United States Patent Application Publication US 2014/0004565 A1 - sequence listing, part 47

SEQ ID NO: 1097339 - RNA, 19 nt, Artificial Sequence
  Description of Artificial Sequence: Synthetic oligonucleotide
ucuuuucgagaggcuuugg

SEQ ID NO: 1097340 - RNA, 19 nt, Artificial Sequence
  Description of Artificial Sequence: Synthetic oligonucleotide
uuaccuugcucuggcaagu

SEQ ID NO: 1097341 - RNA, 19 nt, Artificial Sequence
  Description of Artificial Sequence: Synthetic oligonucleotide
auguacaacagaguugcua

SEQ ID NO: 1097342 - RNA, 19 nt, Artificial Sequence
  Description of Artificial Sequence: Synthetic oligonucleotide
acauaaggcagaaguaaau

SEQ ID NO: 1097343 - RNA, 19 nt, Artificial Sequence
  Description of Artificial Sequence: Synthetic oligonucleotide
cugccuuaacaggagcagg

SEQ ID NO: 1097344 - RNA, 19 nt, Artificial Sequence
  Description of Artificial Sequence: Synthetic oligonucleotide
cacuaauagauugauucaa

SEQ ID NO: 1097345 - RNA, 19 nt, Artificial Sequence
  Description of Artificial Sequence: Synthetic oligonucleotide
accugcuaguagcaaguga

SEQ ID NO: 1097346 - RNA, 19 nt, Artificial Sequence
  Description of Artificial Sequence: Synthetic oligonucleotide
agguccuauucuucaccag

SEQ ID NO: 1097347 - RNA, 19 nt, Artificial Sequence
  Description of Artificial Sequence: Synthetic oligonucleotide
aaguaaagacuggguaaaa

SEQ ID NO: 1097348 - RNA, 19 nt, Artificial Sequence
  Description of Artificial Sequence: Synthetic oligonucleotide
caguguuuccauaaguccu

SEQ ID NO: 1097349 - RNA, 19 nt, Artificial Sequence
  Description of Artificial Sequence: Synthetic oligonucleotide
aguugcagcaaggcggcug

SEQ ID NO: 1097350 - RNA, 19 nt, Artificial Sequence
  Description of Artificial Sequence: Synthetic oligonucleotide
cugccuacugcauccccag

SEQ ID NO: 1097351 - RNA, 19 nt, Artificial Sequence
  Description of Artificial Sequence: Synthetic oligonucleotide
ugucacggcgggauucaac

SEQ ID NO: 1097352 - RNA, 19 nt, Artificial Sequence
  Description of Artificial Sequence: Synthetic oligonucleotide
uugcccaaccacagagugu

SEQ ID NO: 1097353 - RNA, 19 nt, Artificial Sequence
  Description of Artificial Sequence: Synthetic oligonucleotide
aggucaguuggcucugccu

SEQ ID NO: 1097354 - RNA, 19 nt, Artificial Sequence
  Description of Artificial Sequence: Synthetic oligonucleotide
aaugaccucaaaagauaua

SEQ ID NO: 1097355 - RNA, 19 nt, Artificial Sequence
  Description of Artificial Sequence: Synthetic oligonucleotide
gcuauugcccauccaggag

SEQ ID NO: 1097356 - RNA, 19 nt, Artificial Sequence
  Description of Artificial Sequence: Synthetic oligonucleotide
ucuggcuauugcccaucca

SEQ ID NO: 1097357 - RNA, 19 nt, Artificial Sequence
  Description of Artificial Sequence: Synthetic oligonucleotide
uugauagggaaggaaucuu

SEQ ID NO: 1097358 - RNA, 19 nt, Artificial Sequence
  Description of Artificial Sequence: Synthetic oligonucleotide
gaugcucaggucaguuggc

SEQ ID NO: 1097359 - RNA, 19 nt, Artificial Sequence
  Description of Artificial Sequence: Synthetic oligonucleotide
acacacacacacacacacg

SEQ ID NO: 1097360 - RNA, 19 nt, Artificial Sequence
  Description of Artificial Sequence: Synthetic oligonucleotide
gagguaggucuggaggugc

SEQ ID NO: 1097361 - RNA, 19 nt, Artificial Sequence
  Description of Artificial Sequence: Synthetic oligonucleotide
aacagcggacaacguugca

SEQ ID NO: 1097362 - RNA, 19 nt, Artificial Sequence
  Description of Artificial Sequence: Synthetic oligonucleotide
agaggguaccuccuucaau

SEQ ID NO: 1097363 - RNA, 19 nt, Artificial Sequence
  Description of Artificial Sequence: Synthetic oligonucleotide
acccuggcaaaacgaaggu

SEQ ID NO: 1097364 - RNA, 19 nt, Artificial Sequence
  Description of Artificial Sequence: Synthetic oligonucleotide
gucucuggguuaauaagga

SEQ ID NO: 1097365 - RNA, 19 nt, Artificial Sequence
  Description of Artificial Sequence: Synthetic oligonucleotide
uccccguaguuugucaacu

SEQ ID NO: 1097366 - RNA, 19 nt, Artificial Sequence
  Description of Artificial Sequence: Synthetic oligonucleotide
ccaaccacagaguguaaug

SEQ ID NO: 1097367 - RNA, 19 nt, Artificial Sequence
  Description of Artificial Sequence: Synthetic oligonucleotide
gggaauauuuaagccauga

SEQ ID NO: 1097368 - RNA, 19 nt, Artificial Sequence
  Description of Artificial Sequence: Synthetic oligonucleotide
gaguacuccauuggucuca

SEQ ID NO: 1097369 - RNA, 19 nt, Artificial Sequence
  Description of Artificial Sequence: Synthetic oligonucleotide
ggaacuccucucccaagag

SEQ ID NO: 1097370 - RNA, 19 nt, Artificial Sequence
  Description of Artificial Sequence: Synthetic oligonucleotide
gucacggcgggauucaacu

SEQ ID NO: 1097371 - RNA, 19 nt, Artificial Sequence
  Description of Artificial Sequence: Synthetic oligonucleotide
gaggacuagauggaaagau

SEQ ID NO: 1097372 - RNA, 19 nt, Artificial Sequence
  Description of Artificial Sequence: Synthetic oligonucleotide
gggcuacuguucuucacag

SEQ ID NO: 1097373 - RNA, 19 nt, Artificial Sequence
  Description of Artificial Sequence: Synthetic oligonucleotide
cugcguucaucagugucag

SEQ ID NO: 1097374 - RNA, 19 nt, Artificial Sequence
  Description of Artificial Sequence: Synthetic oligonucleotide
guucagaggacuagaugga

SEQ ID NO: 1097375 - RNA, 19 nt, Artificial Sequence
  Description of Artificial Sequence: Synthetic oligonucleotide
agguauguacaagaugcuu

SEQ ID NO: 1097376 - RNA, 19 nt, Artificial Sequence
  Description of Artificial Sequence: Synthetic oligonucleotide
ugaugucucuggguuaaua

SEQ ID NO: 1097377 - RNA, 19 nt, Artificial Sequence
  Description of Artificial Sequence: Synthetic oligonucleotide
gaaggcaggaccacugaua

SEQ ID NO: 1097378 - RNA, 19 nt, Artificial Sequence
  Description of Artificial Sequence: Synthetic oligonucleotide
auggcaguccugccaguga

SEQ ID NO: 1097379 - RNA, 19 nt, Artificial Sequence
  Description of Artificial Sequence: Synthetic oligonucleotide
gccaacaccguugagucac

SEQ ID NO: 1097380 - RNA, 19 nt, Artificial Sequence
  Description of Artificial Sequence: Synthetic oligonucleotide
ggcuauggauucugagucc

SEQ ID NO: 1097381 - RNA, 19 nt, Artificial Sequence
  Description of Artificial Sequence: Synthetic oligonucleotide
cacacacacacacacggua

SEQ ID NO: 1097382 - RNA, 19 nt, Artificial Sequence
  Description of Artificial Sequence: Synthetic oligonucleotide
caaugauuccucuggggcu

SEQ ID NO: 1097383 - RNA, 19 nt, Artificial Sequence
  Description of Artificial Sequence: Synthetic oligonucleotide
gauacagaggguaccuccu

SEQ ID NO: 1097384 - RNA, 19 nt, Artificial Sequence
  Description of Artificial Sequence: Synthetic oligonucleotide
guggaguacuccauugguc

SEQ ID NO: 1097385 - RNA, 19 nt, Artificial Sequence
  Description of Artificial Sequence: Synthetic oligonucleotide
augugagaugguagacagg

SEQ ID NO: 1097386 - RNA, 19 nt, Artificial Sequence
  Description of Artificial Sequence: Synthetic oligonucleotide
caacuugcccaagaauguc

SEQ ID NO: 1097387 - RNA, 19 nt, Artificial Sequence
  Description of Artificial Sequence: Synthetic oligonucleotide
cuccccguaguuugucaac

SEQ ID NO: 1097388 - RNA, 19 nt, Artificial Sequence
  Description of Artificial Sequence: Synthetic oligonucleotide
caaaaggagaggguagaaa

SEQ ID NO: 1097389 - RNA, 19 nt, Artificial Sequence
  Description of Artificial Sequence: Synthetic oligonucleotide
ucggguggaguacuccauu

SEQ ID NO: 1097390 - RNA, 19 nt, Artificial Sequence
  Description of Artificial Sequence: Synthetic oligonucleotide
gaggugccauuuugcugag

SEQ ID NO: 1097391 - RNA, 19 nt, Artificial Sequence
  Description of Artificial Sequence: Synthetic oligonucleotide
gcuaguagcaagugagcaa

SEQ ID NO: 1097392 - RNA, 19 nt, Artificial Sequence
  Description of Artificial Sequence: Synthetic oligonucleotide
aggacuagauggaaagauu

SEQ ID NO: 1097393 - RNA, 19 nt, Artificial Sequence
  Description of Artificial Sequence: Synthetic oligonucleotide
cugcauguacaacagaguu

SEQ ID NO: 1097394 - RNA, 19 nt, Artificial Sequence
  Description of Artificial Sequence: Synthetic oligonucleotide
auacagaggguaccuccuu

SEQ ID NO: 1097395 - RNA, 19 nt, Artificial Sequence
  Description of Artificial Sequence: Synthetic oligonucleotide
agcggacaacguugcagca

SEQ ID NO: 1097396 - RNA, 19 nt, Artificial Sequence
  Description of Artificial Sequence: Synthetic oligonucleotide
acacacacacacacgguaa

SEQ ID NO: 1097397 - RNA, 19 nt, Artificial Sequence
  Description of Artificial Sequence: Synthetic oligonucleotide
ccuuaacaggagcaggcug

SEQ ID NO: 1097398 - RNA, 19 nt, Artificial Sequence
  Description of Artificial Sequence: Synthetic oligonucleotide
cucugccuacugcaucccc

SEQ ID NO: 1097399 - RNA, 19 nt, Artificial Sequence
  Description of Artificial Sequence: Synthetic oligonucleotide
uaccuccuucaaugauucc

SEQ ID NO: 1097400 - RNA, 19 nt, Artificial Sequence
  Description of Artificial Sequence: Synthetic oligonucleotide
aacuuggucucugcaugua

SEQ ID NO: 1097401 - RNA, 19 nt, Artificial Sequence
  Description of Artificial Sequence: Synthetic oligonucleotide
gacuccccaagguggcuca

SEQ ID NO: 1097402 - RNA, 19 nt, Artificial Sequence
  Description of Artificial Sequence: Synthetic oligonucleotide
agcuccccguaguuuguca

SEQ ID NO: 1097403 - RNA, 19 nt, Artificial Sequence
  Description of Artificial Sequence: Synthetic oligonucleotide
gaccagaacugcguucauc

SEQ ID NO: 1097404 - RNA, 19 nt, Artificial Sequence
  Description of Artificial Sequence: Synthetic oligonucleotide
cuggcgucgacguuucuua

SEQ ID NO: 1097405 - RNA, 19 nt, Artificial Sequence
  Description of Artificial Sequence: Synthetic oligonucleotide
gcgucgacguuucuuacuc

SEQ ID NO: 1097406 - RNA, 19 nt, Artificial Sequence
  Description of Artificial Sequence: Synthetic oligonucleotide
ggagagaauaggggcagac

SEQ ID NO: 1097407 - RNA, 19 nt, Artificial Sequence
  Description of Artificial Sequence: Synthetic oligonucleotide
ggagggaugcucaggucag

SEQ ID NO: 1097408 - RNA, 19 nt, Artificial Sequence
  Description of Artificial Sequence: Synthetic oligonucleotide
cauuggucucaaggccugg

SEQ ID NO: 1097409 - RNA, 19 nt, Artificial Sequence
  Description of Artificial Sequence: Synthetic oligonucleotide
cauugaugucucuggguua

SEQ ID NO: 1097410 - RNA, 19 nt, Artificial Sequence
  Description of Artificial Sequence: Synthetic oligonucleotide
ucacggcgggauucaacuc

SEQ ID NO: 1097411 - RNA, 19 nt, Artificial Sequence
  Description of Artificial Sequence: Synthetic oligonucleotide
uguugggaacuggcuucag

SEQ ID NO: 1097412 - RNA, 19 nt, Artificial Sequence
  Description of Artificial Sequence: Synthetic oligonucleotide
cagaacugcguucaucagu

SEQ ID NO: 1097413 - RNA, 19 nt, Artificial Sequence
  Description of Artificial Sequence: Synthetic oligonucleotide
guugcagcaaggcggcugu

SEQ ID NO: 1097414 - RNA, 19 nt, Artificial Sequence
  Description of Artificial Sequence: Synthetic oligonucleotide
cagccugcuuuaugugcag

SEQ ID NO: 1097415 - RNA, 19 nt, Artificial Sequence
  Description of Artificial Sequence: Synthetic oligonucleotide
uaccuugcucuggcaagug

SEQ ID NO: 1097416 - RNA, 19 nt, Artificial Sequence
  Description of Artificial Sequence: Synthetic oligonucleotide
acacacacacacgguaaaa

SEQ ID NO: 1097417 - RNA, 19 nt, Artificial Sequence
  Description of Artificial Sequence: Synthetic oligonucleotide
ccaucaguguuuccauaag

SEQ ID NO: 1097418 - RNA, 19 nt, Artificial Sequence
  Description of Artificial Sequence: Synthetic oligonucleotide
gacggaggcagcucuucua

SEQ ID NO: 1097419 - RNA, 19 nt, Artificial Sequence
  Description of Artificial Sequence: Synthetic oligonucleotide
uggcgucgacguuucuuac

SEQ ID NO: 1097420 - RNA, 19 nt, Artificial Sequence
  Description of Artificial Sequence: Synthetic oligonucleotide
cugauacagaggguaccuc

SEQ ID NO: 1097421 - RNA, 19 nt, Artificial Sequence
  Description of Artificial Sequence: Synthetic oligonucleotide
cccagcuccccguaguuug

SEQ ID NO: 1097422 - RNA, 19 nt, Artificial Sequence
  Description of Artificial Sequence: Synthetic oligonucleotide
acacacacacacacacaca

SEQ ID NO: 1097423 - RNA, 19 nt, Artificial Sequence
  Description of Artificial Sequence: Synthetic oligonucleotide
gauucugaguccugcuguu

SEQ ID NO: 1097424 - RNA, 19 nt, Artificial Sequence
  Description of Artificial Sequence: Synthetic oligonucleotide
cggacaacguugcagcagc

SEQ ID NO: 1097425 - RNA, 19 nt, Artificial Sequence
  Description of Artificial Sequence: Synthetic oligonucleotide
ggggcuauggauucugagu

SEQ ID NO: 1097426 - RNA, 19 nt, Artificial Sequence
  Description of Artificial Sequence: Synthetic oligonucleotide
cacacacacacacgguaaa

SEQ ID NO: 1097427 - RNA, 19 nt, Artificial Sequence
  Description of Artificial Sequence: Synthetic oligonucleotide
ggugccaacaccguugagu

SEQ ID NO: 1097428 - RNA, 19 nt, Artificial Sequence
  Description of Artificial Sequence: Synthetic oligonucleotide
cuuuggacggaggcagcuc

SEQ ID NO: 1097429 - RNA, 19 nt, Artificial Sequence
  Description of Artificial Sequence: Synthetic oligonucleotide
cccguaguuugucaacuug

SEQ ID NO: 1097430 - RNA, 19 nt, Artificial Sequence
  Description of Artificial Sequence: Synthetic oligonucleotide
accguugagucaccugcua

SEQ ID NO: 1097431 - RNA, 19 nt, Artificial Sequence
  Description of Artificial Sequence: Synthetic oligonucleotide
gguggaguacuccauuggu

SEQ ID NO: 1097432 - RNA, 19 nt, Artificial Sequence
  Description of Artificial Sequence: Synthetic oligonucleotide
gaagagggacauaacuuuu

SEQ ID NO: 1097433 - RNA, 19 nt, Artificial Sequence
  Description of Artificial Sequence: Synthetic oligonucleotide
ccuacauaaggcagaagua

SEQ ID NO: 1097434 - RNA, 19 nt, Artificial Sequence
  Description of Artificial Sequence: Synthetic oligonucleotide
ggaguacuccauuggucuc

SEQ ID NO: 1097435 - RNA, 19 nt, Artificial Sequence
  Description of Artificial Sequence: Synthetic oligonucleotide
acacacacacacacacggu

SEQ ID NO: 1097436 - RNA, 19 nt, Artificial Sequence
  Description of Artificial Sequence: Synthetic oligonucleotide
ggagugcucacugaagcaa

SEQ ID NO: 1097437 - RNA, 19 nt, Artificial Sequence
  Description of Artificial Sequence: Synthetic oligonucleotide
aguacuccauuggucucaa

SEQ ID NO: 1097438 - RNA, 19 nt, Artificial Sequence
  Description of Artificial Sequence: Synthetic oligonucleotide
uggacggaggcagcucuuc

SEQ ID NO: 1097439 - RNA, 19 nt, Artificial Sequence
  Description of Artificial Sequence: Synthetic oligonucleotide
agugcucacugaagcaaaa

SEQ ID NO: 1097440 - RNA, 19 nt, Artificial Sequence
  Description of Artificial Sequence: Synthetic oligonucleotide
gcucuggcaagugauuuca

SEQ ID NO: 1097441 - RNA, 19 nt, Artificial Sequence
  Description of Artificial Sequence: Synthetic oligonucleotide
aggcucagcuguugucccu

SEQ ID NO: 1097442 - RNA, 19 nt, Artificial Sequence
  Description of Artificial Sequence: Synthetic oligonucleotide
guaauguuaaggggacccu

SEQ ID NO: 1097443 - RNA, 19 nt, Artificial Sequence
  Description of Artificial Sequence: Synthetic oligonucleotide
ccguugagucaccugcuag

SEQ ID NO: 1097444 - RNA, 19 nt, Artificial Sequence
  Description of Artificial Sequence: Synthetic oligonucleotide
ccauuggucucaaggccug

SEQ ID NO: 1097445 - RNA, 19 nt, Artificial Sequence
  Description of Artificial Sequence: Synthetic oligonucleotide
agccugagaagguccuauu

SEQ ID NO: 1097446 - RNA, 19 nt, Artificial Sequence
  Description of Artificial Sequence: Synthetic oligonucleotide
uuggacggaggcagcucuu

SEQ ID NO: 1097447 - RNA, 19 nt, Artificial Sequence
  Description of Artificial Sequence: Synthetic oligonucleotide
gaauaggggcagacacaca

SEQ ID NO: 1097448 - RNA, 19 nt, Artificial Sequence
  Description of Artificial Sequence: Synthetic oligonucleotide
gcccaagaaugucacuuuc

SEQ ID NO: 1097449 - RNA, 19 nt, Artificial Sequence
  Description of Artificial Sequence: Synthetic oligonucleotide
ucgcuggcgucgacguuuc

SEQ ID NO: 1097450 - RNA, 19 nt, Artificial Sequence
  Description of Artificial Sequence: Synthetic oligonucleotide
ucgagaggcuuuggacgga

SEQ ID NO: 1097451 - RNA, 19 nt, Artificial Sequence
  Description of Artificial Sequence: Synthetic oligonucleotide
acuuugucgcuggcgucga

SEQ ID NO: 1097452 - RNA, 19 nt, Artificial Sequence
  Description of Artificial Sequence: Synthetic oligonucleotide
caacguugcagcagccaua

SEQ ID NO: 1097453 - RNA, 19 nt, Artificial Sequence
  Description of Artificial Sequence: Synthetic oligonucleotide
ggauuugaguggauauuaa

SEQ ID NO: 1097454 - RNA, 19 nt, Artificial Sequence
  Description of Artificial Sequence: Synthetic oligonucleotide
ggaucggguggaguacucc

SEQ ID NO: 1097455 - RNA, 19 nt, Artificial Sequence
  Description of Artificial Sequence: Synthetic oligonucleotide
ccacagaguguaauguuaa

SEQ ID NO: 1097456 - RNA, 19 nt, Artificial Sequence
  Description of Artificial Sequence: Synthetic oligonucleotide
guacuccauuggucucaag

SEQ ID NO: 1097457 - RNA, 19 nt, Artificial Sequence
  Description of Artificial Sequence: Synthetic oligonucleotide
gcggacaacguugcagcag

SEQ ID NO: 1097458 - RNA, 19 nt, Artificial Sequence
  Description of Artificial Sequence: Synthetic oligonucleotide
ggaaagguauguacaagau

SEQ ID NO: 1097459 - RNA, 19 nt, Artificial Sequence
  Description of Artificial Sequence: Synthetic oligonucleotide
cuccuacauaaggcagaag

SEQ ID NO: 1097460 - RNA, 19 nt, Artificial Sequence
  Description of Artificial Sequence: Synthetic oligonucleotide
acggcgggauucaacuccu

SEQ ID NO: 1097461 - RNA, 19 nt, Artificial Sequence
  Description of Artificial Sequence: Synthetic oligonucleotide
agucaccugcuaguagcaa

SEQ ID NO: 1097462 - RNA, 19 nt, Artificial Sequence
  Description of Artificial Sequence: Synthetic oligonucleotide
cuguugggaacuggcuuca

SEQ ID NO: 1097463 - RNA, 19 nt, Artificial Sequence
  Description of Artificial Sequence: Synthetic oligonucleotide
cugucaaggcuggaccaga

SEQ ID NO: 1097464 - RNA, 19 nt, Artificial Sequence
  Description of Artificial Sequence: Synthetic oligonucleotide
ugauuccucuggggcuaug

SEQ ID NO: 1097465 - RNA, 19 nt, Artificial Sequence
  Description of Artificial Sequence: Synthetic oligonucleotide
aucggguggaguacuccau

SEQ ID NO: 1097466 - RNA, 19 nt, Artificial Sequence
  Description of Artificial Sequence: Synthetic oligonucleotide
agauucugucaaggcugga

SEQ ID NO: 1097467 - RNA, 19 nt, Artificial Sequence
  Description of Artificial Sequence: Synthetic oligonucleotide
cuuugucgcuggcgucgac

SEQ ID NO: 1097468 - RNA, 19 nt, Artificial Sequence
  Description of Artificial Sequence: Synthetic oligonucleotide
gcuauggauucugaguccu

SEQ ID NO: 1097469 - RNA, 19 nt, Artificial Sequence
  Description of Artificial Sequence: Synthetic oligonucleotide
cuggggcuauggauucuga

SEQ ID NO: 1097470 - RNA, 19 nt, Artificial Sequence
  Description of Artificial Sequence: Synthetic oligonucleotide
cagaggguaccuccuucaa

SEQ ID NO: 1097471 - RNA, 19 nt, Artificial Sequence
  Description of Artificial Sequence: Synthetic oligonucleotide
aggaaucuuucagggcauu

SEQ ID NO: 1097472 - RNA, 19 nt, Artificial Sequence
  Description of Artificial Sequence: Synthetic oligonucleotide
cuugcucuggcaagugauu

SEQ ID NO: 1097473 - RNA, 19 nt, Artificial Sequence
  Description of Artificial Sequence: Synthetic oligonucleotide
uugaugucucuggguuaau

SEQ ID NO: 1097474 - RNA, 19 nt, Artificial Sequence
  Description of Artificial Sequence: Synthetic oligonucleotide
aacccugcuucaggcccau

SEQ ID NO: 1097475 - RNA, 19 nt, Artificial Sequence
  Description of Artificial Sequence: Synthetic oligonucleotide
gcuucaggcugggauaaaa

SEQ ID NO: 1097476 - RNA, 19 nt, Artificial Sequence
  Description of Artificial Sequence: Synthetic oligonucleotide
gaacugcguucaucagugu

SEQ ID NO: 1097477 - RNA, 19 nt, Artificial Sequence
  Description of Artificial Sequence: Synthetic oligonucleotide
acguugcagcagccauaug

SEQ ID NO: 1097478 - RNA, 19 nt, Artificial Sequence
  Description of Artificial Sequence: Synthetic oligonucleotide
ccauaaguccuguugggau

SEQ ID NO: 1097479 - RNA, 19 nt, Artificial Sequence
  Description of Artificial Sequence: Synthetic oligonucleotide
uguugucccugaggugguu

SEQ ID NO: 1097480 - RNA, 19 nt, Artificial Sequence
  Description of Artificial Sequence: Synthetic oligonucleotide
cggguggaguacuccauug

SEQ ID NO: 1097481 - RNA, 19 nt, Artificial Sequence
  Description of Artificial Sequence: Synthetic oligonucleotide
ggguaaaaucuaccaacuu

SEQ ID NO: 1097482 - RNA, 19 nt, Artificial Sequence
  Description of Artificial Sequence: Synthetic oligonucleotide
agagccugagaagguccua

SEQ ID NO: 1097483 - RNA, 19 nt, Artificial Sequence
  Description of Artificial Sequence: Synthetic oligonucleotide
cuggauuugaguggauauu

SEQ ID NO: 1097484 - RNA, 19 nt, Artificial Sequence
  Description of Artificial Sequence: Synthetic oligonucleotide
gcuccccguaguuugucaa

SEQ ID NO: 1097485 - RNA, 19 nt, Artificial Sequence
  Description of Artificial Sequence: Synthetic oligonucleotide
ggcgggauucaacuccugu

SEQ ID NO: 1097486 - RNA, 19 nt, Artificial Sequence
  Description of Artificial Sequence: Synthetic oligonucleotide
ggcugucacggcgggauuc

SEQ ID NO: 1097487 - RNA, 19 nt, Artificial Sequence
  Description of Artificial Sequence: Synthetic oligonucleotide
augauuccucuggggcuau

SEQ ID NO: 1097488 - RNA, 19 nt, Artificial Sequence
  Description of Artificial Sequence: Synthetic oligonucleotide
gucgcuggcgucgacguuu

SEQ ID NO: 1097489 - RNA, 19 nt, Artificial Sequence
  Description of Artificial Sequence: Synthetic oligonucleotide
cccaagaaugucacuuucu

SEQ ID NO: 1097490 - RNA, 19 nt, Artificial Sequence
  Description of Artificial Sequence: Synthetic oligonucleotide
cgucgacguuucuuacucc

SEQ ID NO: 1097491 - RNA, 19 nt, Artificial Sequence
  Description of Artificial Sequence: Synthetic oligonucleotide
cgacguuucuuacuccaca

SEQ ID NO: 1097492 - RNA, 19 nt, Artificial Sequence
  Description of Artificial Sequence: Synthetic oligonucleotide
ccacuuugucgcuggcguc

SEQ ID NO: 1097493 - RNA, 19 nt, Artificial Sequence
  Description of Artificial Sequence: Synthetic oligonucleotide
ggcgucgacguuucuuacu

SEQ ID NO: 1097494 - RNA, 19 nt, Artificial Sequence
  Description of Artificial Sequence: Synthetic oligonucleotide
ggcuuuggacggaggcagc

SEQ ID NO: 1097495 - RNA, 19 nt, Artificial Sequence
  Description of Artificial Sequence: Synthetic oligonucleotide
gcugucacggcgggauuca

SEQ ID NO: 1097496 - RNA, 19 nt, Artificial Sequence
  Description of Artificial Sequence: Synthetic oligonucleotide
cagcuccccguaguuuguc

SEQ ID NO: 1097497 - RNA, 19 nt, Artificial Sequence
  Description of Artificial Sequence: Synthetic oligonucleotide
gcgggauucaacuccuguu

SEQ ID NO: 1097498 - RNA, 19 nt, Artificial Sequence
  Description of Artificial Sequence: Synthetic oligonucleotide
ggaaaacagcggacaacgu

SEQ ID NO: 1097499 - RNA, 19 nt, Artificial Sequence
  Description of Artificial Sequence: Synthetic oligonucleotide
gguuucuuuucgagaggcu

SEQ ID NO: 1097500 - RNA, 19 nt, Artificial Sequence
  Description of Artificial Sequence: Synthetic oligonucleotide
gccuggugcucauguggca

SEQ ID NO: 1097501 - RNA, 19 nt, Artificial Sequence
  Description of Artificial Sequence: Synthetic oligonucleotide
ggcuggaccagaacugcgu

SEQ ID NO: 1097502 - RNA, 19 nt, Artificial Sequence
  Description of Artificial Sequence: Synthetic oligonucleotide
guugucccugaggugguuu

SEQ ID NO: 1097503 - RNA, 19 nt, Artificial Sequence
  Description of Artificial Sequence: Synthetic oligonucleotide
ggacggaggcagcucuucu

SEQ ID NO: 1097504 - RNA, 19 nt, Artificial Sequence
  Description of Artificial Sequence: Synthetic oligonucleotide
gugcacuaauagauugauu

SEQ ID NO: 1097505 - RNA, 19 nt, Artificial Sequence
  Description of Artificial Sequence: Synthetic oligonucleotide
gggaucggguggaguacuc

SEQ ID NO: 1097506 - RNA, 19 nt, Artificial Sequence
  Description of Artificial Sequence: Synthetic oligonucleotide
gaguuguuccugagcuguu

SEQ ID NO: 1097507 - RNA, 19 nt, Artificial Sequence
  Description of Artificial Sequence: Synthetic oligonucleotide
caacaccguugagucaccu

SEQ ID NO: 1097508 - RNA, 19 nt, Artificial Sequence
  Description of Artificial Sequence: Synthetic oligonucleotide
cgggauucaacuccuguuu

SEQ ID NO: 1097509 - RNA, 19 nt, Artificial Sequence
  Description of Artificial Sequence: Synthetic oligonucleotide
ggaugggaucggguggagu

SEQ ID NO: 1097510 - RNA, 19 nt, Artificial Sequence
  Description of Artificial Sequence: Synthetic oligonucleotide
gcggcugucacggcgggau

SEQ ID NO: 1097511 - RNA, 19 nt, Artificial Sequence
  Description of Artificial Sequence: Synthetic oligonucleotide
cugucacggcgggauucaa

SEQ ID NO: 1097512 - RNA, 19 nt, Artificial Sequence
  Description of Artificial Sequence: Synthetic oligonucleotide
gcuggcgucgacguuucuu

SEQ ID NO: 1097513 - RNA, 19 nt, Artificial Sequence
  Description of Artificial Sequence: Synthetic oligonucleotide
ccagcuccccguaguuugu

SEQ ID NO: 1097514 - RNA, 19 nt, Artificial Sequence
  Description of Artificial Sequence: Synthetic oligonucleotide
ggcggcugucacggcggga

SEQ ID NO: 1097515 - RNA, 19 nt, Artificial Sequence
  Description of Artificial Sequence: Synthetic oligonucleotide
ccccguaguuugucaacuu

SEQ ID NO: 1097516 - RNA, 19 nt, Artificial Sequence
  Description of Artificial Sequence: Synthetic oligonucleotide
cggcugucacggcgggauu

SEQ ID NO: 1097517 - RNA, 19 nt, Artificial Sequence
  Description of Artificial Sequence: Synthetic oligonucleotide
ucuaaugagacucagcaga

SEQ ID NO: 1097518 - RNA, 19 nt, Artificial Sequence
  Description of Artificial Sequence: Synthetic oligonucleotide
cuugauaucccucagcugg

SEQ ID NO: 1097519 - RNA, 19 nt, Artificial Sequence
  Description of Artificial Sequence: Synthetic oligonucleotide
uguacauuagucucuaacc

SEQ ID NO: 1097520 - RNA, 19 nt, Artificial Sequence
  Description of Artificial Sequence: Synthetic oligonucleotide
uuguaacgaagcaugagcg

SEQ ID NO: 1097521 - RNA, 19 nt, Artificial Sequence
  Description of Artificial Sequence: Synthetic oligonucleotide
aguauaaauaggcagagau

SEQ ID NO: 1097522 - RNA, 19 nt, Artificial Sequence
  Description of Artificial Sequence: Synthetic oligonucleotide
ugagcauauacagacacgg

SEQ ID NO: 1097523 - RNA, 19 nt, Artificial Sequence
  Description of Artificial Sequence: Synthetic oligonucleotide
aaaauucuguacauuaguc

SEQ ID NO: 1097524 - RNA, 19 nt, Artificial Sequence
  Description of Artificial Sequence: Synthetic oligonucleotide
agcgguaaaacucaucccg

SEQ ID NO: 1097525 - RNA, 19 nt, Artificial Sequence
  Description of Artificial Sequence: Synthetic oligonucleotide
acugagcauauacagacac

SEQ ID NO: 1097526 - RNA, 19 nt, Artificial Sequence
  Description of Artificial Sequence: Synthetic oligonucleotide
ucuaaccacacauaguaca

SEQ ID NO: 1097527 - RNA, 19 nt, Artificial Sequence
  Description of Artificial Sequence: Synthetic oligonucleotide
aaugguagcgccacgcggc

SEQ ID NO: 1097528 - RNA, 19 nt, Artificial Sequence
  Description of Artificial Sequence: Synthetic oligonucleotide
guuguaacgaagcaugagc

SEQ ID NO: 1097529 - RNA, 19 nt, Artificial Sequence
  Description of Artificial Sequence: Synthetic oligonucleotide
uuagucucuaaccacacau

SEQ ID NO: 1097530 - RNA, 19 nt, Artificial Sequence
  Description of Artificial Sequence: Synthetic oligonucleotide
aaucccauuagggaagcac

SEQ ID NO: 1097531 - RNA, 19 nt, Artificial Sequence
  Description of Artificial Sequence: Synthetic oligonucleotide
uuggauuuguacagcaucc

SEQ ID NO: 1097532 - RNA, 19 nt, Artificial Sequence
  Description of Artificial Sequence: Synthetic oligonucleotide
aacgauagcgcagaucuuc

SEQ ID NO: 1097533 - RNA, 19 nt, Artificial Sequence
  Description of Artificial Sequence: Synthetic oligonucleotide
cucaguaucccacagacuc

SEQ ID NO: 1097534 - RNA, 19 nt, Artificial Sequence
  Description of Artificial Sequence: Synthetic oligonucleotide
guagguuugccccaugccg

SEQ ID NO: 1097535 - RNA, 19 nt, Artificial Sequence
  Description of Artificial Sequence: Synthetic oligonucleotide
agucucuaaccacacauag

SEQ ID NO: 1097536 - RNA, 19 nt, Artificial Sequence
  Description of Artificial Sequence: Synthetic oligonucleotide
acauaguacacauuuagua

SEQ ID NO: 1097537 - RNA, 19 nt, Artificial Sequence
  Description of Artificial Sequence: Synthetic oligonucleotide
aaaggcaaguuuguucugg

SEQ ID NO: 1097538 - RNA, 19 nt, Artificial Sequence
  Description of Artificial Sequence: Synthetic oligonucleotide
auagcgcagaucuuccagc

SEQ ID NO: 1097539 - RNA, 19 nt, Artificial Sequence
  Description of Artificial Sequence: Synthetic oligonucleotide
aguagguuugccccaugcc

SEQ ID NO: 1097540 - RNA, 19 nt, Artificial Sequence
  Description of Artificial Sequence: Synthetic oligonucleotide
auugugaugauuccaagua

SEQ ID NO: 1097541 - RNA, 19 nt, Artificial Sequence
  Description of Artificial Sequence: Synthetic oligonucleotide
uguuguuggugaaaaccag

SEQ ID NO: 1097542 - RNA, 19 nt, Artificial Sequence
  Description of Artificial Sequence: Synthetic oligonucleotide
aaggcaaguuuguucuggg

SEQ ID NO: 1097543 - RNA, 19 nt, Artificial Sequence
  Description of Artificial Sequence: Synthetic oligonucleotide
guaacgaagcaugagcgcg

SEQ ID NO: 1097544 - RNA, 19 nt, Artificial Sequence
  Description of Artificial Sequence: Synthetic oligonucleotide
acucacauccccuugugug

SEQ ID NO: 1097545 - RNA, 19 nt, Artificial Sequence
  Description of Artificial Sequence: Synthetic oligonucleotide
accuguacgccccaguggg

SEQ ID NO: 1097546 - RNA, 19 nt, Artificial Sequence
  Description of Artificial Sequence: Synthetic oligonucleotide
ugugugaccaggguggucc

SEQ ID NO: 1097547 - RNA, 19 nt, Artificial Sequence
  Description of Artificial Sequence: Synthetic oligonucleotide
ugggauucgagccuccagc

SEQ ID NO: 1097548 - RNA, 19 nt, Artificial Sequence
  Description of Artificial Sequence: Synthetic oligonucleotide
auaguacacauuuaguaua

SEQ ID NO: 1097549 - RNA, 19 nt, Artificial Sequence
  Description of Artificial Sequence: Synthetic oligonucleotide
agcaugagcgcgaaggagc

SEQ ID NO: 1097550 - RNA, 19 nt, Artificial Sequence
  Description of Artificial Sequence: Synthetic oligonucleotide
aaccacacauaguacacau

SEQ ID NO: 1097551 - RNA, 19 nt, Artificial Sequence
  Description of Artificial Sequence: Synthetic oligonucleotide
cuccaauguagccacaccc

SEQ ID NO: 1097552 - RNA, 19 nt, Artificial Sequence
  Description of Artificial Sequence: Synthetic oligonucleotide
uguacagcauccaacgaua

SEQ ID NO: 1097553 - RNA, 19 nt, Artificial Sequence
  Description of Artificial Sequence: Synthetic oligonucleotide
uucuaaugagacucagcag

SEQ ID NO: 1097554 - RNA, 19 nt, Artificial Sequence
  Description of Artificial Sequence: Synthetic oligonucleotide
gauacucgcuccaauguag

SEQ ID NO: 1097555 - RNA, 19 nt, Artificial Sequence
  Description of Artificial Sequence: Synthetic oligonucleotide
auuagggaagcacacugcu

SEQ ID NO: 1097556 - RNA, 19 nt, Artificial Sequence
  Description of Artificial Sequence: Synthetic oligonucleotide
cuaaccacacauaguacac

SEQ ID NO: 1097557 - RNA, 19 nt, Artificial Sequence
  Description of Artificial Sequence: Synthetic oligonucleotide
uguaacgaagcaugagcgc

SEQ ID NO: 1097558 - RNA, 19 nt, Artificial Sequence
  Description of Artificial Sequence: Synthetic oligonucleotide
gggucuaugagaaagccgg

SEQ ID NO: 1097559 - RNA, 19 nt, Artificial Sequence
  Description of Artificial Sequence: Synthetic oligonucleotide
ugugucagcagguggccgg

SEQ ID NO: 1097560 - RNA, 19 nt, Artificial Sequence
  Description of Artificial Sequence: Synthetic oligonucleotide
uccuccuggaccacggccg

SEQ ID NO: 1097561 - RNA, 19 nt, Artificial Sequence
  Description of Artificial Sequence: Synthetic oligonucleotide
acaaagagacaucguaucu

SEQ ID NO: 1097562 - RNA, 19 nt, Artificial Sequence
  Description of Artificial Sequence: Synthetic oligonucleotide
cucagcuagacccgaaggg

SEQ ID NO: 1097563 - RNA, 19 nt, Artificial Sequence
  Description of Artificial Sequence: Synthetic oligonucleotide
cacgcuuucuguaggagag

SEQ ID NO: 1097564 - RNA, 19 nt, Artificial Sequence
  Description of Artificial Sequence: Synthetic oligonucleotide
uguagccacacccacucga

SEQ ID NO: 1097565 - RNA, 19 nt, Artificial Sequence
  Description of Artificial Sequence: Synthetic oligonucleotide
gucucaguaucccacagac

SEQ ID NO: 1097566 - RNA, 19 nt, Artificial Sequence
  Description of Artificial Sequence: Synthetic oligonucleotide
ugagaaagccggccuuugg

SEQ ID NO: 1097567 - RNA, 19 nt, Artificial Sequence
  Description of Artificial Sequence: Synthetic oligonucleotide
auaaauaggcagagauggc

SEQ ID NO: 1097568 - RNA, 19 nt, Artificial Sequence
  Description of Artificial Sequence: Synthetic oligonucleotide
cuucacucgucccucaggc

SEQ ID NO: 1097569 - RNA, 19 nt, Artificial Sequence
  Description of Artificial Sequence: Synthetic oligonucleotide
ucauugugaugauuccaag

SEQ ID NO: 1097570 - RNA, 19 nt, Artificial Sequence
  Description of Artificial Sequence: Synthetic oligonucleotide
agaaggucaccuguacgcc

SEQ ID NO: 1097571 - RNA, 19 nt, Artificial Sequence
  Description of Artificial Sequence: Synthetic oligonucleotide
ucagcuagacccgaagggc

SEQ ID NO: 1097572 - RNA, 19 nt, Artificial Sequence
  Description of Artificial Sequence: Synthetic oligonucleotide
agacaucguaucugaaguc

SEQ ID NO: 1097573 - RNA, 19 nt, Artificial Sequence
  Description of Artificial Sequence: Synthetic oligonucleotide
ggagugaucuucauggagg

SEQ ID NO: 1097574 - RNA, 19 nt, Artificial Sequence
  Description of Artificial Sequence: Synthetic oligonucleotide
acuccaacgucugugugac

SEQ ID NO: 1097575 - RNA, 19 nt, Artificial Sequence
  Description of Artificial Sequence: Synthetic oligonucleotide
uucucauugugaugauucc

SEQ ID NO: 1097576 - RNA, 19 nt, Artificial Sequence
  Description of Artificial Sequence: Synthetic oligonucleotide
guauaaauaggcagagaug

SEQ ID NO: 1097577 - RNA, 19 nt, Artificial Sequence
  Description of Artificial Sequence: Synthetic oligonucleotide
ucuucaucacaaguuggcc

SEQ ID NO: 1097578 - RNA, 19 nt, Artificial Sequence
  Description of Artificial Sequence: Synthetic oligonucleotide
cauuagggaagcacacugc

SEQ ID NO: 1097579 - RNA, 19 nt, Artificial Sequence
  Description of Artificial Sequence: Synthetic oligonucleotide
caggcacaaagagacaucg

SEQ ID NO: 1097580 - RNA, 19 nt, Artificial Sequence
  Description of Artificial Sequence: Synthetic oligonucleotide
ucacaaguuggcccagugc

SEQ ID NO: 1097581 - RNA, 19 nt, Artificial Sequence
  Description of Artificial Sequence: Synthetic oligonucleotide
auacagacacggcauauaa

SEQ ID NO: 1097582 - RNA, 19 nt, Artificial Sequence
  Description of Artificial Sequence: Synthetic oligonucleotide
cugagcauauacagacacg

SEQ ID NO: 1097583 - RNA, 19 nt, Artificial Sequence
  Description of Artificial Sequence: Synthetic oligonucleotide
acaaaucccauuagggaag

SEQ ID NO: 1097584 - RNA, 19 nt, Artificial Sequence
  Description of Artificial Sequence: Synthetic oligonucleotide
cucggguccagucucuugg

SEQ ID NO: 1097585 - RNA, 19 nt, Artificial Sequence
  Description of Artificial Sequence: Synthetic oligonucleotide
uuccaaguagcuuggaguu

SEQ ID NO: 1097586 - RNA, 19 nt, Artificial Sequence
  Description of Artificial Sequence: Synthetic oligonucleotide
ucugucucucgcaaccgug

SEQ ID NO: 1097587 - RNA, 19 nt, Artificial Sequence
  Description of Artificial Sequence: Synthetic oligonucleotide
ccagcgguaaaacucaucc

SEQ ID NO: 1097588 - RNA, 19 nt, Artificial Sequence
  Description of Artificial Sequence: Synthetic oligonucleotide
ggugcagugcuccuguacg

SEQ ID NO: 1097589 - RNA, 19 nt, Artificial Sequence
  Description of Artificial Sequence: Synthetic oligonucleotide
ggaguuuucugccugcagc

SEQ ID NO: 1097590 - RNA, 19 nt, Artificial Sequence
  Description of Artificial Sequence: Synthetic oligonucleotide
ugggaauggggucccgggg

SEQ ID NO: 1097591 - RNA, 19 nt, Artificial Sequence
  Description of Artificial Sequence: Synthetic oligonucleotide
acgagugucacaaauccca

SEQ ID NO: 1097592 - RNA, 19 nt, Artificial Sequence
  Description of Artificial Sequence: Synthetic oligonucleotide
agaaagccggccuuuggga

SEQ ID NO: 1097593 - RNA, 19 nt, Artificial Sequence
  Description of Artificial Sequence: Synthetic oligonucleotide
aucguaucugaagucaucu

SEQ ID NO: 1097594 - RNA, 19 nt, Artificial Sequence
  Description of Artificial Sequence: Synthetic oligonucleotide
caaugguagcgccacgcgg

SEQ ID NO: 1097595 - RNA, 19 nt, Artificial Sequence
  Description of Artificial Sequence: Synthetic oligonucleotide
cauuagucucuaaccacac

SEQ ID NO: 1097596 - RNA, 19 nt, Artificial Sequence
  Description of Artificial Sequence: Synthetic oligonucleotide
uuagacugaggcuguucug

SEQ ID NO: 1097597 - RNA, 19 nt, Artificial Sequence
  Description of Artificial Sequence: Synthetic oligonucleotide
ggaauuucagccagcagcc

SEQ ID NO: 1097598 - RNA, 19 nt, Artificial Sequence
  Description of Artificial Sequence: Synthetic oligonucleotide
uggccggaauccuugagcu

SEQ ID NO: 1097599 - RNA, 19 nt, Artificial Sequence
  Description of Artificial Sequence: Synthetic oligonucleotide
ugcaaugguagcgccacgc

SEQ ID NO: 1097600 - RNA, 19 nt, Artificial Sequence
  Description of Artificial Sequence: Synthetic oligonucleotide
agguuugccccaugccgcc

SEQ ID NO: 1097601 - RNA, 19 nt, Artificial Sequence
  Description of Artificial Sequence: Synthetic oligonucleotide
ucccauuagggaagcacac

SEQ ID NO: 1097602 - RNA, 19 nt, Artificial Sequence
  Description of Artificial Sequence: Synthetic oligonucleotide
uaggugaccgucuccuccc

SEQ ID NO: 1097603 - RNA, 19 nt, Artificial Sequence
  Description of Artificial Sequence: Synthetic oligonucleotide
gcacgagugucacaaaucc

SEQ ID NO: 1097604 - RNA, 19 nt, Artificial Sequence
  Description of Artificial Sequence: Synthetic oligonucleotide
cucauugugaugauuccaa

SEQ ID NO: 1097605 - RNA, 19 nt, Artificial Sequence
  Description of Artificial Sequence: Synthetic oligonucleotide
uguacgcucugcuaccauc

SEQ ID NO: 1097606 - RNA, 19 nt, Artificial Sequence
  Description of Artificial Sequence: Synthetic oligonucleotide
gguaaaacucaucccgggc

SEQ ID NO: 1097607 - RNA, 19 nt, Artificial Sequence
  Description of Artificial Sequence: Synthetic oligonucleotide
cauaguacacauuuaguau

SEQ ID NO: 1097608 - RNA, 19 nt, Artificial Sequence
  Description of Artificial Sequence: Synthetic oligonucleotide
auuagucucuaaccacaca

SEQ ID NO: 1097609 - RNA, 19 nt, Artificial Sequence
  Description of Artificial Sequence: Synthetic oligonucleotide
aggaagcuaaggcacgagu

SEQ ID NO: 1097610 - RNA, 19 nt, Artificial Sequence
  Description of Artificial Sequence: Synthetic oligonucleotide
acgauagcgcagaucuucc

SEQ ID NO: 1097611 - RNA, 19 nt, Artificial Sequence
  Description of Artificial Sequence: Synthetic oligonucleotide
ucguaucugaagucaucug

SEQ ID NO: 1097612 - RNA, 19 nt, Artificial Sequence
  Description of Artificial Sequence: Synthetic oligonucleotide
cuccuguacgcucugcuac

SEQ ID NO: 1097613 - RNA, 19 nt, Artificial Sequence
  Description of Artificial Sequence: Synthetic oligonucleotide
aucacaaguuggcccagug

SEQ ID NO: 1097614 - RNA, 19 nt, Artificial Sequence
  Description of Artificial Sequence: Synthetic oligonucleotide
ugucucucgcaaccgugcc

SEQ ID NO: 1097615 - RNA, 19 nt, Artificial Sequence
  Description of Artificial Sequence: Synthetic oligonucleotide
gacuccaacgucuguguga

SEQ ID NO: 1097616 - RNA, 19 nt, Artificial Sequence
  Description of Artificial Sequence: Synthetic oligonucleotide
gcuguucucauugugauga

SEQ ID NO: 1097617 - RNA, 19 nt, Artificial Sequence
  Description of Artificial Sequence: Synthetic oligonucleotide
cacgagugucacaaauccc

SEQ ID NO: 1097618 - RNA, 19 nt, Artificial Sequence
  Description of Artificial Sequence: Synthetic oligonucleotide
uaucccacagacucacauc

SEQ ID NO: 1097619 - RNA, 19 nt, Artificial Sequence
  Description of Artificial Sequence: Synthetic oligonucleotide
cugucucucgcaaccgugc

SEQ ID NO: 1097620 - RNA, 19 nt, Artificial Sequence
  Description of Artificial Sequence: Synthetic oligonucleotide
guugcaaugguagcgccac

SEQ ID NO: 1097621 - RNA, 19 nt, Artificial Sequence
  Description of Artificial Sequence: Synthetic oligonucleotide
uccuguacgcucugcuacc

SEQ ID NO: 1097622 - RNA, 19 nt, Artificial Sequence
  Description of Artificial Sequence: Synthetic oligonucleotide
uacucgcuccaauguagcc

SEQ ID NO: 1097623 - RNA, 19 nt, Artificial Sequence
  Description of Artificial Sequence: Synthetic oligonucleotide
cagggauuccgccaccgcc

SEQ ID NO: 1097624 - RNA, 19 nt, Artificial Sequence
  Description of Artificial Sequence: Synthetic oligonucleotide
uagucucuaaccacacaua

SEQ ID NO: 1097625 - RNA, 19 nt, Artificial Sequence
  Description of Artificial Sequence: Synthetic oligonucleotide
cagcauccaacgauagcgc

SEQ ID NO: 1097626 - RNA, 19 nt, Artificial Sequence
  Description of Artificial Sequence: Synthetic oligonucleotide
ucucaguaucccacagacu

SEQ ID NO: 1097627 - RNA, 19 nt, Artificial Sequence
  Description of Artificial Sequence: Synthetic oligonucleotide
uggauuuguacagcaucca

SEQ ID NO: 1097628 - RNA, 19 nt, Artificial Sequence
  Description of Artificial Sequence: Synthetic oligonucleotide
cuugugugacuccaacguc

SEQ ID NO: 1097629 - RNA, 19 nt, Artificial Sequence
  Description of Artificial Sequence: Synthetic oligonucleotide
agcauccaacgauagcgca

SEQ ID NO: 1097630 - RNA, 19 nt, Artificial Sequence
  Description of Artificial Sequence: Synthetic oligonucleotide
ugcuaccaucucuggaacc

SEQ ID NO: 1097631 - RNA, 19 nt, Artificial Sequence
  Description of Artificial Sequence: Synthetic oligonucleotide
agauacucgcuccaaugua

SEQ ID NO: 1097632 - RNA, 19 nt, Artificial Sequence
  Description of Artificial Sequence: Synthetic oligonucleotide
ugacuccaacgucugugug

SEQ ID NO: 1097633 - RNA, 19 nt, Artificial Sequence
  Description of Artificial Sequence: Synthetic oligonucleotide
caguagguuugccccaugc

SEQ ID NO: 1097634 - RNA, 19 nt, Artificial Sequence
  Description of Artificial Sequence: Synthetic oligonucleotide
gcaaguuuguucugggaac

SEQ ID NO: 1097635 - RNA, 19 nt, Artificial Sequence
  Description of Artificial Sequence: Synthetic oligonucleotide
uagcgcagaucuuccagcu

SEQ ID NO: 1097636 - RNA, 19 nt, Artificial Sequence
  Description of Artificial Sequence: Synthetic oligonucleotide
cauguaggugaccgucucc

SEQ ID NO: 1097637 - RNA, 19 nt, Artificial Sequence
  Description of Artificial Sequence: Synthetic oligonucleotide
gcagauacucgcuccaaug

SEQ ID NO: 1097638 - RNA, 19 nt, Artificial Sequence
  Description of Artificial Sequence: Synthetic oligonucleotide
ggaagcuaaggcacgagug

SEQ ID NO: 1097639 - RNA, 19 nt, Artificial Sequence
  Description of Artificial Sequence: Synthetic oligonucleotide
gggagugaucuucauggag

SEQ ID NO: 1097640 - RNA, 19 nt, Artificial Sequence
  Description of Artificial Sequence: Synthetic oligonucleotide
cagcgguaaaacucauccc

SEQ ID NO: 1097641 - RNA, 19 nt, Artificial Sequence
  Description of Artificial Sequence: Synthetic oligonucleotide
caucguaucugaagucauc

SEQ ID NO: 1097642 - RNA, 19 nt, Artificial Sequence
  Description of Artificial Sequence: Synthetic oligonucleotide
uugggacuugauaucccuc

SEQ ID NO: 1097643 - RNA, 19 nt, Artificial Sequence
  Description of Artificial Sequence: Synthetic oligonucleotide
cacaaguuggcccagugcu

SEQ ID NO: 1097644 - RNA, 19 nt, Artificial Sequence
  Description of Artificial Sequence: Synthetic oligonucleotide
ucucucgcaaccgugccuc

SEQ ID NO: 1097645 - RNA, 19 nt, Artificial Sequence
  Description of Artificial Sequence: Synthetic oligonucleotide
aucccauuagggaagcaca

SEQ ID NO: 1097646 - RNA, 19 nt, Artificial Sequence
  Description of Artificial Sequence: Synthetic oligonucleotide
uugcaaugguagcgccacg

SEQ ID NO: 1097647 - RNA, 19 nt, Artificial Sequence
  Description of Artificial Sequence: Synthetic oligonucleotide
gccguuguaacgaagcaug

SEQ ID NO: 1097648 - RNA, 19 nt, Artificial Sequence
  Description of Artificial Sequence: Synthetic oligonucleotide
acauccccuugugugacuc

SEQ ID NO: 1097649 - RNA, 19 nt, Artificial Sequence
  Description of Artificial Sequence: Synthetic oligonucleotide
gagagagcagggauuccgc

SEQ ID NO: 1097650 - RNA, 19 nt, Artificial Sequence
  Description of Artificial Sequence: Synthetic oligonucleotide
gauuccgccaccgccucug

SEQ ID NO: 1097651 - RNA, 19 nt, Artificial Sequence
  Description of Artificial Sequence: Synthetic oligonucleotide
gguagcgccacgcggcacg

SEQ ID NO: 1097652 - RNA, 19 nt, Artificial Sequence
  Description of Artificial Sequence: Synthetic oligonucleotide
gagacucagcagauucucc

SEQ ID NO: 1097653 - RNA, 19 nt, Artificial Sequence
  Description of Artificial Sequence: Synthetic oligonucleotide
ggcaaguuuguucugggaa

SEQ ID NO: 1097654 - RNA, 19 nt, Artificial Sequence
  Description of Artificial Sequence: Synthetic oligonucleotide
caguugcaaugguagcgcc

SEQ ID NO: 1097655 - RNA, 19 nt, Artificial Sequence
  Description of Artificial Sequence: Synthetic oligonucleotide
aggcacgagugucacaaau

SEQ ID NO: 1097656 - RNA, 19 nt, Artificial Sequence
  Description of Artificial Sequence: Synthetic oligonucleotide
uaugagaaagccggccuuu

SEQ ID NO: 1097657 - RNA, 19 nt, Artificial Sequence
  Description of Artificial Sequence: Synthetic oligonucleotide
cauugugaugauuccaagu

SEQ ID NO: 1097658 - RNA, 19 nt, Artificial Sequence
  Description of Artificial Sequence: Synthetic oligonucleotide
gcagcugcgcuccuccucg

SEQ ID NO: 1097659 - RNA, 19 nt, Artificial Sequence
  Description of Artificial Sequence: Synthetic oligonucleotide
cuggaauuucagccagcag

SEQ ID NO: 1097660 - RNA, 19 nt, Artificial Sequence
  Description of Artificial Sequence: Synthetic oligonucleotide
auguagccacacccacucg

SEQ ID NO: 1097661 - RNA, 19 nt, Artificial Sequence
  Description of Artificial Sequence: Synthetic oligonucleotide
agcagauacucgcuccaau

SEQ ID NO: 1097662 - RNA, 19 nt, Artificial Sequence
  Description of Artificial Sequence: Synthetic oligonucleotide
ugcuggggacuuccacagg

SEQ ID NO: 1097663 - RNA, 19 nt, Artificial Sequence
  Description of Artificial Sequence: Synthetic oligonucleotide
cagguggccggaauccuug

SEQ ID NO: 1097664 - RNA, 19 nt, Artificial Sequence
  Description of Artificial Sequence: Synthetic oligonucleotide
gcaaugguagcgccacgcg

SEQ ID NO: 1097665 - RNA, 19 nt, Artificial Sequence
  Description of Artificial Sequence: Synthetic oligonucleotide
ucacauccccuugugugac

SEQ ID NO: 1097666 - RNA, 19 nt, Artificial Sequence
  Description of Artificial Sequence: Synthetic oligonucleotide
caacgucugugugaccagg

SEQ ID NO: 1097667 - RNA, 19 nt, Artificial Sequence
  Description of Artificial Sequence: Synthetic oligonucleotide
cugggauucgagccuccag

SEQ ID NO: 1097668 - RNA, 19 nt, Artificial Sequence
  Description of Artificial Sequence: Synthetic oligonucleotide
cagugggcuaggugggcgg

SEQ ID NO: 1097669 - RNA, 19 nt, Artificial Sequence
  Description of Artificial Sequence: Synthetic oligonucleotide
uucacucgucccucaggcu

SEQ ID NO: 1097670 - RNA, 19 nt, Artificial Sequence
  Description of Artificial Sequence: Synthetic oligonucleotide
uuccaccuucacucguccc

SEQ ID NO: 1097671 - RNA, 19 nt, Artificial Sequence
  Description of Artificial Sequence: Synthetic oligonucleotide
cagcugcugguuucuaaug

SEQ ID NO: 1097672 - RNA, 19 nt, Artificial Sequence
  Description of Artificial Sequence: Synthetic oligonucleotide
ugcagugcuccuguacgcu

SEQ ID NO: 1097673 - RNA, 19 nt, Artificial Sequence
  Description of Artificial Sequence: Synthetic oligonucleotide
cugcugguuucuaaugaga

SEQ ID NO: 1097674 - RNA, 19 nt, Artificial Sequence
  Description of Artificial Sequence: Synthetic oligonucleotide
cacauaguacacauuuagu

SEQ ID NO: 1097675 - RNA, 19 nt, Artificial Sequence
  Description of Artificial Sequence: Synthetic oligonucleotide
ucaucacaaguuggcccag

SEQ ID NO: 1097676 - RNA, 19 nt, Artificial Sequence
  Description of Artificial Sequence: Synthetic oligonucleotide
cauccaacgauagcgcaga

SEQ ID NO: 1097677 - RNA, 19 nt, Artificial Sequence
  Description of Artificial Sequence: Synthetic oligonucleotide
guugccagaagggccucag

SEQ ID NO: 1097678 - RNA, 19 nt, Artificial Sequence
  Description of Artificial Sequence: Synthetic oligonucleotide
ggggucuaugagaaagccg

SEQ ID NO: 1097679 - RNA, 19 nt, Artificial Sequence
  Description of Artificial Sequence: Synthetic oligonucleotide
gcgguaaaacucaucccgg

SEQ ID NO: 1097680 - RNA, 19 nt, Artificial Sequence
  Description of Artificial Sequence: Synthetic oligonucleotide
caucucuggaaccagcggu

SEQ ID NO: 1097681 - RNA, 19 nt, Artificial Sequence
  Description of Artificial Sequence: Synthetic oligonucleotide
aaccgugccuccagggcug

SEQ ID NO: 1097682 - RNA, 19 nt, Artificial Sequence
  Description of Artificial Sequence: Synthetic oligonucleotide
uccaacgauagcgcagauc

SEQ ID NO: 1097683 - RNA, 19 nt, Artificial Sequence
  Description of Artificial Sequence: Synthetic oligonucleotide
cauauacagacacggcaua

SEQ ID NO: 1097684 - RNA, 19 nt, Artificial Sequence
  Description of Artificial Sequence: Synthetic oligonucleotide
guuugccccaugccgccgc

SEQ ID NO: 1097685 - RNA, 19 nt, Artificial Sequence
  Description of Artificial Sequence: Synthetic oligonucleotide
augagaaagccggccuuug

SEQ ID NO: 1097686 - RNA, 19 nt, Artificial Sequence
  Description of Artificial Sequence: Synthetic oligonucleotide
aguugcaaugguagcgcca

SEQ ID NO: 1097687 - RNA, 19 nt, Artificial Sequence
  Description of Artificial Sequence: Synthetic oligonucleotide
uguggcagugagucaugua

SEQ ID NO: 1097688 - RNA, 19 nt, Artificial Sequence
  Description of Artificial Sequence: Synthetic oligonucleotide
ggauuuguacagcauccaa

SEQ ID NO: 1097689 - RNA, 19 nt, Artificial Sequence
  Description of Artificial Sequence: Synthetic oligonucleotide
gcaugagcgcgaaggagcg

SEQ ID NO: 1097690 - RNA, 19 nt, Artificial Sequence
  Description of Artificial Sequence: Synthetic oligonucleotide
agcuaaggcacgaguguca

SEQ ID NO: 1097691 - RNA, 19 nt, Artificial Sequence
  Description of Artificial Sequence: Synthetic oligonucleotide
accagcgguaaaacucauc

SEQ ID NO: 1097692 - RNA, 19 nt, Artificial Sequence
  Description of Artificial Sequence: Synthetic oligonucleotide
gcuaccaucucuggaacca

SEQ ID NO: 1097693 - RNA, 19 nt, Artificial Sequence
  Description of Artificial Sequence: Synthetic oligonucleotide
aagagacaucguaucugaa

SEQ ID NO: 1097694 - RNA, 19 nt, Artificial Sequence
  Description of Artificial Sequence: Synthetic oligonucleotide
guuguuggugaaaaccagu

SEQ ID NO: 1097695 - RNA, 19 nt, Artificial Sequence
  Description of Artificial Sequence: Synthetic oligonucleotide
gccacacccacucgaugcg

SEQ ID NO: 1097696 - RNA, 19 nt, Artificial Sequence
  Description of Artificial Sequence: Synthetic oligonucleotide
gcauccaacgauagcgcag

SEQ ID NO: 1097697 - RNA, 19 nt, Artificial Sequence
  Description of Artificial Sequence: Synthetic oligonucleotide
cagauacucgcuccaaugu

SEQ ID NO: 1097698 - RNA, 19 nt, Artificial Sequence
  Description of Artificial Sequence: Synthetic oligonucleotide
ggcaggaagcuaaggcacg

SEQ ID NO: 1097699 - RNA, 19 nt, Artificial Sequence
  Description of Artificial Sequence: Synthetic oligonucleotide
augguagcgccacgcggca

SEQ ID NO: 1097700 - RNA, 19 nt, Artificial Sequence
  Description of Artificial Sequence: Synthetic oligonucleotide
ggauguuguuggugaaaac

SEQ ID NO: 1097701 - RNA, 19 nt, Artificial Sequence
  Description of Artificial Sequence: Synthetic oligonucleotide
aaggcacgagugucacaaa

SEQ ID NO: 1097702 - RNA, 19 nt, Artificial Sequence
  Description of Artificial Sequence: Synthetic oligonucleotide
cauccccuugugugacucc

SEQ ID NO: 1097703 - RNA, 19 nt, Artificial Sequence
  Description of Artificial Sequence: Synthetic oligonucleotide
agcagacgcagggccugcc

SEQ ID NO: 1097704 - RNA, 19 nt, Artificial Sequence
  Description of Artificial Sequence: Synthetic oligonucleotide
ucggggucccuguguguug

SEQ ID NO: 1097705 - RNA, 19 nt, Artificial Sequence
  Description of Artificial Sequence: Synthetic oligonucleotide
ggggccguuguaacgaagc

SEQ ID NO: 1097706 - RNA, 19 nt, Artificial Sequence
  Description of Artificial Sequence: Synthetic oligonucleotide
cgguaaaacucaucccggg

SEQ ID NO: 1097707 - RNA, 19 nt, Artificial Sequence
  Description of Artificial Sequence: Synthetic oligonucleotide
cagcauuuagacugaggcu

SEQ ID NO: 1097708 - RNA, 19 nt, Artificial Sequence
  Description of Artificial Sequence: Synthetic oligonucleotide
acgaagcaugagcgcgaag

SEQ ID NO: 1097709 - RNA, 19 nt, Artificial Sequence
  Description of Artificial Sequence: Synthetic oligonucleotide
ucucgcaaccgugccucca

SEQ ID NO: 1097710 - RNA, 19 nt, Artificial Sequence
  Description of Artificial Sequence: Synthetic oligonucleotide
uccaaguagcuuggaguuu

SEQ ID NO: 1097711 - RNA, 19 nt, Artificial Sequence
  Description of Artificial Sequence: Synthetic oligonucleotide
agguucucaaagagaugcu

SEQ ID NO: 1097712 - RNA, 19 nt, Artificial Sequence
  Description of Artificial Sequence: Synthetic oligonucleotide
gacucacauccccuugugu

SEQ ID NO: 1097713 - RNA, 19 nt, Artificial Sequence
  Description of Artificial Sequence: Synthetic oligonucleotide
uguacgccccagugggcua

SEQ ID NO: 1097714 - RNA, 19 nt, Artificial Sequence
  Description of Artificial Sequence: Synthetic oligonucleotide
uccacgccugggcauccuc

SEQ ID NO: 1097715 - RNA, 19 nt, Artificial Sequence
  Description of Artificial Sequence: Synthetic oligonucleotide
gcacgcuuucuguaggaga

SEQ ID NO: 1097716 - RNA, 19 nt, Artificial Sequence
  Description of Artificial Sequence: Synthetic oligonucleotide
caugagcgcgaaggagcgg

SEQ ID NO: 1097717 - RNA, 19 nt, Artificial Sequence
  Description of Artificial Sequence: Synthetic oligonucleotide
uccccuugugugacuccaa

SEQ ID NO: 1097718 - RNA, 19 nt, Artificial Sequence
  Description of Artificial Sequence: Synthetic oligonucleotide
ggcacgagugucacaaauc

SEQ ID NO: 1097719 - RNA, 19 nt, Artificial Sequence
  Description of Artificial Sequence: Synthetic oligonucleotide
gcuaaggcacgagugucac

SEQ ID NO: 1097720 - RNA, 19 nt, Artificial Sequence
  Description of Artificial Sequence: Synthetic oligonucleotide
ccuugugugacuccaacgu

SEQ ID NO: 1097721 - RNA, 19 nt, Artificial Sequence
  Description of Artificial Sequence: Synthetic oligonucleotide
guacgccccagugggcuag

SEQ ID NO: 1097722 - RNA, 19 nt, Artificial Sequence
  Description of Artificial Sequence: Synthetic oligonucleotide
agcgccacgcggcacgcuu

SEQ ID NO: 1097723 - RNA, 19 nt, Artificial Sequence
  Description of Artificial Sequence: Synthetic oligonucleotide
cuaaggcacgagugucaca

SEQ ID NO: 1097724 - RNA, 19 nt, Artificial Sequence
  Description of Artificial Sequence: Synthetic oligonucleotide
cucucgcaaccgugccucc

SEQ ID NO: 1097725 - RNA, 19 nt, Artificial Sequence
  Description of Artificial Sequence: Synthetic oligonucleotide
gcugguuucuaaugagacu

SEQ ID NO: 1097726 - RNA, 19 nt, Artificial Sequence
  Description of Artificial Sequence: Synthetic oligonucleotide
caaccgugccuccagggcu

SEQ ID NO: 1097727 - RNA, 19 nt, Artificial Sequence
  Description of Artificial Sequence: Synthetic oligonucleotide
ggcacgcuuucuguaggag

SEQ ID NO: 1097728 - RNA, 19 nt, Artificial Sequence
  Description of Artificial Sequence: Synthetic oligonucleotide
gucucuaaccacacauagu

SEQ ID NO: 1097729 - RNA, 19 nt, Artificial Sequence
  Description of Artificial Sequence: Synthetic oligonucleotide
cugacacggagcagguucu

SEQ ID NO: 1097730 - RNA, 19 nt, Artificial Sequence
  Description of Artificial Sequence: Synthetic oligonucleotide
ccaacgucugugugaccag

SEQ ID NO: 1097731 - RNA, 19 nt, Artificial Sequence
  Description of Artificial Sequence: Synthetic oligonucleotide
cacccacucgaugcggcug

SEQ ID NO: 1097732 - RNA, 19 nt, Artificial Sequence
  Description of Artificial Sequence: Synthetic oligonucleotide
aggugaccgucuccuccca

SEQ ID NO: 1097733 - RNA, 19 nt, Artificial Sequence
  Description of Artificial Sequence: Synthetic oligonucleotide
cuaugagaaagccggccuu

SEQ ID NO: 1097734 - RNA, 19 nt, Artificial Sequence
  Description of Artificial Sequence: Synthetic oligonucleotide
gucauguaggugaccgucu

SEQ ID NO: 1097735 - RNA, 19 nt, Artificial Sequence
  Description of Artificial Sequence: Synthetic oligonucleotide
cuccaacgucugugugacc

SEQ ID NO: 1097736 - RNA, 19 nt, Artificial Sequence
  Description of Artificial Sequence: Synthetic oligonucleotide
auccaacgauagcgcagau

SEQ ID NO: 1097737 - RNA, 19 nt, Artificial Sequence
  Description of Artificial Sequence: Synthetic oligonucleotide
gaauuucagccagcagccu

SEQ ID NO: 1097738 - RNA, 19 nt, Artificial Sequence
  Description of Artificial Sequence: Synthetic oligonucleotide
ccacgccugggcauccucc

SEQ ID NO: 1097739 - RNA, 19 nt, Artificial Sequence
  Description of Artificial Sequence: Synthetic oligonucleotide
gggauucgagccuccagcu

SEQ ID NO: 1097740 - RNA, 19 nt, Artificial Sequence
  Description of Artificial Sequence: Synthetic oligonucleotide
caugccgccgccugggaau

SEQ ID NO: 1097741 - RNA, 19 nt, Artificial Sequence
  Description of Artificial Sequence: Synthetic oligonucleotide
gggccguuguaacgaagca

SEQ ID NO: 1097742 - RNA, 19 nt, Artificial Sequence
  Description of Artificial Sequence: Synthetic oligonucleotide
accacacauaguacacauu

SEQ ID NO: 1097743 - RNA, 19 nt, Artificial Sequence
  Description of Artificial Sequence: Synthetic oligonucleotide
gccucucggguccagucuc

SEQ ID NO: 1097744 - RNA, 19 nt, Artificial Sequence
  Description of Artificial Sequence: Synthetic oligonucleotide
gguuugccccaugccgccg

SEQ ID NO: 1097745 - RNA, 19 nt, Artificial Sequence
  Description of Artificial Sequence: Synthetic oligonucleotide
ggaccucucucucuggaau

SEQ ID NO: 1097746 - RNA, 19 nt, Artificial Sequence
  Description of Artificial Sequence: Synthetic oligonucleotide
guagcgccacgcggcacgc

SEQ ID NO: 1097747 - RNA, 19 nt, Artificial Sequence
  Description of Artificial Sequence: Synthetic oligonucleotide
acgcggcacgcuuucugua

SEQ ID NO: 1097748 - RNA, 19 nt, Artificial Sequence
  Description of Artificial Sequence: Synthetic oligonucleotide
gcuagacccgaagggccag

SEQ ID NO: 1097749 - RNA, 19 nt, Artificial Sequence
  Description of Artificial Sequence: Synthetic oligonucleotide
gucucucgcaaccgugccu

SEQ ID NO: 1097750 - RNA, 19 nt, Artificial Sequence
  Description of Artificial Sequence: Synthetic oligonucleotide
ccuguacgccccagugggc

SEQ ID NO: 1097751 - RNA, 19 nt, Artificial Sequence
  Description of Artificial Sequence: Synthetic oligonucleotide
ccuggcagguugccagaag

SEQ ID NO: 1097752 - RNA, 19 nt, Artificial Sequence
  Description of Artificial Sequence: Synthetic oligonucleotide
cacgcggcacgcuuucugu

SEQ ID NO: 1097753 - RNA, 19 nt, Artificial Sequence
  Description of Artificial Sequence: Synthetic oligonucleotide
ugguagcgccacgcggcac

SEQ ID NO: 1097754 - RNA, 19 nt, Artificial Sequence
  Description of Artificial Sequence: Synthetic oligonucleotide
ccguuguaacgaagcauga

SEQ ID NO: 1097755 - RNA, 19 nt, Artificial Sequence
  Description of Artificial Sequence: Synthetic oligonucleotide
cuguacgccccagugggcu

SEQ ID NO: 1097756 - RNA, 19 nt, Artificial Sequence
  Description of Artificial Sequence: Synthetic oligonucleotide
guagccacacccacucgau

SEQ ID NO: 1097757 - RNA, 19 nt, Artificial Sequence
  Description of Artificial Sequence: Synthetic oligonucleotide
ccacgcggcacgcuuucug

SEQ ID NO: 1097758 - RNA, 19 nt, Artificial Sequence
  Description of Artificial Sequence: Synthetic oligonucleotide
gcauuuagacugaggcugu

SEQ ID NO: 1097759 - RNA, 19 nt, Artificial Sequence
  Description of Artificial Sequence: Synthetic oligonucleotide
gccccaugccgccgccugg

SEQ ID NO: 1097760 - RNA, 19 nt, Artificial Sequence
  Description of Artificial Sequence: Synthetic oligonucleotide
uugccccaugccgccgccu

SEQ ID NO: 1097761 - RNA, 19 nt, Artificial Sequence
  Description of Artificial Sequence: Synthetic oligonucleotide
auccacgccugggcauccu

SEQ ID NO: 1097762 - RNA, 19 nt, Artificial Sequence
  Description of Artificial Sequence: Synthetic oligonucleotide
ccaguagguuugccccaug

SEQ ID NO: 1097763 - RNA, 19 nt, Artificial Sequence
  Description of Artificial Sequence: Synthetic oligonucleotide
ggccguuguaacgaagcau

SEQ ID NO: 1097764 - RNA, 19 nt, Artificial Sequence
  Description of Artificial Sequence: Synthetic oligonucleotide
ccgccgccugggaaugggg

SEQ ID NO: 1097765 - RNA, 19 nt, Artificial Sequence
  Description of Artificial Sequence: Synthetic oligonucleotide
agggcgcagcugcgcuccu

SEQ ID NO: 1097766 - RNA, 19 nt, Artificial Sequence
  Description of Artificial Sequence: Synthetic oligonucleotide
caucacaaguuggcccagu

SEQ ID NO: 1097767 - RNA, 19 nt, Artificial Sequence
  Description of Artificial Sequence: Synthetic oligonucleotide
caacgauagcgcagaucuu

SEQ ID NO: 1097768 - RNA, 19 nt, Artificial Sequence
  Description of Artificial Sequence: Synthetic oligonucleotide
cgauagcgcagaucuucca

SEQ ID NO: 1097769 - RNA, 19 nt, Artificial Sequence
  Description of Artificial Sequence: Synthetic oligonucleotide
ccuguacgcucugcuacca

SEQ ID NO: 1097770 - RNA, 19 nt, Artificial Sequence
  Description of Artificial Sequence: Synthetic oligonucleotide
ccucgguccucugcagcug

SEQ ID NO: 1097771 - RNA, 19 nt, Artificial Sequence
  Description of Artificial Sequence: Synthetic oligonucleotide
cuguacgcucugcuaccau

SEQ ID NO: 1097772 - RNA, 19 nt, Artificial Sequence
  Description of Artificial Sequence: Synthetic oligonucleotide
cauuuagacugaggcuguu

SEQ ID NO: 1097773 - RNA, 19 nt, Artificial Sequence
  Description of Artificial Sequence: Synthetic oligonucleotide
acgccccagugggcuaggu

SEQ ID NO: 1097774 - RNA, 19 nt, Artificial Sequence
  Description of Artificial Sequence: Synthetic oligonucleotide
cuagacccgaagggccagu

SEQ ID NO: 1097775 - RNA, 19 nt, Artificial Sequence
  Description of Artificial Sequence: Synthetic oligonucleotide
gccaccgccucugcggacu

SEQ ID NO: 1097776 - RNA, 19 nt, Artificial Sequence
  Description of Artificial Sequence: Synthetic oligonucleotide
cgagugucacaaaucccau

SEQ ID NO: 1097777 - RNA, 19 nt, Artificial Sequence
  Description of Artificial Sequence: Synthetic oligonucleotide
gcccuccuggcagguugcc

SEQ ID NO: 1097778 - RNA, 19 nt, Artificial Sequence
  Description of Artificial Sequence: Synthetic oligonucleotide
ggauuccgccaccgccucu

SEQ ID NO: 1097779 - RNA, 19 nt, Artificial Sequence
  Description of Artificial Sequence: Synthetic oligonucleotide
ggccggaauccuugagcuu

SEQ ID NO: 1097780 - RNA, 19 nt, Artificial Sequence
  Description of Artificial Sequence: Synthetic oligonucleotide
cccacucgaugcggcugug

SEQ ID NO: 1097781 - RNA, 19 nt, Artificial Sequence
  Description of Artificial Sequence: Synthetic oligonucleotide
cgccacgcggcacgcuuuc

SEQ ID NO: 1097782 - RNA, 19 nt, Artificial Sequence
  Description of Artificial Sequence: Synthetic oligonucleotide
gcgcagcugcgcuccuccu

SEQ ID NO: 1097783 - RNA, 19 nt, Artificial Sequence
  Description of Artificial Sequence: Synthetic oligonucleotide
caccgccucugcggacucu

SEQ ID NO: 1097784 - RNA, 19 nt, Artificial Sequence
  Description of Artificial Sequence: Synthetic oligonucleotide
agccggccuuugggauguu

SEQ ID NO: 1097785 - RNA, 19 nt, Artificial Sequence
  Description of Artificial Sequence: Synthetic oligonucleotide
gccacgcggcacgcuuucu

SEQ ID NO: 1097786 - RNA, 19 nt, Artificial Sequence
  Description of Artificial Sequence: Synthetic oligonucleotide
gccugacacggagcagguu

SEQ ID NO: 1097787 - RNA, 19 nt, Artificial Sequence
  Description of Artificial Sequence: Synthetic oligonucleotide
gcgccacgcggcacgcuuu

SEQ ID NO: 1097788 - RNA, 19 nt, Artificial Sequence
  Description of Artificial Sequence: Synthetic oligonucleotide
ugauguauaauucuggacg

SEQ ID NO: 1097789 - RNA, 19 nt, Artificial Sequence
  Description of Artificial Sequence: Synthetic oligonucleotide
uguaaucauaaaaugauug

SEQ ID NO: 1097790 - RNA, 19 nt, Artificial Sequence
  Description of Artificial Sequence: Synthetic oligonucleotide
aacguuguacaccacaaac

SEQ ID NO: 1097791 - RNA, 19 nt, Artificial Sequence
  Description of Artificial Sequence: Synthetic oligonucleotide
aaugagaacggccacuuuc

SEQ ID NO: 1097792 - RNA, 19 nt, Artificial Sequence
  Description of Artificial Sequence: Synthetic oligonucleotide
gauaacuucaaauaaggca

SEQ ID NO: 1097793 - RNA, 19 nt, Artificial Sequence
  Description of Artificial Sequence: Synthetic oligonucleotide
aaugacucggauugaacac

SEQ ID NO: 1097794 - RNA, 19 nt, Artificial Sequence
  Description of Artificial Sequence: Synthetic oligonucleotide
auaacaugccccuuucucc

SEQ ID NO: 1097795 - RNA, 19 nt, Artificial Sequence
  Description of Artificial Sequence: Synthetic oligonucleotide
aagugcgugaugcuaaugg

SEQ ID NO: 1097796 - RNA, 19 nt, Artificial Sequence
  Description of Artificial Sequence: Synthetic oligonucleotide
aacgcuauuaccugguucu

SEQ ID NO: 1097797 - RNA, 19 nt, Artificial Sequence
  Description of Artificial Sequence: Synthetic oligonucleotide
ucucaucccauucaaacgc

SEQ ID NO: 1097798 - RNA, 19 nt, Artificial Sequence
  Description of Artificial Sequence: Synthetic oligonucleotide
ugaugaaagaaguaaguaa

SEQ ID NO: 1097799 - RNA, 19 nt, Artificial Sequence
  Description of Artificial Sequence: Synthetic oligonucleotide
gaaguaaguaacagcaagg

SEQ ID NO: 1097800 - RNA, 19 nt, Artificial Sequence
  Description of Artificial Sequence: Synthetic oligonucleotide
aaacgcuauuaccugguuc

SEQ ID NO: 1097801 - RNA, 19 nt, Artificial Sequence
  Description of Artificial Sequence: Synthetic oligonucleotide
auaacuucaaauaaggcaa

SEQ ID NO: 1097802 - RNA, 19 nt, Artificial Sequence
  Description of Artificial Sequence: Synthetic oligonucleotide
gauugaacacaccuuuucc

SEQ ID NO: 1097803 - RNA, 19 nt, Artificial Sequence
  Description of Artificial Sequence: Synthetic oligonucleotide
uuguaaagagccacuugcg

SEQ ID NO: 1097804 - RNA, 19 nt, Artificial Sequence
  Description of Artificial Sequence: Synthetic oligonucleotide
gacguagaguuuaugaggg

SEQ ID NO: 1097805 - RNA, 19 nt, Artificial Sequence
  Description of Artificial Sequence: Synthetic oligonucleotide
guaaccuuucuuuacauca

SEQ ID NO: 1097806 - RNA, 19 nt, Artificial Sequence
  Description of Artificial Sequence: Synthetic oligonucleotide
uguauaauucuggacguag

SEQ ID NO: 1097807 - RNA, 19 nt, Artificial Sequence
  Description of Artificial Sequence: Synthetic oligonucleotide
uauggugugaagauuuuaa

SEQ ID NO: 1097808 - RNA, 19 nt, Artificial Sequence
  Description of Artificial Sequence: Synthetic oligonucleotide
aguaaguaacagcaagguc

SEQ ID NO: 1097809 - RNA, 19 nt, Artificial Sequence
  Description of Artificial Sequence: Synthetic oligonucleotide
uugaaauauggugugaaga

SEQ ID NO: 1097810 - RNA, 19 nt, Artificial Sequence
  Description of Artificial Sequence: Synthetic oligonucleotide
uugaacacaccuuuuccag

SEQ ID NO: 1097811 - RNA, 19 nt, Artificial Sequence
  Description of Artificial Sequence: Synthetic oligonucleotide
uugacgaugcgcacgaccc

SEQ ID NO: 1097812 - RNA, 19 nt, Artificial Sequence
  Description of Artificial Sequence: Synthetic oligonucleotide
uggacguagaguuuaugag

SEQ ID NO: 1097813 - RNA, 19 nt, Artificial Sequence
  Description of Artificial Sequence: Synthetic oligonucleotide
aggcaugaaguuuaaagug

SEQ ID NO: 1097814 - RNA, 19 nt, Artificial Sequence
  Description of Artificial Sequence: Synthetic oligonucleotide
aacauucacgccguucacc

SEQ ID NO: 1097815 - RNA, 19 nt, Artificial Sequence
  Description of Artificial Sequence: Synthetic oligonucleotide
agugcgugaugcuaauggc

SEQ ID NO: 1097816 - RNA, 19 nt, Artificial Sequence
  Description of Artificial Sequence: Synthetic oligonucleotide
aucucaucccauucaaacg

SEQ ID NO: 1097817 - RNA, 19 nt, Artificial Sequence
  Description of Artificial Sequence: Synthetic oligonucleotide
uguaaagagccacuugcga

SEQ ID NO: 1097818 - RNA, 19 nt, Artificial Sequence
  Description of Artificial Sequence: Synthetic oligonucleotide
aaugauugucccaaggagu

SEQ ID NO: 1097819 - RNA, 19 nt, Artificial Sequence
  Description of Artificial Sequence: Synthetic oligonucleotide
auguaaacguuguacacca

SEQ ID NO: 1097820 - RNA, 19 nt, Artificial Sequence
  Description of Artificial Sequence: Synthetic oligonucleotide
agggaauucauuaggugcc

SEQ ID NO: 1097821 - RNA, 19 nt, Artificial Sequence
  Description of Artificial Sequence: Synthetic oligonucleotide
uaaucauaaaaugauuguc

SEQ ID NO: 1097822 - RNA, 19 nt, Artificial Sequence
  Description of Artificial Sequence: Synthetic oligonucleotide
cuugcgaauggucaggcag

SEQ ID NO: 1097823 - RNA, 19 nt, Artificial Sequence
  Description of Artificial Sequence: Synthetic oligonucleotide
auugaaauauggugugaag

SEQ ID NO: 1097824 - RNA, 19 nt, Artificial Sequence
  Description of Artificial Sequence: Synthetic oligonucleotide
aacccaucgaggcuucuuc

SEQ ID NO: 1097825 - RNA, 19 nt, Artificial Sequence
  Description of Artificial Sequence: Synthetic oligonucleotide
ucuugcaugaugucgcucu

SEQ ID NO: 1097826 - RNA, 19 nt, Artificial Sequence
  Description of Artificial Sequence: Synthetic oligonucleotide
gaacucuugcaugaugucg

SEQ ID NO: 1097827 - RNA, 19 nt, Artificial Sequence
  Description of Artificial Sequence: Synthetic oligonucleotide
uaaacguuguacaccacaa

SEQ ID NO: 1097828 - RNA, 19 nt, Artificial Sequence
  Description of Artificial Sequence: Synthetic oligonucleotide
ucggacuugacgaugcgca

SEQ ID NO: 1097829 - RNA, 19 nt, Artificial Sequence
  Description of Artificial Sequence: Synthetic oligonucleotide
uugcgaauggucaggcagg

SEQ ID NO: 1097830 - RNA, 19 nt, Artificial Sequence
  Description of Artificial Sequence: Synthetic oligonucleotide
gaauaagaggaugagggca

SEQ ID NO: 1097831 - RNA, 19 nt, Artificial Sequence
  Description of Artificial Sequence: Synthetic oligonucleotide
uguacuguccaugccaacc

SEQ ID NO: 1097832 - RNA, 19 nt, Artificial Sequence
  Description of Artificial Sequence: Synthetic oligonucleotide
uaccgcuuagaacacagcu

SEQ ID NO: 1097833 - RNA, 19 nt, Artificial Sequence
  Description of Artificial Sequence: Synthetic oligonucleotide
uuuaagaggauuucuucuu

SEQ ID NO: 1097834 - RNA, 19 nt, Artificial Sequence
  Description of Artificial Sequence: Synthetic oligonucleotide
acucggauugaacacaccu

SEQ ID NO: 1097835 - RNA, 19 nt, Artificial Sequence
  Description of Artificial Sequence: Synthetic oligonucleotide
ggacguagaguuuaugagg

SEQ ID NO: 1097836 - RNA, 19 nt, Artificial Sequence
  Description of Artificial Sequence: Synthetic oligonucleotide
ucaagaucaauuccuucuc

SEQ ID NO: 1097837 - RNA, 19 nt, Artificial Sequence
  Description of Artificial Sequence: Synthetic oligonucleotide
uugucauuuaagaggauuu

SEQ ID NO: 1097838 - RNA, 19 nt, Artificial Sequence
  Description of Artificial Sequence: Synthetic oligonucleotide
uguauguggggaccgauau

SEQ ID NO: 1097839 - RNA, 19 nt, Artificial Sequence
  Description of Artificial Sequence: Synthetic oligonucleotide
cucuuuucagguuuuggug

SEQ ID NO: 1097840 - RNA, 19 nt, Artificial Sequence
  Description of Artificial Sequence: Synthetic oligonucleotide
cuguguaaucauaaaauga

SEQ ID NO: 1097841 - RNA, 19 nt, Artificial Sequence
  Description of Artificial Sequence: Synthetic oligonucleotide
uuaagaggauuucuucuuc

SEQ ID NO: 1097842 - RNA, 19 nt, Artificial Sequence
  Description of Artificial Sequence: Synthetic oligonucleotide
gcauguaauugaaauaugg

SEQ ID NO: 1097843 - RNA, 19 nt, Artificial Sequence
  Description of Artificial Sequence: Synthetic oligonucleotide
uccucgugcauauucaaaa

SEQ ID NO: 1097844 - RNA, 19 nt, Artificial Sequence
  Description of Artificial Sequence: Synthetic oligonucleotide
gaguuuaugagggaauuca

SEQ ID NO: 1097845 - RNA, 19 nt, Artificial Sequence
  Description of Artificial Sequence: Synthetic oligonucleotide
aagggaauaagaggaugag

SEQ ID NO: 1097846 - RNA, 19 nt, Artificial Sequence
  Description of Artificial Sequence: Synthetic oligonucleotide
uaaagagccacuugcgaau

SEQ ID NO: 1097847 - RNA, 19 nt, Artificial Sequence
  Description of Artificial Sequence: Synthetic oligonucleotide
ucaaacgcuauuaccuggu

SEQ ID NO: 1097848 - RNA, 19 nt, Artificial Sequence
  Description of Artificial Sequence: Synthetic oligonucleotide
ugugauaacaugccccuuu

SEQ ID NO: 1097849 - RNA, 19 nt, Artificial Sequence
  Description of Artificial Sequence: Synthetic oligonucleotide
augauugucccaaggaguc

SEQ ID NO: 1097850 - RNA, 19 nt, Artificial Sequence
  Description of Artificial Sequence: Synthetic oligonucleotide
ugccagcuuacguacaaag

SEQ ID NO: 1097851 - RNA, 19 nt, Artificial Sequence
  Description of Artificial Sequence: Synthetic oligonucleotide
acguugaagccguagccgg

SEQ ID NO: 1097852 - RNA, 19 nt, Artificial Sequence
  Description of Artificial Sequence: Synthetic oligonucleotide
caagaucaauuccuucucg

SEQ ID NO: 1097853 - RNA, 19 nt, Artificial Sequence
  Description of Artificial Sequence: Synthetic oligonucleotide
ucggauugaacacaccuuu

SEQ ID NO: 1097854 - RNA, 19 nt, Artificial Sequence
  Description of Artificial Sequence: Synthetic oligonucleotide
uuaggugccagcuuacgua

SEQ ID NO: 1097855 - RNA, 19 nt, Artificial Sequence
  Description of Artificial Sequence: Synthetic oligonucleotide
augcuaauggcugugauaa

SEQ ID NO: 1097856 - RNA, 19 nt, Artificial Sequence
  Description of Artificial Sequence: Synthetic oligonucleotide
ucaacagccugaugaaaga

SEQ ID NO: 1097857 - RNA, 19 nt, Artificial Sequence
  Description of Artificial Sequence: Synthetic oligonucleotide
uaagaggauuucuucuucu

SEQ ID NO: 1097858 - RNA, 19 nt, Artificial Sequence
  Description of Artificial Sequence: Synthetic oligonucleotide
cugauguauaauucuggac

SEQ ID NO: 1097859 - RNA, 19 nt, Artificial Sequence
  Description of Artificial Sequence: Synthetic oligonucleotide
auuuuaacccaucgaggcu

SEQ ID NO: 1097860 - RNA, 19 nt, Artificial Sequence
  Description of Artificial Sequence: Synthetic oligonucleotide
aauaagaggaugagggcaa

SEQ ID NO: 1097861 - RNA, 19 nt, Artificial Sequence
  Description of Artificial Sequence: Synthetic oligonucleotide
uguuuguauguggggaccg

SEQ ID NO: 1097862 - RNA, 19 nt, Artificial Sequence
  Description of Artificial Sequence: Synthetic oligonucleotide
uauuaccugguucuccagu

SEQ ID NO: 1097863 - RNA, 19 nt, Artificial Sequence
  Description of Artificial Sequence: Synthetic oligonucleotide
ugauaaugagaacggccac

SEQ ID NO: 1097864 - RNA, 19 nt, Artificial Sequence
  Description of Artificial Sequence: Synthetic oligonucleotide
uuagaacacagcugccgcc

SEQ ID NO: 1097865 - RNA, 19 nt, Artificial Sequence
  Description of Artificial Sequence: Synthetic oligonucleotide
caaugacucggauugaaca

SEQ ID NO: 1097866 - RNA, 19 nt, Artificial Sequence
  Description of Artificial Sequence: Synthetic oligonucleotide
uuuguuguuaaugguuacu

SEQ ID NO: 1097867 - RNA, 19 nt, Artificial Sequence
  Description of Artificial Sequence: Synthetic oligonucleotide
uccgguaaugcuacucuca

SEQ ID NO: 1097868 - RNA, 19 nt, Artificial Sequence
  Description of Artificial Sequence: Synthetic oligonucleotide
gauguauaauucuggacgu

SEQ ID NO: 1097869 - RNA, 19 nt, Artificial Sequence
  Description of Artificial Sequence: Synthetic oligonucleotide
aggagguacagacaacacu

SEQ ID NO: 1097870 - RNA, 19 nt, Artificial Sequence
  Description of Artificial Sequence: Synthetic oligonucleotide
cuugacgaugcgcacgacc

SEQ ID NO: 1097871 - RNA, 19 nt, Artificial Sequence
  Description of Artificial Sequence: Synthetic oligonucleotide
auuaggugccagcuuacgu

SEQ ID NO: 1097872 - RNA, 19 nt, Artificial Sequence
  Description of Artificial Sequence: Synthetic oligonucleotide
ugacgguaacuguuguucc

SEQ ID NO: 1097873 - RNA, 19 nt, Artificial Sequence
  Description of Artificial Sequence: Synthetic oligonucleotide
ugaacacaccuuuuccaga

SEQ ID NO: 1097874 - RNA, 19 nt, Artificial Sequence
  Description of Artificial Sequence: Synthetic oligonucleotide
ugguauacuuggucuguag

SEQ ID NO: 1097875 - RNA, 19 nt, Artificial Sequence
  Description of Artificial Sequence: Synthetic oligonucleotide
agggaauaagaggaugagg

SEQ ID NO: 1097876 - RNA, 19 nt, Artificial Sequence
  Description of Artificial Sequence: Synthetic oligonucleotide
acauguuuguaugugggga

SEQ ID NO: 1097877 - RNA, 19 nt, Artificial Sequence
  Description of Artificial Sequence: Synthetic oligonucleotide
ucauuguagcccucacaag

SEQ ID NO: 1097878 - RNA, 19 nt, Artificial Sequence
  Description of Artificial Sequence: Synthetic oligonucleotide
uuuuaacucugacgguaac

SEQ ID NO: 1097879 - RNA, 19 nt, Artificial Sequence
  Description of Artificial Sequence: Synthetic oligonucleotide
guaaagagccacuugcgaa

SEQ ID NO: 1097880 - RNA, 19 nt, Artificial Sequence
  Description of Artificial Sequence: Synthetic oligonucleotide
agauauucuuccagucccc

SEQ ID NO: 1097881 - RNA, 19 nt, Artificial Sequence
  Description of Artificial Sequence: Synthetic oligonucleotide
uuacguacaaaggaaugau

SEQ ID NO: 1097882 - RNA, 19 nt, Artificial Sequence
  Description of Artificial Sequence: Synthetic oligonucleotide
agcugauguauaauucugg

SEQ ID NO: 1097883 - RNA, 19 nt, Artificial Sequence
  Description of Artificial Sequence: Synthetic oligonucleotide
caaccuuugcugcaauagc

SEQ ID NO: 1097884 - RNA, 19 nt, Artificial Sequence
  Description of Artificial Sequence: Synthetic oligonucleotide
aaacguuguacaccacaaa

SEQ ID NO: 1097885 - RNA, 19 nt, Artificial Sequence
  Description of Artificial Sequence: Synthetic oligonucleotide
uuccauccgguaaugcuac

SEQ ID NO: 1097886 - RNA, 19 nt, Artificial Sequence
  Description of Artificial Sequence: Synthetic oligonucleotide
auaauucuggacguagagu

SEQ ID NO: 1097887 - RNA, 19 nt, Artificial Sequence
  Description of Artificial Sequence: Synthetic oligonucleotide
ucgcagaacacccucucaa

SEQ ID NO: 1097888 - RNA, 19 nt, Artificial Sequence
  Description of Artificial Sequence: Synthetic oligonucleotide
ugacucggauugaacacac

SEQ ID NO: 1097889 - RNA, 19 nt, Artificial Sequence
  Description of Artificial Sequence: Synthetic oligonucleotide
cuggacguagaguuuauga

SEQ ID NO: 1097890 - RNA, 19 nt, Artificial Sequence
  Description of Artificial Sequence: Synthetic oligonucleotide
aacacccucucaaagcacu

SEQ ID NO: 1097891 - RNA, 19 nt, Artificial Sequence
  Description of Artificial Sequence: Synthetic oligonucleotide
auacuuggucuguaguacu

SEQ ID NO: 1097892 - RNA, 19 nt, Artificial Sequence
  Description of Artificial Sequence: Synthetic oligonucleotide
uaggugccagcuuacguac

SEQ ID NO: 1097893 - RNA, 19 nt, Artificial Sequence
  Description of Artificial Sequence: Synthetic oligonucleotide
ggaauaagaggaugagggc

SEQ ID NO: 1097894 - RNA, 19 nt, Artificial Sequence
  Description of Artificial Sequence: Synthetic oligonucleotide
ucgcucucaccaaugacuc

SEQ ID NO: 1097895 - RNA, 19 nt, Artificial Sequence
  Description of Artificial Sequence: Synthetic oligonucleotide
auccgguaaugcuacucuc

SEQ ID NO: 1097896 - RNA, 19 nt, Artificial Sequence
  Description of Artificial Sequence: Synthetic oligonucleotide
cacguugaagccguagccg

SEQ ID NO: 1097897 - RNA, 19 nt, Artificial Sequence
  Description of Artificial Sequence: Synthetic oligonucleotide
ugacgaugcgcacgacccg

SEQ ID NO: 1097898 - RNA, 19 nt, Artificial Sequence
  Description of Artificial Sequence: Synthetic oligonucleotide
uaagacuucuccucugcuu

SEQ ID NO: 1097899 - RNA, 19 nt, Artificial Sequence
  Description of Artificial Sequence: Synthetic oligonucleotide
ugauugucccaaggagucg

SEQ ID NO: 1097900 - RNA, 19 nt, Artificial Sequence
  Description of Artificial Sequence: Synthetic oligonucleotide
gaagccguagccggacucg

SEQ ID NO: 1097901 - RNA, 19 nt, Artificial Sequence
  Description of Artificial Sequence: Synthetic oligonucleotide
gaugcgcacgacccgcggg

SEQ ID NO: 1097902 - RNA, 19 nt, Artificial Sequence
  Description of Artificial Sequence: Synthetic oligonucleotide
uucucgccugcucggauca

SEQ ID NO: 1097903 - RNA, 19 nt, Artificial Sequence
  Description of Artificial Sequence: Synthetic oligonucleotide
gaucuagguugucagccuc

SEQ ID NO: 1097904 - RNA, 19 nt, Artificial Sequence
  Description of Artificial Sequence: Synthetic oligonucleotide
ugguuacugucuggcaugg

SEQ ID NO: 1097905 - RNA, 19 nt, Artificial Sequence
  Description of Artificial Sequence: Synthetic oligonucleotide
uacguacaaaggaaugauu

SEQ ID NO: 1097906 - RNA, 19 nt, Artificial Sequence
  Description of Artificial Sequence: Synthetic oligonucleotide
gacuugacgaugcgcacga

SEQ ID NO: 1097907 - RNA, 19 nt, Artificial Sequence
  Description of Artificial Sequence: Synthetic oligonucleotide
aacucugacgguaacuguu

SEQ ID NO: 1097908 - RNA, 19 nt, Artificial Sequence
  Description of Artificial Sequence: Synthetic oligonucleotide
accugcuugugugucgccc

SEQ ID NO: 1097909 - RNA, 19 nt, Artificial Sequence
  Description of Artificial Sequence: Synthetic oligonucleotide
cauuguagcccucacaagu

SEQ ID NO: 1097910 - RNA, 19 nt, Artificial Sequence
  Description of Artificial Sequence: Synthetic oligonucleotide
aagaaguaaguaacagcaa

SEQ ID NO: 1097911 - RNA, 19 nt, Artificial Sequence
  Description of Artificial Sequence: Synthetic oligonucleotide
uaacucugacgguaacugu

SEQ ID NO: 1097912 - RNA, 19 nt, Artificial Sequence
  Description of Artificial Sequence: Synthetic oligonucleotide
ccgcuuagaacacagcugc

SEQ ID NO: 1097913 - RNA, 19 nt, Artificial Sequence
  Description of Artificial Sequence: Synthetic oligonucleotide
ucccauucaaacgcuauua

SEQ ID NO: 1097914 - RNA, 19 nt, Artificial Sequence
  Description of Artificial Sequence: Synthetic oligonucleotide
gguaagacuucuccucugc

SEQ ID NO: 1097915 - RNA, 19 nt, Artificial Sequence
  Description of Artificial Sequence: Synthetic oligonucleotide
ugguaagacuucuccucug

SEQ ID NO: 1097916 - RNA, 19 nt, Artificial Sequence
  Description of Artificial Sequence: Synthetic oligonucleotide
cuuagcauguugagguaca

SEQ ID NO: 1097917 - RNA, 19 nt, Artificial Sequence
  Description of Artificial Sequence: Synthetic oligonucleotide
cccgguaccgcuuagaaca

SEQ ID NO: 1097918 - RNA, 19 nt, Artificial Sequence
  Description of Artificial Sequence: Synthetic oligonucleotide
ugagguacaugaccauuuu

SEQ ID NO: 1097919 - RNA, 19 nt, Artificial Sequence
  Description of Artificial Sequence: Synthetic oligonucleotide
ugucgcucucaccaaugac

SEQ ID NO: 1097920 - RNA, 19 nt, Artificial Sequence
  Description of Artificial Sequence: Synthetic oligonucleotide
caauagccugguauacuug

SEQ ID NO: 1097921 - RNA, 19 nt, Artificial Sequence
  Description of Artificial Sequence: Synthetic oligonucleotide
auaaugagaacggccacuu

SEQ ID NO: 1097922 - RNA, 19 nt, Artificial Sequence
  Description of Artificial Sequence: Synthetic oligonucleotide
gacucggacuugacgaugc

SEQ ID NO: 1097923 - RNA, 19 nt, Artificial Sequence
  Description of Artificial Sequence: Synthetic oligonucleotide
ggauugaacacaccuuuuc

SEQ ID NO: 1097924 - RNA, 19 nt, Artificial Sequence
  Description of Artificial Sequence: Synthetic oligonucleotide
uucccgguaccgcuuagaa

SEQ ID NO: 1097925 - RNA, 19 nt, Artificial Sequence
  Description of Artificial Sequence: Synthetic oligonucleotide
aaauucccgguaccgcuua

SEQ ID NO: 1097926 - RNA, 19 nt, Artificial Sequence
  Description of Artificial Sequence: Synthetic oligonucleotide
gaugucgcucucaccaaug

SEQ ID NO: 1097927 - RNA, 19 nt, Artificial Sequence
  Description of Artificial Sequence: Synthetic oligonucleotide
gacgguaacuguuguucca

SEQ ID NO: 1097928 - RNA, 19 nt, Artificial Sequence
  Description of Artificial Sequence: Synthetic oligonucleotide
ugagaacggccacuuuccu

SEQ ID NO: 1097929 - RNA, 19 nt, Artificial Sequence
  Description of Artificial Sequence: Synthetic oligonucleotide
uuguauguggggaccgaua

SEQ ID NO: 1097930 - RNA, 19 nt, Artificial Sequence
  Description of Artificial Sequence: Synthetic oligonucleotide
aacuguuguuccauccggu

SEQ ID NO: 1097931 - RNA, 19 nt, Artificial Sequence
  Description of Artificial Sequence: Synthetic oligonucleotide
uaaagugcgugaugcuaau

SEQ ID NO: 1097932 - RNA, 19 nt, Artificial Sequence
  Description of Artificial Sequence: Synthetic oligonucleotide
uguaaacguuguacaccac

SEQ ID NO: 1097933 - RNA, 19 nt, Artificial Sequence
  Description of Artificial Sequence: Synthetic oligonucleotide
gggaucuagguugucagcc

SEQ ID NO: 1097934 - RNA, 19 nt, Artificial Sequence
  Description of Artificial Sequence: Synthetic oligonucleotide
ccccucaacauucacgccg

SEQ ID NO: 1097935 - RNA, 19 nt, Artificial Sequence
  Description of Artificial Sequence: Synthetic oligonucleotide
acugggaucuagguuguca

SEQ ID NO: 1097936 - RNA, 19 nt, Artificial Sequence
  Description of Artificial Sequence: Synthetic oligonucleotide
gauaaugagaacggccacu

SEQ ID NO: 1097937 - RNA, 19 nt, Artificial Sequence
  Description of Artificial Sequence: Synthetic oligonucleotide
accgcuuagaacacagcug

SEQ ID NO: 1097938 - RNA, 19 nt, Artificial Sequence
  Description of Artificial Sequence: Synthetic oligonucleotide
gguaccgcuuagaacacag

SEQ ID NO: 1097939 - RNA, 19 nt, Artificial Sequence
  Description of Artificial Sequence: Synthetic oligonucleotide
gacgaugcgcacgacccgc

SEQ ID NO: 1097940 - RNA, 19 nt, Artificial Sequence
  Description of Artificial Sequence: Synthetic oligonucleotide
ggcugugauaacaugcccc

SEQ ID NO: 1097941 - RNA, 19 nt, Artificial Sequence
  Description of Artificial Sequence: Synthetic oligonucleotide
ccauguaaacguuguacac

SEQ ID NO: 1097942 - RNA, 19 nt, Artificial Sequence
  Description of Artificial Sequence: Synthetic oligonucleotide
gcuauuaccugguucucca

SEQ ID NO: 1097943 - RNA, 19 nt, Artificial Sequence
  Description of Artificial Sequence: Synthetic oligonucleotide
gcucacuuggccccgcacg

SEQ ID NO: 1097944 - RNA, 19 nt, Artificial Sequence
  Description of Artificial Sequence: Synthetic oligonucleotide
aagccguagccggacucgg

SEQ ID NO: 1097945 - RNA, 19 nt, Artificial Sequence
  Description of Artificial Sequence: Synthetic oligonucleotide
uccauuccggugaggggcu

SEQ ID NO: 1097946 - RNA, 19 nt, Artificial Sequence
  Description of Artificial Sequence: Synthetic oligonucleotide
cacggcgcucacaugcugc

SEQ ID NO: 1097947 - RNA, 19 nt, Artificial Sequence
  Description of Artificial Sequence: Synthetic oligonucleotide
gcuaauggcugugauaaca

SEQ ID NO: 1097948 - RNA, 19 nt, Artificial Sequence
  Description of Artificial Sequence: Synthetic oligonucleotide
uuuguauguggggaccgau

SEQ ID NO: 1097949 - RNA, 19 nt, Artificial Sequence
  Description of Artificial Sequence: Synthetic oligonucleotide
ucaucccauucaaacgcua

SEQ ID NO: 1097950 - RNA, 19 nt, Artificial Sequence
  Description of Artificial Sequence: Synthetic oligonucleotide
augucgcucucaccaauga

SEQ ID NO: 1097951 - RNA, 19 nt, Artificial Sequence
  Description of Artificial Sequence: Synthetic oligonucleotide
guaacagcaaggucauugu

SEQ ID NO: 1097952 - RNA, 19 nt, Artificial Sequence
  Description of Artificial Sequence: Synthetic oligonucleotide
auucuggacguagaguuua

SEQ ID NO: 1097953 - RNA, 19 nt, Artificial Sequence
  Description of Artificial Sequence: Synthetic oligonucleotide
aguuuaugagggaauucau

SEQ ID NO: 1097954 - RNA, 19 nt, Artificial Sequence
  Description of Artificial Sequence: Synthetic oligonucleotide
acucggacuugacgaugcg

SEQ ID NO: 1097955 - RNA, 19 nt, Artificial Sequence
  Description of Artificial Sequence: Synthetic oligonucleotide
gucgaggaaauguaaaguu

SEQ ID NO: 1097956 - RNA, 19 nt, Artificial Sequence
  Description of Artificial Sequence: Synthetic oligonucleotide
agcccucacaaguccuuag

SEQ ID NO: 1097957 - RNA, 19 nt, Artificial Sequence
  Description of Artificial Sequence: Synthetic oligonucleotide
aagcacucaugcauguaau

SEQ ID NO: 1097958 - RNA, 19 nt, Artificial Sequence
  Description of Artificial Sequence: Synthetic oligonucleotide
ucugacgguaacuguuguu

SEQ ID NO: 1097959 - RNA, 19 nt, Artificial Sequence
  Description of Artificial Sequence: Synthetic oligonucleotide
acucugacgguaacuguug

SEQ ID NO: 1097960 - RNA, 19 nt, Artificial Sequence
  Description of Artificial Sequence: Synthetic oligonucleotide
aucccauucaaacgcuauu

SEQ ID NO: 1097961 - RNA, 19 nt, Artificial Sequence
  Description of Artificial Sequence: Synthetic oligonucleotide
agcacucaugcauguaauu

SEQ ID NO: 1097962 - RNA, 19 nt, Artificial Sequence
  Description of Artificial Sequence: Synthetic oligonucleotide
agccacuugcgaaugguca

SEQ ID NO: 1097963 - RNA, 19 nt, Artificial Sequence
  Description of Artificial Sequence: Synthetic oligonucleotide
gcuuacguacaaaggaaug

SEQ ID NO: 1097964 - RNA, 19 nt, Artificial Sequence
  Description of Artificial Sequence: Synthetic oligonucleotide
caugccaaccuuugcugca

SEQ ID NO: 1097965 - RNA, 19 nt, Artificial Sequence
  Description of Artificial Sequence: Synthetic oligonucleotide
gccacuugcgaauggucag

SEQ ID NO: 1097966 - RNA, 19 nt, Artificial Sequence
  Description of Artificial Sequence: Synthetic oligonucleotide
cucaacauucacgccguuc

SEQ ID NO: 1097967 - RNA, 19 nt, Artificial Sequence
  Description of Artificial Sequence: Synthetic oligonucleotide
ugucccaucgcugcaucuc

SEQ ID NO: 1097968 - RNA, 19 nt, Artificial Sequence
  Description of Artificial Sequence: Synthetic oligonucleotide
gaggagguacagacaacac

SEQ ID NO: 1097969 - RNA, 19 nt, Artificial Sequence
  Description of Artificial Sequence: Synthetic oligonucleotide
agcuuacguacaaaggaau

SEQ ID NO: 1097970 - RNA, 19 nt, Artificial Sequence
  Description of Artificial Sequence: Synthetic oligonucleotide
ggacuugacgaugcgcacg

SEQ ID NO: 1097971 - RNA, 19 nt, Artificial Sequence
  Description of Artificial Sequence: Synthetic oligonucleotide
ucccgguaccgcuuagaac

SEQ ID NO: 1097972 - RNA, 19 nt, Artificial Sequence
  Description of Artificial Sequence: Synthetic oligonucleotide
cuucucgccugcucggauc

SEQ ID NO: 1097973 - RNA, 19 nt, Artificial Sequence
  Description of Artificial Sequence: Synthetic oligonucleotide
gccagcuuacguacaaagg

SEQ ID NO: 1097974 - RNA, 19 nt, Artificial Sequence
  Description of Artificial Sequence: Synthetic oligonucleotide
acccaucgaggcuucuucu

SEQ ID NO: 1097975 - RNA, 19 nt, Artificial Sequence
  Description of Artificial Sequence: Synthetic oligonucleotide
cacuugcgaauggucaggc

SEQ ID NO: 1097976 - RNA, 19 nt, Artificial Sequence
  Description of Artificial Sequence: Synthetic oligonucleotide
guucccggcgcaguggagc

SEQ ID NO: 1097977 - RNA, 19 nt, Artificial Sequence
  Description of Artificial Sequence: Synthetic oligonucleotide
guuccauccgguaaugcua

SEQ ID NO: 1097978 - RNA, 19 nt, Artificial Sequence
  Description of Artificial Sequence: Synthetic oligonucleotide
caacauucacgccguucac

SEQ ID NO: 1097979 - RNA, 19 nt, Artificial Sequence
  Description of Artificial Sequence: Synthetic oligonucleotide
acuugcgaauggucaggca

SEQ ID NO: 1097980 - RNA, 19 nt, Artificial Sequence
  Description of Artificial Sequence: Synthetic oligonucleotide
gauugucccaaggagucgu

SEQ ID NO: 1097981 - RNA, 19 nt, Artificial Sequence
  Description of Artificial Sequence: Synthetic oligonucleotide
uuagcauguugagguacau

SEQ ID NO: 1097982 - RNA, 19 nt, Artificial Sequence
  Description of Artificial Sequence: Synthetic oligonucleotide
ggagugaggaaaggcuagg

SEQ ID NO: 1097983 - RNA, 19 nt, Artificial Sequence
  Description of Artificial Sequence: Synthetic oligonucleotide
ugcuaauggcugugauaac

SEQ ID NO: 1097984 - RNA, 19 nt, Artificial Sequence
  Description of Artificial Sequence: Synthetic oligonucleotide
uucuggacguagaguuuau

SEQ ID NO: 1097985 - RNA, 19 nt, Artificial Sequence
  Description of Artificial Sequence: Synthetic oligonucleotide
cuaauggcugugauaacau

SEQ ID NO: 1097986 - RNA, 19 nt, Artificial Sequence
  Description of Artificial Sequence: Synthetic oligonucleotide
ccgauaugggcacugcuug

SEQ ID NO: 1097987 - RNA, 19 nt, Artificial Sequence
  Description of Artificial Sequence: Synthetic oligonucleotide
gucgcucucaccaaugacu

SEQ ID NO: 1097988 - RNA, 19 nt, Artificial Sequence
  Description of Artificial Sequence: Synthetic oligonucleotide
uaaugagaacggccacuuu

SEQ ID NO: 1097989 - RNA, 19 nt, Artificial Sequence
  Description of Artificial Sequence: Synthetic oligonucleotide
ucuagguugucagccucau

SEQ ID NO: 1097990 - RNA, 19 nt, Artificial Sequence
  Description of Artificial Sequence: Synthetic oligonucleotide
caucagacacaccauugua

SEQ ID NO: 1097991 - RNA, 19 nt, Artificial Sequence
  Description of Artificial Sequence: Synthetic oligonucleotide
aguugcccgcccucgcuca

SEQ ID NO: 1097992 - RNA, 19 nt, Artificial Sequence
  Description of Artificial Sequence: Synthetic oligonucleotide
gaacacccucucaaagcac

SEQ ID NO: 1097993 - RNA, 19 nt, Artificial Sequence
  Description of Artificial Sequence: Synthetic oligonucleotide
gggagugaggaaaggcuag

SEQ ID NO: 1097994 - RNA, 19 nt, Artificial Sequence
  Description of Artificial Sequence: Synthetic oligonucleotide
guacuguccaugccaaccu

SEQ ID NO: 1097995 - RNA, 19 nt, Artificial Sequence
  Description of Artificial Sequence: Synthetic oligonucleotide
ccaaugacucggauugaac

SEQ ID NO: 1097996 - RNA, 19 nt, Artificial Sequence
  Description of Artificial Sequence: Synthetic oligonucleotide
gguauacuuggucuguagu

SEQ ID NO: 1097997 - RNA, 19 nt, Artificial Sequence
  Description of Artificial Sequence: Synthetic oligonucleotide
auaugggcacugcuugcuu

SEQ ID NO: 1097998 - RNA, 19 nt, Artificial Sequence
  Description of Artificial Sequence: Synthetic oligonucleotide
augggcacugcuugcuuuu

SEQ ID NO: 1097999 - RNA, 19 nt, Artificial Sequence
  Description of Artificial Sequence: Synthetic oligonucleotide
ccgguaaugcuacucucag

SEQ ID NO: 1098000 - RNA, 19 nt, Artificial Sequence
  Description of Artificial Sequence: Synthetic oligonucleotide
cccauucaaacgcuauuac

SEQ ID NO: 1098001 - RNA, 19 nt, Artificial Sequence
  Description of Artificial Sequence: Synthetic oligonucleotide
accgauaugggcacugcuu

SEQ ID NO: 1098002 - RNA, 19 nt, Artificial Sequence
  Description of Artificial Sequence: Synthetic oligonucleotide
uccgcaguugcccgcccuc

SEQ ID NO: 1098003 - RNA, 19 nt, Artificial Sequence
  Description of Artificial Sequence: Synthetic oligonucleotide
cucgccugcucggaucagg

SEQ ID NO: 1098004 - RNA, 19 nt, Artificial Sequence
  Description of Artificial Sequence: Synthetic oligonucleotide
gccggacucggacuugacg

SEQ ID NO: 1098005 - RNA, 19 nt, Artificial Sequence
  Description of Artificial Sequence: Synthetic oligonucleotide
auuccggugaggggcugag

SEQ ID NO: 1098006 - RNA, 19 nt, Artificial Sequence
  Description of Artificial Sequence: Synthetic oligonucleotide
acgcuauuaccugguucuc

SEQ ID NO: 1098007 - RNA, 19 nt, Artificial Sequence
  Description of Artificial Sequence: Synthetic oligonucleotide
gucccaucgcugcaucuca

SEQ ID NO: 1098008 - RNA, 19 nt, Artificial Sequence
  Description of Artificial Sequence: Synthetic oligonucleotide
cuagguugucagccucaug

SEQ ID NO: 1098009 - RNA, 19 nt, Artificial Sequence
  Description of Artificial Sequence: Synthetic oligonucleotide
ccggacucggacuugacga

SEQ ID NO: 1098010 - RNA, 19 nt, Artificial Sequence
  Description of Artificial Sequence: Synthetic oligonucleotide
cauccgguaaugcuacucu

SEQ ID NO: 1098011 - RNA, 19 nt, Artificial Sequence
  Description of Artificial Sequence: Synthetic oligonucleotide
gacucggauugaacacacc

SEQ ID NO: 1098012 - RNA, 19 nt, Artificial Sequence
  Description of Artificial Sequence: Synthetic oligonucleotide
caucagauucugacaggaa

SEQ ID NO: 1098013 - RNA, 19 nt, Artificial Sequence
  Description of Artificial Sequence: Synthetic oligonucleotide
auguauaauucuggacgua

SEQ ID NO: 1098014 - RNA, 19 nt, Artificial Sequence
  Description of Artificial Sequence: Synthetic oligonucleotide
gcaaauucccgguaccgcu

SEQ ID NO: 1098015 - RNA, 19 nt, Artificial Sequence
  Description of Artificial Sequence: Synthetic oligonucleotide
ugccgcccugccauguaaa

SEQ ID NO: 1098016 - RNA, 19 nt, Artificial Sequence
  Description of Artificial Sequence: Synthetic oligonucleotide
guagaguuuaugagggaau

SEQ ID NO: 1098017 - RNA, 19 nt, Artificial Sequence
  Description of Artificial Sequence: Synthetic oligonucleotide
guaccgcuuagaacacagc

SEQ ID NO: 1098018 - RNA, 19 nt, Artificial Sequence
  Description of Artificial Sequence: Synthetic oligonucleotide
uagccggacucggacuuga

SEQ ID NO: 1098019 - RNA, 19 nt, Artificial Sequence
  Description of Artificial Sequence: Synthetic oligonucleotide
ggcgcaguggagcccagac

SEQ ID NO: 1098020 - RNA, 19 nt, Artificial Sequence
  Description of Artificial Sequence: Synthetic oligonucleotide
gcccucacaaguccuuagc

SEQ ID NO: 1098021 - RNA, 19 nt, Artificial Sequence
  Description of Artificial Sequence: Synthetic oligonucleotide
guuuguauguggggaccga

SEQ ID NO: 1098022 - RNA, 19 nt, Artificial Sequence
  Description of Artificial Sequence: Synthetic oligonucleotide
cuccucgugcauauucaaa

SEQ ID NO: 1098023 - RNA, 19 nt, Artificial Sequence
  Description of Artificial Sequence: Synthetic oligonucleotide
cucaccaaugacucggauu

SEQ ID NO: 1098024 - RNA, 19 nt, Artificial Sequence
  Description of Artificial Sequence: Synthetic oligonucleotide
cucgcagaacacccucuca

SEQ ID NO: 1098025 - RNA, 19 nt, Artificial Sequence
  Description of Artificial Sequence: Synthetic oligonucleotide
uuccggugaggggcugagg

SEQ ID NO: 1098026 - RNA, 19 nt, Artificial Sequence
  Description of Artificial Sequence: Synthetic oligonucleotide
uccauccgguaaugcuacu

SEQ ID NO: 1098027 - RNA, 19 nt, Artificial Sequence
  Description of Artificial Sequence: Synthetic oligonucleotide
gaccgauaugggcacugcu

SEQ ID NO: 1098028 - RNA, 19 nt, Artificial Sequence
  Description of Artificial Sequence: Synthetic oligonucleotide
ggugccagcuuacguacaa

SEQ ID NO: 1098029 - RNA, 19 nt, Artificial Sequence
  Description of Artificial Sequence: Synthetic oligonucleotide
acgaugcgcacgacccgcg

SEQ ID NO: 1098030 - RNA, 19 nt, Artificial Sequence
  Description of Artificial Sequence: Synthetic oligonucleotide
gagugaggaaaggcuaggu

SEQ ID NO: 1098031 - RNA, 19 nt, Artificial Sequence
  Description of Artificial Sequence: Synthetic oligonucleotide
caaacucucuuuucagguu

SEQ ID NO: 1098032 - RNA, 19 nt, Artificial Sequence
  Description of Artificial Sequence: Synthetic oligonucleotide
cucaucccauucaaacgcu

SEQ ID NO: 1098033 - RNA, 19 nt, Artificial Sequence
  Description of Artificial Sequence: Synthetic oligonucleotide
caucccauucaaacgcuau

SEQ ID NO: 1098034 - RNA, 19 nt, Artificial Sequence
  Description of Artificial Sequence: Synthetic oligonucleotide
ccacuugcgaauggucagg

SEQ ID NO: 1098035 - RNA, 19 nt, Artificial Sequence
  Description of Artificial Sequence: Synthetic oligonucleotide
cucuugcaugaugucgcuc

SEQ ID NO: 1098036 - RNA, 19 nt, Artificial Sequence
  Description of Artificial Sequence: Synthetic oligonucleotide
augccaaccuuugcugcaa

SEQ ID NO: 1098037 - RNA, 19 nt, Artificial Sequence
  Description of Artificial Sequence: Synthetic oligonucleotide
cucggauugaacacaccuu

SEQ ID NO: 1098038 - RNA, 19 nt, Artificial Sequence
  Description of Artificial Sequence: Synthetic oligonucleotide
gaacggccacuuuccugga

SEQ ID NO: 1098039 - RNA, 19 nt, Artificial Sequence
  Description of Artificial Sequence: Synthetic oligonucleotide
agcucgcagaacacccucu

SEQ ID NO: 1098040 - RNA, 19 nt, Artificial Sequence
  Description of Artificial Sequence: Synthetic oligonucleotide
cgauaugggcacugcuugc

SEQ ID NO: 1098041 - RNA, 19 nt, Artificial Sequence
  Description of Artificial Sequence: Synthetic oligonucleotide
guugagguacaugaccauu

SEQ ID NO: 1098042 - RNA, 19 nt, Artificial Sequence
  Description of Artificial Sequence: Synthetic oligonucleotide
ggacucggacuugacgaug

SEQ ID NO: 1098043 - RNA, 19 nt, Artificial Sequence
  Description of Artificial Sequence: Synthetic oligonucleotide
augcugcagcggcgcguac

SEQ ID NO: 1098044 - RNA, 19 nt, Artificial Sequence
  Description of Artificial Sequence: Synthetic oligonucleotide
ggaucuagguugucagccu

SEQ ID NO: 1098045 - RNA, 19 nt, Artificial Sequence
  Description of Artificial Sequence: Synthetic oligonucleotide
ggccccgcacguugaagcc

SEQ ID NO: 1098046 - RNA, 19 nt, Artificial Sequence
  Description of Artificial Sequence: Synthetic oligonucleotide
gugggaagaugauuucauu

SEQ ID NO: 1098047 - RNA, 19 nt, Artificial Sequence
  Description of Artificial Sequence: Synthetic oligonucleotide
gcucgcagaacacccucuc

SEQ ID NO: 1098048 - RNA, 19 nt, Artificial Sequence
  Description of Artificial Sequence: Synthetic oligonucleotide
guagccggacucggacuug

SEQ ID NO: 1098049 - RNA, 19 nt, Artificial Sequence
  Description of Artificial Sequence: Synthetic oligonucleotide
gggaccgauaugggcacug

SEQ ID NO: 1098050 - RNA, 19 nt, Artificial Sequence
  Description of Artificial Sequence: Synthetic oligonucleotide
cccaucgaggcuucuucuc

SEQ ID NO: 1098051 - RNA, 19 nt, Artificial Sequence
  Description of Artificial Sequence: Synthetic oligonucleotide
gcgcaguggagcccagacc

SEQ ID NO: 1098052 - RNA, 19 nt, Artificial Sequence
  Description of Artificial Sequence: Synthetic oligonucleotide
ucucgccugcucggaucag

SEQ ID NO: 1098053 - RNA, 19 nt, Artificial Sequence
  Description of Artificial Sequence: Synthetic oligonucleotide
caaauucccgguaccgcuu

SEQ ID NO: 1098054 - RNA, 19 nt, Artificial Sequence
  Description of Artificial Sequence: Synthetic oligonucleotide
ugcccgcccucgcucacuu

SEQ ID NO: 1098055 - RNA, 19 nt, Artificial Sequence
  Description of Artificial Sequence: Synthetic oligonucleotide
ggaccgauaugggcacugc

SEQ ID NO: 1098056 - RNA, 19 nt, Artificial Sequence
  Description of Artificial Sequence: Synthetic oligonucleotide
ccgcccugccauguaaacg

SEQ ID NO: 1098057 - RNA, 19 nt, Artificial Sequence
  Description of Artificial Sequence: Synthetic oligonucleotide
ccauccgguaaugcuacuc

SEQ ID NO: 1098058 - RNA, 19 nt, Artificial Sequence
  Description of Artificial Sequence: Synthetic oligonucleotide
cgcuauuaccugguucucc

SEQ ID NO: 1098059 - RNA, 19 nt, Artificial Sequence
  Description of Artificial Sequence: Synthetic oligonucleotide
cagcuccccguugaugcuc

SEQ ID NO: 1098060 - RNA, 19 nt, Artificial Sequence
  Description of Artificial Sequence: Synthetic oligonucleotide
gcuagguggccacaucccu

SEQ ID NO: 1098061 - RNA, 19 nt, Artificial Sequence
  Description of Artificial Sequence: Synthetic oligonucleotide
guugcccgcccucgcucac

SEQ ID NO: 1098062 - RNA, 19 nt, Artificial Sequence
  Description of Artificial Sequence: Synthetic oligonucleotide
ccgacgccgggcaucuagc

SEQ ID NO: 1098063 - RNA, 19 nt, Artificial Sequence
  Description of Artificial Sequence: Synthetic oligonucleotide
cucugacgguaacuguugu

SEQ ID NO: 1098064 - RNA, 19 nt, Artificial Sequence
  Description of Artificial Sequence: Synthetic oligonucleotide
cugguauacuuggucugua

SEQ ID NO: 1098065 - RNA, 19 nt, Artificial Sequence
  Description of Artificial Sequence: Synthetic oligonucleotide
caugcugcagcggcgcgua

SEQ ID NO: 1098066 - RNA, 19 nt, Artificial Sequence
  Description of Artificial Sequence: Synthetic oligonucleotide
gcgcaccccggcccggucg

SEQ ID NO: 1098067 - RNA, 19 nt, Artificial Sequence
  Description of Artificial Sequence: Synthetic oligonucleotide
gccgcccugccauguaaac

SEQ ID NO: 1098068 - RNA, 19 nt, Artificial Sequence
  Description of Artificial Sequence: Synthetic oligonucleotide
aggugccagcuuacguaca

SEQ ID NO: 1098069 - RNA, 19 nt, Artificial Sequence
  Description of Artificial Sequence: Synthetic oligonucleotide
ccgguaccgcuuagaacac

SEQ ID NO: 1098070 - RNA, 19 nt, Artificial Sequence
  Description of Artificial Sequence: Synthetic oligonucleotide
cauuccggugaggggcuga

SEQ ID NO: 1098071 - RNA, 19 nt, Artificial Sequence
  Description of Artificial Sequence: Synthetic oligonucleotide
ccccguugaugcuccgcag

SEQ ID NO: 1098072 - RNA, 19 nt, Artificial Sequence
  Description of Artificial Sequence: Synthetic oligonucleotide
cuuggccccgcacguugaa

SEQ ID NO: 1098073 - RNA, 19 nt, Artificial Sequence
  Description of Artificial Sequence: Synthetic oligonucleotide
ggcgcguacagcuccccgu

SEQ ID NO: 1098074 - RNA, 19 nt, Artificial Sequence
  Description of Artificial Sequence: Synthetic oligonucleotide
uugcgcaccccggcccggu

SEQ ID NO: 1098075 - RNA, 19 nt, Artificial Sequence
  Description of Artificial Sequence: Synthetic oligonucleotide
cugccgcccugccauguaa

SEQ ID NO: 1098076 - RNA, 19 nt, Artificial Sequence
  Description of Artificial Sequence: Synthetic oligonucleotide
gcgcacgacccgcgggccg

SEQ ID NO: 1098077 - RNA, 19 nt, Artificial Sequence
  Description of Artificial Sequence: Synthetic oligonucleotide
cggacuugacgaugcgcac

SEQ ID NO: 1098078 - RNA, 19 nt, Artificial Sequence
  Description of Artificial Sequence: Synthetic oligonucleotide
caaacgcuauuaccugguu

SEQ ID NO: 1098079 - RNA, 19 nt, Artificial Sequence
  Description of Artificial Sequence: Synthetic oligonucleotide
agccguagccggacucgga

SEQ ID NO: 1098080 - RNA, 19 nt, Artificial Sequence
  Description of Artificial Sequence: Synthetic oligonucleotide
cguugaugcuccgcaguug

SEQ ID NO: 1098081 - RNA, 19 nt, Artificial Sequence
  Description of Artificial Sequence: Synthetic oligonucleotide
cgcccugccauguaaacgu

SEQ ID NO: 1098082 - RNA, 19 nt, Artificial Sequence
  Description of Artificial Sequence: Synthetic oligonucleotide
cacugggaucuagguuguc

SEQ ID NO: 1098083 - RNA, 19 nt, Artificial Sequence
  Description of Artificial Sequence: Synthetic oligonucleotide
cgaugcgcacgacccgcgg

SEQ ID NO: 1098084 - RNA, 19 nt, Artificial Sequence
  Description of Artificial Sequence: Synthetic oligonucleotide
ccgcacguugaagccguag

SEQ ID NO: 1098085 - RNA, 19 nt, Artificial Sequence
  Description of Artificial Sequence: Synthetic oligonucleotide
cacgacccgcgggccgccg

SEQ ID NO: 1098086 - RNA, 19 nt, Artificial Sequence
  Description of Artificial Sequence: Synthetic oligonucleotide
ccugguauacuuggucugu

SEQ ID NO: 1098087 - RNA, 19 nt, Artificial Sequence
  Description of Artificial Sequence: Synthetic oligonucleotide
gagucgucacugggaucua

SEQ ID NO: 1098088 - RNA, 19 nt, Artificial Sequence
  Description of Artificial Sequence: Synthetic oligonucleotide
ccgccuccauuccggugag

SEQ ID NO: 1098089 - RNA, 19 nt, Artificial Sequence
  Description of Artificial Sequence: Synthetic oligonucleotide
cgcaccccggcccggucgg

SEQ ID NO: 1098090 - RNA, 19 nt, Artificial Sequence
  Description of Artificial Sequence: Synthetic oligonucleotide
ccguucccggcgcagugga

SEQ ID NO: 1098091 - RNA, 19 nt, Artificial Sequence
  Description of Artificial Sequence: Synthetic oligonucleotide
cggcgcguacagcuccccg

SEQ ID NO: 1098092 - RNA, 19 nt, Artificial Sequence
  Description of Artificial Sequence: Synthetic oligonucleotide
cuccgcaguugcccgcccu

SEQ ID NO: 1098093 - RNA, 19 nt, Artificial Sequence
  Description of Artificial Sequence: Synthetic oligonucleotide
cguucccggcgcaguggag

SEQ ID NO: 1098094 - RNA, 19 nt, Artificial Sequence
  Description of Artificial Sequence: Synthetic oligonucleotide
cgcucacuuggccccgcac

SEQ ID NO: 1098095 - RNA, 19 nt, Artificial Sequence
  Description of Artificial Sequence: Synthetic oligonucleotide
cgcacgacccgcgggccgc

SEQ ID NO: 1098096 - RNA, 19 nt, Artificial Sequence
  Description of Artificial Sequence: Synthetic oligonucleotide
cccggcgcaguggagccca

SEQ ID NO: 1098097 - RNA, 19 nt, Artificial Sequence
  Description of Artificial Sequence: Synthetic oligonucleotide
gcggcgcguacagcucccc

SEQ ID NO: 1098098 - RNA, 19 nt, Artificial Sequence
  Description of Artificial Sequence: Synthetic oligonucleotide
gcgcguacagcuccccguu

SEQ ID NO: 1098099 - RNA, 19 nt, Artificial Sequence
  Description of Artificial Sequence: Synthetic oligonucleotide
ccguugaugcuccgcaguu

SEQ ID NO: 1098100 - RNA, 19 nt, Artificial Sequence
  Description of Artificial Sequence: Synthetic oligonucleotide
ccauuccggugaggggcug

SEQ ID NO: 1098101 - RNA, 19 nt, Artificial Sequence
  Description of Artificial Sequence: Synthetic oligonucleotide
cgccguucccggcgcagug

SEQ ID NO: 1098102 - RNA, 19 nt, Artificial Sequence
  Description of Artificial Sequence: Synthetic oligonucleotide
cguagccggacucggacuu

SEQ ID NO: 1098103 - RNA, 19 nt, Artificial Sequence
  Description of Artificial Sequence: Synthetic oligonucleotide
ccggcgcaguggagcccag

SEQ ID NO: 1098104 - RNA, 19 nt, Artificial Sequence
  Description of Artificial Sequence: Synthetic oligonucleotide
ccuucucgccugcucggau

SEQ ID NO: 1098105 - RNA, 19 nt, Artificial Sequence
  Description of Artificial Sequence: Synthetic oligonucleotide
cggacucggacuugacgau

SEQ ID NO: 1098106 - RNA, 19 nt, Artificial Sequence
  Description of Artificial Sequence: Synthetic oligonucleotide
ccucgccaucuggaaaaua

SEQ ID NO: 1098107 - RNA, 19 nt, Artificial Sequence
  Description of Artificial Sequence: Synthetic oligonucleotide
cgguaccgcuuagaacaca

SEQ ID NO: 1098108 - RNA, 19 nt, Artificial Sequence
  Description of Artificial Sequence: Synthetic oligonucleotide
ggggaccgauaugggcacu

SEQ ID NO: 1098109 - RNA, 19 nt, Artificial Sequence
  Description of Artificial Sequence: Synthetic oligonucleotide
gcaccccggcccggucggc

SEQ ID NO: 1098110 - RNA, 19 nt, Artificial Sequence
  Description of Artificial Sequence: Synthetic oligonucleotide
gcccugccauguaaacguu

SEQ ID NO: 1098111 - RNA, 19 nt, Artificial Sequence
  Description of Artificial Sequence: Synthetic oligonucleotide
ccucaacauucacgccguu

SEQ ID NO: 1098112 - RNA, 19 nt, Artificial Sequence
  Description of Artificial Sequence: Synthetic oligonucleotide
cccgcacguugaagccgua

SEQ ID NO: 1098113 - RNA, 19 nt, Artificial Sequence
  Description of Artificial Sequence: Synthetic oligonucleotide
ccgccguucccggcgcagu

SEQ ID NO: 1098114 - RNA, 19 nt, Artificial Sequence
  Description of Artificial Sequence: Synthetic oligonucleotide
ccccgacgccgggcaucua

SEQ ID NO: 1098115 - RNA, 19 nt, Artificial Sequence
  Description of Artificial Sequence: Synthetic oligonucleotide
agaaacacgaaacaaaagg

SEQ ID NO: 1098116 - RNA, 19 nt, Artificial Sequence
  Description of Artificial Sequence: Synthetic oligonucleotide
agaaagauagcccuucugc

SEQ ID NO: 1098117 - RNA, 19 nt, Artificial Sequence
  Description of Artificial Sequence: Synthetic oligonucleotide
uuaauugcauuucagcagg

SEQ ID NO: 1098118 - RNA, 19 nt, Artificial Sequence
  Description of Artificial Sequence: Synthetic oligonucleotide
gaugugaauagaaagauag

SEQ ID NO: 1098119 - RNA, 19 nt, Artificial Sequence
  Description of Artificial Sequence: Synthetic oligonucleotide
uuuaauugcauuucagcag

SEQ ID NO: 1098120 - RNA, 19 nt, Artificial Sequence
  Description of Artificial Sequence: Synthetic oligonucleotide
aaagguguagaguccuucc

SEQ ID NO: 1098121 - RNA, 19 nt, Artificial Sequence
  Description of Artificial Sequence: Synthetic oligonucleotide
ugcuuaaaacuccuaaggg

SEQ ID NO: 1098122 - RNA, 19 nt, Artificial Sequence
  Description of Artificial Sequence: Synthetic oligonucleotide
ugaauagaaagauagcccu

SEQ ID NO: 1098123 - RNA, 19 nt, Artificial Sequence
  Description of Artificial Sequence: Synthetic oligonucleotide
uuaaguaggaugaaucugu

SEQ ID NO: 1098124 - RNA, 19 nt, Artificial Sequence
  Description of Artificial Sequence: Synthetic oligonucleotide
aagauagcccuucugcacg

SEQ ID NO: 1098125 - RNA, 19 nt, Artificial Sequence
  Description of Artificial Sequence: Synthetic oligonucleotide
aauagaaagauagcccuuc

SEQ ID NO: 1098126 - RNA, 19 nt, Artificial Sequence
  Description of Artificial Sequence: Synthetic oligonucleotide
uguggcuuaaguaggauga

SEQ ID NO: 1098127 - RNA, 19 nt, Artificial Sequence
  Description of Artificial Sequence: Synthetic oligonucleotide
guuagggagggauaaaggg

SEQ ID NO: 1098128 - RNA, 19 nt, Artificial Sequence
  Description of Artificial Sequence: Synthetic oligonucleotide
aacaguauauagucccacg

SEQ ID NO: 1098129 - RNA, 19 nt, Artificial Sequence
  Description of Artificial Sequence: Synthetic oligonucleotide
uccauuuccagcaggaccc

SEQ ID NO: 1098130 - RNA, 19 nt, Artificial Sequence
  Description of Artificial Sequence: Synthetic oligonucleotide
auggguauguguuagggag

SEQ ID NO: 1098131 - RNA, 19 nt, Artificial Sequence
  Description of Artificial Sequence: Synthetic oligonucleotide
aaggauaugaguaguguuc

SEQ ID NO: 1098132 - RNA, 19 nt, Artificial Sequence
  Description of Artificial Sequence: Synthetic oligonucleotide
aaaucagaacccuaaagua

SEQ ID NO: 1098133 - RNA, 19 nt, Artificial Sequence
  Description of Artificial Sequence: Synthetic oligonucleotide
ugucauaagcaauauauau

SEQ ID NO: 1098134 - RNA, 19 nt, Artificial Sequence
  Description of Artificial Sequence: Synthetic oligonucleotide
ucaacagugguuauuuaca

SEQ ID NO: 1098135 - RNA, 19 nt, Artificial Sequence
  Description of Artificial Sequence: Synthetic oligonucleotide
aagguguagaguccuuccc

SEQ ID NO: 1098136 - RNA, 19 nt, Artificial Sequence
  Description of Artificial Sequence: Synthetic oligonucleotide
uacagugacauuugggucc

SEQ ID NO: 1098137 - RNA, 19 nt, Artificial Sequence
  Description of Artificial Sequence: Synthetic oligonucleotide
acaguauauagucccacgg

SEQ ID NO: 1098138 - RNA, 19 nt, Artificial Sequence
  Description of Artificial Sequence: Synthetic oligonucleotide
agaguuguaucacugagga

SEQ ID NO: 1098139 - RNA, 19 nt, Artificial Sequence
  Description of Artificial Sequence: Synthetic oligonucleotide
ucugcuuaaaacuccuaag

SEQ ID NO: 1098140 - RNA, 19 nt, Artificial Sequence
  Description of Artificial Sequence: Synthetic oligonucleotide
agggaagccucauuaauac

SEQ ID NO: 1098141 - RNA, 19 nt, Artificial Sequence
  Description of Artificial Sequence: Synthetic oligonucleotide
guagucaauaaauaccagc

SEQ ID NO: 1098142 - RNA, 19 nt, Artificial Sequence
  Description of Artificial Sequence: Synthetic oligonucleotide
uguuagggagggauaaagg

SEQ ID NO: 1098143 - RNA, 19 nt, Artificial Sequence
  Description of Artificial Sequence: Synthetic oligonucleotide
ugugcaaggauaugaguag

SEQ ID NO: 1098144 - RNA, 19 nt, Artificial Sequence
  Description of Artificial Sequence: Synthetic oligonucleotide
aguauauagucccacggug

SEQ ID NO: 1098145 - RNA, 19 nt, Artificial Sequence
  Description of Artificial Sequence: Synthetic oligonucleotide
uaccaaaugguacagugac

SEQ ID NO: 1098146 - RNA, 19 nt, Artificial Sequence
  Description of Artificial Sequence: Synthetic oligonucleotide
ucuuuuacuggacuagcug

SEQ ID NO: 1098147 - RNA, 19 nt, Artificial Sequence
  Description of Artificial Sequence: Synthetic oligonucleotide
auaagcaauauauauuaaa

SEQ ID NO: 1098148 - RNA, 19 nt, Artificial Sequence
  Description of Artificial Sequence: Synthetic oligonucleotide
ucuacugcugagguaaugg

SEQ ID NO: 1098149 - RNA, 19 nt, Artificial Sequence
  Description of Artificial Sequence: Synthetic oligonucleotide
acgguagucaauaaauacc

SEQ ID NO: 1098150 - RNA, 19 nt, Artificial Sequence
  Description of Artificial Sequence: Synthetic oligonucleotide
uuagaaucuggccuggggu

SEQ ID NO: 1098151 - RNA, 19 nt, Artificial Sequence
  Description of Artificial Sequence: Synthetic oligonucleotide
uuauuuacaaggucuguuc

SEQ ID NO: 1098152 - RNA, 19 nt, Artificial Sequence
  Description of Artificial Sequence: Synthetic oligonucleotide
uggcaucucggccauaacg

SEQ ID NO: 1098153 - RNA, 19 nt, Artificial Sequence
  Description of Artificial Sequence: Synthetic oligonucleotide
agugacuccccuuauggag

SEQ ID NO: 1098154 - RNA, 19 nt, Artificial Sequence
  Description of Artificial Sequence: Synthetic oligonucleotide
cuaccugcuaucuuggccc

SEQ ID NO: 1098155 - RNA, 19 nt, Artificial Sequence
  Description of Artificial Sequence: Synthetic oligonucleotide
agugguuauuuacaagguc

SEQ ID NO: 1098156 - RNA, 19 nt, Artificial Sequence
  Description of Artificial Sequence: Synthetic oligonucleotide
aaagguaaagcguguggca

SEQ ID NO: 1098157 - RNA, 19 nt, Artificial Sequence
  Description of Artificial Sequence: Synthetic oligonucleotide
caagugacuccccuuaugg

SEQ ID NO: 1098158 - RNA, 19 nt, Artificial Sequence
  Description of Artificial Sequence: Synthetic oligonucleotide
uaugaguaguguucggugc

SEQ ID NO: 1098159 - RNA, 19 nt, Artificial Sequence
  Description of Artificial Sequence: Synthetic oligonucleotide
aagcguguggcaucucggc

SEQ ID NO: 1098160 - RNA, 19 nt, Artificial Sequence
  Description of Artificial Sequence: Synthetic oligonucleotide
ugcacgguagucaauaaau

SEQ ID NO: 1098161 - RNA, 19 nt, Artificial Sequence
  Description of Artificial Sequence: Synthetic oligonucleotide
cauugcuuaggucagucag

SEQ ID NO: 1098162 - RNA, 19 nt, Artificial Sequence
  Description of Artificial Sequence: Synthetic oligonucleotide
ugcuaacugagccagcucu

SEQ ID NO: 1098163 - RNA, 19 nt, Artificial Sequence
  Description of Artificial Sequence: Synthetic oligonucleotide
gccucauuaauacagaaug

SEQ ID NO: 1098164 - RNA, 19 nt, Artificial Sequence
  Description of Artificial Sequence: Synthetic oligonucleotide
agcucaaacagucuuggca

SEQ ID NO: 1098165 - RNA, 19 nt, Artificial Sequence
  Description of Artificial Sequence: Synthetic oligonucleotide
cuccuuaucauccugccac

SEQ ID NO: 1098166 - RNA, 19 nt, Artificial Sequence
  Description of Artificial Sequence: Synthetic oligonucleotide
ucaguaaaagggagcagca

SEQ ID NO: 1098167 - RNA, 19 nt, Artificial Sequence
  Description of Artificial Sequence: Synthetic oligonucleotide
guaaaagggagcagcaagg

SEQ ID NO: 1098168 - RNA, 19 nt, Artificial Sequence
  Description of Artificial Sequence: Synthetic oligonucleotide
ugguuauuuacaaggucug

SEQ ID NO: 1098169 - RNA, 19 nt, Artificial Sequence
  Description of Artificial Sequence: Synthetic oligonucleotide
cuuaaggcuguccaugggc

SEQ ID NO: 1098170 - RNA, 19 nt, Artificial Sequence
  Description of Artificial Sequence: Synthetic oligonucleotide
auaugaguaguguucggug

SEQ ID NO: 1098171 - RNA, 19 nt, Artificial Sequence
  Description of Artificial Sequence: Synthetic oligonucleotide
uguucggugcccuuguuca

SEQ ID NO: 1098172 - RNA, 19 nt, Artificial Sequence
  Description of Artificial Sequence: Synthetic oligonucleotide
aauggguauguguuaggga

SEQ ID NO: 1098173 - RNA, 19 nt, Artificial Sequence
  Description of Artificial Sequence: Synthetic oligonucleotide
uguugcucagcaauugcca

SEQ ID NO: 1098174 - RNA, 19 nt, Artificial Sequence
  Description of Artificial Sequence: Synthetic oligonucleotide
uguaucacugaggacagga

SEQ ID NO: 1098175 - RNA, 19 nt, Artificial Sequence
  Description of Artificial Sequence: Synthetic oligonucleotide
gugaauagaaagauagccc

SEQ ID NO: 1098176 - RNA, 19 nt, Artificial Sequence
  Description of Artificial Sequence: Synthetic oligonucleotide
uuuuacuggacuagcugac

SEQ ID NO: 1098177 - RNA, 19 nt, Artificial Sequence
  Description of Artificial Sequence: Synthetic oligonucleotide
gcuuaaaacuccuaagggc

SEQ ID NO: 1098178 - RNA, 19 nt, Artificial Sequence
  Description of Artificial Sequence: Synthetic oligonucleotide
uuauggagcacuguacccc

SEQ ID NO: 1098179 - RNA, 19 nt, Artificial Sequence
  Description of Artificial Sequence: Synthetic oligonucleotide
uuaaggcuguccaugggcu

SEQ ID NO: 1098180 - RNA, 19 nt, Artificial Sequence
  Description of Artificial Sequence: Synthetic oligonucleotide
aggauaugaguaguguucg

SEQ ID NO: 1098181 - RNA, 19 nt, Artificial Sequence
  Description of Artificial Sequence: Synthetic oligonucleotide
guauauagucccacggugg

SEQ ID NO: 1098182 - RNA, 19 nt, Artificial Sequence
  Description of Artificial Sequence: Synthetic oligonucleotide
aaucagaacccuaaaguau

SEQ ID NO: 1098183 - RNA, 19 nt, Artificial Sequence
  Description of Artificial Sequence: Synthetic oligonucleotide
auaaucuccuucaugcguc

SEQ ID NO: 1098184 - RNA, 19 nt, Artificial Sequence
  Description of Artificial Sequence: Synthetic oligonucleotide
uuuacaaggucuguuccca

SEQ ID NO: 1098185 - RNA, 19 nt, Artificial Sequence
  Description of Artificial Sequence: Synthetic oligonucleotide
ugcaguuagccuuccaaca

SEQ ID NO: 1098186 - RNA, 19 nt, Artificial Sequence
  Description of Artificial Sequence: Synthetic oligonucleotide
auuaauacagaaugucaua

SEQ ID NO: 1098187 - RNA, 19 nt, Artificial Sequence
  Description of Artificial Sequence: Synthetic oligonucleotide
uguguugcucagcaauugc

SEQ ID NO: 1098188 - RNA, 19 nt, Artificial Sequence
  Description of Artificial Sequence: Synthetic oligonucleotide
uuaggucagucagagcugg

SEQ ID NO: 1098189 - RNA, 19 nt, Artificial Sequence
  Description of Artificial Sequence: Synthetic oligonucleotide
cucauuaauacagaauguc

SEQ ID NO: 1098190 - RNA, 19 nt, Artificial Sequence
  Description of Artificial Sequence: Synthetic oligonucleotide
uugaugugaauagaaagau

SEQ ID NO: 1098191 - RNA, 19 nt, Artificial Sequence
  Description of Artificial Sequence: Synthetic oligonucleotide
caaagguaaagcguguggc

SEQ ID NO: 1098192 - RNA, 19 nt, Artificial Sequence
  Description of Artificial Sequence: Synthetic oligonucleotide
uccuucaugcgucaucgug

SEQ ID NO: 1098193 - RNA, 19 nt, Artificial Sequence
  Description of Artificial Sequence: Synthetic oligonucleotide
cuuuuacuggacuagcuga

SEQ ID NO: 1098194 - RNA, 19 nt, Artificial Sequence
  Description of Artificial Sequence: Synthetic oligonucleotide
ucgugcugcuaacugagcc

SEQ ID NO: 1098195 - RNA, 19 nt, Artificial Sequence
  Description of Artificial Sequence: Synthetic oligonucleotide
aacacgaaacaaaagguuu

SEQ ID NO: 1098196 - RNA, 19 nt, Artificial Sequence
  Description of Artificial Sequence: Synthetic oligonucleotide
uuacuggacuagcugaccu

SEQ ID NO: 1098197 - RNA, 19 nt, Artificial Sequence
  Description of Artificial Sequence: Synthetic oligonucleotide
cauccugccacaaauguca

SEQ ID NO: 1098198 - RNA, 19 nt, Artificial Sequence
  Description of Artificial Sequence: Synthetic oligonucleotide
gagaguuguaucacugagg

SEQ ID NO: 1098199 - RNA, 19 nt, Artificial Sequence
  Description of Artificial Sequence: Synthetic oligonucleotide
uccccagcgucacacaucc

SEQ ID NO: 1098200 - RNA, 19 nt, Artificial Sequence
  Description of Artificial Sequence: Synthetic oligonucleotide
gugcucauugcuuagguca

SEQ ID NO: 1098201 - RNA, 19 nt, Artificial Sequence
  Description of Artificial Sequence: Synthetic oligonucleotide
uagaaucuggccuggggug

SEQ ID NO: 1098202 - RNA, 19 nt, Artificial Sequence
  Description of Artificial Sequence: Synthetic oligonucleotide
gcuuuaauugcauuucagc

SEQ ID NO: 1098203 - RNA, 19 nt, Artificial Sequence
  Description of Artificial Sequence: Synthetic oligonucleotide
agagcacaacauaaucucc

SEQ ID NO: 1098204 - RNA, 19 nt, Artificial Sequence
  Description of Artificial Sequence: Synthetic oligonucleotide
agccuauugagcaggaagg

SEQ ID NO: 1098205 - RNA, 19 nt, Artificial Sequence
  Description of Artificial Sequence: Synthetic oligonucleotide
augugaauagaaagauagc

SEQ ID NO: 1098206 - RNA, 19 nt, Artificial Sequence
  Description of Artificial Sequence: Synthetic oligonucleotide
cuagcugaccucugggugc

SEQ ID NO: 1098207 - RNA, 19 nt, Artificial Sequence
  Description of Artificial Sequence: Synthetic oligonucleotide
ggaagccucauuaauacag

SEQ ID NO: 1098208 - RNA, 19 nt, Artificial Sequence
  Description of Artificial Sequence: Synthetic oligonucleotide
uuaaaacuccuaagggcaa

SEQ ID NO: 1098209 - RNA, 19 nt, Artificial Sequence
  Description of Artificial Sequence: Synthetic oligonucleotide
uuucuuuuacuggacuagc

SEQ ID NO: 1098210 - RNA, 19 nt, Artificial Sequence
  Description of Artificial Sequence: Synthetic oligonucleotide
aaacacgaaacaaaagguu

SEQ ID NO: 1098211 - RNA, 19 nt, Artificial Sequence
  Description of Artificial Sequence: Synthetic oligonucleotide
cagccuauugagcaggaag

SEQ ID NO: 1098212 - RNA, 19 nt, Artificial Sequence
  Description of Artificial Sequence: Synthetic oligonucleotide
uugcuuaggucagucagag

SEQ ID NO: 1098213 - RNA, 19 nt, Artificial Sequence
  Description of Artificial Sequence: Synthetic oligonucleotide
ccaucaacaguauauaguc

SEQ ID NO: 1098214 - RNA, 19 nt, Artificial Sequence
  Description of Artificial Sequence: Synthetic oligonucleotide
gcuaucuuggcccuuagac

SEQ ID NO: 1098215 - RNA, 19 nt, Artificial Sequence
  Description of Artificial Sequence: Synthetic oligonucleotide
ugcgucaucgugcugcuaa

SEQ ID NO: 1098216 - RNA, 19 nt, Artificial Sequence
  Description of Artificial Sequence: Synthetic oligonucleotide
aaagcguguggcaucucgg

SEQ ID NO: 1098217 - RNA, 19 nt, Artificial Sequence
  Description of Artificial Sequence: Synthetic oligonucleotide
agcguguggcaucucggcc

SEQ ID NO: 1098218 - RNA, 19 nt, Artificial Sequence
  Description of Artificial Sequence: Synthetic oligonucleotide
aggaugaaucuguucagga

SEQ ID NO: 1098219 - RNA, 19 nt, Artificial Sequence
  Description of Artificial Sequence: Synthetic oligonucleotide
auacccuucaccauagcug

SEQ ID NO: 1098220 - RNA, 19 nt, Artificial Sequence
  Description of Artificial Sequence: Synthetic oligonucleotide
uacugcugagguaaugggu

SEQ ID NO: 1098221 - RNA, 19 nt, Artificial Sequence
  Description of Artificial Sequence: Synthetic oligonucleotide
uuaaaaccaucaacaguau

SEQ ID NO: 1098222 - RNA, 19 nt, Artificial Sequence
  Description of Artificial Sequence: Synthetic oligonucleotide
uggcccuuagacuucugag

SEQ ID NO: 1098223 - RNA, 19 nt, Artificial Sequence
  Description of Artificial Sequence: Synthetic oligonucleotide
gaaacacgaaacaaaaggu

SEQ ID NO: 1098224 - RNA, 19 nt, Artificial Sequence
  Description of Artificial Sequence: Synthetic oligonucleotide
caucucggccauaacggcg

SEQ ID NO: 1098225 - RNA, 19 nt, Artificial Sequence
  Description of Artificial Sequence: Synthetic oligonucleotide
cccgaagacaucuucagcc

SEQ ID NO: 1098226 - RNA, 19 nt, Artificial Sequence
  Description of Artificial Sequence: Synthetic oligonucleotide
aggagucuuggucucacug

SEQ ID NO: 1098227 - RNA, 19 nt, Artificial Sequence
  Description of Artificial Sequence: Synthetic oligonucleotide
aagccucauuaauacagaa

SEQ ID NO: 1098228 - RNA, 19 nt, Artificial Sequence
  Description of Artificial Sequence: Synthetic oligonucleotide
ggagaguuguaucacugag

SEQ ID NO: 1098229 - RNA, 19 nt, Artificial Sequence
  Description of Artificial Sequence: Synthetic oligonucleotide
ugaccaugccuggucaugg

SEQ ID NO: 1098230 - RNA, 19 nt, Artificial Sequence
  Description of Artificial Sequence: Synthetic oligonucleotide
agguaaagcguguggcauc

SEQ ID NO: 1098231 - RNA, 19 nt, Artificial Sequence
  Description of Artificial Sequence: Synthetic oligonucleotide
uaaaaccaucaacaguaua

SEQ ID NO: 1098232 - RNA, 19 nt, Artificial Sequence
  Description of Artificial Sequence: Synthetic oligonucleotide
aucucggccauaacggcgc

SEQ ID NO: 1098233 - RNA, 19 nt, Artificial Sequence
  Description of Artificial Sequence: Synthetic oligonucleotide
agucuuggcagcaggagag

SEQ ID NO: 1098234 - RNA, 19 nt, Artificial Sequence
  Description of Artificial Sequence: Synthetic oligonucleotide
aggucagucagagcugggc

SEQ ID NO: 1098235 - RNA, 19 nt, Artificial Sequence
  Description of Artificial Sequence: Synthetic oligonucleotide
ggugccaguaugcacugcg

SEQ ID NO: 1098236 - RNA, 19 nt, Artificial Sequence
  Description of Artificial Sequence: Synthetic oligonucleotide
aagguaaagcguguggcau

SEQ ID NO: 1098237 - RNA, 19 nt, Artificial Sequence
  Description of Artificial Sequence: Synthetic oligonucleotide
caguuagccuuccaacagg

SEQ ID NO: 1098238 - RNA, 19 nt, Artificial Sequence
  Description of Artificial Sequence: Synthetic oligonucleotide
cauaacggcgcaaggagca

SEQ ID NO: 1098239 - RNA, 19 nt, Artificial Sequence
  Description of Artificial Sequence: Synthetic oligonucleotide
aauugcauuucagcaggga

SEQ ID NO: 1098240 - RNA, 19 nt, Artificial Sequence
  Description of Artificial Sequence: Synthetic oligonucleotide
ucauccugccacaaauguc

SEQ ID NO: 1098241 - RNA, 19 nt, Artificial Sequence
  Description of Artificial Sequence: Synthetic oligonucleotide
agauagcccuucugcacgg

SEQ ID NO: 1098242 - RNA, 19 nt, Artificial Sequence
  Description of Artificial Sequence: Synthetic oligonucleotide
uuuacuggacuagcugacc

SEQ ID NO: 1098243 - RNA, 19 nt, Artificial Sequence
  Description of Artificial Sequence: Synthetic oligonucleotide
uauguguuagggagggaua

SEQ ID NO: 1098244 - RNA, 19 nt, Artificial Sequence
  Description of Artificial Sequence: Synthetic oligonucleotide
cuuaggucagucagagcug

SEQ ID NO: 1098245 - RNA, 19 nt, Artificial Sequence
  Description of Artificial Sequence: Synthetic oligonucleotide
guguuagggagggauaaag

SEQ ID NO: 1098246 - RNA, 19 nt, Artificial Sequence
  Description of Artificial Sequence: Synthetic oligonucleotide
uauagucccacgguggcuc

SEQ ID NO: 1098247 - RNA, 19 nt, Artificial Sequence
  Description of Artificial Sequence: Synthetic oligonucleotide
gcuuaggucagucagagcu

SEQ ID NO: 1098248 - RNA, 19 nt, Artificial Sequence
  Description of Artificial Sequence: Synthetic oligonucleotide
gucaucgugcugcuaacug

SEQ ID NO: 1098249 - RNA, 19 nt, Artificial Sequence
  Description of Artificial Sequence: Synthetic oligonucleotide
acacgaaacaaaagguuug

SEQ ID NO: 1098250 - RNA, 19 nt, Artificial Sequence
  Description of Artificial Sequence: Synthetic oligonucleotide
aagacagaagcuaccugcu

SEQ ID NO: 1098251 - RNA, 19 nt, Artificial Sequence
  Description of Artificial Sequence: Synthetic oligonucleotide
ugucugaaagguguagagu

SEQ ID NO: 1098252 - RNA, 19 nt, Artificial Sequence
  Description of Artificial Sequence: Synthetic oligonucleotide
agugacauuuggguccuuc

SEQ ID NO: 1098253 - RNA, 19 nt, Artificial Sequence
  Description of Artificial Sequence: Synthetic oligonucleotide
gguacagugacauuugggu

SEQ ID NO: 1098254 - RNA, 19 nt, Artificial Sequence
  Description of Artificial Sequence: Synthetic oligonucleotide
cuguggcuuaaguaggaug

SEQ ID NO: 1098255 - RNA, 19 nt, Artificial Sequence
  Description of Artificial Sequence: Synthetic oligonucleotide
uuggcccuuagacuucuga

SEQ ID NO: 1098256 - RNA, 19 nt, Artificial Sequence
  Description of Artificial Sequence: Synthetic oligonucleotide
ggcccuuagacuucugagg

SEQ ID NO: 1098257 - RNA, 19 nt, Artificial Sequence
  Description of Artificial Sequence: Synthetic oligonucleotide
agaaucuggccuggggugg

SEQ ID NO: 1098258 - RNA, 19 nt, Artificial Sequence
  Description of Artificial Sequence: Synthetic oligonucleotide
ucauugcuuaggucaguca

SEQ ID NO: 1098259 - RNA, 19 nt, Artificial Sequence
  Description of Artificial Sequence: Synthetic oligonucleotide
ggucuguucccacaaauca

SEQ ID NO: 1098260 - RNA, 19 nt, Artificial Sequence
  Description of Artificial Sequence: Synthetic oligonucleotide
ucugggugcucauugcuua

SEQ ID NO: 1098261 - RNA, 19 nt, Artificial Sequence
  Description of Artificial Sequence: Synthetic oligonucleotide
uuguguugcucagcaauug

SEQ ID NO: 1098262 - RNA, 19 nt, Artificial Sequence
  Description of Artificial Sequence: Synthetic oligonucleotide
gugguuauuuacaaggucu

SEQ ID NO: 1098263 - RNA, 19 nt, Artificial Sequence
  Description of Artificial Sequence: Synthetic oligonucleotide
gccauaacggcgcaaggag

SEQ ID NO: 1098264 - RNA, 19 nt, Artificial Sequence
  Description of Artificial Sequence: Synthetic oligonucleotide
aggagaguuguaucacuga

SEQ ID NO: 1098265 - RNA, 19 nt, Artificial Sequence
  Description of Artificial Sequence: Synthetic oligonucleotide
ucagaacccuaaaguauua

SEQ ID NO: 1098266 - RNA, 19 nt, Artificial Sequence
  Description of Artificial Sequence: Synthetic oligonucleotide
gcaguuagccuuccaacag

SEQ ID NO: 1098267 - RNA, 19 nt, Artificial Sequence
  Description of Artificial Sequence: Synthetic oligonucleotide
cgaaacaaaagguuugaug

SEQ ID NO: 1098268 - RNA, 19 nt, Artificial Sequence
  Description of Artificial Sequence: Synthetic oligonucleotide
auccugcccgccucaaagg

SEQ ID NO: 1098269 - RNA, 19 nt, Artificial Sequence
  Description of Artificial Sequence: Synthetic oligonucleotide
gucucuguuggcccagaag

SEQ ID NO: 1098270 - RNA, 19 nt, Artificial Sequence
  Description of Artificial Sequence: Synthetic oligonucleotide
guguugcucagcaauugcc

SEQ ID NO: 1098271 - RNA, 19 nt, Artificial Sequence
  Description of Artificial Sequence: Synthetic oligonucleotide
uccuuaucauccugccaca

SEQ ID NO: 1098272 - RNA, 19 nt, Artificial Sequence
  Description of Artificial Sequence: Synthetic oligonucleotide
ggagucuuggucucacugc

SEQ ID NO: 1098273 - RNA, 19 nt, Artificial Sequence
  Description of Artificial Sequence: Synthetic oligonucleotide
aggucuguucccacaaauc

SEQ ID NO: 1098274 - RNA, 19 nt, Artificial Sequence
  Description of Artificial Sequence: Synthetic oligonucleotide
cuccuaagggcaaggcuac

SEQ ID NO: 1098275 - RNA, 19 nt, Artificial Sequence
  Description of Artificial Sequence: Synthetic oligonucleotide
uaagggcaaggcuaccaaa

SEQ ID NO: 1098276 - RNA, 19 nt, Artificial Sequence
  Description of Artificial Sequence: Synthetic oligonucleotide
aacggcgcaaggagcagag

SEQ ID NO: 1098277 - RNA, 19 nt, Artificial Sequence
  Description of Artificial Sequence: Synthetic oligonucleotide
augucaacagugguuauuu

SEQ ID NO: 1098278 - RNA, 19 nt, Artificial Sequence
  Description of Artificial Sequence: Synthetic oligonucleotide
gccaguaugcacugcgggg

SEQ ID NO: 1098279 - RNA, 19 nt, Artificial Sequence
  Description of Artificial Sequence: Synthetic oligonucleotide
gugugcaaggauaugagua

SEQ ID NO: 1098280 - RNA, 19 nt, Artificial Sequence
  Description of Artificial Sequence: Synthetic oligonucleotide
cucugcuuaaaacuccuaa

SEQ ID NO: 1098281 - RNA, 19 nt, Artificial Sequence
  Description of Artificial Sequence: Synthetic oligonucleotide
gaagccucauuaauacaga

SEQ ID NO: 1098282 - RNA, 19 nt, Artificial Sequence
  Description of Artificial Sequence: Synthetic oligonucleotide
uucagccuauugagcagga

SEQ ID NO: 1098283 - RNA, 19 nt, Artificial Sequence
  Description of Artificial Sequence: Synthetic oligonucleotide
ggcuuaaguaggaugaauc

SEQ ID NO: 1098284 - RNA, 19 nt, Artificial Sequence
  Description of Artificial Sequence: Synthetic oligonucleotide
ugcuaucuuggcccuuaga

SEQ ID NO: 1098285 - RNA, 19 nt, Artificial Sequence
  Description of Artificial Sequence: Synthetic oligonucleotide
uaggucagucagagcuggg

SEQ ID NO: 1098286 - RNA, 19 nt, Artificial Sequence
  Description of Artificial Sequence: Synthetic oligonucleotide
aguuagccuuccaacaggu

SEQ ID NO: 1098287 - RNA, 19 nt, Artificial Sequence
  Description of Artificial Sequence: Synthetic oligonucleotide
uacuggacuagcugaccuc

SEQ ID NO: 1098288 - RNA, 19 nt, Artificial Sequence
  Description of Artificial Sequence: Synthetic oligonucleotide
ggccgagucaccucccugg

SEQ ID NO: 1098289 - RNA, 19 nt, Artificial Sequence
  Description of Artificial Sequence: Synthetic oligonucleotide
gaguuguaucacugaggac

SEQ ID NO: 1098290 - RNA, 19 nt, Artificial Sequence
  Description of Artificial Sequence: Synthetic oligonucleotide
auguguuagggagggauaa

SEQ ID NO: 1098291 - RNA, 19 nt, Artificial Sequence
  Description of Artificial Sequence: Synthetic oligonucleotide
gacaggaacggcugcccuc

SEQ ID NO: 1098292 - RNA, 19 nt, Artificial Sequence
  Description of Artificial Sequence: Synthetic oligonucleotide
uaaugggugccccgcccga

SEQ ID NO: 1098293 - RNA, 19 nt, Artificial Sequence
  Description of Artificial Sequence: Synthetic oligonucleotide
guaguguucggugcccuug

SEQ ID NO: 1098294 - RNA, 19 nt, Artificial Sequence
  Description of Artificial Sequence: Synthetic oligonucleotide
ucugcacgguagucaauaa

SEQ ID NO: 1098295 - RNA, 19 nt, Artificial Sequence
  Description of Artificial Sequence: Synthetic oligonucleotide
ccgccucaaagguaaagcg

SEQ ID NO: 1098296 - RNA, 19 nt, Artificial Sequence
  Description of Artificial Sequence: Synthetic oligonucleotide
agccuuccaacagguggcc

SEQ ID NO: 1098297 - RNA, 19 nt, Artificial Sequence
  Description of Artificial Sequence: Synthetic oligonucleotide
ccagaagacagaagcuacc

SEQ ID NO: 1098298 - RNA, 19 nt, Artificial Sequence
  Description of Artificial Sequence: Synthetic oligonucleotide
ugccuggucauggaauuaa

SEQ ID NO: 1098299 - RNA, 19 nt, Artificial Sequence
  Description of Artificial Sequence: Synthetic oligonucleotide
acaggaacggcugcccucu

SEQ ID NO: 1098300 - RNA, 19 nt, Artificial Sequence
  Description of Artificial Sequence: Synthetic oligonucleotide
gagcacaacauaaucuccu

SEQ ID NO: 1098301 - RNA, 19 nt, Artificial Sequence
  Description of Artificial Sequence: Synthetic oligonucleotide
ggaacggcugcccucuuac

SEQ ID NO: 1098302 - RNA, 19 nt, Artificial Sequence
  Description of Artificial Sequence: Synthetic oligonucleotide
augucauaagcaauauaua

SEQ ID NO: 1098303 - RNA, 19 nt, Artificial Sequence
  Description of Artificial Sequence: Synthetic oligonucleotide
agaagcuaccugcuaucuu

SEQ ID NO: 1098304 - RNA, 19 nt, Artificial Sequence
  Description of Artificial Sequence: Synthetic oligonucleotide
cccagaagacagaagcuac

SEQ ID NO: 1098305 - RNA, 19 nt, Artificial Sequence
  Description of Artificial Sequence: Synthetic oligonucleotide
gucauaagcaauauauauu

SEQ ID NO: 1098306 - RNA, 19 nt, Artificial Sequence
  Description of Artificial Sequence: Synthetic oligonucleotide
uggcuuaaguaggaugaau

SEQ ID NO: 1098307 - RNA, 19 nt, Artificial Sequence
  Description of Artificial Sequence: Synthetic oligonucleotide
gcccuuagacuucugagga

SEQ ID NO: 1098308 - RNA, 19 nt, Artificial Sequence
  Description of Artificial Sequence: Synthetic oligonucleotide
ugcuuaggucagucagagc

SEQ ID NO: 1098309 - RNA, 19 nt, Artificial Sequence
  Description of Artificial Sequence: Synthetic oligonucleotide
uuguaucacugaggacagg

SEQ ID NO: 1098310 - RNA, 19 nt, Artificial Sequence
  Description of Artificial Sequence: Synthetic oligonucleotide
uguguuagggagggauaaa

SEQ ID NO: 1098311 - RNA, 19 nt, Artificial Sequence
  Description of Artificial Sequence: Synthetic oligonucleotide
cuuccaacagguggcccag

SEQ ID NO: 1098312 - RNA, 19 nt, Artificial Sequence
  Description of Artificial Sequence: Synthetic oligonucleotide
cauacccuucaccauagcu

SEQ ID NO: 1098313 - RNA, 19 nt, Artificial Sequence
  Description of Artificial Sequence: Synthetic oligonucleotide
uugggccccucugggaggg

SEQ ID NO: 1098314 - RNA, 19 nt, Artificial Sequence
  Description of Artificial Sequence: Synthetic oligonucleotide
cuuaucauccugccacaaa

SEQ ID NO: 1098315 - RNA, 19 nt, Artificial Sequence
  Description of Artificial Sequence: Synthetic oligonucleotide
cagagaggccacgagacga

SEQ ID NO: 1098316 - RNA, 19 nt, Artificial Sequence
  Description of Artificial Sequence: Synthetic oligonucleotide
auaacggcgcaaggagcag

SEQ ID NO: 1098317 - RNA, 19 nt, Artificial Sequence
  Description of Artificial Sequence: Synthetic oligonucleotide
ggcgcaaggagcagagagg

SEQ ID NO: 1098318 - RNA, 19 nt, Artificial Sequence
  Description of Artificial Sequence: Synthetic oligonucleotide
ccauaacggcgcaaggagc

SEQ ID NO: 1098319 - RNA, 19 nt, Artificial Sequence
  Description of Artificial Sequence: Synthetic oligonucleotide
guucggugcccuuguucag

SEQ ID NO: 1098320 - RNA, 19 nt, Artificial Sequence
  Description of Artificial Sequence: Synthetic oligonucleotide
auauagucccacgguggcu

SEQ ID NO: 1098321 - RNA, 19 nt, Artificial Sequence
  Description of Artificial Sequence: Synthetic oligonucleotide
cuaagggcaaggcuaccaa

SEQ ID NO: 1098322 - RNA, 19 nt, Artificial Sequence
  Description of Artificial Sequence: Synthetic oligonucleotide
agccucauuaauacagaau

SEQ ID NO: 1098323 - RNA, 19 nt, Artificial Sequence
  Description of Artificial Sequence: Synthetic oligonucleotide
uaacggcgcaaggagcaga

SEQ ID NO: 1098324 - RNA, 19 nt, Artificial Sequence
  Description of Artificial Sequence: Synthetic oligonucleotide
uggccgagucaccucccug

SEQ ID NO: 1098325 - RNA, 19 nt, Artificial Sequence
  Description of Artificial Sequence: Synthetic oligonucleotide
ugcugcuaacugagccagc

SEQ ID NO: 1098326 - RNA, 19 nt, Artificial Sequence
  Description of Artificial Sequence: Synthetic oligonucleotide
cccagcgucacacauccug

SEQ ID NO: 1098327 - RNA, 19 nt, Artificial Sequence
  Description of Artificial Sequence: Synthetic oligonucleotide
aggccacgagacgagcuuc

SEQ ID NO: 1098328 - RNA, 19 nt, Artificial Sequence
  Description of Artificial Sequence: Synthetic oligonucleotide
gugccaguaugcacugcgg

SEQ ID NO: 1098329 - RNA, 19 nt, Artificial Sequence
  Description of Artificial Sequence: Synthetic oligonucleotide
uucaugcgucaucgugcug

SEQ ID NO: 1098330 - RNA, 19 nt, Artificial Sequence
  Description of Artificial Sequence: Synthetic oligonucleotide
ugggugccccgcccgaaga

SEQ ID NO: 1098331 - RNA, 19 nt, Artificial Sequence
  Description of Artificial Sequence: Synthetic oligonucleotide
gcaagugacuccccuuaug

SEQ ID NO: 1098332 - RNA, 19 nt, Artificial Sequence
  Description of Artificial Sequence: Synthetic oligonucleotide
acuccccuuauggagcacu

SEQ ID NO: 1098333 - RNA, 19 nt, Artificial Sequence
  Description of Artificial Sequence: Synthetic oligonucleotide
augggugccccgcccgaag

SEQ ID NO: 1098334 - RNA, 19 nt, Artificial Sequence
  Description of Artificial Sequence: Synthetic oligonucleotide
uaccugcuaucuuggcccu

SEQ ID NO: 1098335 - RNA, 19 nt, Artificial Sequence
  Description of Artificial Sequence: Synthetic oligonucleotide
caguauauagucccacggu

SEQ ID NO: 1098336 - RNA, 19 nt, Artificial Sequence
  Description of Artificial Sequence: Synthetic oligonucleotide
ugggagggagccuccuuau

SEQ ID NO: 1098337 - RNA, 19 nt, Artificial Sequence
  Description of Artificial Sequence: Synthetic oligonucleotide
acgaaacaaaagguuugau

SEQ ID NO: 1098338 - RNA, 19 nt, Artificial Sequence
  Description of Artificial Sequence: Synthetic oligonucleotide
ugggcccauuucuuuuacu

SEQ ID NO: 1098339 - RNA, 19 nt, Artificial Sequence
  Description of Artificial Sequence: Synthetic oligonucleotide
auuucagcagggagccuca

SEQ ID NO: 1098340 - RNA, 19 nt, Artificial Sequence
  Description of Artificial Sequence: Synthetic oligonucleotide
caaggauaugaguaguguu

SEQ ID NO: 1098341 - RNA, 19 nt, Artificial Sequence
  Description of Artificial Sequence: Synthetic oligonucleotide
cagcaauugccaggguggc

SEQ ID NO: 1098342 - RNA, 19 nt, Artificial Sequence
  Description of Artificial Sequence: Synthetic oligonucleotide
gcugcaguuagccuuccaa

SEQ ID NO: 1098343 - RNA, 19 nt, Artificial Sequence
  Description of Artificial Sequence: Synthetic oligonucleotide
gcaucucggccauaacggc

SEQ ID NO: 1098344 - RNA, 19 nt, Artificial Sequence
  Description of Artificial Sequence: Synthetic oligonucleotide
gaagacaucuucagccuau

SEQ ID NO: 1098345 - RNA, 19 nt, Artificial Sequence
  Description of Artificial Sequence: Synthetic oligonucleotide
cugcccgccucaaagguaa

SEQ ID NO: 1098346 - RNA, 19 nt, Artificial Sequence
  Description of Artificial Sequence: Synthetic oligonucleotide
guuagccuuccaacaggug

SEQ ID NO: 1098347 - RNA, 19 nt, Artificial Sequence
  Description of Artificial Sequence: Synthetic oligonucleotide
gguggcacugugaacccgc

SEQ ID NO: 1098348 - RNA, 19 nt, Artificial Sequence
  Description of Artificial Sequence: Synthetic oligonucleotide
caccagucccagcugucac

SEQ ID NO: 1098349 - RNA, 19 nt, Artificial Sequence
  Description of Artificial Sequence: Synthetic oligonucleotide
cuucaugcgucaucgugcu

SEQ ID NO: 1098350 - RNA, 19 nt, Artificial Sequence
  Description of Artificial Sequence: Synthetic oligonucleotide
aguaguguucggugcccuu

SEQ ID NO: 1098351 - RNA, 19 nt, Artificial Sequence
  Description of Artificial Sequence: Synthetic oligonucleotide
gcugguaaaucugcucccc

SEQ ID NO: 1098352 - RNA, 19 nt, Artificial Sequence
  Description of Artificial Sequence: Synthetic oligonucleotide
ggcuggccgagucaccucc

SEQ ID NO: 1098353 - RNA, 19 nt, Artificial Sequence
  Description of Artificial Sequence: Synthetic oligonucleotide
ggugcucauugcuuagguc

SEQ ID NO: 1098354 - RNA, 19 nt, Artificial Sequence
  Description of Artificial Sequence: Synthetic oligonucleotide
cugggcccauuucuuuuac

SEQ ID NO: 1098355 - RNA, 19 nt, Artificial Sequence
  Description of Artificial Sequence: Synthetic oligonucleotide
cuggacuagcugaccucug

SEQ ID NO: 1098356 - RNA, 19 nt, Artificial Sequence
  Description of Artificial Sequence: Synthetic oligonucleotide
ccuuaaggcuguccauggg

SEQ ID NO: 1098357 - RNA, 19 nt, Artificial Sequence
  Description of Artificial Sequence: Synthetic oligonucleotide
agggcaagugacuccccuu

SEQ ID NO: 1098358 - RNA, 19 nt, Artificial Sequence
  Description of Artificial Sequence: Synthetic oligonucleotide
gaccaugccuggucaugga

SEQ ID NO: 1098359 - RNA, 19 nt, Artificial Sequence
  Description of Artificial Sequence: Synthetic oligonucleotide
ucucggccauaacggcgca

SEQ ID NO: 1098360 - RNA, 19 nt, Artificial Sequence
  Description of Artificial Sequence: Synthetic oligonucleotide
uccuaagggcaaggcuacc

SEQ ID NO: 1098361 - RNA, 19 nt, Artificial Sequence
  Description of Artificial Sequence: Synthetic oligonucleotide
aaugggugccccgcccgaa

SEQ ID NO: 1098362 - RNA, 19 nt, Artificial Sequence
  Description of Artificial Sequence: Synthetic oligonucleotide
ucagccuauugagcaggaa

SEQ ID NO: 1098363 - RNA, 19 nt, Artificial Sequence
  Description of Artificial Sequence: Synthetic oligonucleotide
guaucacugaggacaggaa

SEQ ID NO: 1098364 - RNA, 19 nt, Artificial Sequence
  Description of Artificial Sequence: Synthetic oligonucleotide
cugcacgguagucaauaaa

SEQ ID NO: 1098365 - RNA, 19 nt, Artificial Sequence
  Description of Artificial Sequence: Synthetic oligonucleotide
gcguguggcaucucggcca

SEQ ID NO: 1098366 - RNA, 19 nt, Artificial Sequence
  Description of Artificial Sequence: Synthetic oligonucleotide
gcuaacugagccagcucug

SEQ ID NO: 1098367 - RNA, 19 nt, Artificial Sequence
  Description of Artificial Sequence: Synthetic oligonucleotide
gcccgaagacaucuucagc

SEQ ID NO: 1098368 - RNA, 19 nt, Artificial Sequence
  Description of Artificial Sequence: Synthetic oligonucleotide
cggcgcaaggagcagagag

SEQ ID NO: 1098369 - RNA, 19 nt, Artificial Sequence
  Description of Artificial Sequence: Synthetic oligonucleotide
gagcccgcagacagcacca

SEQ ID NO: 1098370 - RNA, 19 nt, Artificial Sequence
  Description of Artificial Sequence: Synthetic oligonucleotide
ggccauaacggcgcaagga

SEQ ID NO: 1098371 - RNA, 19 nt, Artificial Sequence
  Description of Artificial Sequence: Synthetic oligonucleotide
aggaacggcugcccucuua

SEQ ID NO: 1098372 - RNA, 19 nt, Artificial Sequence
  Description of Artificial Sequence: Synthetic oligonucleotide
caugccuggucauggaauu

SEQ ID NO: 1098373 - RNA, 19 nt, Artificial Sequence
  Description of Artificial Sequence: Synthetic oligonucleotide
gugggugugcaaggauaug

SEQ ID NO: 1098374 - RNA, 19 nt, Artificial Sequence
  Description of Artificial Sequence: Synthetic oligonucleotide
aguguucggugcccuuguu

SEQ ID NO: 1098375 - RNA, 19 nt, Artificial Sequence
  Description of Artificial Sequence: Synthetic oligonucleotide
cauuguggugggugugcaa

SEQ ID NO: 1098376 - RNA, 19 nt, Artificial Sequence
  Description of Artificial Sequence: Synthetic oligonucleotide
guggcaucucggccauaac

SEQ ID NO: 1098377 - RNA, 19 nt, Artificial Sequence
  Description of Artificial Sequence: Synthetic oligonucleotide
guggcuuaaguaggaugaa

SEQ ID NO: 1098378 - RNA, 19 nt, Artificial Sequence
  Description of Artificial Sequence: Synthetic oligonucleotide
gccuauugagcaggaagga

SEQ ID NO: 1098379 - RNA, 19 nt, Artificial Sequence
  Description of Artificial Sequence: Synthetic oligonucleotide
gaggccacgagacgagcuu

SEQ ID NO: 1098380 - RNA, 19 nt, Artificial Sequence
  Description of Artificial Sequence: Synthetic oligonucleotide
cgcccgaagacaucuucag

SEQ ID NO: 1098381 - RNA, 19 nt, Artificial Sequence
  Description of Artificial Sequence: Synthetic oligonucleotide
gagucaccucccuggcucu

SEQ ID NO: 1098382 - RNA, 19 nt, Artificial Sequence
  Description of Artificial Sequence: Synthetic oligonucleotide
ugaccucugggugcucauu

SEQ ID NO: 1098383 - RNA, 19 nt, Artificial Sequence
  Description of Artificial Sequence: Synthetic oligonucleotide
gguggcccagcaaucaucu

SEQ ID NO: 1098384 - RNA, 19 nt, Artificial Sequence
  Description of Artificial Sequence: Synthetic oligonucleotide
gaacggcugcccucuuacu

SEQ ID NO: 1098385 - RNA, 19 nt, Artificial Sequence
  Description of Artificial Sequence: Synthetic oligonucleotide
ccuaagggcaaggcuacca

SEQ ID NO: 1098386 - RNA, 19 nt, Artificial Sequence
  Description of Artificial Sequence: Synthetic oligonucleotide
aggacccgcuuguguugcu

SEQ ID NO: 1098387 - RNA, 19 nt, Artificial Sequence
  Description of Artificial Sequence: Synthetic oligonucleotide
cuggcagcucaaacagucu

SEQ ID NO: 1098388 - RNA, 19 nt, Artificial Sequence
  Description of Artificial Sequence: Synthetic oligonucleotide
ggguggcacugugaacccg

SEQ ID NO: 1098389 - RNA, 19 nt, Artificial Sequence
  Description of Artificial Sequence: Synthetic oligonucleotide
gcgucaucgugcugcuaac

SEQ ID NO: 1098390 - RNA, 19 nt, Artificial Sequence
  Description of Artificial Sequence: Synthetic oligonucleotide
caugcgucaucgugcugcu

SEQ ID NO: 1098391 - RNA, 19 nt, Artificial Sequence
  Description of Artificial Sequence: Synthetic oligonucleotide
ugccccgcccgaagacauc

SEQ ID NO: 1098392 - RNA, 19 nt, Artificial Sequence
  Description of Artificial Sequence: Synthetic oligonucleotide
ccgcuuguguugcucagca

SEQ ID NO: 1098393 - RNA, 19 nt, Artificial Sequence
  Description of Artificial Sequence: Synthetic oligonucleotide
caaaugguacagugacauu

SEQ ID NO: 1098394 - RNA, 19 nt, Artificial Sequence
  Description of Artificial Sequence: Synthetic oligonucleotide
gucccacgguggcuccagc

SEQ ID NO: 1098395 - RNA, 19 nt, Artificial Sequence
  Description of Artificial Sequence: Synthetic oligonucleotide
gcaaggcuaccaaauggua

SEQ ID NO: 1098396 - RNA, 19 nt, Artificial Sequence
  Description of Artificial Sequence: Synthetic oligonucleotide
cagggcaagugacuccccu

SEQ ID NO: 1098397 - RNA, 19 nt, Artificial Sequence
  Description of Artificial Sequence: Synthetic oligonucleotide
gacuccccuuauggagcac

SEQ ID NO: 1098398 - RNA, 19 nt, Artificial Sequence
  Description of Artificial Sequence: Synthetic oligonucleotide
ccauacccuucaccauagc

SEQ ID NO: 1098399 - RNA, 19 nt, Artificial Sequence
  Description of Artificial Sequence: Synthetic oligonucleotide
gccugggcugccccauacc

SEQ ID NO: 1098400 - RNA, 19 nt, Artificial Sequence
  Description of Artificial Sequence: Synthetic oligonucleotide
ccuccuuaucauccugcca

SEQ ID NO: 1098401 - RNA, 19 nt, Artificial Sequence
  Description of Artificial Sequence: Synthetic oligonucleotide
ccgaagacaucuucagccu

SEQ ID NO: 1098402 - RNA, 19 nt, Artificial Sequence
  Description of Artificial Sequence: Synthetic oligonucleotide
ccgcccgaagacaucuuca

SEQ ID NO: 1098403 - RNA, 19 nt, Artificial Sequence
  Description of Artificial Sequence: Synthetic oligonucleotide
ccccauacccuucaccaua

SEQ ID NO: 1098404 - RNA, 19 nt, Artificial Sequence
  Description of Artificial Sequence: Synthetic oligonucleotide
agcugaccucugggugcuc

SEQ ID NO: 1098405 - RNA, 19 nt, Artificial Sequence
  Description of Artificial Sequence: Synthetic oligonucleotide
gccagccaugugcugaggu

SEQ ID NO: 1098406 - RNA, 19 nt, Artificial Sequence
  Description of Artificial Sequence: Synthetic oligonucleotide
acggcgcaaggagcagaga

SEQ ID NO: 1098407 - RNA, 19 nt, Artificial Sequence
  Description of Artificial Sequence: Synthetic oligonucleotide
cagcaggacccgcuugugu

SEQ ID NO: 1098408 - RNA, 19 nt, Artificial Sequence
  Description of Artificial Sequence: Synthetic oligonucleotide
gcugccccauacccuucac

SEQ ID NO: 1098409 - RNA, 19 nt, Artificial Sequence
  Description of Artificial Sequence: Synthetic oligonucleotide
ggccacgagacgagcuuca

SEQ ID NO: 1098410 - RNA, 19 nt, Artificial Sequence
  Description of Artificial Sequence: Synthetic oligonucleotide
ggacccgcuuguguugcuc

SEQ ID NO: 1098411 - RNA, 19 nt, Artificial Sequence
  Description of Artificial Sequence: Synthetic oligonucleotide
agucaccucccuggcucuu

SEQ ID NO: 1098412 - RNA, 19 nt, Artificial Sequence
  Description of Artificial Sequence: Synthetic oligonucleotide
ccaugccuggucauggaau

SEQ ID NO: 1098413 - RNA, 19 nt, Artificial Sequence
  Description of Artificial Sequence: Synthetic oligonucleotide
ccaacagguggcccagcaa

SEQ ID NO: 1098414 - RNA, 19 nt, Artificial Sequence
  Description of Artificial Sequence: Synthetic oligonucleotide
gcaauccugcugcagccuu

SEQ ID NO: 1098415 - RNA, 19 nt, Artificial Sequence
  Description of Artificial Sequence: Synthetic oligonucleotide
cuggccgagucaccucccu

SEQ ID NO: 1098416 - RNA, 19 nt, Artificial Sequence
  Description of Artificial Sequence: Synthetic oligonucleotide
ccugcuaucuuggcccuua

SEQ ID NO: 1098417 - RNA, 19 nt, Artificial Sequence
  Description of Artificial Sequence: Synthetic oligonucleotide
ccugugauauggugccagu

SEQ ID NO: 1098418 - RNA, 19 nt, Artificial Sequence
  Description of Artificial Sequence: Synthetic oligonucleotide
ggcuaccaaaugguacagu

SEQ ID NO: 1098419 - RNA, 19 nt, Artificial Sequence
  Description of Artificial Sequence: Synthetic oligonucleotide
guggcacugugaacccgcu

SEQ ID NO: 1098420 - RNA, 19 nt, Artificial Sequence
  Description of Artificial Sequence: Synthetic oligonucleotide
cucggccauaacggcgcaa

SEQ ID NO: 1098421 - RNA, 19 nt, Artificial Sequence
  Description of Artificial Sequence: Synthetic oligonucleotide
gcccuucugcacgguaguc

SEQ ID NO: 1098422 - RNA, 19 nt, Artificial Sequence
  Description of Artificial Sequence: Synthetic oligonucleotide
gugccccgcccgaagacau

SEQ ID NO: 1098423 - RNA, 19 nt, Artificial Sequence
  Description of Artificial Sequence: Synthetic oligonucleotide
ccacagcaauccugcugca

SEQ ID NO: 1098424 - RNA, 19 nt, Artificial Sequence
  Description of Artificial Sequence: Synthetic oligonucleotide
gcuguggcuuaaguaggau

SEQ ID NO: 1098425 - RNA, 19 nt, Artificial Sequence
  Description of Artificial Sequence: Synthetic oligonucleotide
augcgucaucgugcugcua

SEQ ID NO: 1098426 - RNA, 19 nt, Artificial Sequence
  Description of Artificial Sequence: Synthetic oligonucleotide
ccucaugcucagguggugu

SEQ ID NO: 1098427 - RNA, 19 nt, Artificial Sequence
  Description of Artificial Sequence: Synthetic oligonucleotide
ccgcagacagcaccaggcu

SEQ ID NO: 1098428 - RNA, 19 nt, Artificial Sequence
  Description of Artificial Sequence: Synthetic oligonucleotide
cucucgaucugggcccauu

SEQ ID NO: 1098429 - RNA, 19 nt, Artificial Sequence
  Description of Artificial Sequence: Synthetic oligonucleotide
gcucagcaauugccagggu

SEQ ID NO: 1098430 - RNA, 19 nt, Artificial Sequence
  Description of Artificial Sequence: Synthetic oligonucleotide
ccucuacugcugagguaau

SEQ ID NO: 1098431 - RNA, 19 nt, Artificial Sequence
  Description of Artificial Sequence: Synthetic oligonucleotide
cgucaucgugcugcuaacu

SEQ ID NO: 1098432 - RNA, 19 nt, Artificial Sequence
  Description of Artificial Sequence: Synthetic oligonucleotide
caggaacggcugcccucuu

SEQ ID NO: 1098433 - RNA, 19 nt, Artificial Sequence
  Description of Artificial Sequence: Synthetic oligonucleotide
cagugacauuuggguccuu

SEQ ID NO: 1098434 - RNA, 19 nt, Artificial Sequence
  Description of Artificial Sequence: Synthetic oligonucleotide
ccccagcgucacacauccu

SEQ ID NO: 1098435 - RNA, 19 nt, Artificial Sequence
  Description of Artificial Sequence: Synthetic oligonucleotide
ccucucgaucugggcccau

SEQ ID NO: 1098436 - RNA, 19 nt, Artificial Sequence
  Description of Artificial Sequence: Synthetic oligonucleotide
aguaacaacacucaggaca

SEQ ID NO: 1098437 - RNA, 19 nt, Artificial Sequence
  Description of Artificial Sequence: Synthetic oligonucleotide
aauaccgccauguccgugc

SEQ ID NO: 1098438 - RNA, 19 nt, Artificial Sequence
  Description of Artificial Sequence: Synthetic oligonucleotide
ucuagggcaaaucggaugg

SEQ ID NO: 1098439 - RNA, 19 nt, Artificial Sequence
  Description of Artificial Sequence: Synthetic oligonucleotide
ugaguaacagcacuggucc

SEQ ID NO: 1098440 - RNA, 19 nt, Artificial Sequence
  Description of Artificial Sequence: Synthetic oligonucleotide
aaaacccguacauagaagu

SEQ ID NO: 1098441 - RNA, 19 nt, Artificial Sequence
  Description of Artificial Sequence: Synthetic oligonucleotide
gauggugcugcucaguugg

SEQ ID NO: 1098442 - RNA, 19 nt, Artificial Sequence
  Description of Artificial Sequence: Synthetic oligonucleotide
auuguuucaguccacaccu

SEQ ID NO: 1098443 - RNA, 19 nt, Artificial Sequence
  Description of Artificial Sequence: Synthetic oligonucleotide
ugguacaucagcauccggg

SEQ ID NO: 1098444 - RNA, 19 nt, Artificial Sequence
  Description of Artificial Sequence: Synthetic oligonucleotide
uuuuguagcagccuccgcc

SEQ ID NO: 1098445 - RNA, 19 nt, Artificial Sequence
  Description of Artificial Sequence: Synthetic oligonucleotide
uacaagaugugccacacca

SEQ ID NO: 1098446 - RNA, 19 nt, Artificial Sequence
  Description of Artificial Sequence: Synthetic oligonucleotide
aauucugagggccauuuca

SEQ ID NO: 1098447 - RNA, 19 nt, Artificial Sequence
  Description of Artificial Sequence: Synthetic oligonucleotide
aggauuaguggucacugcc

SEQ ID NO: 1098448 - RNA, 19 nt, Artificial Sequence
  Description of Artificial Sequence: Synthetic oligonucleotide
uauuguuucaguccacacc

SEQ ID NO: 1098449 - RNA, 19 nt, Artificial Sequence
  Description of Artificial Sequence: Synthetic oligonucleotide
ucugagggccauuucaugg

SEQ ID NO: 1098450 - RNA, 19 nt, Artificial Sequence
  Description of Artificial Sequence: Synthetic oligonucleotide
uguugguacaucagcaucc

SEQ ID NO: 1098451 - RNA, 19 nt, Artificial Sequence
  Description of Artificial Sequence: Synthetic oligonucleotide
ucuggacaguccaugaggg

SEQ ID NO: 1098452 - RNA, 19 nt, Artificial Sequence
  Description of Artificial Sequence: Synthetic oligonucleotide
cuuccguuuauuuuguagc

SEQ ID NO: 1098453 - RNA, 19 nt, Artificial Sequence
  Description of Artificial Sequence: Synthetic oligonucleotide
gaaccucuagggcaaaucg

SEQ ID NO: 1098454 - RNA, 19 nt, Artificial Sequence
  Description of Artificial Sequence: Synthetic oligonucleotide
ucuauaagcucuacagccc

SEQ ID NO: 1098455 - RNA, 19 nt, Artificial Sequence
  Description of Artificial Sequence: Synthetic oligonucleotide
cucaguaacaacacucagg

SEQ ID NO: 1098456 - RNA, 19 nt, Artificial Sequence
  Description of Artificial Sequence: Synthetic oligonucleotide
aaucggauggagcguaguc

SEQ ID NO: 1098457 - RNA, 19 nt, Artificial Sequence
  Description of Artificial Sequence: Synthetic oligonucleotide
aacccguacauagaagucg

SEQ ID NO: 1098458 - RNA, 19 nt, Artificial Sequence
  Description of Artificial Sequence: Synthetic oligonucleotide
ugucuauaagcucuacagc

SEQ ID NO: 1098459 - RNA, 19 nt, Artificial Sequence
  Description of Artificial Sequence: Synthetic oligonucleotide
ugugugaguaacagcacug

SEQ ID NO: 1098460 - RNA, 19 nt, Artificial Sequence
  Description of Artificial Sequence: Synthetic oligonucleotide
ugaaucguuugcaaggaaa

SEQ ID NO: 1098461 - RNA, 19 nt, Artificial Sequence
  Description of Artificial Sequence: Synthetic oligonucleotide
uucacugcauucuuacaag

SEQ ID NO: 1098462 - RNA, 19 nt, Artificial Sequence
  Description of Artificial Sequence: Synthetic oligonucleotide
acagccagaauucggaaug

SEQ ID NO: 1098463 - RNA, 19 nt, Artificial Sequence
  Description of Artificial Sequence: Synthetic oligonucleotide
caguguguaguagagaggg

SEQ ID NO: 1098464 - RNA, 19 nt, Artificial Sequence
  Description of Artificial Sequence: Synthetic oligonucleotide
ucggauggagcguaguccg

SEQ ID NO: 1098465 - RNA, 19 nt, Artificial Sequence
  Description of Artificial Sequence: Synthetic oligonucleotide
uuaaccuuggccuggccug

SEQ ID NO: 1098466 - RNA, 19 nt, Artificial Sequence
  Description of Artificial Sequence: Synthetic oligonucleotide
ugaggacuuaaccuuggcc

SEQ ID NO: 1098467 - RNA, 19 nt, Artificial Sequence
  Description of Artificial Sequence: Synthetic oligonucleotide
cuauaagcucuacagcccg

SEQ ID NO: 1098468 - RNA, 19 nt, Artificial Sequence
  Description of Artificial Sequence: Synthetic oligonucleotide
gacaccuuggauucgcuug

SEQ ID NO: 1098469 - RNA, 19 nt, Artificial Sequence
  Description of Artificial Sequence: Synthetic oligonucleotide
aacgcaugaugucccagag

SEQ ID NO: 1098470 - RNA, 19 nt, Artificial Sequence
  Description of Artificial Sequence: Synthetic oligonucleotide
aguaucaggccacaggcgu

SEQ ID NO: 1098471 - RNA, 19 nt, Artificial Sequence
  Description of Artificial Sequence: Synthetic oligonucleotide
ucuuacaagcaugggagag

SEQ ID NO: 1098472 - RNA, 19 nt, Artificial Sequence
  Description of Artificial Sequence: Synthetic oligonucleotide
uuacaagcaugggagagag

SEQ ID NO: 1098473 - RNA, 19 nt, Artificial Sequence
  Description of Artificial Sequence: Synthetic oligonucleotide
uccucaguaacaacacuca

SEQ ID NO: 1098474 - RNA, 19 nt, Artificial Sequence
  Description of Artificial Sequence: Synthetic oligonucleotide
ucugucuauaagcucuaca

SEQ ID NO: 1098475 - RNA, 19 nt, Artificial Sequence
  Description of Artificial Sequence: Synthetic oligonucleotide
guaguagagagggacgucg

SEQ ID NO: 1098476 - RNA, 19 nt, Artificial Sequence
  Description of Artificial Sequence: Synthetic oligonucleotide
aucggauggagcguagucc

SEQ ID NO: 1098477 - RNA, 19 nt, Artificial Sequence
  Description of Artificial Sequence: Synthetic oligonucleotide
uccuugaaucguuugcaag

SEQ ID NO: 1098478 - RNA, 19 nt, Artificial Sequence
  Description of Artificial Sequence: Synthetic oligonucleotide
uguggaagcggccaggauu

SEQ ID NO: 1098479 - RNA, 19 nt, Artificial Sequence
  Description of Artificial Sequence: Synthetic oligonucleotide
gaggacuuaaccuuggccu

SEQ ID NO: 1098480 - RNA, 19 nt, Artificial Sequence
  Description of Artificial Sequence: Synthetic oligonucleotide
ucgcagaccuuccucacag

SEQ ID NO: 1098481 - RNA, 19 nt, Artificial Sequence
  Description of Artificial Sequence: Synthetic oligonucleotide
cauucuuacaagcauggga

SEQ ID NO: 1098482 - RNA, 19 nt, Artificial Sequence
  Description of Artificial Sequence: Synthetic oligonucleotide
uuccguuuauuuuguagca

SEQ ID NO: 1098483 - RNA, 19 nt, Artificial Sequence
  Description of Artificial Sequence: Synthetic oligonucleotide
ugccucaagaacucggccc

SEQ ID NO: 1098484 - RNA, 19 nt, Artificial Sequence
  Description of Artificial Sequence: Synthetic oligonucleotide
uggagcguaguccggaggc

SEQ ID NO: 1098485 - RNA, 19 nt, Artificial Sequence
  Description of Artificial Sequence: Synthetic oligonucleotide
aucguuugcaaggaaaugu

SEQ ID NO: 1098486 - RNA, 19 nt, Artificial Sequence
  Description of Artificial Sequence: Synthetic oligonucleotide
agaauucggaaugcugggc

SEQ ID NO: 1098487 - RNA, 19 nt, Artificial Sequence
  Description of Artificial Sequence: Synthetic oligonucleotide
ucagacaaguucucagaca

SEQ ID NO: 1098488 - RNA, 19 nt, Artificial Sequence
  Description of Artificial Sequence: Synthetic oligonucleotide
ccuugaaucguuugcaagg

SEQ ID NO: 1098489 - RNA, 19 nt, Artificial Sequence
  Description of Artificial Sequence: Synthetic oligonucleotide
cagaauucggaaugcuggg

SEQ ID NO: 1098490 - RNA, 19 nt, Artificial Sequence
  Description of Artificial Sequence: Synthetic oligonucleotide
gaugcuaagcagcgguacc

SEQ ID NO: 1098491 - RNA, 19 nt, Artificial Sequence
  Description of Artificial Sequence: Synthetic oligonucleotide
ucggcacugaugcuaagca

SEQ ID NO: 1098492 - RNA, 19 nt, Artificial Sequence
  Description of Artificial Sequence: Synthetic oligonucleotide
acaccuuggauucgcuugg

SEQ ID NO: 1098493 - RNA, 19 nt, Artificial Sequence
  Description of Artificial Sequence: Synthetic oligonucleotide
ugcaaggaaaugucuugag

SEQ ID NO: 1098494 - RNA, 19 nt, Artificial Sequence
  Description of Artificial Sequence: Synthetic oligonucleotide
agguagaaggcuccacaac

SEQ ID NO: 1098495 - RNA, 19 nt, Artificial Sequence
  Description of Artificial Sequence: Synthetic oligonucleotide
aucaaaacgcucagaugcc

SEQ ID NO: 1098496 - RNA, 19 nt, Artificial Sequence
  Description of Artificial Sequence: Synthetic oligonucleotide
ugggauuggcgucuccccg

SEQ ID NO: 1098497 - RNA, 19 nt, Artificial Sequence
  Description of Artificial Sequence: Synthetic oligonucleotide
acacagaaguccuccauca

SEQ ID NO: 1098498 - RNA, 19 nt, Artificial Sequence
  Description of Artificial Sequence: Synthetic oligonucleotide
gaagcggccaggauuagug

SEQ ID NO: 1098499 - RNA, 19 nt, Artificial Sequence
  Description of Artificial Sequence: Synthetic oligonucleotide
acaaguacccuccuugaau

SEQ ID NO: 1098500 - RNA, 19 nt, Artificial Sequence
  Description of Artificial Sequence: Synthetic oligonucleotide
aaucguuugcaaggaaaug

SEQ ID NO: 1098501 - RNA, 19 nt, Artificial Sequence
  Description of Artificial Sequence: Synthetic oligonucleotide
aaacccguacauagaaguc

SEQ ID NO: 1098502 - RNA, 19 nt, Artificial Sequence
  Description of Artificial Sequence: Synthetic oligonucleotide
agcagcgguaccacgaagc

SEQ ID NO: 1098503 - RNA, 19 nt, Artificial Sequence
  Description of Artificial Sequence: Synthetic oligonucleotide
ucguuugcaaggaaauguc

SEQ ID NO: 1098504 - RNA, 19 nt, Artificial Sequence
  Description of Artificial Sequence: Synthetic oligonucleotide
ugugaguaacagcacuggu

SEQ ID NO: 1098505 - RNA, 19 nt, Artificial Sequence
  Description of Artificial Sequence: Synthetic oligonucleotide
uggacaguccaugagggga

SEQ ID NO: 1098506 - RNA, 19 nt, Artificial Sequence
  Description of Artificial Sequence: Synthetic oligonucleotide
ucgacgcuuugccaaggcg

SEQ ID NO: 1098507 - RNA, 19 nt, Artificial Sequence
  Description of Artificial Sequence: Synthetic oligonucleotide
aaguccuccaucauucaca

SEQ ID NO: 1098508 - RNA, 19 nt, Artificial Sequence
  Description of Artificial Sequence: Synthetic oligonucleotide
gacaucaaaacgcucagau

SEQ ID NO: 1098509 - RNA, 19 nt, Artificial Sequence
  Description of Artificial Sequence: Synthetic oligonucleotide
gcaguuggcaugcaggucc

SEQ ID NO: 1098510 - RNA, 19 nt, Artificial Sequence
  Description of Artificial Sequence: Synthetic oligonucleotide
aggacuuaaccuuggccug

SEQ ID NO: 1098511 - RNA, 19 nt, Artificial Sequence
  Description of Artificial Sequence: Synthetic oligonucleotide
acaaaguccaggucaugga

SEQ ID NO: 1098512 - RNA, 19 nt, Artificial Sequence
  Description of Artificial Sequence: Synthetic oligonucleotide
ucucucgacgcuuugccaa

SEQ ID NO: 1098513 - RNA, 19 nt, Artificial Sequence
  Description of Artificial Sequence: Synthetic oligonucleotide
agggccauuucauggcagg

SEQ ID NO: 1098514 - RNA, 19 nt, Artificial Sequence
  Description of Artificial Sequence: Synthetic oligonucleotide
uggacacuccuucucccag

SEQ ID NO: 1098515 - RNA, 19 nt, Artificial Sequence
  Description of Artificial Sequence: Synthetic oligonucleotide
uguagcacgucucuccguu

SEQ ID NO: 1098516 - RNA, 19 nt, Artificial Sequence
  Description of Artificial Sequence: Synthetic oligonucleotide
uccguuuauuuuguagcag

SEQ ID NO: 1098517 - RNA, 19 nt, Artificial Sequence
  Description of Artificial Sequence: Synthetic oligonucleotide
cgcaugaugucccagaggg

SEQ ID NO: 1098518 - RNA, 19 nt, Artificial Sequence
  Description of Artificial Sequence: Synthetic oligonucleotide
cucuagggcaaaucggaug

SEQ ID NO: 1098519 - RNA, 19 nt, Artificial Sequence
  Description of Artificial Sequence: Synthetic oligonucleotide
auuggcgucuccccggaug

SEQ ID NO: 1098520 - RNA, 19 nt, Artificial Sequence
  Description of Artificial Sequence: Synthetic oligonucleotide
augggagagagagacucgg

SEQ ID NO: 1098521 - RNA, 19 nt, Artificial Sequence
  Description of Artificial Sequence: Synthetic oligonucleotide
cugagggccauuucauggc

SEQ ID NO: 1098522 - RNA, 19 nt, Artificial Sequence
  Description of Artificial Sequence: Synthetic oligonucleotide
ucggugauggucucuggac

SEQ ID NO: 1098523 - RNA, 19 nt, Artificial Sequence
  Description of Artificial Sequence: Synthetic oligonucleotide
cuuggauucgcuuggaggu

SEQ ID NO: 1098524 - RNA, 19 nt, Artificial Sequence
  Description of Artificial Sequence: Synthetic oligonucleotide
ccauacuugcuguagcacg

SEQ ID NO: 1098525 - RNA, 19 nt, Artificial Sequence
  Description of Artificial Sequence: Synthetic oligonucleotide
caguguucacacucagggg

SEQ ID NO: 1098526 - RNA, 19 nt, Artificial Sequence
  Description of Artificial Sequence: Synthetic oligonucleotide
gaacucggcccacaaaguc

SEQ ID NO: 1098527 - RNA, 19 nt, Artificial Sequence
  Description of Artificial Sequence: Synthetic oligonucleotide
caugggagagagagacucg

SEQ ID NO: 1098528 - RNA, 19 nt, Artificial Sequence
  Description of Artificial Sequence: Synthetic oligonucleotide
ggagauaucggugaugguc

SEQ ID NO: 1098529 - RNA, 19 nt, Artificial Sequence
  Description of Artificial Sequence: Synthetic oligonucleotide
cuacagcccgggcagaagc

SEQ ID NO: 1098530 - RNA, 19 nt, Artificial Sequence
  Description of Artificial Sequence: Synthetic oligonucleotide
cuaagcagcgguaccacga

SEQ ID NO: 1098531 - RNA, 19 nt, Artificial Sequence
  Description of Artificial Sequence: Synthetic oligonucleotide
uguugccugccaauaccgc

SEQ ID NO: 1098532 - RNA, 19 nt, Artificial Sequence
  Description of Artificial Sequence: Synthetic oligonucleotide
gauggagcguaguccggag

SEQ ID NO: 1098533 - RNA, 19 nt, Artificial Sequence
  Description of Artificial Sequence: Synthetic oligonucleotide
auauggggccuccaagcug

SEQ ID NO: 1098534 - RNA, 19 nt, Artificial Sequence
  Description of Artificial Sequence: Synthetic oligonucleotide
aggcuaugcagcacaauuc

SEQ ID NO: 1098535 - RNA, 19 nt, Artificial Sequence
  Description of Artificial Sequence: Synthetic oligonucleotide
aacgcucagaugccuucug

SEQ ID NO: 1098536 - RNA, 19 nt, Artificial Sequence
  Description of Artificial Sequence: Synthetic oligonucleotide
uuccagcacucgcagaccu

SEQ ID NO: 1098537 - RNA, 19 nt, Artificial Sequence
  Description of Artificial Sequence: Synthetic oligonucleotide
ugcacguuucugucuauaa

SEQ ID NO: 1098538 - RNA, 19 nt, Artificial Sequence
  Description of Artificial Sequence: Synthetic oligonucleotide
gaauucggaaugcugggcu

SEQ ID NO: 1098539 - RNA, 19 nt, Artificial Sequence
  Description of Artificial Sequence: Synthetic oligonucleotide
gaaguuccucaguaacaac

SEQ ID NO: 1098540 - RNA, 19 nt, Artificial Sequence
  Description of Artificial Sequence: Synthetic oligonucleotide
ugaugcuaagcagcgguac

SEQ ID NO: 1098541 - RNA, 19 nt, Artificial Sequence
  Description of Artificial Sequence: Synthetic oligonucleotide
aaggcguugcagguagaag

SEQ ID NO: 1098542 - RNA, 19 nt, Artificial Sequence
  Description of Artificial Sequence: Synthetic oligonucleotide
ucgcuguccacaguguuca

SEQ ID NO: 1098543 - RNA, 19 nt, Artificial Sequence
  Description of Artificial Sequence: Synthetic oligonucleotide
cauuucauggcaggcccgg

SEQ ID NO: 1098544 - RNA, 19 nt, Artificial Sequence
  Description of Artificial Sequence: Synthetic oligonucleotide
cagauccuuacuugcugcc

SEQ ID NO: 1098545 - RNA, 19 nt, Artificial Sequence
  Description of Artificial Sequence: Synthetic oligonucleotide
auaucggugauggucucug

SEQ ID NO: 1098546 - RNA, 19 nt, Artificial Sequence
  Description of Artificial Sequence: Synthetic oligonucleotide
auuaguggucacugccuca

SEQ ID NO: 1098547 - RNA, 19 nt, Artificial Sequence
  Description of Artificial Sequence: Synthetic oligonucleotide
agauaucggugauggucuc

SEQ ID NO: 1098548 - RNA, 19 nt, Artificial Sequence
  Description of Artificial Sequence: Synthetic oligonucleotide
acuuaaccuuggccuggcc

SEQ ID NO: 1098549 - RNA, 19 nt, Artificial Sequence
  Description of Artificial Sequence: Synthetic oligonucleotide
aguccaugaggggaguauc

SEQ ID NO: 1098550 - RNA, 19 nt, Artificial Sequence
  Description of Artificial Sequence: Synthetic oligonucleotide
cacgucucuccguuguugc

SEQ ID NO: 1098551 - RNA, 19 nt, Artificial Sequence
  Description of Artificial Sequence: Synthetic oligonucleotide
ucaaaacgcucagaugccu

SEQ ID NO: 1098552 - RNA, 19 nt, Artificial Sequence
  Description of Artificial Sequence: Synthetic oligonucleotide
uuaguggucacugccucaa

SEQ ID NO: 1098553 - RNA, 19 nt, Artificial Sequence
  Description of Artificial Sequence: Synthetic oligonucleotide
uaagcucuacagcccgggc

SEQ ID NO: 1098554 - RNA, 19 nt, Artificial Sequence
  Description of Artificial Sequence: Synthetic oligonucleotide
uaagcagcgguaccacgaa

SEQ ID NO: 1098555 - RNA, 19 nt, Artificial Sequence
  Description of Artificial Sequence: Synthetic oligonucleotide
acgcucagaugccuucugg

SEQ ID NO: 1098556 - RNA, 19 nt, Artificial Sequence
  Description of Artificial Sequence: Synthetic oligonucleotide
acccguacauagaagucgg

SEQ ID NO: 1098557 - RNA, 19 nt, Artificial Sequence
  Description of Artificial Sequence: Synthetic oligonucleotide
cauccgggcaucugccugg

SEQ ID NO: 1098558 - RNA, 19 nt, Artificial Sequence
  Description of Artificial Sequence: Synthetic oligonucleotide
auggagcguaguccggagg

SEQ ID NO: 1098559 - RNA, 19 nt, Artificial Sequence
  Description of Artificial Sequence: Synthetic oligonucleotide
acgcaugaugucccagagg

SEQ ID NO: 1098560 - RNA, 19 nt, Artificial Sequence
  Description of Artificial Sequence: Synthetic oligonucleotide
uaucggugauggucucugg

SEQ ID NO: 1098561 - RNA, 19 nt, Artificial Sequence
  Description of Artificial Sequence: Synthetic oligonucleotide
ucgcuuggagguguggaag

SEQ ID NO: 1098562 - RNA, 19 nt, Artificial Sequence
  Description of Artificial Sequence: Synthetic oligonucleotide
aucggugauggucucugga

SEQ ID NO: 1098563 - RNA, 19 nt, Artificial Sequence
  Description of Artificial Sequence: Synthetic oligonucleotide
cuggauuggccuggaagcg

SEQ ID NO: 1098564 - RNA, 19 nt, Artificial Sequence
  Description of Artificial Sequence: Synthetic oligonucleotide
caggauuaguggucacugc

SEQ ID NO: 1098565 - RNA, 19 nt, Artificial Sequence
  Description of Artificial Sequence: Synthetic oligonucleotide
gagauaucggugauggucu

SEQ ID NO: 1098566 - RNA, 19 nt, Artificial Sequence
  Description of Artificial Sequence: Synthetic oligonucleotide
cugggauuggcgucucccc

SEQ ID NO: 1098567 - RNA, 19 nt, Artificial Sequence
  Description of Artificial Sequence: Synthetic oligonucleotide
caggcccggcucuugaggg

SEQ ID NO: 1098568 - RNA, 19 nt, Artificial Sequence
  Description of Artificial Sequence: Synthetic oligonucleotide
gccauuucauggcaggccc

SEQ ID NO: 1098569 - RNA, 19 nt, Artificial Sequence
  Description of Artificial Sequence: Synthetic oligonucleotide
uuguuucaguccacaccug

SEQ ID NO: 1098570 - RNA, 19 nt, Artificial Sequence
  Description of Artificial Sequence: Synthetic oligonucleotide
aaaucggauggagcguagu

SEQ ID NO: 1098571 - RNA, 19 nt, Artificial Sequence
  Description of Artificial Sequence: Synthetic oligonucleotide
cuggacaguccaugagggg

SEQ ID NO: 1098572 - RNA, 19 nt, Artificial Sequence
  Description of Artificial Sequence: Synthetic oligonucleotide
accucuagggcaaaucgga

SEQ ID NO: 1098573 - RNA, 19 nt, Artificial Sequence
  Description of Artificial Sequence: Synthetic oligonucleotide
uucgcuuggagguguggaa

SEQ ID NO: 1098574 - RNA, 19 nt, Artificial Sequence
  Description of Artificial Sequence: Synthetic oligonucleotide
uugccaaggcguugcaggu

SEQ ID NO: 1098575 - RNA, 19 nt, Artificial Sequence
  Description of Artificial Sequence: Synthetic oligonucleotide
cauggccccauacuugcug

SEQ ID NO: 1098576 - RNA, 19 nt, Artificial Sequence
  Description of Artificial Sequence: Synthetic oligonucleotide
aaacgcucagaugccuucu

SEQ ID NO: 1098577 - RNA, 19 nt, Artificial Sequence
  Description of Artificial Sequence: Synthetic oligonucleotide
auccuuacuugcugccuug

SEQ ID NO: 1098578 - RNA, 19 nt, Artificial Sequence
  Description of Artificial Sequence: Synthetic oligonucleotide
gaagcgcuugaguccuugc

SEQ ID NO: 1098579 - RNA, 19 nt, Artificial Sequence
  Description of Artificial Sequence: Synthetic oligonucleotide
agcggccaggauuaguggu

SEQ ID NO: 1098580 - RNA, 19 nt, Artificial Sequence
  Description of Artificial Sequence: Synthetic oligonucleotide
cucccguuucacuggacac

SEQ ID NO: 1098581 - RNA, 19 nt, Artificial Sequence
  Description of Artificial Sequence: Synthetic oligonucleotide
ucaggggucacuggaggac

SEQ ID NO: 1098582 - RNA, 19 nt, Artificial Sequence
  Description of Artificial Sequence: Synthetic oligonucleotide
cuugaaucguuugcaagga

SEQ ID NO: 1098583 - RNA, 19 nt, Artificial Sequence
  Description of Artificial Sequence: Synthetic oligonucleotide
ggggucugcccauaugggg

SEQ ID NO: 1098584 - RNA, 19 nt, Artificial Sequence
  Description of Artificial Sequence: Synthetic oligonucleotide
gcuguagcacgucucuccg

SEQ ID NO: 1098585 - RNA, 19 nt, Artificial Sequence
  Description of Artificial Sequence: Synthetic oligonucleotide
gaagucggcacugaugcua

SEQ ID NO: 1098586 - RNA, 19 nt, Artificial Sequence
  Description of Artificial Sequence: Synthetic oligonucleotide
uggauuggccuggaagcgc

SEQ ID NO: 1098587 - RNA, 19 nt, Artificial Sequence
  Description of Artificial Sequence: Synthetic oligonucleotide
acgucgggaaguuccucag

SEQ ID NO: 1098588 - RNA, 19 nt, Artificial Sequence
  Description of Artificial Sequence: Synthetic oligonucleotide
cuugaggcgagcugcccuc

SEQ ID NO: 1098589 - RNA, 19 nt, Artificial Sequence
  Description of Artificial Sequence: Synthetic oligonucleotide
gauucgcuuggaggugugg

SEQ ID NO: 1098590 - RNA, 19 nt, Artificial Sequence
  Description of Artificial Sequence: Synthetic oligonucleotide
cugguugggcuguacaaga

SEQ ID NO: 1098591 - RNA, 19 nt, Artificial Sequence
  Description of Artificial Sequence: Synthetic oligonucleotide
caaaucggauggagcguag

SEQ ID NO: 1098592 - RNA, 19 nt, Artificial Sequence
  Description of Artificial Sequence: Synthetic oligonucleotide
ggaaaugucuugaggcgag

SEQ ID NO: 1098593 - RNA, 19 nt, Artificial Sequence
  Description of Artificial Sequence: Synthetic oligonucleotide
cuggcugaggacuuaaccu

SEQ ID NO: 1098594 - RNA, 19 nt, Artificial Sequence
  Description of Artificial Sequence: Synthetic oligonucleotide
ggucucucgacgcuuugcc

SEQ ID NO: 1098595 - RNA, 19 nt, Artificial Sequence
  Description of Artificial Sequence: Synthetic oligonucleotide
gauggucucuggacagucc

SEQ ID NO: 1098596 - RNA, 19 nt, Artificial Sequence
  Description of Artificial Sequence: Synthetic oligonucleotide
cagaccuuccucacagauc

SEQ ID NO: 1098597 - RNA, 19 nt, Artificial Sequence
  Description of Artificial Sequence: Synthetic oligonucleotide
gaaaugucuugaggcgagc

SEQ ID NO: 1098598 - RNA, 19 nt, Artificial Sequence
  Description of Artificial Sequence: Synthetic oligonucleotide
accuuccucacagaucuca

SEQ ID NO: 1098599 - RNA, 19 nt, Artificial Sequence
  Description of Artificial Sequence: Synthetic oligonucleotide
ccgggcagaagcaucauug

SEQ ID NO: 1098600 - RNA, 19 nt, Artificial Sequence
  Description of Artificial Sequence: Synthetic oligonucleotide
cucucgacgcuuugccaag

SEQ ID NO: 1098601 - RNA, 19 nt, Artificial Sequence
  Description of Artificial Sequence: Synthetic oligonucleotide
augcuaagcagcgguacca

SEQ ID NO: 1098602 - RNA, 19 nt, Artificial Sequence
  Description of Artificial Sequence: Synthetic oligonucleotide
uguucacacucagggguca

SEQ ID NO: 1098603 - RNA, 19 nt, Artificial Sequence
  Description of Artificial Sequence: Synthetic oligonucleotide
gaaucguuugcaaggaaau

SEQ ID NO: 1098604 - RNA, 19 nt, Artificial Sequence
  Description of Artificial Sequence: Synthetic oligonucleotide
ugauggucucuggacaguc

SEQ ID NO: 1098605 - RNA, 19 nt, Artificial Sequence
  Description of Artificial Sequence: Synthetic oligonucleotide
cuuacaagcaugggagaga

SEQ ID NO: 1098606 - RNA, 19 nt, Artificial Sequence
  Description of Artificial Sequence: Synthetic oligonucleotide
gcagcgguaccacgaagcg

SEQ ID NO: 1098607 - RNA, 19 nt, Artificial Sequence
  Description of Artificial Sequence: Synthetic oligonucleotide
ucuacagcccgggcagaag

SEQ ID NO: 1098608 - RNA, 19 nt, Artificial Sequence
  Description of Artificial Sequence: Synthetic oligonucleotide
guuucaguccacaccugac

SEQ ID NO: 1098609 - RNA, 19 nt, Artificial Sequence
  Description of Artificial Sequence: Synthetic oligonucleotide
gacucggaagccagcgugc

SEQ ID NO: 1098610 - RNA, 19 nt, Artificial Sequence
  Description of Artificial Sequence: Synthetic oligonucleotide
aguacccuccuugaaucgu

SEQ ID NO: 1098611 - RNA, 19 nt, Artificial Sequence
  Description of Artificial Sequence: Synthetic oligonucleotide
uggauucgcuuggaggugu

SEQ ID NO: 1098612 - RNA, 19 nt, Artificial Sequence
  Description of Artificial Sequence: Synthetic oligonucleotide
ccaguuggcuucuggauug

SEQ ID NO: 1098613 - RNA, 19 nt, Artificial Sequence
  Description of Artificial Sequence: Synthetic oligonucleotide
uguaguagagagggacguc

SEQ ID NO: 1098614 - RNA, 19 nt, Artificial Sequence
  Description of Artificial Sequence: Synthetic oligonucleotide
ucccguuucacuggacacu

SEQ ID NO: 1098615 - RNA, 19 nt, Artificial Sequence
  Description of Artificial Sequence: Synthetic oligonucleotide
uccguuguugccugccaau

SEQ ID NO: 1098616 - RNA, 19 nt, Artificial Sequence
  Description of Artificial Sequence: Synthetic oligonucleotide
ccagauccuuacuugcugc

SEQ ID NO: 1098617 - RNA, 19 nt, Artificial Sequence
  Description of Artificial Sequence: Synthetic oligonucleotide
ucauggcaggcccggcucu

SEQ ID NO: 1098618 - RNA, 19 nt, Artificial Sequence
  Description of Artificial Sequence: Synthetic oligonucleotide
gggauuggcgucuccccgg

SEQ ID NO: 1098619 - RNA, 19 nt, Artificial Sequence
  Description of Artificial Sequence: Synthetic oligonucleotide
gucggcacugaugcuaagc

SEQ ID NO: 1098620 - RNA, 19 nt, Artificial Sequence
  Description of Artificial Sequence: Synthetic oligonucleotide
guccgugcaggugacacac

SEQ ID NO: 1098621 - RNA, 19 nt, Artificial Sequence
  Description of Artificial Sequence: Synthetic oligonucleotide
gcuaagcagcgguaccacg

SEQ ID NO: 1098622 - RNA, 19 nt, Artificial Sequence
  Description of Artificial Sequence: Synthetic oligonucleotide
caacgcaugaugucccaga

SEQ ID NO: 1098623 - RNA, 19 nt, Artificial Sequence
  Description of Artificial Sequence: Synthetic oligonucleotide
auucugagggccauuucau

SEQ ID NO: 1098624 - RNA, 19 nt, Artificial Sequence
  Description of Artificial Sequence: Synthetic oligonucleotide
ugcuaagcagcgguaccac

SEQ ID NO: 1098625 - RNA, 19 nt, Artificial Sequence
  Description of Artificial Sequence: Synthetic oligonucleotide
gcaugggagagagagacuc

SEQ ID NO: 1098626 - RNA, 19 nt, Artificial Sequence
  Description of Artificial Sequence: Synthetic oligonucleotide
gucucuggacaguccauga

SEQ ID NO: 1098627 - RNA, 19 nt, Artificial Sequence
  Description of Artificial Sequence: Synthetic oligonucleotide
uccuuacuugcugccuugc

SEQ ID NO: 1098628 - RNA, 19 nt, Artificial Sequence
  Description of Artificial Sequence: Synthetic oligonucleotide
gucacugccucaagaacuc

SEQ ID NO: 1098629 - RNA, 19 nt, Artificial Sequence
  Description of Artificial Sequence: Synthetic oligonucleotide
guuuauuuuguagcagccu

SEQ ID NO: 1098630 - RNA, 19 nt, Artificial Sequence
  Description of Artificial Sequence: Synthetic oligonucleotide
gaggggaguaucaggccac

SEQ ID NO: 1098631 - RNA, 19 nt, Artificial Sequence
  Description of Artificial Sequence: Synthetic oligonucleotide
aagucggcacugaugcuaa

SEQ ID NO: 1098632 - RNA, 19 nt, Artificial Sequence
  Description of Artificial Sequence: Synthetic oligonucleotide
agcaacgcaugauguccca

SEQ ID NO: 1098633 - RNA, 19 nt, Artificial Sequence
  Description of Artificial Sequence: Synthetic oligonucleotide
caaccacacacuggaggcc

SEQ ID NO: 1098634 - RNA, 19 nt, Artificial Sequence
  Description of Artificial Sequence: Synthetic oligonucleotide
ggacuuaaccuuggccugg

SEQ ID NO: 1098635 - RNA, 19 nt, Artificial Sequence
  Description of Artificial Sequence: Synthetic oligonucleotide
cagguagaaggcuccacaa

SEQ ID NO: 1098636 - RNA, 19 nt, Artificial Sequence
  Description of Artificial Sequence: Synthetic oligonucleotide
agaacucggcccacaaagu

SEQ ID NO: 1098637 - RNA, 19 nt, Artificial Sequence
  Description of Artificial Sequence: Synthetic oligonucleotide
agccagcgugcagaagagc

SEQ ID NO: 1098638 - RNA, 19 nt, Artificial Sequence
  Description of Artificial Sequence: Synthetic oligonucleotide
acgaagcgcugguagcagu

SEQ ID NO: 1098639 - RNA, 19 nt, Artificial Sequence
  Description of Artificial Sequence: Synthetic oligonucleotide
uucugucuauaagcucuac

SEQ ID NO: 1098640 - RNA, 19 nt, Artificial Sequence
  Description of Artificial Sequence: Synthetic oligonucleotide
cagccagaauucggaaugc

SEQ ID NO: 1098641 - RNA, 19 nt, Artificial Sequence
  Description of Artificial Sequence: Synthetic oligonucleotide
cuugcuguagcacgucucu

SEQ ID NO: 1098642 - RNA, 19 nt, Artificial Sequence
  Description of Artificial Sequence: Synthetic oligonucleotide
auggauggggucugcccau

SEQ ID NO: 1098643 - RNA, 19 nt, Artificial Sequence
  Description of Artificial Sequence: Synthetic oligonucleotide
uaacaacacucaggacacc

SEQ ID NO: 1098644 - RNA, 19 nt, Artificial Sequence
  Description of Artificial Sequence: Synthetic oligonucleotide
ggcuaugcagcacaauucu

SEQ ID NO: 1098645 - RNA, 19 nt, Artificial Sequence
  Description of Artificial Sequence: Synthetic oligonucleotide
gaguccuugcuggcgcgag

SEQ ID NO: 1098646 - RNA, 19 nt, Artificial Sequence
  Description of Artificial Sequence: Synthetic oligonucleotide
ggcguugcagguagaaggc

SEQ ID NO: 1098647 - RNA, 19 nt, Artificial Sequence
  Description of Artificial Sequence: Synthetic oligonucleotide
ccaggauuaguggucacug

SEQ ID NO: 1098648 - RNA, 19 nt, Artificial Sequence
  Description of Artificial Sequence: Synthetic oligonucleotide
ccuggccugugaaaaugcg

SEQ ID NO: 1098649 - RNA, 19 nt, Artificial Sequence
  Description of Artificial Sequence: Synthetic oligonucleotide
acaggcguagcagggcugu

SEQ ID NO: 1098650 - RNA, 19 nt, Artificial Sequence
  Description of Artificial Sequence: Synthetic oligonucleotide
gauccuuacuugcugccuu

SEQ ID NO: 1098651 - RNA, 19 nt, Artificial Sequence
  Description of Artificial Sequence: Synthetic oligonucleotide
guggaagcggccaggauua

SEQ ID NO: 1098652 - RNA, 19 nt, Artificial Sequence
  Description of Artificial Sequence: Synthetic oligonucleotide
gcauucuuacaagcauggg

SEQ ID NO: 1098653 - RNA, 19 nt, Artificial Sequence
  Description of Artificial Sequence: Synthetic oligonucleotide
cugugugaguaacagcacu

SEQ ID NO: 1098654 - RNA, 19 nt, Artificial Sequence
  Description of Artificial Sequence: Synthetic oligonucleotide
cagcacucgcagaccuucc

SEQ ID NO: 1098655 - RNA, 19 nt, Artificial Sequence
  Description of Artificial Sequence: Synthetic oligonucleotide
caucauuggcaaccacaca

SEQ ID NO: 1098656 - RNA, 19 nt, Artificial Sequence
  Description of Artificial Sequence: Synthetic oligonucleotide
cacgaagcgcugguagcag

SEQ ID NO: 1098657 - RNA, 19 nt, Artificial Sequence
  Description of Artificial Sequence: Synthetic oligonucleotide
ccauuucauggcaggcccg

SEQ ID NO: 1098658 - RNA, 19 nt, Artificial Sequence
  Description of Artificial Sequence: Synthetic oligonucleotide
cccucgcugacaaguaccc

SEQ ID NO: 1098659 - RNA, 19 nt, Artificial Sequence
  Description of Artificial Sequence: Synthetic oligonucleotide
auaccgccauguccgugca

SEQ ID NO: 1098660 - RNA, 19 nt, Artificial Sequence
  Description of Artificial Sequence: Synthetic oligonucleotide
caggcuaugcagcacaauu

SEQ ID NO: 1098661 - RNA, 19 nt, Artificial Sequence
  Description of Artificial Sequence: Synthetic oligonucleotide
aucaggccacaggcguagc

SEQ ID NO: 1098662 - RNA, 19 nt, Artificial Sequence
  Description of Artificial Sequence: Synthetic oligonucleotide
ccggauguugaaguuggcc

SEQ ID NO: 1098663 - RNA, 19 nt, Artificial Sequence
  Description of Artificial Sequence: Synthetic oligonucleotide
cagcgguaccacgaagcgc

SEQ ID NO: 1098664 - RNA, 19 nt, Artificial Sequence
  Description of Artificial Sequence: Synthetic oligonucleotide
ccaccagggucucucgacg

SEQ ID NO: 1098665 - RNA, 19 nt, Artificial Sequence
  Description of Artificial Sequence: Synthetic oligonucleotide
ccccucgcugacaaguacc

SEQ ID NO: 1098666 - RNA, 19 nt, Artificial Sequence
  Description of Artificial Sequence: Synthetic oligonucleotide
ccgugcaggugacacacag

SEQ ID NO: 1098667 - RNA, 19 nt, Artificial Sequence
  Description of Artificial Sequence: Synthetic oligonucleotide
gccgcucccguuucacugg

SEQ ID NO: 1098668 - RNA, 19 nt, Artificial Sequence
  Description of Artificial Sequence: Synthetic oligonucleotide
uccgugcaggugacacaca

SEQ ID NO: 1098669 - RNA, 19 nt, Artificial Sequence
  Description of Artificial Sequence: Synthetic oligonucleotide
cagcgugcagaagagcuga

SEQ ID NO: 1098670 - RNA, 19 nt, Artificial Sequence
  Description of Artificial Sequence: Synthetic oligonucleotide
ccugguugggcuguacaag

SEQ ID NO: 1098671 - RNA, 19 nt, Artificial Sequence
  Description of Artificial Sequence: Synthetic oligonucleotide
agucggcacugaugcuaag

SEQ ID NO: 1098672 - RNA, 19 nt, Artificial Sequence
  Description of Artificial Sequence: Synthetic oligonucleotide
uaccgccauguccgugcag

SEQ ID NO: 1098673 - RNA, 19 nt, Artificial Sequence
  Description of Artificial Sequence: Synthetic oligonucleotide
guauucccuuggucccaag

SEQ ID NO: 1098674 - RNA, 19 nt, Artificial Sequence
  Description of Artificial Sequence: Synthetic oligonucleotide
ugcuggcgcgagcugggau

SEQ ID NO: 1098675 - RNA, 19 nt, Artificial Sequence
  Description of Artificial Sequence: Synthetic oligonucleotide
gcuaugcagcacaauucug

SEQ ID NO: 1098676 - RNA, 19 nt, Artificial Sequence
  Description of Artificial Sequence: Synthetic oligonucleotide
gcucccguuucacuggaca

SEQ ID NO: 1098677 - RNA, 19 nt, Artificial Sequence
  Description of Artificial Sequence: Synthetic oligonucleotide
ccuuacuugcugccuugcc

SEQ ID NO: 1098678 - RNA, 19 nt, Artificial Sequence
  Description of Artificial Sequence: Synthetic oligonucleotide
agcgugcagaagagcugac

SEQ ID NO: 1098679 - RNA, 19 nt, Artificial Sequence
  Description of Artificial Sequence: Synthetic oligonucleotide
gauaucggugauggucucu

SEQ ID NO: 1098680 - RNA, 19 nt, Artificial Sequence
  Description of Artificial Sequence: Synthetic oligonucleotide
uggguguguugcaguggau

SEQ ID NO: 1098681 - RNA, 19 nt, Artificial Sequence
  Description of Artificial Sequence: Synthetic oligonucleotide
caauaccgccauguccgug

SEQ ID NO: 1098682 - RNA, 19 nt, Artificial Sequence
  Description of Artificial Sequence: Synthetic oligonucleotide
uccagcacucgcagaccuu

SEQ ID NO: 1098683 - RNA, 19 nt, Artificial Sequence
  Description of Artificial Sequence: Synthetic oligonucleotide
cugaugcuaagcagcggua

SEQ ID NO: 1098684 - RNA, 19 nt, Artificial Sequence
  Description of Artificial Sequence: Synthetic oligonucleotide
aggcguagcagggcugugu

SEQ ID NO: 1098685 - RNA, 19 nt, Artificial Sequence
  Description of Artificial Sequence: Synthetic oligonucleotide
acaacacucaggacaccuu

SEQ ID NO: 1098686 - RNA, 19 nt, Artificial Sequence
  Description of Artificial Sequence: Synthetic oligonucleotide
cucgcagaccuuccucaca

SEQ ID NO: 1098687 - RNA, 19 nt, Artificial Sequence
  Description of Artificial Sequence: Synthetic oligonucleotide
ggccccauacuugcuguag

SEQ ID NO: 1098688 - RNA, 19 nt, Artificial Sequence
  Description of Artificial Sequence: Synthetic oligonucleotide
uugaggcgagcugcccucu

SEQ ID NO: 1098689 - RNA, 19 nt, Artificial Sequence
  Description of Artificial Sequence: Synthetic oligonucleotide
uggaagcggccaggauuag

SEQ ID NO: 1098690 - RNA, 19 nt, Artificial Sequence
  Description of Artificial Sequence: Synthetic oligonucleotide
ggaagcgcuugaguccuug

SEQ ID NO: 1098691 - RNA, 19 nt, Artificial Sequence
  Description of Artificial Sequence: Synthetic oligonucleotide
caaggcguugcagguagaa

SEQ ID NO: 1098692 - RNA, 19 nt, Artificial Sequence
  Description of Artificial Sequence: Synthetic oligonucleotide
cccagcaacgcaugauguc

SEQ ID NO: 1098693 - RNA, 19 nt, Artificial Sequence
  Description of Artificial Sequence: Synthetic oligonucleotide
ggcaugcagguccaggcua

SEQ ID NO: 1098694 - RNA, 19 nt, Artificial Sequence
  Description of Artificial Sequence: Synthetic oligonucleotide
gacagccgcucccguuuca

SEQ ID NO: 1098695 - RNA, 19 nt, Artificial Sequence
  Description of Artificial Sequence: Synthetic oligonucleotide
agagggacgucgggaaguu

SEQ ID NO: 1098696 - RNA, 19 nt, Artificial Sequence
  Description of Artificial Sequence: Synthetic oligonucleotide
agcacgucucuccguuguu

SEQ ID NO: 1098697 - RNA, 19 nt, Artificial Sequence
  Description of Artificial Sequence: Synthetic oligonucleotide
ggauggagcguaguccgga

SEQ ID NO: 1098698 - RNA, 19 nt, Artificial Sequence
  Description of Artificial Sequence: Synthetic oligonucleotide
ggauuaguggucacugccu

SEQ ID NO: 1098699 - RNA, 19 nt, Artificial Sequence
  Description of Artificial Sequence: Synthetic oligonucleotide
cugguccccucgcugacaa

SEQ ID NO: 1098700 - RNA, 19 nt, Artificial Sequence
  Description of Artificial Sequence: Synthetic oligonucleotide
caaaacgcucagaugccuu

SEQ ID NO: 1098701 - RNA, 19 nt, Artificial Sequence
  Description of Artificial Sequence: Synthetic oligonucleotide
acgcuuugccaaggcguug

SEQ ID NO: 1098702 - RNA, 19 nt, Artificial Sequence
  Description of Artificial Sequence: Synthetic oligonucleotide
gcaaaucggauggagcgua

SEQ ID NO: 1098703 - RNA, 19 nt, Artificial Sequence
  Description of Artificial Sequence: Synthetic oligonucleotide
gcacgucucuccguuguug

SEQ ID NO: 1098704 - RNA, 19 nt, Artificial Sequence
  Description of Artificial Sequence: Synthetic oligonucleotide
ccguacauagaagucggca

SEQ ID NO: 1098705 - RNA, 19 nt, Artificial Sequence
  Description of Artificial Sequence: Synthetic oligonucleotide
cccauacuugcuguagcac

SEQ ID NO: 1098706 - RNA, 19 nt, Artificial Sequence
  Description of Artificial Sequence: Synthetic oligonucleotide
gcacucgcagaccuuccuc

SEQ ID NO: 1098707 - RNA, 19 nt, Artificial Sequence
  Description of Artificial Sequence: Synthetic oligonucleotide
uggccccauacuugcugua

SEQ ID NO: 1098708 - RNA, 19 nt, Artificial Sequence
  Description of Artificial Sequence: Synthetic oligonucleotide
cuccguuguugccugccaa

SEQ ID NO: 1098709 - RNA, 19 nt, Artificial Sequence
  Description of Artificial Sequence: Synthetic oligonucleotide
guccggaggcugccaggcc

SEQ ID NO: 1098710 - RNA, 19 nt, Artificial Sequence
  Description of Artificial Sequence: Synthetic oligonucleotide
cccguuucacuggacacuc

SEQ ID NO: 1098711 - RNA, 19 nt, Artificial Sequence
  Description of Artificial Sequence: Synthetic oligonucleotide
cacaacccacacacuggaa

SEQ ID NO: 1098712 - RNA, 19 nt, Artificial Sequence
  Description of Artificial Sequence: Synthetic oligonucleotide
ccagcacucgcagaccuuc

SEQ ID NO: 1098713 - RNA, 19 nt, Artificial Sequence
  Description of Artificial Sequence: Synthetic oligonucleotide
gcgugcagaagagcugacc

SEQ ID NO: 1098714 - RNA, 19 nt, Artificial Sequence
  Description of Artificial Sequence: Synthetic oligonucleotide
gacgcuuugccaaggcguu

SEQ ID NO: 1098715 - RNA, 19 nt, Artificial Sequence
  Description of Artificial Sequence: Synthetic oligonucleotide
guaucaggccacaggcgua

SEQ ID NO: 1098716 - RNA, 19 nt, Artificial Sequence
  Description of Artificial Sequence: Synthetic oligonucleotide
ggcaggcccggcucuugag

SEQ ID NO: 1098717 - RNA, 19 nt, Artificial Sequence
  Description of Artificial Sequence: Synthetic oligonucleotide
ggauuggcgucuccccgga

SEQ ID NO: 1098718 - RNA, 19 nt, Artificial Sequence
  Description of Artificial Sequence: Synthetic oligonucleotide
aggaaccucuagggcaaau

SEQ ID NO: 1098719 - RNA, 19 nt, Artificial Sequence
  Description of Artificial Sequence: Synthetic oligonucleotide
ccccauacuugcuguagca

SEQ ID NO: 1098720 - RNA, 19 nt, Artificial Sequence
  Description of Artificial Sequence: Synthetic oligonucleotide
cccguacauagaagucggc

SEQ ID NO: 1098721 - RNA, 19 nt, Artificial Sequence
  Description of Artificial Sequence: Synthetic oligonucleotide
cuagggcaaaucggaugga

SEQ ID NO: 1098722 - RNA, 19 nt, Artificial Sequence
  Description of Artificial Sequence: Synthetic oligonucleotide
uggggccuccaagcuggug

SEQ ID NO: 1098723 - RNA, 19 nt, Artificial Sequence
  Description of Artificial Sequence: Synthetic oligonucleotide
ggggaguaucaggccacag

SEQ ID NO: 1098724 - RNA, 19 nt, Artificial Sequence
  Description of Artificial Sequence: Synthetic oligonucleotide
uugcuggcgcgagcuggga

SEQ ID NO: 1098725 - RNA, 19 nt, Artificial Sequence
  Description of Artificial Sequence: Synthetic oligonucleotide
uggcgcgagcugggauugg

SEQ ID NO: 1098726 - RNA, 19 nt, Artificial Sequence
  Description of Artificial Sequence: Synthetic oligonucleotide
cgcuuugccaaggcguugc

SEQ ID NO: 1098727 - RNA, 19 nt, Artificial Sequence
  Description of Artificial Sequence: Synthetic oligonucleotide
ggcgcgagcugggauuggc

SEQ ID NO: 1098728 - RNA, 19 nt, Artificial Sequence
  Description of Artificial Sequence: Synthetic oligonucleotide
cuggaacaccagggccugc

SEQ ID NO: 1098729 - RNA, 19 nt, Artificial Sequence
  Description of Artificial Sequence: Synthetic oligonucleotide
cugcuuucugacagccgcu

SEQ ID NO: 1098730 - RNA, 19 nt, Artificial Sequence
  Description of Artificial Sequence: Synthetic oligonucleotide
ugguagcaguuggcaugca

SEQ ID NO: 1098731 - RNA, 19 nt, Artificial Sequence
  Description of Artificial Sequence: Synthetic oligonucleotide
ccauguccgugcaggugac

SEQ ID NO: 1098732 - RNA, 19 nt, Artificial Sequence
  Description of Artificial Sequence: Synthetic oligonucleotide
cacucaggacaccuuggau

SEQ ID NO: 1098733 - RNA, 19 nt, Artificial Sequence
  Description of Artificial Sequence: Synthetic oligonucleotide
gcgcgagcugggauuggcg

SEQ ID NO: 1098734 - RNA, 19 nt, Artificial Sequence
  Description of Artificial Sequence: Synthetic oligonucleotide
ggauucgcuuggaggugug

SEQ ID NO: 1098735 - RNA, 19 nt, Artificial Sequence
  Description of Artificial Sequence: Synthetic oligonucleotide
uggaagcgcuugaguccuu

SEQ ID NO: 1098736 - RNA, 19 nt, Artificial Sequence
  Description of Artificial Sequence: Synthetic oligonucleotide
ucggaaugcugggcugcuu

SEQ ID NO: 1098737 - RNA, 19 nt, Artificial Sequence
  Description of Artificial Sequence: Synthetic oligonucleotide
ccguuucacuggacacucc

SEQ ID NO: 1098738 - RNA, 19 nt, Artificial Sequence
  Description of Artificial Sequence: Synthetic oligonucleotide
ggauuggccuggaagcgcu

SEQ ID NO: 1098739 - RNA, 19 nt, Artificial Sequence
  Description of Artificial Sequence: Synthetic oligonucleotide
gugauggucucuggacagu

SEQ ID NO: 1098740 - RNA, 19 nt, Artificial Sequence
  Description of Artificial Sequence: Synthetic oligonucleotide
ggcaaaucggauggagcgu

SEQ ID NO: 1098741 - RNA, 19 nt, Artificial Sequence
  Description of Artificial Sequence: Synthetic oligonucleotide
gcuuugccaaggcguugca

SEQ ID NO: 1098742 - RNA, 19 nt, Artificial Sequence
  Description of Artificial Sequence: Synthetic oligonucleotide
cuguagcacgucucuccgu

SEQ ID NO: 1098743 - RNA, 19 nt, Artificial Sequence
  Description of Artificial Sequence: Synthetic oligonucleotide
cugcacguuucugucuaua

SEQ ID NO: 1098744 - RNA, 19 nt, Artificial Sequence
  Description of Artificial Sequence: Synthetic oligonucleotide
gcgcugguagcaguuggca

SEQ ID NO: 1098745 - RNA, 19 nt, Artificial Sequence
  Description of Artificial Sequence: Synthetic oligonucleotide
cgacgcuuugccaaggcgu

SEQ ID NO: 1098746 - RNA, 19 nt, Artificial Sequence
  Description of Artificial Sequence: Synthetic oligonucleotide
guacccuccuugaaucguu

SEQ ID NO: 1098747 - RNA, 19 nt, Artificial Sequence
  Description of Artificial Sequence: Synthetic oligonucleotide
ccaagcuggugucgcuguc

SEQ ID NO: 1098748 - RNA, 19 nt, Artificial Sequence
  Description of Artificial Sequence: Synthetic oligonucleotide
cauguccgugcaggugaca

SEQ ID NO: 1098749 - RNA, 19 nt, Artificial Sequence
  Description of Artificial Sequence: Synthetic oligonucleotide
caccuuggauucgcuugga

SEQ ID NO: 1098750 - RNA, 19 nt, Artificial Sequence
  Description of Artificial Sequence: Synthetic oligonucleotide
caggcguagcagggcugug

SEQ ID NO: 1098751 - RNA, 19 nt, Artificial Sequence
  Description of Artificial Sequence: Synthetic oligonucleotide
gcuguccgagucugcucuc

SEQ ID NO: 1098752 - RNA, 19 nt, Artificial Sequence
  Description of Artificial Sequence: Synthetic oligonucleotide
cguuucacuggacacuccu

SEQ ID NO: 1098753 - RNA, 19 nt, Artificial Sequence
  Description of Artificial Sequence: Synthetic oligonucleotide
guccccucgcugacaagua

SEQ ID NO: 1098754 - RNA, 19 nt, Artificial Sequence
  Description of Artificial Sequence: Synthetic oligonucleotide
gcugacaaguacccuccuu

SEQ ID NO: 1098755 - RNA, 19 nt, Artificial Sequence
  Description of Artificial Sequence: Synthetic oligonucleotide
gauuggcgucuccccggau

SEQ ID NO: 1098756 - RNA, 19 nt, Artificial Sequence
  Description of Artificial Sequence: Synthetic oligonucleotide
gcggggcugccauaggggu

SEQ ID NO: 1098757 - RNA, 19 nt, Artificial Sequence
  Description of Artificial Sequence: Synthetic oligonucleotide
ggacgucgggaaguuccuc

SEQ ID NO: 1098758 - RNA, 19 nt, Artificial Sequence
  Description of Artificial Sequence: Synthetic oligonucleotide
ggacaccuuggauucgcuu

SEQ ID NO: 1098759 - RNA, 19 nt, Artificial Sequence
  Description of Artificial Sequence: Synthetic oligonucleotide
cuccccggauguugaaguu

SEQ ID NO: 1098760 - RNA, 19 nt, Artificial Sequence
  Description of Artificial Sequence: Synthetic oligonucleotide
ggauggggucugcccauau

SEQ ID NO: 1098761 - RNA, 19 nt, Artificial Sequence
  Description of Artificial Sequence: Synthetic oligonucleotide
ccucuagggcaaaucggau

SEQ ID NO: 1098762 - RNA, 19 nt, Artificial Sequence
  Description of Artificial Sequence: Synthetic oligonucleotide
gauuggccuggaagcgcuu

SEQ ID NO: 1098763 - RNA, 19 nt, Artificial Sequence
  Description of Artificial Sequence: Synthetic oligonucleotide
caggaaccucuagggcaaa

SEQ ID NO: 1098764 - RNA, 19 nt, Artificial Sequence
  Description of Artificial Sequence: Synthetic oligonucleotide
ccguuguugccugccaaua

SEQ ID NO: 1098765 - RNA, 19 nt, Artificial Sequence
  Description of Artificial Sequence: Synthetic oligonucleotide
gcgguaccacgaagcgcug

SEQ ID NO: 1098766 - RNA, 19 nt, Artificial Sequence
  Description of Artificial Sequence: Synthetic oligonucleotide
caucagcauccgggcaucu

SEQ ID NO: 1098767 - RNA, 19 nt, Artificial Sequence
  Description of Artificial Sequence: Synthetic oligonucleotide
gcugcucaguugguccagu

SEQ ID NO: 1098768 - RNA, 19 nt, Artificial Sequence
  Description of Artificial Sequence: Synthetic oligonucleotide
ccucuugcucagacaaguu

SEQ ID NO: 1098769 - RNA, 19 nt, Artificial Sequence
  Description of Artificial Sequence: Synthetic oligonucleotide
gcuccacaacccacacacu

SEQ ID NO: 1098770 - RNA, 19 nt, Artificial Sequence
  Description of Artificial Sequence: Synthetic oligonucleotide
ccauggccccauacuugcu

SEQ ID NO: 1098771 - RNA, 19 nt, Artificial Sequence
  Description of Artificial Sequence: Synthetic oligonucleotide
cgucgggaaguuccucagu

SEQ ID NO: 1098772 - RNA, 19 nt, Artificial Sequence
  Description of Artificial Sequence: Synthetic oligonucleotide
cccgggcagaagcaucauu

SEQ ID NO: 1098773 - RNA, 19 nt, Artificial Sequence
  Description of Artificial Sequence: Synthetic oligonucleotide
gcccgggcagaagcaucau

SEQ ID NO: 1098774 - RNA, 19 nt, Artificial Sequence
  Description of Artificial Sequence: Synthetic oligonucleotide
gaguuuaagaauuagaggc

SEQ ID NO: 1098775 - RNA, 19 nt, Artificial Sequence
  Description of Artificial Sequence: Synthetic oligonucleotide
uaugauauaacuauuguuc

SEQ ID NO: 1098776 - RNA, 19 nt, Artificial Sequence
  Description of Artificial Sequence: Synthetic oligonucleotide
uauuaguuccaucaaaagg

SEQ ID NO: 1098777 - RNA, 19 nt, Artificial Sequence
  Description of Artificial Sequence: Synthetic oligonucleotide
auuauuaugcuguuggugg

SEQ ID NO: 1098778 - RNA, 19 nt, Artificial Sequence
  Description of Artificial Sequence: Synthetic oligonucleotide
aaugcauuaugauauaacu

SEQ ID NO: 1098779 - RNA, 19 nt, Artificial Sequence
  Description of Artificial Sequence: Synthetic oligonucleotide
auuguuuacauuuaaguca

SEQ ID NO: 1098780 - RNA, 19 nt, Artificial Sequence
  Description of Artificial Sequence: Synthetic oligonucleotide
gaucauaucaaacuucugc

SEQ ID NO: 1098781 - RNA, 19 nt, Artificial Sequence
  Description of Artificial Sequence: Synthetic oligonucleotide
uacuauaucugguacauag

SEQ ID NO: 1098782 - RNA, 19 nt, Artificial Sequence
  Description of Artificial Sequence: Synthetic oligonucleotide
auuuaaagaugauccaacc

SEQ ID NO: 1098783 - RNA, 19 nt, Artificial Sequence
  Description of Artificial Sequence: Synthetic oligonucleotide
uuaacuacuaagcauaaau

SEQ ID NO: 1098784 - RNA, 19 nt, Artificial Sequence
  Description of Artificial Sequence: Synthetic oligonucleotide
uguacagaaguacuaaaag

SEQ ID NO: 1098785 - RNA, 19 nt, Artificial Sequence
  Description of Artificial Sequence: Synthetic oligonucleotide
aguuccauaugccaggggc

SEQ ID NO: 1098786 - RNA, 19 nt, Artificial Sequence
  Description of Artificial Sequence: Synthetic oligonucleotide
uauaguuggcucuuggugg

SEQ ID NO: 1098787 - RNA, 19 nt, Artificial Sequence
  Description of Artificial Sequence: Synthetic oligonucleotide
ugcuuauagacuaagguga

SEQ ID NO: 1098788 - RNA, 19 nt, Artificial Sequence
  Description of Artificial Sequence: Synthetic oligonucleotide
ugaauaaagaguuggugag

SEQ ID NO: 1098789 - RNA, 19 nt, Artificial Sequence
  Description of Artificial Sequence: Synthetic oligonucleotide
acgaacucgauuuucaagg

SEQ ID NO: 1098790 - RNA, 19 nt, Artificial Sequence
  Description of Artificial Sequence: Synthetic oligonucleotide
uguauugugcaucaauaag

SEQ ID NO: 1098791 - RNA, 19 nt, Artificial Sequence
  Description of Artificial Sequence: Synthetic oligonucleotide
agaguuuaagaauuagagg

SEQ ID NO: 1098792 - RNA, 19 nt, Artificial Sequence
  Description of Artificial Sequence: Synthetic oligonucleotide
aauuauaguuggcucuugg

SEQ ID NO: 1098793 - RNA, 19 nt, Artificial Sequence
  Description of Artificial Sequence: Synthetic oligonucleotide
aauaaagaguuggugagag

SEQ ID NO: 1098794 - RNA, 19 nt, Artificial Sequence
  Description of Artificial Sequence: Synthetic oligonucleotide
ugcauuaugauauaacuau

SEQ ID NO: 1098795 - RNA, 19 nt, Artificial Sequence
  Description of Artificial Sequence: Synthetic oligonucleotide
aauaauggggaugucgagg

SEQ ID NO: 1098796 - RNA, 19 nt, Artificial Sequence
  Description of Artificial Sequence: Synthetic oligonucleotide
uaauuucucgaagaggugg

SEQ ID NO: 1098797 - RNA, 19 nt, Artificial Sequence
  Description of Artificial Sequence: Synthetic oligonucleotide
aacucuaguaucugcugac

SEQ ID NO: 1098798 - RNA, 19 nt, Artificial Sequence
  Description of Artificial Sequence: Synthetic oligonucleotide
gacuaaggugaguauaugg

SEQ ID NO: 1098799 - RNA, 19 nt, Artificial Sequence
  Description of Artificial Sequence: Synthetic oligonucleotide
aacgcugccguuuaccauc

SEQ ID NO: 1098800 - RNA, 19 nt, Artificial Sequence
  Description of Artificial Sequence: Synthetic oligonucleotide
aauuauuaugcuguuggug

SEQ ID NO: 1098801 - RNA, 19 nt, Artificial Sequence
  Description of Artificial Sequence: Synthetic oligonucleotide
caauacaagacuauagcug

SEQ ID NO: 1098802 - RNA, 19 nt, Artificial Sequence
  Description of Artificial Sequence: Synthetic oligonucleotide
uugaucauaucaaacuucu

SEQ ID NO: 1098803 - RNA, 19 nt, Artificial Sequence
  Description of Artificial Sequence: Synthetic oligonucleotide
gaacuaauggacgaacucg

SEQ ID NO: 1098804 - RNA, 19 nt, Artificial Sequence
  Description of Artificial Sequence: Synthetic oligonucleotide
ugauggagguaacaaaugc

SEQ ID NO: 1098805 - RNA, 19 nt, Artificial Sequence
  Description of Artificial Sequence: Synthetic oligonucleotide
cauuuugaaaguuguauug

SEQ ID NO: 1098806 - RNA, 19 nt, Artificial Sequence
  Description of Artificial Sequence: Synthetic oligonucleotide
aggaacauuacauggagca

SEQ ID NO: 1098807 - RNA, 19 nt, Artificial Sequence
  Description of Artificial Sequence: Synthetic oligonucleotide
auuaugauauaacuauugu

SEQ ID NO: 1098808 - RNA, 19 nt, Artificial Sequence
  Description of Artificial Sequence: Synthetic oligonucleotide
cuaagcauaaaucaccauc

SEQ ID NO: 1098809 - RNA, 19 nt, Artificial Sequence
  Description of Artificial Sequence: Synthetic oligonucleotide
aguaagagguccccaagac

SEQ ID NO: 1098810 - RNA, 19 nt, Artificial Sequence
  Description of Artificial Sequence: Synthetic oligonucleotide
aauguagccagacagucua

SEQ ID NO: 1098811 - RNA, 19 nt, Artificial Sequence
  Description of Artificial Sequence: Synthetic oligonucleotide
gaguguuccagucaaauuc

SEQ ID NO: 1098812 - RNA, 19 nt, Artificial Sequence
  Description of Artificial Sequence: Synthetic oligonucleotide
agaacuaauggacgaacuc

SEQ ID NO: 1098813 - RNA, 19 nt, Artificial Sequence
  Description of Artificial Sequence: Synthetic oligonucleotide
aguuuaagaauuagaggcc

SEQ ID NO: 1098814 - RNA, 19 nt, Artificial Sequence
  Description of Artificial Sequence: Synthetic oligonucleotide
acuacuaagcauaaaucac

SEQ ID NO: 1098815 - RNA, 19 nt, Artificial Sequence
  Description of Artificial Sequence: Synthetic oligonucleotide
uaggcauaaguucugagaa

SEQ ID NO: 1098816 - RNA, 19 nt, Artificial Sequence
  Description of Artificial Sequence: Synthetic oligonucleotide
uucuuaaucaccagaacua

SEQ ID NO: 1098817 - RNA, 19 nt, Artificial Sequence
  Description of Artificial Sequence: Synthetic oligonucleotide
aagucuacauuuugaaagu

SEQ ID NO: 1098818 - RNA, 19 nt, Artificial Sequence
  Description of Artificial Sequence: Synthetic oligonucleotide
ucuuccgacguccacgccg

SEQ ID NO: 1098819 - RNA, 19 nt, Artificial Sequence
  Description of Artificial Sequence: Synthetic oligonucleotide
uuagaggccagcuaucucu

SEQ ID NO: 1098820 - RNA, 19 nt, Artificial Sequence
  Description of Artificial Sequence: Synthetic oligonucleotide
uaucugguuaauuauaguu

SEQ ID NO: 1098821 - RNA, 19 nt, Artificial Sequence
  Description of Artificial Sequence: Synthetic oligonucleotide
aaauaauggggaugucgag

SEQ ID NO: 1098822 - RNA, 19 nt, Artificial Sequence
  Description of Artificial Sequence: Synthetic oligonucleotide
auaugcaaucuuuauauaa

SEQ ID NO: 1098823 - RNA, 19 nt, Artificial Sequence
  Description of Artificial Sequence: Synthetic oligonucleotide
uaauggacgaacucgauuu

SEQ ID NO: 1098824 - RNA, 19 nt, Artificial Sequence
  Description of Artificial Sequence: Synthetic oligonucleotide
uaacaaaugcauuaugaua

SEQ ID NO: 1098825 - RNA, 19 nt, Artificial Sequence
  Description of Artificial Sequence: Synthetic oligonucleotide
uucacaauuggcacuuuug

SEQ ID NO: 1098826 - RNA, 19 nt, Artificial Sequence
  Description of Artificial Sequence: Synthetic oligonucleotide
ugauucauucuuugagagg

SEQ ID NO: 1098827 - RNA, 19 nt, Artificial Sequence
  Description of Artificial Sequence: Synthetic oligonucleotide
cuuccucgaaauaaugggg

SEQ ID NO: 1098828 - RNA, 19 nt, Artificial Sequence
  Description of Artificial Sequence: Synthetic oligonucleotide
uaaggugaguauauggcgu

SEQ ID NO: 1098829 - RNA, 19 nt, Artificial Sequence
  Description of Artificial Sequence: Synthetic oligonucleotide
uucuuuaacuacuaagcau

SEQ ID NO: 1098830 - RNA, 19 nt, Artificial Sequence
  Description of Artificial Sequence: Synthetic oligonucleotide
uaacuauuguucuuuauuu

SEQ ID NO: 1098831 - RNA, 19 nt, Artificial Sequence
  Description of Artificial Sequence: Synthetic oligonucleotide
ucuaguaucugcugacuca

SEQ ID NO: 1098832 - RNA, 19 nt, Artificial Sequence
  Description of Artificial Sequence: Synthetic oligonucleotide
aaagaguuggugagagagc

SEQ ID NO: 1098833 - RNA, 19 nt, Artificial Sequence
  Description of Artificial Sequence: Synthetic oligonucleotide
gcauaaaucaccaucacug

SEQ ID NO: 1098834 - RNA, 19 nt, Artificial Sequence
  Description of Artificial Sequence: Synthetic oligonucleotide
ugagagagcaaagaaauua

SEQ ID NO: 1098835 - RNA, 19 nt, Artificial Sequence
  Description of Artificial Sequence: Synthetic oligonucleotide
ucggucaccugauaaaggc

SEQ ID NO: 1098836 - RNA, 19 nt, Artificial Sequence
  Description of Artificial Sequence: Synthetic oligonucleotide
gaacauuacauggagcaug

SEQ ID NO: 1098837 - RNA, 19 nt, Artificial Sequence
  Description of Artificial Sequence: Synthetic oligonucleotide
cauuacauggagcaugaug

SEQ ID NO: 1098838 - RNA, 19 nt, Artificial Sequence
  Description of Artificial Sequence: Synthetic oligonucleotide
uggacgacccaaaauugag

SEQ ID NO: 1098839 - RNA, 19 nt, Artificial Sequence
  Description of Artificial Sequence: Synthetic oligonucleotide
uucaagguaggcauaaguu

SEQ ID NO: 1098840 - RNA, 19 nt, Artificial Sequence
  Description of Artificial Sequence: Synthetic oligonucleotide
acuauagcugcucaaagua

SEQ ID NO: 1098841 - RNA, 19 nt, Artificial Sequence
  Description of Artificial Sequence: Synthetic oligonucleotide
auaauggggaugucgaggu

SEQ ID NO: 1098842 - RNA, 19 nt, Artificial Sequence
  Description of Artificial Sequence: Synthetic oligonucleotide
guauuaguuccaucaaaag

SEQ ID NO: 1098843 - RNA, 19 nt, Artificial Sequence
  Description of Artificial Sequence: Synthetic oligonucleotide
ugaaggugaacauguauuc

SEQ ID NO: 1098844 - RNA, 19 nt, Artificial Sequence
  Description of Artificial Sequence: Synthetic oligonucleotide
ucaucgcuuauucucuucc

SEQ ID NO: 1098845 - RNA, 19 nt, Artificial Sequence
  Description of Artificial Sequence: Synthetic oligonucleotide
uuauagacuaaggugagua

SEQ ID NO: 1098846 - RNA, 19 nt, Artificial Sequence
  Description of Artificial Sequence: Synthetic oligonucleotide
uguauucuucuuccgacgu

SEQ ID NO: 1098847 - RNA, 19 nt, Artificial Sequence
  Description of Artificial Sequence: Synthetic oligonucleotide
gugugugaaacaauggcgg

SEQ ID NO: 1098848 - RNA, 19 nt, Artificial Sequence
  Description of Artificial Sequence: Synthetic oligonucleotide
uauauggcgugcuucaguc

SEQ ID NO: 1098849 - RNA, 19 nt, Artificial Sequence
  Description of Artificial Sequence: Synthetic oligonucleotide
aaggugaacauguauucuu

SEQ ID NO: 1098850 - RNA, 19 nt, Artificial Sequence
  Description of Artificial Sequence: Synthetic oligonucleotide
ggugugaauaaagaguugg

SEQ ID NO: 1098851 - RNA, 19 nt, Artificial Sequence
  Description of Artificial Sequence: Synthetic oligonucleotide
uggacugacaguuccauau

SEQ ID NO: 1098852 - RNA, 19 nt, Artificial Sequence
  Description of Artificial Sequence: Synthetic oligonucleotide
uguuucuaauuccaacggu

SEQ ID NO: 1098853 - RNA, 19 nt, Artificial Sequence
  Description of Artificial Sequence: Synthetic oligonucleotide
aaggugaguauauggcgug

SEQ ID NO: 1098854 - RNA, 19 nt, Artificial Sequence
  Description of Artificial Sequence: Synthetic oligonucleotide
acgaacugaaaucaucuga

SEQ ID NO: 1098855 - RNA, 19 nt, Artificial Sequence
  Description of Artificial Sequence: Synthetic oligonucleotide
ugcucaaaguaccacgacu

SEQ ID NO: 1098856 - RNA, 19 nt, Artificial Sequence
  Description of Artificial Sequence: Synthetic oligonucleotide
gacgaacucgauuuucaag

SEQ ID NO: 1098857 - RNA, 19 nt, Artificial Sequence
  Description of Artificial Sequence: Synthetic oligonucleotide
ucgauuuucaagguaggca

SEQ ID NO: 1098858 - RNA, 19 nt, Artificial Sequence
  Description of Artificial Sequence: Synthetic oligonucleotide
aucuuuauauaaguauguc

SEQ ID NO: 1098859 - RNA, 19 nt, Artificial Sequence
  Description of Artificial Sequence: Synthetic oligonucleotide
acuaaaagauucuggguaa

SEQ ID NO: 1098860 - RNA, 19 nt, Artificial Sequence
  Description of Artificial Sequence: Synthetic oligonucleotide
ugguaauuucucgaagagg

SEQ ID NO: 1098861 - RNA, 19 nt, Artificial Sequence
  Description of Artificial Sequence: Synthetic oligonucleotide
acuaucugguuaauuauag

SEQ ID NO: 1098862 - RNA, 19 nt, Artificial Sequence
  Description of Artificial Sequence: Synthetic oligonucleotide
ggucuuucaauguagccag

SEQ ID NO: 1098863 - RNA, 19 nt, Artificial Sequence
  Description of Artificial Sequence: Synthetic oligonucleotide
ugguuaauuauaguuggcu

SEQ ID NO: 1098864 - RNA, 19 nt, Artificial Sequence
  Description of Artificial Sequence: Synthetic oligonucleotide
aauuagaggccagcuaucu

SEQ ID NO: 1098865 - RNA, 19 nt, Artificial Sequence
  Description of Artificial Sequence: Synthetic oligonucleotide
auuccaacgguauuguuua

SEQ ID NO: 1098866 - RNA, 19 nt, Artificial Sequence
  Description of Artificial Sequence: Synthetic oligonucleotide
uucggucaccugauaaagg

SEQ ID NO: 1098867 - RNA, 19 nt, Artificial Sequence
  Description of Artificial Sequence: Synthetic oligonucleotide
ugcacgaaucagcugaggu

SEQ ID NO: 1098868 - RNA, 19 nt, Artificial Sequence
  Description of Artificial Sequence: Synthetic oligonucleotide
aaaauugauccuugaucau

SEQ ID NO: 1098869 - RNA, 19 nt, Artificial Sequence
  Description of Artificial Sequence: Synthetic oligonucleotide
aauugauccuugaucauau

SEQ ID NO: 1098870 - RNA, 19 nt, Artificial Sequence
  Description of Artificial Sequence: Synthetic oligonucleotide
agacuauagcugcucaaag

SEQ ID NO: 1098871 - RNA, 19 nt, Artificial Sequence
  Description of Artificial Sequence: Synthetic oligonucleotide
aauggcggcauggaauauc

SEQ ID NO: 1098872 - RNA, 19 nt, Artificial Sequence
  Description of Artificial Sequence: Synthetic oligonucleotide
gacugacaguuccauaugc

SEQ ID NO: 1098873 - RNA, 19 nt, Artificial Sequence
  Description of Artificial Sequence: Synthetic oligonucleotide
aguaccacgacuggcauca

SEQ ID NO: 1098874 - RNA, 19 nt, Artificial Sequence
  Description of Artificial Sequence: Synthetic oligonucleotide
uauauaaguauguccuuuu

SEQ ID NO: 1098875 - RNA, 19 nt, Artificial Sequence
  Description of Artificial Sequence: Synthetic oligonucleotide
cagucuaguacagaagugc

SEQ ID NO: 1098876 - RNA, 19 nt, Artificial Sequence
  Description of Artificial Sequence: Synthetic oligonucleotide
aaaagauucuggguaaauu

SEQ ID NO: 1098877 - RNA, 19 nt, Artificial Sequence
  Description of Artificial Sequence: Synthetic oligonucleotide
aucugguuaauuauaguug

SEQ ID NO: 1098878 - RNA, 19 nt, Artificial Sequence
  Description of Artificial Sequence: Synthetic oligonucleotide
acguccacgccgaagagcc

SEQ ID NO: 1098879 - RNA, 19 nt, Artificial Sequence
  Description of Artificial Sequence: Synthetic oligonucleotide
ugccguuuaccaucaagag

SEQ ID NO: 1098880 - RNA, 19 nt, Artificial Sequence
  Description of Artificial Sequence: Synthetic oligonucleotide
uggugagagagcaaagaaa

SEQ ID NO: 1098881 - RNA, 19 nt, Artificial Sequence
  Description of Artificial Sequence: Synthetic oligonucleotide
ugcuuugugggaacagcag

SEQ ID NO: 1098882 - RNA, 19 nt, Artificial Sequence
  Description of Artificial Sequence: Synthetic oligonucleotide
ucaaaguaccacgacuggc

SEQ ID NO: 1098883 - RNA, 19 nt, Artificial Sequence
  Description of Artificial Sequence: Synthetic oligonucleotide
uggacgaacucgauuuuca

SEQ ID NO: 1098884 - RNA, 19 nt, Artificial Sequence
  Description of Artificial Sequence: Synthetic oligonucleotide
uacaaggugcagcuguaca

SEQ ID NO: 1098885 - RNA, 19 nt, Artificial Sequence
  Description of Artificial Sequence: Synthetic oligonucleotide
ugcuccgggcaccaaaucc

SEQ ID NO: 1098886 - RNA, 19 nt, Artificial Sequence
  Description of Artificial Sequence: Synthetic oligonucleotide
aaauugauccuugaucaua

SEQ ID NO: 1098887 - RNA, 19 nt, Artificial Sequence
  Description of Artificial Sequence: Synthetic oligonucleotide
cauuuaagucaaauuccac

SEQ ID NO: 1098888 - RNA, 19 nt, Artificial Sequence
  Description of Artificial Sequence: Synthetic oligonucleotide
guaggcauaaguucugaga

SEQ ID NO: 1098889 - RNA, 19 nt, Artificial Sequence
  Description of Artificial Sequence: Synthetic oligonucleotide
uuugcacgaaucagcugag

SEQ ID NO: 1098890 - RNA, 19 nt, Artificial Sequence
  Description of Artificial Sequence: Synthetic oligonucleotide
uuauuucauggugacuugc

SEQ ID NO: 1098891 - RNA, 19 nt, Artificial Sequence
  Description of Artificial Sequence: Synthetic oligonucleotide
gacagucuaguacagaagu

SEQ ID NO: 1098892 - RNA, 19 nt, Artificial Sequence
  Description of Artificial Sequence: Synthetic oligonucleotide
uaaguugcuggugugaaua

SEQ ID NO: 1098893 - RNA, 19 nt, Artificial Sequence
  Description of Artificial Sequence: Synthetic oligonucleotide
aaguaccacgacuggcauc

SEQ ID NO: 1098894 - RNA, 19 nt, Artificial Sequence
  Description of Artificial Sequence: Synthetic oligonucleotide
aagacuauagcugcucaaa

SEQ ID NO: 1098895 - RNA, 19 nt, Artificial Sequence
  Description of Artificial Sequence: Synthetic oligonucleotide
acaacucuaguaucugcug

SEQ ID NO: 1098896 - RNA, 19 nt, Artificial Sequence
  Description of Artificial Sequence: Synthetic oligonucleotide
auuagaggccagcuaucuc

SEQ ID NO: 1098897 - RNA, 19 nt, Artificial Sequence
  Description of Artificial Sequence: Synthetic oligonucleotide
auggaauaucuucggucac

SEQ ID NO: 1098898 - RNA, 19 nt, Artificial Sequence
  Description of Artificial Sequence: Synthetic oligonucleotide
gaggucuuucaauguagcc

SEQ ID NO: 1098899 - RNA, 19 nt, Artificial Sequence
  Description of Artificial Sequence: Synthetic oligonucleotide
aggucuuucaauguagcca

SEQ ID NO: 1098900 - RNA, 19 nt, Artificial Sequence
  Description of Artificial Sequence: Synthetic oligonucleotide
ccuuccucgaaauaauggg

SEQ ID NO: 1098901 - RNA, 19 nt, Artificial Sequence
  Description of Artificial Sequence: Synthetic oligonucleotide
ucuggcaguauuaguucca

SEQ ID NO: 1098902 - RNA, 19 nt, Artificial Sequence
  Description of Artificial Sequence: Synthetic oligonucleotide
ucuuaaucaccagaacuaa

SEQ ID NO: 1098903 - RNA, 19 nt, Artificial Sequence
  Description of Artificial Sequence: Synthetic oligonucleotide
cucaaaguaccacgacugg

SEQ ID NO: 1098904 - RNA, 19 nt, Artificial Sequence
  Description of Artificial Sequence: Synthetic oligonucleotide
uauuggacugacaguucca

SEQ ID NO: 1098905 - RNA, 19 nt, Artificial Sequence
  Description of Artificial Sequence: Synthetic oligonucleotide
aauuucucgaagaggugga

SEQ ID NO: 1098906 - RNA, 19 nt, Artificial Sequence
  Description of Artificial Sequence: Synthetic oligonucleotide
ccguuuaccaucaagagga

SEQ ID NO: 1098907 - RNA, 19 nt, Artificial Sequence
  Description of Artificial Sequence: Synthetic oligonucleotide
gguuaauuauaguuggcuc

SEQ ID NO: 1098908 - RNA, 19 nt, Artificial Sequence
  Description of Artificial Sequence: Synthetic oligonucleotide
gauggagguaacaaaugca

SEQ ID NO: 1098909 - RNA, 19 nt, Artificial Sequence
  Description of Artificial Sequence: Synthetic oligonucleotide
uucucuggguucuaauagu

SEQ ID NO: 1098910 - RNA, 19 nt, Artificial Sequence
  Description of Artificial Sequence: Synthetic oligonucleotide
aaacaauggcggcauggaa

SEQ ID NO: 1098911 - RNA, 19 nt, Artificial Sequence
  Description of Artificial Sequence: Synthetic oligonucleotide
gaaacgcugccguuuacca

SEQ ID NO: 1098912 - RNA, 19 nt, Artificial Sequence
  Description of Artificial Sequence: Synthetic oligonucleotide
ggaauguguuucuaauucc

SEQ ID NO: 1098913 - RNA, 19 nt, Artificial Sequence
  Description of Artificial Sequence: Synthetic oligonucleotide
ucuucggucaccugauaaa

SEQ ID NO: 1098914 - RNA, 19 nt, Artificial Sequence
  Description of Artificial Sequence: Synthetic oligonucleotide
aguagugcaaaaccaucaa

SEQ ID NO: 1098915 - RNA, 19 nt, Artificial Sequence
  Description of Artificial Sequence: Synthetic oligonucleotide
uauggcgugcuucagucuu

SEQ ID NO: 1098916 - RNA, 19 nt, Artificial Sequence
  Description of Artificial Sequence: Synthetic oligonucleotide
uauagacuaaggugaguau

SEQ ID NO: 1098917 - RNA, 19 nt, Artificial Sequence
  Description of Artificial Sequence: Synthetic oligonucleotide
aauggaaacgcugccguuu

SEQ ID NO: 1098918 - RNA, 19 nt, Artificial Sequence
  Description of Artificial Sequence: Synthetic oligonucleotide
aaagucugcuuugugggaa

SEQ ID NO: 1098919 - RNA, 19 nt, Artificial Sequence
  Description of Artificial Sequence: Synthetic oligonucleotide
cugguuaauuauaguuggc

SEQ ID NO: 1098920 - RNA, 19 nt, Artificial Sequence
  Description of Artificial Sequence: Synthetic oligonucleotide
auguauuuauuucuccauu

SEQ ID NO: 1098921 - RNA, 19 nt, Artificial Sequence
  Description of Artificial Sequence: Synthetic oligonucleotide
ugacuugcccauuucuuaa

SEQ ID NO: 1098922 - RNA, 19 nt, Artificial Sequence
  Description of Artificial Sequence: Synthetic oligonucleotide
uuaccaucaagaggaaagu

SEQ ID NO: 1098923 - RNA, 19 nt, Artificial Sequence
  Description of Artificial Sequence: Synthetic oligonucleotide
uuuuggagggauggaagga

SEQ ID NO: 1098924 - RNA, 19 nt, Artificial Sequence
  Description of Artificial Sequence: Synthetic oligonucleotide
uugagagguaaggaggaac

SEQ ID NO: 1098925 - RNA, 19 nt, Artificial Sequence
  Description of Artificial Sequence: Synthetic oligonucleotide
uggguucuaauagugguaa

SEQ ID NO: 1098926 - RNA, 19 nt, Artificial Sequence
  Description of Artificial Sequence: Synthetic oligonucleotide
ugaguauauggcgugcuuc

SEQ ID NO: 1098927 - RNA, 19 nt, Artificial Sequence
  Description of Artificial Sequence: Synthetic oligonucleotide
uaucugguacauagugugu

SEQ ID NO: 1098928 - RNA, 19 nt, Artificial Sequence
  Description of Artificial Sequence: Synthetic oligonucleotide
aggcauaaguucugagaag

SEQ ID NO: 1098929 - RNA, 19 nt, Artificial Sequence
  Description of Artificial Sequence: Synthetic oligonucleotide
cuucggucaccugauaaag

SEQ ID NO: 1098930 - RNA, 19 nt, Artificial Sequence
  Description of Artificial Sequence: Synthetic oligonucleotide
cugccguuuaccaucaaga

SEQ ID NO: 1098931 - RNA, 19 nt, Artificial Sequence
  Description of Artificial Sequence: Synthetic oligonucleotide
uggcuucacgaacugaaau

SEQ ID NO: 1098932 - RNA, 19 nt, Artificial Sequence
  Description of Artificial Sequence: Synthetic oligonucleotide
uggugugaauaaagaguug

SEQ ID NO: 1098933 - RNA, 19 nt, Artificial Sequence
  Description of Artificial Sequence: Synthetic oligonucleotide
gccguuuaccaucaagagg

SEQ ID NO: 1098934 - RNA, 19 nt, Artificial Sequence
  Description of Artificial Sequence: Synthetic oligonucleotide
aaccaucaauacaagacua

SEQ ID NO: 1098935 - RNA, 19 nt, Artificial Sequence
  Description of Artificial Sequence: Synthetic oligonucleotide
augucgaggucuguauugg

SEQ ID NO: 1098936 - RNA, 19 nt, Artificial Sequence
  Description of Artificial Sequence: Synthetic oligonucleotide
aauggacgaacucgauuuu

SEQ ID NO: 1098937 - RNA, 19 nt, Artificial Sequence
  Description of Artificial Sequence: Synthetic oligonucleotide
auagacuaaggugaguaua

SEQ ID NO: 1098938 - RNA, 19 nt, Artificial Sequence
  Description of Artificial Sequence: Synthetic oligonucleotide
gaauaaagaguuggugaga

SEQ ID NO: 1098939 - RNA, 19 nt, Artificial Sequence
  Description of Artificial Sequence: Synthetic oligonucleotide
cagaagugcuuauagacua

SEQ ID NO: 1098940 - RNA, 19 nt, Artificial Sequence
  Description of Artificial Sequence: Synthetic oligonucleotide
caagguaggcauaaguucu

SEQ ID NO: 1098941 - RNA, 19 nt, Artificial Sequence
  Description of Artificial Sequence: Synthetic oligonucleotide
uccaacgguauuguuuaca

SEQ ID NO: 1098942 - RNA, 19 nt, Artificial Sequence
  Description of Artificial Sequence: Synthetic oligonucleotide
gacuauagcugcucaaagu

SEQ ID NO: 1098943 - RNA, 19 nt, Artificial Sequence
  Description of Artificial Sequence: Synthetic oligonucleotide
uuccauaugccaggggcug

SEQ ID NO: 1098944 - RNA, 19 nt, Artificial Sequence
  Description of Artificial Sequence: Synthetic oligonucleotide
caugauggagguaacaaau

SEQ ID NO: 1098945 - RNA, 19 nt, Artificial Sequence
  Description of Artificial Sequence: Synthetic oligonucleotide
auaaagaguuggugagaga

SEQ ID NO: 1098946 - RNA, 19 nt, Artificial Sequence
  Description of Artificial Sequence: Synthetic oligonucleotide
gguggggugaauggaaacg

SEQ ID NO: 1098947 - RNA, 19 nt, Artificial Sequence
  Description of Artificial Sequence: Synthetic oligonucleotide
ggaagaguuuaagaauuag

SEQ ID NO: 1098948 - RNA, 19 nt, Artificial Sequence
  Description of Artificial Sequence: Synthetic oligonucleotide
auggacgaacucgauuuuc

SEQ ID NO: 1098949 - RNA, 19 nt, Artificial Sequence
  Description of Artificial Sequence: Synthetic oligonucleotide
ugaguguuccagucaaauu

SEQ ID NO: 1098950 - RNA, 19 nt, Artificial Sequence
  Description of Artificial Sequence: Synthetic oligonucleotide
uggcacuuuugcacgaauc

SEQ ID NO: 1098951 - RNA, 19 nt, Artificial Sequence
  Description of Artificial Sequence: Synthetic oligonucleotide
uaauuauaguuggcucuug

SEQ ID NO: 1098952 - RNA, 19 nt, Artificial Sequence
  Description of Artificial Sequence: Synthetic oligonucleotide
ugaaggguggacgacccaa

SEQ ID NO: 1098953 - RNA, 19 nt, Artificial Sequence
  Description of Artificial Sequence: Synthetic oligonucleotide
guaaggaggaacauuacau

SEQ ID NO: 1098954 - RNA, 19 nt, Artificial Sequence
  Description of Artificial Sequence: Synthetic oligonucleotide
ugcuuuucaugcacagcuc

SEQ ID NO: 1098955 - RNA, 19 nt, Artificial Sequence
  Description of Artificial Sequence: Synthetic oligonucleotide
augauggagguaacaaaug

SEQ ID NO: 1098956 - RNA, 19 nt, Artificial Sequence
  Description of Artificial Sequence: Synthetic oligonucleotide
ugcugacucaacuuaucuu

SEQ ID NO: 1098957 - RNA, 19 nt, Artificial Sequence
  Description of Artificial Sequence: Synthetic oligonucleotide
uugguggggugaauggaaa

SEQ ID NO: 1098958 - RNA, 19 nt, Artificial Sequence
  Description of Artificial Sequence: Synthetic oligonucleotide
gcauggaauaucuucgguc

SEQ ID NO: 1098959 - RNA, 19 nt, Artificial Sequence
  Description of Artificial Sequence: Synthetic oligonucleotide
uccucgaaauaauggggau

SEQ ID NO: 1098960 - RNA, 19 nt, Artificial Sequence
  Description of Artificial Sequence: Synthetic oligonucleotide
aaccaugauggagguaaca

SEQ ID NO: 1098961 - RNA, 19 nt, Artificial Sequence
  Description of Artificial Sequence: Synthetic oligonucleotide
cgaaauaauggggaugucg

SEQ ID NO: 1098962 - RNA, 19 nt, Artificial Sequence
  Description of Artificial Sequence: Synthetic oligonucleotide
cuuuaacuacuaagcauaa

SEQ ID NO: 1098963 - RNA, 19 nt, Artificial Sequence
  Description of Artificial Sequence: Synthetic oligonucleotide
acuaagcauaaaucaccau

SEQ ID NO: 1098964 - RNA, 19 nt, Artificial Sequence
  Description of Artificial Sequence: Synthetic oligonucleotide
acccaaaauugaguuuggg

SEQ ID NO: 1098965 - RNA, 19 nt, Artificial Sequence
  Description of Artificial Sequence: Synthetic oligonucleotide
uucaucgcuuauucucuuc

SEQ ID NO: 1098966 - RNA, 19 nt, Artificial Sequence
  Description of Artificial Sequence: Synthetic oligonucleotide
uuacauggagcaugaugua

SEQ ID NO: 1098967 - RNA, 19 nt, Artificial Sequence
  Description of Artificial Sequence: Synthetic oligonucleotide
ucaaugucaucaggccuug

SEQ ID NO: 1098968 - RNA, 19 nt, Artificial Sequence
  Description of Artificial Sequence: Synthetic oligonucleotide
gcggcauggaauaucuucg

SEQ ID NO: 1098969 - RNA, 19 nt, Artificial Sequence
  Description of Artificial Sequence: Synthetic oligonucleotide
gacgacccaaaauugaguu

SEQ ID NO: 1098970 - RNA, 19 nt, Artificial Sequence
  Description of Artificial Sequence: Synthetic oligonucleotide
acuauaucugguacauagu

SEQ ID NO: 1098971 - RNA, 19 nt, Artificial Sequence
  Description of Artificial Sequence: Synthetic oligonucleotide
aguauauggcgugcuucag

SEQ ID NO: 1098972 - RNA, 19 nt, Artificial Sequence
  Description of Artificial Sequence: Synthetic oligonucleotide
cuugggauggcuuuggcuu

SEQ ID NO: 1098973 - RNA, 19 nt, Artificial Sequence
  Description of Artificial Sequence: Synthetic oligonucleotide
auaaguugcuggugugaau

SEQ ID NO: 1098974 - RNA, 19 nt, Artificial Sequence
  Description of Artificial Sequence: Synthetic oligonucleotide
gguaggcauaaguucugag

SEQ ID NO: 1098975 - RNA, 19 nt, Artificial Sequence
  Description of Artificial Sequence: Synthetic oligonucleotide
acagucuaguacagaagug

SEQ ID NO: 1098976 - RNA, 19 nt, Artificial Sequence
  Description of Artificial Sequence: Synthetic oligonucleotide
gaauuagaggccagcuauc

SEQ ID NO: 1098977 - RNA, 19 nt, Artificial Sequence
  Description of Artificial Sequence: Synthetic oligonucleotide
agguaaggaggaacauuac

SEQ ID NO: 1098978 - RNA, 19 nt, Artificial Sequence
  Description of Artificial Sequence: Synthetic oligonucleotide
aucgcuuauucucuuccuu

SEQ ID NO: 1098979 - RNA, 19 nt, Artificial Sequence
  Description of Artificial Sequence: Synthetic oligonucleotide
guagcagcccucaaaggca

SEQ ID NO: 1098980 - RNA, 19 nt, Artificial Sequence
  Description of Artificial Sequence: Synthetic oligonucleotide
ugucgaggucuguauugga

SEQ ID NO: 1098981 - RNA, 19 nt, Artificial Sequence
  Description of Artificial Sequence: Synthetic oligonucleotide
cucgaaauaauggggaugu

SEQ ID NO: 1098982 - RNA, 19 nt, Artificial Sequence
  Description of Artificial Sequence: Synthetic oligonucleotide
ggucaccugauaaaggcac

SEQ ID NO: 1098983 - RNA, 19 nt, Artificial Sequence
  Description of Artificial Sequence: Synthetic oligonucleotide
agacuaaggugaguauaug

SEQ ID NO: 1098984 - RNA, 19 nt, Artificial Sequence
  Description of Artificial Sequence: Synthetic oligonucleotide
aguuggugagagagcaaag

SEQ ID NO: 1098985 - RNA, 19 nt, Artificial Sequence
  Description of Artificial Sequence: Synthetic oligonucleotide
gaacugaaaucaucugagu

SEQ ID NO: 1098986 - RNA, 19 nt, Artificial Sequence
  Description of Artificial Sequence: Synthetic oligonucleotide
acgccgaagagccgagcag

SEQ ID NO: 1098987 - RNA, 19 nt, Artificial Sequence
  Description of Artificial Sequence: Synthetic oligonucleotide
agccgagcagggcccagcg

SEQ ID NO: 1098988 - RNA, 19 nt, Artificial Sequence
  Description of Artificial Sequence: Synthetic oligonucleotide
auauggcgugcuucagucu

SEQ ID NO: 1098989 - RNA, 19 nt, Artificial Sequence
  Description of Artificial Sequence: Synthetic oligonucleotide
gcuuauagacuaaggugag

SEQ ID NO: 1098990 - RNA, 19 nt, Artificial Sequence
  Description of Artificial Sequence: Synthetic oligonucleotide
cuuacuauaucugguacau

SEQ ID NO: 1098991 - RNA, 19 nt, Artificial Sequence
  Description of Artificial Sequence: Synthetic oligonucleotide
gucgaggucuguauuggac

SEQ ID NO: 1098992 - RNA, 19 nt, Artificial Sequence
  Description of Artificial Sequence: Synthetic oligonucleotide
gacguccacgccgaagagc

SEQ ID NO: 1098993 - RNA, 19 nt, Artificial Sequence
  Description of Artificial Sequence: Synthetic oligonucleotide
uugcacgaaucagcugagg

SEQ ID NO: 1098994 - RNA, 19 nt, Artificial Sequence
  Description of Artificial Sequence: Synthetic oligonucleotide
ggugagagagcaaagaaau

SEQ ID NO: 1098995 - RNA, 19 nt, Artificial Sequence
  Description of Artificial Sequence: Synthetic oligonucleotide
caguaagagguccccaaga

SEQ ID NO: 1098996 - RNA, 19 nt, Artificial Sequence
  Description of Artificial Sequence: Synthetic oligonucleotide
uguuuacauuuaagucaaa

SEQ ID NO: 1098997 - RNA, 19 nt, Artificial Sequence
  Description of Artificial Sequence: Synthetic oligonucleotide
agcucuagacaagucuaca

SEQ ID NO: 1098998 - RNA, 19 nt, Artificial Sequence
  Description of Artificial Sequence: Synthetic oligonucleotide
auaucuucggucaccugau

SEQ ID NO: 1098999 - RNA, 19 nt, Artificial Sequence
  Description of Artificial Sequence: Synthetic oligonucleotide
gagagagcaaagaaauuau

SEQ ID NO: 1099000 - RNA, 19 nt, Artificial Sequence
  Description of Artificial Sequence: Synthetic oligonucleotide
guucuaauagugguaauuu

SEQ ID NO: 1099001 - RNA, 19 nt, Artificial Sequence
  Description of Artificial Sequence: Synthetic oligonucleotide
gugugaaacaauggcggca

SEQ ID NO: 1099002 - RNA, 19 nt, Artificial Sequence
  Description of Artificial Sequence: Synthetic oligonucleotide
gaaggugaacauguauucu

SEQ ID NO: 1099003 - RNA, 19 nt, Artificial Sequence
  Description of Artificial Sequence: Synthetic oligonucleotide
auggaaacgcugccguuua

SEQ ID NO: 1099004 - RNA, 19 nt, Artificial Sequence
  Description of Artificial Sequence: Synthetic oligonucleotide
uaauuccaacgguauuguu

SEQ ID NO: 1099005 - RNA, 19 nt, Artificial Sequence
  Description of Artificial Sequence: Synthetic oligonucleotide
cccaaaauugaguuuggga

SEQ ID NO: 1099006 - RNA, 19 nt, Artificial Sequence
  Description of Artificial Sequence: Synthetic oligonucleotide
cugcucaaaguaccacgac

SEQ ID NO: 1099007 - RNA, 19 nt, Artificial Sequence
  Description of Artificial Sequence: Synthetic oligonucleotide
caagacuauagcugcucaa

SEQ ID NO: 1099008 - RNA, 19 nt, Artificial Sequence
  Description of Artificial Sequence: Synthetic oligonucleotide
agagagcaaagaaauuauu

SEQ ID NO: 1099009 - RNA, 19 nt, Artificial Sequence
  Description of Artificial Sequence: Synthetic oligonucleotide
acgacuggcaucauuuauu

SEQ ID NO: 1099010 - RNA, 19 nt, Artificial Sequence
  Description of Artificial Sequence: Synthetic oligonucleotide
caucugaguguuccaguca

SEQ ID NO: 1099011 - RNA, 19 nt, Artificial Sequence
  Description of Artificial Sequence: Synthetic oligonucleotide
cuacagaguucuuucuucu

SEQ ID NO: 1099012 - RNA, 19 nt, Artificial Sequence
  Description of Artificial Sequence: Synthetic oligonucleotide
uaguuggcucuuggugggg

SEQ ID NO: 1099013 - RNA, 19 nt, Artificial Sequence
  Description of Artificial Sequence: Synthetic oligonucleotide
guauauggcgugcuucagu

SEQ ID NO: 1099014 - RNA, 19 nt, Artificial Sequence
  Description of Artificial Sequence: Synthetic oligonucleotide
caaggugcagcuguacaga

SEQ ID NO: 1099015 - RNA, 19 nt, Artificial Sequence
  Description of Artificial Sequence: Synthetic oligonucleotide
uggaaacgcugccguuuac

SEQ ID NO: 1099016 - RNA, 19 nt, Artificial Sequence
  Description of Artificial Sequence: Synthetic oligonucleotide
guggacgacccaaaauuga

SEQ ID NO: 1099017 - RNA, 19 nt, Artificial Sequence
  Description of Artificial Sequence: Synthetic oligonucleotide
cagaacuaauggacgaacu

SEQ ID NO: 1099018 - RNA, 19 nt, Artificial Sequence
  Description of Artificial Sequence: Synthetic oligonucleotide
cuaucugguuaauuauagu

SEQ ID NO: 1099019 - RNA, 19 nt, Artificial Sequence
  Description of Artificial Sequence: Synthetic oligonucleotide
uuccaacgguauuguuuac

SEQ ID NO: 1099020 - RNA, 19 nt, Artificial Sequence
  Description of Artificial Sequence: Synthetic oligonucleotide
gcgugcuucagucuucuga

SEQ ID NO: 1099021 - RNA, 19 nt, Artificial Sequence
  Description of Artificial Sequence: Synthetic oligonucleotide
cuuaaucaccagaacuaau

SEQ ID NO: 1099022 - RNA, 19 nt, Artificial Sequence
  Description of Artificial Sequence: Synthetic oligonucleotide
uucuuccgacguccacgcc

SEQ ID NO: 1099023 - RNA, 19 nt, Artificial Sequence
  Description of Artificial Sequence: Synthetic oligonucleotide
agguaggcauaaguucuga

SEQ ID NO: 1099024 - RNA, 19 nt, Artificial Sequence
  Description of Artificial Sequence: Synthetic oligonucleotide
agaagugcuuauagacuaa

SEQ ID NO: 1099025 - RNA, 19 nt, Artificial Sequence
  Description of Artificial Sequence: Synthetic oligonucleotide
acuaauggacgaacucgau

SEQ ID NO: 1099026 - RNA, 19 nt, Artificial Sequence
  Description of Artificial Sequence: Synthetic oligonucleotide
ggccagcuaucucuucagg

SEQ ID NO: 1099027 - RNA, 19 nt, Artificial Sequence
  Description of Artificial Sequence: Synthetic oligonucleotide
auuucucgaagagguggaa

SEQ ID NO: 1099028 - RNA, 19 nt, Artificial Sequence
  Description of Artificial Sequence: Synthetic oligonucleotide
gugaacauguauucuucuu

SEQ ID NO: 1099029 - RNA, 19 nt, Artificial Sequence
  Description of Artificial Sequence: Synthetic oligonucleotide
gaggucuguauuggacuga

SEQ ID NO: 1099030 - RNA, 19 nt, Artificial Sequence
  Description of Artificial Sequence: Synthetic oligonucleotide
ggguggacgacccaaaauu

SEQ ID NO: 1099031 - RNA, 19 nt, Artificial Sequence
  Description of Artificial Sequence: Synthetic oligonucleotide
ucgaaauaauggggauguc

SEQ ID NO: 1099032 - RNA, 19 nt, Artificial Sequence
  Description of Artificial Sequence: Synthetic oligonucleotide
cugaaaucaucugaguguu

SEQ ID NO: 1099033 - RNA, 19 nt, Artificial Sequence
  Description of Artificial Sequence: Synthetic oligonucleotide
ccucgaaauaauggggaug

SEQ ID NO: 1099034 - RNA, 19 nt, Artificial Sequence
  Description of Artificial Sequence: Synthetic oligonucleotide
uggcgugcuucagucuucu

SEQ ID NO: 1099035 - RNA, 19 nt, Artificial Sequence
  Description of Artificial Sequence: Synthetic oligonucleotide
gaaggguggacgacccaaa

SEQ ID NO: 1099036 - RNA, 19 nt, Artificial Sequence
  Description of Artificial Sequence: Synthetic oligonucleotide
guaaggccacagcucuaga

SEQ ID NO: 1099037 - RNA, 19 nt, Artificial Sequence
  Description of Artificial Sequence: Synthetic oligonucleotide
guuccauaugccaggggcu

SEQ ID NO: 1099038 - RNA, 19 nt, Artificial Sequence
  Description of Artificial Sequence: Synthetic oligonucleotide
auaaaccaugauggaggua

SEQ ID NO: 1099039 - RNA, 19 nt, Artificial Sequence
  Description of Artificial Sequence: Synthetic oligonucleotide
ggacgaacucgauuuucaa

SEQ ID NO: 1099040 - RNA, 19 nt, Artificial Sequence
  Description of Artificial Sequence: Synthetic oligonucleotide
cggcauggaauaucuucgg

SEQ ID NO: 1099041 - RNA, 19 nt, Artificial Sequence
  Description of Artificial Sequence: Synthetic oligonucleotide
cuuauagacuaaggugagu

SEQ ID NO: 1099042 - RNA, 19 nt, Artificial Sequence
  Description of Artificial Sequence: Synthetic oligonucleotide
caucgcuuauucucuuccu

SEQ ID NO: 1099043 - RNA, 19 nt, Artificial Sequence
  Description of Artificial Sequence: Synthetic oligonucleotide
gggcaccaaauccauuuaa

SEQ ID NO: 1099044 - RNA, 19 nt, Artificial Sequence
  Description of Artificial Sequence: Synthetic oligonucleotide
gcuccgggcaccaaaucca

SEQ ID NO: 1099045 - RNA, 19 nt, Artificial Sequence
  Description of Artificial Sequence: Synthetic oligonucleotide
gugaaggguggacgaccca

SEQ ID NO: 1099046 - RNA, 19 nt, Artificial Sequence
  Description of Artificial Sequence: Synthetic oligonucleotide
cacgacuggcaucauuuau

SEQ ID NO: 1099047 - RNA, 19 nt, Artificial Sequence
  Description of Artificial Sequence: Synthetic oligonucleotide
aggcacuaucugguuaauu

SEQ ID NO: 1099048 - RNA, 19 nt, Artificial Sequence
  Description of Artificial Sequence: Synthetic oligonucleotide
cugcuccgggcaccaaauc

SEQ ID NO: 1099049 - RNA, 19 nt, Artificial Sequence
  Description of Artificial Sequence: Synthetic oligonucleotide
gugaguauauggcgugcuu

SEQ ID NO: 1099050 - RNA, 19 nt, Artificial Sequence
  Description of Artificial Sequence: Synthetic oligonucleotide
ccaacgguauuguuuacau

SEQ ID NO: 1099051 - RNA, 19 nt, Artificial Sequence
  Description of Artificial Sequence: Synthetic oligonucleotide
uggcggcauggaauaucuu

SEQ ID NO: 1099052 - RNA, 19 nt, Artificial Sequence
  Description of Artificial Sequence: Synthetic oligonucleotide
acgcugccguuuaccauca

SEQ ID NO: 1099053 - RNA, 19 nt, Artificial Sequence
  Description of Artificial Sequence: Synthetic oligonucleotide
gggaugucgaggucuguau

SEQ ID NO: 1099054 - RNA, 19 nt, Artificial Sequence
  Description of Artificial Sequence: Synthetic oligonucleotide
gcauuaugauauaacuauu

SEQ ID NO: 1099055 - RNA, 19 nt, Artificial Sequence
  Description of Artificial Sequence: Synthetic oligonucleotide
gugagagagcaaagaaauu

SEQ ID NO: 1099056 - RNA, 19 nt, Artificial Sequence
  Description of Artificial Sequence: Synthetic oligonucleotide
ggacgacccaaaauugagu

SEQ ID NO: 1099057 - RNA, 19 nt, Artificial Sequence
  Description of Artificial Sequence: Synthetic oligonucleotide
cauaugccaggggcuguaa

SEQ ID NO: 1099058 - RNA, 19 nt, Artificial Sequence
  Description of Artificial Sequence: Synthetic oligonucleotide
ggggaugucgaggucugua

SEQ ID NO: 1099059 - RNA, 19 nt, Artificial Sequence
  Description of Artificial Sequence: Synthetic oligonucleotide
cuggcaguauuaguuccau

SEQ ID NO: 1099060 - RNA, 19 nt, Artificial Sequence
  Description of Artificial Sequence: Synthetic oligonucleotide
acgaaucagcugaggucuu

SEQ ID NO: 1099061 - RNA, 19 nt, Artificial Sequence
  Description of Artificial Sequence: Synthetic oligonucleotide
cggucaccugauaaaggca

SEQ ID NO: 1099062 - RNA, 19 nt, Artificial Sequence
  Description of Artificial Sequence: Synthetic oligonucleotide
ggcgugcuucagucuucug

SEQ ID NO: 1099063 - RNA, 19 nt, Artificial Sequence
  Description of Artificial Sequence: Synthetic oligonucleotide
cuccgggcaccaaauccau

SEQ ID NO: 1099064 - RNA, 19 nt, Artificial Sequence
  Description of Artificial Sequence: Synthetic oligonucleotide
ccagacagucuaguacaga

SEQ ID NO: 1099065 - RNA, 19 nt, Artificial Sequence
  Description of Artificial Sequence: Synthetic oligonucleotide
ggguucuaauagugguaau

SEQ ID NO: 1099066 - RNA, 19 nt, Artificial Sequence
  Description of Artificial Sequence: Synthetic oligonucleotide
cgacguccacgccgaagag

SEQ ID NO: 1099067 - RNA, 19 nt, Artificial Sequence
  Description of Artificial Sequence: Synthetic oligonucleotide
cgagcagggcccagcggca

SEQ ID NO: 1099068 - RNA, 19 nt, Artificial Sequence
  Description of Artificial Sequence: Synthetic oligonucleotide
caauggcggcauggaauau

SEQ ID NO: 1099069 - RNA, 19 nt, Artificial Sequence
  Description of Artificial Sequence: Synthetic oligonucleotide
cgggcaccaaauccauuua

SEQ ID NO: 1099070 - RNA, 19 nt, Artificial Sequence
  Description of Artificial Sequence: Synthetic oligonucleotide
ggguucagguaggguuugu

SEQ ID NO: 1099071 - RNA, 19 nt, Artificial Sequence
  Description of Artificial Sequence: Synthetic oligonucleotide
guaccacgacuggcaucau

SEQ ID NO: 1099072 - RNA, 19 nt, Artificial Sequence
  Description of Artificial Sequence: Synthetic oligonucleotide
aauauuuagggucugcuuc

SEQ ID NO: 1099073 - RNA, 19 nt, Artificial Sequence
  Description of Artificial Sequence: Synthetic oligonucleotide
aaaguuauuacaaggguac

SEQ ID NO: 1099074 - RNA, 19 nt, Artificial Sequence
  Description of Artificial Sequence: Synthetic oligonucleotide
uaucuuaaugcauauaugu

SEQ ID NO: 1099075 - RNA, 19 nt, Artificial Sequence
  Description of Artificial Sequence: Synthetic oligonucleotide
aagcaaaaguauuagcauc

SEQ ID NO: 1099076 - RNA, 19 nt, Artificial Sequence
  Description of Artificial Sequence: Synthetic oligonucleotide
aaaguauuagcauccagga

SEQ ID NO: 1099077 - RNA, 19 nt, Artificial Sequence
  Description of Artificial Sequence: Synthetic oligonucleotide
uuuauggcaccuauaaaag

SEQ ID NO: 1099078 - RNA, 19 nt, Artificial Sequence
  Description of Artificial Sequence: Synthetic oligonucleotide
cugauuacagcuuuucucg

SEQ ID NO: 1099079 - RNA, 19 nt, Artificial Sequence
  Description of Artificial Sequence: Synthetic oligonucleotide
acucggagcacacaaaggc

SEQ ID NO: 1099080 - RNA, 19 nt, Artificial Sequence
  Description of Artificial Sequence: Synthetic oligonucleotide
auaauuuccauuccugguc

SEQ ID NO: 1099081 - RNA, 19 nt, Artificial Sequence
  Description of Artificial Sequence: Synthetic oligonucleotide
aguauuagcauccaggaau

SEQ ID NO: 1099082 - RNA, 19 nt, Artificial Sequence
  Description of Artificial Sequence: Synthetic oligonucleotide
aguaucuuaaugcauauau

SEQ ID NO: 1099083 - RNA, 19 nt, Artificial Sequence
  Description of Artificial Sequence: Synthetic oligonucleotide
uaguguuuagaaauggcag

SEQ ID NO: 1099084 - RNA, 19 nt, Artificial Sequence
  Description of Artificial Sequence: Synthetic oligonucleotide
cuuuggugaacacacaucc

SEQ ID NO: 1099085 - RNA, 19 nt, Artificial Sequence
  Description of Artificial Sequence: Synthetic oligonucleotide
uucacuaaguugcuagcgg

SEQ ID NO: 1099086 - RNA, 19 nt, Artificial Sequence
  Description of Artificial Sequence: Synthetic oligonucleotide
aaccuuauaguguuuagaa

SEQ ID NO: 1099087 - RNA, 19 nt, Artificial Sequence
  Description of Artificial Sequence: Synthetic oligonucleotide
acagaaauaggucauccug

SEQ ID NO: 1099088 - RNA, 19 nt, Artificial Sequence
  Description of Artificial Sequence: Synthetic oligonucleotide
acgcuuguaaaccuuauag

SEQ ID NO: 1099089 - RNA, 19 nt, Artificial Sequence
  Description of Artificial Sequence: Synthetic oligonucleotide
auuauuagguccaaucuuc

SEQ ID NO: 1099090 - RNA, 19 nt, Artificial Sequence
  Description of Artificial Sequence: Synthetic oligonucleotide
aguuaggacgcuuguaaac

SEQ ID NO: 1099091 - RNA, 19 nt, Artificial Sequence
  Description of Artificial Sequence: Synthetic oligonucleotide
uacuucacuaaguugcuag

SEQ ID NO: 1099092 - RNA, 19 nt, Artificial Sequence
  Description of Artificial Sequence: Synthetic oligonucleotide
auauguaccacagguauuc

SEQ ID NO: 1099093 - RNA, 19 nt, Artificial Sequence
  Description of Artificial Sequence: Synthetic oligonucleotide
uuagcauccaggaauaauu

SEQ ID NO: 1099094 - RNA, 19 nt, Artificial Sequence
  Description of Artificial Sequence: Synthetic oligonucleotide
uguagaucacuaaaacaca

SEQ ID NO: 1099095 - RNA, 19 nt, Artificial Sequence
  Description of Artificial Sequence: Synthetic oligonucleotide
cuuuauggcaccuauaaaa

SEQ ID NO: 1099096 - RNA, 19 nt, Artificial Sequence
  Description of Artificial Sequence: Synthetic oligonucleotide
aaagaauacuucucaaaua

SEQ ID NO: 1099097 - RNA, 19 nt, Artificial Sequence
  Description of Artificial Sequence: Synthetic oligonucleotide
cacaucuguaggaagaaag

SEQ ID NO: 1099098 - RNA, 19 nt, Artificial Sequence
  Description of Artificial Sequence: Synthetic oligonucleotide
ucuauaagcuuucuacuaa

SEQ ID NO: 1099099 - RNA, 19 nt, Artificial Sequence
  Description of Artificial Sequence: Synthetic oligonucleotide
uguuuacccuguuggaugg

SEQ ID NO: 1099100 - RNA, 19 nt, Artificial Sequence
  Description of Artificial Sequence: Synthetic oligonucleotide
ucggagcacacaaaggcgg

SEQ ID NO: 1099101 - RNA, 19 nt, Artificial Sequence
  Description of Artificial Sequence: Synthetic oligonucleotide
auuacaaggguacuucacu

SEQ ID NO: 1099102 - RNA, 19 nt, Artificial Sequence
  Description of Artificial Sequence: Synthetic oligonucleotide
gauuuauuacugaaaucag

SEQ ID NO: 1099103 - RNA, 19 nt, Artificial Sequence
  Description of Artificial Sequence: Synthetic oligonucleotide
acugcccgcauuuacagag

SEQ ID NO: 1099104 - RNA, 19 nt, Artificial Sequence
  Description of Artificial Sequence: Synthetic oligonucleotide
uguaccacagguauucuau

SEQ ID NO: 1099105 - RNA, 19 nt, Artificial Sequence
  Description of Artificial Sequence: Synthetic oligonucleotide
uuaaucgagaugaagccuu

SEQ ID NO: 1099106 - RNA, 19 nt, Artificial Sequence
  Description of Artificial Sequence: Synthetic oligonucleotide
agacaaggguuguacuucc

SEQ ID NO: 1099107 - RNA, 19 nt, Artificial Sequence
  Description of Artificial Sequence: Synthetic oligonucleotide
uguuagagaguccaggguu

SEQ ID NO: 1099108 - RNA, 19 nt, Artificial Sequence
  Description of Artificial Sequence: Synthetic oligonucleotide
gaaguacuggauuuauuac

SEQ ID NO: 1099109 - RNA, 19 nt, Artificial Sequence
  Description of Artificial Sequence: Synthetic oligonucleotide
uacagagcgaggaccaucc

SEQ ID NO: 1099110 - RNA, 19 nt, Artificial Sequence
  Description of Artificial Sequence: Synthetic oligonucleotide
ugaauuucugaguucuacu

SEQ ID NO: 1099111 - RNA, 19 nt, Artificial Sequence
  Description of Artificial Sequence: Synthetic oligonucleotide
auagcauccgaucuuucug

SEQ ID NO: 1099112 - RNA, 19 nt, Artificial Sequence
  Description of Artificial Sequence: Synthetic oligonucleotide
uuguacuuccaaauacagc

SEQ ID NO: 1099113 - RNA, 19 nt, Artificial Sequence
  Description of Artificial Sequence: Synthetic oligonucleotide
uguucccuacaccaggcag

SEQ ID NO: 1099114 - RNA, 19 nt, Artificial Sequence
  Description of Artificial Sequence: Synthetic oligonucleotide
uauuacaaggguacuucac

SEQ ID NO: 1099115 - RNA, 19 nt, Artificial Sequence
  Description of Artificial Sequence: Synthetic oligonucleotide
ugaaucaacaggccuuaca

SEQ ID NO: 1099116 - RNA, 19 nt, Artificial Sequence
  Description of Artificial Sequence: Synthetic oligonucleotide
uaaaccuuauaguguuuag

SEQ ID NO: 1099117 - RNA, 19 nt, Artificial Sequence
  Description of Artificial Sequence: Synthetic oligonucleotide
auguuuacccuguuggaug

SEQ ID NO: 1099118 - RNA, 19 nt, Artificial Sequence
  Description of Artificial Sequence: Synthetic oligonucleotide
uuuccucacaacucggagc

SEQ ID NO: 1099119 - RNA, 19 nt, Artificial Sequence
  Description of Artificial Sequence: Synthetic oligonucleotide
gcaccuauaaaagagaaug

SEQ ID NO: 1099120 - RNA, 19 nt, Artificial Sequence
  Description of Artificial Sequence: Synthetic oligonucleotide
ugaguaauguaguuugcuc

SEQ ID NO: 1099121 - RNA, 19 nt, Artificial Sequence
  Description of Artificial Sequence: Synthetic oligonucleotide
guaggcgauauguuuaccc

SEQ ID NO: 1099122 - RNA, 19 nt, Artificial Sequence
  Description of Artificial Sequence: Synthetic oligonucleotide
uaauuuugcaguggcacug

SEQ ID NO: 1099123 - RNA, 19 nt, Artificial Sequence
  Description of Artificial Sequence: Synthetic oligonucleotide
gguuaaucgagaugaagcc

SEQ ID NO: 1099124 - RNA, 19 nt, Artificial Sequence
  Description of Artificial Sequence: Synthetic oligonucleotide
uuauuagguccaaucuuca

SEQ ID NO: 1099125 - RNA, 19 nt, Artificial Sequence
  Description of Artificial Sequence: Synthetic oligonucleotide
ugugcuucuugcaccgagg

SEQ ID NO: 1099126 - RNA, 19 nt, Artificial Sequence
  Description of Artificial Sequence: Synthetic oligonucleotide
aaggguacuucacuaaguu

SEQ ID NO: 1099127 - RNA, 19 nt, Artificial Sequence
  Description of Artificial Sequence: Synthetic oligonucleotide
cuguuuuccccuaagcgac

SEQ ID NO: 1099128 - RNA, 19 nt, Artificial Sequence
  Description of Artificial Sequence: Synthetic oligonucleotide
uucuauaagcuuucuacua

SEQ ID NO: 1099129 - RNA, 19 nt, Artificial Sequence
  Description of Artificial Sequence: Synthetic oligonucleotide
uccccuaagcgacacacug

SEQ ID NO: 1099130 - RNA, 19 nt, Artificial Sequence
  Description of Artificial Sequence: Synthetic oligonucleotide
aaaccuuauaguguuuaga

SEQ ID NO: 1099131 - RNA, 19 nt, Artificial Sequence
  Description of Artificial Sequence: Synthetic oligonucleotide
aucaacaggccuuacaguu

SEQ ID NO: 1099132 - RNA, 19 nt, Artificial Sequence
  Description of Artificial Sequence: Synthetic oligonucleotide
auauuuagggucugcuucu

SEQ ID NO: 1099133 - RNA, 19 nt, Artificial Sequence
  Description of Artificial Sequence: Synthetic oligonucleotide
uauuagguccaaucuucag

SEQ ID NO: 1099134 - RNA, 19 nt, Artificial Sequence
  Description of Artificial Sequence: Synthetic oligonucleotide
aacuguaggcgauauguuu

SEQ ID NO: 1099135 - RNA, 19 nt, Artificial Sequence
  Description of Artificial Sequence: Synthetic oligonucleotide
acaggccuuacaguuaagc

SEQ ID NO: 1099136 - RNA, 19 nt, Artificial Sequence
  Description of Artificial Sequence: Synthetic oligonucleotide
agaaauaggucauccugcu

SEQ ID NO: 1099137 - RNA, 19 nt, Artificial Sequence
  Description of Artificial Sequence: Synthetic oligonucleotide
uuauggcaccuauaaaaga

SEQ ID NO: 1099138 - RNA, 19 nt, Artificial Sequence
  Description of Artificial Sequence: Synthetic oligonucleotide
acuaaauaauuuagacugg

SEQ ID NO: 1099139 - RNA, 19 nt, Artificial Sequence
  Description of Artificial Sequence: Synthetic oligonucleotide
cauuuacagagcgaggacc

SEQ ID NO: 1099140 - RNA, 19 nt, Artificial Sequence
  Description of Artificial Sequence: Synthetic oligonucleotide
uagggucugcuucugaaga

SEQ ID NO: 1099141 - RNA, 19 nt, Artificial Sequence
  Description of Artificial Sequence: Synthetic oligonucleotide
guuaggacgcuuguaaacc

SEQ ID NO: 1099142 - RNA, 19 nt, Artificial Sequence
  Description of Artificial Sequence: Synthetic oligonucleotide
uccguugaauuucugaguu

SEQ ID NO: 1099143 - RNA, 19 nt, Artificial Sequence
  Description of Artificial Sequence: Synthetic oligonucleotide
aggcauaaaacugccuccc

SEQ ID NO: 1099144 - RNA, 19 nt, Artificial Sequence
  Description of Artificial Sequence: Synthetic oligonucleotide
caccuauaaaagagaaugc

SEQ ID NO: 1099145 - RNA, 19 nt, Artificial Sequence
  Description of Artificial Sequence: Synthetic oligonucleotide
uuuaugugcugaacuaaau

SEQ ID NO: 1099146 - RNA, 19 nt, Artificial Sequence
  Description of Artificial Sequence: Synthetic oligonucleotide
uuagggucugcuucugaag

SEQ ID NO: 1099147 - RNA, 19 nt, Artificial Sequence
  Description of Artificial Sequence: Synthetic oligonucleotide
uugaauuucugaguucuac

SEQ ID NO: 1099148 - RNA, 19 nt, Artificial Sequence
  Description of Artificial Sequence: Synthetic oligonucleotide
acaaaggcgguugugcuuc

SEQ ID NO: 1099149 - RNA, 19 nt, Artificial Sequence
  Description of Artificial Sequence: Synthetic oligonucleotide
caugcuugcacaaugggaa

SEQ ID NO: 1099150 - RNA, 19 nt, Artificial Sequence
  Description of Artificial Sequence: Synthetic oligonucleotide
uguuggauggcugaguaau

SEQ ID NO: 1099151 - RNA, 19 nt, Artificial Sequence
  Description of Artificial Sequence: Synthetic oligonucleotide
uaguuugcuccuucuuugg

SEQ ID NO: 1099152 - RNA, 19 nt, Artificial Sequence
  Description of Artificial Sequence: Synthetic oligonucleotide
uauguguguucccaaaguu

SEQ ID NO: 1099153 - RNA, 19 nt, Artificial Sequence
  Description of Artificial Sequence: Synthetic oligonucleotide
guuauuacaaggguacuuc

SEQ ID NO: 1099154 - RNA, 19 nt, Artificial Sequence
  Description of Artificial Sequence: Synthetic oligonucleotide
guuguacuuccaaauacag

SEQ ID NO: 1099155 - RNA, 19 nt, Artificial Sequence
  Description of Artificial Sequence: Synthetic oligonucleotide
uucacaaggugaugggucu

SEQ ID NO: 1099156 - RNA, 19 nt, Artificial Sequence
  Description of Artificial Sequence: Synthetic oligonucleotide
uagacugggcacaaacugu

SEQ ID NO: 1099157 - RNA, 19 nt, Artificial Sequence
  Description of Artificial Sequence: Synthetic oligonucleotide
uucucaaauaugacaguau

SEQ ID NO: 1099158 - RNA, 19 nt, Artificial Sequence
  Description of Artificial Sequence: Synthetic oligonucleotide
uguaauauuuagggucugc

SEQ ID NO: 1099159 - RNA, 19 nt, Artificial Sequence
  Description of Artificial Sequence: Synthetic oligonucleotide
cuucaaauuuccgagccac

SEQ ID NO: 1099160 - RNA, 19 nt, Artificial Sequence
  Description of Artificial Sequence: Synthetic oligonucleotide
cucggagcacacaaaggcg

SEQ ID NO: 1099161 - RNA, 19 nt, Artificial Sequence
  Description of Artificial Sequence: Synthetic oligonucleotide
ucgagagacugaacuuugg

SEQ ID NO: 1099162 - RNA, 19 nt, Artificial Sequence
  Description of Artificial Sequence: Synthetic oligonucleotide
caggcauaaaacugccucc

SEQ ID NO: 1099163 - RNA, 19 nt, Artificial Sequence
  Description of Artificial Sequence: Synthetic oligonucleotide
aaaucacggaucaucuuca

SEQ ID NO: 1099164 - RNA, 19 nt, Artificial Sequence
  Description of Artificial Sequence: Synthetic oligonucleotide
aaguauuagcauccaggaa

SEQ ID NO: 1099165 - RNA, 19 nt, Artificial Sequence
  Description of Artificial Sequence: Synthetic oligonucleotide
ggcugaguaauguaguuug

SEQ ID NO: 1099166 - RNA, 19 nt, Artificial Sequence
  Description of Artificial Sequence: Synthetic oligonucleotide
ugcccgcauuuacagagcg

SEQ ID NO: 1099167 - RNA, 19 nt, Artificial Sequence
  Description of Artificial Sequence: Synthetic oligonucleotide
uuuucucguuggcaguuug

SEQ ID NO: 1099168 - RNA, 19 nt, Artificial Sequence
  Description of Artificial Sequence: Synthetic oligonucleotide
uaggcgauauguuuacccu

SEQ ID NO: 1099169 - RNA, 19 nt, Artificial Sequence
  Description of Artificial Sequence: Synthetic oligonucleotide
ggguuaaucgagaugaagc

SEQ ID NO: 1099170 - RNA, 19 nt, Artificial Sequence
  Description of Artificial Sequence: Synthetic oligonucleotide
uaaguugcuagcggcaaug

SEQ ID NO: 1099171 - RNA, 19 nt, Artificial Sequence
  Description of Artificial Sequence: Synthetic oligonucleotide
uggauuuauuacugaaauc

SEQ ID NO: 1099172 - RNA, 19 nt, Artificial Sequence
  Description of Artificial Sequence: Synthetic oligonucleotide
caacucggagcacacaaag

SEQ ID NO: 1099173 - RNA, 19 nt, Artificial Sequence
  Description of Artificial Sequence: Synthetic oligonucleotide
cucauaauggagcgcuugc

SEQ ID NO: 1099174 - RNA, 19 nt, Artificial Sequence
  Description of Artificial Sequence: Synthetic oligonucleotide
uaauauuuagggucugcuu

SEQ ID NO: 1099175 - RNA, 19 nt, Artificial Sequence
  Description of Artificial Sequence: Synthetic oligonucleotide
uuacaaggguacuucacua

SEQ ID NO: 1099176 - RNA, 19 nt, Artificial Sequence
  Description of Artificial Sequence: Synthetic oligonucleotide
guguucauuaugacaaaag

SEQ ID NO: 1099177 - RNA, 19 nt, Artificial Sequence
  Description of Artificial Sequence: Synthetic oligonucleotide
aggcgguugugcuucuugc

SEQ ID NO: 1099178 - RNA, 19 nt, Artificial Sequence
  Description of Artificial Sequence: Synthetic oligonucleotide
uccaguaccacaucacaua

SEQ ID NO: 1099179 - RNA, 19 nt, Artificial Sequence
  Description of Artificial Sequence: Synthetic oligonucleotide
caaaguuauuacaagggua

SEQ ID NO: 1099180 - RNA, 19 nt, Artificial Sequence
  Description of Artificial Sequence: Synthetic oligonucleotide
uauguuuacccuguuggau

SEQ ID NO: 1099181 - RNA, 19 nt, Artificial Sequence
  Description of Artificial Sequence: Synthetic oligonucleotide
cuuuccucacaacucggag

SEQ ID NO: 1099182 - RNA, 19 nt, Artificial Sequence
  Description of Artificial Sequence: Synthetic oligonucleotide
uggguuaaucgagaugaag

SEQ ID NO: 1099183 - RNA, 19 nt, Artificial Sequence
  Description of Artificial Sequence: Synthetic oligonucleotide
aaggcgguugugcuucuug

SEQ ID NO: 1099184 - RNA, 19 nt, Artificial Sequence
  Description of Artificial Sequence: Synthetic oligonucleotide
uuaggacgcuuguaaaccu

SEQ ID NO: 1099185 - RNA, 19 nt, Artificial Sequence
  Description of Artificial Sequence: Synthetic oligonucleotide
aaaacugccuccccuuguu

SEQ ID NO: 1099186 - RNA, 19 nt, Artificial Sequence
  Description of Artificial Sequence: Synthetic oligonucleotide
guagaucacuaaaacacac

SEQ ID NO: 1099187 - RNA, 19 nt, Artificial Sequence
  Description of Artificial Sequence: Synthetic oligonucleotide
ugcuugcacaaugggaagg

SEQ ID NO: 1099188 - RNA, 19 nt, Artificial Sequence
  Description of Artificial Sequence: Synthetic oligonucleotide
uggcaccuauaaaagagaa

SEQ ID NO: 1099189 - RNA, 19 nt, Artificial Sequence
  Description of Artificial Sequence: Synthetic oligonucleotide
guaucuuaaugcauauaug

SEQ ID NO: 1099190 - RNA, 19 nt, Artificial Sequence
  Description of Artificial Sequence: Synthetic oligonucleotide
ugaggguacagaccacaca

SEQ ID NO: 1099191 - RNA, 19 nt, Artificial Sequence
  Description of Artificial Sequence: Synthetic oligonucleotide
auaauggagcgcuugccau

SEQ ID NO: 1099192 - RNA, 19 nt, Artificial Sequence
  Description of Artificial Sequence: Synthetic oligonucleotide
ucauaauggagcgcuugcc

SEQ ID NO: 1099193 - RNA, 19 nt, Artificial Sequence
  Description of Artificial Sequence: Synthetic oligonucleotide
gaguucauaugccagacau

SEQ ID NO: 1099194 - RNA, 19 nt, Artificial Sequence
  Description of Artificial Sequence: Synthetic oligonucleotide
uuucucguuggcaguuugc

SEQ ID NO: 1099195 - RNA, 19 nt, Artificial Sequence
  Description of Artificial Sequence: Synthetic oligonucleotide
ggcguucacuguuagagag

SEQ ID NO: 1099196 - RNA, 19 nt, Artificial Sequence
  Description of Artificial Sequence: Synthetic oligonucleotide
uuccguugaauuucugagu

SEQ ID NO: 1099197 - RNA, 19 nt, Artificial Sequence
  Description of Artificial Sequence: Synthetic oligonucleotide
gaaauaggucauccugcug

SEQ ID NO: 1099198 - RNA, 19 nt, Artificial Sequence
  Description of Artificial Sequence: Synthetic oligonucleotide
cacacaccuuaacagcugg

SEQ ID NO: 1099199 - RNA, 19 nt, Artificial Sequence
  Description of Artificial Sequence: Synthetic oligonucleotide
uauauguaccacagguauu

SEQ ID NO: 1099200 - RNA, 19 nt, Artificial Sequence
  Description of Artificial Sequence: Synthetic oligonucleotide
aaaguuggggagaccccac

SEQ ID NO: 1099201 - RNA, 19 nt, Artificial Sequence
  Description of Artificial Sequence: Synthetic oligonucleotide
guaggaagaaaguuuugaa

SEQ ID NO: 1099202 - RNA, 19 nt, Artificial Sequence
  Description of Artificial Sequence: Synthetic oligonucleotide
uuuccgagccacugagucc

SEQ ID NO: 1099203 - RNA, 19 nt, Artificial Sequence
  Description of Artificial Sequence: Synthetic oligonucleotide
uuccgagccacugagucca

SEQ ID NO: 1099204 - RNA, 19 nt, Artificial Sequence
  Description of Artificial Sequence: Synthetic oligonucleotide
cuuguaaaccuuauagugu

SEQ ID NO: 1099205 - RNA, 19 nt, Artificial Sequence
  Description of Artificial Sequence: Synthetic oligonucleotide
acuuuggugaacacacauc

SEQ ID NO: 1099206 - RNA, 19 nt, Artificial Sequence
  Description of Artificial Sequence: Synthetic oligonucleotide
aauaggucauccugcuguu

SEQ ID NO: 1099207 - RNA, 19 nt, Artificial Sequence
  Description of Artificial Sequence: Synthetic oligonucleotide
gcugauuacagcuuuucuc

SEQ ID NO: 1099208 - RNA, 19 nt, Artificial Sequence
  Description of Artificial Sequence: Synthetic oligonucleotide
agagucaaagaagcagauc

SEQ ID NO: 1099209 - RNA, 19 nt, Artificial Sequence
  Description of Artificial Sequence: Synthetic oligonucleotide
ucuugcaccgaggacugcc

SEQ ID NO: 1099210 - RNA, 19 nt, Artificial Sequence
  Description of Artificial Sequence: Synthetic oligonucleotide
ugaguucauaugccagaca

SEQ ID NO: 1099211 - RNA, 19 nt, Artificial Sequence
  Description of Artificial Sequence: Synthetic oligonucleotide
uucaaauuuccgagccacu

SEQ ID NO: 1099212 - RNA, 19 nt, Artificial Sequence
  Description of Artificial Sequence: Synthetic oligonucleotide
aaguuauuacaaggguacu

SEQ ID NO: 1099213 - RNA, 19 nt, Artificial Sequence
  Description of Artificial Sequence: Synthetic oligonucleotide
uaagcgacacacuguaauu

SEQ ID NO: 1099214 - RNA, 19 nt, Artificial Sequence
  Description of Artificial Sequence: Synthetic oligonucleotide
uucugcucucgagagacug

SEQ ID NO: 1099215 - RNA, 19 nt, Artificial Sequence
  Description of Artificial Sequence: Synthetic oligonucleotide
ugauuacagcuuuucucgu

SEQ ID NO: 1099216 - RNA, 19 nt, Artificial Sequence
  Description of Artificial Sequence: Synthetic oligonucleotide
guuagagaguccaggguug

SEQ ID NO: 1099217 - RNA, 19 nt, Artificial Sequence
  Description of Artificial Sequence: Synthetic oligonucleotide
accuuauaguguuuagaaa

SEQ ID NO: 1099218 - RNA, 19 nt, Artificial Sequence
  Description of Artificial Sequence: Synthetic oligonucleotide
uucucguuggcaguuugca

SEQ ID NO: 1099219 - RNA, 19 nt, Artificial Sequence
  Description of Artificial Sequence: Synthetic oligonucleotide
caaacuguaggcgauaugu

SEQ ID NO: 1099220 - RNA, 19 nt, Artificial Sequence
  Description of Artificial Sequence: Synthetic oligonucleotide
agaccccaccucuauuuuc

SEQ ID NO: 1099221 - RNA, 19 nt, Artificial Sequence
  Description of Artificial Sequence: Synthetic oligonucleotide
cauaauggagcgcuugcca

SEQ ID NO: 1099222 - RNA, 19 nt, Artificial Sequence
  Description of Artificial Sequence: Synthetic oligonucleotide
aggcgauauguuuacccug

SEQ ID NO: 1099223 - RNA, 19 nt, Artificial Sequence
  Description of Artificial Sequence: Synthetic oligonucleotide
ucuguauguguguucccaa

SEQ ID NO: 1099224 - RNA, 19 nt, Artificial Sequence
  Description of Artificial Sequence: Synthetic oligonucleotide
agcugauuacagcuuuucu

SEQ ID NO: 1099225 - RNA, 19 nt, Artificial Sequence
  Description of Artificial Sequence: Synthetic oligonucleotide
ucaacaggccuuacaguua

SEQ ID NO: 1099226 - RNA, 19 nt, Artificial Sequence
  Description of Artificial Sequence: Synthetic oligonucleotide
cucgagagacugaacuuug

SEQ ID NO: 1099227 - RNA, 19 nt, Artificial Sequence
  Description of Artificial Sequence: Synthetic oligonucleotide
gaucacuaaaacacacauc

SEQ ID NO: 1099228 - RNA, 19 nt, Artificial Sequence
  Description of Artificial Sequence: Synthetic oligonucleotide
gaacauugugagccugaug

SEQ ID NO: 1099229 - RNA, 19 nt, Artificial Sequence
  Description of Artificial Sequence: Synthetic oligonucleotide
cauccguuguacugguuug

SEQ ID NO: 1099230 - RNA, 19 nt, Artificial Sequence
  Description of Artificial Sequence: Synthetic oligonucleotide
caccucuauuuucacauuc

SEQ ID NO: 1099231 - RNA, 19 nt, Artificial Sequence
  Description of Artificial Sequence: Synthetic oligonucleotide
caguuaagcaagcaucaca

SEQ ID NO: 1099232 - RNA, 19 nt, Artificial Sequence
  Description of Artificial Sequence: Synthetic oligonucleotide
cuguaggcgauauguuuac

SEQ ID NO: 1099233 - RNA, 19 nt, Artificial Sequence
  Description of Artificial Sequence: Synthetic oligonucleotide
aguuauuacaaggguacuu

SEQ ID NO: 1099234 - RNA, 19 nt, Artificial Sequence
  Description of Artificial Sequence: Synthetic oligonucleotide
uugcauagcugaacaugcu

SEQ ID NO: 1099235 - RNA, 19 nt, Artificial Sequence
  Description of Artificial Sequence: Synthetic oligonucleotide
uugcaccgaggacugcccg

SEQ ID NO: 1099236 - RNA, 19 nt, Artificial Sequence
  Description of Artificial Sequence: Synthetic oligonucleotide
cuauaagcuuucuacuaaa

SEQ ID NO: 1099237 - RNA, 19 nt, Artificial Sequence
  Description of Artificial Sequence: Synthetic oligonucleotide
cagugaggacagaaauagg

SEQ ID NO: 1099238 - RNA, 19 nt, Artificial Sequence
  Description of Artificial Sequence: Synthetic oligonucleotide
ccgauuaucugguuugggc

SEQ ID NO: 1099239 - RNA, 19 nt, Artificial Sequence
  Description of Artificial Sequence: Synthetic oligonucleotide
cagagguccagcugauuac

SEQ ID NO: 1099240 - RNA, 19 nt, Artificial Sequence
  Description of Artificial Sequence: Synthetic oligonucleotide
uccauaaggcaaucuucuc

SEQ ID NO: 1099241 - RNA, 19 nt, Artificial Sequence
  Description of Artificial Sequence: Synthetic oligonucleotide
cccauuauuagguccaauc

SEQ ID NO: 1099242 - RNA, 19 nt, Artificial Sequence
  Description of Artificial Sequence: Synthetic oligonucleotide
cuugcaccgaggacugccc

SEQ ID NO: 1099243 - RNA, 19 nt, Artificial Sequence
  Description of Artificial Sequence: Synthetic oligonucleotide
uuuggcguucacuguuaga

SEQ ID NO: 1099244 - RNA, 19 nt, Artificial Sequence
  Description of Artificial Sequence: Synthetic oligonucleotide
caaauaugacaguaucuua

SEQ ID NO: 1099245 - RNA, 19 nt, Artificial Sequence
  Description of Artificial Sequence: Synthetic oligonucleotide
gagcacacaaaggcgguug

SEQ ID NO: 1099246 - RNA, 19 nt, Artificial Sequence
  Description of Artificial Sequence: Synthetic oligonucleotide
guucccuacaccaggcagc

SEQ ID NO: 1099247 - RNA, 19 nt, Artificial Sequence
  Description of Artificial Sequence: Synthetic oligonucleotide
cucacaacucggagcacac

SEQ ID NO: 1099248 - RNA, 19 nt, Artificial Sequence
  Description of Artificial Sequence: Synthetic oligonucleotide
ggugcuguagaucacuaaa

SEQ ID NO: 1099249 - RNA, 19 nt, Artificial Sequence
  Description of Artificial Sequence: Synthetic oligonucleotide
gcugaaaucacggaucauc

SEQ ID NO: 1099250 - RNA, 19 nt, Artificial Sequence
  Description of Artificial Sequence: Synthetic oligonucleotide
auugugagccugaugaguu

SEQ ID NO: 1099251 - RNA, 19 nt, Artificial Sequence
  Description of Artificial Sequence: Synthetic oligonucleotide
ugaaaucacggaucaucuu

SEQ ID NO: 1099252 - RNA, 19 nt, Artificial Sequence
  Description of Artificial Sequence: Synthetic oligonucleotide
uuuccauuccugguccacu

SEQ ID NO: 1099253 - RNA, 19 nt, Artificial Sequence
  Description of Artificial Sequence: Synthetic oligonucleotide
guuuggcguucacuguuag

SEQ ID NO: 1099254 - RNA, 19 nt, Artificial Sequence
  Description of Artificial Sequence: Synthetic oligonucleotide
ugcuucuugcaccgaggac

SEQ ID NO: 1099255 - RNA, 19 nt, Artificial Sequence
  Description of Artificial Sequence: Synthetic oligonucleotide
uccccuggguuaaucgaga

SEQ ID NO: 1099256 - RNA, 19 nt, Artificial Sequence
  Description of Artificial Sequence: Synthetic oligonucleotide
acuguaggcgauauguuua

SEQ ID NO: 1099257 - RNA, 19 nt, Artificial Sequence
  Description of Artificial Sequence: Synthetic oligonucleotide
agagaguccaggguuguaa

SEQ ID NO: 1099258 - RNA, 19 nt, Artificial Sequence
  Description of Artificial Sequence: Synthetic oligonucleotide
uucccuacaccaggcagca

SEQ ID NO: 1099259 - RNA, 19 nt, Artificial Sequence
  Description of Artificial Sequence: Synthetic oligonucleotide
cacaacucggagcacacaa

SEQ ID NO: 1099260 - RNA, 19 nt, Artificial Sequence
  Description of Artificial Sequence: Synthetic oligonucleotide
uccguuguacugguuuggc

SEQ ID NO: 1099261 - RNA, 19 nt, Artificial Sequence
  Description of Artificial Sequence: Synthetic oligonucleotide
uguacugguuuggcguuca

SEQ ID NO: 1099262 - RNA, 19 nt, Artificial Sequence
  Description of Artificial Sequence: Synthetic oligonucleotide
uggcguucacuguuagaga

SEQ ID NO: 1099263 - RNA, 19 nt, Artificial Sequence
  Description of Artificial Sequence: Synthetic oligonucleotide
auccguuguacugguuugg

SEQ ID NO: 1099264 - RNA, 19 nt, Artificial Sequence
  Description of Artificial Sequence: Synthetic oligonucleotide
ggaccauccguuguacugg

SEQ ID NO: 1099265 - RNA, 19 nt, Artificial Sequence
  Description of Artificial Sequence: Synthetic oligonucleotide
aucuuuccucacaacucgg

SEQ ID NO: 1099266 - RNA, 19 nt, Artificial Sequence
  Description of Artificial Sequence: Synthetic oligonucleotide
guaauauuuagggucugcu

SEQ ID NO: 1099267 - RNA, 19 nt, Artificial Sequence
  Description of Artificial Sequence: Synthetic oligonucleotide
uggccgaaguacuggauuu

SEQ ID NO: 1099268 - RNA, 19 nt, Artificial Sequence
  Description of Artificial Sequence: Synthetic oligonucleotide
ccaguaccacaucacauag

SEQ ID NO: 1099269 - RNA, 19 nt, Artificial Sequence
  Description of Artificial Sequence: Synthetic oligonucleotide
aaguugcuagcggcaaugu

SEQ ID NO: 1099270 - RNA, 19 nt, Artificial Sequence
  Description of Artificial Sequence: Synthetic oligonucleotide
aaggauaagucugcccauu

SEQ ID NO: 1099271 - RNA, 19 nt, Artificial Sequence
  Description of Artificial Sequence: Synthetic oligonucleotide
uguaggcgauauguuuacc

SEQ ID NO: 1099272 - RNA, 19 nt, Artificial Sequence
  Description of Artificial Sequence: Synthetic oligonucleotide
ugcaccgaggacugcccgc

SEQ ID NO: 1099273 - RNA, 19 nt, Artificial Sequence
  Description of Artificial Sequence: Synthetic oligonucleotide
aucagucaagacaaggguu

SEQ ID NO: 1099274 - RNA, 19 nt, Artificial Sequence
  Description of Artificial Sequence: Synthetic oligonucleotide
ugaacauugugagccugau

SEQ ID NO: 1099275 - RNA, 19 nt, Artificial Sequence
  Description of Artificial Sequence: Synthetic oligonucleotide
acuaaguugcuagcggcaa

SEQ ID NO: 1099276 - RNA, 19 nt, Artificial Sequence
  Description of Artificial Sequence: Synthetic oligonucleotide
gguuguacuuccaaauaca

SEQ ID NO: 1099277 - RNA, 19 nt, Artificial Sequence
  Description of Artificial Sequence: Synthetic oligonucleotide
caaugggaaggauaagucu

SEQ ID NO: 1099278 - RNA, 19 nt, Artificial Sequence
  Description of Artificial Sequence: Synthetic oligonucleotide
ucucguuggcaguuugcau

SEQ ID NO: 1099279 - RNA, 19 nt, Artificial Sequence
  Description of Artificial Sequence: Synthetic oligonucleotide
aaacuguaggcgauauguu

SEQ ID NO: 1099280 - RNA, 19 nt, Artificial Sequence
  Description of Artificial Sequence: Synthetic oligonucleotide
gaccccaccucuauuuuca

SEQ ID NO: 1099281 - RNA, 19 nt, Artificial Sequence
  Description of Artificial Sequence: Synthetic oligonucleotide
cuaagcgacacacuguaau

SEQ ID NO: 1099282 - RNA, 19 nt, Artificial Sequence
  Description of Artificial Sequence: Synthetic oligonucleotide
agcggcaauguuauucucu

SEQ ID NO: 1099283 - RNA, 19 nt, Artificial Sequence
  Description of Artificial Sequence: Synthetic oligonucleotide
ucacauuccccuggguuaa

SEQ ID NO: 1099284 - RNA, 19 nt, Artificial Sequence
  Description of Artificial Sequence: Synthetic oligonucleotide
agcgaggaccauccguugu

SEQ ID NO: 1099285 - RNA, 19 nt, Artificial Sequence
  Description of Artificial Sequence: Synthetic oligonucleotide
gcucuucaaauuuccgagc

SEQ ID NO: 1099286 - RNA, 19 nt, Artificial Sequence
  Description of Artificial Sequence: Synthetic oligonucleotide
auggcaccuauaaaagaga

SEQ ID NO: 1099287 - RNA, 19 nt, Artificial Sequence
  Description of Artificial Sequence: Synthetic oligonucleotide
cugaacauugugagccuga

SEQ ID NO: 1099288 - RNA, 19 nt, Artificial Sequence
  Description of Artificial Sequence: Synthetic oligonucleotide
aaacugccuccccuuguuu

SEQ ID NO: 1099289 - RNA, 19 nt, Artificial Sequence
  Description of Artificial Sequence: Synthetic oligonucleotide
uaggacgcuuguaaaccuu

SEQ ID NO: 1099290 - RNA, 19 nt, Artificial Sequence
  Description of Artificial Sequence: Synthetic oligonucleotide
ccaccgauuaucugguuug

SEQ ID NO: 1099291 - RNA, 19 nt, Artificial Sequence
  Description of Artificial Sequence: Synthetic oligonucleotide
cauuauuagguccaaucuu

SEQ ID NO: 1099292 - RNA, 19 nt, Artificial Sequence
  Description of Artificial Sequence: Synthetic oligonucleotide
cuguaauuuugcaguggca

SEQ ID NO: 1099293 - RNA, 19 nt, Artificial Sequence
  Description of Artificial Sequence: Synthetic oligonucleotide
auguaccacagguauucua

SEQ ID NO: 1099294 - RNA, 19 nt, Artificial Sequence
  Description of Artificial Sequence: Synthetic oligonucleotide
cauugugcuucucugggua

SEQ ID NO: 1099295 - RNA, 19 nt, Artificial Sequence
  Description of Artificial Sequence: Synthetic oligonucleotide
cuagcggcaauguuauucu

SEQ ID NO: 1099296 - RNA, 19 nt, Artificial Sequence
  Description of Artificial Sequence: Synthetic oligonucleotide
uugugagccugaugaguuc

SEQ ID NO: 1099297 - RNA, 19 nt, Artificial Sequence
  Description of Artificial Sequence: Synthetic oligonucleotide
cccgcauuuacagagcgag

SEQ ID NO: 1099298 - RNA, 19 nt, Artificial Sequence
  Description of Artificial Sequence: Synthetic oligonucleotide
guuaaucgagaugaagccu

SEQ ID NO: 1099299 - RNA, 19 nt, Artificial Sequence
  Description of Artificial Sequence: Synthetic oligonucleotide
ucuggccgaaguacuggau

SEQ ID NO: 1099300 - RNA, 19 nt, Artificial Sequence
  Description of Artificial Sequence: Synthetic oligonucleotide
cauagcauccgaucuuucu

SEQ ID NO: 1099301 - RNA, 19 nt, Artificial Sequence
  Description of Artificial Sequence: Synthetic oligonucleotide
agagcgaggaccauccguu

SEQ ID NO: 1099302 - RNA, 19 nt, Artificial Sequence
  Description of Artificial Sequence: Synthetic oligonucleotide
accccaccucuauuuucac

SEQ ID NO: 1099303 - RNA, 19 nt, Artificial Sequence
  Description of Artificial Sequence: Synthetic oligonucleotide
uuucugcucucgagagacu

SEQ ID NO: 1099304 - RNA, 19 nt, Artificial Sequence
  Description of Artificial Sequence: Synthetic oligonucleotide
guuggauggcugaguaaug

SEQ ID NO: 1099305 - RNA, 19 nt, Artificial Sequence
  Description of Artificial Sequence: Synthetic oligonucleotide
gacgcuuguaaaccuuaua

SEQ ID NO: 1099306 - RNA, 19 nt, Artificial Sequence
  Description of Artificial Sequence: Synthetic oligonucleotide
gagccugaugaguucauau

SEQ ID NO: 1099307 - RNA, 19 nt, Artificial Sequence
  Description of Artificial Sequence: Synthetic oligonucleotide
auguucccuacaccaggca

SEQ ID NO: 1099308 - RNA, 19 nt, Artificial Sequence
  Description of Artificial Sequence: Synthetic oligonucleotide
uagguccaaucuucagcac

SEQ ID NO: 1099309 - RNA, 19 nt, Artificial Sequence
  Description of Artificial Sequence: Synthetic oligonucleotide
accuuaacagcuggaugga

SEQ ID NO: 1099310 - RNA, 19 nt, Artificial Sequence
  Description of Artificial Sequence: Synthetic oligonucleotide
gauuacagcuuuucucguu

SEQ ID NO: 1099311 - RNA, 19 nt, Artificial Sequence
  Description of Artificial Sequence: Synthetic oligonucleotide
gaguccaggguuguaauau

SEQ ID NO: 1099312 - RNA, 19 nt, Artificial Sequence
  Description of Artificial Sequence: Synthetic oligonucleotide
aggacugcccgcauuuaca

SEQ ID NO: 1099313 - RNA, 19 nt, Artificial Sequence
  Description of Artificial Sequence: Synthetic oligonucleotide
gcagaucaagucccgggug

SEQ ID NO: 1099314 - RNA, 19 nt, Artificial Sequence
  Description of Artificial Sequence: Synthetic oligonucleotide
cugcccgcauuuacagagc

SEQ ID NO: 1099315 - RNA, 19 nt, Artificial Sequence
  Description of Artificial Sequence: Synthetic oligonucleotide
gcuucuugcaccgaggacu

SEQ ID NO: 1099316 - RNA, 19 nt, Artificial Sequence
  Description of Artificial Sequence: Synthetic oligonucleotide
gaguucuacugaagaguca

SEQ ID NO: 1099317 - RNA, 19 nt, Artificial Sequence
  Description of Artificial Sequence: Synthetic oligonucleotide
ggacaggcauaaaacugcc

SEQ ID NO: 1099318 - RNA, 19 nt, Artificial Sequence
  Description of Artificial Sequence: Synthetic oligonucleotide
ggagcgcuugccaugcuug

SEQ ID NO: 1099319 - RNA, 19 nt, Artificial Sequence
  Description of Artificial Sequence: Synthetic oligonucleotide
gacugcccgcauuuacaga

SEQ ID NO: 1099320 - RNA, 19 nt, Artificial Sequence
  Description of Artificial Sequence: Synthetic oligonucleotide
cacugaaucaacaggccuu

SEQ ID NO: 1099321 - RNA, 19 nt, Artificial Sequence
  Description of Artificial Sequence: Synthetic oligonucleotide
uagcggcaauguuauucuc

SEQ ID NO: 1099322 - RNA, 19 nt, Artificial Sequence
  Description of Artificial Sequence: Synthetic oligonucleotide
cugaguaauguaguuugcu

SEQ ID NO: 1099323 - RNA, 19 nt, Artificial Sequence
  Description of Artificial Sequence: Synthetic oligonucleotide
ccaugcuugcacaauggga

SEQ ID NO: 1099324 - RNA, 19 nt, Artificial Sequence
  Description of Artificial Sequence: Synthetic oligonucleotide
uuguacugguuuggcguuc

SEQ ID NO: 1099325 - RNA, 19 nt, Artificial Sequence
  Description of Artificial Sequence: Synthetic oligonucleotide
ccauuauuagguccaaucu

SEQ ID NO: 1099326 - RNA, 19 nt, Artificial Sequence
  Description of Artificial Sequence: Synthetic oligonucleotide
auacagcuuuccuguugau

SEQ ID NO: 1099327 - RNA, 19 nt, Artificial Sequence
  Description of Artificial Sequence: Synthetic oligonucleotide
uucccauuauuagguccaa

SEQ ID NO: 1099328 - RNA, 19 nt, Artificial Sequence
  Description of Artificial Sequence: Synthetic oligonucleotide
acaacucggagcacacaaa

SEQ ID NO: 1099329 - RNA, 19 nt, Artificial Sequence
  Description of Artificial Sequence: Synthetic oligonucleotide
ccaaaguuauuacaagggu

SEQ ID NO: 1099330 - RNA, 19 nt, Artificial Sequence
  Description of Artificial Sequence: Synthetic oligonucleotide
cuuacucucuguuggcuuu

SEQ ID NO: 1099331 - RNA, 19 nt, Artificial Sequence
  Description of Artificial Sequence: Synthetic oligonucleotide
cgauauguuuacccuguug

SEQ ID NO: 1099332 - RNA, 19 nt, Artificial Sequence
  Description of Artificial Sequence: Synthetic oligonucleotide
gacaaggguuguacuucca

SEQ ID NO: 1099333 - RNA, 19 nt, Artificial Sequence
  Description of Artificial Sequence: Synthetic oligonucleotide
ccauuccugguccacuuuc

SEQ ID NO: 1099334 - RNA, 19 nt, Artificial Sequence
  Description of Artificial Sequence: Synthetic oligonucleotide
gcgacacacuguaauuuug

SEQ ID NO: 1099335 - RNA, 19 nt, Artificial Sequence
  Description of Artificial Sequence: Synthetic oligonucleotide
guuguacugguuuggcguu

SEQ ID NO: 1099336 - RNA, 19 nt, Artificial Sequence
  Description of Artificial Sequence: Synthetic oligonucleotide
gcgcuugccaugcuugcac

SEQ ID NO: 1099337 - RNA, 19 nt, Artificial Sequence
  Description of Artificial Sequence: Synthetic oligonucleotide
ccauaaggcaaucuucucu

SEQ ID NO: 1099338 - RNA, 19 nt, Artificial Sequence
  Description of Artificial Sequence: Synthetic oligonucleotide
aggacgcuuguaaaccuua

SEQ ID NO: 1099339 - RNA, 19 nt, Artificial Sequence
  Description of Artificial Sequence: Synthetic oligonucleotide
cgguugugcuucuugcacc

SEQ ID NO: 1099340 - RNA, 19 nt, Artificial Sequence
  Description of Artificial Sequence: Synthetic oligonucleotide
ccgcauuuacagagcgagg

SEQ ID NO: 1099341 - RNA, 19 nt, Artificial Sequence
  Description of Artificial Sequence: Synthetic oligonucleotide
cuguuggauggcugaguaa

SEQ ID NO: 1099342 - RNA, 19 nt, Artificial Sequence
  Description of Artificial Sequence: Synthetic oligonucleotide
ugcugaaaucacggaucau

SEQ ID NO: 1099343 - RNA, 19 nt, Artificial Sequence
  Description of Artificial Sequence: Synthetic oligonucleotide
cgcauuuacagagcgagga

SEQ ID NO: 1099344 - RNA, 19 nt, Artificial Sequence
  Description of Artificial Sequence: Synthetic oligonucleotide
ccagagguccagcugauua

SEQ ID NO: 1099345 - RNA, 19 nt, Artificial Sequence
  Description of Artificial Sequence: Synthetic oligonucleotide
cucagcggaagguuuguuu

SEQ ID NO: 1099346 - RNA, 19 nt, Artificial Sequence
  Description of Artificial Sequence: Synthetic oligonucleotide
cugcucucgagagacugaa

SEQ ID NO: 1099347 - RNA, 19 nt, Artificial Sequence
  Description of Artificial Sequence: Synthetic oligonucleotide
cagagcgaggaccauccgu

SEQ ID NO: 1099348 - RNA, 19 nt, Artificial Sequence
  Description of Artificial Sequence: Synthetic oligonucleotide
guacugguuuggcguucac

SEQ ID NO: 1099349 - RNA, 19 nt, Artificial Sequence
  Description of Artificial Sequence: Synthetic oligonucleotide
gacaggcauaaaacugccu

SEQ ID NO: 1099350 - RNA, 19 nt, Artificial Sequence
  Description of Artificial Sequence: Synthetic oligonucleotide
ccuuaacagcuggauggag

SEQ ID NO: 1099351 - RNA, 19 nt, Artificial Sequence
  Description of Artificial Sequence: Synthetic oligonucleotide
ggcgauauguuuacccugu

SEQ ID NO: 1099352 - RNA, 19 nt, Artificial Sequence
  Description of Artificial Sequence: Synthetic oligonucleotide
aaaggcgguugugcuucuu

SEQ ID NO: 1099353 - RNA, 19 nt, Artificial Sequence
  Description of Artificial Sequence: Synthetic oligonucleotide
cacaguuaggacgcuugua

SEQ ID NO: 1099354 - RNA, 19 nt, Artificial Sequence
  Description of Artificial Sequence: Synthetic oligonucleotide
ggaccacugcucuucaaau

SEQ ID NO: 1099355 - RNA, 19 nt, Artificial Sequence
  Description of Artificial Sequence: Synthetic oligonucleotide
gagaccccaccucuauuuu

SEQ ID NO: 1099356 - RNA, 19 nt, Artificial Sequence
  Description of Artificial Sequence: Synthetic oligonucleotide
cccuaagcgacacacugua

SEQ ID NO: 1099357 - RNA, 19 nt, Artificial Sequence
  Description of Artificial Sequence: Synthetic oligonucleotide
cuaaguugcuagcggcaau

SEQ ID NO: 1099358 - RNA, 19 nt, Artificial Sequence
  Description of Artificial Sequence: Synthetic oligonucleotide
ccuguuggauggcugagua

SEQ ID NO: 1099359 - RNA, 19 nt, Artificial Sequence
  Description of Artificial Sequence: Synthetic oligonucleotide
gguauucuauaagcuuucu

SEQ ID NO: 1099360 - RNA, 19 nt, Artificial Sequence
  Description of Artificial Sequence: Synthetic oligonucleotide
ccuuacaguuaagcaagca

SEQ ID NO: 1099361 - RNA, 19 nt, Artificial Sequence
  Description of Artificial Sequence: Synthetic oligonucleotide
cacaaaggcgguugugcuu

SEQ ID NO: 1099362 - RNA, 19 nt, Artificial Sequence
  Description of Artificial Sequence: Synthetic oligonucleotide
cacaaacuguaggcgauau

SEQ ID NO: 1099363 - RNA, 19 nt, Artificial Sequence
  Description of Artificial Sequence: Synthetic oligonucleotide
cgcugucaaagagagcuuc

SEQ ID NO: 1099364 - RNA, 19 nt, Artificial Sequence
  Description of Artificial Sequence: Synthetic oligonucleotide
gguuuggcguucacuguua

SEQ ID NO: 1099365 - RNA, 19 nt, Artificial Sequence
  Description of Artificial Sequence: Synthetic oligonucleotide
ccuccccuuguuuucucca

SEQ ID NO: 1099366 - RNA, 19 nt, Artificial Sequence
  Description of Artificial Sequence: Synthetic oligonucleotide
cagucaagacaaggguugu

SEQ ID NO: 1099367 - RNA, 19 nt, Artificial Sequence
  Description of Artificial Sequence: Synthetic oligonucleotide
ggcacaaacuguaggcgau

SEQ ID NO: 1099368 - RNA, 19 nt, Artificial Sequence
  Description of Artificial Sequence: Synthetic oligonucleotide
gcaccgaggacugcccgca

SEQ ID NO: 1099369 - RNA, 19 nt, Artificial Sequence
  Description of Artificial Sequence: Synthetic oligonucleotide
ucccuacaccaggcagcac

SEQ ID NO: 1099370 - RNA, 19 nt, Artificial Sequence
  Description of Artificial Sequence: Synthetic oligonucleotide
ggcaccuauaaaagagaau

SEQ ID NO: 1099371 - RNA, 19 nt, Artificial Sequence
  Description of Artificial Sequence: Synthetic oligonucleotide
ccauccguuguacugguuu

SEQ ID NO: 1099372 - RNA, 19 nt, Artificial Sequence
  Description of Artificial Sequence: Synthetic oligonucleotide
guaccacaucacauagcau

SEQ ID NO: 1099373 - RNA, 19 nt, Artificial Sequence
  Description of Artificial Sequence: Synthetic oligonucleotide
ccuaagcgacacacuguaa

SEQ ID NO: 1099374 - RNA, 19 nt, Artificial Sequence
  Description of Artificial Sequence: Synthetic oligonucleotide
ccccaccucuauuuucaca

SEQ ID NO: 1099375 - RNA, 19 nt, Artificial Sequence
  Description of Artificial Sequence: Synthetic oligonucleotide
caaaggcgguugugcuucu

SEQ ID NO: 1099376 - RNA, 19 nt, Artificial Sequence
  Description of Artificial Sequence: Synthetic oligonucleotide
cuacaccaggcagcacucu

SEQ ID NO: 1099377 - RNA, 19 nt, Artificial Sequence
  Description of Artificial Sequence: Synthetic oligonucleotide
gcguucacuguuagagagu

SEQ ID NO: 1099378 - RNA, 19 nt, Artificial Sequence
  Description of Artificial Sequence: Synthetic oligonucleotide
gcccgcauuuacagagcga

SEQ ID NO: 1099379 - RNA, 19 nt, Artificial Sequence
  Description of Artificial Sequence: Synthetic oligonucleotide
cccaccgauuaucugguuu

SEQ ID NO: 1099380 - RNA, 19 nt, Artificial Sequence
  Description of Artificial Sequence: Synthetic oligonucleotide
ccccuaagcgacacacugu

SEQ ID NO: 1099381 - RNA, 19 nt, Artificial Sequence
  Description of Artificial Sequence: Synthetic oligonucleotide
cguuggcaguuugcauagc

SEQ ID NO: 1099382 - RNA, 19 nt, Artificial Sequence
  Description of Artificial Sequence: Synthetic oligonucleotide
ccgaaguacuggauuuauu

SEQ ID NO: 1099383 - RNA, 19 nt, Artificial Sequence
  Description of Artificial Sequence: Synthetic oligonucleotide
gcgauauguuuacccuguu

SEQ ID NO: 1099384 - RNA, 19 nt, Artificial Sequence
  Description of Artificial Sequence: Synthetic oligonucleotide
ccgaggacugcccgcauuu

SEQ ID NO: 1099385 - RNA, 19 nt, Artificial Sequence
  Description of Artificial Sequence: Synthetic oligonucleotide
gccucagcggaagguuugu

SEQ ID NO: 1099386 - RNA, 19 nt, Artificial Sequence
  Description of Artificial Sequence: Synthetic oligonucleotide
cccuguuggauggcugagu

SEQ ID NO: 1099387 - RNA, 19 nt, Artificial Sequence
  Description of Artificial Sequence: Synthetic oligonucleotide
caccgaggacugcccgcau

SEQ ID NO: 1099388 - RNA, 19 nt, Artificial Sequence
  Description of Artificial Sequence: Synthetic oligonucleotide
cgaggacugcccgcauuua

SEQ ID NO: 1099389 - RNA, 19 nt, Artificial Sequence
  Description of Artificial Sequence: Synthetic oligonucleotide
ccccaccgauuaucugguu

SEQ ID NO: 1099390 - RNA, 19 nt, Artificial Sequence
  Description of Artificial Sequence: Synthetic oligonucleotide
aauaucuacauucauuggg

SEQ ID NO: 1099391 - RNA, 19 nt, Artificial Sequence
  Description of Artificial Sequence: Synthetic oligonucleotide
gaaagcagaacacacaugg

SEQ ID NO: 1099392 - RNA, 19 nt, Artificial Sequence
  Description of Artificial Sequence: Synthetic oligonucleotide
cuaaagaugauacauggcc

SEQ ID NO: 1099393 - RNA, 19 nt, Artificial Sequence
  Description of Artificial Sequence: Synthetic oligonucleotide
ucaaauaaucucuugcagg

SEQ ID NO: 1099394 - RNA, 19 nt, Artificial Sequence
  Description of Artificial Sequence: Synthetic oligonucleotide
uauucaaauaaucucuugc

SEQ ID NO: 1099395 - RNA, 19 nt, Artificial Sequence
  Description of Artificial Sequence: Synthetic oligonucleotide
uuuagcauaaagcaagugu

SEQ ID NO: 1099396 - RNA, 19 nt, Artificial Sequence
  Description of Artificial Sequence: Synthetic oligonucleotide
auuacucccucuuauaaac

SEQ ID NO: 1099397 - RNA, 19 nt, Artificial Sequence
  Description of Artificial Sequence: Synthetic oligonucleotide
ucuuaaagagucauguugc

SEQ ID NO: 1099398 - RNA, 19 nt, Artificial Sequence
  Description of Artificial Sequence: Synthetic oligonucleotide
aauucuaagauugucuaag

SEQ ID NO: 1099399 - RNA, 19 nt, Artificial Sequence
  Description of Artificial Sequence: Synthetic oligonucleotide
uaaguuguggcacuggaag

SEQ ID NO: 1099400 - RNA, 19 nt, Artificial Sequence
  Description of Artificial Sequence: Synthetic oligonucleotide
cagacaagcagccagaucc

SEQ ID NO: 1099401 - RNA, 19 nt, Artificial Sequence
  Description of Artificial Sequence: Synthetic oligonucleotide
aagaauuugugacauguca

SEQ ID NO: 1099402 - RNA, 19 nt, Artificial Sequence
  Description of Artificial Sequence: Synthetic oligonucleotide
ugacaugucaucaaauuug

SEQ ID NO: 1099403 - RNA, 19 nt, Artificial Sequence
  Description of Artificial Sequence: Synthetic oligonucleotide
aauagauuguuuuagcaua

SEQ ID NO: 1099404 - RNA, 19 nt, Artificial Sequence
  Description of Artificial Sequence: Synthetic oligonucleotide
agcuaaagaugauacaugg

SEQ ID NO: 1099405 - RNA, 19 nt, Artificial Sequence
  Description of Artificial Sequence: Synthetic oligonucleotide
uccuuauagagcaaaaugu

SEQ ID NO: 1099406 - RNA, 19 nt, Artificial Sequence
  Description of Artificial Sequence: Synthetic oligonucleotide
uaauagcuaaagaugauac

SEQ ID NO: 1099407 - RNA, 19 nt, Artificial Sequence
  Description of Artificial Sequence: Synthetic oligonucleotide
uuagcauaaagcaaguguc

SEQ ID NO: 1099408 - RNA, 19 nt, Artificial Sequence
  Description of Artificial Sequence: Synthetic oligonucleotide
aaauguugagggcacggac

SEQ ID NO: 1099409 - RNA, 19 nt, Artificial Sequence
  Description of Artificial Sequence: Synthetic oligonucleotide
ucuaagauugucuaagccu

SEQ ID NO: 1099410 - RNA, 19 nt, Artificial Sequence
  Description of Artificial Sequence: Synthetic oligonucleotide
aaaccguguggacaggacc

SEQ ID NO: 1099411 - RNA, 19 nt, Artificial Sequence
  Description of Artificial Sequence: Synthetic oligonucleotide
aagaguucaguacucuagg

SEQ ID NO: 1099412 - RNA, 19 nt, Artificial Sequence
  Description of Artificial Sequence: Synthetic oligonucleotide
uaaucagaaaacccaaccc

SEQ ID NO: 1099413 - RNA, 19 nt, Artificial Sequence
  Description of Artificial Sequence: Synthetic oligonucleotide
aucaaauuugcuuaagugu

SEQ ID NO: 1099414 - RNA, 19 nt, Artificial Sequence
  Description of Artificial Sequence: Synthetic oligonucleotide
uuaaguguauaaauuacaa

SEQ ID NO: 1099415 - RNA, 19 nt, Artificial Sequence
  Description of Artificial Sequence: Synthetic oligonucleotide
uagaauaguaaguuguggc

SEQ ID NO: 1099416 - RNA, 19 nt, Artificial Sequence
  Description of Artificial Sequence: Synthetic oligonucleotide
uucaaauaaucucuugcag

SEQ ID NO: 1099417 - RNA, 19 nt, Artificial Sequence
  Description of Artificial Sequence: Synthetic oligonucleotide
ucucuuaauagcuaaagau

SEQ ID NO: 1099418 - RNA, 19 nt, Artificial Sequence
  Description of Artificial Sequence: Synthetic oligonucleotide
agagucauguugcaguagc

SEQ ID NO: 1099419 - RNA, 19 nt, Artificial Sequence
  Description of Artificial Sequence: Synthetic oligonucleotide
uaagaguucaguacucuag

SEQ ID NO: 1099420 - RNA, 19 nt, Artificial Sequence
  Description of Artificial Sequence: Synthetic oligonucleotide
ucaaggauaucuuugcaca

SEQ ID NO: 1099421 - RNA, 19 nt, Artificial Sequence
  Description of Artificial Sequence: Synthetic oligonucleotide
ucaugugugaauucuaaga

SEQ ID NO: 1099422 - RNA, 19 nt, Artificial Sequence
  Description of Artificial Sequence: Synthetic oligonucleotide
uaaagagucauguugcagu

SEQ ID NO: 1099423 - RNA, 19 nt, Artificial Sequence
  Description of Artificial Sequence: Synthetic oligonucleotide
aaucuagaauaguaaguug

SEQ ID NO: 1099424 - RNA, 19 nt, Artificial Sequence
  Description of Artificial Sequence: Synthetic oligonucleotide
uguauaaacgccgauccag

SEQ ID NO: 1099425 - RNA, 19 nt, Artificial Sequence
  Description of Artificial Sequence: Synthetic oligonucleotide
uuugcacacuguuuggugg

SEQ ID NO: 1099426 - RNA, 19 nt, Artificial Sequence
  Description of Artificial Sequence: Synthetic oligonucleotide
auaucuacauucauugggc

SEQ ID NO: 1099427 - RNA, 19 nt, Artificial Sequence
  Description of Artificial Sequence: Synthetic oligonucleotide
cuuaaaacuugcuuuuccc

SEQ ID NO: 1099428 - RNA, 19 nt, Artificial Sequence
  Description of Artificial Sequence: Synthetic oligonucleotide
uauaauugaguucauccau

SEQ ID NO: 1099429 - RNA, 19 nt, Artificial Sequence
  Description of Artificial Sequence: Synthetic oligonucleotide
ucugucaaggauaucuuug

SEQ ID NO: 1099430 - RNA, 19 nt, Artificial Sequence
  Description of Artificial Sequence: Synthetic oligonucleotide
auucuaagauugucuaagc

SEQ ID NO: 1099431 - RNA, 19 nt, Artificial Sequence
  Description of Artificial Sequence: Synthetic oligonucleotide
aaugccuagcugcacauca

SEQ ID NO: 1099432 - RNA, 19 nt, Artificial Sequence
  Description of Artificial Sequence: Synthetic oligonucleotide
ucuaguaaucaggaaaucc

SEQ ID NO: 1099433 - RNA, 19 nt, Artificial Sequence
  Description of Artificial Sequence: Synthetic oligonucleotide
auccuuauagagcaaaaug

SEQ ID NO: 1099434 - RNA, 19 nt, Artificial Sequence
  Description of Artificial Sequence: Synthetic oligonucleotide
aauagcuaaagaugauaca

SEQ ID NO: 1099435 - RNA, 19 nt, Artificial Sequence
  Description of Artificial Sequence: Synthetic oligonucleotide
uacucuaggacagaaagca

SEQ ID NO: 1099436 - RNA, 19 nt, Artificial Sequence
  Description of Artificial Sequence: Synthetic oligonucleotide
aauaguaaguuguggcacu

SEQ ID NO: 1099437 - RNA, 19 nt, Artificial Sequence
  Description of Artificial Sequence: Synthetic oligonucleotide
uucuaagauugucuaagcc

SEQ ID NO: 1099438 - RNA, 19 nt, Artificial Sequence
  Description of Artificial Sequence: Synthetic oligonucleotide
caucaaauuugcuuaagug

SEQ ID NO: 1099439 - RNA, 19 nt, Artificial Sequence
  Description of Artificial Sequence: Synthetic oligonucleotide
aguucaguacucuaggaca

SEQ ID NO: 1099440 - RNA, 19 nt, Artificial Sequence
  Description of Artificial Sequence: Synthetic oligonucleotide
cuaguaaucagaaaaccca

SEQ ID NO: 1099441 - RNA, 19 nt, Artificial Sequence
  Description of Artificial Sequence: Synthetic oligonucleotide
agcaaggugcaaugaaugc

SEQ ID NO: 1099442 - RNA, 19 nt, Artificial Sequence
  Description of Artificial Sequence: Synthetic oligonucleotide
gauacccguacucaagggg

SEQ ID NO: 1099443 - RNA, 19 nt, Artificial Sequence
  Description of Artificial Sequence: Synthetic oligonucleotide
agauuguuuuagcauaaag

SEQ ID NO: 1099444 - RNA, 19 nt, Artificial Sequence
  Description of Artificial Sequence: Synthetic oligonucleotide
agaauaguaaguuguggca

SEQ ID NO: 1099445 - RNA, 19 nt, Artificial Sequence
  Description of Artificial Sequence: Synthetic oligonucleotide
cuuggcuguauaaacgccg

SEQ ID NO: 1099446 - RNA, 19 nt, Artificial Sequence
  Description of Artificial Sequence: Synthetic oligonucleotide
gguucauccacuuaaaauc

SEQ ID NO: 1099447 - RNA, 19 nt, Artificial Sequence
  Description of Artificial Sequence: Synthetic oligonucleotide
cucuaauccauuuccagac

SEQ ID NO: 1099448 - RNA, 19 nt, Artificial Sequence
  Description of Artificial Sequence: Synthetic oligonucleotide
aaagguaggggugugguca

SEQ ID NO: 1099449 - RNA, 19 nt, Artificial Sequence
  Description of Artificial Sequence: Synthetic oligonucleotide
aaucauuacucccucuuau

SEQ ID NO: 1099450 - RNA, 19 nt, Artificial Sequence
  Description of Artificial Sequence: Synthetic oligonucleotide
ucucuaguaaucaggaaau

SEQ ID NO: 1099451 - RNA, 19 nt, Artificial Sequence
  Description of Artificial Sequence: Synthetic oligonucleotide
agauagaagaaucuagaau

SEQ ID NO: 1099452 - RNA, 19 nt, Artificial Sequence
  Description of Artificial Sequence: Synthetic oligonucleotide
augagcggaagucacauug

SEQ ID NO: 1099453 - RNA, 19 nt, Artificial Sequence
  Description of Artificial Sequence: Synthetic oligonucleotide
uuucucuuaauagcuaaag

SEQ ID NO: 1099454 - RNA, 19 nt, Artificial Sequence
  Description of Artificial Sequence: Synthetic oligonucleotide
ucaggguucauccacuuaa

SEQ ID NO: 1099455 - RNA, 19 nt, Artificial Sequence
  Description of Artificial Sequence: Synthetic oligonucleotide
ugaauucuaagauugucua

SEQ ID NO: 1099456 - RNA, 19 nt, Artificial Sequence
  Description of Artificial Sequence: Synthetic oligonucleotide
aacccugcuuaguagauga

SEQ ID NO: 1099457 - RNA, 19 nt, Artificial Sequence
  Description of Artificial Sequence: Synthetic oligonucleotide
agaguuuuaacuuccuuau

SEQ ID NO: 1099458 - RNA, 19 nt, Artificial Sequence
  Description of Artificial Sequence: Synthetic oligonucleotide
uucucuuaauagcuaaaga

SEQ ID NO: 1099459 - RNA, 19 nt, Artificial Sequence
  Description of Artificial Sequence: Synthetic oligonucleotide
cagagauagaagaaucuag

SEQ ID NO: 1099460 - RNA, 19 nt, Artificial Sequence
  Description of Artificial Sequence: Synthetic oligonucleotide
auagugaguauaaugagca

SEQ ID NO: 1099461 - RNA, 19 nt, Artificial Sequence
  Description of Artificial Sequence: Synthetic oligonucleotide
agugaguauaaugagcaag

SEQ ID NO: 1099462 - RNA, 19 nt, Artificial Sequence
  Description of Artificial Sequence: Synthetic oligonucleotide
uuauuuauuacagcagagu

SEQ ID NO: 1099463 - RNA, 19 nt, Artificial Sequence
  Description of Artificial Sequence: Synthetic oligonucleotide
ucucuaauccauuuccaga

SEQ ID NO: 1099464 - RNA, 19 nt, Artificial Sequence
  Description of Artificial Sequence: Synthetic oligonucleotide
ugcagaauaucuacauuca

SEQ ID NO: 1099465 - RNA, 19 nt, Artificial Sequence
  Description of Artificial Sequence: Synthetic oligonucleotide
agcauagugaguauaauga

SEQ ID NO: 1099466 - RNA, 19 nt, Artificial Sequence
  Description of Artificial Sequence: Synthetic oligonucleotide
ugcuuaaguguauaaauua

SEQ ID NO: 1099467 - RNA, 19 nt, Artificial Sequence
  Description of Artificial Sequence: Synthetic oligonucleotide
agauauuaaaguaaacaga

SEQ ID NO: 1099468 - RNA, 19 nt, Artificial Sequence
  Description of Artificial Sequence: Synthetic oligonucleotide
ucguuacagaaacaaacac

SEQ ID NO: 1099469 - RNA, 19 nt, Artificial Sequence
  Description of Artificial Sequence: Synthetic oligonucleotide
ucauuacucccucuuauaa

SEQ ID NO: 1099470 - RNA, 19 nt, Artificial Sequence
  Description of Artificial Sequence: Synthetic oligonucleotide
uaagccucuggcuuaaaac

SEQ ID NO: 1099471 - RNA, 19 nt, Artificial Sequence
  Description of Artificial Sequence: Synthetic oligonucleotide
caaggauuguuucuguccc

SEQ ID NO: 1099472 - RNA, 19 nt, Artificial Sequence
  Description of Artificial Sequence: Synthetic oligonucleotide
ucaaggggcucuuagccag

SEQ ID NO: 1099473 - RNA, 19 nt, Artificial Sequence
  Description of Artificial Sequence: Synthetic oligonucleotide
uagccuagugaauuuaaca

SEQ ID NO: 1099474 - RNA, 19 nt, Artificial Sequence
  Description of Artificial Sequence: Synthetic oligonucleotide
aaauaaucucuugcagggg

SEQ ID NO: 1099475 - RNA, 19 nt, Artificial Sequence
  Description of Artificial Sequence: Synthetic oligonucleotide
ucagaggaaucauuacucc

SEQ ID NO: 1099476 - RNA, 19 nt, Artificial Sequence
  Description of Artificial Sequence: Synthetic oligonucleotide
ugauacuggagauauuaaa

SEQ ID NO: 1099477 - RNA, 19 nt, Artificial Sequence
  Description of Artificial Sequence: Synthetic oligonucleotide
gacuggauaacaauccuug

SEQ ID NO: 1099478 - RNA, 19 nt, Artificial Sequence
  Description of Artificial Sequence: Synthetic oligonucleotide
cuaauccauuuccagacag

SEQ ID NO: 1099479 - RNA, 19 nt, Artificial Sequence
  Description of Artificial Sequence: Synthetic oligonucleotide
ugguugaucccaucguagg

SEQ ID NO: 1099480 - RNA, 19 nt, Artificial Sequence
  Description of Artificial Sequence: Synthetic oligonucleotide
cuagaauaguaaguugugg

SEQ ID NO: 1099481 - RNA, 19 nt, Artificial Sequence
  Description of Artificial Sequence: Synthetic oligonucleotide
uuaaagagucauguugcag

SEQ ID NO: 1099482 - RNA, 19 nt, Artificial Sequence
  Description of Artificial Sequence: Synthetic oligonucleotide
auccagguuucauaggauc

SEQ ID NO: 1099483 - RNA, 19 nt, Artificial Sequence
  Description of Artificial Sequence: Synthetic oligonucleotide
gauuguuucugucccagca

SEQ ID NO: 1099484 - RNA, 19 nt, Artificial Sequence
  Description of Artificial Sequence: Synthetic oligonucleotide
cuugcaggggaucagcgcc

SEQ ID NO: 1099485 - RNA, 19 nt, Artificial Sequence
  Description of Artificial Sequence: Synthetic oligonucleotide
cagucucuaauccauuucc

SEQ ID NO: 1099486 - RNA, 19 nt, Artificial Sequence
  Description of Artificial Sequence: Synthetic oligonucleotide
aacaugauacccguacuca

SEQ ID NO: 1099487 - RNA, 19 nt, Artificial Sequence
  Description of Artificial Sequence: Synthetic oligonucleotide
uaaaaucgucuguauuucc

SEQ ID NO: 1099488 - RNA, 19 nt, Artificial Sequence
  Description of Artificial Sequence: Synthetic oligonucleotide
acauucauugggccaugcc

SEQ ID NO: 1099489 - RNA, 19 nt, Artificial Sequence
  Description of Artificial Sequence: Synthetic oligonucleotide
uagcauaaagcaaguguca

SEQ ID NO: 1099490 - RNA, 19 nt, Artificial Sequence
  Description of Artificial Sequence: Synthetic oligonucleotide
aucgucuguauuuccauug

SEQ ID NO: 1099491 - RNA, 19 nt, Artificial Sequence
  Description of Artificial Sequence: Synthetic oligonucleotide
uuaauagcuaaagaugaua

SEQ ID NO: 1099492 - RNA, 19 nt, Artificial Sequence
  Description of Artificial Sequence: Synthetic oligonucleotide
uaacacuuaaaggaguuaa

SEQ ID NO: 1099493 - RNA, 19 nt, Artificial Sequence
  Description of Artificial Sequence: Synthetic oligonucleotide
aaaucgucuguauuuccau

SEQ ID NO: 1099494 - RNA, 19 nt, Artificial Sequence
  Description of Artificial Sequence: Synthetic oligonucleotide
ucuggcuuaaaacuugcuu

SEQ ID NO: 1099495 - RNA, 19 nt, Artificial Sequence
  Description of Artificial Sequence: Synthetic oligonucleotide
cacagaaggguccuuaaug

SEQ ID NO: 1099496 - RNA, 19 nt, Artificial Sequence
  Description of Artificial Sequence: Synthetic oligonucleotide
cagaacaugauacccguac

SEQ ID NO: 1099497 - RNA, 19 nt, Artificial Sequence
  Description of Artificial Sequence: Synthetic oligonucleotide
aaaguaaacagaacaugau

SEQ ID NO: 1099498 - RNA, 19 nt, Artificial Sequence
  Description of Artificial Sequence: Synthetic oligonucleotide
uaacuuccuuauaauugag

SEQ ID NO: 1099499 - RNA, 19 nt, Artificial Sequence
  Description of Artificial Sequence: Synthetic oligonucleotide
auauucguuacagaaacaa

SEQ ID NO: 1099500 - RNA, 19 nt, Artificial Sequence
  Description of Artificial Sequence: Synthetic oligonucleotide
auacauggccaaaucaaac

SEQ ID NO: 1099501 - RNA, 19 nt, Artificial Sequence
  Description of Artificial Sequence: Synthetic oligonucleotide
gcuguauaaacgccgaucc

SEQ ID NO: 1099502 - RNA, 19 nt, Artificial Sequence
  Description of Artificial Sequence: Synthetic oligonucleotide
ugugacaugucaucaaauu

SEQ ID NO: 1099503 - RNA, 19 nt, Artificial Sequence
  Description of Artificial Sequence: Synthetic oligonucleotide
gaugauacauggccaaauc

SEQ ID NO: 1099504 - RNA, 19 nt, Artificial Sequence
  Description of Artificial Sequence: Synthetic oligonucleotide
gaaucuuaaagagucaugu

SEQ ID NO: 1099505 - RNA, 19 nt, Artificial Sequence
  Description of Artificial Sequence: Synthetic oligonucleotide
aacacuuaaaggaguuaag

SEQ ID NO: 1099506 - RNA, 19 nt, Artificial Sequence
  Description of Artificial Sequence: Synthetic oligonucleotide
aguagccaaagguaggggu

SEQ ID NO: 1099507 - RNA, 19 nt, Artificial Sequence
  Description of Artificial Sequence: Synthetic oligonucleotide
aucguaggacagcagggcg

SEQ ID NO: 1099508 - RNA, 19 nt, Artificial Sequence
  Description of Artificial Sequence: Synthetic oligonucleotide
aaagagucauguugcagua

SEQ ID NO: 1099509 - RNA, 19 nt, Artificial Sequence
  Description of Artificial Sequence: Synthetic oligonucleotide
ugauacccguacucaaggg

SEQ ID NO: 1099510 - RNA, 19 nt, Artificial Sequence
  Description of Artificial Sequence: Synthetic oligonucleotide
aaaacccaacccugcuuag

SEQ ID NO: 1099511 - RNA, 19 nt, Artificial Sequence
  Description of Artificial Sequence: Synthetic oligonucleotide
aauguugagggcacggacu

SEQ ID NO: 1099512 - RNA, 19 nt, Artificial Sequence
  Description of Artificial Sequence: Synthetic oligonucleotide
caugauacccguacucaag

SEQ ID NO: 1099513 - RNA, 19 nt, Artificial Sequence
  Description of Artificial Sequence: Synthetic oligonucleotide
cagcauagugaguauaaug

SEQ ID NO: 1099514 - RNA, 19 nt, Artificial Sequence
  Description of Artificial Sequence: Synthetic oligonucleotide
ccuaguaaucagaaaaccc

SEQ ID NO: 1099515 - RNA, 19 nt, Artificial Sequence
  Description of Artificial Sequence: Synthetic oligonucleotide
cuuccuuauaauugaguuc

SEQ ID NO: 1099516 - RNA, 19 nt, Artificial Sequence
  Description of Artificial Sequence: Synthetic oligonucleotide
gcggaagucacauugacac

SEQ ID NO: 1099517 - RNA, 19 nt, Artificial Sequence
  Description of Artificial Sequence: Synthetic oligonucleotide
aguaaucagaaaacccaac

SEQ ID NO: 1099518 - RNA, 19 nt, Artificial Sequence
  Description of Artificial Sequence: Synthetic oligonucleotide
aaggaguuaagaguucagu

SEQ ID NO: 1099519 - RNA, 19 nt, Artificial Sequence
  Description of Artificial Sequence: Synthetic oligonucleotide
gauagcagagggcagucuc

SEQ ID NO: 1099520 - RNA, 19 nt, Artificial Sequence
  Description of Artificial Sequence: Synthetic oligonucleotide
aagucucccuaguaaucag

SEQ ID NO: 1099521 - RNA, 19 nt, Artificial Sequence
  Description of Artificial Sequence: Synthetic oligonucleotide
agaaaacccacaucagggu

SEQ ID NO: 1099522 - RNA, 19 nt, Artificial Sequence
  Description of Artificial Sequence: Synthetic oligonucleotide
cagaggaaucauuacuccc

SEQ ID NO: 1099523 - RNA, 19 nt, Artificial Sequence
  Description of Artificial Sequence: Synthetic oligonucleotide
aaguuguggcacuggaagu

SEQ ID NO: 1099524 - RNA, 19 nt, Artificial Sequence
  Description of Artificial Sequence: Synthetic oligonucleotide
aguaaguuguggcacugga

SEQ ID NO: 1099525 - RNA, 19 nt, Artificial Sequence
  Description of Artificial Sequence: Synthetic oligonucleotide
ugucacacauuucucuuaa

SEQ ID NO: 1099526 - RNA, 19 nt, Artificial Sequence
  Description of Artificial Sequence: Synthetic oligonucleotide
ucuaauccauuuccagaca

SEQ ID NO: 1099527 - RNA, 19 nt, Artificial Sequence
  Description of Artificial Sequence: Synthetic oligonucleotide
guauaaacgccgauccagg

SEQ ID NO: 1099528 - RNA, 19 nt, Artificial Sequence
  Description of Artificial Sequence: Synthetic oligonucleotide
ucuacauucauugggccau

SEQ ID NO: 1099529 - RNA, 19 nt, Artificial Sequence
  Description of Artificial Sequence: Synthetic oligonucleotide
agaagaaucuagaauagua

SEQ ID NO: 1099530 - RNA, 19 nt, Artificial Sequence
  Description of Artificial Sequence: Synthetic oligonucleotide
ugucaaggauaucuuugca

SEQ ID NO: 1099531 - RNA, 19 nt, Artificial Sequence
  Description of Artificial Sequence: Synthetic oligonucleotide
acacauggcucuuacuuca

SEQ ID NO: 1099532 - RNA, 19 nt, Artificial Sequence
  Description of Artificial Sequence: Synthetic oligonucleotide
agcuccacucuacaaaugu

SEQ ID NO: 1099533 - RNA, 19 nt, Artificial Sequence
  Description of Artificial Sequence: Synthetic oligonucleotide
aaaaccguguggacaggac

SEQ ID NO: 1099534 - RNA, 19 nt, Artificial Sequence
  Description of Artificial Sequence: Synthetic oligonucleotide
acuuaaaaucgucuguauu

SEQ ID NO: 1099535 - RNA, 19 nt, Artificial Sequence
  Description of Artificial Sequence: Synthetic oligonucleotide
uccugacacagcauaguga

SEQ ID NO: 1099536 - RNA, 19 nt, Artificial Sequence
  Description of Artificial Sequence: Synthetic oligonucleotide
aggaguuaagaguucagua

SEQ ID NO: 1099537 - RNA, 19 nt, Artificial Sequence
  Description of Artificial Sequence: Synthetic oligonucleotide
ccauauucguuacagaaac

SEQ ID NO: 1099538 - RNA, 19 nt, Artificial Sequence
  Description of Artificial Sequence: Synthetic oligonucleotide
ugaccugagaaggaugagc

SEQ ID NO: 1099539 - RNA, 19 nt, Artificial Sequence
  Description of Artificial Sequence: Synthetic oligonucleotide
ggugcagacaagcagccag

SEQ ID NO: 1099540 - RNA, 19 nt, Artificial Sequence
  Description of Artificial Sequence: Synthetic oligonucleotide
aaaggaguuaagaguucag

SEQ ID NO: 1099541 - RNA, 19 nt, Artificial Sequence
  Description of Artificial Sequence: Synthetic oligonucleotide
ugucggaccacuccuggac

SEQ ID NO: 1099542 - RNA, 19 nt, Artificial Sequence
  Description of Artificial Sequence: Synthetic oligonucleotide
ugagcuccacucuacaaau

SEQ ID NO: 1099543 - RNA, 19 nt, Artificial Sequence
  Description of Artificial Sequence: Synthetic oligonucleotide
uggcucuuacuucaucuca

SEQ ID NO: 1099544 - RNA, 19 nt, Artificial Sequence
  Description of Artificial Sequence: Synthetic oligonucleotide
uuuuagcauaaagcaagug

SEQ ID NO: 1099545 - RNA, 19 nt, Artificial Sequence
  Description of Artificial Sequence: Synthetic oligonucleotide
uuggcuguauaaacgccga

SEQ ID NO: 1099546 - RNA, 19 nt, Artificial Sequence
  Description of Artificial Sequence: Synthetic oligonucleotide
cugaaacaucacuccaucc

SEQ ID NO: 1099547 - RNA, 19 nt, Artificial Sequence
  Description of Artificial Sequence: Synthetic oligonucleotide
cucaugugugaauucuaag

SEQ ID NO: 1099548 - RNA, 19 nt, Artificial Sequence
  Description of Artificial Sequence: Synthetic oligonucleotide
cuacgugccaggcacuugc

SEQ ID NO: 1099549 - RNA, 19 nt, Artificial Sequence
  Description of Artificial Sequence: Synthetic oligonucleotide
ugaugaagguuuccuggac

SEQ ID NO: 1099550 - RNA, 19 nt, Artificial Sequence
  Description of Artificial Sequence: Synthetic oligonucleotide
aguuaagaguucaguacuc

SEQ ID NO: 1099551 - RNA, 19 nt, Artificial Sequence
  Description of Artificial Sequence: Synthetic oligonucleotide
cuacaaauguugagggcac

SEQ ID NO: 1099552 - RNA, 19 nt, Artificial Sequence
  Description of Artificial Sequence: Synthetic oligonucleotide
uauaaacgccgauccaggu

SEQ ID NO: 1099553 - RNA, 19 nt, Artificial Sequence
  Description of Artificial Sequence: Synthetic oligonucleotide
cugguugaucccaucguag

SEQ ID NO: 1099554 - RNA, 19 nt, Artificial Sequence
  Description of Artificial Sequence: Synthetic oligonucleotide
ucguaggacagcagggcgc

SEQ ID NO: 1099555 - RNA, 19 nt, Artificial Sequence
  Description of Artificial Sequence: Synthetic oligonucleotide
cuuagccaggauagcagag

SEQ ID NO: 1099556 - RNA, 19 nt, Artificial Sequence
  Description of Artificial Sequence: Synthetic oligonucleotide
agaggaaucauuacucccu

SEQ ID NO: 1099557 - RNA, 19 nt, Artificial Sequence
  Description of Artificial Sequence: Synthetic oligonucleotide
aaauggaguuccagggaag

SEQ ID NO: 1099558 - RNA, 19 nt, Artificial Sequence
  Description of Artificial Sequence: Synthetic oligonucleotide
uacucaaggggcucuuagc

SEQ ID NO: 1099559 - RNA, 19 nt, Artificial Sequence
  Description of Artificial Sequence: Synthetic oligonucleotide
cuuacuucaucucaugugu

SEQ ID NO: 1099560 - RNA, 19 nt, Artificial Sequence
  Description of Artificial Sequence: Synthetic oligonucleotide
guucaguacucuaggacag

SEQ ID NO: 1099561 - RNA, 19 nt, Artificial Sequence
  Description of Artificial Sequence: Synthetic oligonucleotide
augagcaaggcaugccaag

SEQ ID NO: 1099562 - RNA, 19 nt, Artificial Sequence
  Description of Artificial Sequence: Synthetic oligonucleotide
gaagucucccuaguaauca

SEQ ID NO: 1099563 - RNA, 19 nt, Artificial Sequence
  Description of Artificial Sequence: Synthetic oligonucleotide
ucgucuguauuuccauuga

SEQ ID NO: 1099564 - RNA, 19 nt, Artificial Sequence
  Description of Artificial Sequence: Synthetic oligonucleotide
ugagcggaagucacauuga

SEQ ID NO: 1099565 - RNA, 19 nt, Artificial Sequence
  Description of Artificial Sequence: Synthetic oligonucleotide
aacccaacccugcuuagua

SEQ ID NO: 1099566 - RNA, 19 nt, Artificial Sequence
  Description of Artificial Sequence: Synthetic oligonucleotide
cuagccuagugaauuuaac

SEQ ID NO: 1099567 - RNA, 19 nt, Artificial Sequence
  Description of Artificial Sequence: Synthetic oligonucleotide
uuacucccucuuauaaacu

SEQ ID NO: 1099568 - RNA, 19 nt, Artificial Sequence
  Description of Artificial Sequence: Synthetic oligonucleotide
cuggagauauuaaaguaaa

SEQ ID NO: 1099569 - RNA, 19 nt, Artificial Sequence
  Description of Artificial Sequence: Synthetic oligonucleotide
aaucgucuguauuuccauu

SEQ ID NO: 1099570 - RNA, 19 nt, Artificial Sequence
  Description of Artificial Sequence: Synthetic oligonucleotide
agaguucaguacucuagga

SEQ ID NO: 1099571 - RNA, 19 nt, Artificial Sequence
  Description of Artificial Sequence: Synthetic oligonucleotide
gaauucuaagauugucuaa

SEQ ID NO: 1099572 - RNA, 19 nt, Artificial Sequence
  Description of Artificial Sequence: Synthetic oligonucleotide
guacucaaggggcucuuag

SEQ ID NO: 1099573 - RNA, 19 nt, Artificial Sequence
  Description of Artificial Sequence: Synthetic oligonucleotide
ugguacagaaccuggcguc

SEQ ID NO: 1099574 - RNA, 19 nt, Artificial Sequence
  Description of Artificial Sequence: Synthetic oligonucleotide
aaauuugcuuaaguguaua

SEQ ID NO: 1099575 - RNA, 19 nt, Artificial Sequence
  Description of Artificial Sequence: Synthetic oligonucleotide
uucaucucaugugugaauu

SEQ ID NO: 1099576 - RNA, 19 nt, Artificial Sequence
  Description of Artificial Sequence: Synthetic oligonucleotide
aaggauuguuucuguccca

SEQ ID NO: 1099577 - RNA, 19 nt, Artificial Sequence
  Description of Artificial Sequence: Synthetic oligonucleotide
uuaaugccuagcugcacau

SEQ ID NO: 1099578 - RNA, 19 nt, Artificial Sequence
  Description of Artificial Sequence: Synthetic oligonucleotide
aaccguguggacaggacca

SEQ ID NO: 1099579 - RNA, 19 nt, Artificial Sequence
  Description of Artificial Sequence: Synthetic oligonucleotide
gaacacacauggcucuuac

SEQ ID NO: 1099580 - RNA, 19 nt, Artificial Sequence
  Description of Artificial Sequence: Synthetic oligonucleotide
uggcuuaaaacuugcuuuu

SEQ ID NO: 1099581 - RNA, 19 nt, Artificial Sequence
  Description of Artificial Sequence: Synthetic oligonucleotide
cucuugcaggggaucagcg

SEQ ID NO: 1099582 - RNA, 19 nt, Artificial Sequence
  Description of Artificial Sequence: Synthetic oligonucleotide
uucaccaggagcaguucuc

SEQ ID NO: 1099583 - RNA, 19 nt, Artificial Sequence
  Description of Artificial Sequence: Synthetic oligonucleotide
uacaaauguugagggcacg

SEQ ID NO: 1099584 - RNA, 19 nt, Artificial Sequence
  Description of Artificial Sequence: Synthetic oligonucleotide
ccaaggauuguuucugucc

SEQ ID NO: 1099585 - RNA, 19 nt, Artificial Sequence
  Description of Artificial Sequence: Synthetic oligonucleotide
uccaaccaaaccagucucu

SEQ ID NO: 1099586 - RNA, 19 nt, Artificial Sequence
  Description of Artificial Sequence: Synthetic oligonucleotide
aagagucauguugcaguag

SEQ ID NO: 1099587 - RNA, 19 nt, Artificial Sequence
  Description of Artificial Sequence: Synthetic oligonucleotide
cuuaaagagucauguugca

SEQ ID NO: 1099588 - RNA, 19 nt, Artificial Sequence
  Description of Artificial Sequence: Synthetic oligonucleotide
agagcuagccuagugaauu

SEQ ID NO: 1099589 - RNA, 19 nt, Artificial Sequence
  Description of Artificial Sequence: Synthetic oligonucleotide
cacacauggcucuuacuuc

SEQ ID NO: 1099590 - RNA, 19 nt, Artificial Sequence
  Description of Artificial Sequence: Synthetic oligonucleotide
gaaggaugagcggaaguca

SEQ ID NO: 1099591 - RNA, 19 nt, Artificial Sequence
  Description of Artificial Sequence: Synthetic oligonucleotide
aggauuguuucugucccag

SEQ ID NO: 1099592 - RNA, 19 nt, Artificial Sequence
  Description of Artificial Sequence: Synthetic oligonucleotide
guagccaaagguaggggug

SEQ ID NO: 1099593 - RNA, 19 nt, Artificial Sequence
  Description of Artificial Sequence: Synthetic oligonucleotide
gguagaauucugugggaug

SEQ ID NO: 1099594 - RNA, 19 nt, Artificial Sequence
  Description of Artificial Sequence: Synthetic oligonucleotide
acaugauacccguacucaa

SEQ ID NO: 1099595 - RNA, 19 nt, Artificial Sequence
  Description of Artificial Sequence: Synthetic oligonucleotide
ucuuugcacacuguuuggu

SEQ ID NO: 1099596 - RNA, 19 nt, Artificial Sequence
  Description of Artificial Sequence: Synthetic oligonucleotide
gaggaaucauuacucccuc

SEQ ID NO: 1099597 - RNA, 19 nt, Artificial Sequence
  Description of Artificial Sequence: Synthetic oligonucleotide
uacucccucuuauaaacuu

SEQ ID NO: 1099598 - RNA, 19 nt, Artificial Sequence
  Description of Artificial Sequence: Synthetic oligonucleotide
auaaacgccgauccagguu

SEQ ID NO: 1099599 - RNA, 19 nt, Artificial Sequence
  Description of Artificial Sequence: Synthetic oligonucleotide
cuuauagagcaaaauguau

SEQ ID NO: 1099600 - RNA, 19 nt, Artificial Sequence
  Description of Artificial Sequence: Synthetic oligonucleotide
aaugagcaaggcaugccaa

SEQ ID NO: 1099601 - RNA, 19 nt, Artificial Sequence
  Description of Artificial Sequence: Synthetic oligonucleotide
caucguaggacagcagggc

SEQ ID NO: 1099602 - RNA, 19 nt, Artificial Sequence
  Description of Artificial Sequence: Synthetic oligonucleotide
ucaucucaugugugaauuc

SEQ ID NO: 1099603 - RNA, 19 nt, Artificial Sequence
  Description of Artificial Sequence: Synthetic oligonucleotide
gccgauccagguuucauag

SEQ ID NO: 1099604 - RNA, 19 nt, Artificial Sequence
  Description of Artificial Sequence: Synthetic oligonucleotide
ugcauccaaccaaaccagu

SEQ ID NO: 1099605 - RNA, 19 nt, Artificial Sequence
  Description of Artificial Sequence: Synthetic oligonucleotide
auaguaaguuguggcacug

SEQ ID NO: 1099606 - RNA, 19 nt, Artificial Sequence
  Description of Artificial Sequence: Synthetic oligonucleotide
cauggccaaaucaaacaca

SEQ ID NO: 1099607 - RNA, 19 nt, Artificial Sequence
  Description of Artificial Sequence: Synthetic oligonucleotide
aucauuacucccucuuaua

SEQ ID NO: 1099608 - RNA, 19 nt, Artificial Sequence
  Description of Artificial Sequence: Synthetic oligonucleotide
aaggaaucuuaaagaguca

SEQ ID NO: 1099609 - RNA, 19 nt, Artificial Sequence
  Description of Artificial Sequence: Synthetic oligonucleotide
gagcggaagucacauugac

SEQ ID NO: 1099610 - RNA, 19 nt, Artificial Sequence
  Description of Artificial Sequence: Synthetic oligonucleotide
gucauguugcaguagccaa

SEQ ID NO: 1099611 - RNA, 19 nt, Artificial Sequence
  Description of Artificial Sequence: Synthetic oligonucleotide
auagauuguuuuagcauaa

SEQ ID NO: 1099612 - RNA, 19 nt, Artificial Sequence
  Description of Artificial Sequence: Synthetic oligonucleotide
agagcaaaauguauucaaa

SEQ ID NO: 1099613 - RNA, 19 nt, Artificial Sequence
  Description of Artificial Sequence: Synthetic oligonucleotide
ucaaggccagagcuagccu

SEQ ID NO: 1099614 - RNA, 19 nt, Artificial Sequence
  Description of Artificial Sequence: Synthetic oligonucleotide
gguucugucaaggauaucu

SEQ ID NO: 1099615 - RNA, 19 nt, Artificial Sequence
  Description of Artificial Sequence: Synthetic oligonucleotide
auugggccaugccacaaau

SEQ ID NO: 1099616 - RNA, 19 nt, Artificial Sequence
  Description of Artificial Sequence: Synthetic oligonucleotide
agaugauacauggccaaau

SEQ ID NO: 1099617 - RNA, 19 nt, Artificial Sequence
  Description of Artificial Sequence: Synthetic oligonucleotide
caugugugaauucuaagau

SEQ ID NO: 1099618 - RNA, 19 nt, Artificial Sequence
  Description of Artificial Sequence: Synthetic oligonucleotide
gccacaaauuuuaagucug

SEQ ID NO: 1099619 - RNA, 19 nt, Artificial Sequence
  Description of Artificial Sequence: Synthetic oligonucleotide
ugccuagcugcacaucaaa

SEQ ID NO: 1099620 - RNA, 19 nt, Artificial Sequence
  Description of Artificial Sequence: Synthetic oligonucleotide
gaucccaucguaggacagc

SEQ ID NO: 1099621 - RNA, 19 nt, Artificial Sequence
  Description of Artificial Sequence: Synthetic oligonucleotide
uagugaguauaaugagcaa

SEQ ID NO: 1099622 - RNA, 19 nt, Artificial Sequence
  Description of Artificial Sequence: Synthetic oligonucleotide
cacagcauagugaguauaa

SEQ ID NO: 1099623 - RNA, 19 nt, Artificial Sequence
  Description of Artificial Sequence: Synthetic oligonucleotide
gucacaugggagcugaccu

SEQ ID NO: 1099624 - RNA, 19 nt, Artificial Sequence
  Description of Artificial Sequence: Synthetic oligonucleotide
cccaucguaggacagcagg

SEQ ID NO: 1099625 - RNA, 19 nt, Artificial Sequence
  Description of Artificial Sequence: Synthetic oligonucleotide
cauuacucccucuuauaaa

SEQ ID NO: 1099626 - RNA, 19 nt, Artificial Sequence
  Description of Artificial Sequence: Synthetic oligonucleotide
acccaacccugcuuaguag

SEQ ID NO: 1099627 - RNA, 19 nt, Artificial Sequence
  Description of Artificial Sequence: Synthetic oligonucleotide
aaguucaccaggagcaguu

SEQ ID NO: 1099628 - RNA, 19 nt, Artificial Sequence
  Description of Artificial Sequence: Synthetic oligonucleotide
ucggaccacuccuggacug

SEQ ID NO: 1099629 - RNA, 19 nt, Artificial Sequence
  Description of Artificial Sequence: Synthetic oligonucleotide
cuggcuuaaaacuugcuuu

SEQ ID NO: 1099630 - RNA, 19 nt, Artificial Sequence
  Description of Artificial Sequence: Synthetic oligonucleotide
aaagcaagugucacacauu

SEQ ID NO: 1099631 - RNA, 19 nt, Artificial Sequence
  Description of Artificial Sequence: Synthetic oligonucleotide
guagaauucugugggaugu

SEQ ID NO: 1099632 - RNA, 19 nt, Artificial Sequence
  Description of Artificial Sequence: Synthetic oligonucleotide
uacagaaccuggcgucccu

SEQ ID NO: 1099633 - RNA, 19 nt, Artificial Sequence
  Description of Artificial Sequence: Synthetic oligonucleotide
aggaaucauuacucccucu

SEQ ID NO: 1099634 - RNA, 19 nt, Artificial Sequence
  Description of Artificial Sequence: Synthetic oligonucleotide
aaacaucacuccauccuua

SEQ ID NO: 1099635 - RNA, 19 nt, Artificial Sequence
  Description of Artificial Sequence: Synthetic oligonucleotide
cucuuauaaacuuccacuu

SEQ ID NO: 1099636 - RNA, 19 nt, Artificial Sequence
  Description of Artificial Sequence: Synthetic oligonucleotide
ggaaucuuaaagagucaug

SEQ ID NO: 1099637 - RNA, 19 nt, Artificial Sequence
  Description of Artificial Sequence: Synthetic oligonucleotide
uggccaaaucaaacacaga

SEQ ID NO: 1099638 - RNA, 19 nt, Artificial Sequence
  Description of Artificial Sequence: Synthetic oligonucleotide
cuggaagucucccuaguaa

SEQ ID NO: 1099639 - RNA, 19 nt, Artificial Sequence
  Description of Artificial Sequence: Synthetic oligonucleotide
agucucuaguaaucaggaa

SEQ ID NO: 1099640 - RNA, 19 nt, Artificial Sequence
  Description of Artificial Sequence: Synthetic oligonucleotide
ccugcuuaguagaugagga

SEQ ID NO: 1099641 - RNA, 19 nt, Artificial Sequence
  Description of Artificial Sequence: Synthetic oligonucleotide
aggguccuuaaugccuagc

SEQ ID NO: 1099642 - RNA, 19 nt, Artificial Sequence
  Description of Artificial Sequence: Synthetic oligonucleotide
ggcagucucuaguaaucag

SEQ ID NO: 1099643 - RNA, 19 nt, Artificial Sequence
  Description of Artificial Sequence: Synthetic oligonucleotide
cagaaccuggcgucccucc

SEQ ID NO: 1099644 - RNA, 19 nt, Artificial Sequence
  Description of Artificial Sequence: Synthetic oligonucleotide
uacauucauugggccaugc

SEQ ID NO: 1099645 - RNA, 19 nt, Artificial Sequence
  Description of Artificial Sequence: Synthetic oligonucleotide
acacagaaggguccuuaau

SEQ ID NO: 1099646 - RNA, 19 nt, Artificial Sequence
  Description of Artificial Sequence: Synthetic oligonucleotide
agucucuaauccauuucca

SEQ ID NO: 1099647 - RNA, 19 nt, Artificial Sequence
  Description of Artificial Sequence: Synthetic oligonucleotide
gguggggugaacacagaag

SEQ ID NO: 1099648 - RNA, 19 nt, Artificial Sequence
  Description of Artificial Sequence: Synthetic oligonucleotide
gacaggaccacaguguaau

SEQ ID NO: 1099649 - RNA, 19 nt, Artificial Sequence
  Description of Artificial Sequence: Synthetic oligonucleotide
gcuaaagaugauacauggc

SEQ ID NO: 1099650 - RNA, 19 nt, Artificial Sequence
  Description of Artificial Sequence: Synthetic oligonucleotide
aucccaucguaggacagca

SEQ ID NO: 1099651 - RNA, 19 nt, Artificial Sequence
  Description of Artificial Sequence: Synthetic oligonucleotide
uucaguacucuaggacaga

SEQ ID NO: 1099652 - RNA, 19 nt, Artificial Sequence
  Description of Artificial Sequence: Synthetic oligonucleotide
cucaaggggcucuuagcca

SEQ ID NO: 1099653 - RNA, 19 nt, Artificial Sequence
  Description of Artificial Sequence: Synthetic oligonucleotide
agagggcagucucuaguaa

SEQ ID NO: 1099654 - RNA, 19 nt, Artificial Sequence
  Description of Artificial Sequence: Synthetic oligonucleotide
uccuuauaauugaguucau

SEQ ID NO: 1099655 - RNA, 19 nt, Artificial Sequence
  Description of Artificial Sequence: Synthetic oligonucleotide
cuuaauagcuaaagaugau

SEQ ID NO: 1099656 - RNA, 19 nt, Artificial Sequence
  Description of Artificial Sequence: Synthetic oligonucleotide
gguuuccuggacuggauaa

SEQ ID NO: 1099657 - RNA, 19 nt, Artificial Sequence
  Description of Artificial Sequence: Synthetic oligonucleotide
cauaggaucuggcuguccu

SEQ ID NO: 1099658 - RNA, 19 nt, Artificial Sequence
  Description of Artificial Sequence: Synthetic oligonucleotide
ucccaucguaggacagcag

SEQ ID NO: 1099659 - RNA, 19 nt, Artificial Sequence
  Description of Artificial Sequence: Synthetic oligonucleotide
aaacgccgauccagguuuc

SEQ ID NO: 1099660 - RNA, 19 nt, Artificial Sequence
  Description of Artificial Sequence: Synthetic oligonucleotide
gguugaucccaucguagga

SEQ ID NO: 1099661 - RNA, 19 nt, Artificial Sequence
  Description of Artificial Sequence: Synthetic oligonucleotide
cucuaguaaucaggaaauc

SEQ ID NO: 1099662 - RNA, 19 nt, Artificial Sequence
  Description of Artificial Sequence: Synthetic oligonucleotide
uuguggcacuggaagucuc

SEQ ID NO: 1099663 - RNA, 19 nt, Artificial Sequence
  Description of Artificial Sequence: Synthetic oligonucleotide
gcgcugguugaucccaucg

SEQ ID NO: 1099664 - RNA, 19 nt, Artificial Sequence
  Description of Artificial Sequence: Synthetic oligonucleotide
gcuggggcgccugacaagg

SEQ ID NO: 1099665 - RNA, 19 nt, Artificial Sequence
  Description of Artificial Sequence: Synthetic oligonucleotide
gaaggguccuuaaugccua

SEQ ID NO: 1099666 - RNA, 19 nt, Artificial Sequence
  Description of Artificial Sequence: Synthetic oligonucleotide
acaucaggguucauccacu

SEQ ID NO: 1099667 - RNA, 19 nt, Artificial Sequence
  Description of Artificial Sequence: Synthetic oligonucleotide
acagcauagugaguauaau

SEQ ID NO: 1099668 - RNA, 19 nt, Artificial Sequence
  Description of Artificial Sequence: Synthetic oligonucleotide
cugagaaggaugagcggaa

SEQ ID NO: 1099669 - RNA, 19 nt, Artificial Sequence
  Description of Artificial Sequence: Synthetic oligonucleotide
gcucuuacuucaucucaug

SEQ ID NO: 1099670 - RNA, 19 nt, Artificial Sequence
  Description of Artificial Sequence: Synthetic oligonucleotide
gguacagaaccuggcgucc

SEQ ID NO: 1099671 - RNA, 19 nt, Artificial Sequence
  Description of Artificial Sequence: Synthetic oligonucleotide
acggacuacgugccaggca

SEQ ID NO: 1099672 - RNA, 19 nt, Artificial Sequence
  Description of Artificial Sequence: Synthetic oligonucleotide
agcggaagucacauugaca

SEQ ID NO: 1099673 - RNA, 19 nt, Artificial Sequence
  Description of Artificial Sequence: Synthetic oligonucleotide
accguguggacaggaccac

SEQ ID NO: 1099674 - RNA, 19 nt, Artificial Sequence
  Description of Artificial Sequence: Synthetic oligonucleotide
ugggaacuguugccacucu

SEQ ID NO: 1099675 - RNA, 19 nt, Artificial Sequence
  Description of Artificial Sequence: Synthetic oligonucleotide
gcaaggugcaaugaaugca

SEQ ID NO: 1099676 - RNA, 19 nt, Artificial Sequence
  Description of Artificial Sequence: Synthetic oligonucleotide
agguuuccuggacuggaua

SEQ ID NO: 1099677 - RNA, 19 nt, Artificial Sequence
  Description of Artificial Sequence: Synthetic oligonucleotide
agucucccuaguaaucaga

SEQ ID NO: 1099678 - RNA, 19 nt, Artificial Sequence
  Description of Artificial Sequence: Synthetic oligonucleotide
uggcgucccucccacugcu

SEQ ID NO: 1099679 - RNA, 19 nt, Artificial Sequence
  Description of Artificial Sequence: Synthetic oligonucleotide
uacgugccaggcacuugcu

SEQ ID NO: 1099680 - RNA, 19 nt, Artificial Sequence
  Description of Artificial Sequence: Synthetic oligonucleotide
guacagaaccuggcguccc

SEQ ID NO: 1099681 - RNA, 19 nt, Artificial Sequence
  Description of Artificial Sequence: Synthetic oligonucleotide
ggguucauccacuuaaaau

SEQ ID NO: 1099682 - RNA, 19 nt, Artificial Sequence
  Description of Artificial Sequence: Synthetic oligonucleotide
uggcuguauaaacgccgau

SEQ ID NO: 1099683 - RNA, 19 nt, Artificial Sequence
  Description of Artificial Sequence: Synthetic oligonucleotide
cugcuuaguagaugaggaa

SEQ ID NO: 1099684 - RNA, 19 nt, Artificial Sequence
  Description of Artificial Sequence: Synthetic oligonucleotide
cccugcuuaguagaugagg

SEQ ID NO: 1099685 - RNA, 19 nt, Artificial Sequence
  Description of Artificial Sequence: Synthetic oligonucleotide
uucauaggaucuggcuguc

SEQ ID NO: 1099686 - RNA, 19 nt, Artificial Sequence
  Description of Artificial Sequence: Synthetic oligonucleotide
gucucccuaguaaucagaa

SEQ ID NO: 1099687 - RNA, 19 nt, Artificial Sequence
  Description of Artificial Sequence: Synthetic oligonucleotide
ggucacaugggagcugacc

SEQ ID NO: 1099688 - RNA, 19 nt, Artificial Sequence
  Description of Artificial Sequence: Synthetic oligonucleotide
ggucacuaagagccaagga

SEQ ID NO: 1099689 - RNA, 19 nt, Artificial Sequence
  Description of Artificial Sequence: Synthetic oligonucleotide
cuggcgucccucccacugc

SEQ ID NO: 1099690 - RNA, 19 nt, Artificial Sequence
  Description of Artificial Sequence: Synthetic oligonucleotide
agcugaccugagaaggaug

SEQ ID NO: 1099691 - RNA, 19 nt, Artificial Sequence
  Description of Artificial Sequence: Synthetic oligonucleotide
agggucacuaagagccaag

SEQ ID NO: 1099692 - RNA, 19 nt, Artificial Sequence
  Description of Artificial Sequence: Synthetic oligonucleotide
uugggccaugccacaaauu

SEQ ID NO: 1099693 - RNA, 19 nt, Artificial Sequence
  Description of Artificial Sequence: Synthetic oligonucleotide
gagcuccacucuacaaaug

SEQ ID NO: 1099694 - RNA, 19 nt, Artificial Sequence
  Description of Artificial Sequence: Synthetic oligonucleotide
gugucacacauuucucuua

SEQ ID NO: 1099695 - RNA, 19 nt, Artificial Sequence
  Description of Artificial Sequence: Synthetic oligonucleotide
cggacuacgugccaggcac

SEQ ID NO: 1099696 - RNA, 19 nt, Artificial Sequence
  Description of Artificial Sequence: Synthetic oligonucleotide
uaaugccuagcugcacauc

SEQ ID NO: 1099697 - RNA, 19 nt, Artificial Sequence
  Description of Artificial Sequence: Synthetic oligonucleotide
gcacuggaagucucccuag

SEQ ID NO: 1099698 - RNA, 19 nt, Artificial Sequence
  Description of Artificial Sequence: Synthetic oligonucleotide
aaggcaugccaagcagcaa

SEQ ID NO: 1099699 - RNA, 19 nt, Artificial Sequence
  Description of Artificial Sequence: Synthetic oligonucleotide
gcucuuagccaggauagca

SEQ ID NO: 1099700 - RNA, 19 nt, Artificial Sequence
  Description of Artificial Sequence: Synthetic oligonucleotide
ccagacagggucacuaaga

SEQ ID NO: 1099701 - RNA, 19 nt, Artificial Sequence
  Description of Artificial Sequence: Synthetic oligonucleotide
gcacggacuacgugccagg

SEQ ID NO: 1099702 - RNA, 19 nt, Artificial Sequence
  Description of Artificial Sequence: Synthetic oligonucleotide
aacgccgauccagguuuca

SEQ ID NO: 1099703 - RNA, 19 nt, Artificial Sequence
  Description of Artificial Sequence: Synthetic oligonucleotide
ggaaucauuacucccucuu

SEQ ID NO: 1099704 - RNA, 19 nt, Artificial Sequence
  Description of Artificial Sequence: Synthetic oligonucleotide
gguagggguguggucagug

SEQ ID NO: 1099705 - RNA, 19 nt, Artificial Sequence
  Description of Artificial Sequence: Synthetic oligonucleotide
acccguacucaaggggcuc

SEQ ID NO: 1099706 - RNA, 19 nt, Artificial Sequence
  Description of Artificial Sequence: Synthetic oligonucleotide
cacggacuacgugccaggc

SEQ ID NO: 1099707 - RNA, 19 nt, Artificial Sequence
  Description of Artificial Sequence: Synthetic oligonucleotide
aaccagucucuaauccauu

SEQ ID NO: 1099708 - RNA, 19 nt, Artificial Sequence
  Description of Artificial Sequence: Synthetic oligonucleotide
cacuuccuugcagaauauc

SEQ ID NO: 1099709 - RNA, 19 nt, Artificial Sequence
  Description of Artificial Sequence: Synthetic oligonucleotide
ggcacggacuacgugccag

SEQ ID NO: 1099710 - RNA, 19 nt, Artificial Sequence
  Description of Artificial Sequence: Synthetic oligonucleotide
cuacauucauugggccaug

SEQ ID NO: 1099711 - RNA, 19 nt, Artificial Sequence
  Description of Artificial Sequence: Synthetic oligonucleotide
acacuguuugguggcuugu

SEQ ID NO: 1099712 - RNA, 19 nt, Artificial Sequence
  Description of Artificial Sequence: Synthetic oligonucleotide
ggccaugccacaaauuuua

SEQ ID NO: 1099713 - RNA, 19 nt, Artificial Sequence
  Description of Artificial Sequence: Synthetic oligonucleotide
cacccgcacgcgcugguug

SEQ ID NO: 1099714 - RNA, 19 nt, Artificial Sequence
  Description of Artificial Sequence: Synthetic oligonucleotide
cuugcagaauaucuacauu

SEQ ID NO: 1099715 - RNA, 19 nt, Artificial Sequence
  Description of Artificial Sequence: Synthetic oligonucleotide
caggguucauccacuuaaa

SEQ ID NO: 1099716 - RNA, 19 nt, Artificial Sequence
  Description of Artificial Sequence: Synthetic oligonucleotide
ggguccuuaaugccuagcu

SEQ ID NO: 1099717 - RNA, 19 nt, Artificial Sequence
  Description of Artificial Sequence: Synthetic oligonucleotide
acaaggcugcggggucccc

SEQ ID NO: 1099718 - RNA, 19 nt, Artificial Sequence
  Description of Artificial Sequence: Synthetic oligonucleotide
ggcuuaaaacuugcuuuuc

SEQ ID NO: 1099719 - RNA, 19 nt, Artificial Sequence
  Description of Artificial Sequence: Synthetic oligonucleotide
cauccuuauagagcaaaau

SEQ ID NO: 1099720 - RNA, 19 nt, Artificial Sequence
  Description of Artificial Sequence: Synthetic oligonucleotide
cauugggccaugccacaaa

SEQ ID NO: 1099721 - RNA, 19 nt, Artificial Sequence
  Description of Artificial Sequence: Synthetic oligonucleotide
ccuggcgucccucccacug

SEQ ID NO: 1099722 - RNA, 19 nt, Artificial Sequence
  Description of Artificial Sequence: Synthetic oligonucleotide
cuggggcgccugacaaggc

SEQ ID NO: 1099723 - RNA, 19 nt, Artificial Sequence
  Description of Artificial Sequence: Synthetic oligonucleotide
cugucggaccacuccugga

SEQ ID NO: 1099724 - RNA, 19 nt, Artificial Sequence
  Description of Artificial Sequence: Synthetic oligonucleotide
cccaacccugcuuaguaga

SEQ ID NO: 1099725 - RNA, 19 nt, Artificial Sequence
  Description of Artificial Sequence: Synthetic oligonucleotide
acccugcuuaguagaugag

SEQ ID NO: 1099726 - RNA, 19 nt, Artificial Sequence
  Description of Artificial Sequence: Synthetic oligonucleotide
ggagcugaccugagaagga

SEQ ID NO: 1099727 - RNA, 19 nt, Artificial Sequence
  Description of Artificial Sequence: Synthetic oligonucleotide
agcacccgcacgcgcuggu

SEQ ID NO: 1099728 - RNA, 19 nt, Artificial Sequence
  Description of Artificial Sequence: Synthetic oligonucleotide
gucggaccacuccuggacu

SEQ ID NO: 1099729 - RNA, 19 nt, Artificial Sequence
  Description of Artificial Sequence: Synthetic oligonucleotide
acagaacaugauacccgua

SEQ ID NO: 1099730 - RNA, 19 nt, Artificial Sequence
  Description of Artificial Sequence: Synthetic oligonucleotide
guaggacagcagggcgcgg

SEQ ID NO: 1099731 - RNA, 19 nt, Artificial Sequence
  Description of Artificial Sequence: Synthetic oligonucleotide
gagcuagccuagugaauuu

SEQ ID NO: 1099732 - RNA, 19 nt, Artificial Sequence
  Description of Artificial Sequence: Synthetic oligonucleotide
gaugagcggaagucacauu

SEQ ID NO: 1099733 - RNA, 19 nt, Artificial Sequence
  Description of Artificial Sequence: Synthetic oligonucleotide
cacgcgcugguugauccca

SEQ ID NO: 1099734 - RNA, 19 nt, Artificial Sequence
  Description of Artificial Sequence: Synthetic oligonucleotide
augccuagcugcacaucaa

SEQ ID NO: 1099735 - RNA, 19 nt, Artificial Sequence
  Description of Artificial Sequence: Synthetic oligonucleotide
ggggcgccugacaaggcug

SEQ ID NO: 1099736 - RNA, 19 nt, Artificial Sequence
  Description of Artificial Sequence: Synthetic oligonucleotide
cucuggcuuaaaacuugcu

SEQ ID NO: 1099737 - RNA, 19 nt, Artificial Sequence
  Description of Artificial Sequence: Synthetic oligonucleotide
gcgccugacaaggcugcgg

SEQ ID NO: 1099738 - RNA, 19 nt, Artificial Sequence
  Description of Artificial Sequence: Synthetic oligonucleotide
acgccgauccagguuucau

SEQ ID NO: 1099739 - RNA, 19 nt, Artificial Sequence
  Description of Artificial Sequence: Synthetic oligonucleotide
ccucccacugcuggggcgc

SEQ ID NO: 1099740 - RNA, 19 nt, Artificial Sequence
  Description of Artificial Sequence: Synthetic oligonucleotide
ggguguggucagugggaac

SEQ ID NO: 1099741 - RNA, 19 nt, Artificial Sequence
  Description of Artificial Sequence: Synthetic oligonucleotide
gcacgcgcugguugauccc

SEQ ID NO: 1099742 - RNA, 19 nt, Artificial Sequence
  Description of Artificial Sequence: Synthetic oligonucleotide
gucacacauuucucuuaau

SEQ ID NO: 1099743 - RNA, 19 nt, Artificial Sequence
  Description of Artificial Sequence: Synthetic oligonucleotide
cagagcuagccuagugaau

SEQ ID NO: 1099744 - RNA, 19 nt, Artificial Sequence
  Description of Artificial Sequence: Synthetic oligonucleotide
gggcgccugacaaggcugc

SEQ ID NO: 1099745 - RNA, 19 nt, Artificial Sequence
  Description of Artificial Sequence: Synthetic oligonucleotide
gccuagcugcacaucaaaa

SEQ ID NO: 1099746 - RNA, 19 nt, Artificial Sequence
  Description of Artificial Sequence: Synthetic oligonucleotide
ggcauguacuugguggggu

SEQ ID NO: 1099747 - RNA, 19 nt, Artificial Sequence
  Description of Artificial Sequence: Synthetic oligonucleotide
ggcucuuacuucaucucau

SEQ ID NO: 1099748 - RNA, 19 nt, Artificial Sequence
  Description of Artificial Sequence: Synthetic oligonucleotide
ggcugcgggguccccgcug

SEQ ID NO: 1099749 - RNA, 19 nt, Artificial Sequence
  Description of Artificial Sequence: Synthetic oligonucleotide
ggcgccugacaaggcugcg

SEQ ID NO: 1099750 - RNA, 19 nt, Artificial Sequence
  Description of Artificial Sequence: Synthetic oligonucleotide
ggacuggauaacaauccuu

SEQ ID NO: 1099751 - RNA, 19 nt, Artificial Sequence
  Description of Artificial Sequence: Synthetic oligonucleotide
cacauggcucuuacuucau

SEQ ID NO: 1099752 - RNA, 19 nt, Artificial Sequence
  Description of Artificial Sequence: Synthetic oligonucleotide
ccaaccaaaccagucucua

SEQ ID NO: 1099753 - RNA, 19 nt, Artificial Sequence
  Description of Artificial Sequence: Synthetic oligonucleotide
cugcgggguccccgcugag

SEQ ID NO: 1099754 - RNA, 19 nt, Artificial Sequence
  Description of Artificial Sequence: Synthetic oligonucleotide
gcugagcccgccgucccca

SEQ ID NO: 1099755 - RNA, 19 nt, Artificial Sequence
  Description of Artificial Sequence: Synthetic oligonucleotide
ccaacccugcuuaguagau

SEQ ID NO: 1099756 - RNA, 19 nt, Artificial Sequence
  Description of Artificial Sequence: Synthetic oligonucleotide
acgcgcugguugaucccau

SEQ ID NO: 1099757 - RNA, 19 nt, Artificial Sequence
  Description of Artificial Sequence: Synthetic oligonucleotide
gggccaugccacaaauuuu

SEQ ID NO: 1099758 - RNA, 19 nt, Artificial Sequence
  Description of Artificial Sequence: Synthetic oligonucleotide
cgccgauccagguuucaua

SEQ ID NO: 1099759 - RNA, 19 nt, Artificial Sequence
  Description of Artificial Sequence: Synthetic oligonucleotide
ggacuacgugccaggcacu

SEQ ID NO: 1099760 - RNA, 19 nt, Artificial Sequence
  Description of Artificial Sequence: Synthetic oligonucleotide
ccgcugcucugcugguaca

SEQ ID NO: 1099761 - RNA, 19 nt, Artificial Sequence
  Description of Artificial Sequence: Synthetic oligonucleotide
gcuugauacuggagauauu

SEQ ID NO: 1099762 - RNA, 19 nt, Artificial Sequence
  Description of Artificial Sequence: Synthetic oligonucleotide
gcacacuguuugguggcuu

SEQ ID NO: 1099763 - RNA, 19 nt, Artificial Sequence
  Description of Artificial Sequence: Synthetic oligonucleotide
cguacucaaggggcucuua

SEQ ID NO: 1099764 - RNA, 19 nt, Artificial Sequence
  Description of Artificial Sequence: Synthetic oligonucleotide
ccgccguccccaggcccgc

SEQ ID NO: 1099765 - RNA, 19 nt, Artificial Sequence
  Description of Artificial Sequence: Synthetic oligonucleotide
gcacccgcacgcgcugguu

SEQ ID NO: 1099766 - RNA, 19 nt, Artificial Sequence
  Description of Artificial Sequence: Synthetic oligonucleotide
ccguacucaaggggcucuu

SEQ ID NO: 1099767 - RNA, 19 nt, Artificial Sequence
  Description of Artificial Sequence: Synthetic oligonucleotide
auauucaacaauucuaucc

SEQ ID NO: 1099768 - RNA, 19 nt, Artificial Sequence
  Description of Artificial Sequence: Synthetic oligonucleotide
uucaagauuagaaacagag

SEQ ID NO: 1099769 - RNA, 19 nt, Artificial Sequence
  Description of Artificial Sequence: Synthetic oligonucleotide
uaauauguaaacauaaacu

SEQ ID NO: 1099770 - RNA, 19 nt, Artificial Sequence
  Description of Artificial Sequence: Synthetic oligonucleotide
aauauguaaacauaaacua

SEQ ID NO: 1099771 - RNA, 19 nt, Artificial Sequence
  Description of Artificial Sequence: Synthetic oligonucleotide
aagacaauaacugacauca

SEQ ID NO: 1099772 - RNA, 19 nt, Artificial Sequence
  Description of Artificial Sequence: Synthetic oligonucleotide
uucaaguacagucaaaugc

SEQ ID NO: 1099773 - RNA, 19 nt, Artificial Sequence
  Description of Artificial Sequence: Synthetic oligonucleotide
aauagcauuaagcauauau

SEQ ID NO: 1099774 - RNA, 19 nt, Artificial Sequence
  Description of Artificial Sequence: Synthetic oligonucleotide
caaauaauccaguugaagg

SEQ ID NO: 1099775 - RNA, 19 nt, Artificial Sequence
  Description of Artificial Sequence: Synthetic oligonucleotide
uguuccuaugucaaaaugg

SEQ ID NO: 1099776 - RNA, 19 nt, Artificial Sequence
  Description of Artificial Sequence: Synthetic oligonucleotide
aacaagacuacaaauaauc

SEQ ID NO: 1099777 - RNA, 19 nt, Artificial Sequence
  Description of Artificial Sequence: Synthetic oligonucleotide
auggauauuauuuacaagu

SEQ ID NO: 1099778 - RNA, 19 nt, Artificial Sequence
  Description of Artificial Sequence: Synthetic oligonucleotide
uccuuaagcacuauuaaag

SEQ ID NO: 1099779 - RNA, 19 nt, Artificial Sequence
  Description of Artificial Sequence: Synthetic oligonucleotide
auuuacaaguuauagaugu

SEQ ID NO: 1099780 - RNA, 19 nt, Artificial Sequence
  Description of Artificial Sequence: Synthetic oligonucleotide
auguaaauaagguuacagc

SEQ ID NO: 1099781 - RNA, 19 nt, Artificial Sequence
  Description of Artificial Sequence: Synthetic oligonucleotide
aacacacugaacuugcuag

SEQ ID NO: 1099782 - RNA, 19 nt, Artificial Sequence
  Description of Artificial Sequence: Synthetic oligonucleotide
ucaagaauuaacuuagcug

SEQ ID NO: 1099783 - RNA, 19 nt, Artificial Sequence
  Description of Artificial Sequence: Synthetic oligonucleotide
aaguuauagauguagaaaa

SEQ ID NO: 1099784 - RNA, 19 nt, Artificial Sequence
  Description of Artificial Sequence: Synthetic oligonucleotide
uucaaugcccaguugaugg

SEQ ID NO: 1099785 - RNA, 19 nt, Artificial Sequence
  Description of Artificial Sequence: Synthetic oligonucleotide
uugaguaccacacacaaaa

SEQ ID NO: 1099786 - RNA, 19 nt, Artificial Sequence
  Description of Artificial Sequence: Synthetic oligonucleotide
auagauauuuccuucccac

SEQ ID NO: 1099787 - RNA, 19 nt, Artificial Sequence
  Description of Artificial Sequence: Synthetic oligonucleotide
caagauuagaaacagaguc

SEQ ID NO: 1099788 - RNA, 19 nt, Artificial Sequence
  Description of Artificial Sequence: Synthetic oligonucleotide
acuaacuauauacaucacg

SEQ ID NO: 1099789 - RNA, 19 nt, Artificial Sequence
  Description of Artificial Sequence: Synthetic oligonucleotide
aagacuacaaauaauccag

SEQ ID NO: 1099790 - RNA, 19 nt, Artificial Sequence
  Description of Artificial Sequence: Synthetic oligonucleotide
aaagccauuccauugugag

SEQ ID NO: 1099791 - RNA, 19 nt, Artificial Sequence
  Description of Artificial Sequence: Synthetic oligonucleotide
aguuuaaacugccuacucc

SEQ ID NO: 1099792 - RNA, 19 nt, Artificial Sequence
  Description of Artificial Sequence: Synthetic oligonucleotide
aagauucuccacuugguuc

SEQ ID NO: 1099793 - RNA, 19 nt, Artificial Sequence
  Description of Artificial Sequence: Synthetic oligonucleotide
aaugccuauguaaauaagg

SEQ ID NO: 1099794 - RNA, 19 nt, Artificial Sequence
  Description of Artificial Sequence: Synthetic oligonucleotide
aauccagugaguuuuauua

SEQ ID NO: 1099795 - RNA, 19 nt, Artificial Sequence
  Description of Artificial Sequence: Synthetic oligonucleotide
uugaauagcauuaagcaua

SEQ ID NO: 1099796 - RNA, 19 nt, Artificial Sequence
  Description of Artificial Sequence: Synthetic oligonucleotide
uacagucaaaugcagaugc

SEQ ID NO: 1099797 - RNA, 19 nt, Artificial Sequence
  Description of Artificial Sequence: Synthetic oligonucleotide
uuauuccuagccaaaauug

SEQ ID NO: 1099798 - RNA, 19 nt, Artificial Sequence
  Description of Artificial Sequence: Synthetic oligonucleotide
aggaugaaggcccaauucc

SEQ ID NO: 1099799 - RNA, 19 nt, Artificial Sequence
  Description of Artificial Sequence: Synthetic oligonucleotide
ugagaauucguaccaaugc

SEQ ID NO: 1099800 - RNA, 19 nt, Artificial Sequence
  Description of Artificial Sequence: Synthetic oligonucleotide
caaacuuucaagaauuaac

SEQ ID NO: 1099801 - RNA, 19 nt, Artificial Sequence
  Description of Artificial Sequence: Synthetic oligonucleotide
uugaauuugaauagcauua

SEQ ID NO: 1099802 - RNA, 19 nt, Artificial Sequence
  Description of Artificial Sequence: Synthetic oligonucleotide
ucacuuaauguaaacaccu

SEQ ID NO: 1099803 - RNA, 19 nt, Artificial Sequence
  Description of Artificial Sequence: Synthetic oligonucleotide
uguauuuaucauacagagg

SEQ ID NO: 1099804 - RNA, 19 nt, Artificial Sequence
  Description of Artificial Sequence: Synthetic oligonucleotide
uuuacuauguauuuaucau

SEQ ID NO: 1099805 - RNA, 19 nt, Artificial Sequence
  Description of Artificial Sequence: Synthetic oligonucleotide
uagcauuaagcauauaucu

SEQ ID NO: 1099806 - RNA, 19 nt, Artificial Sequence
  Description of Artificial Sequence: Synthetic oligonucleotide
ucuuugagacugcaguucg

SEQ ID NO: 1099807 - RNA, 19 nt, Artificial Sequence
  Description of Artificial Sequence: Synthetic oligonucleotide
aaacuuucaagaauuaacu

SEQ ID NO: 1099808 - RNA, 19 nt, Artificial Sequence
  Description of Artificial Sequence: Synthetic oligonucleotide
aauuuaaugaugaaguauu

SEQ ID NO: 1099809 - RNA, 19 nt, Artificial Sequence
  Description of Artificial Sequence: Synthetic oligonucleotide
cuaaagguggaccuggagg

SEQ ID NO: 1099810 - RNA, 19 nt, Artificial Sequence
  Description of Artificial Sequence: Synthetic oligonucleotide
uauugugucaccaaagauu

SEQ ID NO: 1099811 - RNA, 19 nt, Artificial Sequence
  Description of Artificial Sequence: Synthetic oligonucleotide
uaguguucccaccugaucc

SEQ ID NO: 1099812 - RNA, 19 nt, Artificial Sequence
  Description of Artificial Sequence: Synthetic oligonucleotide
acuacaaauaauccaguug

SEQ ID NO: 1099813 - RNA, 19 nt, Artificial Sequence
  Description of Artificial Sequence: Synthetic oligonucleotide
uccuuaacaaaacaagcac

SEQ ID NO: 1099814 - RNA, 19 nt, Artificial Sequence
  Description of Artificial Sequence: Synthetic oligonucleotide
agcaguuuaaacugccuac

SEQ ID NO: 1099815 - RNA, 19 nt, Artificial Sequence
  Description of Artificial Sequence: Synthetic oligonucleotide
aacuacaaguggcauaaug

SEQ ID NO: 1099816 - RNA, 19 nt, Artificial Sequence
  Description of Artificial Sequence: Synthetic oligonucleotide
aagucuagauauuuaacaa

SEQ ID NO: 1099817 - RNA, 19 nt, Artificial Sequence
  Description of Artificial Sequence: Synthetic oligonucleotide
uccaucaaaacacuaugug

SEQ ID NO: 1099818 - RNA, 19 nt, Artificial Sequence
  Description of Artificial Sequence: Synthetic oligonucleotide
uuauuuacuauugugucac

SEQ ID NO: 1099819 - RNA, 19 nt, Artificial Sequence
  Description of Artificial Sequence: Synthetic oligonucleotide
gauauuuccuucccacugg

SEQ ID NO: 1099820 - RNA, 19 nt, Artificial Sequence
  Description of Artificial Sequence: Synthetic oligonucleotide
uucaagaauuaacuuagcu

SEQ ID NO: 1099821 - RNA, 19 nt, Artificial Sequence
  Description of Artificial Sequence: Synthetic oligonucleotide
auugugucaccaaagauuc

SEQ ID NO: 1099822 - RNA, 19 nt, Artificial Sequence
  Description of Artificial Sequence: Synthetic oligonucleotide
uuuugaguaccacacacaa

SEQ ID NO: 1099823 - RNA, 19 nt, Artificial Sequence
  Description of Artificial Sequence: Synthetic oligonucleotide
acguauuugucucucaaag

SEQ ID NO: 1099824 - RNA, 19 nt, Artificial Sequence
  Description of Artificial Sequence: Synthetic oligonucleotide
aaacacuaugugaagaaag

SEQ ID NO: 1099825 - RNA, 19 nt, Artificial Sequence
  Description of Artificial Sequence: Synthetic oligonucleotide
agauguagaaaacacucug

SEQ ID NO: 1099826 - RNA, 19 nt, Artificial Sequence
  Description of Artificial Sequence: Synthetic oligonucleotide
uugguucaagauuagaaac

SEQ ID NO: 1099827 - RNA, 19 nt, Artificial Sequence
  Description of Artificial Sequence: Synthetic oligonucleotide
cuaaauagauauuuccuuc

SEQ ID NO: 1099828 - RNA, 19 nt, Artificial Sequence
  Description of Artificial Sequence: Synthetic oligonucleotide
aauagauauuuccuuccca

SEQ ID NO: 1099829 - RNA, 19 nt, Artificial Sequence
  Description of Artificial Sequence: Synthetic oligonucleotide
aguaggcacaucgaaaagc

SEQ ID NO: 1099830 - RNA, 19 nt, Artificial Sequence
  Description of Artificial Sequence: Synthetic oligonucleotide
uuuucagauagcuagucau

SEQ ID NO: 1099831 - RNA, 19 nt, Artificial Sequence
  Description of Artificial Sequence: Synthetic oligonucleotide
aauuaacuuagcugucuug

SEQ ID NO: 1099832 - RNA, 19 nt, Artificial Sequence
  Description of Artificial Sequence: Synthetic oligonucleotide
uauuucaauccuuaagcac

SEQ ID NO: 1099833 - RNA, 19 nt, Artificial Sequence
  Description of Artificial Sequence: Synthetic oligonucleotide
ugggauacauacucaaucc

SEQ ID NO: 1099834 - RNA, 19 nt, Artificial Sequence
  Description of Artificial Sequence: Synthetic oligonucleotide
auccuugggauacauacuc

SEQ ID NO: 1099835 - RNA, 19 nt, Artificial Sequence
  Description of Artificial Sequence: Synthetic oligonucleotide
uuaagaaaagcaguaggca

SEQ ID NO: 1099836 - RNA, 19 nt, Artificial Sequence
  Description of Artificial Sequence: Synthetic oligonucleotide
auagcauuaagcauauauc

SEQ ID NO: 1099837 - RNA, 19 nt, Artificial Sequence
  Description of Artificial Sequence: Synthetic oligonucleotide
agaaauuauuccuagccaa

SEQ ID NO: 1099838 - RNA, 19 nt, Artificial Sequence
  Description of Artificial Sequence: Synthetic oligonucleotide
ucugaaauuugaaagucua

SEQ ID NO: 1099839 - RNA, 19 nt, Artificial Sequence
  Description of Artificial Sequence: Synthetic oligonucleotide
gagaauucguaccaaugcc

SEQ ID NO: 1099840 - RNA, 19 nt, Artificial Sequence
  Description of Artificial Sequence: Synthetic oligonucleotide
uuugaauagcauuaagcau

SEQ ID NO: 1099841 - RNA, 19 nt, Artificial Sequence
  Description of Artificial Sequence: Synthetic oligonucleotide
uggcaaauaucucaggagu

SEQ ID NO: 1099842 - RNA, 19 nt, Artificial Sequence
  Description of Artificial Sequence: Synthetic oligonucleotide
aaauaauaccaagaauuca

SEQ ID NO: 1099843 - RNA, 19 nt, Artificial Sequence
  Description of Artificial Sequence: Synthetic oligonucleotide
aauuucuuauuucucugaa

SEQ ID NO: 1099844 - RNA, 19 nt, Artificial Sequence
  Description of Artificial Sequence: Synthetic oligonucleotide
ucuuauuucucugaaauuu

SEQ ID NO: 1099845 - RNA, 19 nt, Artificial Sequence
  Description of Artificial Sequence: Synthetic oligonucleotide
uugggauacauacucaauc

SEQ ID NO: 1099846 - RNA, 19 nt, Artificial Sequence
  Description of Artificial Sequence: Synthetic oligonucleotide
gucuagauauuuaacaaag

SEQ ID NO: 1099847 - RNA, 19 nt, Artificial Sequence
  Description of Artificial Sequence: Synthetic oligonucleotide
acuuucaagaauuaacuua

SEQ ID NO: 1099848 - RNA, 19 nt, Artificial Sequence
  Description of Artificial Sequence: Synthetic oligonucleotide
gauuuaagaaaagcaguag

SEQ ID NO: 1099849 - RNA, 19 nt, Artificial Sequence
  Description of Artificial Sequence: Synthetic oligonucleotide
aguacagucaaaugcagau

SEQ ID NO: 1099850 - RNA, 19 nt, Artificial Sequence
  Description of Artificial Sequence: Synthetic oligonucleotide
agauuagaaacagagucag

SEQ ID NO: 1099851 - RNA, 19 nt, Artificial Sequence
  Description of Artificial Sequence: Synthetic oligonucleotide
caagaauuaacuuagcugu

SEQ ID NO: 1099852 - RNA, 19 nt, Artificial Sequence
  Description of Artificial Sequence: Synthetic oligonucleotide
agauauuuccuucccacug

SEQ ID NO: 1099853 - RNA, 19 nt, Artificial Sequence
  Description of Artificial Sequence: Synthetic oligonucleotide
ucaccaaagauucuccacu

SEQ ID NO: 1099854 - RNA, 19 nt, Artificial Sequence
  Description of Artificial Sequence: Synthetic oligonucleotide
gauuagagcuugcuggugc

SEQ ID NO: 1099855 - RNA, 19 nt, Artificial Sequence
  Description of Artificial Sequence: Synthetic oligonucleotide
ucaguaucacuuaauguaa

SEQ ID NO: 1099856 - RNA, 19 nt, Artificial Sequence
  Description of Artificial Sequence: Synthetic oligonucleotide
aauucuauccacagcaccu

SEQ ID NO: 1099857 - RNA, 19 nt, Artificial Sequence
  Description of Artificial Sequence: Synthetic oligonucleotide
agugaguuuuauuagcagu

SEQ ID NO: 1099858 - RNA, 19 nt, Artificial Sequence
  Description of Artificial Sequence: Synthetic oligonucleotide
auauuucaauccuuaagca

SEQ ID NO: 1099859 - RNA, 19 nt, Artificial Sequence
  Description of Artificial Sequence: Synthetic oligonucleotide
uucaacaauucuauccaca

SEQ ID NO: 1099860 - RNA, 19 nt, Artificial Sequence
  Description of Artificial Sequence: Synthetic oligonucleotide
gcaauuugaauuugaauag

SEQ ID NO: 1099861 - RNA, 19 nt, Artificial Sequence
  Description of Artificial Sequence: Synthetic oligonucleotide
ugaaauuugaaagucuaau

SEQ ID NO: 1099862 - RNA, 19 nt, Artificial Sequence
  Description of Artificial Sequence: Synthetic oligonucleotide
guaaacauaaacuaacuau

SEQ ID NO: 1099863 - RNA, 19 nt, Artificial Sequence
  Description of Artificial Sequence: Synthetic oligonucleotide
caucacguggcuuuggccc

SEQ ID NO: 1099864 - RNA, 19 nt, Artificial Sequence
  Description of Artificial Sequence: Synthetic oligonucleotide
uauuccuagccaaaauugu

SEQ ID NO: 1099865 - RNA, 19 nt, Artificial Sequence
  Description of Artificial Sequence: Synthetic oligonucleotide
uuuacuuucaaugcccagu

SEQ ID NO: 1099866 - RNA, 19 nt, Artificial Sequence
  Description of Artificial Sequence: Synthetic oligonucleotide
aagauuagaaacagaguca

SEQ ID NO: 1099867 - RNA, 19 nt, Artificial Sequence
  Description of Artificial Sequence: Synthetic oligonucleotide
uauuagcaguuuaaacugc

SEQ ID NO: 1099868 - RNA, 19 nt, Artificial Sequence
  Description of Artificial Sequence: Synthetic oligonucleotide
auuauuccuagccaaaauu

SEQ ID NO: 1099869 - RNA, 19 nt, Artificial Sequence
  Description of Artificial Sequence: Synthetic oligonucleotide
cauaaacuaacuauauaca

SEQ ID NO: 1099870 - RNA, 19 nt, Artificial Sequence
  Description of Artificial Sequence: Synthetic oligonucleotide
uggaacuuuuggaggaggg

SEQ ID NO: 1099871 - RNA, 19 nt, Artificial Sequence
  Description of Artificial Sequence: Synthetic oligonucleotide
aguuauagauguagaaaac

SEQ ID NO: 1099872 - RNA, 19 nt, Artificial Sequence
  Description of Artificial Sequence: Synthetic oligonucleotide
cuacaaguggcauaaugug

SEQ ID NO: 1099873 - RNA, 19 nt, Artificial Sequence
  Description of Artificial Sequence: Synthetic oligonucleotide
aauaguccucucuggaggu

SEQ ID NO: 1099874 - RNA, 19 nt, Artificial Sequence
  Description of Artificial Sequence: Synthetic oligonucleotide
uacaaguggcauaaugugu

SEQ ID NO: 1099875 - RNA, 19 nt, Artificial Sequence
  Description of Artificial Sequence: Synthetic oligonucleotide
gaacuuuuggaggagggcc

SEQ ID NO: 1099876 - RNA, 19 nt, Artificial Sequence
  Description of Artificial Sequence: Synthetic oligonucleotide
uucagauagcuagucaucc

SEQ ID NO: 1099877 - RNA, 19 nt, Artificial Sequence
  Description of Artificial Sequence: Synthetic oligonucleotide
acaucgaaaagcaauauau

SEQ ID NO: 1099878 - RNA, 19 nt, Artificial Sequence
  Description of Artificial Sequence: Synthetic oligonucleotide
auuaacuuagcugucuugu

SEQ ID NO: 1099879 - RNA, 19 nt, Artificial Sequence
  Description of Artificial Sequence: Synthetic oligonucleotide
aucaaaacacuaugugaag

SEQ ID NO: 1099880 - RNA, 19 nt, Artificial Sequence
  Description of Artificial Sequence: Synthetic oligonucleotide
uucccacuggcaaauaucu

SEQ ID NO: 1099881 - RNA, 19 nt, Artificial Sequence
  Description of Artificial Sequence: Synthetic oligonucleotide
gagcauaccuguucugugg

SEQ ID NO: 1099882 - RNA, 19 nt, Artificial Sequence
  Description of Artificial Sequence: Synthetic oligonucleotide
acaaauaauccaguugaag

SEQ ID NO: 1099883 - RNA, 19 nt, Artificial Sequence
  Description of Artificial Sequence: Synthetic oligonucleotide
acuuaauguaaacaccuaa

SEQ ID NO: 1099884 - RNA, 19 nt, Artificial Sequence
  Description of Artificial Sequence: Synthetic oligonucleotide
aacgggucuugcuaaaggu

SEQ ID NO: 1099885 - RNA, 19 nt, Artificial Sequence
  Description of Artificial Sequence: Synthetic oligonucleotide
uaacuauauacaucacgug

SEQ ID NO: 1099886 - RNA, 19 nt, Artificial Sequence
  Description of Artificial Sequence: Synthetic oligonucleotide
ugcaguuccuauuuguuaa

SEQ ID NO: 1099887 - RNA, 19 nt, Artificial Sequence
  Description of Artificial Sequence: Synthetic oligonucleotide
uccuagccaaaauuguucc

SEQ ID NO: 1099888 - RNA, 19 nt, Artificial Sequence
  Description of Artificial Sequence: Synthetic oligonucleotide
ugcaggauuuaagaaaagc

SEQ ID NO: 1099889 - RNA, 19 nt, Artificial Sequence
  Description of Artificial Sequence: Synthetic oligonucleotide
acaaguuauagauguagaa

SEQ ID NO: 1099890 - RNA, 19 nt, Artificial Sequence
  Description of Artificial Sequence: Synthetic oligonucleotide
cuucaaagccauuccauug

SEQ ID NO: 1099891 - RNA, 19 nt, Artificial Sequence
  Description of Artificial Sequence: Synthetic oligonucleotide
uuguuccuaugucaaaaug

SEQ ID NO: 1099892 - RNA, 19 nt, Artificial Sequence
  Description of Artificial Sequence: Synthetic oligonucleotide
ugagacugcaguucgcuga

SEQ ID NO: 1099893 - RNA, 19 nt, Artificial Sequence
  Description of Artificial Sequence: Synthetic oligonucleotide
ucaguugcauucuucuuga

SEQ ID NO: 1099894 - RNA, 19 nt, Artificial Sequence
  Description of Artificial Sequence: Synthetic oligonucleotide
ucaggaguuaaaauuuaau

SEQ ID NO: 1099895 - RNA, 19 nt, Artificial Sequence
  Description of Artificial Sequence: Synthetic oligonucleotide
uaacuuagcugucuuguaa

SEQ ID NO: 1099896 - RNA, 19 nt, Artificial Sequence
  Description of Artificial Sequence: Synthetic oligonucleotide
ugacuguucaguugcauuc

SEQ ID NO: 1099897 - RNA, 19 nt, Artificial Sequence
  Description of Artificial Sequence: Synthetic oligonucleotide
ucuugcuaaagguggaccu

SEQ ID NO: 1099898 - RNA, 19 nt, Artificial Sequence
  Description of Artificial Sequence: Synthetic oligonucleotide
aaacguauuugucucucaa

SEQ ID NO: 1099899 - RNA, 19 nt, Artificial Sequence
  Description of Artificial Sequence: Synthetic oligonucleotide
cuuugagucuggaucaaac

SEQ ID NO: 1099900 - RNA, 19 nt, Artificial Sequence
  Description of Artificial Sequence: Synthetic oligonucleotide
gaacgggucuugcuaaagg

SEQ ID NO: 1099901 - RNA, 19 nt, Artificial Sequence
  Description of Artificial Sequence: Synthetic oligonucleotide
uauuuaucauacagaggac

SEQ ID NO: 1099902 - RNA, 19 nt, Artificial Sequence
  Description of Artificial Sequence: Synthetic oligonucleotide
acuacaaguggcauaaugu

SEQ ID NO: 1099903 - RNA, 19 nt, Artificial Sequence
  Description of Artificial Sequence: Synthetic oligonucleotide
uuccuagccaaaauuguuc

SEQ ID NO: 1099904 - RNA, 19 nt, Artificial Sequence
  Description of Artificial Sequence: Synthetic oligonucleotide
ugacauaugagagcauacc

SEQ ID NO: 1099905 - RNA, 19 nt, Artificial Sequence
  Description of Artificial Sequence: Synthetic oligonucleotide
uucuauccacagcaccucg

SEQ ID NO: 1099906 - RNA, 19 nt, Artificial Sequence
  Description of Artificial Sequence: Synthetic oligonucleotide
accacgugcuuuuacuuuc

SEQ ID NO: 1099907 - RNA, 19 nt, Artificial Sequence
  Description of Artificial Sequence: Synthetic oligonucleotide
aagaauuaacuuagcuguc

SEQ ID NO: 1099908 - RNA, 19 nt, Artificial Sequence
  Description of Artificial Sequence: Synthetic oligonucleotide
caauucuauccacagcacc

SEQ ID NO: 1099909 - RNA, 19 nt, Artificial Sequence
  Description of Artificial Sequence: Synthetic oligonucleotide
agcaggggauccaagacgc

SEQ ID NO: 1099910 - RNA, 19 nt, Artificial Sequence
  Description of Artificial Sequence: Synthetic oligonucleotide
aaaacguauuugucucuca

SEQ ID NO: 1099911 - RNA, 19 nt, Artificial Sequence
  Description of Artificial Sequence: Synthetic oligonucleotide
cuuaauguaaacaccuaaa

SEQ ID NO: 1099912 - RNA, 19 nt, Artificial Sequence
  Description of Artificial Sequence: Synthetic oligonucleotide
uagcuagucauccaucaaa

SEQ ID NO: 1099913 - RNA, 19 nt, Artificial Sequence
  Description of Artificial Sequence: Synthetic oligonucleotide
guuauagauguagaaaaca

SEQ ID NO: 1099914 - RNA, 19 nt, Artificial Sequence
  Description of Artificial Sequence: Synthetic oligonucleotide
agucuagauauuuaacaaa

SEQ ID NO: 1099915 - RNA, 19 nt, Artificial Sequence
  Description of Artificial Sequence: Synthetic oligonucleotide
ugagucuggaucaaacuuu

SEQ ID NO: 1099916 - RNA, 19 nt, Artificial Sequence
  Description of Artificial Sequence: Synthetic oligonucleotide
auuuaaugaugaaguauuc

SEQ ID NO: 1099917 - RNA, 19 nt, Artificial Sequence
  Description of Artificial Sequence: Synthetic oligonucleotide
agaauucaaguacagucaa

SEQ ID NO: 1099918 - RNA, 19 nt, Artificial Sequence
  Description of Artificial Sequence: Synthetic oligonucleotide
auuaagcauauaucuaaaa

SEQ ID NO: 1099919 - RNA, 19 nt, Artificial Sequence
  Description of Artificial Sequence: Synthetic oligonucleotide
auuauauuucaauccuuaa

SEQ ID NO: 1099920 - RNA, 19 nt, Artificial Sequence
  Description of Artificial Sequence: Synthetic oligonucleotide
ugaugggacuugaacacac

SEQ ID NO: 1099921 - RNA, 19 nt, Artificial Sequence
  Description of Artificial Sequence: Synthetic oligonucleotide
cuggaucaaacuuucaaga

SEQ ID NO: 1099922 - RNA, 19 nt, Artificial Sequence
  Description of Artificial Sequence: Synthetic oligonucleotide
acacacugaacuugcuagg

SEQ ID NO: 1099923 - RNA, 19 nt, Artificial Sequence
  Description of Artificial Sequence: Synthetic oligonucleotide
auaauaccaagaauucaag

SEQ ID NO: 1099924 - RNA, 19 nt, Artificial Sequence
  Description of Artificial Sequence: Synthetic oligonucleotide
cacauucacugauaccacg

SEQ ID NO: 1099925 - RNA, 19 nt, Artificial Sequence
  Description of Artificial Sequence: Synthetic oligonucleotide
uuaaacugccuacuccaaa

SEQ ID NO: 1099926 - RNA, 19 nt, Artificial Sequence
  Description of Artificial Sequence: Synthetic oligonucleotide
uguguguguguguaagugu

SEQ ID NO: 1099927 - RNA, 19 nt, Artificial Sequence
  Description of Artificial Sequence: Synthetic oligonucleotide
uccuauuuguuaauaugua

SEQ ID NO: 1099928 - RNA, 19 nt, Artificial Sequence
  Description of Artificial Sequence: Synthetic oligonucleotide
gauggugguucaaaacucc

SEQ ID NO: 1099929 - RNA, 19 nt, Artificial Sequence
  Description of Artificial Sequence: Synthetic oligonucleotide
ucgcugacgaaucucuugu

SEQ ID NO: 1099930 - RNA, 19 nt, Artificial Sequence
  Description of Artificial Sequence: Synthetic oligonucleotide
auaucucaggaguuaaaau

SEQ ID NO: 1099931 - RNA, 19 nt, Artificial Sequence
  Description of Artificial Sequence: Synthetic oligonucleotide
acauaugagagcauaccug

SEQ ID NO: 1099932 - RNA, 19 nt, Artificial Sequence
  Description of Artificial Sequence: Synthetic oligonucleotide
ucuguggaccaucaccaac

SEQ ID NO: 1099933 - RNA, 19 nt, Artificial Sequence
  Description of Artificial Sequence: Synthetic oligonucleotide
accuaaauagauauuuccu

SEQ ID NO: 1099934 - RNA, 19 nt, Artificial Sequence
  Description of Artificial Sequence: Synthetic oligonucleotide
uuuaaacugccuacuccaa

SEQ ID NO: 1099935 - RNA, 19 nt, Artificial Sequence
  Description of Artificial Sequence: Synthetic oligonucleotide
agauggugguucaaaacuc

SEQ ID NO: 1099936 - RNA, 19 nt, Artificial Sequence
  Description of Artificial Sequence: Synthetic oligonucleotide
aacuaacuauauacaucac

SEQ ID NO: 1099937 - RNA, 19 nt, Artificial Sequence
  Description of Artificial Sequence: Synthetic oligonucleotide
uucgcugacgaaucucuug

SEQ ID NO: 1099938 - RNA, 19 nt, Artificial Sequence
  Description of Artificial Sequence: Synthetic oligonucleotide
guaagugugugugugugug

SEQ ID NO: 1099939 - RNA, 19 nt, Artificial Sequence
  Description of Artificial Sequence: Synthetic oligonucleotide
gaggaugaaggcccaauuc

SEQ ID NO: 1099940 - RNA, 19 nt, Artificial Sequence
  Description of Artificial Sequence: Synthetic oligonucleotide
auuuacuauugugucacca

SEQ ID NO: 1099941 - RNA, 19 nt, Artificial Sequence
  Description of Artificial Sequence: Synthetic oligonucleotide
gaugaaggcccaauuccag

SEQ ID NO: 1099942 - RNA, 19 nt, Artificial Sequence
  Description of Artificial Sequence: Synthetic oligonucleotide
ccaaagauucuccacuugg

SEQ ID NO: 1099943 - RNA, 19 nt, Artificial Sequence
  Description of Artificial Sequence: Synthetic oligonucleotide
gacauaugagagcauaccu

SEQ ID NO: 1099944 - RNA, 19 nt, Artificial Sequence
  Description of Artificial Sequence: Synthetic oligonucleotide
uuucaauccuuaagcacua

SEQ ID NO: 1099945 - RNA, 19 nt, Artificial Sequence
  Description of Artificial Sequence: Synthetic oligonucleotide
agagcauaccuguucugug

SEQ ID NO: 1099946 - RNA, 19 nt, Artificial Sequence
  Description of Artificial Sequence: Synthetic oligonucleotide
aagcaguaggcacaucgaa

SEQ ID NO: 1099947 - RNA, 19 nt, Artificial Sequence
  Description of Artificial Sequence: Synthetic oligonucleotide
cugacauaugagagcauac

SEQ ID NO: 1099948 - RNA, 19 nt, Artificial Sequence
  Description of Artificial Sequence: Synthetic oligonucleotide
uucguaccaaugccuaugu

SEQ ID NO: 1099949 - RNA, 19 nt, Artificial Sequence
  Description of Artificial Sequence: Synthetic oligonucleotide
cauaccuguucuguggacc

SEQ ID NO: 1099950 - RNA, 19 nt, Artificial Sequence
  Description of Artificial Sequence: Synthetic oligonucleotide
guguguguaagugugugug

SEQ ID NO: 1099951 - RNA, 19 nt, Artificial Sequence
  Description of Artificial Sequence: Synthetic oligonucleotide
aagguuucuuugagacugc

SEQ ID NO: 1099952 - RNA, 19 nt, Artificial Sequence
  Description of Artificial Sequence: Synthetic oligonucleotide
ugucaccaaagauucucca

SEQ ID NO: 1099953 - RNA, 19 nt, Artificial Sequence
  Description of Artificial Sequence: Synthetic oligonucleotide
augccuauguaaauaaggu

SEQ ID NO: 1099954 - RNA, 19 nt, Artificial Sequence
  Description of Artificial Sequence: Synthetic oligonucleotide
ugcuaggcaauuugaauuu

SEQ ID NO: 1099955 - RNA, 19 nt, Artificial Sequence
  Description of Artificial Sequence: Synthetic oligonucleotide
uguguaagugugugugugu

SEQ ID NO: 1099956 - RNA, 19 nt, Artificial Sequence
  Description of Artificial Sequence: Synthetic oligonucleotide
agaauucguaccaaugccu

SEQ ID NO: 1099957 - RNA, 19 nt, Artificial Sequence
  Description of Artificial Sequence: Synthetic oligonucleotide
guuccuaugucaaaaugga

SEQ ID NO: 1099958 - RNA, 19 nt, Artificial Sequence
  Description of Artificial Sequence: Synthetic oligonucleotide
ugcaguucgcugacgaauc

SEQ ID NO: 1099959 - RNA, 19 nt, Artificial Sequence
  Description of Artificial Sequence: Synthetic oligonucleotide
acaauucuauccacagcac

SEQ ID NO: 1099960 - RNA, 19 nt, Artificial Sequence
  Description of Artificial Sequence: Synthetic oligonucleotide
gaggcauccuuugauggcc

SEQ ID NO: 1099961 - RNA, 19 nt, Artificial Sequence
  Description of Artificial Sequence: Synthetic oligonucleotide
uguguguguguguguagug

SEQ ID NO: 1099962 - RNA, 19 nt, Artificial Sequence
  Description of Artificial Sequence: Synthetic oligonucleotide
auucuauccacagcaccuc

SEQ ID NO: 1099963 - RNA, 19 nt, Artificial Sequence
  Description of Artificial Sequence: Synthetic oligonucleotide
ggaguuaaaauuuaaugau

SEQ ID NO: 1099964 - RNA, 19 nt, Artificial Sequence
  Description of Artificial Sequence: Synthetic oligonucleotide
augggauuauuuacuauug

SEQ ID NO: 1099965 - RNA, 19 nt, Artificial Sequence
  Description of Artificial Sequence: Synthetic oligonucleotide
gcauuaagcauauaucuaa

SEQ ID NO: 1099966 - RNA, 19 nt, Artificial Sequence
  Description of Artificial Sequence: Synthetic oligonucleotide
uguguguaagugugugugu

SEQ ID NO: 1099967 - RNA, 19 nt, Artificial Sequence
  Description of Artificial Sequence: Synthetic oligonucleotide
aaagcaguaggcacaucga

SEQ ID NO: 1099968 - RNA, 19 nt, Artificial Sequence
  Description of Artificial Sequence: Synthetic oligonucleotide
caaguuauagauguagaaa

SEQ ID NO: 1099969 - RNA, 19 nt, Artificial Sequence
  Description of Artificial Sequence: Synthetic oligonucleotide
ucaauccuuaagcacuauu

SEQ ID NO: 1099970 - RNA, 19 nt, Artificial Sequence
  Description of Artificial Sequence: Synthetic oligonucleotide
uguaagugugugugugugu

SEQ ID NO: 1099971 - RNA, 19 nt, Artificial Sequence
  Description of Artificial Sequence: Synthetic oligonucleotide
auucguaccaaugccuaug

SEQ ID NO: 1099972 - RNA, 19 nt, Artificial Sequence
  Description of Artificial Sequence: Synthetic oligonucleotide
ucucaggaguuaaaauuua

SEQ ID NO: 1099973 - RNA, 19 nt, Artificial Sequence
  Description of Artificial Sequence: Synthetic oligonucleotide
ggcacaugggauuauuuac

SEQ ID NO: 1099974 - RNA, 19 nt, Artificial Sequence
  Description of Artificial Sequence: Synthetic oligonucleotide
guucccaccugauccuugg

SEQ ID NO: 1099975 - RNA, 19 nt, Artificial Sequence
  Description of Artificial Sequence: Synthetic oligonucleotide
cauaugagagcauaccugu

SEQ ID NO: 1099976 - RNA, 19 nt, Artificial Sequence
  Description of Artificial Sequence: Synthetic oligonucleotide
cacuaugugaagaaagucu

SEQ ID NO: 1099977 - RNA, 19 nt, Artificial Sequence
  Description of Artificial Sequence: Synthetic oligonucleotide
ugccuauguaaauaagguu

SEQ ID NO: 1099978 - RNA, 19 nt, Artificial Sequence
  Description of Artificial Sequence: Synthetic oligonucleotide
uguguguguaagugugugu

SEQ ID NO: 1099979 - RNA, 19 nt, Artificial Sequence
  Description of Artificial Sequence: Synthetic oligonucleotide
guagcaggggauccaagac

SEQ ID NO: 1099980 - RNA, 19 nt, Artificial Sequence
  Description of Artificial Sequence: Synthetic oligonucleotide
guguguguguguaagugug

SEQ ID NO: 1099981 - RNA, 19 nt, Artificial Sequence
  Description of Artificial Sequence: Synthetic oligonucleotide
uguguguguguaagugugu

SEQ ID NO: 1099982 - RNA, 19 nt, Artificial Sequence
  Description of Artificial Sequence: Synthetic oligonucleotide
aagacgccuggguaaggcu

SEQ ID NO: 1099983 - RNA, 19 nt, Artificial Sequence
  Description of Artificial Sequence: Synthetic oligonucleotide
uccuugggauacauacuca

SEQ ID NO: 1099984 - RNA, 19 nt, Artificial Sequence
  Description of Artificial Sequence: Synthetic oligonucleotide
gaucaaacuuucaagaauu

SEQ ID NO: 1099985 - RNA, 19 nt, Artificial Sequence
  Description of Artificial Sequence: Synthetic oligonucleotide
aacacucugcacauucacu

SEQ ID NO: 1099986 - RNA, 19 nt, Artificial Sequence
  Description of Artificial Sequence: Synthetic oligonucleotide
guaggcacaucgaaaagca

SEQ ID NO: 1099987 - RNA, 19 nt, Artificial Sequence
  Description of Artificial Sequence: Synthetic oligonucleotide
gguuacagcuuucaguauc

SEQ ID NO: 1099988 - RNA, 19 nt, Artificial Sequence
  Description of Artificial Sequence: Synthetic oligonucleotide
uguguguguguguaguguu

SEQ ID NO: 1099989 - RNA, 19 nt, Artificial Sequence
  Description of Artificial Sequence: Synthetic oligonucleotide
agauagcuagucauccauc

SEQ ID NO: 1099990 - RNA, 19 nt, Artificial Sequence
  Description of Artificial Sequence: Synthetic oligonucleotide
aguguguguguguguguag

SEQ ID NO: 1099991 - RNA, 19 nt, Artificial Sequence
  Description of Artificial Sequence: Synthetic oligonucleotide
gauuagaaacagagucagc

SEQ ID NO: 1099992 - RNA, 19 nt, Artificial Sequence
  Description of Artificial Sequence: Synthetic oligonucleotide
uacuuucaaugcccaguug

SEQ ID NO: 1099993 - RNA, 19 nt, Artificial Sequence
  Description of Artificial Sequence: Synthetic oligonucleotide
uguuugacuuggcuucguc

SEQ ID NO: 1099994 - RNA, 19 nt, Artificial Sequence
  Description of Artificial Sequence: Synthetic oligonucleotide
uuccuaugucaaaauggau

SEQ ID NO: 1099995 - RNA, 19 nt, Artificial Sequence
  Description of Artificial Sequence: Synthetic oligonucleotide
cauucacugauaccacgug

SEQ ID NO: 1099996 - RNA, 19 nt, Artificial Sequence
  Description of Artificial Sequence: Synthetic oligonucleotide
cauuaagcauauaucuaaa

SEQ ID NO: 1099997 - RNA, 19 nt, Artificial Sequence
  Description of Artificial Sequence: Synthetic oligonucleotide
acaaguggcauaauguguu

SEQ ID NO: 1099998 - RNA, 19 nt, Artificial Sequence
  Description of Artificial Sequence: Synthetic oligonucleotide
guguguguguguguaagug

SEQ ID NO: 1099999 - RNA, 19 nt, Artificial Sequence
  Description of Artificial Sequence: Synthetic oligonucleotide
gagacugcaguucgcugac

SEQ ID NO: 1100000 - RNA, 19 nt, Artificial Sequence
  Description of Artificial Sequence: Synthetic oligonucleotide
guguguaagugugugugug

SEQ ID NO: 1100001 - RNA, 19 nt, Artificial Sequence
  Description of Artificial Sequence: Synthetic oligonucleotide
aaauaucucaggaguuaaa

SEQ ID NO: 1100002 - RNA, 19 nt, Artificial Sequence
  Description of Artificial Sequence: Synthetic oligonucleotide
uagccaaaauuguuccuau

SEQ ID NO: 1100003 - RNA, 19 nt, Artificial Sequence
  Description of Artificial Sequence: Synthetic oligonucleotide
guguaagugugugugugug

SEQ ID NO: 1100004 - RNA, 19 nt, Artificial Sequence
  Description of Artificial Sequence: Synthetic oligonucleotide
aguugaaggcacaugggau

SEQ ID NO: 1100005 - RNA, 19 nt, Artificial Sequence
  Description of Artificial Sequence: Synthetic oligonucleotide
caguuuaaacugccuacuc

SEQ ID NO: 1100006 - RNA, 19 nt, Artificial Sequence
  Description of Artificial Sequence: Synthetic oligonucleotide
aggcacaugggauuauuua

SEQ ID NO: 1100007 - RNA, 19 nt, Artificial Sequence
  Description of Artificial Sequence: Synthetic oligonucleotide
uaagugugugugugugugu

SEQ ID NO: 1100008 - RNA, 19 nt, Artificial Sequence
  Description of Artificial Sequence: Synthetic oligonucleotide
cacuggaacuuuuggagga

SEQ ID NO: 1100009 - RNA, 19 nt, Artificial Sequence
  Description of Artificial Sequence: Synthetic oligonucleotide
aagugugugugugugugua

SEQ ID NO: 1100010 - RNA, 19 nt, Artificial Sequence
  Description of Artificial Sequence: Synthetic oligonucleotide
acaugggauuauuuacuau

SEQ ID NO: 1100011 - RNA, 19 nt, Artificial Sequence
  Description of Artificial Sequence: Synthetic oligonucleotide
auccaucaaaacacuaugu

SEQ ID NO: 1100012 - RNA, 19 nt, Artificial Sequence
  Description of Artificial Sequence: Synthetic oligonucleotide
gccuauguaaauaagguua

SEQ ID NO: 1100013 - RNA, 19 nt, Artificial Sequence
  Description of Artificial Sequence: Synthetic oligonucleotide
cuugcuaaagguggaccug

SEQ ID NO: 1100014 - RNA, 19 nt, Artificial Sequence
  Description of Artificial Sequence: Synthetic oligonucleotide
auagcuagucauccaucaa

SEQ ID NO: 1100015 - RNA, 19 nt, Artificial Sequence
  Description of Artificial Sequence: Synthetic oligonucleotide
agaaacagagucagcucug

SEQ ID NO: 1100016 - RNA, 19 nt, Artificial Sequence
  Description of Artificial Sequence: Synthetic oligonucleotide
cugcacauucacugauacc

SEQ ID NO: 1100017 - RNA, 19 nt, Artificial Sequence
  Description of Artificial Sequence: Synthetic oligonucleotide
gacgccuggguaaggcugg

SEQ ID NO: 1100018 - RNA, 19 nt, Artificial Sequence
  Description of Artificial Sequence: Synthetic oligonucleotide
gucuugcuaaagguggacc

SEQ ID NO: 1100019 - RNA, 19 nt, Artificial Sequence
  Description of Artificial Sequence: Synthetic oligonucleotide
cugaaauuugaaagucuaa

SEQ ID NO: 1100020 - RNA, 19 nt, Artificial Sequence
  Description of Artificial Sequence: Synthetic oligonucleotide
aggcacaucgaaaagcaau

SEQ ID NO: 1100021 - RNA, 19 nt, Artificial Sequence
  Description of Artificial Sequence: Synthetic oligonucleotide
caagacgccuggguaaggc

SEQ ID NO: 1100022 - RNA, 19 nt, Artificial Sequence
  Description of Artificial Sequence: Synthetic oligonucleotide
ugcuaaagguggaccugga

SEQ ID NO: 1100023 - RNA, 19 nt, Artificial Sequence
  Description of Artificial Sequence: Synthetic oligonucleotide
gaauucguaccaaugccua

SEQ ID NO: 1100024 - RNA, 19 nt, Artificial Sequence
  Description of Artificial Sequence: Synthetic oligonucleotide
uugaaggcacaugggauua

SEQ ID NO: 1100025 - RNA, 19 nt, Artificial Sequence
  Description of Artificial Sequence: Synthetic oligonucleotide
guguguguguaagugugug

SEQ ID NO: 1100026 - RNA, 19 nt, Artificial Sequence
  Description of Artificial Sequence: Synthetic oligonucleotide
uuuuggaggagggcccuga

SEQ ID NO: 1100027 - RNA, 19 nt, Artificial Sequence
  Description of Artificial Sequence: Synthetic oligonucleotide
ucuugagaauucguaccaa

SEQ ID NO: 1100028 - RNA, 19 nt, Artificial Sequence
  Description of Artificial Sequence: Synthetic oligonucleotide
gcaguaggcacaucgaaaa

SEQ ID NO: 1100029 - RNA, 19 nt, Artificial Sequence
  Description of Artificial Sequence: Synthetic oligonucleotide
guaguguucccaccugauc

SEQ ID NO: 1100030 - RNA, 19 nt, Artificial Sequence
  Description of Artificial Sequence: Synthetic oligonucleotide
uucgucuguugaugcuucc

SEQ ID NO: 1100031 - RNA, 19 nt, Artificial Sequence
  Description of Artificial Sequence: Synthetic oligonucleotide
cacuauuaaagaaauuauu

SEQ ID NO: 1100032 - RNA, 19 nt, Artificial Sequence
  Description of Artificial Sequence: Synthetic oligonucleotide
agaacgggucuugcuaaag

SEQ ID NO: 1100033 - RNA, 19 nt, Artificial Sequence
  Description of Artificial Sequence: Synthetic oligonucleotide
agcuagucauccaucaaaa

SEQ ID NO: 1100034 - RNA, 19 nt, Artificial Sequence
  Description of Artificial Sequence: Synthetic oligonucleotide
cucaggaguuaaaauuuaa

SEQ ID NO: 1100035 - RNA, 19 nt, Artificial Sequence
  Description of Artificial Sequence: Synthetic oligonucleotide
uguggaccaucaccaacua

SEQ ID NO: 1100036 - RNA, 19 nt, Artificial Sequence
  Description of Artificial Sequence: Synthetic oligonucleotide
gcagauggugguucaaaac

SEQ ID NO: 1100037 - RNA, 19 nt, Artificial Sequence
  Description of Artificial Sequence: Synthetic oligonucleotide
gaauuaacuuagcugucuu

SEQ ID NO: 1100038 - RNA, 19 nt, Artificial Sequence
  Description of Artificial Sequence: Synthetic oligonucleotide
auuccuagccaaaauuguu

SEQ ID NO: 1100039 - RNA, 19 nt, Artificial Sequence
  Description of Artificial Sequence: Synthetic oligonucleotide
ccuuaagcacuauuaaaga

SEQ ID NO: 1100040 - RNA, 19 nt, Artificial Sequence
  Description of Artificial Sequence: Synthetic oligonucleotide
cgggucuugcuaaaggugg

SEQ ID NO: 1100041 - RNA, 19 nt, Artificial Sequence
  Description of Artificial Sequence: Synthetic oligonucleotide
accuguucuguggaccauc

SEQ ID NO: 1100042 - RNA, 19 nt, Artificial Sequence
  Description of Artificial Sequence: Synthetic oligonucleotide
ucacugauaccacgugcuu

SEQ ID NO: 1100043 - RNA, 19 nt, Artificial Sequence
  Description of Artificial Sequence: Synthetic oligonucleotide
ugcuaacuucugauuuaaa

SEQ ID NO: 1100044 - RNA, 19 nt, Artificial Sequence
  Description of Artificial Sequence: Synthetic oligonucleotide
gggauacauacucaaucca

SEQ ID NO: 1100045 - RNA, 19 nt, Artificial Sequence
  Description of Artificial Sequence: Synthetic oligonucleotide
cuagccaaaauuguuccua

SEQ ID NO: 1100046 - RNA, 19 nt, Artificial Sequence
  Description of Artificial Sequence: Synthetic oligonucleotide
caaauaucucaggaguuaa

SEQ ID NO: 1100047 - RNA, 19 nt, Artificial Sequence
  Description of Artificial Sequence: Synthetic oligonucleotide
aaguagcaggggauccaag

SEQ ID NO: 1100048 - RNA, 19 nt, Artificial Sequence
  Description of Artificial Sequence: Synthetic oligonucleotide
gacgaaucucuuguccuga

SEQ ID NO: 1100049 - RNA, 19 nt, Artificial Sequence
  Description of Artificial Sequence: Synthetic oligonucleotide
augcuaacuucugauuuaa

SEQ ID NO: 1100050 - RNA, 19 nt, Artificial Sequence
  Description of Artificial Sequence: Synthetic oligonucleotide
acuugcuaggcaauuugaa

SEQ ID NO: 1100051 - RNA, 19 nt, Artificial Sequence
  Description of Artificial Sequence: Synthetic oligonucleotide
aaacaccuaaauagauauu

SEQ ID NO: 1100052 - RNA, 19 nt, Artificial Sequence
  Description of Artificial Sequence: Synthetic oligonucleotide
agucauccaucaaaacacu

SEQ ID NO: 1100053 - RNA, 19 nt, Artificial Sequence
  Description of Artificial Sequence: Synthetic oligonucleotide
aggagggcccugauuagag

SEQ ID NO: 1100054 - RNA, 19 nt, Artificial Sequence
  Description of Artificial Sequence: Synthetic oligonucleotide
ccuauuuguuaauauguaa

SEQ ID NO: 1100055 - RNA, 19 nt, Artificial Sequence
  Description of Artificial Sequence: Synthetic oligonucleotide
aggcauccuuugauggccc

SEQ ID NO: 1100056 - RNA, 19 nt, Artificial Sequence
  Description of Artificial Sequence: Synthetic oligonucleotide
guguaguguucccaccuga

SEQ ID NO: 1100057 - RNA, 19 nt, Artificial Sequence
  Description of Artificial Sequence: Synthetic oligonucleotide
cacaugggauuauuuacua

SEQ ID NO: 1100058 - RNA, 19 nt, Artificial Sequence
  Description of Artificial Sequence: Synthetic oligonucleotide
cauacagaggacucuccua

SEQ ID NO: 1100059 - RNA, 19 nt, Artificial Sequence
  Description of Artificial Sequence: Synthetic oligonucleotide
gaauucaaguacagucaaa

SEQ ID NO: 1100060 - RNA, 19 nt, Artificial Sequence
  Description of Artificial Sequence: Synthetic oligonucleotide
agcaguaggcacaucgaaa

SEQ ID NO: 1100061 - RNA, 19 nt, Artificial Sequence
  Description of Artificial Sequence: Synthetic oligonucleotide
auaguccucucuggagguc

SEQ ID NO: 1100062 - RNA, 19 nt, Artificial Sequence
  Description of Artificial Sequence: Synthetic oligonucleotide
guugaaggcacaugggauu

SEQ ID NO: 1100063 - RNA, 19 nt, Artificial Sequence
  Description of Artificial Sequence: Synthetic oligonucleotide
ggaucaaacuuucaagaau

SEQ ID NO: 1100064 - RNA, 19 nt, Artificial Sequence
  Description of Artificial Sequence: Synthetic oligonucleotide
agacgccuggguaaggcug

SEQ ID NO: 1100065 - RNA, 19 nt, Artificial Sequence
  Description of Artificial Sequence: Synthetic oligonucleotide
uucuguggaccaucaccaa

SEQ ID NO: 1100066 - RNA, 19 nt, Artificial Sequence
  Description of Artificial Sequence: Synthetic oligonucleotide
aaggcacaugggauuauuu

SEQ ID NO: 1100067 - RNA, 19 nt, Artificial Sequence
  Description of Artificial Sequence: Synthetic oligonucleotide
cugacgaaucucuuguccu

SEQ ID NO: 1100068 - RNA, 19 nt, Artificial Sequence
  Description of Artificial Sequence: Synthetic oligonucleotide
ucgucuguugaugcuuccu

SEQ ID NO: 1100069 - RNA, 19 nt, Artificial Sequence
  Description of Artificial Sequence: Synthetic oligonucleotide
gaaguagcaggggauccaa

SEQ ID NO: 1100070 - RNA, 19 nt, Artificial Sequence
  Description of Artificial Sequence: Synthetic oligonucleotide
cagaggacucuccuaacaa

SEQ ID NO: 1100071 - RNA, 19 nt, Artificial Sequence
  Description of Artificial Sequence: Synthetic oligonucleotide
acuguucaguugcauucuu

SEQ ID NO: 1100072 - RNA, 19 nt, Artificial Sequence
  Description of Artificial Sequence: Synthetic oligonucleotide
cugauuagagcuugcuggu

SEQ ID NO: 1100073 - RNA, 19 nt, Artificial Sequence
  Description of Artificial Sequence: Synthetic oligonucleotide
uggguaaggcuggagcaau

SEQ ID NO: 1100074 - RNA, 19 nt, Artificial Sequence
  Description of Artificial Sequence: Synthetic oligonucleotide
uuacagcuuucaguaucac

SEQ ID NO: 1100075 - RNA, 19 nt, Artificial Sequence
  Description of Artificial Sequence: Synthetic oligonucleotide
acugcaguucgcugacgaa

SEQ ID NO: 1100076 - RNA, 19 nt, Artificial Sequence
  Description of Artificial Sequence: Synthetic oligonucleotide
auggugguucaaaacuccu

SEQ ID NO: 1100077 - RNA, 19 nt, Artificial Sequence
  Description of Artificial Sequence: Synthetic oligonucleotide
gcuagucauccaucaaaac

SEQ ID NO: 1100078 - RNA, 19 nt, Artificial Sequence
  Description of Artificial Sequence: Synthetic oligonucleotide
cacuuaauguaaacaccua

SEQ ID NO: 1100079 - RNA, 19 nt, Artificial Sequence
  Description of Artificial Sequence: Synthetic oligonucleotide
cuauugugucaccaaagau

SEQ ID NO: 1100080 - RNA, 19 nt, Artificial Sequence
  Description of Artificial Sequence: Synthetic oligonucleotide
uucuuugagucuggaucaa

SEQ ID NO: 1100081 - RNA, 19 nt, Artificial Sequence
  Description of Artificial Sequence: Synthetic oligonucleotide
ggagaacgggucuugcuaa

SEQ ID NO: 1100082 - RNA, 19 nt, Artificial Sequence
  Description of Artificial Sequence: Synthetic oligonucleotide
gagaacgggucuugcuaaa

SEQ ID NO: 1100083 - RNA, 19 nt, Artificial Sequence
  Description of Artificial Sequence: Synthetic oligonucleotide
ucguaccaaugccuaugua

SEQ ID NO: 1100084 - RNA, 19 nt, Artificial Sequence
  Description of Artificial Sequence: Synthetic oligonucleotide
cagauagcuagucauccau

SEQ ID NO: 1100085 - RNA, 19 nt, Artificial Sequence
  Description of Artificial Sequence: Synthetic oligonucleotide
aggacucuccuaacaagau

SEQ ID NO: 1100086 - RNA, 19 nt, Artificial Sequence
  Description of Artificial Sequence: Synthetic oligonucleotide
ggaggagggcccugauuag

SEQ ID NO: 1100087 - RNA, 19 nt, Artificial Sequence
  Description of Artificial Sequence: Synthetic oligonucleotide
ccuaaauagauauuuccuu

SEQ ID NO: 1100088 - RNA, 19 nt, Artificial Sequence
  Description of Artificial Sequence: Synthetic oligonucleotide
guguguguguguaguguuc

SEQ ID NO: 1100089 - RNA, 19 nt, Artificial Sequence
  Description of Artificial Sequence: Synthetic oligonucleotide
aaacuacaaguggcauaau

SEQ ID NO: 1100090 - RNA, 19 nt, Artificial Sequence
  Description of Artificial Sequence: Synthetic oligonucleotide
gcaaauaucucaggaguua

SEQ ID NO: 1100091 - RNA, 19 nt, Artificial Sequence
  Description of Artificial Sequence: Synthetic oligonucleotide
ggcacaucgaaaagcaaua

SEQ ID NO: 1100092 - RNA, 19 nt, Artificial Sequence
  Description of Artificial Sequence: Synthetic oligonucleotide
ucacguggcuuuggcccag

SEQ ID NO: 1100093 - RNA, 19 nt, Artificial Sequence
  Description of Artificial Sequence: Synthetic oligonucleotide
caguucgcugacgaaucuc

SEQ ID NO: 1100094 - RNA, 19 nt, Artificial Sequence
  Description of Artificial Sequence: Synthetic oligonucleotide
gcugacauaugagagcaua

SEQ ID NO: 1100095 - RNA, 19 nt, Artificial Sequence
  Description of Artificial Sequence: Synthetic oligonucleotide
ggagggcccugauuagagc

SEQ ID NO: 1100096 - RNA, 19 nt, Artificial Sequence
  Description of Artificial Sequence: Synthetic oligonucleotide
ugaaggcacaugggauuau

SEQ ID NO: 1100097 - RNA, 19 nt, Artificial Sequence
  Description of Artificial Sequence: Synthetic oligonucleotide
auaugagagcauaccuguu

SEQ ID NO: 1100098 - RNA, 19 nt, Artificial Sequence
  Description of Artificial Sequence: Synthetic oligonucleotide
cuccacuugguucaagauu

SEQ ID NO: 1100099 - RNA, 19 nt, Artificial Sequence
  Description of Artificial Sequence: Synthetic oligonucleotide
guguguguguguguagugu

SEQ ID NO: 1100100 - RNA, 19 nt, Artificial Sequence
  Description of Artificial Sequence: Synthetic oligonucleotide
guguguguguguguguagu

SEQ ID NO: 1100101 - RNA, 19 nt, Artificial Sequence
  Description of Artificial Sequence: Synthetic oligonucleotide
cugcacuugacuguucagu

SEQ ID NO: 1100102 - RNA, 19 nt, Artificial Sequence
  Description of Artificial Sequence: Synthetic oligonucleotide
guggaccaucaccaacuaa

SEQ ID NO: 1100103 - RNA, 19 nt, Artificial Sequence
  Description of Artificial Sequence: Synthetic oligonucleotide
gaugggacuugaacacacu

SEQ ID NO: 1100104 - RNA, 19 nt, Artificial Sequence
  Description of Artificial Sequence: Synthetic oligonucleotide
gcauaccuguucuguggac

SEQ ID NO: 1100105 - RNA, 19 nt, Artificial Sequence
  Description of Artificial Sequence: Synthetic oligonucleotide
acucuccuaacaagauuuu

SEQ ID NO: 1100106 - RNA, 19 nt, Artificial Sequence
  Description of Artificial Sequence: Synthetic oligonucleotide
gcaguuuaaacugccuacu

SEQ ID NO: 1100107 - RNA, 19 nt, Artificial Sequence
  Description of Artificial Sequence: Synthetic oligonucleotide
gcauccuuugauggcccag

SEQ ID NO: 1100108 - RNA, 19 nt, Artificial Sequence
  Description of Artificial Sequence: Synthetic oligonucleotide
cuggguaaggcuggagcaa

SEQ ID NO: 1100109 - RNA, 19 nt, Artificial Sequence
  Description of Artificial Sequence: Synthetic oligonucleotide
gcacaugggauuauuuacu

SEQ ID NO: 1100110 - RNA, 19 nt, Artificial Sequence
  Description of Artificial Sequence: Synthetic oligonucleotide
caccaaagauucuccacuu

SEQ ID NO: 1100111 - RNA, 19 nt, Artificial Sequence
  Description of Artificial Sequence: Synthetic oligonucleotide
uaccuguucuguggaccau

SEQ ID NO: 1100112 - RNA, 19 nt, Artificial Sequence
  Description of Artificial Sequence: Synthetic oligonucleotide
gaaggcacaugggauuauu

SEQ ID NO: 1100113 - RNA, 19 nt, Artificial Sequence
  Description of Artificial Sequence: Synthetic oligonucleotide
cuauccacagcaccucguu

SEQ ID NO: 1100114 - RNA, 19 nt, Artificial Sequence
  Description of Artificial Sequence: Synthetic oligonucleotide
ggaggaugaaggcccaauu

SEQ ID NO: 1100115 - RNA, 19 nt, Artificial Sequence
  Description of Artificial Sequence: Synthetic oligonucleotide
cguauuugucucucaaagu

SEQ ID NO: 1100116 - RNA, 19 nt, Artificial Sequence
  Description of Artificial Sequence: Synthetic oligonucleotide
ggcauccuuugauggccca

SEQ ID NO: 1100117 - RNA, 19 nt, Artificial Sequence
  Description of Artificial Sequence: Synthetic oligonucleotide
ggacucuccuaacaagauu

SEQ ID NO: 1100118 - RNA, 19 nt, Artificial Sequence
  Description of Artificial Sequence: Synthetic oligonucleotide
uccuucccacuggcaaaua

SEQ ID NO: 1100119 - RNA, 19 nt, Artificial Sequence
  Description of Artificial Sequence: Synthetic oligonucleotide
cacugauaccacgugcuuu

SEQ ID NO: 1100120 - RNA, 19 nt, Artificial Sequence
  Description of Artificial Sequence: Synthetic oligonucleotide
ggggagaacgggucuugcu

SEQ ID NO: 1100121 - RNA, 19 nt, Artificial Sequence
  Description of Artificial Sequence: Synthetic oligonucleotide
ccacgugcuuuuacuuuca

SEQ ID NO: 1100122 - RNA, 19 nt, Artificial Sequence
  Description of Artificial Sequence: Synthetic oligonucleotide
ccaagacgccuggguaagg

SEQ ID NO: 1100123 - RNA, 19 nt, Artificial Sequence
  Description of Artificial Sequence: Synthetic oligonucleotide
ggcuucgucuguugaugcu

SEQ ID NO: 1100124 - RNA, 19 nt, Artificial Sequence
  Description of Artificial Sequence: Synthetic oligonucleotide
gcaguucgcugacgaaucu

SEQ ID NO: 1100125 - RNA, 19 nt, Artificial Sequence
  Description of Artificial Sequence: Synthetic oligonucleotide
ccuagccaaaauuguuccu

SEQ ID NO: 1100126 - RNA, 19 nt, Artificial Sequence
  Description of Artificial Sequence: Synthetic oligonucleotide
gcacaucgaaaagcaauau

SEQ ID NO: 1100127 - RNA, 19 nt, Artificial Sequence
  Description of Artificial Sequence: Synthetic oligonucleotide
acgccuggguaaggcugga

SEQ ID NO: 1100128 - RNA, 19 nt, Artificial Sequence
  Description of Artificial Sequence: Synthetic oligonucleotide
gugcuggggaaagguuucu

SEQ ID NO: 1100129 - RNA, 19 nt, Artificial Sequence
  Description of Artificial Sequence: Synthetic oligonucleotide
gcccaauuccaggcacuga

SEQ ID NO: 1100130 - RNA, 19 nt, Artificial Sequence
  Description of Artificial Sequence: Synthetic oligonucleotide
gcccugauuagagcuugcu

SEQ ID NO: 1100131 - RNA, 19 nt, Artificial Sequence
  Description of Artificial Sequence: Synthetic oligonucleotide
cgaaucucuuguccugauu

SEQ ID NO: 1100132 - RNA, 19 nt, Artificial Sequence
  Description of Artificial Sequence: Synthetic oligonucleotide
uugacauccaccucgcagg

SEQ ID NO: 1100133 - RNA, 19 nt, Artificial Sequence
  Description of Artificial Sequence: Synthetic oligonucleotide
ugaaggauggucucuaugu

SEQ ID NO: 1100134 - RNA, 19 nt, Artificial Sequence
  Description of Artificial Sequence: Synthetic oligonucleotide
gagagagagagagagaaag

SEQ ID NO: 1100135 - RNA, 19 nt, Artificial Sequence
  Description of Artificial Sequence: Synthetic oligonucleotide
gagagagagagagagagag

SEQ ID NO: 1100136 - RNA, 19 nt, Artificial Sequence
  Description of Artificial Sequence: Synthetic oligonucleotide
aguaccgugguauaggcca

SEQ ID NO: 1100137 - RNA, 19 nt, Artificial Sequence
  Description of Artificial Sequence: Synthetic oligonucleotide
agcaccgaaagcuugaccu

SEQ ID NO: 1100138 - RNA, 19 nt, Artificial Sequence
  Description of Artificial Sequence: Synthetic oligonucleotide
acggggaucagcuugaccu

SEQ ID NO: 1100139 - RNA, 19 nt, Artificial Sequence
  Description of Artificial Sequence: Synthetic oligonucleotide
uggaggccuaaccugaggg

SEQ ID NO: 1100140 - RNA, 19 nt, Artificial Sequence
  Description of Artificial Sequence: Synthetic oligonucleotide
ucucacgguguccacacgg

SEQ ID NO: 1100141 - RNA, 19 nt, Artificial Sequence
  Description of Artificial Sequence: Synthetic oligonucleotide
ugaaguaccgugguauagg

SEQ ID NO: 1100142 - RNA, 19 nt, Artificial Sequence
  Description of Artificial Sequence: Synthetic oligonucleotide
gugagagagagagagagag

SEQ ID NO: 1100143 - RNA, 19 nt, Artificial Sequence
  Description of Artificial Sequence: Synthetic oligonucleotide
aagaguugaaggauggucu

SEQ ID NO: 1100144 - RNA, 19 nt, Artificial Sequence
  Description of Artificial Sequence: Synthetic oligonucleotide
guugacauccaccucgcag

SEQ ID NO: 1100145 - RNA, 19 nt, Artificial Sequence
  Description of Artificial Sequence: Synthetic oligonucleotide
uugaguugcacggugagcu

SEQ ID NO: 1100146 - RNA, 19 nt, Artificial Sequence
  Description of Artificial Sequence: Synthetic oligonucleotide
cacggaauagugcagggcc

SEQ ID NO: 1100147 - RNA, 19 nt, Artificial Sequence
  Description of Artificial Sequence: Synthetic oligonucleotide
cauuccugaaguaccgugg

SEQ ID NO: 1100148 - RNA, 19 nt, Artificial Sequence
  Description of Artificial Sequence: Synthetic oligonucleotide
uguucaugcgugaguacag

SEQ ID NO: 1100149 - RNA, 19 nt, Artificial Sequence
  Description of Artificial Sequence: Synthetic oligonucleotide
uggcucuugaguugcacgg

SEQ ID NO: 1100150 - RNA, 19 nt, Artificial Sequence
  Description of Artificial Sequence: Synthetic oligonucleotide
gugugugagagagagagag

SEQ ID NO: 1100151 - RNA, 19 nt, Artificial Sequence
  Description of Artificial Sequence: Synthetic oligonucleotide
cauagaugcaaucucgcuc

SEQ ID NO: 1100152 - RNA, 19 nt, Artificial Sequence
  Description of Artificial Sequence: Synthetic oligonucleotide
uggccuagaaacuucuggc

SEQ ID NO: 1100153 - RNA, 19 nt, Artificial Sequence
  Description of Artificial Sequence: Synthetic oligonucleotide
uggggcuguagccagcacg

SEQ ID NO: 1100154 - RNA, 19 nt, Artificial Sequence
  Description of Artificial Sequence: Synthetic oligonucleotide
guucacauucccaagccgg

SEQ ID NO: 1100155 - RNA, 19 nt, Artificial Sequence
  Description of Artificial Sequence: Synthetic oligonucleotide
acagacaccgcuguccagc

SEQ ID NO: 1100156 - RNA, 19 nt, Artificial Sequence
  Description of Artificial Sequence: Synthetic oligonucleotide
acuccggcaggccaggcgc

SEQ ID NO: 1100157 - RNA, 19 nt, Artificial Sequence
  Description of Artificial Sequence: Synthetic oligonucleotide
aaguuggcgugugacacgg

SEQ ID NO: 1100158 - RNA, 19 nt, Artificial Sequence
  Description of Artificial Sequence: Synthetic oligonucleotide
cacucuucagcugaggagg

SEQ ID NO: 1100159 - RNA, 19 nt, Artificial Sequence
  Description of Artificial Sequence: Synthetic oligonucleotide
gaaguaccgugguauaggc

SEQ ID NO: 1100160 - RNA, 19 nt, Artificial Sequence
  Description of Artificial Sequence: Synthetic oligonucleotide
gugugagagagagagagag

SEQ ID NO: 1100161 - RNA, 19 nt, Artificial Sequence
  Description of Artificial Sequence: Synthetic oligonucleotide
ggcgauguugaccacauag

SEQ ID NO: 1100162 - RNA, 19 nt, Artificial Sequence
  Description of Artificial Sequence: Synthetic oligonucleotide
guggccuagaaacuucugg

SEQ ID NO: 1100163 - RNA, 19 nt, Artificial Sequence
  Description of Artificial Sequence: Synthetic oligonucleotide
gaugucgucgcacaagcuc

SEQ ID NO: 1100164 - RNA, 19 nt, Artificial Sequence
  Description of Artificial Sequence: Synthetic oligonucleotide
uacagcauagaugcaaucu

SEQ ID NO: 1100165 - RNA, 19 nt, Artificial Sequence
  Description of Artificial Sequence: Synthetic oligonucleotide
cagguauuucuccagggcc

SEQ ID NO: 1100166 - RNA, 19 nt, Artificial Sequence
  Description of Artificial Sequence: Synthetic oligonucleotide
agagagagagagaaaggac

SEQ ID NO: 1100167 - RNA, 19 nt, Artificial Sequence
  Description of Artificial Sequence: Synthetic oligonucleotide
gagagagagagaaaggaca

SEQ ID NO: 1100168 - RNA, 19 nt, Artificial Sequence
  Description of Artificial Sequence: Synthetic oligonucleotide
acucucacgguguccacac

SEQ ID NO: 1100169 - RNA, 19 nt, Artificial Sequence
  Description of Artificial Sequence: Synthetic oligonucleotide
aaagcuugaccuggagcac

SEQ ID NO: 1100170 - RNA, 19 nt, Artificial Sequence
  Description of Artificial Sequence: Synthetic oligonucleotide
aagucccguucucggaccc

SEQ ID NO: 1100171 - RNA, 19 nt, Artificial Sequence
  Description of Artificial Sequence: Synthetic oligonucleotide
gaagaguugaaggaugguc

SEQ ID NO: 1100172 - RNA, 19 nt, Artificial Sequence
  Description of Artificial Sequence: Synthetic oligonucleotide
acacgcacacauuagggcu

SEQ ID NO: 1100173 - RNA, 19 nt, Artificial Sequence
  Description of Artificial Sequence: Synthetic oligonucleotide
agcauagaugcaaucucgc

SEQ ID NO: 1100174 - RNA, 19 nt, Artificial Sequence
  Description of Artificial Sequence: Synthetic oligonucleotide
gugugugugugugagagag

SEQ ID NO: 1100175 - RNA, 19 nt, Artificial Sequence
  Description of Artificial Sequence: Synthetic oligonucleotide
gagagagagagagaaagga

SEQ ID NO: 1100176 - RNA, 19 nt, Artificial Sequence
  Description of Artificial Sequence: Synthetic oligonucleotide
gagagagagagagagagaa

SEQ ID NO: 1100177 - RNA, 19 nt, Artificial Sequence
  Description of Artificial Sequence: Synthetic oligonucleotide
cacagucugacaugggagc

SEQ ID NO: 1100178 - RNA, 19 nt, Artificial Sequence
  Description of Artificial Sequence: Synthetic oligonucleotide
uugauguucaugcgugagu

SEQ ID NO: 1100179 - RNA, 19 nt, Artificial Sequence
  Description of Artificial Sequence: Synthetic oligonucleotide
gaaguuggcgugugacacg

SEQ ID NO: 1100180 - RNA, 19 nt, Artificial Sequence
  Description of Artificial Sequence: Synthetic oligonucleotide
gacaccgcuguccagcagc

SEQ ID NO: 1100181 - RNA, 19 nt, Artificial Sequence
  Description of Artificial Sequence: Synthetic oligonucleotide
gacacggaauagugcaggg

SEQ ID NO: 1100182 - RNA, 19 nt, Artificial Sequence
  Description of Artificial Sequence: Synthetic oligonucleotide
ugacaugggagcgaucgag

SEQ ID NO: 1100183 - RNA, 19 nt, Artificial Sequence
  Description of Artificial Sequence: Synthetic oligonucleotide
aaugcccaagucccguucu

SEQ ID NO: 1100184 - RNA, 19 nt, Artificial Sequence
  Description of Artificial Sequence: Synthetic oligonucleotide
cuuguguccgugcucacac

SEQ ID NO: 1100185 - RNA, 19 nt, Artificial Sequence
  Description of Artificial Sequence: Synthetic oligonucleotide
cagaugucgucgcacaagc

SEQ ID NO: 1100186 - RNA, 19 nt, Artificial Sequence
  Description of Artificial Sequence: Synthetic oligonucleotide
aagcuugaccuggagcacg

SEQ ID NO: 1100187 - RNA, 19 nt, Artificial Sequence
  Description of Artificial Sequence: Synthetic oligonucleotide
uccguaagugagaugucac

SEQ ID NO: 1100188 - RNA, 19 nt, Artificial Sequence
  Description of Artificial Sequence: Synthetic oligonucleotide
aguuuguccaccugacaga

SEQ ID NO: 1100189 - RNA, 19 nt, Artificial Sequence
  Description of Artificial Sequence: Synthetic oligonucleotide
aaguaccgugguauaggcc

SEQ ID NO: 1100190 - RNA, 19 nt, Artificial Sequence
  Description of Artificial Sequence: Synthetic oligonucleotide
gugugugugugugugagag

SEQ ID NO: 1100191 - RNA, 19 nt, Artificial Sequence
  Description of Artificial Sequence: Synthetic oligonucleotide
aguucucgcccagugaggg

SEQ ID NO: 1100192 - RNA, 19 nt, Artificial Sequence
  Description of Artificial Sequence: Synthetic oligonucleotide
ugauguucaugcgugagua

SEQ ID NO: 1100193 - RNA, 19 nt, Artificial Sequence
  Description of Artificial Sequence: Synthetic oligonucleotide
uucaugcgugaguacagca

SEQ ID NO: 1100194 - RNA, 19 nt, Artificial Sequence
  Description of Artificial Sequence: Synthetic oligonucleotide
auacccgccguugacuccc

SEQ ID NO: 1100195 - RNA, 19 nt, Artificial Sequence
  Description of Artificial Sequence: Synthetic oligonucleotide
augcaaucucgcucugccc

SEQ ID NO: 1100196 - RNA, 19 nt, Artificial Sequence
  Description of Artificial Sequence: Synthetic oligonucleotide
augucgucgcacaagcucg

SEQ ID NO: 1100197 - RNA, 19 nt, Artificial Sequence
  Description of Artificial Sequence: Synthetic oligonucleotide
ugugagagagagagagaga

SEQ ID NO: 1100198 - RNA, 19 nt, Artificial Sequence
  Description of Artificial Sequence: Synthetic oligonucleotide
guugccguugcugucggcg

SEQ ID NO: 1100199 - RNA, 19 nt, Artificial Sequence
  Description of Artificial Sequence: Synthetic oligonucleotide
auaggccacuuucaguucu

SEQ ID NO: 1100200 - RNA, 19 nt, Artificial Sequence
  Description of Artificial Sequence: Synthetic oligonucleotide
agagagagagagagaaagg

SEQ ID NO: 1100201 - RNA, 19 nt, Artificial Sequence
  Description of Artificial Sequence: Synthetic oligonucleotide
aucucuggggcuucguucu

SEQ ID NO: 1100202 - RNA, 19 nt, Artificial Sequence
  Description of Artificial Sequence: Synthetic oligonucleotide
ucaugcgugaguacagcau

SEQ ID NO: 1100203 - RNA, 19 nt, Artificial Sequence
  Description of Artificial Sequence: Synthetic oligonucleotide
ugagagagagagagagaga

SEQ ID NO: 1100204 - RNA, 19 nt, Artificial Sequence
  Description of Artificial Sequence: Synthetic oligonucleotide
gccacuuuagccacuaggg

SEQ ID NO: 1100205 - RNA, 19 nt, Artificial Sequence
  Description of Artificial Sequence: Synthetic oligonucleotide
uccugaaguaccgugguau

SEQ ID NO: 1100206 - RNA, 19 nt, Artificial Sequence
  Description of Artificial Sequence: Synthetic oligonucleotide
uccaccacucucacggugu

SEQ ID NO: 1100207 - RNA, 19 nt, Artificial Sequence
  Description of Artificial Sequence: Synthetic oligonucleotide
ucgucgcacaagcucgggg

SEQ ID NO: 1100208 - RNA, 19 nt, Artificial Sequence
  Description of Artificial Sequence: Synthetic oligonucleotide
ugugugagagagagagaga

SEQ ID NO: 1100209 - RNA, 19 nt, Artificial Sequence
  Description of Artificial Sequence: Synthetic oligonucleotide
acgguguccacacggaccu

SEQ ID NO: 1100210 - RNA, 19 nt, Artificial Sequence
  Description of Artificial Sequence: Synthetic oligonucleotide
gagcacggggaucagcuug

SEQ ID NO: 1100211 - RNA, 19 nt, Artificial Sequence
  Description of Artificial Sequence: Synthetic oligonucleotide
uggcgugugacacggaaua

SEQ ID NO: 1100212 - RNA, 19 nt, Artificial Sequence
  Description of Artificial Sequence: Synthetic oligonucleotide
cucuagcacagcagggucc

SEQ ID NO: 1100213 - RNA, 19 nt, Artificial Sequence
  Description of Artificial Sequence: Synthetic oligonucleotide
acacggaauagugcagggc

SEQ ID NO: 1100214 - RNA, 19 nt, Artificial Sequence
  Description of Artificial Sequence: Synthetic oligonucleotide
cuugauguucaugcgugag

SEQ ID NO: 1100215 - RNA, 19 nt, Artificial Sequence
  Description of Artificial Sequence: Synthetic oligonucleotide
auguucaugcgugaguaca

SEQ ID NO: 1100216 - RNA, 19 nt, Artificial Sequence
  Description of Artificial Sequence: Synthetic oligonucleotide
ccgaauuuccuccucagag

SEQ ID NO: 1100217 - RNA, 19 nt, Artificial Sequence
  Description of Artificial Sequence: Synthetic oligonucleotide
cacgguguccacacggacc

SEQ ID NO: 1100218 - RNA, 19 nt, Artificial Sequence
  Description of Artificial Sequence: Synthetic oligonucleotide
cugucggcgauguugacca

SEQ ID NO: 1100219 - RNA, 19 nt, Artificial Sequence
  Description of Artificial Sequence: Synthetic oligonucleotide
guauaggccacuuucaguu

SEQ ID NO: 1100220 - RNA, 19 nt, Artificial Sequence
  Description of Artificial Sequence: Synthetic oligonucleotide
ugacauccaccucgcaggc

SEQ ID NO: 1100221 - RNA, 19 nt, Artificial Sequence
  Description of Artificial Sequence: Synthetic oligonucleotide
uguccgugcucacacgcac

SEQ ID NO: 1100222 - RNA, 19 nt, Artificial Sequence
  Description of Artificial Sequence: Synthetic oligonucleotide
cacuagggcagcuucacca

SEQ ID NO: 1100223 - RNA, 19 nt, Artificial Sequence
  Description of Artificial Sequence: Synthetic oligonucleotide
cuucauggggaccuuccac

SEQ ID NO: 1100224 - RNA, 19 nt, Artificial Sequence
  Description of Artificial Sequence: Synthetic oligonucleotide
cugagucgcccguagcucc

SEQ ID NO: 1100225 - RNA, 19 nt, Artificial Sequence
  Description of Artificial Sequence: Synthetic oligonucleotide
cacagagcgggucucuagc

SEQ ID NO: 1100226 - RNA, 19 nt, Artificial Sequence
  Description of Artificial Sequence: Synthetic oligonucleotide
uggguuugugcugagcuuc

SEQ ID NO: 1100227 - RNA, 19 nt, Artificial Sequence
  Description of Artificial Sequence: Synthetic oligonucleotide
agagcgggucucuagcaca

SEQ ID NO: 1100228 - RNA, 19 nt, Artificial Sequence
  Description of Artificial Sequence: Synthetic oligonucleotide
ugugugugagagagagaga

SEQ ID NO: 1100229 - RNA, 19 nt, Artificial Sequence
  Description of Artificial Sequence: Synthetic oligonucleotide
gaguacagcauagaugcaa

SEQ ID NO: 1100230 - RNA, 19 nt, Artificial Sequence
  Description of Artificial Sequence: Synthetic oligonucleotide
ugccgugcucccaucucgg

SEQ ID NO: 1100231 - RNA, 19 nt, Artificial Sequence
  Description of Artificial Sequence: Synthetic oligonucleotide
ugcucucguguucugaguu

SEQ ID NO: 1100232 - RNA, 19 nt, Artificial Sequence
  Description of Artificial Sequence: Synthetic oligonucleotide
augggagcgaucgagcacu

SEQ ID NO: 1100233 - RNA, 19 nt, Artificial Sequence
  Description of Artificial Sequence: Synthetic oligonucleotide
ggaccugggugucuggugg

SEQ ID NO: 1100234 - RNA, 19 nt, Artificial Sequence
  Description of Artificial Sequence: Synthetic oligonucleotide
auggggaccuuccaccacu

SEQ ID NO: 1100235 - RNA, 19 nt, Artificial Sequence
  Description of Artificial Sequence: Synthetic oligonucleotide
agcgaucgagcacuugaug

SEQ ID NO: 1100236 - RNA, 19 nt, Artificial Sequence
  Description of Artificial Sequence: Synthetic oligonucleotide
agugccgugcucccaucuc

SEQ ID NO: 1100237 - RNA, 19 nt, Artificial Sequence
  Description of Artificial Sequence: Synthetic oligonucleotide
ggugaucuccuuguguccg

SEQ ID NO: 1100238 - RNA, 19 nt, Artificial Sequence
  Description of Artificial Sequence: Synthetic oligonucleotide
gagcuggguuuccaacacg

SEQ ID NO: 1100239 - RNA, 19 nt, Artificial Sequence
  Description of Artificial Sequence: Synthetic oligonucleotide
cugaaguaccgugguauag

SEQ ID NO: 1100240 - RNA, 19 nt, Artificial Sequence
  Description of Artificial Sequence: Synthetic oligonucleotide
agcagccgggcagacaugg

SEQ ID NO: 1100241 - RNA, 19 nt, Artificial Sequence
  Description of Artificial Sequence: Synthetic oligonucleotide
gugugugugugugugugag

SEQ ID NO: 1100242 - RNA, 19 nt, Artificial Sequence
  Description of Artificial Sequence: Synthetic oligonucleotide
uguguguguguguguguga

SEQ ID NO: 1100243 - RNA, 19 nt, Artificial Sequence
  Description of Artificial Sequence: Synthetic oligonucleotide
caagccggaagaguugaag

SEQ ID NO: 1100244 - RNA, 19 nt, Artificial Sequence
  Description of Artificial Sequence: Synthetic oligonucleotide
gacaugggagcgaucgagc

SEQ ID NO: 1100245 - RNA, 19 nt, Artificial Sequence
  Description of Artificial Sequence: Synthetic oligonucleotide
gugccgugcucccaucucg

SEQ ID NO: 1100246 - RNA, 19 nt, Artificial Sequence
  Description of Artificial Sequence: Synthetic oligonucleotide
acuugauguucaugcguga

SEQ ID NO: 1100247 - RNA, 19 nt, Artificial Sequence
  Description of Artificial Sequence: Synthetic oligonucleotide
ggaugccggacucucacag

SEQ ID NO: 1100248 - RNA, 19 nt, Artificial Sequence
  Description of Artificial Sequence: Synthetic oligonucleotide
cacgcacacauuagggcug

SEQ ID NO: 1100249 - RNA, 19 nt, Artificial Sequence
  Description of Artificial Sequence: Synthetic oligonucleotide
ucgcccguagcuccugcag

SEQ ID NO: 1100250 - RNA, 19 nt, Artificial Sequence
  Description of Artificial Sequence: Synthetic oligonucleotide
ugugugugugugagagaga

SEQ ID NO: 1100251 - RNA, 19 nt, Artificial Sequence
  Description of Artificial Sequence: Synthetic oligonucleotide
ggaaguuggcgugugacac

SEQ ID NO: 1100252 - RNA, 19 nt, Artificial Sequence
  Description of Artificial Sequence: Synthetic oligonucleotide
caagucccguucucggacc

SEQ ID NO: 1100253 - RNA, 19 nt, Artificial Sequence
  Description of Artificial Sequence: Synthetic oligonucleotide
ugugugugugugugugugu

SEQ ID NO: 1100254 - RNA, 19 nt, Artificial Sequence
  Description of Artificial Sequence: Synthetic oligonucleotide
uggcguucacauucccaag

SEQ ID NO: 1100255 - RNA, 19 nt, Artificial Sequence
  Description of Artificial Sequence: Synthetic oligonucleotide
acagagcgggucucuagca

SEQ ID NO: 1100256 - RNA, 19 nt, Artificial Sequence
  Description of Artificial Sequence: Synthetic oligonucleotide
cuugaguugcacggugagc

SEQ ID NO: 1100257 - RNA, 19 nt, Artificial Sequence
  Description of Artificial Sequence: Synthetic oligonucleotide
ucggcgauguugaccacau

SEQ ID NO: 1100258 - RNA, 19 nt, Artificial Sequence
  Description of Artificial Sequence: Synthetic oligonucleotide
ggagcgaucgagcacuuga

SEQ ID NO: 1100259 - RNA, 19 nt, Artificial Sequence
  Description of Artificial Sequence: Synthetic oligonucleotide
ugugugugugugugugaga

SEQ ID NO: 1100260 - RNA, 19 nt, Artificial Sequence
  Description of Artificial Sequence: Synthetic oligonucleotide
ugugugugugugugagaga

SEQ ID NO: 1100261 - RNA, 19 nt, Artificial Sequence
  Description of Artificial Sequence: Synthetic oligonucleotide
accacucucacggugucca

SEQ ID NO: 1100262 - RNA, 19 nt, Artificial Sequence
  Description of Artificial Sequence: Synthetic oligonucleotide
ggcguucacauucccaagc

SEQ ID NO: 1100263 - RNA, 19 nt, Artificial Sequence
  Description of Artificial Sequence: Synthetic oligonucleotide
aggaggacucauacccgcc

SEQ ID NO: 1100264 - RNA, 19 nt, Artificial Sequence
  Description of Artificial Sequence: Synthetic oligonucleotide
acggaauagugcagggccg

SEQ ID NO: 1100265 - RNA, 19 nt, Artificial Sequence
  Description of Artificial Sequence: Synthetic oligonucleotide
gccguugacucccacaaac

SEQ ID NO: 1100266 - RNA, 19 nt, Artificial Sequence
  Description of Artificial Sequence: Synthetic oligonucleotide
gugugugugugugugugug

SEQ ID NO: 1100267 - RNA, 19 nt, Artificial Sequence
  Description of Artificial Sequence: Synthetic oligonucleotide
cagccgggcagacauggcc

SEQ ID NO: 1100268 - RNA, 19 nt, Artificial Sequence
  Description of Artificial Sequence: Synthetic oligonucleotide
cucgugucccugaggagug

SEQ ID NO: 1100269 - RNA, 19 nt, Artificial Sequence
  Description of Artificial Sequence: Synthetic oligonucleotide
agaacccuugcugguaucu

SEQ ID NO: 1100270 - RNA, 19 nt, Artificial Sequence
  Description of Artificial Sequence: Synthetic oligonucleotide
caugggagcgaucgagcac

SEQ ID NO: 1100271 - RNA, 19 nt, Artificial Sequence
  Description of Artificial Sequence: Synthetic oligonucleotide
accucgcaggccaacagag

SEQ ID NO: 1100272 - RNA, 19 nt, Artificial Sequence
  Description of Artificial Sequence: Synthetic oligonucleotide
guuggguccugaugucacc

SEQ ID NO: 1100273 - RNA, 19 nt, Artificial Sequence
  Description of Artificial Sequence: Synthetic oligonucleotide
aucagugccgugcucccau

SEQ ID NO: 1100274 - RNA, 19 nt, Artificial Sequence
  Description of Artificial Sequence: Synthetic oligonucleotide
ucugagucgcccguagcuc

SEQ ID NO: 1100275 - RNA, 19 nt, Artificial Sequence
  Description of Artificial Sequence: Synthetic oligonucleotide
agucgcccguagcuccugc

SEQ ID NO: 1100276 - RNA, 19 nt, Artificial Sequence
  Description of Artificial Sequence: Synthetic oligonucleotide
ugacucccacaaacuggag

SEQ ID NO: 1100277 - RNA, 19 nt, Artificial Sequence
  Description of Artificial Sequence: Synthetic oligonucleotide
guucaugcgugaguacagc

SEQ ID NO: 1100278 - RNA, 19 nt, Artificial Sequence
  Description of Artificial Sequence: Synthetic oligonucleotide
cguucucggacccaggugc

SEQ ID NO: 1100279 - RNA, 19 nt, Artificial Sequence
  Description of Artificial Sequence: Synthetic oligonucleotide
agggaugaggggagggacg

SEQ ID NO: 1100280 - RNA, 19 nt, Artificial Sequence
  Description of Artificial Sequence: Synthetic oligonucleotide
cuugcgcagggccgcagcc

SEQ ID NO: 1100281 - RNA, 19 nt, Artificial Sequence
  Description of Artificial Sequence: Synthetic oligonucleotide
ugaggucagggcucagauc

SEQ ID NO: 1100282 - RNA, 19 nt, Artificial Sequence
  Description of Artificial Sequence: Synthetic oligonucleotide
ggcgcagccauuccugaag

SEQ ID NO: 1100283 - RNA, 19 nt, Artificial Sequence
  Description of Artificial Sequence: Synthetic oligonucleotide
guacagcauagaugcaauc

SEQ ID NO: 1100284 - RNA, 19 nt, Artificial Sequence
  Description of Artificial Sequence: Synthetic oligonucleotide
ccagguauuucuccagggc

SEQ ID NO: 1100285 - RNA, 19 nt, Artificial Sequence
  Description of Artificial Sequence: Synthetic oligonucleotide
uugccguugcugucggcga

SEQ ID NO: 1100286 - RNA, 19 nt, Artificial Sequence
  Description of Artificial Sequence: Synthetic oligonucleotide
caugcgugaguacagcaua

SEQ ID NO: 1100287 - RNA, 19 nt, Artificial Sequence
  Description of Artificial Sequence: Synthetic oligonucleotide
cauacccgccguugacucc

SEQ ID NO: 1100288 - RNA, 19 nt, Artificial Sequence
  Description of Artificial Sequence: Synthetic oligonucleotide
gugugacacggaauagugc

SEQ ID NO: 1100289 - RNA, 19 nt, Artificial Sequence
  Description of Artificial Sequence: Synthetic oligonucleotide
ugcgugaguacagcauaga

SEQ ID NO: 1100290 - RNA, 19 nt, Artificial Sequence
  Description of Artificial Sequence: Synthetic oligonucleotide
augcgugaguacagcauag

SEQ ID NO: 1100291 - RNA, 19 nt, Artificial Sequence
  Description of Artificial Sequence: Synthetic oligonucleotide
agcuugaccuggagcacgg

SEQ ID NO: 1100292 - RNA, 19 nt, Artificial Sequence
  Description of Artificial Sequence: Synthetic oligonucleotide
uccugcacguugacaucca

SEQ ID NO: 1100293 - RNA, 19 nt, Artificial Sequence
  Description of Artificial Sequence: Synthetic oligonucleotide
cugugcggcuggcaugucc

SEQ ID NO: 1100294 - RNA, 19 nt, Artificial Sequence
  Description of Artificial Sequence: Synthetic oligonucleotide
aguugcacggugagcuguc

SEQ ID NO: 1100295 - RNA, 19 nt, Artificial Sequence
  Description of Artificial Sequence: Synthetic oligonucleotide
gucgcacaagcucggggug

SEQ ID NO: 1100296 - RNA, 19 nt, Artificial Sequence
  Description of Artificial Sequence: Synthetic oligonucleotide
gcaaucucgcucugccccg

SEQ ID NO: 1100297 - RNA, 19 nt, Artificial Sequence
  Description of Artificial Sequence: Synthetic oligonucleotide
ggugaccagaugucgucgc

SEQ ID NO: 1100298 - RNA, 19 nt, Artificial Sequence
  Description of Artificial Sequence: Synthetic oligonucleotide
ccacuuuagccacuagggc

SEQ ID NO: 1100299 - RNA, 19 nt, Artificial Sequence
  Description of Artificial Sequence: Synthetic oligonucleotide
cagagcgggucucuagcac

SEQ ID NO: 1100300 - RNA, 19 nt, Artificial Sequence
  Description of Artificial Sequence: Synthetic oligonucleotide
aaucucgcucugccccgca

SEQ ID NO: 1100301 - RNA, 19 nt, Artificial Sequence
  Description of Artificial Sequence: Synthetic oligonucleotide
gcagccauuccugaaguac

SEQ ID NO: 1100302 - RNA, 19 nt, Artificial Sequence
  Description of Artificial Sequence: Synthetic oligonucleotide
ggaggccuaaccugagggc

SEQ ID NO: 1100303 - RNA, 19 nt, Artificial Sequence
  Description of Artificial Sequence: Synthetic oligonucleotide
cgugugacacggaauagug

SEQ ID NO: 1100304 - RNA, 19 nt, Artificial Sequence
  Description of Artificial Sequence: Synthetic oligonucleotide
gggcauuaggguucuccag

SEQ ID NO: 1100305 - RNA, 19 nt, Artificial Sequence
  Description of Artificial Sequence: Synthetic oligonucleotide
cggaagaguugaaggaugg

SEQ ID NO: 1100306 - RNA, 19 nt, Artificial Sequence
  Description of Artificial Sequence: Synthetic oligonucleotide
uugcacggugagcugucuc

SEQ ID NO: 1100307 - RNA, 19 nt, Artificial Sequence
  Description of Artificial Sequence: Synthetic oligonucleotide
cacuccggcaggccaggcg

SEQ ID NO: 1100308 - RNA, 19 nt, Artificial Sequence
  Description of Artificial Sequence: Synthetic oligonucleotide
ggagggacgguuugcugug

SEQ ID NO: 1100309 - RNA, 19 nt, Artificial Sequence
  Description of Artificial Sequence: Synthetic oligonucleotide
ugagggcauucagccaugc

SEQ ID NO: 1100310 - RNA, 19 nt, Artificial Sequence
  Description of Artificial Sequence: Synthetic oligonucleotide
ucccguucucggacccagg

SEQ ID NO: 1100311 - RNA, 19 nt, Artificial Sequence
  Description of Artificial Sequence: Synthetic oligonucleotide
ugcaucacuccggcaggcc

SEQ ID NO: 1100312 - RNA, 19 nt, Artificial Sequence
  Description of Artificial Sequence: Synthetic oligonucleotide
cucgcaggccaacagagcu

SEQ ID NO: 1100313 - RNA, 19 nt, Artificial Sequence
  Description of Artificial Sequence: Synthetic oligonucleotide
gaccuuccaccacucucac

SEQ ID NO: 1100314 - RNA, 19 nt, Artificial Sequence
  Description of Artificial Sequence: Synthetic oligonucleotide
acaagcucggggugugcau

SEQ ID NO: 1100315 - RNA, 19 nt, Artificial Sequence
  Description of Artificial Sequence: Synthetic oligonucleotide
uggcccugaaggugaccag

SEQ ID NO: 1100316 - RNA, 19 nt, Artificial Sequence
  Description of Artificial Sequence: Synthetic oligonucleotide
agagagagagagagagaga

SEQ ID NO: 1100317 - RNA, 19 nt, Artificial Sequence
  Description of Artificial Sequence: Synthetic oligonucleotide
gaaggugaccagaugucgu

SEQ ID NO: 1100318 - RNA, 19 nt, Artificial Sequence
  Description of Artificial Sequence: Synthetic oligonucleotide
aggccacuuucaguucucg

SEQ ID NO: 1100319 - RNA, 19 nt, Artificial Sequence
  Description of Artificial Sequence: Synthetic oligonucleotide
ggaaaucacuggccucucc

SEQ ID NO: 1100320 - RNA, 19 nt, Artificial Sequence
  Description of Artificial Sequence: Synthetic oligonucleotide
ccggaagaguugaaggaug

SEQ ID NO: 1100321 - RNA, 19 nt, Artificial Sequence
  Description of Artificial Sequence: Synthetic oligonucleotide
caucucgguccguaaguga

SEQ ID NO: 1100322 - RNA, 19 nt, Artificial Sequence
  Description of Artificial Sequence: Synthetic oligonucleotide
aggaugccggacucucaca

SEQ ID NO: 1100323 - RNA, 19 nt, Artificial Sequence
  Description of Artificial Sequence: Synthetic oligonucleotide
ggacgguuugcugugcggc

SEQ ID NO: 1100324 - RNA, 19 nt, Artificial Sequence
  Description of Artificial Sequence: Synthetic oligonucleotide
cauggggaccuuccaccac

SEQ ID NO: 1100325 - RNA, 19 nt, Artificial Sequence
  Description of Artificial Sequence: Synthetic oligonucleotide
cacggggaucagcuugacc

SEQ ID NO: 1100326 - RNA, 19 nt, Artificial Sequence
  Description of Artificial Sequence: Synthetic oligonucleotide
gggacgguuugcugugcgg

SEQ ID NO: 1100327 - RNA, 19 nt, Artificial Sequence
  Description of Artificial Sequence: Synthetic oligonucleotide
ucgagcacuugauguucau

SEQ ID NO: 1100328 - RNA, 19 nt, Artificial Sequence
  Description of Artificial Sequence: Synthetic oligonucleotide
guucucgcccagugagggc

SEQ ID NO: 1100329 - RNA, 19 nt, Artificial Sequence
  Description of Artificial Sequence: Synthetic oligonucleotide
gcgaucgagcacuugaugu

SEQ ID NO: 1100330 - RNA, 19 nt, Artificial Sequence
  Description of Artificial Sequence: Synthetic oligonucleotide
ucgcaggccaacagagcuu

SEQ ID NO: 1100331 - RNA, 19 nt, Artificial Sequence
  Description of Artificial Sequence: Synthetic oligonucleotide
acgguuugcugugcggcug

SEQ ID NO: 1100332 - RNA, 19 nt, Artificial Sequence
  Description of Artificial Sequence: Synthetic oligonucleotide
caagcucggggugugcauc

SEQ ID NO: 1100333 - RNA, 19 nt, Artificial Sequence
  Description of Artificial Sequence: Synthetic oligonucleotide
ccaagucccguucucggac

SEQ ID NO: 1100334 - RNA, 19 nt, Artificial Sequence
  Description of Artificial Sequence: Synthetic oligonucleotide
uggggaccuuccaccacuc

SEQ ID NO: 1100335 - RNA, 19 nt, Artificial Sequence
  Description of Artificial Sequence: Synthetic oligonucleotide
ucgcacaagcucggggugu

SEQ ID NO: 1100336 - RNA, 19 nt, Artificial Sequence
  Description of Artificial Sequence: Synthetic oligonucleotide
ccugaaggugaccagaugu

SEQ ID NO: 1100337 - RNA, 19 nt, Artificial Sequence
  Description of Artificial Sequence: Synthetic oligonucleotide
uucucggacccaggugccc

SEQ ID NO: 1100338 - RNA, 19 nt, Artificial Sequence
  Description of Artificial Sequence: Synthetic oligonucleotide
uggguccugaugucaccuc

SEQ ID NO: 1100339 - RNA, 19 nt, Artificial Sequence
  Description of Artificial Sequence: Synthetic oligonucleotide
cucucacgguguccacacg

SEQ ID NO: 1100340 - RNA, 19 nt, Artificial Sequence
  Description of Artificial Sequence: Synthetic oligonucleotide
cguugacucccacaaacug

SEQ ID NO: 1100341 - RNA, 19 nt, Artificial Sequence
  Description of Artificial Sequence: Synthetic oligonucleotide
agacaccgcuguccagcag

SEQ ID NO: 1100342 - RNA, 19 nt, Artificial Sequence
  Description of Artificial Sequence: Synthetic oligonucleotide
aguggccuagaaacuucug

SEQ ID NO: 1100343 - RNA, 19 nt, Artificial Sequence
  Description of Artificial Sequence: Synthetic oligonucleotide
ucgugucccugaggagugg

SEQ ID NO: 1100344 - RNA, 19 nt, Artificial Sequence
  Description of Artificial Sequence: Synthetic oligonucleotide
acacggaccugggugucug

SEQ ID NO: 1100345 - RNA, 19 nt, Artificial Sequence
  Description of Artificial Sequence: Synthetic oligonucleotide
agagagagagagagagaaa

SEQ ID NO: 1100346 - RNA, 19 nt, Artificial Sequence
  Description of Artificial Sequence: Synthetic oligonucleotide
guucucggacccaggugcc

SEQ ID NO: 1100347 - RNA, 19 nt, Artificial Sequence
  Description of Artificial Sequence: Synthetic oligonucleotide
agcgggucucuagcacagc

SEQ ID NO: 1100348 - RNA, 19 nt, Artificial Sequence
  Description of Artificial Sequence: Synthetic oligonucleotide
gaauagugcagggccgugu

SEQ ID NO: 1100349 - RNA, 19 nt, Artificial Sequence
  Description of Artificial Sequence: Synthetic oligonucleotide
agcacggggaucagcuuga

SEQ ID NO: 1100350 - RNA, 19 nt, Artificial Sequence
  Description of Artificial Sequence: Synthetic oligonucleotide
gacgguuugcugugcggcu

SEQ ID NO: 1100351 - RNA, 19 nt, Artificial Sequence
  Description of Artificial Sequence: Synthetic oligonucleotide
gugcucccaucucgguccg

SEQ ID NO: 1100352 - RNA, 19 nt, Artificial Sequence
  Description of Artificial Sequence: Synthetic oligonucleotide
gucuucgggguggccagag

SEQ ID NO: 1100353 - RNA, 19 nt, Artificial Sequence
  Description of Artificial Sequence: Synthetic oligonucleotide
gaggacucauacccgccgu

SEQ ID NO: 1100354 - RNA, 19 nt, Artificial Sequence
  Description of Artificial Sequence: Synthetic oligonucleotide
ccagaugucgucgcacaag

SEQ ID NO: 1100355 - RNA, 19 nt, Artificial Sequence
  Description of Artificial Sequence: Synthetic oligonucleotide
agaugucgucgcacaagcu

SEQ ID NO: 1100356 - RNA, 19 nt, Artificial Sequence
  Description of Artificial Sequence: Synthetic oligonucleotide
gucgucgcacaagcucggg

SEQ ID NO: 1100357 - RNA, 19 nt, Artificial Sequence
  Description of Artificial Sequence: Synthetic oligonucleotide
gcugccgcaccacagggaa

SEQ ID NO: 1100358 - RNA, 19 nt, Artificial Sequence
  Description of Artificial Sequence: Synthetic oligonucleotide
cggggugugcaucacuccg

SEQ ID NO: 1100359 - RNA, 19 nt, Artificial Sequence
  Description of Artificial Sequence: Synthetic oligonucleotide
uuagggcuguggagccauc

SEQ ID NO: 1100360 - RNA, 19 nt, Artificial Sequence
  Description of Artificial Sequence: Synthetic oligonucleotide
caaucucgcucugccccgc

SEQ ID NO: 1100361 - RNA, 19 nt, Artificial Sequence
  Description of Artificial Sequence: Synthetic oligonucleotide
ucagugccgugcucccauc

SEQ ID NO: 1100362 - RNA, 19 nt, Artificial Sequence
  Description of Artificial Sequence: Synthetic oligonucleotide
cagacaccgcuguccagca

SEQ ID NO: 1100363 - RNA, 19 nt, Artificial Sequence
  Description of Artificial Sequence: Synthetic oligonucleotide
gaguugcacggugagcugu

SEQ ID NO: 1100364 - RNA, 19 nt, Artificial Sequence
  Description of Artificial Sequence: Synthetic oligonucleotide
gggagggacgguuugcugu

SEQ ID NO: 1100365 - RNA, 19 nt, Artificial Sequence
  Description of Artificial Sequence: Synthetic oligonucleotide
gucggcgauguugaccaca

SEQ ID NO: 1100366 - RNA, 19 nt, Artificial Sequence
  Description of Artificial Sequence: Synthetic oligonucleotide
guaccgugguauaggccac

SEQ ID NO: 1100367 - RNA, 19 nt, Artificial Sequence
  Description of Artificial Sequence: Synthetic oligonucleotide
uaccgugguauaggccacu

SEQ ID NO: 1100368 - RNA, 19 nt, Artificial Sequence
  Description of Artificial Sequence: Synthetic oligonucleotide
caccucgcaggccaacaga

SEQ ID NO: 1100369 - RNA, 19 nt, Artificial Sequence
  Description of Artificial Sequence: Synthetic oligonucleotide
gcauagaugcaaucucgcu

SEQ ID NO: 1100370 - RNA, 19 nt, Artificial Sequence
  Description of Artificial Sequence: Synthetic oligonucleotide
auccacccguccguggcug

SEQ ID NO: 1100371 - RNA, 19 nt, Artificial Sequence
  Description of Artificial Sequence: Synthetic oligonucleotide
gugcaucacuccggcaggc

SEQ ID NO: 1100372 - RNA, 19 nt, Artificial Sequence
  Description of Artificial Sequence: Synthetic oligonucleotide
ccaucagugccgugcuccc

SEQ ID NO: 1100373 - RNA, 19 nt, Artificial Sequence
  Description of Artificial Sequence: Synthetic oligonucleotide
accgaaagcuugaccugga

SEQ ID NO: 1100374 - RNA, 19 nt, Artificial Sequence
  Description of Artificial Sequence: Synthetic oligonucleotide
ggaguggccuagaaacuuc

SEQ ID NO: 1100375 - RNA, 19 nt, Artificial Sequence
  Description of Artificial Sequence: Synthetic oligonucleotide
gaguggccuagaaacuucu

SEQ ID NO: 1100376 - RNA, 19 nt, Artificial Sequence
  Description of Artificial Sequence: Synthetic oligonucleotide
gagggacgguuugcugugc

SEQ ID NO: 1100377 - RNA, 19 nt, Artificial Sequence
  Description of Artificial Sequence: Synthetic oligonucleotide
acgcacacauuagggcugu

SEQ ID NO: 1100378 - RNA, 19 nt, Artificial Sequence
  Description of Artificial Sequence: Synthetic oligonucleotide
cucggacccaggugcccac

SEQ ID NO: 1100379 - RNA, 19 nt, Artificial Sequence
  Description of Artificial Sequence: Synthetic oligonucleotide
gucuggugguggccaggcc

SEQ ID NO: 1100380 - RNA, 19 nt, Artificial Sequence
  Description of Artificial Sequence: Synthetic oligonucleotide
cugacaugggagcgaucga

SEQ ID NO: 1100381 - RNA, 19 nt, Artificial Sequence
  Description of Artificial Sequence: Synthetic oligonucleotide
cacaagcucggggugugca

SEQ ID NO: 1100382 - RNA, 19 nt, Artificial Sequence
  Description of Artificial Sequence: Synthetic oligonucleotide
ggcgugugacacggaauag

SEQ ID NO: 1100383 - RNA, 19 nt, Artificial Sequence
  Description of Artificial Sequence: Synthetic oligonucleotide
gcgggucucuagcacagca

SEQ ID NO: 1100384 - RNA, 19 nt, Artificial Sequence
  Description of Artificial Sequence: Synthetic oligonucleotide
ggugagcugucucuucucu

SEQ ID NO: 1100385 - RNA, 19 nt, Artificial Sequence
  Description of Artificial Sequence: Synthetic oligonucleotide
acggaccugggugucuggu

SEQ ID NO: 1100386 - RNA, 19 nt, Artificial Sequence
  Description of Artificial Sequence: Synthetic oligonucleotide
caccacucucacggugucc

SEQ ID NO: 1100387 - RNA, 19 nt, Artificial Sequence
  Description of Artificial Sequence: Synthetic oligonucleotide
agacuggucuuggccgcug

SEQ ID NO: 1100388 - RNA, 19 nt, Artificial Sequence
  Description of Artificial Sequence: Synthetic oligonucleotide
uccacccguccguggcuga

SEQ ID NO: 1100389 - RNA, 19 nt, Artificial Sequence
  Description of Artificial Sequence: Synthetic oligonucleotide
ccguaagugagaugucaca

SEQ ID NO: 1100390 - RNA, 19 nt, Artificial Sequence
  Description of Artificial Sequence: Synthetic oligonucleotide
gcucagauccauccgaauu

SEQ ID NO: 1100391 - RNA, 19 nt, Artificial Sequence
  Description of Artificial Sequence: Synthetic oligonucleotide
ccguccguggcugacugcc

SEQ ID NO: 1100392 - RNA, 19 nt, Artificial Sequence
  Description of Artificial Sequence: Synthetic oligonucleotide
cauggcccugaaggugacc

SEQ ID NO: 1100393 - RNA, 19 nt, Artificial Sequence
  Description of Artificial Sequence: Synthetic oligonucleotide
agccacuagggcagcuuca

SEQ ID NO: 1100394 - RNA, 19 nt, Artificial Sequence
  Description of Artificial Sequence: Synthetic oligonucleotide
aucucgcucugccccgcau

SEQ ID NO: 1100395 - RNA, 19 nt, Artificial Sequence
  Description of Artificial Sequence: Synthetic oligonucleotide
cucagaacccuugcuggua

SEQ ID NO: 1100396 - RNA, 19 nt, Artificial Sequence
  Description of Artificial Sequence: Synthetic oligonucleotide
ugucggcgauguugaccac

SEQ ID NO: 1100397 - RNA, 19 nt, Artificial Sequence
  Description of Artificial Sequence: Synthetic oligonucleotide
cagucugacaugggagcga

SEQ ID NO: 1100398 - RNA, 19 nt, Artificial Sequence
  Description of Artificial Sequence: Synthetic oligonucleotide
ccgaaagcuugaccuggag

SEQ ID NO: 1100399 - RNA, 19 nt, Artificial Sequence
  Description of Artificial Sequence: Synthetic oligonucleotide
ccaucucgguccguaagug

SEQ ID NO: 1100400 - RNA, 19 nt, Artificial Sequence
  Description of Artificial Sequence: Synthetic oligonucleotide
ggacucucacagucugaca

SEQ ID NO: 1100401 - RNA, 19 nt, Artificial Sequence
  Description of Artificial Sequence: Synthetic oligonucleotide
guaucucuggggcuucguu

SEQ ID NO: 1100402 - RNA, 19 nt, Artificial Sequence
  Description of Artificial Sequence: Synthetic oligonucleotide
guguccgugcucacacgca

SEQ ID NO: 1100403 - RNA, 19 nt, Artificial Sequence
  Description of Artificial Sequence: Synthetic oligonucleotide
ugggagcgaucgagcacuu

SEQ ID NO: 1100404 - RNA, 19 nt, Artificial Sequence
  Description of Artificial Sequence: Synthetic oligonucleotide
gucgcccguagcuccugca

SEQ ID NO: 1100405 - RNA, 19 nt, Artificial Sequence
  Description of Artificial Sequence: Synthetic oligonucleotide
acggccacuuuagccacua

SEQ ID NO: 1100406 - RNA, 19 nt, Artificial Sequence
  Description of Artificial Sequence: Synthetic oligonucleotide
ugggucugagucgcccgua

SEQ ID NO: 1100407 - RNA, 19 nt, Artificial Sequence
  Description of Artificial Sequence: Synthetic oligonucleotide
uacccgccguugacuccca

SEQ ID NO: 1100408 - RNA, 19 nt, Artificial Sequence
  Description of Artificial Sequence: Synthetic oligonucleotide
cugugcggcugugcggcug

SEQ ID NO: 1100409 - RNA, 19 nt, Artificial Sequence
  Description of Artificial Sequence: Synthetic oligonucleotide
accgugguauaggccacuu

SEQ ID NO: 1100410 - RNA, 19 nt, Artificial Sequence
  Description of Artificial Sequence: Synthetic oligonucleotide
gcgugaguacagcauagau

SEQ ID NO: 1100411 - RNA, 19 nt, Artificial Sequence
  Description of Artificial Sequence: Synthetic oligonucleotide
gagcgaucgagcacuugau

SEQ ID NO: 1100412 - RNA, 19 nt, Artificial Sequence
  Description of Artificial Sequence: Synthetic oligonucleotide
agucccguucucggaccca

SEQ ID NO: 1100413 - RNA, 19 nt, Artificial Sequence
  Description of Artificial Sequence: Synthetic oligonucleotide
cagggaaguuggcguguga

SEQ ID NO: 1100414 - RNA, 19 nt, Artificial Sequence
  Description of Artificial Sequence: Synthetic oligonucleotide
ccguucucggacccaggug

SEQ ID NO: 1100415 - RNA, 19 nt, Artificial Sequence
  Description of Artificial Sequence: Synthetic oligonucleotide
cguucucugugcucucgug

SEQ ID NO: 1100416 - RNA, 19 nt, Artificial Sequence
  Description of Artificial Sequence: Synthetic oligonucleotide
cagcagccgggcagacaug

SEQ ID NO: 1100417 - RNA, 19 nt, Artificial Sequence
  Description of Artificial Sequence: Synthetic oligonucleotide
agccaugcucagaacccuu

SEQ ID NO: 1100418 - RNA, 19 nt, Artificial Sequence
  Description of Artificial Sequence: Synthetic oligonucleotide
cucccaucucgguccguaa

SEQ ID NO: 1100419 - RNA, 19 nt, Artificial Sequence
  Description of Artificial Sequence: Synthetic oligonucleotide
ccugaaguaccgugguaua

SEQ ID NO: 1100420 - RNA, 19 nt, Artificial Sequence
  Description of Artificial Sequence: Synthetic oligonucleotide
gcucagaacccuugcuggu

SEQ ID NO: 1100421 - RNA, 19 nt, Artificial Sequence
  Description of Artificial Sequence: Synthetic oligonucleotide
ccgugcucccaucucgguc

SEQ ID NO: 1100422 - RNA, 19 nt, Artificial Sequence
  Description of Artificial Sequence: Synthetic oligonucleotide
ccgccguugacucccacaa

SEQ ID NO: 1100423 - RNA, 19 nt, Artificial Sequence
  Description of Artificial Sequence: Synthetic oligonucleotide
cucucguguucugaguuuu

SEQ ID NO: 1100424 - RNA, 19 nt, Artificial Sequence
  Description of Artificial Sequence: Synthetic oligonucleotide
gggaaaucacuggccucuc

SEQ ID NO: 1100425 - RNA, 19 nt, Artificial Sequence
  Description of Artificial Sequence: Synthetic oligonucleotide
gugagggcauuaggguucu

SEQ ID NO: 1100426 - RNA, 19 nt, Artificial Sequence
  Description of Artificial Sequence: Synthetic oligonucleotide
gcgugugacacggaauagu

SEQ ID NO: 1100427 - RNA, 19 nt, Artificial Sequence
  Description of Artificial Sequence: Synthetic oligonucleotide
cccaagccggaagaguuga

SEQ ID NO: 1100428 - RNA, 19 nt, Artificial Sequence
  Description of Artificial Sequence: Synthetic oligonucleotide
gccggaagaguugaaggau

SEQ ID NO: 1100429 - RNA, 19 nt, Artificial Sequence
  Description of Artificial Sequence: Synthetic oligonucleotide
aguuggcgugugacacgga

SEQ ID NO: 1100430 - RNA, 19 nt, Artificial Sequence
  Description of Artificial Sequence: Synthetic oligonucleotide
ccucgugucccugaggagu

SEQ ID NO: 1100431 - RNA, 19 nt, Artificial Sequence
  Description of Artificial Sequence: Synthetic oligonucleotide
ccaccacucucacgguguc

SEQ ID NO: 1100432 - RNA, 19 nt, Artificial Sequence
  Description of Artificial Sequence: Synthetic oligonucleotide
cauccacccguccguggcu

SEQ ID NO: 1100433 - RNA, 19 nt, Artificial Sequence
  Description of Artificial Sequence: Synthetic oligonucleotide
gcccggugaucuccuugug

SEQ ID NO: 1100434 - RNA, 19 nt, Artificial Sequence
  Description of Artificial Sequence: Synthetic oligonucleotide
gucugacaugggagcgauc

SEQ ID NO: 1100435 - RNA, 19 nt, Artificial Sequence
  Description of Artificial Sequence: Synthetic oligonucleotide
cagugccgugcucccaucu

SEQ ID NO: 1100436 - RNA, 19 nt, Artificial Sequence
  Description of Artificial Sequence: Synthetic oligonucleotide
guugcacggugagcugucu

SEQ ID NO: 1100437 - RNA, 19 nt, Artificial Sequence
  Description of Artificial Sequence: Synthetic oligonucleotide
ccguugacucccacaaacu

SEQ ID NO: 1100438 - RNA, 19 nt, Artificial Sequence
  Description of Artificial Sequence: Synthetic oligonucleotide
ccggccucgugucccugag

SEQ ID NO: 1100439 - RNA, 19 nt, Artificial Sequence
  Description of Artificial Sequence: Synthetic oligonucleotide
gggagcgaucgagcacuug

SEQ ID NO: 1100440 - RNA, 19 nt, Artificial Sequence
  Description of Artificial Sequence: Synthetic oligonucleotide
cgucgcacaagcucggggu

SEQ ID NO: 1100441 - RNA, 19 nt, Artificial Sequence
  Description of Artificial Sequence: Synthetic oligonucleotide
ugcucccaucucgguccgu

SEQ ID NO: 1100442 - RNA, 19 nt, Artificial Sequence
  Description of Artificial Sequence: Synthetic oligonucleotide
ccgcaccacagggaaguug

SEQ ID NO: 1100443 - RNA, 19 nt, Artificial Sequence
  Description of Artificial Sequence: Synthetic oligonucleotide
cguccugcacguugacauc

SEQ ID NO: 1100444 - RNA, 19 nt, Artificial Sequence
  Description of Artificial Sequence: Synthetic oligonucleotide
ggaaugcccaagucccguu

SEQ ID NO: 1100445 - RNA, 19 nt, Artificial Sequence
  Description of Artificial Sequence: Synthetic oligonucleotide
cagcgccgucuguccugcc

SEQ ID NO: 1100446 - RNA, 19 nt, Artificial Sequence
  Description of Artificial Sequence: Synthetic oligonucleotide
gcucaccccggccucgugu

SEQ ID NO: 1100447 - RNA, 19 nt, Artificial Sequence
  Description of Artificial Sequence: Synthetic oligonucleotide
gcucccaucucgguccgua

SEQ ID NO: 1100448 - RNA, 19 nt, Artificial Sequence
  Description of Artificial Sequence: Synthetic oligonucleotide
gcagccgggcagacauggc

SEQ ID NO: 1100449 - RNA, 19 nt, Artificial Sequence
  Description of Artificial Sequence: Synthetic oligonucleotide
gcucucguguucugaguuu

SEQ ID NO: 1100450 - RNA, 19 nt, Artificial Sequence
  Description of Artificial Sequence: Synthetic oligonucleotide
gguaucucuggggcuucgu

SEQ ID NO: 1100451 - RNA, 19 nt, Artificial Sequence
  Description of Artificial Sequence: Synthetic oligonucleotide
cccguccguggcugacugc

SEQ ID NO: 1100452 - RNA, 19 nt, Artificial Sequence
  Description of Artificial Sequence: Synthetic oligonucleotide
gccgucuguccugccuggc

SEQ ID NO: 1100453 - RNA, 19 nt, Artificial Sequence
  Description of Artificial Sequence: Synthetic oligonucleotide
gguuugugcugagcuuccu

SEQ ID NO: 1100454 - RNA, 19 nt, Artificial Sequence
  Description of Artificial Sequence: Synthetic oligonucleotide
gagcucaccccggccucgu

SEQ ID NO: 1100455 - RNA, 19 nt, Artificial Sequence
  Description of Artificial Sequence: Synthetic oligonucleotide
cgaucgagcacuugauguu

SEQ ID NO: 1100456 - RNA, 19 nt, Artificial Sequence
  Description of Artificial Sequence: Synthetic oligonucleotide
cacacggaccugggugucu

SEQ ID NO: 1100457 - RNA, 19 nt, Artificial Sequence
  Description of Artificial Sequence: Synthetic oligonucleotide
ccaagccggaagaguugaa

SEQ ID NO: 1100458 - RNA, 19 nt, Artificial Sequence
  Description of Artificial Sequence: Synthetic oligonucleotide
cccguucucggacccaggu

SEQ ID NO: 1100459 - RNA, 19 nt, Artificial Sequence
  Description of Artificial Sequence: Synthetic oligonucleotide
ccacccguccguggcugac

SEQ ID NO: 1100460 - RNA, 19 nt, Artificial Sequence
  Description of Artificial Sequence: Synthetic oligonucleotide
gccgugcucccaucucggu

SEQ ID NO: 1100461 - RNA, 19 nt, Artificial Sequence
  Description of Artificial Sequence: Synthetic oligonucleotide
cgugugugugugugugugu

SEQ ID NO: 1100462 - RNA, 19 nt, Artificial Sequence
  Description of Artificial Sequence: Synthetic oligonucleotide
cggccacuuuagccacuag

SEQ ID NO: 1100463 - RNA, 19 nt, Artificial Sequence
  Description of Artificial Sequence: Synthetic oligonucleotide
cggaauagugcagggccgu

SEQ ID NO: 1100464 - RNA, 19 nt, Artificial Sequence
  Description of Artificial Sequence: Synthetic oligonucleotide
ccgugcucacacgcacaca

SEQ ID NO: 1100465 - RNA, 19 nt, Artificial Sequence
  Description of Artificial Sequence: Synthetic oligonucleotide
gcugugcggcuggcauguc

SEQ ID NO: 1100466 - RNA, 19 nt, Artificial Sequence
  Description of Artificial Sequence: Synthetic oligonucleotide
ggagcccggugaucuccuu

SEQ ID NO: 1100467 - RNA, 19 nt, Artificial Sequence
  Description of Artificial Sequence: Synthetic oligonucleotide
cauccucguccugcacguu

SEQ ID NO: 1100468 - RNA, 19 nt, Artificial Sequence
  Description of Artificial Sequence: Synthetic oligonucleotide
cgccguugacucccacaaa

SEQ ID NO: 1100469 - RNA, 19 nt, Artificial Sequence
  Description of Artificial Sequence: Synthetic oligonucleotide
ccgugguauaggccacuuu

SEQ ID NO: 1100470 - RNA, 19 nt, Artificial Sequence
  Description of Artificial Sequence: Synthetic oligonucleotide
cucgcccagugagggcauu

SEQ ID NO: 1100471 - RNA, 19 nt, Artificial Sequence
  Description of Artificial Sequence: Synthetic oligonucleotide
gccgcaccacagggaaguu

SEQ ID NO: 1100472 - RNA, 19 nt, Artificial Sequence
  Description of Artificial Sequence: Synthetic oligonucleotide
cggcgauguugaccacaua

SEQ ID NO: 1100473 - RNA, 19 nt, Artificial Sequence
  Description of Artificial Sequence: Synthetic oligonucleotide
ucaauuaacagcaacaaug

SEQ ID NO: 1100474 - RNA, 19 nt, Artificial Sequence
  Description of Artificial Sequence: Synthetic oligonucleotide
uucaauacaguacaaauug

SEQ ID NO: 1100475 - RNA, 19 nt, Artificial Sequence
  Description of Artificial Sequence: Synthetic oligonucleotide
auaacuaagaagcugcuac

SEQ ID NO: 1100476 - RNA, 19 nt, Artificial Sequence
  Description of Artificial Sequence: Synthetic oligonucleotide
uuuuagaggaucaaaagcu

SEQ ID NO: 1100477 - RNA, 19 nt, Artificial Sequence
  Description of Artificial Sequence: Synthetic oligonucleotide
auguuaauaguaaauagcc

SEQ ID NO: 1100478 - RNA, 19 nt, Artificial Sequence
  Description of Artificial Sequence: Synthetic oligonucleotide
uaguaaauagccaagugug

SEQ ID NO: 1100479 - RNA, 19 nt, Artificial Sequence
  Description of Artificial Sequence: Synthetic oligonucleotide
aauccaauaagcgauucac

SEQ ID NO: 1100480 - RNA, 19 nt, Artificial Sequence
  Description of Artificial Sequence: Synthetic oligonucleotide
aguauuguagucuuuuggg

SEQ ID NO: 1100481 - RNA, 19 nt, Artificial Sequence
  Description of Artificial Sequence: Synthetic oligonucleotide
uauucuacuacacugaauu

SEQ ID NO: 1100482 - RNA, 19 nt, Artificial Sequence
  Description of Artificial Sequence: Synthetic oligonucleotide
cauguuaauaguaaauagc

SEQ ID NO: 1100483 - RNA, 19 nt, Artificial Sequence
  Description of Artificial Sequence: Synthetic oligonucleotide
acaaugauaucauaaaacu

SEQ ID NO: 1100484 - RNA, 19 nt, Artificial Sequence
  Description of Artificial Sequence: Synthetic oligonucleotide
aaauagccaagugugaugg

SEQ ID NO: 1100485 - RNA, 19 nt, Artificial Sequence
  Description of Artificial Sequence: Synthetic oligonucleotide
uuggguauagcccugacca

SEQ ID NO: 1100486 - RNA, 19 nt, Artificial Sequence
  Description of Artificial Sequence: Synthetic oligonucleotide
aaauuguaauaagaucucc

SEQ ID NO: 1100487 - RNA, 19 nt, Artificial Sequence
  Description of Artificial Sequence: Synthetic oligonucleotide
aaggaggacgguuacgggc

SEQ ID NO: 1100488 - RNA, 19 nt, Artificial Sequence
  Description of Artificial Sequence: Synthetic oligonucleotide
uaugaaugggaauucggcg

SEQ ID NO: 1100489 - RNA, 19 nt, Artificial Sequence
  Description of Artificial Sequence: Synthetic oligonucleotide
uuuucgggaauacugguag

SEQ ID NO: 1100490 - RNA, 19 nt, Artificial Sequence
  Description of Artificial Sequence: Synthetic oligonucleotide
aaaaggaggacgguuacgg

SEQ ID NO: 1100491 - RNA, 19 nt, Artificial Sequence
  Description of Artificial Sequence: Synthetic oligonucleotide
uaguauuguagucuuuugg

SEQ ID NO: 1100492 - RNA, 19 nt, Artificial Sequence
  Description of Artificial Sequence: Synthetic oligonucleotide
uguuacauuuuauacauaa

SEQ ID NO: 1100493 - RNA, 19 nt, Artificial Sequence
  Description of Artificial Sequence: Synthetic oligonucleotide
uuaugaaugggaauucggc

SEQ ID NO: 1100494 - RNA, 19 nt, Artificial Sequence
  Description of Artificial Sequence: Synthetic oligonucleotide
aauaccguacugcugagga

SEQ ID NO: 1100495 - RNA, 19 nt, Artificial Sequence
  Description of Artificial Sequence: Synthetic oligonucleotide
ucuguuaacccaaaugcug

SEQ ID NO: 1100496 - RNA, 19 nt, Artificial Sequence
  Description of Artificial Sequence: Synthetic oligonucleotide
aaucugaccugcuuguguc

SEQ ID NO: 1100497 - RNA, 19 nt, Artificial Sequence
  Description of Artificial Sequence: Synthetic oligonucleotide
aguaauaucuucauuauga

SEQ ID NO: 1100498 - RNA, 19 nt, Artificial Sequence
  Description of Artificial Sequence: Synthetic oligonucleotide
aaaaccuggucuugguugg

SEQ ID NO: 1100499 - RNA, 19 nt, Artificial Sequence
  Description of Artificial Sequence: Synthetic oligonucleotide
ucauuaguguagcugaacc

SEQ ID NO: 1100500 - RNA, 19 nt, Artificial Sequence
  Description of Artificial Sequence: Synthetic oligonucleotide
uuuauuagccuaucaaugu

SEQ ID NO: 1100501 - RNA, 19 nt, Artificial Sequence
  Description of Artificial Sequence: Synthetic oligonucleotide
aauacugaauaccguacug

SEQ ID NO: 1100502 - RNA, 19 nt, Artificial Sequence
  Description of Artificial Sequence: Synthetic oligonucleotide
aaaauuguaauaagaucuc

SEQ ID NO: 1100503 - RNA, 19 nt, Artificial Sequence
  Description of Artificial Sequence: Synthetic oligonucleotide
ucaaaagcugacaugcuug

SEQ ID NO: 1100504 - RNA, 19 nt, Artificial Sequence
  Description of Artificial Sequence: Synthetic oligonucleotide
auaagugcucgucugguac

SEQ ID NO: 1100505 - RNA, 19 nt, Artificial Sequence
  Description of Artificial Sequence: Synthetic oligonucleotide
aauucggcggauaucuucc

SEQ ID NO: 1100506 - RNA, 19 nt, Artificial Sequence
  Description of Artificial Sequence: Synthetic oligonucleotide
uuuauuguaacuucaucau

SEQ ID NO: 1100507 - RNA, 19 nt, Artificial Sequence
  Description of Artificial Sequence: Synthetic oligonucleotide
uugaaacaaaauaguauug

SEQ ID NO: 1100508 - RNA, 19 nt, Artificial Sequence
  Description of Artificial Sequence: Synthetic oligonucleotide
uaguauaaguuuguggagg

SEQ ID NO: 1100509 - RNA, 19 nt, Artificial Sequence
  Description of Artificial Sequence: Synthetic oligonucleotide
uaauaagcuucccacuuag

SEQ ID NO: 1100510 - RNA, 19 nt, Artificial Sequence
  Description of Artificial Sequence: Synthetic oligonucleotide
ucuacuacacugaauugca

SEQ ID NO: 1100511 - RNA, 19 nt, Artificial Sequence
  Description of Artificial Sequence: Synthetic oligonucleotide
uuuguggaggauaagugcu

SEQ ID NO: 1100512 - RNA, 19 nt, Artificial Sequence
  Description of Artificial Sequence: Synthetic oligonucleotide
uuuagaggaucaaaagcug

SEQ ID NO: 1100513 - RNA, 19 nt, Artificial Sequence
  Description of Artificial Sequence: Synthetic oligonucleotide
cuccuuaucgauaaccggg

SEQ ID NO: 1100514 - RNA, 19 nt, Artificial Sequence
  Description of Artificial Sequence: Synthetic oligonucleotide
uuaacaaauaaugucaguu

SEQ ID NO: 1100515 - RNA, 19 nt, Artificial Sequence
  Description of Artificial Sequence: Synthetic oligonucleotide
ucuuuugggaggcaacuag

SEQ ID NO: 1100516 - RNA, 19 nt, Artificial Sequence
  Description of Artificial Sequence: Synthetic oligonucleotide
gacgguuacgggcauaagg

SEQ ID NO: 1100517 - RNA, 19 nt, Artificial Sequence
  Description of Artificial Sequence: Synthetic oligonucleotide
cuagccaucauuaguguag

SEQ ID NO: 1100518 - RNA, 19 nt, Artificial Sequence
  Description of Artificial Sequence: Synthetic oligonucleotide
guugguaagcaccagguug

SEQ ID NO: 1100519 - RNA, 19 nt, Artificial Sequence
  Description of Artificial Sequence: Synthetic oligonucleotide
ucgacgaagauauuucacc

SEQ ID NO: 1100520 - RNA, 19 nt, Artificial Sequence
  Description of Artificial Sequence: Synthetic oligonucleotide
aaguaauaucuucauuaug

SEQ ID NO: 1100521 - RNA, 19 nt, Artificial Sequence
  Description of Artificial Sequence: Synthetic oligonucleotide
agcgauucacuuuauuccg

SEQ ID NO: 1100522 - RNA, 19 nt, Artificial Sequence
  Description of Artificial Sequence: Synthetic oligonucleotide
auuaguguagcugaaccuc

SEQ ID NO: 1100523 - RNA, 19 nt, Artificial Sequence
  Description of Artificial Sequence: Synthetic oligonucleotide
ugaaacaaaauaguauugu

SEQ ID NO: 1100524 - RNA, 19 nt, Artificial Sequence
  Description of Artificial Sequence: Synthetic oligonucleotide
ugaaccuuagccuagcuuu

SEQ ID NO: 1100525 - RNA, 19 nt, Artificial Sequence
  Description of Artificial Sequence: Synthetic oligonucleotide
uauguauuccggcaaauua

SEQ ID NO: 1100526 - RNA, 19 nt, Artificial Sequence
  Description of Artificial Sequence: Synthetic oligonucleotide
ugaauacugaauaccguac

SEQ ID NO: 1100527 - RNA, 19 nt, Artificial Sequence
  Description of Artificial Sequence: Synthetic oligonucleotide
auacugaauaccguacugc

SEQ ID NO: 1100528 - RNA, 19 nt, Artificial Sequence
  Description of Artificial Sequence: Synthetic oligonucleotide
auaagcuucccacuuaggu

SEQ ID NO: 1100529 - RNA, 19 nt, Artificial Sequence
  Description of Artificial Sequence: Synthetic oligonucleotide
aauuguaauaagaucucca

SEQ ID NO: 1100530 - RNA, 19 nt, Artificial Sequence
  Description of Artificial Sequence: Synthetic oligonucleotide
uuagaggaucaaaagcuga

SEQ ID NO: 1100531 - RNA, 19 nt, Artificial Sequence
  Description of Artificial Sequence: Synthetic oligonucleotide
uuuugggaggcaacuagcc

SEQ ID NO: 1100532 - RNA, 19 nt, Artificial Sequence
  Description of Artificial Sequence: Synthetic oligonucleotide
auucaaggggucuugguug

SEQ ID NO: 1100533 - RNA, 19 nt, Artificial Sequence
  Description of Artificial Sequence: Synthetic oligonucleotide
uuaguacuaacucaucgua

SEQ ID NO: 1100534 - RNA, 19 nt, Artificial Sequence
  Description of Artificial Sequence: Synthetic oligonucleotide
auuguaauaagaucuccau

SEQ ID NO: 1100535 - RNA, 19 nt, Artificial Sequence
  Description of Artificial Sequence: Synthetic oligonucleotide
cuuaucgauaaccgggucc

SEQ ID NO: 1100536 - RNA, 19 nt, Artificial Sequence
  Description of Artificial Sequence: Synthetic oligonucleotide
caugaaagaguaguguucc

SEQ ID NO: 1100537 - RNA, 19 nt, Artificial Sequence
  Description of Artificial Sequence: Synthetic oligonucleotide
aauagccaagugugauggc

SEQ ID NO: 1100538 - RNA, 19 nt, Artificial Sequence
  Description of Artificial Sequence: Synthetic oligonucleotide
guuuguggaggauaagugc

SEQ ID NO: 1100539 - RNA, 19 nt, Artificial Sequence
  Description of Artificial Sequence: Synthetic oligonucleotide
gauaaccggguccagguug

SEQ ID NO: 1100540 - RNA, 19 nt, Artificial Sequence
  Description of Artificial Sequence: Synthetic oligonucleotide
aaagaguaguguuccaaaa

SEQ ID NO: 1100541 - RNA, 19 nt, Artificial Sequence
  Description of Artificial Sequence: Synthetic oligonucleotide
acuagcugaauacugaaua

SEQ ID NO: 1100542 - RNA, 19 nt, Artificial Sequence
  Description of Artificial Sequence: Synthetic oligonucleotide
uuaguguagcugaaccucc

SEQ ID NO: 1100543 - RNA, 19 nt, Artificial Sequence
  Description of Artificial Sequence: Synthetic oligonucleotide
auggcguaaaaccuggucu

SEQ ID NO: 1100544 - RNA, 19 nt, Artificial Sequence
  Description of Artificial Sequence: Synthetic oligonucleotide
uaucaguucucgacgaaga

SEQ ID NO: 1100545 - RNA, 19 nt, Artificial Sequence
  Description of Artificial Sequence: Synthetic oligonucleotide
auuaugaaugggaauucgg

SEQ ID NO: 1100546 - RNA, 19 nt, Artificial Sequence
  Description of Artificial Sequence: Synthetic oligonucleotide
aaaggaggacgguuacggg

SEQ ID NO: 1100547 - RNA, 19 nt, Artificial Sequence
  Description of Artificial Sequence: Synthetic oligonucleotide
uauuccggcaaauuauacu

SEQ ID NO: 1100548 - RNA, 19 nt, Artificial Sequence
  Description of Artificial Sequence: Synthetic oligonucleotide
agcugaauacugaauaccg

SEQ ID NO: 1100549 - RNA, 19 nt, Artificial Sequence
  Description of Artificial Sequence: Synthetic oligonucleotide
guacaucugaccuucaauc

SEQ ID NO: 1100550 - RNA, 19 nt, Artificial Sequence
  Description of Artificial Sequence: Synthetic oligonucleotide
uaccguacugcugaggagg

SEQ ID NO: 1100551 - RNA, 19 nt, Artificial Sequence
  Description of Artificial Sequence: Synthetic oligonucleotide
uuaauauccucugggaagu

SEQ ID NO: 1100552 - RNA, 19 nt, Artificial Sequence
  Description of Artificial Sequence: Synthetic oligonucleotide
aguauaauuagcagguuga

SEQ ID NO: 1100553 - RNA, 19 nt, Artificial Sequence
  Description of Artificial Sequence: Synthetic oligonucleotide
ugauaauaagcuucccacu

SEQ ID NO: 1100554 - RNA, 19 nt, Artificial Sequence
  Description of Artificial Sequence: Synthetic oligonucleotide
gaaggaguggucaugguac

SEQ ID NO: 1100555 - RNA, 19 nt, Artificial Sequence
  Description of Artificial Sequence: Synthetic oligonucleotide
uaauaagaucuccaucuuc

SEQ ID NO: 1100556 - RNA, 19 nt, Artificial Sequence
  Description of Artificial Sequence: Synthetic oligonucleotide
auuccggcaaauuauacuu

SEQ ID NO: 1100557 - RNA, 19 nt, Artificial Sequence
  Description of Artificial Sequence: Synthetic oligonucleotide
uccaauaagcgauucacuu

SEQ ID NO: 1100558 - RNA, 19 nt, Artificial Sequence
  Description of Artificial Sequence: Synthetic oligonucleotide
acgggcauaaggguuaggc

SEQ ID NO: 1100559 - RNA, 19 nt, Artificial Sequence
  Description of Artificial Sequence: Synthetic oligonucleotide
uauuguugguacaucugac

SEQ ID NO: 1100560 - RNA, 19 nt, Artificial Sequence
  Description of Artificial Sequence: Synthetic oligonucleotide
uuuauuccgaaguucuauc

SEQ ID NO: 1100561 - RNA, 19 nt, Artificial Sequence
  Description of Artificial Sequence: Synthetic oligonucleotide
uuguaauaagaucuccauc

SEQ ID NO: 1100562 - RNA, 19 nt, Artificial Sequence
  Description of Artificial Sequence: Synthetic oligonucleotide
uagccuaucaauguuacau

SEQ ID NO: 1100563 - RNA, 19 nt, Artificial Sequence
  Description of Artificial Sequence: Synthetic oligonucleotide
ucuugguugguaagcacca

SEQ ID NO: 1100564 - RNA, 19 nt, Artificial Sequence
  Description of Artificial Sequence: Synthetic oligonucleotide
uuaucgauaaccgggucca

SEQ ID NO: 1100565 - RNA, 19 nt, Artificial Sequence
  Description of Artificial Sequence: Synthetic oligonucleotide
gauauuucaccugacuuga

SEQ ID NO: 1100566 - RNA, 19 nt, Artificial Sequence
  Description of Artificial Sequence: Synthetic oligonucleotide
aagcaauccaauaagcgau

SEQ ID NO: 1100567 - RNA, 19 nt, Artificial Sequence
  Description of Artificial Sequence: Synthetic oligonucleotide
gucaguuucaguauucuac

SEQ ID NO: 1100568 - RNA, 19 nt, Artificial Sequence
  Description of Artificial Sequence: Synthetic oligonucleotide
cucaucguaaguaauaucu

SEQ ID NO: 1100569 - RNA, 19 nt, Artificial Sequence
  Description of Artificial Sequence: Synthetic oligonucleotide
uccuuauacuuuauuguaa

SEQ ID NO: 1100570 - RNA, 19 nt, Artificial Sequence
  Description of Artificial Sequence: Synthetic oligonucleotide
auuaacaaauaaugucagu

SEQ ID NO: 1100571 - RNA, 19 nt, Artificial Sequence
  Description of Artificial Sequence: Synthetic oligonucleotide
gaaguucuaucaguucucg

SEQ ID NO: 1100572 - RNA, 19 nt, Artificial Sequence
  Description of Artificial Sequence: Synthetic oligonucleotide
uacugaauaccguacugcu

SEQ ID NO: 1100573 - RNA, 19 nt, Artificial Sequence
  Description of Artificial Sequence: Synthetic oligonucleotide
acgguuacgggcauaaggg

SEQ ID NO: 1100574 - RNA, 19 nt, Artificial Sequence
  Description of Artificial Sequence: Synthetic oligonucleotide
uguuuggguaguauaaguu

SEQ ID NO: 1100575 - RNA, 19 nt, Artificial Sequence
  Description of Artificial Sequence: Synthetic oligonucleotide
ugguauuguugguacaucu

SEQ ID NO: 1100576 - RNA, 19 nt, Artificial Sequence
  Description of Artificial Sequence: Synthetic oligonucleotide
caucguaaguaauaucuuc

SEQ ID NO: 1100577 - RNA, 19 nt, Artificial Sequence
  Description of Artificial Sequence: Synthetic oligonucleotide
uucucgacgaagauauuuc

SEQ ID NO: 1100578 - RNA, 19 nt, Artificial Sequence
  Description of Artificial Sequence: Synthetic oligonucleotide
caagcaauccaauaagcga

SEQ ID NO: 1100579 - RNA, 19 nt, Artificial Sequence
  Description of Artificial Sequence: Synthetic oligonucleotide
auaaugucaguuucaguau

SEQ ID NO: 1100580 - RNA, 19 nt, Artificial Sequence
  Description of Artificial Sequence: Synthetic oligonucleotide
gauguuuggguaguauaag

SEQ ID NO: 1100581 - RNA, 19 nt, Artificial Sequence
  Description of Artificial Sequence: Synthetic oligonucleotide
uacuacacugaauugcaaa

SEQ ID NO: 1100582 - RNA, 19 nt, Artificial Sequence
  Description of Artificial Sequence: Synthetic oligonucleotide
auaguauuguagucuuuug

SEQ ID NO: 1100583 - RNA, 19 nt, Artificial Sequence
  Description of Artificial Sequence: Synthetic oligonucleotide
cugaauaccguacugcuga

SEQ ID NO: 1100584 - RNA, 19 nt, Artificial Sequence
  Description of Artificial Sequence: Synthetic oligonucleotide
ugaacggucuucugcagga

SEQ ID NO: 1100585 - RNA, 19 nt, Artificial Sequence
  Description of Artificial Sequence: Synthetic oligonucleotide
uaacucaucguaaguaaua

SEQ ID NO: 1100586 - RNA, 19 nt, Artificial Sequence
  Description of Artificial Sequence: Synthetic oligonucleotide
uguauuccggcaaauuaua

SEQ ID NO: 1100587 - RNA, 19 nt, Artificial Sequence
  Description of Artificial Sequence: Synthetic oligonucleotide
gaggauaagugcucgucug

SEQ ID NO: 1100588 - RNA, 19 nt, Artificial Sequence
  Description of Artificial Sequence: Synthetic oligonucleotide
aagugugauggcugaaccu

SEQ ID NO: 1100589 - RNA, 19 nt, Artificial Sequence
  Description of Artificial Sequence: Synthetic oligonucleotide
aggauaagugcucgucugg

SEQ ID NO: 1100590 - RNA, 19 nt, Artificial Sequence
  Description of Artificial Sequence: Synthetic oligonucleotide
aaaccgcuugccgaggccg

SEQ ID NO: 1100591 - RNA, 19 nt, Artificial Sequence
  Description of Artificial Sequence: Synthetic oligonucleotide
cauuaugaaugggaauucg

SEQ ID NO: 1100592 - RNA, 19 nt, Artificial Sequence
  Description of Artificial Sequence: Synthetic oligonucleotide
uuugggaggcaacuagcca

SEQ ID NO: 1100593 - RNA, 19 nt, Artificial Sequence
  Description of Artificial Sequence: Synthetic oligonucleotide
gccauuaacaaauaauguc

SEQ ID NO: 1100594 - RNA, 19 nt, Artificial Sequence
  Description of Artificial Sequence: Synthetic oligonucleotide
auuccgaaguucuaucagu

SEQ ID NO: 1100595 - RNA, 19 nt, Artificial Sequence
  Description of Artificial Sequence: Synthetic oligonucleotide
gacgaagauauuucaccug

SEQ ID NO: 1100596 - RNA, 19 nt, Artificial Sequence
  Description of Artificial Sequence: Synthetic oligonucleotide
auuauacuuucaauuaaca

SEQ ID NO: 1100597 - RNA, 19 nt, Artificial Sequence
  Description of Artificial Sequence: Synthetic oligonucleotide
caagugugauggcugaacc

SEQ ID NO: 1100598 - RNA, 19 nt, Artificial Sequence
  Description of Artificial Sequence: Synthetic oligonucleotide
acucaucguaaguaauauc

SEQ ID NO: 1100599 - RNA, 19 nt, Artificial Sequence
  Description of Artificial Sequence: Synthetic oligonucleotide
aacuagccaucauuagugu

SEQ ID NO: 1100600 - RNA, 19 nt, Artificial Sequence
  Description of Artificial Sequence: Synthetic oligonucleotide
ugaccuucaaucugaccug

SEQ ID NO: 1100601 - RNA, 19 nt, Artificial Sequence
  Description of Artificial Sequence: Synthetic oligonucleotide
aacucaucguaaguaauau

SEQ ID NO: 1100602 - RNA, 19 nt, Artificial Sequence
  Description of Artificial Sequence: Synthetic oligonucleotide
uccuuaucgauaaccgggu

SEQ ID NO: 1100603 - RNA, 19 nt, Artificial Sequence
  Description of Artificial Sequence: Synthetic oligonucleotide
gggcauaaggguuaggccc

SEQ ID NO: 1100604 - RNA, 19 nt, Artificial Sequence
  Description of Artificial Sequence: Synthetic oligonucleotide
uaguacuaacucaucguaa

SEQ ID NO: 1100605 - RNA, 19 nt, Artificial Sequence
  Description of Artificial Sequence: Synthetic oligonucleotide
gaaagaguaguguuccaaa

SEQ ID NO: 1100606 - RNA, 19 nt, Artificial Sequence
  Description of Artificial Sequence: Synthetic oligonucleotide
auccuuauacuuuauugua

SEQ ID NO: 1100607 - RNA, 19 nt, Artificial Sequence
  Description of Artificial Sequence: Synthetic oligonucleotide
ucgauaaccggguccaggu

SEQ ID NO: 1100608 - RNA, 19 nt, Artificial Sequence
  Description of Artificial Sequence: Synthetic oligonucleotide
accugacuugauucaaggg

SEQ ID NO: 1100609 - RNA, 19 nt, Artificial Sequence
  Description of Artificial Sequence: Synthetic oligonucleotide
ccaagcaauccaauaagcg

SEQ ID NO: 1100610 - RNA, 19 nt, Artificial Sequence
  Description of Artificial Sequence: Synthetic oligonucleotide
aauaagcuucccacuuagg

SEQ ID NO: 1100611 - RNA, 19 nt, Artificial Sequence
  Description of Artificial Sequence: Synthetic oligonucleotide
uguagcugaaccuccuuau

SEQ ID NO: 1100612 - RNA, 19 nt, Artificial Sequence
  Description of Artificial Sequence: Synthetic oligonucleotide
ucucgacgaagauauuuca

SEQ ID NO: 1100613 - RNA, 19 nt, Artificial Sequence
  Description of Artificial Sequence: Synthetic oligonucleotide
aucauuaguguagcugaac

SEQ ID NO: 1100614 - RNA, 19 nt, Artificial Sequence
  Description of Artificial Sequence: Synthetic oligonucleotide
aguauucuacuacacugaa

SEQ ID NO: 1100615 - RNA, 19 nt, Artificial Sequence
  Description of Artificial Sequence: Synthetic oligonucleotide
guauuguagucuuuuggga

SEQ ID NO: 1100616 - RNA, 19 nt, Artificial Sequence
  Description of Artificial Sequence: Synthetic oligonucleotide
aucguaaguaauaucuuca

SEQ ID NO: 1100617 - RNA, 19 nt, Artificial Sequence
  Description of Artificial Sequence: Synthetic oligonucleotide
cacugaauugcaaaggaaa

SEQ ID NO: 1100618 - RNA, 19 nt, Artificial Sequence
  Description of Artificial Sequence: Synthetic oligonucleotide
ugaaagaguaguguuccaa

SEQ ID NO: 1100619 - RNA, 19 nt, Artificial Sequence
  Description of Artificial Sequence: Synthetic oligonucleotide
guuguggcugaccagaaaa

SEQ ID NO: 1100620 - RNA, 19 nt, Artificial Sequence
  Description of Artificial Sequence: Synthetic oligonucleotide
ggaaguagaaagccaauca

SEQ ID NO: 1100621 - RNA, 19 nt, Artificial Sequence
  Description of Artificial Sequence: Synthetic oligonucleotide
aucaaaagcugacaugcuu

SEQ ID NO: 1100622 - RNA, 19 nt, Artificial Sequence
  Description of Artificial Sequence: Synthetic oligonucleotide
aaaggaaaggucagaacua

SEQ ID NO: 1100623 - RNA, 19 nt, Artificial Sequence
  Description of Artificial Sequence: Synthetic oligonucleotide
ucguaaguaauaucuucau

SEQ ID NO: 1100624 - RNA, 19 nt, Artificial Sequence
  Description of Artificial Sequence: Synthetic oligonucleotide
gauaauaagcuucccacuu

SEQ ID NO: 1100625 - RNA, 19 nt, Artificial Sequence
  Description of Artificial Sequence: Synthetic oligonucleotide
uguuaacccaaaugcugac

SEQ ID NO: 1100626 - RNA, 19 nt, Artificial Sequence
  Description of Artificial Sequence: Synthetic oligonucleotide
accuccuuaucgauaaccg

SEQ ID NO: 1100627 - RNA, 19 nt, Artificial Sequence
  Description of Artificial Sequence: Synthetic oligonucleotide
uccggcaaauuauacuuuc

SEQ ID NO: 1100628 - RNA, 19 nt, Artificial Sequence
  Description of Artificial Sequence: Synthetic oligonucleotide
agcuccuguauauggaggu

SEQ ID NO: 1100629 - RNA, 19 nt, Artificial Sequence
  Description of Artificial Sequence: Synthetic oligonucleotide
gguuaggcccacuggaagg

SEQ ID NO: 1100630 - RNA, 19 nt, Artificial Sequence
  Description of Artificial Sequence: Synthetic oligonucleotide
cuguuaacccaaaugcuga

SEQ ID NO: 1100631 - RNA, 19 nt, Artificial Sequence
  Description of Artificial Sequence: Synthetic oligonucleotide
cucgacgaagauauuucac

SEQ ID NO: 1100632 - RNA, 19 nt, Artificial Sequence
  Description of Artificial Sequence: Synthetic oligonucleotide
gauggcugaaccuuagccu

SEQ ID NO: 1100633 - RNA, 19 nt, Artificial Sequence
  Description of Artificial Sequence: Synthetic oligonucleotide
caauaagcgauucacuuua

SEQ ID NO: 1100634 - RNA, 19 nt, Artificial Sequence
  Description of Artificial Sequence: Synthetic oligonucleotide
gaagauauuucaccugacu

SEQ ID NO: 1100635 - RNA, 19 nt, Artificial Sequence
  Description of Artificial Sequence: Synthetic oligonucleotide
ccuuauacuuuauuguaac

SEQ ID NO: 1100636 - RNA, 19 nt, Artificial Sequence
  Description of Artificial Sequence: Synthetic oligonucleotide
uugguuggccauuaacaaa

SEQ ID NO: 1100637 - RNA, 19 nt, Artificial Sequence
  Description of Artificial Sequence: Synthetic oligonucleotide
auucggcggauaucuuccc

SEQ ID NO: 1100638 - RNA, 19 nt, Artificial Sequence
  Description of Artificial Sequence: Synthetic oligonucleotide
auaauaagcuucccacuua

SEQ ID NO: 1100639 - RNA, 19 nt, Artificial Sequence
  Description of Artificial Sequence: Synthetic oligonucleotide
cugaauacugaauaccgua

SEQ ID NO: 1100640 - RNA, 19 nt, Artificial Sequence
  Description of Artificial Sequence: Synthetic oligonucleotide
aaacuugcucugcuuuuaa

SEQ ID NO: 1100641 - RNA, 19 nt, Artificial Sequence
  Description of Artificial Sequence: Synthetic oligonucleotide
gucuugguugguaagcacc

SEQ ID NO: 1100642 - RNA, 19 nt, Artificial Sequence
  Description of Artificial Sequence: Synthetic oligonucleotide
uuccgaaguucuaucaguu

SEQ ID NO: 1100643 - RNA, 19 nt, Artificial Sequence
  Description of Artificial Sequence: Synthetic oligonucleotide
ugaauaccguacugcugag

SEQ ID NO: 1100644 - RNA, 19 nt, Artificial Sequence
  Description of Artificial Sequence: Synthetic oligonucleotide
cuugguuggccauuaacaa

SEQ ID NO: 1100645 - RNA, 19 nt, Artificial Sequence
  Description of Artificial Sequence: Synthetic oligonucleotide
ccaaguugagcuuugauaa

SEQ ID NO: 1100646 - RNA, 19 nt, Artificial Sequence
  Description of Artificial Sequence: Synthetic oligonucleotide
uagucuuuugggaggcaac

SEQ ID NO: 1100647 - RNA, 19 nt, Artificial Sequence
  Description of Artificial Sequence: Synthetic oligonucleotide
gaauacugaauaccguacu

SEQ ID NO: 1100648 - RNA, 19 nt, Artificial Sequence
  Description of Artificial Sequence: Synthetic oligonucleotide
aaaacuugcucugcuuuua

SEQ ID NO: 1100649 - RNA, 19 nt, Artificial Sequence
  Description of Artificial Sequence: Synthetic oligonucleotide
gaguggucaugguaccugc

SEQ ID NO: 1100650 - RNA, 19 nt, Artificial Sequence
  Description of Artificial Sequence: Synthetic oligonucleotide
uugcucugcuuuuaaaauu

SEQ ID NO: 1100651 - RNA, 19 nt, Artificial Sequence
  Description of Artificial Sequence: Synthetic oligonucleotide
uuguagucuuuugggaggc

SEQ ID NO: 1100652 - RNA, 19 nt, Artificial Sequence
  Description of Artificial Sequence: Synthetic oligonucleotide
agcccugaccaaaaggagg

SEQ ID NO: 1100653 - RNA, 19 nt, Artificial Sequence
  Description of Artificial Sequence: Synthetic oligonucleotide
ucggcggauaucuucccca

SEQ ID NO: 1100654 - RNA, 19 nt, Artificial Sequence
  Description of Artificial Sequence: Synthetic oligonucleotide
aguaaauagccaaguguga

SEQ ID NO: 1100655 - RNA, 19 nt, Artificial Sequence
  Description of Artificial Sequence: Synthetic oligonucleotide
ucgggaauacugguagaag

SEQ ID NO: 1100656 - RNA, 19 nt, Artificial Sequence
  Description of Artificial Sequence: Synthetic oligonucleotide
gaauaccguacugcugagg

SEQ ID NO: 1100657 - RNA, 19 nt, Artificial Sequence
  Description of Artificial Sequence: Synthetic oligonucleotide
auguauuccggcaaauuau

SEQ ID NO: 1100658 - RNA, 19 nt, Artificial Sequence
  Description of Artificial Sequence: Synthetic oligonucleotide
guggcugaccagaaaaggc

SEQ ID NO: 1100659 - RNA, 19 nt, Artificial Sequence
  Description of Artificial Sequence: Synthetic oligonucleotide
uuguggaggauaagugcuc

SEQ ID NO: 1100660 - RNA, 19 nt, Artificial Sequence
  Description of Artificial Sequence: Synthetic oligonucleotide
uucgggaauacugguagaa

SEQ ID NO: 1100661 - RNA, 19 nt, Artificial Sequence
  Description of Artificial Sequence: Synthetic oligonucleotide
aucuguuaacccaaaugcu

SEQ ID NO: 1100662 - RNA, 19 nt, Artificial Sequence
  Description of Artificial Sequence: Synthetic oligonucleotide
uucggcggauaucuucccc

SEQ ID NO: 1100663 - RNA, 19 nt, Artificial Sequence
  Description of Artificial Sequence: Synthetic oligonucleotide
auaaccggguccagguugg

SEQ ID NO: 1100664 - RNA, 19 nt, Artificial Sequence
  Description of Artificial Sequence: Synthetic oligonucleotide
auaccguacugcugaggag

SEQ ID NO: 1100665 - RNA, 19 nt, Artificial Sequence
  Description of Artificial Sequence: Synthetic oligonucleotide
cuguguauguauuccggca

SEQ ID NO: 1100666 - RNA, 19 nt, Artificial Sequence
  Description of Artificial Sequence: Synthetic oligonucleotide
agugugauggcugaaccuu

SEQ ID NO: 1100667 - RNA, 19 nt, Artificial Sequence
  Description of Artificial Sequence: Synthetic oligonucleotide
agaggaucaaaagcugaca

SEQ ID NO: 1100668 - RNA, 19 nt, Artificial Sequence
  Description of Artificial Sequence: Synthetic oligonucleotide
uuucgggaauacugguaga

SEQ ID NO: 1100669 - RNA, 19 nt, Artificial Sequence
  Description of Artificial Sequence: Synthetic oligonucleotide
uggcguaaaaccuggucuu

SEQ ID NO: 1100670 - RNA, 19 nt, Artificial Sequence
  Description of Artificial Sequence: Synthetic oligonucleotide
ugucaguuucaguauucua

SEQ ID NO: 1100671 - RNA, 19 nt, Artificial Sequence
  Description of Artificial Sequence: Synthetic oligonucleotide
uggcugaaccuuagccuag

SEQ ID NO: 1100672 - RNA, 19 nt, Artificial Sequence
  Description of Artificial Sequence: Synthetic oligonucleotide
uaguguagcugaaccuccu

SEQ ID NO: 1100673 - RNA, 19 nt, Artificial Sequence
  Description of Artificial Sequence: Synthetic oligonucleotide
uccgaaguucuaucaguuc

SEQ ID NO: 1100674 - RNA, 19 nt, Artificial Sequence
  Description of Artificial Sequence: Synthetic oligonucleotide
cgggaauacugguagaagg

SEQ ID NO: 1100675 - RNA, 19 nt, Artificial Sequence
  Description of Artificial Sequence: Synthetic oligonucleotide
augggaauucggcggauau

SEQ ID NO: 1100676 - RNA, 19 nt, Artificial Sequence
  Description of Artificial Sequence: Synthetic oligonucleotide
aacuagcugaauacugaau

SEQ ID NO: 1100677 - RNA, 19 nt, Artificial Sequence
  Description of Artificial Sequence: Synthetic oligonucleotide
aacacucgcugcaucauua

SEQ ID NO: 1100678 - RNA, 19 nt, Artificial Sequence
  Description of Artificial Sequence: Synthetic oligonucleotide
aagugcucgucugguacug

SEQ ID NO: 1100679 - RNA, 19 nt, Artificial Sequence
  Description of Artificial Sequence: Synthetic oligonucleotide
uggaggauaagugcucguc

SEQ ID NO: 1100680 - RNA, 19 nt, Artificial Sequence
  Description of Artificial Sequence: Synthetic oligonucleotide
auaagcgauucacuuuauu

SEQ ID NO: 1100681 - RNA, 19 nt, Artificial Sequence
  Description of Artificial Sequence: Synthetic oligonucleotide
augaaagaguaguguucca

SEQ ID NO: 1100682 - RNA, 19 nt, Artificial Sequence
  Description of Artificial Sequence: Synthetic oligonucleotide
gucugcuggcuguaacuag

SEQ ID NO: 1100683 - RNA, 19 nt, Artificial Sequence
  Description of Artificial Sequence: Synthetic oligonucleotide
acugaauaccguacugcug

SEQ ID NO: 1100684 - RNA, 19 nt, Artificial Sequence
  Description of Artificial Sequence: Synthetic oligonucleotide
guuuuccucugaacacucg

SEQ ID NO: 1100685 - RNA, 19 nt, Artificial Sequence
  Description of Artificial Sequence: Synthetic oligonucleotide
guuuggguaguauaaguuu

SEQ ID NO: 1100686 - RNA, 19 nt, Artificial Sequence
  Description of Artificial Sequence: Synthetic oligonucleotide
agccuaucaauguuacauu

SEQ ID NO: 1100687 - RNA, 19 nt, Artificial Sequence
  Description of Artificial Sequence: Synthetic oligonucleotide
auaaccugaguagacuguu

SEQ ID NO: 1100688 - RNA, 19 nt, Artificial Sequence
  Description of Artificial Sequence: Synthetic oligonucleotide
gguauuguugguacaucug

SEQ ID NO: 1100689 - RNA, 19 nt, Artificial Sequence
  Description of Artificial Sequence: Synthetic oligonucleotide
ggagauggcguaaaaccug

SEQ ID NO: 1100690 - RNA, 19 nt, Artificial Sequence
  Description of Artificial Sequence: Synthetic oligonucleotide
gauaagugcucgucuggua

SEQ ID NO: 1100691 - RNA, 19 nt, Artificial Sequence
  Description of Artificial Sequence: Synthetic oligonucleotide
gccaucauuaguguagcug

SEQ ID NO: 1100692 - RNA, 19 nt, Artificial Sequence
  Description of Artificial Sequence: Synthetic oligonucleotide
uggguggcccugaaaccug

SEQ ID NO: 1100693 - RNA, 19 nt, Artificial Sequence
  Description of Artificial Sequence: Synthetic oligonucleotide
guauuccggcaaauuauac

SEQ ID NO: 1100694 - RNA, 19 nt, Artificial Sequence
  Description of Artificial Sequence: Synthetic oligonucleotide
aguugagcuuugauaauaa

SEQ ID NO: 1100695 - RNA, 19 nt, Artificial Sequence
  Description of Artificial Sequence: Synthetic oligonucleotide
ugucguuuucgggaauacu

SEQ ID NO: 1100696 - RNA, 19 nt, Artificial Sequence
  Description of Artificial Sequence: Synthetic oligonucleotide
agguggcuccaagcaaucc

SEQ ID NO: 1100697 - RNA, 19 nt, Artificial Sequence
  Description of Artificial Sequence: Synthetic oligonucleotide
agccaagugugauggcuga

SEQ ID NO: 1100698 - RNA, 19 nt, Artificial Sequence
  Description of Artificial Sequence: Synthetic oligonucleotide
uuccggcaaauuauacuuu

SEQ ID NO: 1100699 - RNA, 19 nt, Artificial Sequence
  Description of Artificial Sequence: Synthetic oligonucleotide
ccuccuuaucgauaaccgg

SEQ ID NO: 1100700 - RNA, 19 nt, Artificial Sequence
  Description of Artificial Sequence: Synthetic oligonucleotide
cauuaguguagcugaaccu

SEQ ID NO: 1100701 - RNA, 19 nt, Artificial Sequence
  Description of Artificial Sequence: Synthetic oligonucleotide
ugccccguagccagccugc

SEQ ID NO: 1100702 - RNA, 19 nt, Artificial Sequence
  Description of Artificial Sequence: Synthetic oligonucleotide
aauaagcgauucacuuuau

SEQ ID NO: 1100703 - RNA, 19 nt, Artificial Sequence
  Description of Artificial Sequence: Synthetic oligonucleotide
guuaacccaaaugcugaca

SEQ ID NO: 1100704 - RNA, 19 nt, Artificial Sequence
  Description of Artificial Sequence: Synthetic oligonucleotide
auccaauaagcgauucacu

SEQ ID NO: 1100705 - RNA, 19 nt, Artificial Sequence
  Description of Artificial Sequence: Synthetic oligonucleotide
aggaguuccugaacggucu

SEQ ID NO: 1100706 - RNA, 19 nt, Artificial Sequence
  Description of Artificial Sequence: Synthetic oligonucleotide
accggguccagguugggua

SEQ ID NO: 1100707 - RNA, 19 nt, Artificial Sequence
  Description of Artificial Sequence: Synthetic oligonucleotide
agugcucgucugguacugc

SEQ ID NO: 1100708 - RNA, 19 nt, Artificial Sequence
  Description of Artificial Sequence: Synthetic oligonucleotide
ggguuaggcccacuggaag

SEQ ID NO: 1100709 - RNA, 19 nt, Artificial Sequence
  Description of Artificial Sequence: Synthetic oligonucleotide
uuacgggcauaaggguuag

SEQ ID NO: 1100710 - RNA, 19 nt, Artificial Sequence
  Description of Artificial Sequence: Synthetic oligonucleotide
aucugaccugcuugugucu

SEQ ID NO: 1100711 - RNA, 19 nt, Artificial Sequence
  Description of Artificial Sequence: Synthetic oligonucleotide
aaugggaauucggcggaua

SEQ ID NO: 1100712 - RNA, 19 nt, Artificial Sequence
  Description of Artificial Sequence: Synthetic oligonucleotide
ucgcugcaucauuaguacu

SEQ ID NO: 1100713 - RNA, 19 nt, Artificial Sequence
  Description of Artificial Sequence: Synthetic oligonucleotide
uuaggcccacuggaaggag

SEQ ID NO: 1100714 - RNA, 19 nt, Artificial Sequence
  Description of Artificial Sequence: Synthetic oligonucleotide
ggcuguaacuagcugaaua

SEQ ID NO: 1100715 - RNA, 19 nt, Artificial Sequence
  Description of Artificial Sequence: Synthetic oligonucleotide
guuacgggcauaaggguua

SEQ ID NO: 1100716 - RNA, 19 nt, Artificial Sequence
  Description of Artificial Sequence: Synthetic oligonucleotide
ucaccuuuauuagccuauc

SEQ ID NO: 1100717 - RNA, 19 nt, Artificial Sequence
  Description of Artificial Sequence: Synthetic oligonucleotide
guuaggcccacuggaagga

SEQ ID NO: 1100718 - RNA, 19 nt, Artificial Sequence
  Description of Artificial Sequence: Synthetic oligonucleotide
guacuaacucaucguaagu

SEQ ID NO: 1100719 - RNA, 19 nt, Artificial Sequence
  Description of Artificial Sequence: Synthetic oligonucleotide
gggcacaguauaauuagca

SEQ ID NO: 1100720 - RNA, 19 nt, Artificial Sequence
  Description of Artificial Sequence: Synthetic oligonucleotide
cauaaccugaguagacugu

SEQ ID NO: 1100721 - RNA, 19 nt, Artificial Sequence
  Description of Artificial Sequence: Synthetic oligonucleotide
aguugguuguuggccauau

SEQ ID NO: 1100722 - RNA, 19 nt, Artificial Sequence
  Description of Artificial Sequence: Synthetic oligonucleotide
gaacggucuucugcaggag

SEQ ID NO: 1100723 - RNA, 19 nt, Artificial Sequence
  Description of Artificial Sequence: Synthetic oligonucleotide
ccacuuagguccaacuguc

SEQ ID NO: 1100724 - RNA, 19 nt, Artificial Sequence
  Description of Artificial Sequence: Synthetic oligonucleotide
aggcaacuagccaucauua

SEQ ID NO: 1100725 - RNA, 19 nt, Artificial Sequence
  Description of Artificial Sequence: Synthetic oligonucleotide
gcguaaaaccuggucuugg

SEQ ID NO: 1100726 - RNA, 19 nt, Artificial Sequence
  Description of Artificial Sequence: Synthetic oligonucleotide
cuuggagccauuccaggcu

SEQ ID NO: 1100727 - RNA, 19 nt, Artificial Sequence
  Description of Artificial Sequence: Synthetic oligonucleotide
guagucuuuugggaggcaa

SEQ ID NO: 1100728 - RNA, 19 nt, Artificial Sequence
  Description of Artificial Sequence: Synthetic oligonucleotide
uguagucuuuugggaggca

SEQ ID NO: 1100729 - RNA, 19 nt, Artificial Sequence
  Description of Artificial Sequence: Synthetic oligonucleotide
aauguucauuuuggucuuu

SEQ ID NO: 1100730 - RNA, 19 nt, Artificial Sequence
  Description of Artificial Sequence: Synthetic oligonucleotide
ggaguggucaugguaccug

SEQ ID NO: 1100731 - RNA, 19 nt, Artificial Sequence
  Description of Artificial Sequence: Synthetic oligonucleotide
agugucguuuucgggaaua

SEQ ID NO: 1100732 - RNA, 19 nt, Artificial Sequence
  Description of Artificial Sequence: Synthetic oligonucleotide
guuuuaagcaggggaggaa

SEQ ID NO: 1100733 - RNA, 19 nt, Artificial Sequence
  Description of Artificial Sequence: Synthetic oligonucleotide
gggugcgcugcugaggagg

SEQ ID NO: 1100734 - RNA, 19 nt, Artificial Sequence
  Description of Artificial Sequence: Synthetic oligonucleotide
gagcuuugauaauaagcuu

SEQ ID NO: 1100735 - RNA, 19 nt, Artificial Sequence
  Description of Artificial Sequence: Synthetic oligonucleotide
aggacgguuacgggcauaa

SEQ ID NO: 1100736 - RNA, 19 nt, Artificial Sequence
  Description of Artificial Sequence: Synthetic oligonucleotide
caccuuuauuagccuauca

SEQ ID NO: 1100737 - RNA, 19 nt, Artificial Sequence
  Description of Artificial Sequence: Synthetic oligonucleotide
auacugguagaagguccug

SEQ ID NO: 1100738 - RNA, 19 nt, Artificial Sequence
  Description of Artificial Sequence: Synthetic oligonucleotide
ugguaagcaccagguuggc

SEQ ID NO: 1100739 - RNA, 19 nt, Artificial Sequence
  Description of Artificial Sequence: Synthetic oligonucleotide
cucgucugguacugcugug

SEQ ID NO: 1100740 - RNA, 19 nt, Artificial Sequence
  Description of Artificial Sequence: Synthetic oligonucleotide
cauaaaacuugcucugcuu

SEQ ID NO: 1100741 - RNA, 19 nt, Artificial Sequence
  Description of Artificial Sequence: Synthetic oligonucleotide
acaguauaauuagcagguu

SEQ ID NO: 1100742 - RNA, 19 nt, Artificial Sequence
  Description of Artificial Sequence: Synthetic oligonucleotide
guucucgacgaagauauuu

SEQ ID NO: 1100743 - RNA, 19 nt, Artificial Sequence
  Description of Artificial Sequence: Synthetic oligonucleotide
aggaguggucaugguaccu

SEQ ID NO: 1100744 - RNA, 19 nt, Artificial Sequence
  Description of Artificial Sequence: Synthetic oligonucleotide
ggcauaaggguuaggccca

SEQ ID NO: 1100745 - RNA, 19 nt, Artificial Sequence
  Description of Artificial Sequence: Synthetic oligonucleotide
gugucguuuucgggaauac

SEQ ID NO: 1100746 - RNA, 19 nt, Artificial Sequence
  Description of Artificial Sequence: Synthetic oligonucleotide
agcaauccaauaagcgauu

SEQ ID NO: 1100747 - RNA, 19 nt, Artificial Sequence
  Description of Artificial Sequence: Synthetic oligonucleotide
gccauaucccuggaacugc

SEQ ID NO: 1100748 - RNA, 19 nt, Artificial Sequence
  Description of Artificial Sequence: Synthetic oligonucleotide
uacgggcauaaggguuagg

SEQ ID NO: 1100749 - RNA, 19 nt, Artificial Sequence
  Description of Artificial Sequence: Synthetic oligonucleotide
guugguuguuggccauauc

SEQ ID NO: 1100750 - RNA, 19 nt, Artificial Sequence
  Description of Artificial Sequence: Synthetic oligonucleotide
guccaacuguccguucaug

SEQ ID NO: 1100751 - RNA, 19 nt, Artificial Sequence
  Description of Artificial Sequence: Synthetic oligonucleotide
gcggauaucuuccccaagu

SEQ ID NO: 1100752 - RNA, 19 nt, Artificial Sequence
  Description of Artificial Sequence: Synthetic oligonucleotide
cgggcauaaggguuaggcc

SEQ ID NO: 1100753 - RNA, 19 nt, Artificial Sequence
  Description of Artificial Sequence: Synthetic oligonucleotide
ugggugcgcugcugaggag

SEQ ID NO: 1100754 - RNA, 19 nt, Artificial Sequence
  Description of Artificial Sequence: Synthetic oligonucleotide
ugcuugugucugagcuccu

SEQ ID NO: 1100755 - RNA, 19 nt, Artificial Sequence
  Description of Artificial Sequence: Synthetic oligonucleotide
ggggcacaguauaauuagc

SEQ ID NO: 1100756 - RNA, 19 nt, Artificial Sequence
  Description of Artificial Sequence: Synthetic oligonucleotide
gcccugaccaaaaggagga

SEQ ID NO: 1100757 - RNA, 19 nt, Artificial Sequence
  Description of Artificial Sequence: Synthetic oligonucleotide
ggcguaaaaccuggucuug

SEQ ID NO: 1100758 - RNA, 19 nt, Artificial Sequence
  Description of Artificial Sequence: Synthetic oligonucleotide
ggcggauaucuuccccaag

SEQ ID NO: 1100759 - RNA, 19 nt, Artificial Sequence
  Description of Artificial Sequence: Synthetic oligonucleotide
gguauagcccugaccaaaa

SEQ ID NO: 1100760 - RNA, 19 nt, Artificial Sequence
  Description of Artificial Sequence: Synthetic oligonucleotide
gaacacucgcugcaucauu

SEQ ID NO: 1100761 - RNA, 19 nt, Artificial Sequence
  Description of Artificial Sequence: Synthetic oligonucleotide
auuagcagguugagauguu

SEQ ID NO: 1100762 - RNA, 19 nt, Artificial Sequence
  Description of Artificial Sequence: Synthetic oligonucleotide
caaguugagcuuugauaau

SEQ ID NO: 1100763 - RNA, 19 nt, Artificial Sequence
  Description of Artificial Sequence: Synthetic oligonucleotide
auauuucaccugacuugau

SEQ ID NO: 1100764 - RNA, 19 nt, Artificial Sequence
  Description of Artificial Sequence: Synthetic oligonucleotide
guauguauuccggcaaauu

SEQ ID NO: 1100765 - RNA, 19 nt, Artificial Sequence
  Description of Artificial Sequence: Synthetic oligonucleotide
cuguccguucaugguggac

SEQ ID NO: 1100766 - RNA, 19 nt, Artificial Sequence
  Description of Artificial Sequence: Synthetic oligonucleotide
gccuaucaauguuacauuu

SEQ ID NO: 1100767 - RNA, 19 nt, Artificial Sequence
  Description of Artificial Sequence: Synthetic oligonucleotide
guauucuacuacacugaau

SEQ ID NO: 1100768 - RNA, 19 nt, Artificial Sequence
  Description of Artificial Sequence: Synthetic oligonucleotide
ggcugaaccuuagccuagc

SEQ ID NO: 1100769 - RNA, 19 nt, Artificial Sequence
  Description of Artificial Sequence: Synthetic oligonucleotide
ccuuaucgauaaccggguc

SEQ ID NO: 1100770 - RNA, 19 nt, Artificial Sequence
  Description of Artificial Sequence: Synthetic oligonucleotide
cccacuuagguccaacugu

SEQ ID NO: 1100771 - RNA, 19 nt, Artificial Sequence
  Description of Artificial Sequence: Synthetic oligonucleotide
cugaaccuuagccuagcuu

SEQ ID NO: 1100772 - RNA, 19 nt, Artificial Sequence
  Description of Artificial Sequence: Synthetic oligonucleotide
ccggcaaauuauacuuuca

SEQ ID NO: 1100773 - RNA, 19 nt, Artificial Sequence
  Description of Artificial Sequence: Synthetic oligonucleotide
gccgaggccgcugcguccg

SEQ ID NO: 1100774 - RNA, 19 nt, Artificial Sequence
  Description of Artificial Sequence: Synthetic oligonucleotide
ggauaagugcucgucuggu

SEQ ID NO: 1100775 - RNA, 19 nt, Artificial Sequence
  Description of Artificial Sequence: Synthetic oligonucleotide
ggauucaaucaccuuuauu

SEQ ID NO: 1100776 - RNA, 19 nt, Artificial Sequence
  Description of Artificial Sequence: Synthetic oligonucleotide
gaacggcuggugggugcgc

SEQ ID NO: 1100777 - RNA, 19 nt, Artificial Sequence
  Description of Artificial Sequence: Synthetic oligonucleotide
uggaacugcugagguuguu

SEQ ID NO: 1100778 - RNA, 19 nt, Artificial Sequence
  Description of Artificial Sequence: Synthetic oligonucleotide
cgcugcaucauuaguacua

SEQ ID NO: 1100779 - RNA, 19 nt, Artificial Sequence
  Description of Artificial Sequence: Synthetic oligonucleotide
gguuacgggcauaaggguu

SEQ ID NO: 1100780 - RNA, 19 nt, Artificial Sequence
  Description of Artificial Sequence: Synthetic oligonucleotide
cgacgaagauauuucaccu

SEQ ID NO: 1100781 - RNA, 19 nt, Artificial Sequence
  Description of Artificial Sequence: Synthetic oligonucleotide
cacucgcugcaucauuagu

SEQ ID NO: 1100782 - RNA, 19 nt, Artificial Sequence
  Description of Artificial Sequence: Synthetic oligonucleotide
cugcugugccccguagcca

SEQ ID NO: 1100783 - RNA, 19 nt, Artificial Sequence
  Description of Artificial Sequence: Synthetic oligonucleotide
gaaugggaauucggcggau

SEQ ID NO: 1100784 - RNA, 19 nt, Artificial Sequence
  Description of Artificial Sequence: Synthetic oligonucleotide
ggacgguuacgggcauaag

SEQ ID NO: 1100785 - RNA, 19 nt, Artificial Sequence
  Description of Artificial Sequence: Synthetic oligonucleotide
ccguucaugguggacucca

SEQ ID NO: 1100786 - RNA, 19 nt, Artificial Sequence
  Description of Artificial Sequence: Synthetic oligonucleotide
gguccaacuguccguucau

SEQ ID NO: 1100787 - RNA, 19 nt, Artificial Sequence
  Description of Artificial Sequence: Synthetic oligonucleotide
gcauaaggguuaggcccac

SEQ ID NO: 1100788 - RNA, 19 nt, Artificial Sequence
  Description of Artificial Sequence: Synthetic oligonucleotide
cguaaaaccuggucuuggu

SEQ ID NO: 1100789 - RNA, 19 nt, Artificial Sequence
  Description of Artificial Sequence: Synthetic oligonucleotide
gcugaaccuuagccuagcu

SEQ ID NO: 1100790 - RNA, 19 nt, Artificial Sequence
  Description of Artificial Sequence: Synthetic oligonucleotide
gggaggcaacuagccauca

SEQ ID NO: 1100791 - RNA, 19 nt, Artificial Sequence
  Description of Artificial Sequence: Synthetic oligonucleotide
gaggacgguuacgggcaua

SEQ ID NO: 1100792 - RNA, 19 nt, Artificial Sequence
  Description of Artificial Sequence: Synthetic oligonucleotide
ccauaucccuggaacugcu

SEQ ID NO: 1100793 - RNA, 19 nt, Artificial Sequence
  Description of Artificial Sequence: Synthetic oligonucleotide
ggaggcaacuagccaucau

SEQ ID NO: 1100794 - RNA, 19 nt, Artificial Sequence
  Description of Artificial Sequence: Synthetic oligonucleotide
cauaaggguuaggcccacu

SEQ ID NO: 1100795 - RNA, 19 nt, Artificial Sequence
  Description of Artificial Sequence: Synthetic oligonucleotide
ggaguuccugaacggucuu

SEQ ID NO: 1100796 - RNA, 19 nt, Artificial Sequence
  Description of Artificial Sequence: Synthetic oligonucleotide
cagugucguuuucgggaau

SEQ ID NO: 1100797 - RNA, 19 nt, Artificial Sequence
  Description of Artificial Sequence: Synthetic oligonucleotide
cgguuacgggcauaagggu

SEQ ID NO: 1100798 - RNA, 19 nt, Artificial Sequence
  Description of Artificial Sequence: Synthetic oligonucleotide
gcuccuguauauggagguu

SEQ ID NO: 1100799 - RNA, 19 nt, Artificial Sequence
  Description of Artificial Sequence: Synthetic oligonucleotide
cggauaucuuccccaaguu

SEQ ID NO: 1100800 - RNA, 19 nt, Artificial Sequence
  Description of Artificial Sequence: Synthetic oligonucleotide
ccggguccagguuggguau

SEQ ID NO: 1100801 - RNA, 19 nt, Artificial Sequence
  Description of Artificial Sequence: Synthetic oligonucleotide
cgauaaccggguccagguu

SEQ ID NO: 1100802 - RNA, 19 nt, Artificial Sequence
  Description of Artificial Sequence: Synthetic oligonucleotide
gccccguagccagccugcu

SEQ ID NO: 1100803 - RNA, 19 nt, Artificial Sequence
  Description of Artificial Sequence: Synthetic oligonucleotide
uuaauuaacaaaucuauag

SEQ ID NO: 1100804 - RNA, 19 nt, Artificial Sequence
  Description of Artificial Sequence: Synthetic oligonucleotide
aaucccaacacuuaaggac

SEQ ID NO: 1100805 - RNA, 19 nt, Artificial Sequence
  Description of Artificial Sequence: Synthetic oligonucleotide
agggaaacaaaucacacgc

SEQ ID NO: 1100806 - RNA, 19 nt, Artificial Sequence
  Description of Artificial Sequence: Synthetic oligonucleotide
uccaaaucgaacaacaucc

SEQ ID NO: 1100807 - RNA, 19 nt, Artificial Sequence
  Description of Artificial Sequence: Synthetic oligonucleotide
aauuaacaaaucuauagga

SEQ ID NO: 1100808 - RNA, 19 nt, Artificial Sequence
  Description of Artificial Sequence: Synthetic oligonucleotide
gagauuauaagaaacacag

SEQ ID NO: 1100809 - RNA, 19 nt, Artificial Sequence
  Description of Artificial Sequence: Synthetic oligonucleotide
uucauaaauuguuagggcg

SEQ ID NO: 1100810 - RNA, 19 nt, Artificial Sequence
  Description of Artificial Sequence: Synthetic oligonucleotide
uuuacuagcaggcugagac

SEQ ID NO: 1100811 - RNA, 19 nt, Artificial Sequence
  Description of Artificial Sequence: Synthetic oligonucleotide
ucuguuuagaacaagggga

SEQ ID NO: 1100812 - RNA, 19 nt, Artificial Sequence
  Description of Artificial Sequence: Synthetic oligonucleotide
aaagacguagaaaagcccc

SEQ ID NO: 1100813 - RNA, 19 nt, Artificial Sequence
  Description of Artificial Sequence: Synthetic oligonucleotide
auaauauaaauuauagugg

SEQ ID NO: 1100814 - RNA, 19 nt, Artificial Sequence
  Description of Artificial Sequence: Synthetic oligonucleotide
uguuguagagcacauauga

SEQ ID NO: 1100815 - RNA, 19 nt, Artificial Sequence
  Description of Artificial Sequence: Synthetic oligonucleotide
aaagugaugaggaugauca

SEQ ID NO: 1100816 - RNA, 19 nt, Artificial Sequence
  Description of Artificial Sequence: Synthetic oligonucleotide
aacaaaucuauaggaaacc

SEQ ID NO: 1100817 - RNA, 19 nt, Artificial Sequence
  Description of Artificial Sequence: Synthetic oligonucleotide
aaucgaacaacauccuggg

SEQ ID NO: 1100818 - RNA, 19 nt, Artificial Sequence
  Description of Artificial Sequence: Synthetic oligonucleotide
agugccacauacuugaauc

SEQ ID NO: 1100819 - RNA, 19 nt, Artificial Sequence
  Description of Artificial Sequence: Synthetic oligonucleotide
ucuaguggagauuauaaga

SEQ ID NO: 1100820 - RNA, 19 nt, Artificial Sequence
  Description of Artificial Sequence: Synthetic oligonucleotide
acauucaggggacaggugc

SEQ ID NO: 1100821 - RNA, 19 nt, Artificial Sequence
  Description of Artificial Sequence: Synthetic oligonucleotide
ucgaacaacauccuggggc

SEQ ID NO: 1100822 - RNA, 19 nt, Artificial Sequence
  Description of Artificial Sequence: Synthetic oligonucleotide
aacacuuaaggacaggcgu

SEQ ID NO: 1100823 - RNA, 19 nt, Artificial Sequence
  Description of Artificial Sequence: Synthetic oligonucleotide
aaacaaaucacacgcagau

SEQ ID NO: 1100824 - RNA, 19 nt, Artificial Sequence
  Description of Artificial Sequence: Synthetic oligonucleotide
uaaaucaggagacauaaua

SEQ ID NO: 1100825 - RNA, 19 nt, Artificial Sequence
  Description of Artificial Sequence: Synthetic oligonucleotide
ucaagguucguuuuacuag

SEQ ID NO: 1100826 - RNA, 19 nt, Artificial Sequence
  Description of Artificial Sequence: Synthetic oligonucleotide
auuauuagcaucuccuaug

SEQ ID NO: 1100827 - RNA, 19 nt, Artificial Sequence
  Description of Artificial Sequence: Synthetic oligonucleotide
uauaagaaacacagacacg

SEQ ID NO: 1100828 - RNA, 19 nt, Artificial Sequence
  Description of Artificial Sequence: Synthetic oligonucleotide
aaaguggcccgacaacacc

SEQ ID NO: 1100829 - RNA, 19 nt, Artificial Sequence
  Description of Artificial Sequence: Synthetic oligonucleotide
gacagaaaugucugaaccg

SEQ ID NO: 1100830 - RNA, 19 nt, Artificial Sequence
  Description of Artificial Sequence: Synthetic oligonucleotide
gaugaugccaaagacguag

SEQ ID NO: 1100831 - RNA, 19 nt, Artificial Sequence
  Description of Artificial Sequence: Synthetic oligonucleotide
guagaugagagccaagugc

SEQ ID NO: 1100832 - RNA, 19 nt, Artificial Sequence
  Description of Artificial Sequence: Synthetic oligonucleotide
uguagagcacauaugagaa

SEQ ID NO: 1100833 - RNA, 19 nt, Artificial Sequence
  Description of Artificial Sequence: Synthetic oligonucleotide
  modified_base (8)..(8): a, c, u, g, unknown or other
uucagggnuccccauaagg

SEQ ID NO: 1100834 - RNA, 19 nt, Artificial Sequence
  Description of Artificial Sequence: Synthetic oligonucleotide
uccuucauaaauuguuagg

SEQ ID NO: 1100835 - RNA, 19 nt, Artificial Sequence
  Description of Artificial Sequence: Synthetic oligonucleotide
  modified_base (7)..(7): a, c, u, g, unknown or other
ucagggnuccccauaagga

SEQ ID NO: 1100836 - RNA, 19 nt, Artificial Sequence
  Description of Artificial Sequence: Synthetic oligonucleotide
uuaaugagggacuuucucu

SEQ ID NO: 1100837 - RNA, 19 nt, Artificial Sequence
  Description of Artificial Sequence: Synthetic oligonucleotide
ucauaaauuguuagggcgu

SEQ ID NO: 1100838 - RNA, 19 nt, Artificial Sequence
  Description of Artificial Sequence: Synthetic oligonucleotide
  modified_base (14)..(14): a, c, u, g, unknown or other
agugguuucagggnucccc

SEQ ID NO: 1100839 - RNA, 19 nt, Artificial Sequence
  Description of Artificial Sequence: Synthetic oligonucleotide
ugaucaaugcccuuggaaa

SEQ ID NO: 1100840 - RNA, 19 nt, Artificial Sequence
  Description of Artificial Sequence: Synthetic oligonucleotide
gagggaaacaaaucacacg

SEQ ID NO: 1100841 - RNA, 19 nt, Artificial Sequence
  Description of Artificial Sequence: Synthetic oligonucleotide
aaaugucugaaccgcccac

SEQ ID NO: 1100842 - RNA, 19 nt, Artificial Sequence
  Description of Artificial Sequence: Synthetic oligonucleotide
uguuaaugggaccuggcac

SEQ ID NO: 1100843 - RNA, 19 nt, Artificial Sequence
  Description of Artificial Sequence: Synthetic oligonucleotide
acauaauauaaauuauagu

SEQ ID NO: 1100844 - RNA, 19 nt, Artificial Sequence
  Description of Artificial Sequence: Synthetic oligonucleotide
uauaaauuauaguggccug

SEQ ID NO: 1100845 - RNA, 19 nt, Artificial Sequence
  Description of Artificial Sequence: Synthetic oligonucleotide
gugaaaggagacaugaagg

SEQ ID NO: 1100846 - RNA, 19 nt, Artificial Sequence
  Description of Artificial Sequence: Synthetic oligonucleotide
aaugucugaaccgcccacc

SEQ ID NO: 1100847 - RNA, 19 nt, Artificial Sequence
  Description of Artificial Sequence: Synthetic oligonucleotide
augccaaagacguagaaaa

SEQ ID NO: 1100848 - RNA, 19 nt, Artificial Sequence
  Description of Artificial Sequence: Synthetic oligonucleotide
agugcuuaacucaagguuc

SEQ ID NO: 1100849 - RNA, 19 nt, Artificial Sequence
  Description of Artificial Sequence: Synthetic oligonucleotide
aggcaagcggcacagacac

SEQ ID NO: 1100850 - RNA, 19 nt, Artificial Sequence
  Description of Artificial Sequence: Synthetic oligonucleotide
uauaguggccuguauauaa

SEQ ID NO: 1100851 - RNA, 19 nt, Artificial Sequence
  Description of Artificial Sequence: Synthetic oligonucleotide
guuaaugggaccuggcacc

SEQ ID NO: 1100852 - RNA, 19 nt, Artificial Sequence
  Description of Artificial Sequence: Synthetic oligonucleotide
agaaacacagacacgagag

SEQ ID NO: 1100853 - RNA, 19 nt, Artificial Sequence
  Description of Artificial Sequence: Synthetic oligonucleotide
aaauauggccucuggagau

SEQ ID NO: 1100854 - RNA, 19 nt, Artificial Sequence
  Description of Artificial Sequence: Synthetic oligonucleotide
aaucaggagacauaauaua

SEQ ID NO: 1100855 - RNA, 19 nt, Artificial Sequence
  Description of Artificial Sequence: Synthetic oligonucleotide
acgcagauuaccuuuacca

SEQ ID NO: 1100856 - RNA, 19 nt, Artificial Sequence
  Description of Artificial Sequence: Synthetic oligonucleotide
ggagacauaauauaaauua

SEQ ID NO: 1100857 - RNA, 19 nt, Artificial Sequence
  Description of Artificial Sequence: Synthetic oligonucleotide
ugcacaacccaccaacagc

SEQ ID NO: 1100858 - RNA, 19 nt, Artificial Sequence
  Description of Artificial Sequence: Synthetic oligonucleotide
cuguguagagaaaggaacc

SEQ ID NO: 1100859 - RNA, 19 nt, Artificial Sequence
  Description of Artificial Sequence: Synthetic oligonucleotide
uugaccaaauuuccggccc

SEQ ID NO: 1100860 - RNA, 19 nt, Artificial Sequence
  Description of Artificial Sequence: Synthetic oligonucleotide
caagguucguuuuacuagc

SEQ ID NO: 1100861 - RNA, 19 nt, Artificial Sequence
  Description of Artificial Sequence: Synthetic oligonucleotide
cauaugagaaggugggccc

SEQ ID NO: 1100862 - RNA, 19 nt, Artificial Sequence
  Description of Artificial Sequence: Synthetic oligonucleotide
aaaucaggagacauaauau

SEQ ID NO: 1100863 - RNA, 19 nt, Artificial Sequence
  Description of Artificial Sequence: Synthetic oligonucleotide
aguggugacgagugaaagg

SEQ ID NO: 1100864 - RNA, 19 nt, Artificial Sequence
  Description of Artificial Sequence: Synthetic oligonucleotide
ucguuuuacuagcaggcug

SEQ ID NO: 1100865 - RNA, 19 nt, Artificial Sequence
  Description of Artificial Sequence: Synthetic oligonucleotide
agaaaugucugaaccgccc

SEQ ID NO: 1100866 - RNA, 19 nt, Artificial Sequence
  Description of Artificial Sequence: Synthetic oligonucleotide
ugaaccgcccaccaccuag

SEQ ID NO: 1100867 - RNA, 19 nt, Artificial Sequence
  Description of Artificial Sequence: Synthetic oligonucleotide
aaguagaugagagccaagu

SEQ ID NO: 1100868 - RNA, 19 nt, Artificial Sequence
  Description of Artificial Sequence: Synthetic oligonucleotide
agcacauaugagaaggugg

SEQ ID NO: 1100869 - RNA, 19 nt, Artificial Sequence
  Description of Artificial Sequence: Synthetic oligonucleotide
aauuguuagggcguucugu

SEQ ID NO: 1100870 - RNA, 19 nt, Artificial Sequence
  Description of Artificial Sequence: Synthetic oligonucleotide
ugacucagugcuuaacuca

SEQ ID NO: 1100871 - RNA, 19 nt, Artificial Sequence
  Description of Artificial Sequence: Synthetic oligonucleotide
gguucguuuuacuagcagg

SEQ ID NO: 1100872 - RNA, 19 nt, Artificial Sequence
  Description of Artificial Sequence: Synthetic oligonucleotide
  modified_base (16)..(16): a, c, u, g, unknown or other
agagugguuucagggnucc

SEQ ID NO: 1100873 - RNA, 19 nt, Artificial Sequence
  Description of Artificial Sequence: Synthetic oligonucleotide
agugacucagugcuuaacu

SEQ ID NO: 1100874 - RNA, 19 nt, Artificial Sequence
  Description of Artificial Sequence: Synthetic oligonucleotide
guggccuguauauaaaaug

SEQ ID NO: 1100875 - RNA, 19 nt, Artificial Sequence
  Description of Artificial Sequence: Synthetic oligonucleotide
gucauaguaaguguugacc

SEQ ID NO: 1100876 - RNA, 19 nt, Artificial Sequence
  Description of Artificial Sequence: Synthetic oligonucleotide
cucagugcuuaacucaagg

SEQ ID NO: 1100877 - RNA, 19 nt, Artificial Sequence
  Description of Artificial Sequence: Synthetic oligonucleotide
agggcguucuguuuagaac

SEQ ID NO: 1100878 - RNA, 19 nt, Artificial Sequence
  Description of Artificial Sequence: Synthetic oligonucleotide
caaagacguagaaaagccc

SEQ ID NO: 1100879 - RNA, 19 nt, Artificial Sequence
  Description of Artificial Sequence: Synthetic oligonucleotide
agccaagugcuccaguuuc

SEQ ID NO: 1100880 - RNA, 19 nt, Artificial Sequence
  Description of Artificial Sequence: Synthetic oligonucleotide
ugguguagcagcugacacg

SEQ ID NO: 1100881 - RNA, 19 nt, Artificial Sequence
  Description of Artificial Sequence: Synthetic oligonucleotide
ugccaagguaacaggacag

SEQ ID NO: 1100882 - RNA, 19 nt, Artificial Sequence
  Description of Artificial Sequence: Synthetic oligonucleotide
gauccgguccaccagaguc

SEQ ID NO: 1100883 - RNA, 19 nt, Artificial Sequence
  Description of Artificial Sequence: Synthetic oligonucleotide
caacacuuaaggacaggcg

SEQ ID NO: 1100884 - RNA, 19 nt, Artificial Sequence
  Description of Artificial Sequence: Synthetic oligonucleotide
ugaccaaauuuccggcccg

SEQ ID NO: 1100885 - RNA, 19 nt, Artificial Sequence
  Description of Artificial Sequence: Synthetic oligonucleotide
auaggaaaccuucauuaaa

SEQ ID NO: 1100886 - RNA, 19 nt, Artificial Sequence
  Description of Artificial Sequence: Synthetic oligonucleotide
auaaggagggaaacaaauc

SEQ ID NO: 1100887 - RNA, 19 nt, Artificial Sequence
  Description of Artificial Sequence: Synthetic oligonucleotide
cuaguggagauuauaagaa

SEQ ID NO: 1100888 - RNA, 19 nt, Artificial Sequence
  Description of Artificial Sequence: Synthetic oligonucleotide
guucguuuuacuagcaggc

SEQ ID NO: 1100889 - RNA, 19 nt, Artificial Sequence
  Description of Artificial Sequence: Synthetic oligonucleotide
aaauuguuagggcguucug

SEQ ID NO: 1100890 - RNA, 19 nt, Artificial Sequence
  Description of Artificial Sequence: Synthetic oligonucleotide
cucuaguggagauuauaag

SEQ ID NO: 1100891 - RNA, 19 nt, Artificial Sequence
  Description of Artificial Sequence: Synthetic oligonucleotide
ccuguauauaaaauguggc

SEQ ID NO: 1100892 - RNA, 19 nt, Artificial Sequence
  Description of Artificial Sequence: Synthetic oligonucleotide
acguagaaaagccccagca

SEQ ID NO: 1100893 - RNA, 19 nt, Artificial Sequence
  Description of Artificial Sequence: Synthetic oligonucleotide
gaucuguaggccaaggcac

SEQ ID NO: 1100894 - RNA, 19 nt, Artificial Sequence
  Description of Artificial Sequence: Synthetic oligonucleotide
aaucacacgcagauuaccu

SEQ ID NO: 1100895 - RNA, 19 nt, Artificial Sequence
  Description of Artificial Sequence: Synthetic oligonucleotide
agagucugggcagacugcc

SEQ ID NO: 1100896 - RNA, 19 nt, Artificial Sequence
  Description of Artificial Sequence: Synthetic oligonucleotide
ccaaagacguagaaaagcc

SEQ ID NO: 1100897 - RNA, 19 nt, Artificial Sequence
  Description of Artificial Sequence: Synthetic oligonucleotide
uguuagggcguucuguuua

SEQ ID NO: 1100898 - RNA, 19 nt, Artificial Sequence
  Description of Artificial Sequence: Synthetic oligonucleotide
ugccaaagacguagaaaag

SEQ ID NO: 1100899 - RNA, 19 nt, Artificial Sequence
  Description of Artificial Sequence: Synthetic oligonucleotide
gucugaaccgcccaccacc

SEQ ID NO: 1100900 - RNA, 19 nt, Artificial Sequence
  Description of Artificial Sequence: Synthetic oligonucleotide
caacccaccaacagccugg

SEQ ID NO: 1100901 - RNA, 19 nt, Artificial Sequence
  Description of Artificial Sequence: Synthetic oligonucleotide
uguuaaugagggacuuucu

SEQ ID NO: 1100902 - RNA, 19 nt, Artificial Sequence
  Description of Artificial Sequence: Synthetic oligonucleotide
cuccaaaucgaacaacauc

SEQ ID NO: 1100903 - RNA, 19 nt, Artificial Sequence
  Description of Artificial Sequence: Synthetic oligonucleotide
auaaauuauaguggccugu

SEQ ID NO: 1100904 - RNA, 19 nt, Artificial Sequence
  Description of Artificial Sequence: Synthetic oligonucleotide
guugaccaaauuuccggcc

SEQ ID NO: 1100905 - RNA, 19 nt, Artificial Sequence
  Description of Artificial Sequence: Synthetic oligonucleotide
auguuaaugggaccuggca

SEQ ID NO: 1100906 - RNA, 19 nt, Artificial Sequence
  Description of Artificial Sequence: Synthetic oligonucleotide
gcagauuaccuuuaccaag

SEQ ID NO: 1100907 - RNA, 19 nt, Artificial Sequence
  Description of Artificial Sequence: Synthetic oligonucleotide
cauguuaaugggaccuggc

SEQ ID NO: 1100908 - RNA, 19 nt, Artificial Sequence
  Description of Artificial Sequence: Synthetic oligonucleotide
ugagguuagccauguguca

SEQ ID NO: 1100909 - RNA, 19 nt, Artificial Sequence
  Description of Artificial Sequence: Synthetic oligonucleotide
uguuggaauggagaauggc

SEQ ID NO: 1100910 - RNA, 19 nt, Artificial Sequence
  Description of Artificial Sequence: Synthetic oligonucleotide
auggccagcgugacgaugc

SEQ ID NO: 1100911 - RNA, 19 nt, Artificial Sequence
  Description of Artificial Sequence: Synthetic oligonucleotide
caccuggacagcauaggcg

SEQ ID NO: 1100912 - RNA, 19 nt, Artificial Sequence
  Description of Artificial Sequence: Synthetic oligonucleotide
  modified_base (6)..(6): a, c, u, g, unknown or other
cagggnuccccauaaggag

SEQ ID NO: 1100913 - RNA, 19 nt, Artificial Sequence
  Description of Artificial Sequence: Synthetic oligonucleotide
uuaacucaagguucguuuu

SEQ ID NO: 1100914 - RNA, 19 nt, Artificial Sequence
  Description of Artificial Sequence: Synthetic oligonucleotide
gagguuagccaugugucag

SEQ ID NO: 1100915 - RNA, 19 nt, Artificial Sequence
  Description of Artificial Sequence: Synthetic oligonucleotide
uuacuagcaggcugagacc

SEQ ID NO: 1100916 - RNA, 19 nt, Artificial Sequence
  Description of Artificial Sequence: Synthetic oligonucleotide
aagugacucagugcuuaac

SEQ ID NO: 1100917 - RNA, 19 nt, Artificial Sequence
  Description of Artificial Sequence: Synthetic oligonucleotide
cacugcacaacccaccaac

SEQ ID NO: 1100918 - RNA, 19 nt, Artificial Sequence
  Description of Artificial Sequence: Synthetic oligonucleotide
uccgaaaguggcccgacaa

SEQ ID NO: 1100919 - RNA, 19 nt, Artificial Sequence
  Description of Artificial Sequence: Synthetic oligonucleotide
cagauuaccuuuaccaaga

SEQ ID NO: 1100920 - RNA, 19 nt, Artificial Sequence
  Description of Artificial Sequence: Synthetic oligonucleotide
guaaguguugaccaaauuu

SEQ ID NO: 1100921 - RNA, 19 nt, Artificial Sequence
  Description of Artificial Sequence: Synthetic oligonucleotide
ugcacauucuaaggagggg

SEQ ID NO: 1100922 - RNA, 19 nt, Artificial Sequence
  Description of Artificial Sequence: Synthetic oligonucleotide
accaaauauggccucugga

SEQ ID NO: 1100923 - RNA, 19 nt, Artificial Sequence
  Description of Artificial Sequence: Synthetic oligonucleotide
aucuauaggaaaccuucau

SEQ ID NO: 1100924 - RNA, 19 nt, Artificial Sequence
  Description of Artificial Sequence: Synthetic oligonucleotide
cuguuaaugagggacuuuc

SEQ ID NO: 1100925 - RNA, 19 nt, Artificial Sequence
  Description of Artificial Sequence: Synthetic oligonucleotide
agauggaccuuccauccga

SEQ ID NO: 1100926 - RNA, 19 nt, Artificial Sequence
  Description of Artificial Sequence: Synthetic oligonucleotide
cuuaaggacaggcguuggc

SEQ ID NO: 1100927 - RNA, 19 nt, Artificial Sequence
  Description of Artificial Sequence: Synthetic oligonucleotide
ggagauggaccuuccaucc

SEQ ID NO: 1100928 - RNA, 19 nt, Artificial Sequence
  Description of Artificial Sequence: Synthetic oligonucleotide
  modified_base (10)..(10): a, c, u, g, unknown or other
guuucagggnuccccauaa

SEQ ID NO: 1100929 - RNA, 19 nt, Artificial Sequence
  Description of Artificial Sequence: Synthetic oligonucleotide
caaaucacacgcagauuac

SEQ ID NO: 1100930 - RNA, 19 nt, Artificial Sequence
  Description of Artificial Sequence: Synthetic oligonucleotide
gcgaacaucacagccagcg

SEQ ID NO: 1100931 - RNA, 19 nt, Artificial Sequence
  Description of Artificial Sequence: Synthetic oligonucleotide
gagauggaccuuccauccg

SEQ ID NO: 1100932 - RNA, 19 nt, Artificial Sequence
  Description of Artificial Sequence: Synthetic oligonucleotide
agguuagccaugugucagg

SEQ ID NO: 1100933 - RNA, 19 nt, Artificial Sequence
  Description of Artificial Sequence: Synthetic oligonucleotide
ugagaaggugggcccaaug

SEQ ID NO: 1100934 - RNA, 19 nt, Artificial Sequence
  Description of Artificial Sequence: Synthetic oligonucleotide
ugcggaacugccucucaag

SEQ ID NO: 1100935 - RNA, 19 nt, Artificial Sequence
  Description of Artificial Sequence: Synthetic oligonucleotide
uaccuuuaccaagauaauc

SEQ ID NO: 1100936 - RNA, 19 nt, Artificial Sequence
  Description of Artificial Sequence: Synthetic oligonucleotide
aguuucaggguggacaggu

SEQ ID NO: 1100937 - RNA, 19 nt, Artificial Sequence
  Description of Artificial Sequence: Synthetic oligonucleotide
aggacaggcguuggcagcc

SEQ ID NO: 1100938 - RNA, 19 nt, Artificial Sequence
  Description of Artificial Sequence: Synthetic oligonucleotide
ugucaggccaaggaaguga

SEQ ID NO: 1100939 - RNA, 19 nt, Artificial Sequence
  Description of Artificial Sequence: Synthetic oligonucleotide
uguaccccuucucagucuc

SEQ ID NO: 1100940 - RNA, 19 nt, Artificial Sequence
  Description of Artificial Sequence: Synthetic oligonucleotide
uuaccaagauaaucccaac

SEQ ID NO: 1100941 - RNA, 19 nt, Artificial Sequence
  Description of Artificial Sequence: Synthetic oligonucleotide
  modified_base (5)..(5): a, c, u, g, unknown or other
agggnuccccauaaggagg

SEQ ID NO: 1100942 - RNA, 19 nt, Artificial Sequence
  Description of Artificial Sequence: Synthetic oligonucleotide
gugcuuaacucaagguucg

SEQ ID NO: 1100943 - RNA, 19 nt, Artificial Sequence
  Description of Artificial Sequence: Synthetic oligonucleotide
gacguagaaaagccccagc

SEQ ID NO: 1100944 - RNA, 19 nt, Artificial Sequence
  Description of Artificial Sequence: Synthetic oligonucleotide
uuaccuuuaccaagauaau

SEQ ID NO: 1100945 - RNA, 19 nt, Artificial Sequence
  Description of Artificial Sequence: Synthetic oligonucleotide
cucuggagaucauauauaa

SEQ ID NO: 1100946 - RNA, 19 nt, Artificial Sequence
  Description of Artificial Sequence: Synthetic oligonucleotide
acagacacgagagugguuu

SEQ ID NO: 1100947 - RNA, 19 nt, Artificial Sequence
  Description of Artificial Sequence: Synthetic oligonucleotide
agguucguuuuacuagcag

SEQ ID NO: 1100948 - RNA, 19 nt, Artificial Sequence
  Description of Artificial Sequence: Synthetic oligonucleotide
aguagaggcaagcggcaca

SEQ ID NO: 1100949 - RNA, 19 nt, Artificial Sequence
  Description of Artificial Sequence: Synthetic oligonucleotide
ugacacgguucugaugagg

SEQ ID NO: 1100950 - RNA, 19 nt, Artificial Sequence
  Description of Artificial Sequence: Synthetic oligonucleotide
uggcuguuaaugagggacu

SEQ ID NO: 1100951 - RNA, 19 nt, Artificial Sequence
  Description of Artificial Sequence: Synthetic oligonucleotide
gcauaggcgaacaucacag

SEQ ID NO: 1100952 - RNA, 19 nt, Artificial Sequence
  Description of Artificial Sequence: Synthetic oligonucleotide
acaacccaccaacagccug

SEQ ID NO: 1100953 - RNA, 19 nt, Artificial Sequence
  Description of Artificial Sequence: Synthetic oligonucleotide
aucgaacaacauccugggg

SEQ ID NO: 1100954 - RNA, 19 nt, Artificial Sequence
  Description of Artificial Sequence: Synthetic oligonucleotide
caaauuuccggcccgugca

SEQ ID NO: 1100955 - RNA, 19 nt, Artificial Sequence
  Description of Artificial Sequence: Synthetic oligonucleotide
guuagggcguucuguuuag

SEQ ID NO: 1100956 - RNA, 19 nt, Artificial Sequence
  Description of Artificial Sequence: Synthetic oligonucleotide
cguucuguuuagaacaagg

SEQ ID NO: 1100957 - RNA, 19 nt, Artificial Sequence
  Description of Artificial Sequence: Synthetic oligonucleotide
acacgcagauuaccuuuac

SEQ ID NO: 1100958 - RNA, 19 nt, Artificial Sequence
  Description of Artificial Sequence: Synthetic oligonucleotide
auaaaauguggcaccaaau

SEQ ID NO: 1100959 - RNA, 19 nt, Artificial Sequence
  Description of Artificial Sequence: Synthetic oligonucleotide
uccauccgaaaguggcccg

SEQ ID NO: 1100960 - RNA, 19 nt, Artificial Sequence
  Description of Artificial Sequence: Synthetic oligonucleotide
ccuuuaccaagauaauccc

SEQ ID NO: 1100961 - RNA, 19 nt, Artificial Sequence
  Description of Artificial Sequence: Synthetic oligonucleotide
cauaaggagggaaacaaau

SEQ ID NO: 1100962 - RNA, 19 nt, Artificial Sequence
  Description of Artificial Sequence: Synthetic oligonucleotide
agacaggccuccaaaguag

SEQ ID NO: 1100963 - RNA, 19 nt, Artificial Sequence
  Description of Artificial Sequence: Synthetic oligonucleotide
uuaaugggaccuggcacca

SEQ ID NO: 1100964 - RNA, 19 nt, Artificial Sequence
  Description of Artificial Sequence: Synthetic oligonucleotide
caagauaaucccaacacuu

SEQ ID NO: 1100965 - RNA, 19 nt, Artificial Sequence
  Description of Artificial Sequence: Synthetic oligonucleotide
ugugaucaaugcccuugga

SEQ ID NO: 1100966 - RNA, 19 nt, Artificial Sequence
  Description of Artificial Sequence: Synthetic oligonucleotide
gccaaagacguagaaaagc

SEQ ID NO: 1100967 - RNA, 19 nt, Artificial Sequence
  Description of Artificial Sequence: Synthetic oligonucleotide
aaggggagauggaccuucc

SEQ ID NO: 1100968 - RNA, 19 nt, Artificial Sequence
  Description of Artificial Sequence: Synthetic oligonucleotide
auuuccggcccgugcacag

SEQ ID NO: 1100969 - RNA, 19 nt, Artificial Sequence
  Description of Artificial Sequence: Synthetic oligonucleotide
cuaucaggcagcacauuca

SEQ ID NO: 1100970 - RNA, 19 nt, Artificial Sequence
  Description of Artificial Sequence: Synthetic oligonucleotide
gggcguucuguuuagaaca

SEQ ID NO: 1100971 - RNA, 19 nt, Artificial Sequence
  Description of Artificial Sequence: Synthetic oligonucleotide
gugacucagugcuuaacuc

SEQ ID NO: 1100972 - RNA, 19 nt, Artificial Sequence
  Description of Artificial Sequence: Synthetic oligonucleotide
uguuuagaacaaggggaga

SEQ ID NO: 1100973 - RNA, 19 nt, Artificial Sequence
  Description of Artificial Sequence: Synthetic oligonucleotide
cagguguaccccuucucag

SEQ ID NO: 1100974 - RNA, 19 nt, Artificial Sequence
  Description of Artificial Sequence: Synthetic oligonucleotide
ggcaccaauuauuagcauc

SEQ ID NO: 1100975 - RNA, 19 nt, Artificial Sequence
  Description of Artificial Sequence: Synthetic oligonucleotide
caccaaauauggccucugg

SEQ ID NO: 1100976 - RNA, 19 nt, Artificial Sequence
  Description of Artificial Sequence: Synthetic oligonucleotide
uucguuuuacuagcaggcu

SEQ ID NO: 1100977 - RNA, 19 nt, Artificial Sequence
  Description of Artificial Sequence: Synthetic oligonucleotide
agcgugacgaugccggccu

SEQ ID NO: 1100978 - RNA, 19 nt, Artificial Sequence
  Description of Artificial Sequence: Synthetic oligonucleotide
cacgcagauuaccuuuacc

SEQ ID NO: 1100979 - RNA, 19 nt, Artificial Sequence
  Description of Artificial Sequence: Synthetic oligonucleotide
gaaaguggcccgacaacac

SEQ ID NO: 1100980 - RNA, 19 nt, Artificial Sequence
  Description of Artificial Sequence: Synthetic oligonucleotide
cagccgaucagggaggcag

SEQ ID NO: 1100981 - RNA, 19 nt, Artificial Sequence
  Description of Artificial Sequence: Synthetic oligonucleotide
uggcauagaccagagggaa

SEQ ID NO: 1100982 - RNA, 19 nt, Artificial Sequence
  Description of Artificial Sequence: Synthetic oligonucleotide
agauuauaagaaacacaga

SEQ ID NO: 1100983 - RNA, 19 nt, Artificial Sequence
  Description of Artificial Sequence: Synthetic oligonucleotide
uagggcguucuguuuagaa

SEQ ID NO: 1100984 - RNA, 19 nt, Artificial Sequence
  Description of Artificial Sequence: Synthetic oligonucleotide
ucaaugcccuuggaaaagu

SEQ ID NO: 1100985 - RNA, 19 nt, Artificial Sequence
  Description of Artificial Sequence: Synthetic oligonucleotide
aguaaguguugaccaaauu

SEQ ID NO: 1100986 - RNA, 19 nt, Artificial Sequence
  Description of Artificial Sequence: Synthetic oligonucleotide
ucucccagugccacauacu

SEQ ID NO: 1100987 - RNA, 19 nt, Artificial Sequence
  Description of Artificial Sequence: Synthetic oligonucleotide
gauuaccuuuaccaagaua

SEQ ID NO: 1100988 - RNA, 19 nt, Artificial Sequence
  Description of Artificial Sequence: Synthetic oligonucleotide
caauuccuccuguguagag

SEQ ID NO: 1100989 - RNA, 19 nt, Artificial Sequence
  Description of Artificial Sequence: Synthetic oligonucleotide
agacguagaaaagccccag

SEQ ID NO: 1100990 - RNA, 19 nt, Artificial Sequence
  Description of Artificial Sequence: Synthetic oligonucleotide
ugacgagugaaaggagaca

SEQ ID NO: 1100991 - RNA, 19 nt, Artificial Sequence
  Description of Artificial Sequence: Synthetic oligonucleotide
gguucugaugagguuagcc

SEQ ID NO: 1100992 - RNA, 19 nt, Artificial Sequence
  Description of Artificial Sequence: Synthetic oligonucleotide
acuuaaggacaggcguugg

SEQ ID NO: 1100993 - RNA, 19 nt, Artificial Sequence
  Description of Artificial Sequence: Synthetic oligonucleotide
agguguaccccuucucagu

SEQ ID NO: 1100994 - RNA, 19 nt, Artificial Sequence
  Description of Artificial Sequence: Synthetic oligonucleotide
gcugagacccugcagugcc

SEQ ID NO: 1100995 - RNA, 19 nt, Artificial Sequence
  Description of Artificial Sequence: Synthetic oligonucleotide
cucaagguucguuuuacua

SEQ ID NO: 1100996 - RNA, 19 nt, Artificial Sequence
  Description of Artificial Sequence: Synthetic oligonucleotide
caauuauuagcaucuccua

SEQ ID NO: 1100997 - RNA, 19 nt, Artificial Sequence
  Description of Artificial Sequence: Synthetic oligonucleotide
cuuaacucaagguucguuu

SEQ ID NO: 1100998 - RNA, 19 nt, Artificial Sequence
  Description of Artificial Sequence: Synthetic oligonucleotide
uccauguuaaugggaccug

SEQ ID NO: 1100999 - RNA, 19 nt, Artificial Sequence
  Description of Artificial Sequence: Synthetic oligonucleotide
augucugaaccgcccacca

SEQ ID NO: 1101000 - RNA, 19 nt, Artificial Sequence
  Description of Artificial Sequence: Synthetic oligonucleotide
cauaguaaguguugaccaa

SEQ ID NO: 1101001 - RNA, 19 nt, Artificial Sequence
  Description of Artificial Sequence: Synthetic oligonucleotide
agggauggcauagaccaga

SEQ ID NO: 1101002 - RNA, 19 nt, Artificial Sequence
  Description of Artificial Sequence: Synthetic oligonucleotide
aagauccgguccaccagag

SEQ ID NO: 1101003 - RNA, 19 nt, Artificial Sequence
  Description of Artificial Sequence: Synthetic oligonucleotide
aacccaccaacagccuggg

SEQ ID NO: 1101004 - RNA, 19 nt, Artificial Sequence
  Description of Artificial Sequence: Synthetic oligonucleotide
ugggaucuguaggccaagg

SEQ ID NO: 1101005 - RNA, 19 nt, Artificial Sequence
  Description of Artificial Sequence: Synthetic oligonucleotide
aauuuccggcccgugcaca

SEQ ID NO: 1101006 - RNA, 19 nt, Artificial Sequence
  Description of Artificial Sequence: Synthetic oligonucleotide
acucaagguucguuuuacu

SEQ ID NO: 1101007 - RNA, 19 nt, Artificial Sequence
  Description of Artificial Sequence: Synthetic oligonucleotide
caugugucaggccaaggaa

SEQ ID NO: 1101008 - RNA, 19 nt, Artificial Sequence
  Description of Artificial Sequence: Synthetic oligonucleotide
gcacauucuaaggaggggc

SEQ ID NO: 1101009 - RNA, 19 nt, Artificial Sequence
  Description of Artificial Sequence: Synthetic oligonucleotide
uuuuacuagcaggcugaga

SEQ ID NO: 1101010 - RNA, 19 nt, Artificial Sequence
  Description of Artificial Sequence: Synthetic oligonucleotide
ugucugaaccgcccaccac

SEQ ID NO: 1101011 - RNA, 19 nt, Artificial Sequence
  Description of Artificial Sequence: Synthetic oligonucleotide
ccaaggaagugacucagug

SEQ ID NO: 1101012 - RNA, 19 nt, Artificial Sequence
  Description of Artificial Sequence: Synthetic oligonucleotide
caaggcccaggcuugucug

SEQ ID NO: 1101013 - RNA, 19 nt, Artificial Sequence
  Description of Artificial Sequence: Synthetic oligonucleotide
uuauaguggccuguauaua

SEQ ID NO: 1101014 - RNA, 19 nt, Artificial Sequence
  Description of Artificial Sequence: Synthetic oligonucleotide
  modified_base (4)..(4): a, c, u, g, unknown or other
gggnuccccauaaggaggg

SEQ ID NO: 1101015 - RNA, 19 nt, Artificial Sequence
  Description of Artificial Sequence: Synthetic oligonucleotide
gacacagcccaagguguag

SEQ ID NO: 1101016 - RNA, 19 nt, Artificial Sequence
  Description of Artificial Sequence: Synthetic oligonucleotide
ugugcuguggugggagcug

SEQ ID NO: 1101017 - RNA, 19 nt, Artificial Sequence
  Description of Artificial Sequence: Synthetic oligonucleotide
uggcccgacaacacccucu

SEQ ID NO: 1101018 - RNA, 19 nt, Artificial Sequence
  Description of Artificial Sequence: Synthetic oligonucleotide
gggagauggaccuuccauc

SEQ ID NO: 1101019 - RNA, 19 nt, Artificial Sequence
  Description of Artificial Sequence: Synthetic oligonucleotide
aggagacauaauauaaauu

SEQ ID NO: 1101020 - RNA, 19 nt, Artificial Sequence
  Description of Artificial Sequence: Synthetic oligonucleotide
gaaccgcccaccaccuagg

SEQ ID NO: 1101021 - RNA, 19 nt, Artificial Sequence
  Description of Artificial Sequence: Synthetic oligonucleotide
aagguucguuuuacuagca

SEQ ID NO: 1101022 - RNA, 19 nt, Artificial Sequence
  Description of Artificial Sequence: Synthetic oligonucleotide
guuagccaugugucaggcc

SEQ ID NO: 1101023 - RNA, 19 nt, Artificial Sequence
  Description of Artificial Sequence: Synthetic oligonucleotide
gacgagugaaaggagacau

SEQ ID NO: 1101024 - RNA, 19 nt, Artificial Sequence
  Description of Artificial Sequence: Synthetic oligonucleotide
ccuuggaaaagucauagua

SEQ ID NO: 1101025 - RNA, 19 nt, Artificial Sequence
  Description of Artificial Sequence: Synthetic oligonucleotide
gaucagggaggcagcuggg

SEQ ID NO: 1101026 - RNA, 19 nt, Artificial Sequence
  Description of Artificial Sequence: Synthetic oligonucleotide
guuuuacuagcaggcugag

SEQ ID NO: 1101027 - RNA, 19 nt, Artificial Sequence
  Description of Artificial Sequence: Synthetic oligonucleotide
agcgggccgaaagugauga

SEQ ID NO: 1101028 - RNA, 19 nt, Artificial Sequence
  Description of Artificial Sequence: Synthetic oligonucleotide
agauuaccuuuaccaagau

SEQ ID NO: 1101029 - RNA, 19 nt, Artificial Sequence
  Description of Artificial Sequence: Synthetic oligonucleotide
guguuguagagcacauaug

SEQ ID NO: 1101030 - RNA, 19 nt, Artificial Sequence
  Description of Artificial Sequence: Synthetic oligonucleotide
caagauccgguccaccaga

SEQ ID NO: 1101031 - RNA, 19 nt, Artificial Sequence
  Description of Artificial Sequence: Synthetic oligonucleotide
auaugagaaggugggccca

SEQ ID NO: 1101032 - RNA, 19 nt, Artificial Sequence
  Description of Artificial Sequence: Synthetic oligonucleotide
ccgacaacacccucuagug

SEQ ID NO: 1101033 - RNA, 19 nt, Artificial Sequence
  Description of Artificial Sequence: Synthetic oligonucleotide
gccgaaagugaugaggaug

SEQ ID NO: 1101034 - RNA, 19 nt, Artificial Sequence
  Description of Artificial Sequence: Synthetic oligonucleotide
ccaaauuuccggcccgugc

SEQ ID NO: 1101035 - RNA, 19 nt, Artificial Sequence
  Description of Artificial Sequence: Synthetic oligonucleotide
gccagcgugacgaugccgg

SEQ ID NO: 1101036 - RNA, 19 nt, Artificial Sequence
  Description of Artificial Sequence: Synthetic oligonucleotide
gaggaugaucaggucuccc

SEQ ID NO: 1101037 - RNA, 19 nt, Artificial Sequence
  Description of Artificial Sequence: Synthetic oligonucleotide
acgguucugaugagguuag

SEQ ID NO: 1101038 - RNA, 19 nt, Artificial Sequence
  Description of Artificial Sequence: Synthetic oligonucleotide
caucuccuaugugccaagg

SEQ ID NO: 1101039 - RNA, 19 nt, Artificial Sequence
  Description of Artificial Sequence: Synthetic oligonucleotide
cgaucagggaggcagcugg

SEQ ID NO: 1101040 - RNA, 19 nt, Artificial Sequence
  Description of Artificial Sequence: Synthetic oligonucleotide
gacacgguucugaugaggu

SEQ ID NO: 1101041 - RNA, 19 nt, Artificial Sequence
  Description of Artificial Sequence: Synthetic oligonucleotide
agcaucuccuaugugccaa

SEQ ID NO: 1101042 - RNA, 19 nt, Artificial Sequence
  Description of Artificial Sequence: Synthetic oligonucleotide
uuguuagggcguucuguuu

SEQ ID NO: 1101043 - RNA, 19 nt, Artificial Sequence
  Description of Artificial Sequence: Synthetic oligonucleotide
gaagugacucagugcuuaa

SEQ ID NO: 1101044 - RNA, 19 nt, Artificial Sequence
  Description of Artificial Sequence: Synthetic oligonucleotide
gguguaccccuucucaguc

SEQ ID NO: 1101045 - RNA, 19 nt, Artificial Sequence
  Description of Artificial Sequence: Synthetic oligonucleotide
gauggccagcgugacgaug

SEQ ID NO: 1101046 - RNA, 19 nt, Artificial Sequence
  Description of Artificial Sequence: Synthetic oligonucleotide
gcagacugccugcuggugc

SEQ ID NO: 1101047 - RNA, 19 nt, Artificial Sequence
  Description of Artificial Sequence: Synthetic oligonucleotide
gucaggccaaggaagugac

SEQ ID NO: 1101048 - RNA, 19 nt, Artificial Sequence
  Description of Artificial Sequence: Synthetic oligonucleotide
cagacaggccuccaaagua

SEQ ID NO: 1101049 - RNA, 19 nt, Artificial Sequence
  Description of Artificial Sequence: Synthetic oligonucleotide
uagccaugugucaggccaa

SEQ ID NO: 1101050 - RNA, 19 nt, Artificial Sequence
  Description of Artificial Sequence: Synthetic oligonucleotide
cuagcaggcugagacccug

SEQ ID NO: 1101051 - RNA, 19 nt, Artificial Sequence
  Description of Artificial Sequence: Synthetic oligonucleotide
auaguggccuguauauaaa

SEQ ID NO: 1101052 - RNA, 19 nt, Artificial Sequence
  Description of Artificial Sequence: Synthetic oligonucleotide
agacacgagagugguuuca

SEQ ID NO: 1101053 - RNA, 19 nt, Artificial Sequence
  Description of Artificial Sequence: Synthetic oligonucleotide
  modified_base (2)..(2): a, c, u, g, unknown or other
gnuccccauaaggagggaa

SEQ ID NO: 1101054 - RNA, 19 nt, Artificial Sequence
  Description of Artificial Sequence: Synthetic oligonucleotide
cugagacccugcagugccc

SEQ ID NO: 1101055 - RNA, 19 nt, Artificial Sequence
  Description of Artificial Sequence: Synthetic oligonucleotide
acacuuaaggacaggcguu

SEQ ID NO: 1101056 - RNA, 19 nt, Artificial Sequence
  Description of Artificial Sequence: Synthetic oligonucleotide
accuuccauccgaaagugg

SEQ ID NO: 1101057 - RNA, 19 nt, Artificial Sequence
  Description of Artificial Sequence: Synthetic oligonucleotide
agccgggagccacauggcu

SEQ ID NO: 1101058 - RNA, 19 nt, Artificial Sequence
  Description of Artificial Sequence: Synthetic oligonucleotide
ggaagacuccaaaucgaac

SEQ ID NO: 1101059 - RNA, 19 nt, Artificial Sequence
  Description of Artificial Sequence: Synthetic oligonucleotide
  modified_base (13)..(13): a, c, u, g, unknown or other
gugguuucagggnucccca

SEQ ID NO: 1101060 - RNA, 19 nt, Artificial Sequence
  Description of Artificial Sequence: Synthetic oligonucleotide
gguuagccaugugucaggc

SEQ ID NO: 1101061 - RNA, 19 nt, Artificial Sequence
  Description of Artificial Sequence: Synthetic oligonucleotide
cagugcuuaacucaagguu

SEQ ID NO: 1101062 - RNA, 19 nt, Artificial Sequence
  Description of Artificial Sequence: Synthetic oligonucleotide
cacgguucugaugagguua

SEQ ID NO: 1101063 - RNA, 19 nt, Artificial Sequence
  Description of Artificial Sequence: Synthetic oligonucleotide
ccauguuaaugggaccugg

SEQ ID NO: 1101064 - RNA, 19 nt, Artificial Sequence
  Description of Artificial Sequence: Synthetic oligonucleotide
auccgaaaguggcccgaca

SEQ ID NO: 1101065 - RNA, 19 nt, Artificial Sequence
  Description of Artificial Sequence: Synthetic oligonucleotide
uccgguccaccagaguccu

SEQ ID NO: 1101066 - RNA, 19 nt, Artificial Sequence
  Description of Artificial Sequence: Synthetic oligonucleotide
ccucuaguggagauuauaa

SEQ ID NO: 1101067 - RNA, 19 nt, Artificial Sequence
  Description of Artificial Sequence: Synthetic oligonucleotide
agauccgguccaccagagu

SEQ ID NO: 1101068 - RNA, 19 nt, Artificial Sequence
  Description of Artificial Sequence: Synthetic oligonucleotide
ugcagugcguggccaggau

SEQ ID NO: 1101069 - RNA, 19 nt, Artificial Sequence
  Description of Artificial Sequence: Synthetic oligonucleotide
accaaauuuccggcccgug

SEQ ID NO: 1101070 - RNA, 19 nt, Artificial Sequence
  Description of Artificial Sequence: Synthetic oligonucleotide
ugcuuaacucaagguucgu

SEQ ID NO: 1101071 - RNA, 19 nt, Artificial Sequence
  Description of Artificial Sequence: Synthetic oligonucleotide
ggucagccgaucagggagg

SEQ ID NO: 1101072 - RNA, 19 nt, Artificial Sequence
  Description of Artificial Sequence: Synthetic oligonucleotide
ugacgaugccggccuccug

SEQ ID NO: 1101073 - RNA, 19 nt, Artificial Sequence
  Description of Artificial Sequence: Synthetic oligonucleotide
ggaccuuccauccgaaagu

SEQ ID NO: 1101074 - RNA, 19 nt, Artificial Sequence
  Description of Artificial Sequence: Synthetic oligonucleotide
uuagggcguucuguuuaga

SEQ ID NO: 1101075 - RNA, 19 nt, Artificial Sequence
  Description of Artificial Sequence: Synthetic oligonucleotide
ggagccacauggcuguuaa

SEQ ID NO: 1101076 - RNA, 19 nt, Artificial Sequence
  Description of Artificial Sequence: Synthetic oligonucleotide
caggguggacagguaguag

SEQ ID NO: 1101077 - RNA, 19 nt, Artificial Sequence
  Description of Artificial Sequence: Synthetic oligonucleotide
cagcguguuguagagcaca

SEQ ID NO: 1101078 - RNA, 19 nt, Artificial Sequence
  Description of Artificial Sequence: Synthetic oligonucleotide
gggccgaaagugaugagga

SEQ ID NO: 1101079 - RNA, 19 nt, Artificial Sequence
  Description of Artificial Sequence: Synthetic oligonucleotide
cauucaggggacaggugcu

SEQ ID NO: 1101080 - RNA, 19 nt, Artificial Sequence
  Description of Artificial Sequence: Synthetic oligonucleotide
ggaagugacucagugcuua

SEQ ID NO: 1101081 - RNA, 19 nt, Artificial Sequence
  Description of Artificial Sequence: Synthetic oligonucleotide
uuuccggcccgugcacagc

SEQ ID NO: 1101082 - RNA, 19 nt, Artificial Sequence
  Description of Artificial Sequence: Synthetic oligonucleotide
acgaugccggccuccuggu

SEQ ID NO: 1101083 - RNA, 19 nt, Artificial Sequence
  Description of Artificial Sequence: Synthetic oligonucleotide
ccaugugucaggccaagga

SEQ ID NO: 1101084 - RNA, 19 nt, Artificial Sequence
  Description of Artificial Sequence: Synthetic oligonucleotide
ggcauagaccagagggaag

SEQ ID NO: 1101085 - RNA, 19 nt, Artificial Sequence
  Description of Artificial Sequence: Synthetic oligonucleotide
gauggaccuuccauccgaa

SEQ ID NO: 1101086 - RNA, 19 nt, Artificial Sequence
  Description of Artificial Sequence: Synthetic oligonucleotide
auggaccuuccauccgaaa

SEQ ID NO: 1101087 - RNA, 19 nt, Artificial Sequence
  Description of Artificial Sequence: Synthetic oligonucleotide
gccaagguaacaggacagc

SEQ ID NO: 1101088 - RNA, 19 nt, Artificial Sequence
  Description of Artificial Sequence: Synthetic oligonucleotide
gcaucuccuaugugccaag

SEQ ID NO: 1101089 - RNA, 19 nt, Artificial Sequence
  Description of Artificial Sequence: Synthetic oligonucleotide
cauccgaaaguggcccgac

SEQ ID NO: 1101090 - RNA, 19 nt, Artificial Sequence
  Description of Artificial Sequence: Synthetic oligonucleotide
cacccucuaguggagauua

SEQ ID NO: 1101091 - RNA, 19 nt, Artificial Sequence
  Description of Artificial Sequence: Synthetic oligonucleotide
cacacgcagauuaccuuua

SEQ ID NO: 1101092 - RNA, 19 nt, Artificial Sequence
  Description of Artificial Sequence: Synthetic oligonucleotide
gaacaacauccuggggcuc

SEQ ID NO: 1101093 - RNA, 19 nt, Artificial Sequence
  Description of Artificial Sequence: Synthetic oligonucleotide
gacaggcguuggcagccca

SEQ ID NO: 1101094 - RNA, 19 nt, Artificial Sequence
  Description of Artificial Sequence: Synthetic oligonucleotide
  modified_base (15)..(15): a, c, u, g, unknown or other
gagugguuucagggnuccc

SEQ ID NO: 1101095 - RNA, 19 nt, Artificial Sequence
  Description of Artificial Sequence: Synthetic oligonucleotide
cccauaaggagggaaacaa

SEQ ID NO: 1101096 - RNA, 19 nt, Artificial Sequence
  Description of Artificial Sequence: Synthetic oligonucleotide
cgaacaucacagccagcgg

SEQ ID NO: 1101097 - RNA, 19 nt, Artificial Sequence
  Description of Artificial Sequence: Synthetic oligonucleotide
aguggcccgacaacacccu

SEQ ID NO: 1101098 - RNA, 19 nt, Artificial Sequence
  Description of Artificial Sequence: Synthetic oligonucleotide
ccgaaaguggcccgacaac

SEQ ID NO: 1101099 - RNA, 19 nt, Artificial Sequence
  Description of Artificial Sequence: Synthetic oligonucleotide
cagcgggccgaaagugaug

SEQ ID NO: 1101100 - RNA, 19 nt, Artificial Sequence
  Description of Artificial Sequence: Synthetic oligonucleotide
cugggcagacugccugcug

SEQ ID NO: 1101101 - RNA, 19 nt, Artificial Sequence
  Description of Artificial Sequence: Synthetic oligonucleotide
ccaagauaaucccaacacu

SEQ ID NO: 1101102 - RNA, 19 nt, Artificial Sequence
  Description of Artificial Sequence: Synthetic oligonucleotide
cgggccgaaagugaugagg

SEQ ID NO: 1101103 - RNA, 19 nt, Artificial Sequence
  Description of Artificial Sequence: Synthetic oligonucleotide
ggcagaaagagcagcgugu

SEQ ID NO: 1101104 - RNA, 19 nt, Artificial Sequence
  Description of Artificial Sequence: Synthetic oligonucleotide
cauccuggggcuccaagau

SEQ ID NO: 1101105 - RNA, 19 nt, Artificial Sequence
  Description of Artificial Sequence: Synthetic oligonucleotide
uccggcccgugcacagcca

SEQ ID NO: 1101106 - RNA, 19 nt, Artificial Sequence
  Description of Artificial Sequence: Synthetic oligonucleotide
agacacagcccaaggugua

SEQ ID NO: 1101107 - RNA, 19 nt, Artificial Sequence
  Description of Artificial Sequence: Synthetic oligonucleotide
gacaaggcccaggcuuguc

SEQ ID NO: 1101108 - RNA, 19 nt, Artificial Sequence
  Description of Artificial Sequence: Synthetic oligonucleotide
gugcguggccaggaugcug

SEQ ID NO: 1101109 - RNA, 19 nt, Artificial Sequence
  Description of Artificial Sequence: Synthetic oligonucleotide
gcguucuguuuagaacaag

SEQ ID NO: 1101110 - RNA, 19 nt, Artificial Sequence
  Description of Artificial Sequence: Synthetic oligonucleotide
acacccucuaguggagauu

SEQ ID NO: 1101111 - RNA, 19 nt, Artificial Sequence
  Description of Artificial Sequence: Synthetic oligonucleotide
cgaaaguggcccgacaaca

SEQ ID NO: 1101112 - RNA, 19 nt, Artificial Sequence
  Description of Artificial Sequence: Synthetic oligonucleotide
cugcggaacugccucucaa

SEQ ID NO: 1101113 - RNA, 19 nt, Artificial Sequence
  Description of Artificial Sequence: Synthetic oligonucleotide
ccucuggagaucauauaua

SEQ ID NO: 1101114 - RNA, 19 nt, Artificial Sequence
  Description of Artificial Sequence: Synthetic oligonucleotide
gaccaaauuuccggcccgu

SEQ ID NO: 1101115 - RNA, 19 nt, Artificial Sequence
  Description of Artificial Sequence: Synthetic oligonucleotide
cccaacacuuaaggacagg

SEQ ID NO: 1101116 - RNA, 19 nt, Artificial Sequence
  Description of Artificial Sequence: Synthetic oligonucleotide
cccgugcacagccaggaca

SEQ ID NO: 1101117 - RNA, 19 nt, Artificial Sequence
  Description of Artificial Sequence: Synthetic oligonucleotide
guguaccccuucucagucu

SEQ ID NO: 1101118 - RNA, 19 nt, Artificial Sequence
  Description of Artificial Sequence: Synthetic oligonucleotide
cgaacaacauccuggggcu

SEQ ID NO: 1101119 - RNA, 19 nt, Artificial Sequence
  Description of Artificial Sequence: Synthetic oligonucleotide
aggagacaugaaggacaga

SEQ ID NO: 1101120 - RNA, 19 nt, Artificial Sequence
  Description of Artificial Sequence: Synthetic oligonucleotide
cccgacaacacccucuagu

SEQ ID NO: 1101121 - RNA, 19 nt, Artificial Sequence
  Description of Artificial Sequence: Synthetic oligonucleotide
gcugagcacccacccuggc

SEQ ID NO: 1101122 - RNA, 19 nt, Artificial Sequence
  Description of Artificial Sequence: Synthetic oligonucleotide
ccagcgugacgaugccggc

SEQ ID NO: 1101123 - RNA, 19 nt, Artificial Sequence
  Description of Artificial Sequence: Synthetic oligonucleotide
guuucaggguggacaggua

SEQ ID NO: 1101124 - RNA, 19 nt, Artificial Sequence
  Description of Artificial Sequence: Synthetic oligonucleotide
ggcguucuguuuagaacaa

SEQ ID NO: 1101125 - RNA, 19 nt, Artificial Sequence
  Description of Artificial Sequence: Synthetic oligonucleotide
acaggcguuggcagcccau

SEQ ID NO: 1101126 - RNA, 19 nt, Artificial Sequence
  Description of Artificial Sequence: Synthetic oligonucleotide
gcagggugagcugacauuu

SEQ ID NO: 1101127 - RNA, 19 nt, Artificial Sequence
  Description of Artificial Sequence: Synthetic oligonucleotide
ggcguuggcagcccaugcu

SEQ ID NO: 1101128 - RNA, 19 nt, Artificial Sequence
  Description of Artificial Sequence: Synthetic oligonucleotide
ccuaugugccaagguaaca

SEQ ID NO: 1101129 - RNA, 19 nt, Artificial Sequence
  Description of Artificial Sequence: Synthetic oligonucleotide
ccccauaaggagggaaaca

SEQ ID NO: 1101130 - RNA, 19 nt, Artificial Sequence
  Description of Artificial Sequence: Synthetic oligonucleotide
gcgggccgaaagugaugag

SEQ ID NO: 1101131 - RNA, 19 nt, Artificial Sequence
  Description of Artificial Sequence: Synthetic oligonucleotide
gcagcguguuguagagcac

SEQ ID NO: 1101132 - RNA, 19 nt, Artificial Sequence
  Description of Artificial Sequence: Synthetic oligonucleotide
caggaccacccugggaucu

SEQ ID NO: 1101133 - RNA, 19 nt, Artificial Sequence
  Description of Artificial Sequence: Synthetic oligonucleotide
gcuuaacucaagguucguu

SEQ ID NO: 1101134 - RNA, 19 nt, Artificial Sequence
  Description of Artificial Sequence: Synthetic oligonucleotide
cgugacgaugccggccucc

SEQ ID NO: 1101135 - RNA, 19 nt, Artificial Sequence
  Description of Artificial Sequence: Synthetic oligonucleotide
acccucuaguggagauuau

SEQ ID NO: 1101136 - RNA, 19 nt, Artificial Sequence
  Description of Artificial Sequence: Synthetic oligonucleotide
ccgaucagggaggcagcug

SEQ ID NO: 1101137 - RNA, 19 nt, Artificial Sequence
  Description of Artificial Sequence: Synthetic oligonucleotide
cccucuaguggagauuaua

SEQ ID NO: 1101138 - RNA, 19 nt, Artificial Sequence
  Description of Artificial Sequence: Synthetic oligonucleotide
ggcuguuaaugagggacuu

SEQ ID NO: 1101139 - RNA, 19 nt, Artificial Sequence
  Description of Artificial Sequence: Synthetic oligonucleotide
ggccgaaagugaugaggau

SEQ ID NO: 1101140 - RNA, 19 nt, Artificial Sequence
  Description of Artificial Sequence: Synthetic oligonucleotide
  modified_base (3)..(3): a, c, u, g, unknown or other
ggnuccccauaaggaggga

SEQ ID NO: 1101141 - RNA, 19 nt, Artificial Sequence
  Description of Artificial Sequence: Synthetic oligonucleotide
cugaaccgcccaccaccua

SEQ ID NO: 1101142 - RNA, 19 nt, Artificial Sequence
  Description of Artificial Sequence: Synthetic oligonucleotide
ccauccgaaaguggcccga

SEQ ID NO: 1101143 - RNA, 19 nt, Artificial Sequence
  Description of Artificial Sequence: Synthetic oligonucleotide
guaccccuucucagucucu

SEQ ID NO: 1101144 - RNA, 19 nt, Artificial Sequence
  Description of Artificial Sequence: Synthetic oligonucleotide
gcuguuaaugagggacuuu

SEQ ID NO: 1101145 - RNA, 19 nt, Artificial Sequence
  Description of Artificial Sequence: Synthetic oligonucleotide
ccagcgggccgaaagugau

SEQ ID NO: 1101146 - RNA, 19 nt, Artificial Sequence
  Description of Artificial Sequence: Synthetic oligonucleotide
gccaaggaagugacucagu

SEQ ID NO: 1101147 - RNA, 19 nt, Artificial Sequence
  Description of Artificial Sequence: Synthetic oligonucleotide
gggagccacauggcuguua

SEQ ID NO: 1101148 - RNA, 19 nt, Artificial Sequence
  Description of Artificial Sequence: Synthetic oligonucleotide
gcgugacgaugccggccuc

SEQ ID NO: 1101149 - RNA, 19 nt, Artificial Sequence
  Description of Artificial Sequence: Synthetic oligonucleotide
cgguucugaugagguuagc

SEQ ID NO: 1101150 - RNA, 19 nt, Artificial Sequence
  Description of Artificial Sequence: Synthetic oligonucleotide
cacagccagcgggccgaaa

SEQ ID NO: 1101151 - RNA, 19 nt, Artificial Sequence
  Description of Artificial Sequence: Synthetic oligonucleotide
aauucguacauucugaugc

SEQ ID NO: 1101152 - RNA, 19 nt, Artificial Sequence
  Description of Artificial Sequence: Synthetic oligonucleotide
caugauuuaagccaugggg

SEQ ID NO: 1101153 - RNA, 19 nt, Artificial Sequence
  Description of Artificial Sequence: Synthetic oligonucleotide
uggguuaagaguaacagac

SEQ ID NO: 1101154 - RNA, 19 nt, Artificial Sequence
  Description of Artificial Sequence: Synthetic oligonucleotide
uuuggggacaggaauaucc

SEQ ID NO: 1101155 - RNA, 19 nt, Artificial Sequence
  Description of Artificial Sequence: Synthetic oligonucleotide
acuaucuuguaccuucacc

SEQ ID NO: 1101156 - RNA, 19 nt, Artificial Sequence
  Description of Artificial Sequence: Synthetic oligonucleotide
gaaucugucacuugguagc

SEQ ID NO: 1101157 - RNA, 19 nt, Artificial Sequence
  Description of Artificial Sequence: Synthetic oligonucleotide
uagaaaguuguccuguugc

SEQ ID NO: 1101158 - RNA, 19 nt, Artificial Sequence
  Description of Artificial Sequence: Synthetic oligonucleotide
aaaguggugcgaaugauuc

SEQ ID NO: 1101159 - RNA, 19 nt, Artificial Sequence
  Description of Artificial Sequence: Synthetic oligonucleotide
cauguuuaagaucugugcc

SEQ ID NO: 1101160 - RNA, 19 nt, Artificial Sequence
  Description of Artificial Sequence: Synthetic oligonucleotide
agauugaacagguuucccg

SEQ ID NO: 1101161 - RNA, 19 nt, Artificial Sequence
  Description of Artificial Sequence: Synthetic oligonucleotide
ugacaggagacuuaagaag

SEQ ID NO: 1101162 - RNA, 19 nt, Artificial Sequence
  Description of Artificial Sequence: Synthetic oligonucleotide
uugauaguccucuaaggcc

SEQ ID NO: 1101163 - RNA, 19 nt, Artificial Sequence
  Description of Artificial Sequence: Synthetic oligonucleotide
ugauaguccucuaaggcca

SEQ ID NO: 1101164 - RNA, 19 nt, Artificial Sequence
  Description of Artificial Sequence: Synthetic oligonucleotide
aagucaggaagccuuuggg

SEQ ID NO: 1101165 - RNA, 19 nt, Artificial Sequence
  Description of Artificial Sequence: Synthetic oligonucleotide
ucaggcguaugaaugaacc

SEQ ID NO: 1101166 - RNA, 19 nt, Artificial Sequence
  Description of Artificial Sequence: Synthetic oligonucleotide
guugauaguccucuaaggc

SEQ ID NO: 1101167 - RNA, 19 nt, Artificial Sequence
  Description of Artificial Sequence: Synthetic oligonucleotide
ucauaugugcucuugguuc

SEQ ID NO: 1101168 - RNA, 19 nt, Artificial Sequence
  Description of Artificial Sequence: Synthetic oligonucleotide
aacggaucaucccagacau

SEQ ID NO: 1101169 - RNA, 19 nt, Artificial Sequence
  Description of Artificial Sequence: Synthetic oligonucleotide
aucuuguaccuucaccugc

SEQ ID NO: 1101170 - RNA, 19 nt, Artificial Sequence
  Description of Artificial Sequence: Synthetic oligonucleotide
uccugaauuccuuaugcag

SEQ ID NO: 1101171 - RNA, 19 nt, Artificial Sequence
  Description of Artificial Sequence: Synthetic oligonucleotide
acuuugauugcucgggagg

SEQ ID NO: 1101172 - RNA, 19 nt, Artificial Sequence
  Description of Artificial Sequence: Synthetic oligonucleotide
aagagcaauagguucugug

SEQ ID NO: 1101173 - RNA, 19 nt, Artificial Sequence
  Description of Artificial Sequence: Synthetic oligonucleotide
aggaauaucccugcguugc

SEQ ID NO: 1101174 - RNA, 19 nt, Artificial Sequence
  Description of Artificial Sequence: Synthetic oligonucleotide
aacccaucuguccugagcu

SEQ ID NO: 1101175 - RNA, 19 nt, Artificial Sequence
  Description of Artificial Sequence: Synthetic oligonucleotide
ugaaugaacccaucugucc

SEQ ID NO: 1101176 - RNA, 19 nt, Artificial Sequence
  Description of Artificial Sequence: Synthetic oligonucleotide
ucuugguuccauuuggugu

SEQ ID NO: 1101177 - RNA, 19 nt, Artificial Sequence
  Description of Artificial Sequence: Synthetic oligonucleotide
aaacggaucaucccagaca

SEQ ID NO: 1101178 - RNA, 19 nt, Artificial Sequence
  Description of Artificial Sequence: Synthetic oligonucleotide
aagaucugugccaaccagc

SEQ ID NO: 1101179 - RNA, 19 nt, Artificial Sequence
  Description of Artificial Sequence: Synthetic oligonucleotide
agccccugaaccuugcugc

SEQ ID NO: 1101180 - RNA, 19 nt, Artificial Sequence
  Description of Artificial Sequence: Synthetic oligonucleotide
aaguggugcgaaugauucc

SEQ ID NO: 1101181 - RNA, 19 nt, Artificial Sequence
  Description of Artificial Sequence: Synthetic oligonucleotide
auacaaacggaucauccca

SEQ ID NO: 1101182 - RNA, 19 nt, Artificial Sequence
  Description of Artificial Sequence: Synthetic oligonucleotide
aggauggugaauuaucaga

SEQ ID NO: 1101183 - RNA, 19 nt, Artificial Sequence
  Description of Artificial Sequence: Synthetic oligonucleotide
agagcaauagguucugugu

SEQ ID NO: 1101184 - RNA, 19 nt, Artificial Sequence
  Description of Artificial Sequence: Synthetic oligonucleotide
augauuccagagaugaggc

SEQ ID NO: 1101185 - RNA, 19 nt, Artificial Sequence
  Description of Artificial Sequence: Synthetic oligonucleotide
ugcuaguuuguacuggaca

SEQ ID NO: 1101186 - RNA, 19 nt, Artificial Sequence
  Description of Artificial Sequence: Synthetic oligonucleotide
gaagucaggaagccuuugg

SEQ ID NO: 1101187 - RNA, 19 nt, Artificial Sequence
  Description of Artificial Sequence: Synthetic oligonucleotide
uuagaaaguuguccuguug

SEQ ID NO: 1101188 - RNA, 19 nt, Artificial Sequence
  Description of Artificial Sequence: Synthetic oligonucleotide
aaugaacccaucuguccug

SEQ ID NO: 1101189 - RNA, 19 nt, Artificial Sequence
  Description of Artificial Sequence: Synthetic oligonucleotide
uacaaacggaucaucccag

SEQ ID NO: 1101190 - RNA, 19 nt, Artificial Sequence
  Description of Artificial Sequence: Synthetic oligonucleotide
guagggacacuucuugugg

SEQ ID NO: 1101191 - RNA, 19 nt, Artificial Sequence
  Description of Artificial Sequence: Synthetic oligonucleotide
auguuuaagaucugugcca

SEQ ID NO: 1101192 - RNA, 19 nt, Artificial Sequence
  Description of Artificial Sequence: Synthetic oligonucleotide
auucguuuuagaaaguugu

SEQ ID NO: 1101193 - RNA, 19 nt, Artificial Sequence
  Description of Artificial Sequence: Synthetic oligonucleotide
cuggacaaaguccagcccc

SEQ ID NO: 1101194 - RNA, 19 nt, Artificial Sequence
  Description of Artificial Sequence: Synthetic oligonucleotide
cuugccgguuuccauaugg

SEQ ID NO: 1101195 - RNA, 19 nt, Artificial Sequence
  Description of Artificial Sequence: Synthetic oligonucleotide
caggucgacauucagcagg

SEQ ID NO: 1101196 - RNA, 19 nt, Artificial Sequence
  Description of Artificial Sequence: Synthetic oligonucleotide
ucuuguggagaugagcaag

SEQ ID NO: 1101197 - RNA, 19 nt, Artificial Sequence
  Description of Artificial Sequence: Synthetic oligonucleotide
uguugcuccaccuuagaau

SEQ ID NO: 1101198 - RNA, 19 nt, Artificial Sequence
  Description of Artificial Sequence: Synthetic oligonucleotide
uccggggugcuucugacag

SEQ ID NO: 1101199 - RNA, 19 nt, Artificial Sequence
  Description of Artificial Sequence: Synthetic oligonucleotide
aauaucccugcguugcaga

SEQ ID NO: 1101200 - RNA, 19 nt, Artificial Sequence
  Description of Artificial Sequence: Synthetic oligonucleotide
aguagggacacuucuugug

SEQ ID NO: 1101201 - RNA, 19 nt, Artificial Sequence
  Description of Artificial Sequence: Synthetic oligonucleotide
gguuaagaguaacagacac

SEQ ID NO: 1101202 - RNA, 19 nt, Artificial Sequence
  Description of Artificial Sequence: Synthetic oligonucleotide
uccaaaguggugcgaauga

SEQ ID NO: 1101203 - RNA, 19 nt, Artificial Sequence
  Description of Artificial Sequence: Synthetic oligonucleotide
uucuugacuucauaggcuc

SEQ ID NO: 1101204 - RNA, 19 nt, Artificial Sequence
  Description of Artificial Sequence: Synthetic oligonucleotide
uuuaguuguucagaugcca

SEQ ID NO: 1101205 - RNA, 19 nt, Artificial Sequence
  Description of Artificial Sequence: Synthetic oligonucleotide
agaguaacagacacagaac

SEQ ID NO: 1101206 - RNA, 19 nt, Artificial Sequence
  Description of Artificial Sequence: Synthetic oligonucleotide
cuuaagaagggaggguugg

SEQ ID NO: 1101207 - RNA, 19 nt, Artificial Sequence
  Description of Artificial Sequence: Synthetic oligonucleotide
gaggcuacacagcugguug

SEQ ID NO: 1101208 - RNA, 19 nt, Artificial Sequence
  Description of Artificial Sequence: Synthetic oligonucleotide
aaguaucaucuuccagaac

SEQ ID NO: 1101209 - RNA, 19 nt, Artificial Sequence
  Description of Artificial Sequence: Synthetic oligonucleotide
ucuaaggccaucccuuccu

SEQ ID NO: 1101210 - RNA, 19 nt, Artificial Sequence
  Description of Artificial Sequence: Synthetic oligonucleotide
cauucguuuuagaaaguug

SEQ ID NO: 1101211 - RNA, 19 nt, Artificial Sequence
  Description of Artificial Sequence: Synthetic oligonucleotide
ugaaccuugcugcaccugu

SEQ ID NO: 1101212 - RNA, 19 nt, Artificial Sequence
  Description of Artificial Sequence: Synthetic oligonucleotide
gacuucauaggcucuggug

SEQ ID NO: 1101213 - RNA, 19 nt, Artificial Sequence
  Description of Artificial Sequence: Synthetic oligonucleotide
uccuuaugcagcuucaguu

SEQ ID NO: 1101214 - RNA, 19 nt, Artificial Sequence
  Description of Artificial Sequence: Synthetic oligonucleotide
gucgacauucagcaggucc

SEQ ID NO: 1101215 - RNA, 19 nt, Artificial Sequence
  Description of Artificial Sequence: Synthetic oligonucleotide
ucguacauucugaugcagc

SEQ ID NO: 1101216 - RNA, 19 nt, Artificial Sequence
  Description of Artificial Sequence: Synthetic oligonucleotide
ugauuuaagccauggggau

SEQ ID NO: 1101217 - RNA, 19 nt, Artificial Sequence
  Description of Artificial Sequence: Synthetic oligonucleotide
uucaugagggcauucccac

SEQ ID NO: 1101218 - RNA, 19 nt, Artificial Sequence
  Description of Artificial Sequence: Synthetic oligonucleotide
gaggauggugaauuaucag

SEQ ID NO: 1101219 - RNA, 19 nt, Artificial Sequence
  Description of Artificial Sequence: Synthetic oligonucleotide
cuuuaguuguucagaugcc

SEQ ID NO: 1101220 - RNA, 19 nt, Artificial Sequence
  Description of Artificial Sequence: Synthetic oligonucleotide
ugauuggaggcauccagcu

SEQ ID NO: 1101221 - RNA, 19 nt, Artificial Sequence
  Description of Artificial Sequence: Synthetic oligonucleotide
aucaaaccucuuuaguugu

SEQ ID NO: 1101222 - RNA, 19 nt, Artificial Sequence
  Description of Artificial Sequence: Synthetic oligonucleotide
aauuugagaggaggucccg

SEQ ID NO: 1101223 - RNA, 19 nt, Artificial Sequence
  Description of Artificial Sequence: Synthetic oligonucleotide
gguacuaucuuguaccuuc

SEQ ID NO: 1101224 - RNA, 19 nt, Artificial Sequence
  Description of Artificial Sequence: Synthetic oligonucleotide
auuuaagccauggggauga

SEQ ID NO: 1101225 - RNA, 19 nt, Artificial Sequence
  Description of Artificial Sequence: Synthetic oligonucleotide
uaucuuguaccuucaccug

SEQ ID NO: 1101226 - RNA, 19 nt, Artificial Sequence
  Description of Artificial Sequence: Synthetic oligonucleotide
gauaauggcagcauacaaa

SEQ ID NO: 1101227 - RNA, 19 nt, Artificial Sequence
  Description of Artificial Sequence: Synthetic oligonucleotide
ugauaccacugcaugguac

SEQ ID NO: 1101228 - RNA, 19 nt, Artificial Sequence
  Description of Artificial Sequence: Synthetic oligonucleotide
cagaacgcccgccagauug

SEQ ID NO: 1101229 - RNA, 19 nt, Artificial Sequence
  Description of Artificial Sequence: Synthetic oligonucleotide
uggagaucuggcucacugg

SEQ ID NO: 1101230 - RNA, 19 nt, Artificial Sequence
  Description of Artificial Sequence: Synthetic oligonucleotide
uuugagaggaggucccgca

SEQ ID NO: 1101231 - RNA, 19 nt, Artificial Sequence
  Description of Artificial Sequence: Synthetic oligonucleotide
auaucccugcguugcagac

SEQ ID NO: 1101232 - RNA, 19 nt, Artificial Sequence
  Description of Artificial Sequence: Synthetic oligonucleotide
uucaguuuugaaccugcaa

SEQ ID NO: 1101233 - RNA, 19 nt, Artificial Sequence
  Description of Artificial Sequence: Synthetic oligonucleotide
ugcugggacucauaugugc

SEQ ID NO: 1101234 - RNA, 19 nt, Artificial Sequence
  Description of Artificial Sequence: Synthetic oligonucleotide
uucguuuuagaaaguuguc

SEQ ID NO: 1101235 - RNA, 19 nt, Artificial Sequence
  Description of Artificial Sequence: Synthetic oligonucleotide
uccuguaaguccugaauuc

SEQ ID NO: 1101236 - RNA, 19 nt, Artificial Sequence
  Description of Artificial Sequence: Synthetic oligonucleotide
accacugcaugguacuauc

SEQ ID NO: 1101237 - RNA, 19 nt, Artificial Sequence
  Description of Artificial Sequence: Synthetic oligonucleotide
aguccucuaaggccauccc

SEQ ID NO: 1101238 - RNA, 19 nt, Artificial Sequence
  Description of Artificial Sequence: Synthetic oligonucleotide
auuugagaggaggucccgc

SEQ ID NO: 1101239 - RNA, 19 nt, Artificial Sequence
  Description of Artificial Sequence: Synthetic oligonucleotide
ggugcgaaugauuccagag

SEQ ID NO: 1101240 - RNA, 19 nt, Artificial Sequence
  Description of Artificial Sequence: Synthetic oligonucleotide
cugcaauggggaaugcugc

SEQ ID NO: 1101241 - RNA, 19 nt, Artificial Sequence
  Description of Artificial Sequence: Synthetic oligonucleotide
aggcuacacagcugguugc

SEQ ID NO: 1101242 - RNA, 19 nt, Artificial Sequence
  Description of Artificial Sequence: Synthetic oligonucleotide
aaggccaucccuuccuuaa

SEQ ID NO: 1101243 - RNA, 19 nt, Artificial Sequence
  Description of Artificial Sequence: Synthetic oligonucleotide
ugaaccugcaaugguggag

SEQ ID NO: 1101244 - RNA, 19 nt, Artificial Sequence
  Description of Artificial Sequence: Synthetic oligonucleotide
aguuguucagaugccaucu

SEQ ID NO: 1101245 - RNA, 19 nt, Artificial Sequence
  Description of Artificial Sequence: Synthetic oligonucleotide
acucauaugugcucuuggu

SEQ ID NO: 1101246 - RNA, 19 nt, Artificial Sequence
  Description of Artificial Sequence: Synthetic oligonucleotide
uacacagcugguugccccg

SEQ ID NO: 1101247 - RNA, 19 nt, Artificial Sequence
  Description of Artificial Sequence: Synthetic oligonucleotide
gcuauggaucuuuucaaag

SEQ ID NO: 1101248 - RNA, 19 nt, Artificial Sequence
  Description of Artificial Sequence: Synthetic oligonucleotide
aacagaguagggacacuuc

SEQ ID NO: 1101249 - RNA, 19 nt, Artificial Sequence
  Description of Artificial Sequence: Synthetic oligonucleotide
ccauguuuaagaucugugc

SEQ ID NO: 1101250 - RNA, 19 nt, Artificial Sequence
  Description of Artificial Sequence: Synthetic oligonucleotide
cacuuuaggguggagcucc

SEQ ID NO: 1101251 - RNA, 19 nt, Artificial Sequence
  Description of Artificial Sequence: Synthetic oligonucleotide
aguggugcgaaugauucca

SEQ ID NO: 1101252 - RNA, 19 nt, Artificial Sequence
  Description of Artificial Sequence: Synthetic oligonucleotide
ggagacuuaagaagggagg

SEQ ID NO: 1101253 - RNA, 19 nt, Artificial Sequence
  Description of Artificial Sequence: Synthetic oligonucleotide
gauuuaagccauggggaug

SEQ ID NO: 1101254 - RNA, 19 nt, Artificial Sequence
  Description of Artificial Sequence: Synthetic oligonucleotide
agguucugugugcugggac

SEQ ID NO: 1101255 - RNA, 19 nt, Artificial Sequence
  Description of Artificial Sequence: Synthetic oligonucleotide
caccaauucguacauucug

SEQ ID NO: 1101256 - RNA, 19 nt, Artificial Sequence
  Description of Artificial Sequence: Synthetic oligonucleotide
uggauaauggcagcauaca

SEQ ID NO: 1101257 - RNA, 19 nt, Artificial Sequence
  Description of Artificial Sequence: Synthetic oligonucleotide
caauucguacauucugaug

SEQ ID NO: 1101258 - RNA, 19 nt, Artificial Sequence
  Description of Artificial Sequence: Synthetic oligonucleotide
aggagacuuaagaagggag

SEQ ID NO: 1101259 - RNA, 19 nt, Artificial Sequence
  Description of Artificial Sequence: Synthetic oligonucleotide
auuuggcagaagcauccug

SEQ ID NO: 1101260 - RNA, 19 nt, Artificial Sequence
  Description of Artificial Sequence: Synthetic oligonucleotide
auucguacauucugaugca

SEQ ID NO: 1101261 - RNA, 19 nt, Artificial Sequence
  Description of Artificial Sequence: Synthetic oligonucleotide
aggcguaugaaugaaccca

SEQ ID NO: 1101262 - RNA, 19 nt, Artificial Sequence
  Description of Artificial Sequence: Synthetic oligonucleotide
aaccuugcugcaccuguga

SEQ ID NO: 1101263 - RNA, 19 nt, Artificial Sequence
  Description of Artificial Sequence: Synthetic oligonucleotide
acauucagcagguccuugu

SEQ ID NO: 1101264 - RNA, 19 nt, Artificial Sequence
  Description of Artificial Sequence: Synthetic oligonucleotide
uuaggguggagcucccaga

SEQ ID NO: 1101265 - RNA, 19 nt, Artificial Sequence
  Description of Artificial Sequence: Synthetic oligonucleotide
agcauacaaacggaucauc

SEQ ID NO: 1101266 - RNA, 19 nt, Artificial Sequence
  Description of Artificial Sequence: Synthetic oligonucleotide
gauuccagagaugaggcua

SEQ ID NO: 1101267 - RNA, 19 nt, Artificial Sequence
  Description of Artificial Sequence: Synthetic oligonucleotide
ucaucccagacauucguuu

SEQ ID NO: 1101268 - RNA, 19 nt, Artificial Sequence
  Description of Artificial Sequence: Synthetic oligonucleotide
agauaccagaugccaccac

SEQ ID NO: 1101269 - RNA, 19 nt, Artificial Sequence
  Description of Artificial Sequence: Synthetic oligonucleotide
uccguugauaguccucuaa

SEQ ID NO: 1101270 - RNA, 19 nt, Artificial Sequence
  Description of Artificial Sequence: Synthetic oligonucleotide
cucgggaggacagaagagc

SEQ ID NO: 1101271 - RNA, 19 nt, Artificial Sequence
  Description of Artificial Sequence: Synthetic oligonucleotide
uucaggcguaugaaugaac

SEQ ID NO: 1101272 - RNA, 19 nt, Artificial Sequence
  Description of Artificial Sequence: Synthetic oligonucleotide
caggcguaugaaugaaccc

SEQ ID NO: 1101273 - RNA, 19 nt, Artificial Sequence
  Description of Artificial Sequence: Synthetic oligonucleotide
auugaacagguuucccgga

SEQ ID NO: 1101274 - RNA, 19 nt, Artificial Sequence
  Description of Artificial Sequence: Synthetic oligonucleotide
uaguuguucagaugccauc

SEQ ID NO: 1101275 - RNA, 19 nt, Artificial Sequence
  Description of Artificial Sequence: Synthetic oligonucleotide
ugcuucaugagggcauucc

SEQ ID NO: 1101276 - RNA, 19 nt, Artificial Sequence
  Description of Artificial Sequence: Synthetic oligonucleotide
gauaccagaugccaccacu

SEQ ID NO: 1101277 - RNA, 19 nt, Artificial Sequence
  Description of Artificial Sequence: Synthetic oligonucleotide
caaacggaucaucccagac

SEQ ID NO: 1101278 - RNA, 19 nt, Artificial Sequence
  Description of Artificial Sequence: Synthetic oligonucleotide
ugaagcagauccagaggau

SEQ ID NO: 1101279 - RNA, 19 nt, Artificial Sequence
  Description of Artificial Sequence: Synthetic oligonucleotide
acagguuucccggagagua

SEQ ID NO: 1101280 - RNA, 19 nt, Artificial Sequence
  Description of Artificial Sequence: Synthetic oligonucleotide
uugcaucuuggcccgggcc

SEQ ID NO: 1101281 - RNA, 19 nt, Artificial Sequence
  Description of Artificial Sequence: Synthetic oligonucleotide
uuucccggagaguaggcua

SEQ ID NO: 1101282 - RNA, 19 nt, Artificial Sequence
  Description of Artificial Sequence: Synthetic oligonucleotide
caaggaugaggucucccac

SEQ ID NO: 1101283 - RNA, 19 nt, Artificial Sequence
  Description of Artificial Sequence: Synthetic oligonucleotide
ucccacuuuaggguggagc

SEQ ID NO: 1101284 - RNA, 19 nt, Artificial Sequence
  Description of Artificial Sequence: Synthetic oligonucleotide
ugggauaaccacucuccaa

SEQ ID NO: 1101285 - RNA, 19 nt, Artificial Sequence
  Description of Artificial Sequence: Synthetic oligonucleotide
ggcagaagcauccugaagu

SEQ ID NO: 1101286 - RNA, 19 nt, Artificial Sequence
  Description of Artificial Sequence: Synthetic oligonucleotide
uucguacauucugaugcag

SEQ ID NO: 1101287 - RNA, 19 nt, Artificial Sequence
  Description of Artificial Sequence: Synthetic oligonucleotide
ccagauaccagaugccacc

SEQ ID NO: 1101288 - RNA, 19 nt, Artificial Sequence
  Description of Artificial Sequence: Synthetic oligonucleotide
uggggaugagccucuugcc

SEQ ID NO: 1101289 - RNA, 19 nt, Artificial Sequence
  Description of Artificial Sequence: Synthetic oligonucleotide
guggguuaagaguaacaga

SEQ ID NO: 1101290 - RNA, 19 nt, Artificial Sequence
  Description of Artificial Sequence: Synthetic oligonucleotide
ucccagacauucguuuuag

SEQ ID NO: 1101291 - RNA, 19 nt, Artificial Sequence
  Description of Artificial Sequence: Synthetic oligonucleotide
ggguggagcucccagauac

SEQ ID NO: 1101292 - RNA, 19 nt, Artificial Sequence
  Description of Artificial Sequence: Synthetic oligonucleotide
aucccugcguugcagacau

SEQ ID NO: 1101293 - RNA, 19 nt, Artificial Sequence
  Description of Artificial Sequence: Synthetic oligonucleotide
guagccaagcauccguuga

SEQ ID NO: 1101294 - RNA, 19 nt, Artificial Sequence
  Description of Artificial Sequence: Synthetic oligonucleotide
gggauaaccacucuccaaa

SEQ ID NO: 1101295 - RNA, 19 nt, Artificial Sequence
  Description of Artificial Sequence: Synthetic oligonucleotide
ugcuccaccuuagaaucug

SEQ ID NO: 1101296 - RNA, 19 nt, Artificial Sequence
  Description of Artificial Sequence: Synthetic oligonucleotide
agaacuggaccugguacug

SEQ ID NO: 1101297 - RNA, 19 nt, Artificial Sequence
  Description of Artificial Sequence: Synthetic oligonucleotide
agacacagaacgcccgcca

SEQ ID NO: 1101298 - RNA, 19 nt, Artificial Sequence
  Description of Artificial Sequence: Synthetic oligonucleotide
ccaccuuagaaucugucac

SEQ ID NO: 1101299 - RNA, 19 nt, Artificial Sequence
  Description of Artificial Sequence: Synthetic oligonucleotide
gccaggucgacauucagca

SEQ ID NO: 1101300 - RNA, 19 nt, Artificial Sequence
  Description of Artificial Sequence: Synthetic oligonucleotide
agccccuguggguuaagag

SEQ ID NO: 1101301 - RNA, 19 nt, Artificial Sequence
  Description of Artificial Sequence: Synthetic oligonucleotide
gagccccugaaccuugcug

SEQ ID NO: 1101302 - RNA, 19 nt, Artificial Sequence
  Description of Artificial Sequence: Synthetic oligonucleotide
acaaacggaucaucccaga

SEQ ID NO: 1101303 - RNA, 19 nt, Artificial Sequence
  Description of Artificial Sequence: Synthetic oligonucleotide
ggauaaccacucuccaaag

SEQ ID NO: 1101304 - RNA, 19 nt, Artificial Sequence
  Description of Artificial Sequence: Synthetic oligonucleotide
ugggccuggacugugcacu

SEQ ID NO: 1101305 - RNA, 19 nt, Artificial Sequence
  Description of Artificial Sequence: Synthetic oligonucleotide
gauaaccacucuccaaagu

SEQ ID NO: 1101306 - RNA, 19 nt, Artificial Sequence
  Description of Artificial Sequence: Synthetic oligonucleotide
ccaucccuuccuuaaaagc

SEQ ID NO: 1101307 - RNA, 19 nt, Artificial Sequence
  Description of Artificial Sequence: Synthetic oligonucleotide
auaccagaugccaccacug

SEQ ID NO: 1101308 - RNA, 19 nt, Artificial Sequence
  Description of Artificial Sequence: Synthetic oligonucleotide
accagcgccagccaugauu

SEQ ID NO: 1101309 - RNA, 19 nt, Artificial Sequence
  Description of Artificial Sequence: Synthetic oligonucleotide
acauucguuuuagaaaguu

SEQ ID NO: 1101310 - RNA, 19 nt, Artificial Sequence
  Description of Artificial Sequence: Synthetic oligonucleotide
uagccaagcauccguugau

SEQ ID NO: 1101311 - RNA, 19 nt, Artificial Sequence
  Description of Artificial Sequence: Synthetic oligonucleotide
gaucugugccaaccagcgc

SEQ ID NO: 1101312 - RNA, 19 nt, Artificial Sequence
  Description of Artificial Sequence: Synthetic oligonucleotide
cugugggauaaccacucuc

SEQ ID NO: 1101313 - RNA, 19 nt, Artificial Sequence
  Description of Artificial Sequence: Synthetic oligonucleotide
cguugauaguccucuaagg

SEQ ID NO: 1101314 - RNA, 19 nt, Artificial Sequence
  Description of Artificial Sequence: Synthetic oligonucleotide
uucccggagaguaggcuau

SEQ ID NO: 1101315 - RNA, 19 nt, Artificial Sequence
  Description of Artificial Sequence: Synthetic oligonucleotide
ccuucaguuuugaaccugc

SEQ ID NO: 1101316 - RNA, 19 nt, Artificial Sequence
  Description of Artificial Sequence: Synthetic oligonucleotide
gccaugauuuaagccaugg

SEQ ID NO: 1101317 - RNA, 19 nt, Artificial Sequence
  Description of Artificial Sequence: Synthetic oligonucleotide
cugcaaguccaucuuuauc

SEQ ID NO: 1101318 - RNA, 19 nt, Artificial Sequence
  Description of Artificial Sequence: Synthetic oligonucleotide
cagauugaacagguuuccc

SEQ ID NO: 1101319 - RNA, 19 nt, Artificial Sequence
  Description of Artificial Sequence: Synthetic oligonucleotide
uucauggugagaggccacu

SEQ ID NO: 1101320 - RNA, 19 nt, Artificial Sequence
  Description of Artificial Sequence: Synthetic oligonucleotide
uuugauugcucgggaggac

SEQ ID NO: 1101321 - RNA, 19 nt, Artificial Sequence
  Description of Artificial Sequence: Synthetic oligonucleotide
uccguuccucucauucugu

SEQ ID NO: 1101322 - RNA, 19 nt, Artificial Sequence
  Description of Artificial Sequence: Synthetic oligonucleotide
uggugcgaaugauuccaga

SEQ ID NO: 1101323 - RNA, 19 nt, Artificial Sequence
  Description of Artificial Sequence: Synthetic oligonucleotide
ucauaggcucuggugauuu

SEQ ID NO: 1101324 - RNA, 19 nt, Artificial Sequence
  Description of Artificial Sequence: Synthetic oligonucleotide
gacaggaauaucccugcgu

SEQ ID NO: 1101325 - RNA, 19 nt, Artificial Sequence
  Description of Artificial Sequence: Synthetic oligonucleotide
aucaggagcgccagaagga

SEQ ID NO: 1101326 - RNA, 19 nt, Artificial Sequence
  Description of Artificial Sequence: Synthetic oligonucleotide
acacagaacgcccgccaga

SEQ ID NO: 1101327 - RNA, 19 nt, Artificial Sequence
  Description of Artificial Sequence: Synthetic oligonucleotide
agcauccguugauaguccu

SEQ ID NO: 1101328 - RNA, 19 nt, Artificial Sequence
  Description of Artificial Sequence: Synthetic oligonucleotide
ccagaacuggaccugguac

SEQ ID NO: 1101329 - RNA, 19 nt, Artificial Sequence
  Description of Artificial Sequence: Synthetic oligonucleotide
cuugcaucuuggcccgggc

SEQ ID NO: 1101330 - RNA, 19 nt, Artificial Sequence
  Description of Artificial Sequence: Synthetic oligonucleotide
cuucauggugagaggccac

SEQ ID NO: 1101331 - RNA, 19 nt, Artificial Sequence
  Description of Artificial Sequence: Synthetic oligonucleotide
ggauaauggcagcauacaa

SEQ ID NO: 1101332 - RNA, 19 nt, Artificial Sequence
  Description of Artificial Sequence: Synthetic oligonucleotide
ugcaugguacuaucuugua

SEQ ID NO: 1101333 - RNA, 19 nt, Artificial Sequence
  Description of Artificial Sequence: Synthetic oligonucleotide
guaaguccugaauuccuua

SEQ ID NO: 1101334 - RNA, 19 nt, Artificial Sequence
  Description of Artificial Sequence: Synthetic oligonucleotide
ccaugauuuaagccauggg

SEQ ID NO: 1101335 - RNA, 19 nt, Artificial Sequence
  Description of Artificial Sequence: Synthetic oligonucleotide
cugggacucauaugugcuc

SEQ ID NO: 1101336 - RNA, 19 nt, Artificial Sequence
  Description of Artificial Sequence: Synthetic oligonucleotide
auugcucgggaggacagaa

SEQ ID NO: 1101337 - RNA, 19 nt, Artificial Sequence
  Description of Artificial Sequence: Synthetic oligonucleotide
uaucccugcguugcagaca

SEQ ID NO: 1101338 - RNA, 19 nt, Artificial Sequence
  Description of Artificial Sequence: Synthetic oligonucleotide
ugaacccaucuguccugag

SEQ ID NO: 1101339 - RNA, 19 nt, Artificial Sequence
  Description of Artificial Sequence: Synthetic oligonucleotide
uuccucucauucugugcac

SEQ ID NO: 1101340 - RNA, 19 nt, Artificial Sequence
  Description of Artificial Sequence: Synthetic oligonucleotide
ccuguaaguccugaauucc

SEQ ID NO: 1101341 - RNA, 19 nt, Artificial Sequence
  Description of Artificial Sequence: Synthetic oligonucleotide
aguuguccuguugcuccac

SEQ ID NO: 1101342 - RNA, 19 nt, Artificial Sequence
  Description of Artificial Sequence: Synthetic oligonucleotide
ccguugauaguccucuaag

SEQ ID NO: 1101343 - RNA, 19 nt, Artificial Sequence
  Description of Artificial Sequence: Synthetic oligonucleotide
gaaccuugcugcaccugug

SEQ ID NO: 1101344 - RNA, 19 nt, Artificial Sequence
  Description of Artificial Sequence: Synthetic oligonucleotide
aacgcccgccagauugaac

SEQ ID NO: 1101345 - RNA, 19 nt, Artificial Sequence
  Description of Artificial Sequence: Synthetic oligonucleotide
agcgccagaaggaggaagu

SEQ ID NO: 1101346 - RNA, 19 nt, Artificial Sequence
  Description of Artificial Sequence: Synthetic oligonucleotide
acuuuaggguggagcuccc

SEQ ID NO: 1101347 - RNA, 19 nt, Artificial Sequence
  Description of Artificial Sequence: Synthetic oligonucleotide
ccagacauucguuuuagaa

SEQ ID NO: 1101348 - RNA, 19 nt, Artificial Sequence
  Description of Artificial Sequence: Synthetic oligonucleotide
gccaucccuuccuuaaaag

SEQ ID NO: 1101349 - RNA, 19 nt, Artificial Sequence
  Description of Artificial Sequence: Synthetic oligonucleotide
uccccuuguuucacaaauu

SEQ ID NO: 1101350 - RNA, 19 nt, Artificial Sequence
  Description of Artificial Sequence: Synthetic oligonucleotide
cgaaugauuccagagauga

SEQ ID NO: 1101351 - RNA, 19 nt, Artificial Sequence
  Description of Artificial Sequence: Synthetic oligonucleotide
acauucugaugcagccuuc

SEQ ID NO: 1101352 - RNA, 19 nt, Artificial Sequence
  Description of Artificial Sequence: Synthetic oligonucleotide
ccagauugaacagguuucc

SEQ ID NO: 1101353 - RNA, 19 nt, Artificial Sequence
  Description of Artificial Sequence: Synthetic oligonucleotide
ucuugccgguuuccauaug

SEQ ID NO: 1101354 - RNA, 19 nt, Artificial Sequence
  Description of Artificial Sequence: Synthetic oligonucleotide
uuuaagccauggggaugag

SEQ ID NO: 1101355 - RNA, 19 nt, Artificial Sequence
  Description of Artificial Sequence: Synthetic oligonucleotide
gccagauugaacagguuuc

SEQ ID NO: 1101356 - RNA, 19 nt, Artificial Sequence
  Description of Artificial Sequence: Synthetic oligonucleotide
cugcaugguacuaucuugu

SEQ ID NO: 1101357 - RNA, 19 nt, Artificial Sequence
  Description of Artificial Sequence: Synthetic oligonucleotide
gggaaguagucuucuuuga

SEQ ID NO: 1101358 - RNA, 19 nt, Artificial Sequence
  Description of Artificial Sequence: Synthetic oligonucleotide
ccgguuuccauauggccac

SEQ ID NO: 1101359 - RNA, 19 nt, Artificial Sequence
  Description of Artificial Sequence: Synthetic oligonucleotide
augaacccaucuguccuga

SEQ ID NO: 1101360 - RNA, 19 nt, Artificial Sequence
  Description of Artificial Sequence: Synthetic oligonucleotide
auaguccucuaaggccauc

SEQ ID NO: 1101361 - RNA, 19 nt, Artificial Sequence
  Description of Artificial Sequence: Synthetic oligonucleotide
agcgccagccaugauuuaa

SEQ ID NO: 1101362 - RNA, 19 nt, Artificial Sequence
  Description of Artificial Sequence: Synthetic oligonucleotide
uagguucugugugcuggga

SEQ ID NO: 1101363 - RNA, 19 nt, Artificial Sequence
  Description of Artificial Sequence: Synthetic oligonucleotide
gaacagaguagggacacuu

SEQ ID NO: 1101364 - RNA, 19 nt, Artificial Sequence
  Description of Artificial Sequence: Synthetic oligonucleotide
cauaggcucuggugauuuc

SEQ ID NO: 1101365 - RNA, 19 nt, Artificial Sequence
  Description of Artificial Sequence: Synthetic oligonucleotide
agcuggauaauggcagcau

SEQ ID NO: 1101366 - RNA, 19 nt, Artificial Sequence
  Description of Artificial Sequence: Synthetic oligonucleotide
cugcguugcagacauuucu

SEQ ID NO: 1101367 - RNA, 19 nt, Artificial Sequence
  Description of Artificial Sequence: Synthetic oligonucleotide
ggcuauggaucuuuucaaa

SEQ ID NO: 1101368 - RNA, 19 nt, Artificial Sequence
  Description of Artificial Sequence: Synthetic oligonucleotide
gccgguuuccauauggcca

SEQ ID NO: 1101369 - RNA, 19 nt, Artificial Sequence
  Description of Artificial Sequence: Synthetic oligonucleotide
ggccacuggagcuggauaa

SEQ ID NO: 1101370 - RNA, 19 nt, Artificial Sequence
  Description of Artificial Sequence: Synthetic oligonucleotide
guggugcgaaugauuccag

SEQ ID NO: 1101371 - RNA, 19 nt, Artificial Sequence
  Description of Artificial Sequence: Synthetic oligonucleotide
ugccacugucucaggcccu

SEQ ID NO: 1101372 - RNA, 19 nt, Artificial Sequence
  Description of Artificial Sequence: Synthetic oligonucleotide
cauccguugauaguccucu

SEQ ID NO: 1101373 - RNA, 19 nt, Artificial Sequence
  Description of Artificial Sequence: Synthetic oligonucleotide
caccuuagaaucugucacu

SEQ ID NO: 1101374 - RNA, 19 nt, Artificial Sequence
  Description of Artificial Sequence: Synthetic oligonucleotide
gguucugugugcugggacu

SEQ ID NO: 1101375 - RNA, 19 nt, Artificial Sequence
  Description of Artificial Sequence: Synthetic oligonucleotide
ggcuucaauucuggggaag

SEQ ID NO: 1101376 - RNA, 19 nt, Artificial Sequence
  Description of Artificial Sequence: Synthetic oligonucleotide
cuuuggggacaggaauauc

SEQ ID NO: 1101377 - RNA, 19 nt, Artificial Sequence
  Description of Artificial Sequence: Synthetic oligonucleotide
gcuucauggugagaggcca

SEQ ID NO: 1101378 - RNA, 19 nt, Artificial Sequence
  Description of Artificial Sequence: Synthetic oligonucleotide
gauugcucgggaggacaga

SEQ ID NO: 1101379 - RNA, 19 nt, Artificial Sequence
  Description of Artificial Sequence: Synthetic oligonucleotide
cucauaugugcucuugguu

SEQ ID NO: 1101380 - RNA, 19 nt, Artificial Sequence
  Description of Artificial Sequence: Synthetic oligonucleotide
agagggcucgugccuuccu

SEQ ID NO: 1101381 - RNA, 19 nt, Artificial Sequence
  Description of Artificial Sequence: Synthetic oligonucleotide
ggaauaucccugcguugca

SEQ ID NO: 1101382 - RNA, 19 nt, Artificial Sequence
  Description of Artificial Sequence: Synthetic oligonucleotide
ucauggugagaggccacuu

SEQ ID NO: 1101383 - RNA, 19 nt, Artificial Sequence
  Description of Artificial Sequence: Synthetic oligonucleotide
ggucccgcauuuccugcag

SEQ ID NO: 1101384 - RNA, 19 nt, Artificial Sequence
  Description of Artificial Sequence: Synthetic oligonucleotide
ggcuacacagcugguugcc

SEQ ID NO: 1101385 - RNA, 19 nt, Artificial Sequence
  Description of Artificial Sequence: Synthetic oligonucleotide
agaacgcccgccagauuga

SEQ ID NO: 1101386 - RNA, 19 nt, Artificial Sequence
  Description of Artificial Sequence: Synthetic oligonucleotide
ggguuaagaguaacagaca

SEQ ID NO: 1101387 - RNA, 19 nt, Artificial Sequence
  Description of Artificial Sequence: Synthetic oligonucleotide
cuucaggcguaugaaugaa

SEQ ID NO: 1101388 - RNA, 19 nt, Artificial Sequence
  Description of Artificial Sequence: Synthetic oligonucleotide
aggccaucccuuccuuaaa

SEQ ID NO: 1101389 - RNA, 19 nt, Artificial Sequence
  Description of Artificial Sequence: Synthetic oligonucleotide
cugguugccccgggucugg

SEQ ID NO: 1101390 - RNA, 19 nt, Artificial Sequence
  Description of Artificial Sequence: Synthetic oligonucleotide
gcuggauaauggcagcaua

SEQ ID NO: 1101391 - RNA, 19 nt, Artificial Sequence
  Description of Artificial Sequence: Synthetic oligonucleotide
gacauucguuuuagaaagu

SEQ ID NO: 1101392 - RNA, 19 nt, Artificial Sequence
  Description of Artificial Sequence: Synthetic oligonucleotide
cugcaaugguggagaucug

SEQ ID NO: 1101393 - RNA, 19 nt, Artificial Sequence
  Description of Artificial Sequence: Synthetic oligonucleotide
caucuguccugagcuugug

SEQ ID NO: 1101394 - RNA, 19 nt, Artificial Sequence
  Description of Artificial Sequence: Synthetic oligonucleotide
ggcagccaggucgacauuc

SEQ ID NO: 1101395 - RNA, 19 nt, Artificial Sequence
  Description of Artificial Sequence: Synthetic oligonucleotide
aguaggcuauggaucuuuu

SEQ ID NO: 1101396 - RNA, 19 nt, Artificial Sequence
  Description of Artificial Sequence: Synthetic oligonucleotide
cuucaauucuggggaagua

SEQ ID NO: 1101397 - RNA, 19 nt, Artificial Sequence
  Description of Artificial Sequence: Synthetic oligonucleotide
caaccagcgccagccauga

SEQ ID NO: 1101398 - RNA, 19 nt, Artificial Sequence
  Description of Artificial Sequence: Synthetic oligonucleotide
gucacaucugacagaggcu

SEQ ID NO: 1101399 - RNA, 19 nt, Artificial Sequence
  Description of Artificial Sequence: Synthetic oligonucleotide
acucuccaaaguggugcga

SEQ ID NO: 1101400 - RNA, 19 nt, Artificial Sequence
  Description of Artificial Sequence: Synthetic oligonucleotide
ggcucgugccuuccucucc

SEQ ID NO: 1101401 - RNA, 19 nt, Artificial Sequence
  Description of Artificial Sequence: Synthetic oligonucleotide
gcgccagccaugauuuaag

SEQ ID NO: 1101402 - RNA, 19 nt, Artificial Sequence
  Description of Artificial Sequence: Synthetic oligonucleotide
cugauaccacugcauggua

SEQ ID NO: 1101403 - RNA, 19 nt, Artificial Sequence
  Description of Artificial Sequence: Synthetic oligonucleotide
gguuucccggagaguaggc

SEQ ID NO: 1101404 - RNA, 19 nt, Artificial Sequence
  Description of Artificial Sequence: Synthetic oligonucleotide
cuuugaugagaaguaucau

SEQ ID NO: 1101405 - RNA, 19 nt, Artificial Sequence
  Description of Artificial Sequence: Synthetic oligonucleotide
agccaugauuuaagccaug

SEQ ID NO: 1101406 - RNA, 19 nt, Artificial Sequence
  Description of Artificial Sequence: Synthetic oligonucleotide
cucauucugugcaccaauu

SEQ ID NO: 1101407 - RNA, 19 nt, Artificial Sequence
  Description of Artificial Sequence: Synthetic oligonucleotide
ucccggagaguaggcuaug

SEQ ID NO: 1101408 - RNA, 19 nt, Artificial Sequence
  Description of Artificial Sequence: Synthetic oligonucleotide
cccacuuuaggguggagcu

SEQ ID NO: 1101409 - RNA, 19 nt, Artificial Sequence
  Description of Artificial Sequence: Synthetic oligonucleotide
cccaucuguccugagcuug

SEQ ID NO: 1101410 - RNA, 19 nt, Artificial Sequence
  Description of Artificial Sequence: Synthetic oligonucleotide
gcuacacagcugguugccc

SEQ ID NO: 1101411 - RNA, 19 nt, Artificial Sequence
  Description of Artificial Sequence: Synthetic oligonucleotide
gaguaggcuauggaucuuu

SEQ ID NO: 1101412 - RNA, 19 nt, Artificial Sequence
  Description of Artificial Sequence: Synthetic oligonucleotide
aggguggagcucccagaua

SEQ ID NO: 1101413 - RNA, 19 nt, Artificial Sequence
  Description of Artificial Sequence: Synthetic oligonucleotide
cacugcaugguacuaucuu

SEQ ID NO: 1101414 - RNA, 19 nt, Artificial Sequence
  Description of Artificial Sequence: Synthetic oligonucleotide
gguggagcucccagauacc

SEQ ID NO: 1101415 - RNA, 19 nt, Artificial Sequence
  Description of Artificial Sequence: Synthetic oligonucleotide
ccugcguugcagacauuuc

SEQ ID NO: 1101416 - RNA, 19 nt, Artificial Sequence
  Description of Artificial Sequence: Synthetic oligonucleotide
guuucccggagaguaggcu

SEQ ID NO: 1101417 - RNA, 19 nt, Artificial Sequence
  Description of Artificial Sequence: Synthetic oligonucleotide
ccaggucgacauucagcag

SEQ ID NO: 1101418 - RNA, 19 nt, Artificial Sequence
  Description of Artificial Sequence: Synthetic oligonucleotide
gccucagcuugguucucug

SEQ ID NO: 1101419 - RNA, 19 nt, Artificial Sequence
  Description of Artificial Sequence: Synthetic oligonucleotide
cagcuugguucucugcugu

SEQ ID NO: 1101420 - RNA, 19 nt, Artificial Sequence
  Description of Artificial Sequence: Synthetic oligonucleotide
gcccgccagauugaacagg

SEQ ID NO: 1101421 - RNA, 19 nt, Artificial Sequence
  Description of Artificial Sequence: Synthetic oligonucleotide
cuuuaggguggagcuccca

SEQ ID NO: 1101422 - RNA, 19 nt, Artificial Sequence
  Description of Artificial Sequence: Synthetic oligonucleotide
gcuucaauucuggggaagu

SEQ ID NO: 1101423 - RNA, 19 nt, Artificial Sequence
  Description of Artificial Sequence: Synthetic oligonucleotide
gauaguccucuaaggccau

SEQ ID NO: 1101424 - RNA, 19 nt, Artificial Sequence
  Description of Artificial Sequence: Synthetic oligonucleotide
ccucuuuaguuguucagau

SEQ ID NO: 1101425 - RNA, 19 nt, Artificial Sequence
  Description of Artificial Sequence: Synthetic oligonucleotide
gggaggacagaagagcaau

SEQ ID NO: 1101426 - RNA, 19 nt, Artificial Sequence
  Description of Artificial Sequence: Synthetic oligonucleotide
cccggagaguaggcuaugg

SEQ ID NO: 1101427 - RNA, 19 nt, Artificial Sequence
  Description of Artificial Sequence: Synthetic oligonucleotide
gaacgcccgccagauugaa

SEQ ID NO: 1101428 - RNA, 19 nt, Artificial Sequence
  Description of Artificial Sequence: Synthetic oligonucleotide
ccucuugccgguuuccaua

SEQ ID NO: 1101429 - RNA, 19 nt, Artificial Sequence
  Description of Artificial Sequence: Synthetic oligonucleotide
cacagaacgcccgccagau

SEQ ID NO: 1101430 - RNA, 19 nt, Artificial Sequence
  Description of Artificial Sequence: Synthetic oligonucleotide
gcauccguugauaguccuc

SEQ ID NO: 1101431 - RNA, 19 nt, Artificial Sequence
  Description of Artificial Sequence: Synthetic oligonucleotide
ggcguaugaaugaacccau

SEQ ID NO: 1101432 - RNA, 19 nt, Artificial Sequence
  Description of Artificial Sequence: Synthetic oligonucleotide
ccuuaaaagcuggguagaa

SEQ ID NO: 1101433 - RNA, 19 nt, Artificial Sequence
  Description of Artificial Sequence: Synthetic oligonucleotide
ccggagaguaggcuaugga

SEQ ID NO: 1101434 - RNA, 19 nt, Artificial Sequence
  Description of Artificial Sequence: Synthetic oligonucleotide
ccaagcauccguugauagu

SEQ ID NO: 1101435 - RNA, 19 nt, Artificial Sequence
  Description of Artificial Sequence: Synthetic oligonucleotide
gcguaugaaugaacccauc

SEQ ID NO: 1101436 - RNA, 19 nt, Artificial Sequence
  Description of Artificial Sequence: Synthetic oligonucleotide
gggcucgugccuuccucuc

SEQ ID NO: 1101437 - RNA, 19 nt, Artificial Sequence
  Description of Artificial Sequence: Synthetic oligonucleotide
ccacuuuaggguggagcuc

SEQ ID NO: 1101438 - RNA, 19 nt, Artificial Sequence
  Description of Artificial Sequence: Synthetic oligonucleotide
cccgccagauugaacaggu

SEQ ID NO: 1101439 - RNA, 19 nt, Artificial Sequence
  Description of Artificial Sequence: Synthetic oligonucleotide
ccagcgccagccaugauuu

SEQ ID NO: 1101440 - RNA, 19 nt, Artificial Sequence
  Description of Artificial Sequence: Synthetic oligonucleotide
cugucucaggcccuccguu

SEQ ID NO: 1101441 - RNA, 19 nt, Artificial Sequence
  Description of Artificial Sequence: Synthetic oligonucleotide
cagccccuguggguuaaga

SEQ ID NO: 1101442 - RNA, 19 nt, Artificial Sequence
  Description of Artificial Sequence: Synthetic oligonucleotide
gugggagccccugaaccuu

SEQ ID NO: 1101443 - RNA, 19 nt, Artificial Sequence
  Description of Artificial Sequence: Synthetic oligonucleotide
cgccagauugaacagguuu

SEQ ID NO: 1101444 - RNA, 19 nt, Artificial Sequence
  Description of Artificial Sequence: Synthetic oligonucleotide
cugagagggcucgugccuu

SEQ ID NO: 1101445 - RNA, 19 nt, Artificial Sequence
  Description of Artificial Sequence: Synthetic oligonucleotide
ucccugcguugcagacauu

SEQ ID NO: 1101446 - RNA, 19 nt, Artificial Sequence
  Description of Artificial Sequence: Synthetic oligonucleotide
cccuguggguuaagaguaa

SEQ ID NO: 1101447 - RNA, 19 nt, Artificial Sequence
  Description of Artificial Sequence: Synthetic oligonucleotide
ccugaaccuugcugcaccu

SEQ ID NO: 1101448 - RNA, 19 nt, Artificial Sequence
  Description of Artificial Sequence: Synthetic oligonucleotide
ggucgacauucagcagguc

SEQ ID NO: 1101449 - RNA, 19 nt, Artificial Sequence
  Description of Artificial Sequence: Synthetic oligonucleotide
ccgcauuuccugcaggguu

SEQ ID NO: 1101450 - RNA, 19 nt, Artificial Sequence
  Description of Artificial Sequence: Synthetic oligonucleotide
caucucugagagggcucgu

SEQ ID NO: 1101451 - RNA, 19 nt, Artificial Sequence
  Description of Artificial Sequence: Synthetic oligonucleotide
cccugcguugcagacauuu

SEQ ID NO: 1101452 - RNA, 19 nt, Artificial Sequence
  Description of Artificial Sequence: Synthetic oligonucleotide
gccauggggaugagccucu

SEQ ID NO: 1101453 - RNA, 19 nt, Artificial Sequence
  Description of Artificial Sequence: Synthetic oligonucleotide
cagcgccagccaugauuua

SEQ ID NO: 1101454 - RNA, 19 nt, Artificial Sequence
  Description of Artificial Sequence: Synthetic oligonucleotide
gguggagaucuggcucacu

SEQ ID NO: 1101455 - RNA, 19 nt, Artificial Sequence
  Description of Artificial Sequence: Synthetic oligonucleotide
gccacuggagcuggauaau

SEQ ID NO: 1101456 - RNA, 19 nt, Artificial Sequence
  Description of Artificial Sequence: Synthetic oligonucleotide
ggguugguccaggccugaa

SEQ ID NO: 1101457 - RNA, 19 nt, Artificial Sequence
  Description of Artificial Sequence: Synthetic oligonucleotide
gccccgggucuggaaggca

SEQ ID NO: 1101458 - RNA, 19 nt, Artificial Sequence
  Description of Artificial Sequence: Synthetic oligonucleotide
ccgccagauugaacagguu

SEQ ID NO: 1101459 - RNA, 19 nt, Artificial Sequence
  Description of Artificial Sequence: Synthetic oligonucleotide
ccauggggaugagccucuu

SEQ ID NO: 1101460 - RNA, 19 nt, Artificial Sequence
  Description of Artificial Sequence: Synthetic oligonucleotide
aaugaggccaaagucacgc

SEQ ID NO: 1101461 - RNA, 19 nt, Artificial Sequence
  Description of Artificial Sequence: Synthetic oligonucleotide
ucuugguagauaaugaccc

SEQ ID NO: 1101462 - RNA, 19 nt, Artificial Sequence
  Description of Artificial Sequence: Synthetic oligonucleotide
uuucguagaaccaucacug

SEQ ID NO: 1101463 - RNA, 19 nt, Artificial Sequence
  Description of Artificial Sequence: Synthetic oligonucleotide
acuguuaucaaaacgcucc

SEQ ID NO: 1101464 - RNA, 19 nt, Artificial Sequence
  Description of Artificial Sequence: Synthetic oligonucleotide
uuuauguacacuacagugu

SEQ ID NO: 1101465 - RNA, 19 nt, Artificial Sequence
  Description of Artificial Sequence: Synthetic oligonucleotide
uuuacggccagcaaaccag

SEQ ID NO: 1101466 - RNA, 19 nt, Artificial Sequence
  Description of Artificial Sequence: Synthetic oligonucleotide
agauggaacccacauagac

SEQ ID NO: 1101467 - RNA, 19 nt, Artificial Sequence
  Description of Artificial Sequence: Synthetic oligonucleotide
agagagaucacuguuauca

SEQ ID NO: 1101468 - RNA, 19 nt, Artificial Sequence
  Description of Artificial Sequence: Synthetic oligonucleotide
gaucacuguuaucaaaacg

SEQ ID NO: 1101469 - RNA, 19 nt, Artificial Sequence
  Description of Artificial Sequence: Synthetic oligonucleotide
ucuauaauggguugggccu

SEQ ID NO: 1101470 - RNA, 19 nt, Artificial Sequence
  Description of Artificial Sequence: Synthetic oligonucleotide
aacgcuccuggucauacac

SEQ ID NO: 1101471 - RNA, 19 nt, Artificial Sequence
  Description of Artificial Sequence: Synthetic oligonucleotide
cacuuaacaucucuggucg

SEQ ID NO: 1101472 - RNA, 19 nt, Artificial Sequence
  Description of Artificial Sequence: Synthetic oligonucleotide
auaaugacccgguucacag

SEQ ID NO: 1101473 - RNA, 19 nt, Artificial Sequence
  Description of Artificial Sequence: Synthetic oligonucleotide
aaugacccgguucacagca

SEQ ID NO: 1101474 - RNA, 19 nt, Artificial Sequence
  Description of Artificial Sequence: Synthetic oligonucleotide
agaaccaucacuguggacu

SEQ ID NO: 1101475 - RNA, 19 nt, Artificial Sequence
  Description of Artificial Sequence: Synthetic oligonucleotide
guucacuuaacaucucugg

SEQ ID NO: 1101476 - RNA, 19 nt, Artificial Sequence
  Description of Artificial Sequence: Synthetic oligonucleotide
auauucaauaaaaccauag

SEQ ID NO: 1101477 - RNA, 19 nt, Artificial Sequence
  Description of Artificial Sequence: Synthetic oligonucleotide
agcuaaaguacccagcacu

SEQ ID NO: 1101478 - RNA, 19 nt, Artificial Sequence
  Description of Artificial Sequence: Synthetic oligonucleotide
ugugcuugccaguuguggg

SEQ ID NO: 1101479 - RNA, 19 nt, Artificial Sequence
  Description of Artificial Sequence: Synthetic oligonucleotide
gccaaagucacgcagagag

SEQ ID NO: 1101480 - RNA, 19 nt, Artificial Sequence
  Description of Artificial Sequence: Synthetic oligonucleotide
ugggguagagccccuaagg

SEQ ID NO: 1101481 - RNA, 19 nt, Artificial Sequence
  Description of Artificial Sequence: Synthetic oligonucleotide
aaaacgcuccuggucauac

SEQ ID NO: 1101482 - RNA, 19 nt, Artificial Sequence
  Description of Artificial Sequence: Synthetic oligonucleotide
acguagaugcgguugaaag

SEQ ID NO: 1101483 - RNA, 19 nt, Artificial Sequence
  Description of Artificial Sequence: Synthetic oligonucleotide
uacacuacaguguggguug

SEQ ID NO: 1101484 - RNA, 19 nt, Artificial Sequence
  Description of Artificial Sequence: Synthetic oligonucleotide
agcccuagccuccucagcc

SEQ ID NO: 1101485 - RNA, 19 nt, Artificial Sequence
  Description of Artificial Sequence: Synthetic oligonucleotide
gucuauaauggguugggcc

SEQ ID NO: 1101486 - RNA, 19 nt, Artificial Sequence
  Description of Artificial Sequence: Synthetic oligonucleotide
ucucuggucgcucugacuc

SEQ ID NO: 1101487 - RNA, 19 nt, Artificial Sequence
  Description of Artificial Sequence: Synthetic oligonucleotide
uguacaagacuugaucuug

SEQ ID NO: 1101488 - RNA, 19 nt, Artificial Sequence
  Description of Artificial Sequence: Synthetic oligonucleotide
uugauggggccaaagggag

SEQ ID NO: 1101489 - RNA, 19 nt, Artificial Sequence
  Description of Artificial Sequence: Synthetic oligonucleotide
agaucacuguuaucaaaac

SEQ ID NO: 1101490 - RNA, 19 nt, Artificial Sequence
  Description of Artificial Sequence: Synthetic oligonucleotide
auacacuucagccaccacu

SEQ ID NO: 1101491 - RNA, 19 nt, Artificial Sequence
  Description of Artificial Sequence: Synthetic oligonucleotide
uguacagaggccacguaga

SEQ ID NO: 1101492 - RNA, 19 nt, Artificial Sequence
  Description of Artificial Sequence: Synthetic oligonucleotide
gacuugaucuugccaaagg

SEQ ID NO: 1101493 - RNA, 19 nt, Artificial Sequence
  Description of Artificial Sequence: Synthetic oligonucleotide
uucacuuaacaucucuggu

SEQ ID NO: 1101494 - RNA, 19 nt, Artificial Sequence
  Description of Artificial Sequence: Synthetic oligonucleotide
uaggaugggauucaccacu

SEQ ID NO: 1101495 - RNA, 19 nt, Artificial Sequence
  Description of Artificial Sequence: Synthetic oligonucleotide
uugguagauaaugacccgg

SEQ ID NO: 1101496 - RNA, 19 nt, Artificial Sequence
  Description of Artificial Sequence: Synthetic oligonucleotide
ucaucgucgauguccuugg

SEQ ID NO: 1101497 - RNA, 19 nt, Artificial Sequence
  Description of Artificial Sequence: Synthetic oligonucleotide
aauaaggggcaagugcaag

SEQ ID NO: 1101498 - RNA, 19 nt, Artificial Sequence
  Description of Artificial Sequence: Synthetic oligonucleotide
agaaucccaggacauauca

SEQ ID NO: 1101499 - RNA, 19 nt, Artificial Sequence
  Description of Artificial Sequence: Synthetic oligonucleotide
gauggaacccacauagacc

SEQ ID NO: 1101500 - RNA, 19 nt, Artificial Sequence
  Description of Artificial Sequence: Synthetic oligonucleotide
aagagguucauggaagaca

SEQ ID NO: 1101501 - RNA, 19 nt, Artificial Sequence
  Description of Artificial Sequence: Synthetic oligonucleotide
ucuaacagacccagcguug

SEQ ID NO: 1101502 - RNA, 19 nt, Artificial Sequence
  Description of Artificial Sequence: Synthetic oligonucleotide
cuugggcucuaacagaccc

SEQ ID NO: 1101503 - RNA, 19 nt, Artificial Sequence
  Description of Artificial Sequence: Synthetic oligonucleotide
ugccaaaggcuucaaacac

SEQ ID NO: 1101504 - RNA, 19 nt, Artificial Sequence
  Description of Artificial Sequence: Synthetic oligonucleotide
uguccuauguugcuggguc

SEQ ID NO: 1101505 - RNA, 19 nt, Artificial Sequence
  Description of Artificial Sequence: Synthetic oligonucleotide
uagacccggcacaugauag

SEQ ID NO: 1101506 - RNA, 19 nt, Artificial Sequence
  Description of Artificial Sequence: Synthetic oligonucleotide
ucacuguuaucaaaacgcu

SEQ ID NO: 1101507 - RNA, 19 nt, Artificial Sequence
  Description of Artificial Sequence: Synthetic oligonucleotide
guucacagcaccaaauuug

SEQ ID NO: 1101508 - RNA, 19 nt, Artificial Sequence
  Description of Artificial Sequence: Synthetic oligonucleotide
guagauaaugacccgguuc

SEQ ID NO: 1101509 - RNA, 19 nt, Artificial Sequence
  Description of Artificial Sequence: Synthetic oligonucleotide
uugacgaugaucucugcau

SEQ ID NO: 1101510 - RNA, 19 nt, Artificial Sequence
  Description of Artificial Sequence: Synthetic oligonucleotide
acauagacccggcacauga

SEQ ID NO: 1101511 - RNA, 19 nt, Artificial Sequence
  Description of Artificial Sequence: Synthetic oligonucleotide
ggcucuaacagacccagcg

SEQ ID NO: 1101512 - RNA, 19 nt, Artificial Sequence
  Description of Artificial Sequence: Synthetic oligonucleotide
guagcuaaaguacccagca

SEQ ID NO: 1101513 - RNA, 19 nt, Artificial Sequence
  Description of Artificial Sequence: Synthetic oligonucleotide
ucccaggacauaucaaugc

SEQ ID NO: 1101514 - RNA, 19 nt, Artificial Sequence
  Description of Artificial Sequence: Synthetic oligonucleotide
cacaugauagccagugccc

SEQ ID NO: 1101515 - RNA, 19 nt, Artificial Sequence
  Description of Artificial Sequence: Synthetic oligonucleotide
ugagcugccaucgauugca

SEQ ID NO: 1101516 - RNA, 19 nt, Artificial Sequence
  Description of Artificial Sequence: Synthetic oligonucleotide
ugugcuucaugguaacaga

SEQ ID NO: 1101517 - RNA, 19 nt, Artificial Sequence
  Description of Artificial Sequence: Synthetic oligonucleotide
cuugguagauaaugacccg

SEQ ID NO: 1101518 - RNA, 19 nt, Artificial Sequence
  Description of Artificial Sequence: Synthetic oligonucleotide
ugguguagcuaaaguaccc

SEQ ID NO: 1101519 - RNA, 19 nt, Artificial Sequence
  Description of Artificial Sequence: Synthetic oligonucleotide
ucacgcagagagaucacug

SEQ ID NO: 1101520 - RNA, 19 nt, Artificial Sequence
  Description of Artificial Sequence: Synthetic oligonucleotide
cacuuuacggccagcaaac

SEQ ID NO: 1101521 - RNA, 19 nt, Artificial Sequence
  Description of Artificial Sequence: Synthetic oligonucleotide
ugguaacagaaucccagga

SEQ ID NO: 1101522 - RNA, 19 nt, Artificial Sequence
  Description of Artificial Sequence: Synthetic oligonucleotide
ucugaggccauugaaaauu

SEQ ID NO: 1101523 - RNA, 19 nt, Artificial Sequence
  Description of Artificial Sequence: Synthetic oligonucleotide
acuuaacaucucuggucgc

SEQ ID NO: 1101524 - RNA, 19 nt, Artificial Sequence
  Description of Artificial Sequence: Synthetic oligonucleotide
uggucuauaauggguuggg

SEQ ID NO: 1101525 - RNA, 19 nt, Artificial Sequence
  Description of Artificial Sequence: Synthetic oligonucleotide
uguggguugggcagagugc

SEQ ID NO: 1101526 - RNA, 19 nt, Artificial Sequence
  Description of Artificial Sequence: Synthetic oligonucleotide
acggccagcaaaccagcgc

SEQ ID NO: 1101527 - RNA, 19 nt, Artificial Sequence
  Description of Artificial Sequence: Synthetic oligonucleotide
aagcccuagccuccucagc

SEQ ID NO: 1101528 - RNA, 19 nt, Artificial Sequence
  Description of Artificial Sequence: Synthetic oligonucleotide
uguaaucuuggcuguggcu

SEQ ID NO: 1101529 - RNA, 19 nt, Artificial Sequence
  Description of Artificial Sequence: Synthetic oligonucleotide
caguguacaagacuugauc

SEQ ID NO: 1101530 - RNA, 19 nt, Artificial Sequence
  Description of Artificial Sequence: Synthetic oligonucleotide
ugguagauaaugacccggu

SEQ ID NO: 1101531 - RNA, 19 nt, Artificial Sequence
  Description of Artificial Sequence: Synthetic oligonucleotide
agacccggcacaugauagc

SEQ ID NO: 1101532 - RNA, 19 nt, Artificial Sequence
  Description of Artificial Sequence: Synthetic oligonucleotide
uguuucguagaaccaucac

SEQ ID NO: 1101533 - RNA, 19 nt, Artificial Sequence
  Description of Artificial Sequence: Synthetic oligonucleotide
uggacuccuguuuucugag

SEQ ID NO: 1101534 - RNA, 19 nt, Artificial Sequence
  Description of Artificial Sequence: Synthetic oligonucleotide
auaaggggcaagugcaagu

SEQ ID NO: 1101535 - RNA, 19 nt, Artificial Sequence
  Description of Artificial Sequence: Synthetic oligonucleotide
uucugggaccucauacucc

SEQ ID NO: 1101536 - RNA, 19 nt, Artificial Sequence
  Description of Artificial Sequence: Synthetic oligonucleotide
aauggugacuggaauggga

SEQ ID NO: 1101537 - RNA, 19 nt, Artificial Sequence
  Description of Artificial Sequence: Synthetic oligonucleotide
uuuuagggccagcaguauc

SEQ ID NO: 1101538 - RNA, 19 nt, Artificial Sequence
  Description of Artificial Sequence: Synthetic oligonucleotide
ugcuccuguucacuuaaca

SEQ ID NO: 1101539 - RNA, 19 nt, Artificial Sequence
  Description of Artificial Sequence: Synthetic oligonucleotide
uccugguguagcuaaagua

SEQ ID NO: 1101540 - RNA, 19 nt, Artificial Sequence
  Description of Artificial Sequence: Synthetic oligonucleotide
ugugcuccuguucacuuaa

SEQ ID NO: 1101541 - RNA, 19 nt, Artificial Sequence
  Description of Artificial Sequence: Synthetic oligonucleotide
cauguuucguagaaccauc

SEQ ID NO: 1101542 - RNA, 19 nt, Artificial Sequence
  Description of Artificial Sequence: Synthetic oligonucleotide
auguggcgagcacugcugc

SEQ ID NO: 1101543 - RNA, 19 nt, Artificial Sequence
  Description of Artificial Sequence: Synthetic oligonucleotide
guguagcuaaaguacccag

SEQ ID NO: 1101544 - RNA, 19 nt, Artificial Sequence
  Description of Artificial Sequence: Synthetic oligonucleotide
acacuaguccugguguagc

SEQ ID NO: 1101545 - RNA, 19 nt, Artificial Sequence
  Description of Artificial Sequence: Synthetic oligonucleotide
ugggccuguccuauguugc

SEQ ID NO: 1101546 - RNA, 19 nt, Artificial Sequence
  Description of Artificial Sequence: Synthetic oligonucleotide
caaauuugccacacucuuc

SEQ ID NO: 1101547 - RNA, 19 nt, Artificial Sequence
  Description of Artificial Sequence: Synthetic oligonucleotide
uaauggguugggccugucc

SEQ ID NO: 1101548 - RNA, 19 nt, Artificial Sequence
  Description of Artificial Sequence: Synthetic oligonucleotide
ugggcucuaacagacccag

SEQ ID NO: 1101549 - RNA, 19 nt, Artificial Sequence
  Description of Artificial Sequence: Synthetic oligonucleotide
ugggauucaccacucccac

SEQ ID NO: 1101550 - RNA, 19 nt, Artificial Sequence
  Description of Artificial Sequence: Synthetic oligonucleotide
gguaacagaaucccaggac

SEQ ID NO: 1101551 - RNA, 19 nt, Artificial Sequence
  Description of Artificial Sequence: Synthetic oligonucleotide
augaccauguggcgagcac

SEQ ID NO: 1101552 - RNA, 19 nt, Artificial Sequence
  Description of Artificial Sequence: Synthetic oligonucleotide
gguugaaagcccuagccuc

SEQ ID NO: 1101553 - RNA, 19 nt, Artificial Sequence
  Description of Artificial Sequence: Synthetic oligonucleotide
caucgauugcaaaggugag

SEQ ID NO: 1101554 - RNA, 19 nt, Artificial Sequence
  Description of Artificial Sequence: Synthetic oligonucleotide
ugcuggugcgcgauggucu

SEQ ID NO: 1101555 - RNA, 19 nt, Artificial Sequence
  Description of Artificial Sequence: Synthetic oligonucleotide
cugccaucgauugcaaagg

SEQ ID NO: 1101556 - RNA, 19 nt, Artificial Sequence
  Description of Artificial Sequence: Synthetic oligonucleotide
ugacccgguucacagcacc

SEQ ID NO: 1101557 - RNA, 19 nt, Artificial Sequence
  Description of Artificial Sequence: Synthetic oligonucleotide
guguggguugggcagagug

SEQ ID NO: 1101558 - RNA, 19 nt, Artificial Sequence
  Description of Artificial Sequence: Synthetic oligonucleotide
guuucguagaaccaucacu

SEQ ID NO: 1101559 - RNA, 19 nt, Artificial Sequence
  Description of Artificial Sequence: Synthetic oligonucleotide
ucauacacuucagccacca

SEQ ID NO: 1101560 - RNA, 19 nt, Artificial Sequence
  Description of Artificial Sequence: Synthetic oligonucleotide
cucguaguagauggaaccc

SEQ ID NO: 1101561 - RNA, 19 nt, Artificial Sequence
  Description of Artificial Sequence: Synthetic oligonucleotide
uuacggccagcaaaccagc

SEQ ID NO: 1101562 - RNA, 19 nt, Artificial Sequence
  Description of Artificial Sequence: Synthetic oligonucleotide
ugauguacagaggccacgu

SEQ ID NO: 1101563 - RNA, 19 nt, Artificial Sequence
  Description of Artificial Sequence: Synthetic oligonucleotide
uccuguuuucugaguagcu

SEQ ID NO: 1101564 - RNA, 19 nt, Artificial Sequence
  Description of Artificial Sequence: Synthetic oligonucleotide
gcuucaugguaacagaauc

SEQ ID NO: 1101565 - RNA, 19 nt, Artificial Sequence
  Description of Artificial Sequence: Synthetic oligonucleotide
gauaaugacccgguucaca

SEQ ID NO: 1101566 - RNA, 19 nt, Artificial Sequence
  Description of Artificial Sequence: Synthetic oligonucleotide
cugcccaccuugauguucc

SEQ ID NO: 1101567 - RNA, 19 nt, Artificial Sequence
  Description of Artificial Sequence: Synthetic oligonucleotide
cacuguuaucaaaacgcuc

SEQ ID NO: 1101568 - RNA, 19 nt, Artificial Sequence
  Description of Artificial Sequence: Synthetic oligonucleotide
cuguaaucuuggcuguggc

SEQ ID NO: 1101569 - RNA, 19 nt, Artificial Sequence
  Description of Artificial Sequence: Synthetic oligonucleotide
ugcgguugaaagcccuagc

SEQ ID NO: 1101570 - RNA, 19 nt, Artificial Sequence
  Description of Artificial Sequence: Synthetic oligonucleotide
cuaggaugggauucaccac

SEQ ID NO: 1101571 - RNA, 19 nt, Artificial Sequence
  Description of Artificial Sequence: Synthetic oligonucleotide
agaggaaauaaggggcaag

SEQ ID NO: 1101572 - RNA, 19 nt, Artificial Sequence
  Description of Artificial Sequence: Synthetic oligonucleotide
uaaugacccgguucacagc

SEQ ID NO: 1101573 - RNA, 19 nt, Artificial Sequence
  Description of Artificial Sequence: Synthetic oligonucleotide
uacggccagcaaaccagcg

SEQ ID NO: 1101574 - RNA, 19 nt, Artificial Sequence
  Description of Artificial Sequence: Synthetic oligonucleotide
agcaaaccagcgcccauug

SEQ ID NO: 1101575 - RNA, 19 nt, Artificial Sequence
  Description of Artificial Sequence: Synthetic oligonucleotide
uagcuaaaguacccagcac

SEQ ID NO: 1101576 - RNA, 19 nt, Artificial Sequence
  Description of Artificial Sequence: Synthetic oligonucleotide
cauguggcgagcacugcug

SEQ ID NO: 1101577 - RNA, 19 nt, Artificial Sequence
  Description of Artificial Sequence: Synthetic oligonucleotide
uagauggaacccacauaga

SEQ ID NO: 1101578 - RNA, 19 nt, Artificial Sequence
  Description of Artificial Sequence: Synthetic oligonucleotide
gacacuaguccugguguag

SEQ ID NO: 1101579 - RNA, 19 nt, Artificial Sequence
  Description of Artificial Sequence: Synthetic oligonucleotide
ucguaguagauggaaccca

SEQ ID NO: 1101580 - RNA, 19 nt, Artificial Sequence
  Description of Artificial Sequence: Synthetic oligonucleotide
acagaaucccaggacauau

SEQ ID NO: 1101581 - RNA, 19 nt, Artificial Sequence
  Description of Artificial Sequence: Synthetic oligonucleotide
acuuuacggccagcaaacc

SEQ ID NO: 1101582 - RNA, 19 nt, Artificial Sequence
  Description of Artificial Sequence: Synthetic oligonucleotide
gaaagcccuagccuccuca

SEQ ID NO: 1101583 - RNA, 19 nt, Artificial Sequence
  Description of Artificial Sequence: Synthetic oligonucleotide
cucgcccugcuuuucuugg

SEQ ID NO: 1101584 - RNA, 19 nt, Artificial Sequence
  Description of Artificial Sequence: Synthetic oligonucleotide
gauggggccaaagggagca

SEQ ID NO: 1101585 - RNA, 19 nt, Artificial Sequence
  Description of Artificial Sequence: Synthetic oligonucleotide
gucaucgucgauguccuug

SEQ ID NO: 1101586 - RNA, 19 nt, Artificial Sequence
  Description of Artificial Sequence: Synthetic oligonucleotide
aggaaauaaggggcaagug

SEQ ID NO: 1101587 - RNA, 19 nt, Artificial Sequence
  Description of Artificial Sequence: Synthetic oligonucleotide
ggugugacggccuugccca

SEQ ID NO: 1101588 - RNA, 19 nt, Artificial Sequence
  Description of Artificial Sequence: Synthetic oligonucleotide
uugggcucuaacagaccca

SEQ ID NO: 1101589 - RNA, 19 nt, Artificial Sequence
  Description of Artificial Sequence: Synthetic oligonucleotide
ugauggggccaaagggagc

SEQ ID NO: 1101590 - RNA, 19 nt, Artificial Sequence
  Description of Artificial Sequence: Synthetic oligonucleotide
uccuauguugcugggucug

SEQ ID NO: 1101591 - RNA, 19 nt, Artificial Sequence
  Description of Artificial Sequence: Synthetic oligonucleotide
ugcuuccugagcuguaauc

SEQ ID NO: 1101592 - RNA, 19 nt, Artificial Sequence
  Description of Artificial Sequence: Synthetic oligonucleotide
ccaagcaucacugaguuca

SEQ ID NO: 1101593 - RNA, 19 nt, Artificial Sequence
  Description of Artificial Sequence: Synthetic oligonucleotide
gauagccagugcccgcugc

SEQ ID NO: 1101594 - RNA, 19 nt, Artificial Sequence
  Description of Artificial Sequence: Synthetic oligonucleotide
cuccuguuuucugaguagc

SEQ ID NO: 1101595 - RNA, 19 nt, Artificial Sequence
  Description of Artificial Sequence: Synthetic oligonucleotide
agauaaugacccgguucac

SEQ ID NO: 1101596 - RNA, 19 nt, Artificial Sequence
  Description of Artificial Sequence: Synthetic oligonucleotide
ugagucucugaggccauug

SEQ ID NO: 1101597 - RNA, 19 nt, Artificial Sequence
  Description of Artificial Sequence: Synthetic oligonucleotide
guagaaccaucacugugga

SEQ ID NO: 1101598 - RNA, 19 nt, Artificial Sequence
  Description of Artificial Sequence: Synthetic oligonucleotide
gacccggcacaugauagcc

SEQ ID NO: 1101599 - RNA, 19 nt, Artificial Sequence
  Description of Artificial Sequence: Synthetic oligonucleotide
cugauguacagaggccacg

SEQ ID NO: 1101600 - RNA, 19 nt, Artificial Sequence
  Description of Artificial Sequence: Synthetic oligonucleotide
cugaggccauugaaaauuc

SEQ ID NO: 1101601 - RNA, 19 nt, Artificial Sequence
  Description of Artificial Sequence: Synthetic oligonucleotide
ugaccauguggcgagcacu

SEQ ID NO: 1101602 - RNA, 19 nt, Artificial Sequence
  Description of Artificial Sequence: Synthetic oligonucleotide
cuggcgaauggugucuucc

SEQ ID NO: 1101603 - RNA, 19 nt, Artificial Sequence
  Description of Artificial Sequence: Synthetic oligonucleotide
ugccgcugagcugccaucg

SEQ ID NO: 1101604 - RNA, 19 nt, Artificial Sequence
  Description of Artificial Sequence: Synthetic oligonucleotide
agacuugaucuugccaaag

SEQ ID NO: 1101605 - RNA, 19 nt, Artificial Sequence
  Description of Artificial Sequence: Synthetic oligonucleotide
aaacgcuccuggucauaca

SEQ ID NO: 1101606 - RNA, 19 nt, Artificial Sequence
  Description of Artificial Sequence: Synthetic oligonucleotide
cuauaauggguugggccug

SEQ ID NO: 1101607 - RNA, 19 nt, Artificial Sequence
  Description of Artificial Sequence: Synthetic oligonucleotide
auagacccggcacaugaua

SEQ ID NO: 1101608 - RNA, 19 nt, Artificial Sequence
  Description of Artificial Sequence: Synthetic oligonucleotide
agugucagagcuggggaca

SEQ ID NO: 1101609 - RNA, 19 nt, Artificial Sequence
  Description of Artificial Sequence: Synthetic oligonucleotide
aacccacauagacccggca

SEQ ID NO: 1101610 - RNA, 19 nt, Artificial Sequence
  Description of Artificial Sequence: Synthetic oligonucleotide
aucgauugcaaaggugaga

SEQ ID NO: 1101611 - RNA, 19 nt, Artificial Sequence
  Description of Artificial Sequence: Synthetic oligonucleotide
ggaacccacauagacccgg

SEQ ID NO: 1101612 - RNA, 19 nt, Artificial Sequence
  Description of Artificial Sequence: Synthetic oligonucleotide
aguccugguguagcuaaag

SEQ ID NO: 1101613 - RNA, 19 nt, Artificial Sequence
  Description of Artificial Sequence: Synthetic oligonucleotide
cuguuucaccagcacacuc

SEQ ID NO: 1101614 - RNA, 19 nt, Artificial Sequence
  Description of Artificial Sequence: Synthetic oligonucleotide
caccuuuauguacacuaca

SEQ ID NO: 1101615 - RNA, 19 nt, Artificial Sequence
  Description of Artificial Sequence: Synthetic oligonucleotide
cuacaguguggguugggca

SEQ ID NO: 1101616 - RNA, 19 nt, Artificial Sequence
  Description of Artificial Sequence: Synthetic oligonucleotide
uauaauggguugggccugu

SEQ ID NO: 1101617 - RNA, 19 nt, Artificial Sequence
  Description of Artificial Sequence: Synthetic oligonucleotide
ugauagccagugcccgcug

SEQ ID NO: 1101618 - RNA, 19 nt, Artificial Sequence
  Description of Artificial Sequence: Synthetic oligonucleotide
aggaugggauucaccacuc

SEQ ID NO: 1101619 - RNA, 19 nt, Artificial Sequence
  Description of Artificial Sequence: Synthetic oligonucleotide
cugggguagagccccuaag

SEQ ID NO: 1101620 - RNA, 19 nt, Artificial Sequence
  Description of Artificial Sequence: Synthetic oligonucleotide
acauaucaaugcucuugau

SEQ ID NO: 1101621 - RNA, 19 nt, Artificial Sequence
  Description of Artificial Sequence: Synthetic oligonucleotide
gcgauggucuguuucacca

SEQ ID NO: 1101622 - RNA, 19 nt, Artificial Sequence
  Description of Artificial Sequence: Synthetic oligonucleotide
acgacugggccuuuucaua

SEQ ID NO: 1101623 - RNA, 19 nt, Artificial Sequence
  Description of Artificial Sequence: Synthetic oligonucleotide
cagagagguccugauguac

SEQ ID NO: 1101624 - RNA, 19 nt, Artificial Sequence
  Description of Artificial Sequence: Synthetic oligonucleotide
augcgguugaaagcccuag

SEQ ID NO: 1101625 - RNA, 19 nt, Artificial Sequence
  Description of Artificial Sequence: Synthetic oligonucleotide
caccugugaugacuccagg

SEQ ID NO: 1101626 - RNA, 19 nt, Artificial Sequence
  Description of Artificial Sequence: Synthetic oligonucleotide
gggugugacggccuugccc

SEQ ID NO: 1101627 - RNA, 19 nt, Artificial Sequence
  Description of Artificial Sequence: Synthetic oligonucleotide
ucccgggccaguguacaag

SEQ ID NO: 1101628 - RNA, 19 nt, Artificial Sequence
  Description of Artificial Sequence: Synthetic oligonucleotide
ugcccacccucaaguacug

SEQ ID NO: 1101629 - RNA, 19 nt, Artificial Sequence
  Description of Artificial Sequence: Synthetic oligonucleotide
ugcuugccaguuguggggu

SEQ ID NO: 1101630 - RNA, 19 nt, Artificial Sequence
  Description of Artificial Sequence: Synthetic oligonucleotide
uagaaccaucacuguggac

SEQ ID NO: 1101631 - RNA, 19 nt, Artificial Sequence
  Description of Artificial Sequence: Synthetic oligonucleotide
gaacccacauagacccggc

SEQ ID NO: 1101632 - RNA, 19 nt, Artificial Sequence
  Description of Artificial Sequence: Synthetic oligonucleotide
caaagucacgcagagagau

SEQ ID NO: 1101633 - RNA, 19 nt, Artificial Sequence
  Description of Artificial Sequence: Synthetic oligonucleotide
ggcgaauggugucuucccc

SEQ ID NO: 1101634 - RNA, 19 nt, Artificial Sequence
  Description of Artificial Sequence: Synthetic oligonucleotide
cccacccucaaguacuggc

SEQ ID NO: 1101635 - RNA, 19 nt, Artificial Sequence
  Description of Artificial Sequence: Synthetic oligonucleotide
ggcagguguuagcaggggc

SEQ ID NO: 1101636 - RNA, 19 nt, Artificial Sequence
  Description of Artificial Sequence: Synthetic oligonucleotide
ccaggacauaucaaugcuc

SEQ ID NO: 1101637 - RNA, 19 nt, Artificial Sequence
  Description of Artificial Sequence: Synthetic oligonucleotide
agucacgcagagagaucac

SEQ ID NO: 1101638 - RNA, 19 nt, Artificial Sequence
  Description of Artificial Sequence: Synthetic oligonucleotide
aggugagagaggaucucca

SEQ ID NO: 1101639 - RNA, 19 nt, Artificial Sequence
  Description of Artificial Sequence: Synthetic oligonucleotide
agaugcgguugaaagcccu

SEQ ID NO: 1101640 - RNA, 19 nt, Artificial Sequence
  Description of Artificial Sequence: Synthetic oligonucleotide
gguguagcuaaaguaccca

SEQ ID NO: 1101641 - RNA, 19 nt, Artificial Sequence
  Description of Artificial Sequence: Synthetic oligonucleotide
cauacacuucagccaccac

SEQ ID NO: 1101642 - RNA, 19 nt, Artificial Sequence
  Description of Artificial Sequence: Synthetic oligonucleotide
cccggcacaugauagccag

SEQ ID NO: 1101643 - RNA, 19 nt, Artificial Sequence
  Description of Artificial Sequence: Synthetic oligonucleotide
caucgucgauguccuuggg

SEQ ID NO: 1101644 - RNA, 19 nt, Artificial Sequence
  Description of Artificial Sequence: Synthetic oligonucleotide
ggcacaugauagccagugc

SEQ ID NO: 1101645 - RNA, 19 nt, Artificial Sequence
  Description of Artificial Sequence: Synthetic oligonucleotide
agcccuugugcuugccagu

SEQ ID NO: 1101646 - RNA, 19 nt, Artificial Sequence
  Description of Artificial Sequence: Synthetic oligonucleotide
agagguccugauguacaga

SEQ ID NO: 1101647 - RNA, 19 nt, Artificial Sequence
  Description of Artificial Sequence: Synthetic oligonucleotide
ugaaagcccuagccuccuc

SEQ ID NO: 1101648 - RNA, 19 nt, Artificial Sequence
  Description of Artificial Sequence: Synthetic oligonucleotide
gauguacagaggccacgua

SEQ ID NO: 1101649 - RNA, 19 nt, Artificial Sequence
  Description of Artificial Sequence: Synthetic oligonucleotide
aggcgucagggaggcagcc

SEQ ID NO: 1101650 - RNA, 19 nt, Artificial Sequence
  Description of Artificial Sequence: Synthetic oligonucleotide
cuguucacuuaacaucucu

SEQ ID NO: 1101651 - RNA, 19 nt, Artificial Sequence
  Description of Artificial Sequence: Synthetic oligonucleotide
cuuaacaucucuggucgcu

SEQ ID NO: 1101652 - RNA, 19 nt, Artificial Sequence
  Description of Artificial Sequence: Synthetic oligonucleotide
ggucuauaauggguugggc

SEQ ID NO: 1101653 - RNA, 19 nt, Artificial Sequence
  Description of Artificial Sequence: Synthetic oligonucleotide
auaauggguugggccuguc

SEQ ID NO: 1101654 - RNA, 19 nt, Artificial Sequence
  Description of Artificial Sequence: Synthetic oligonucleotide
guacacuacaguguggguu

SEQ ID NO: 1101655 - RNA, 19 nt, Artificial Sequence
  Description of Artificial Sequence: Synthetic oligonucleotide
auggguugggccuguccua

SEQ ID NO: 1101656 - RNA, 19 nt, Artificial Sequence
  Description of Artificial Sequence: Synthetic oligonucleotide
gaucuccaaagcccauugu

SEQ ID NO: 1101657 - RNA, 19 nt, Artificial Sequence
  Description of Artificial Sequence: Synthetic oligonucleotide
gggacacuaguccuggugu

SEQ ID NO: 1101658 - RNA, 19 nt, Artificial Sequence
  Description of Artificial Sequence: Synthetic oligonucleotide
cucuaacagacccagcguu

SEQ ID NO: 1101659 - RNA, 19 nt, Artificial Sequence
  Description of Artificial Sequence: Synthetic oligonucleotide
cacuacaguguggguuggg

SEQ ID NO: 1101660 - RNA, 19 nt, Artificial Sequence
  Description of Artificial Sequence: Synthetic oligonucleotide
acuaguccugguguagcua

SEQ ID NO: 1101661 - RNA, 19 nt, Artificial Sequence
  Description of Artificial Sequence: Synthetic oligonucleotide
cuguuaucaaaacgcuccu

SEQ ID NO: 1101662 - RNA, 19 nt, Artificial Sequence
  Description of Artificial Sequence: Synthetic oligonucleotide
caggcguggcagguguuag

SEQ ID NO: 1101663 - RNA, 19 nt, Artificial Sequence
  Description of Artificial Sequence: Synthetic oligonucleotide
ggugagagaggaucuccaa

SEQ ID NO: 1101664 - RNA, 19 nt, Artificial Sequence
  Description of Artificial Sequence: Synthetic oligonucleotide
augacccgguucacagcac

SEQ ID NO: 1101665 - RNA, 19 nt, Artificial Sequence
  Description of Artificial Sequence: Synthetic oligonucleotide
gcgagcacugcugccagag

SEQ ID NO: 1101666 - RNA, 19 nt, Artificial Sequence
  Description of Artificial Sequence: Synthetic oligonucleotide
cacgcagagagaucacugu

SEQ ID NO: 1101667 - RNA, 19 nt, Artificial Sequence
  Description of Artificial Sequence: Synthetic oligonucleotide
gccaucgauugcaaaggug

SEQ ID NO: 1101668 - RNA, 19 nt, Artificial Sequence
  Description of Artificial Sequence: Synthetic oligonucleotide
gccaccacuuuacggccag

SEQ ID NO: 1101669 - RNA, 19 nt, Artificial Sequence
  Description of Artificial Sequence: Synthetic oligonucleotide
uggggucccgggccagugu

SEQ ID NO: 1101670 - RNA, 19 nt, Artificial Sequence
  Description of Artificial Sequence: Synthetic oligonucleotide
agcugccaucgauugcaaa

SEQ ID NO: 1101671 - RNA, 19 nt, Artificial Sequence
  Description of Artificial Sequence: Synthetic oligonucleotide
ccacuuuacggccagcaaa

SEQ ID NO: 1101672 - RNA, 19 nt, Artificial Sequence
  Description of Artificial Sequence: Synthetic oligonucleotide
ggacgacugggccuuuuca

SEQ ID NO: 1101673 - RNA, 19 nt, Artificial Sequence
  Description of Artificial Sequence: Synthetic oligonucleotide
gaugcgguugaaagcccua

SEQ ID NO: 1101674 - RNA, 19 nt, Artificial Sequence
  Description of Artificial Sequence: Synthetic oligonucleotide
guccaccauguuucguaga

SEQ ID NO: 1101675 - RNA, 19 nt, Artificial Sequence
  Description of Artificial Sequence: Synthetic oligonucleotide
gguucacagcaccaaauuu

SEQ ID NO: 1101676 - RNA, 19 nt, Artificial Sequence
  Description of Artificial Sequence: Synthetic oligonucleotide
cacauagacccggcacaug

SEQ ID NO: 1101677 - RNA, 19 nt, Artificial Sequence
  Description of Artificial Sequence: Synthetic oligonucleotide
caugaccauguggcgagca

SEQ ID NO: 1101678 - RNA, 19 nt, Artificial Sequence
  Description of Artificial Sequence: Synthetic oligonucleotide
uggcuaggaugggauucac

SEQ ID NO: 1101679 - RNA, 19 nt, Artificial Sequence
  Description of Artificial Sequence: Synthetic oligonucleotide
gcguuggcgggcuggcuag

SEQ ID NO: 1101680 - RNA, 19 nt, Artificial Sequence
  Description of Artificial Sequence: Synthetic oligonucleotide
cugggucugcccaccuuga

SEQ ID NO: 1101681 - RNA, 19 nt, Artificial Sequence
  Description of Artificial Sequence: Synthetic oligonucleotide
gcucuugauggggccaaag

SEQ ID NO: 1101682 - RNA, 19 nt, Artificial Sequence
  Description of Artificial Sequence: Synthetic oligonucleotide
cagcucguaguagauggaa

SEQ ID NO: 1101683 - RNA, 19 nt, Artificial Sequence
  Description of Artificial Sequence: Synthetic oligonucleotide
gagguucauggaagacaca

SEQ ID NO: 1101684 - RNA, 19 nt, Artificial Sequence
  Description of Artificial Sequence: Synthetic oligonucleotide
ccucaaguacuggccaccc

SEQ ID NO: 1101685 - RNA, 19 nt, Artificial Sequence
  Description of Artificial Sequence: Synthetic oligonucleotide
uggugcgcgauggucuguu

SEQ ID NO: 1101686 - RNA, 19 nt, Artificial Sequence
  Description of Artificial Sequence: Synthetic oligonucleotide
ggucgcucugacucaguaa

SEQ ID NO: 1101687 - RNA, 19 nt, Artificial Sequence
  Description of Artificial Sequence: Synthetic oligonucleotide
cacuaguccugguguagcu

SEQ ID NO: 1101688 - RNA, 19 nt, Artificial Sequence
  Description of Artificial Sequence: Synthetic oligonucleotide
cagaggaaauaaggggcaa

SEQ ID NO: 1101689 - RNA, 19 nt, Artificial Sequence
  Description of Artificial Sequence: Synthetic oligonucleotide
gucacgcagagagaucacu

SEQ ID NO: 1101690 - RNA, 19 nt, Artificial Sequence
  Description of Artificial Sequence: Synthetic oligonucleotide
caccacucccacagaggga

SEQ ID NO: 1101691 - RNA, 19 nt, Artificial Sequence
  Description of Artificial Sequence: Synthetic oligonucleotide
cccucaaguacuggccacc

SEQ ID NO: 1101692 - RNA, 19 nt, Artificial Sequence
  Description of Artificial Sequence: Synthetic oligonucleotide
gguugggccuguccuaugu

SEQ ID NO: 1101693 - RNA, 19 nt, Artificial Sequence
  Description of Artificial Sequence: Synthetic oligonucleotide
acccgguucacagcaccaa

SEQ ID NO: 1101694 - RNA, 19 nt, Artificial Sequence
  Description of Artificial Sequence: Synthetic oligonucleotide
gcccuugugcuucauggua

SEQ ID NO: 1101695 - RNA, 19 nt, Artificial Sequence
  Description of Artificial Sequence: Synthetic oligonucleotide
ggacacuaguccuggugua

SEQ ID NO: 1101696 - RNA, 19 nt, Artificial Sequence
  Description of Artificial Sequence: Synthetic oligonucleotide
cacguagaugcgguugaaa

SEQ ID NO: 1101697 - RNA, 19 nt, Artificial Sequence
  Description of Artificial Sequence: Synthetic oligonucleotide
ggccaguguacaagacuug

SEQ ID NO: 1101698 - RNA, 19 nt, Artificial Sequence
  Description of Artificial Sequence: Synthetic oligonucleotide
gcguggcagguguuagcag

SEQ ID NO: 1101699 - RNA, 19 nt, Artificial Sequence
  Description of Artificial Sequence: Synthetic oligonucleotide
cggcacaugauagccagug

SEQ ID NO: 1101700 - RNA, 19 nt, Artificial Sequence
  Description of Artificial Sequence: Synthetic oligonucleotide
gcccauugucacugcugcc

SEQ ID NO: 1101701 - RNA, 19 nt, Artificial Sequence
  Description of Artificial Sequence: Synthetic oligonucleotide
acccggcacaugauagcca

SEQ ID NO: 1101702 - RNA, 19 nt, Artificial Sequence
  Description of Artificial Sequence: Synthetic oligonucleotide
cauagacccggcacaugau

SEQ ID NO: 1101703 - RNA, 19 nt, Artificial Sequence
  Description of Artificial Sequence: Synthetic oligonucleotide
gguagauaaugacccgguu

SEQ ID NO: 1101704 - RNA, 19 nt, Artificial Sequence
  Description of Artificial Sequence: Synthetic oligonucleotide
caaaggcuucaaacacacu

SEQ ID NO: 1101705 - RNA, 19 nt, Artificial Sequence
  Description of Artificial Sequence: Synthetic oligonucleotide
gugugacggccuugcccac

SEQ ID NO: 1101706 - RNA, 19 nt, Artificial Sequence
  Description of Artificial Sequence: Synthetic oligonucleotide
agucaucgucgauguccuu

SEQ ID NO: 1101707 - RNA, 19 nt, Artificial Sequence
  Description of Artificial Sequence: Synthetic oligonucleotide
guuggcgggcuggcuagga

SEQ ID NO: 1101708 - RNA, 19 nt, Artificial Sequence
  Description of Artificial Sequence: Synthetic oligonucleotide
gacugggccuuuucauauu

SEQ ID NO: 1101709 - RNA, 19 nt, Artificial Sequence
  Description of Artificial Sequence: Synthetic oligonucleotide
gggccaguguacaagacuu

SEQ ID NO: 1101710 - RNA, 19 nt, Artificial Sequence
  Description of Artificial Sequence: Synthetic oligonucleotide
ccaccauguuucguagaac

SEQ ID NO: 1101711 - RNA, 19 nt, Artificial Sequence
  Description of Artificial Sequence: Synthetic oligonucleotide
gcgggcuggggucacaccu

SEQ ID NO: 1101712 - RNA, 19 nt, Artificial Sequence
  Description of Artificial Sequence: Synthetic oligonucleotide
caaaacgcuccuggucaua

SEQ ID NO: 1101713 - RNA, 19 nt, Artificial Sequence
  Description of Artificial Sequence: Synthetic oligonucleotide
gcccuagccuccucagcca

SEQ ID NO: 1101714 - RNA, 19 nt, Artificial Sequence
  Description of Artificial Sequence: Synthetic oligonucleotide
guugggccuguccuauguu

SEQ ID NO: 1101715 - RNA, 19 nt, Artificial Sequence
  Description of Artificial Sequence: Synthetic oligonucleotide
caaaggccuggcgaauggu

SEQ ID NO: 1101716 - RNA, 19 nt, Artificial Sequence
  Description of Artificial Sequence: Synthetic oligonucleotide
ccauguuucguagaaccau

SEQ ID NO: 1101717 - RNA, 19 nt, Artificial Sequence
  Description of Artificial Sequence: Synthetic oligonucleotide
ccccuaagggcugggccag

SEQ ID NO: 1101718 - RNA, 19 nt, Artificial Sequence
  Description of Artificial Sequence: Synthetic oligonucleotide
gagcaaaggccuggcgaau

SEQ ID NO: 1101719 - RNA, 19 nt, Artificial Sequence
  Description of Artificial Sequence: Synthetic oligonucleotide
ggacuccuguuuucugagu

SEQ ID NO: 1101720 - RNA, 19 nt, Artificial Sequence
  Description of Artificial Sequence: Synthetic oligonucleotide
ggggucccgggccagugua

SEQ ID NO: 1101721 - RNA, 19 nt, Artificial Sequence
  Description of Artificial Sequence: Synthetic oligonucleotide
gcaugaccauguggcgagc

SEQ ID NO: 1101722 - RNA, 19 nt, Artificial Sequence
  Description of Artificial Sequence: Synthetic oligonucleotide
ccaguguacaagacuugau

SEQ ID NO: 1101723 - RNA, 19 nt, Artificial Sequence
  Description of Artificial Sequence: Synthetic oligonucleotide
ccauguggcgagcacugcu

SEQ ID NO: 1101724 - RNA, 19 nt, Artificial Sequence
  Description of Artificial Sequence: Synthetic oligonucleotide
gggccuguccuauguugcu

SEQ ID NO: 1101725 - RNA, 19 nt, Artificial Sequence
  Description of Artificial Sequence: Synthetic oligonucleotide
cugcuuccugagcuguaau

SEQ ID NO: 1101726 - RNA, 19 nt, Artificial Sequence
  Description of Artificial Sequence: Synthetic oligonucleotide
gcaccaaauuugccacacu

SEQ ID NO: 1101727 - RNA, 19 nt, Artificial Sequence
  Description of Artificial Sequence: Synthetic oligonucleotide
cgguugaaagcccuagccu

SEQ ID NO: 1101728 - RNA, 19 nt, Artificial Sequence
  Description of Artificial Sequence: Synthetic oligonucleotide
cccgguucacagcaccaaa

SEQ ID NO: 1101729 - RNA, 19 nt, Artificial Sequence
  Description of Artificial Sequence: Synthetic oligonucleotide
ccgguucacagcaccaaau

SEQ ID NO: 1101730 - RNA, 19 nt, Artificial Sequence
  Description of Artificial Sequence: Synthetic oligonucleotide
gccgcugagcugccaucga

SEQ ID NO: 1101731 - RNA, 19 nt, Artificial Sequence
  Description of Artificial Sequence: Synthetic oligonucleotide
gggucccgggccaguguac

SEQ ID NO: 1101732 - RNA, 19 nt, Artificial Sequence
  Description of Artificial Sequence: Synthetic oligonucleotide
cuggucgcucugacucagu

SEQ ID NO: 1101733 - RNA, 19 nt, Artificial Sequence
  Description of Artificial Sequence: Synthetic oligonucleotide
ggccuggcgaauggugucu

SEQ ID NO: 1101734 - RNA, 19 nt, Artificial Sequence
  Description of Artificial Sequence: Synthetic oligonucleotide
cacccagaucaaagagguu

SEQ ID NO: 1101735 - RNA, 19 nt, Artificial Sequence
  Description of Artificial Sequence: Synthetic oligonucleotide
cguuggcgggcuggcuagg

SEQ ID NO: 1101736 - RNA, 19 nt, Artificial Sequence
  Description of Artificial Sequence: Synthetic oligonucleotide
gcccuugugcuugccaguu

SEQ ID NO: 1101737 - RNA, 19 nt, Artificial Sequence
  Description of Artificial Sequence: Synthetic oligonucleotide
cuggugcgcgauggucugu

SEQ ID NO: 1101738 - RNA, 19 nt, Artificial Sequence
  Description of Artificial Sequence: Synthetic oligonucleotide
ggugcgcgauggucuguuu

SEQ ID NO: 1101739 - RNA, 19 nt, Artificial Sequence
  Description of Artificial Sequence: Synthetic oligonucleotide
ccgcugagcugccaucgau

SEQ ID NO: 1101740 - RNA, 19 nt, Artificial Sequence
  Description of Artificial Sequence: Synthetic oligonucleotide
cugggacgacugggccuuu

SEQ ID NO: 1101741 - RNA, 19 nt, Artificial Sequence
  Description of Artificial Sequence: Synthetic oligonucleotide
uuuaacauauuuuaaagug

SEQ ID NO: 1101742 - RNA, 19 nt, Artificial Sequence
  Description of Artificial Sequence: Synthetic oligonucleotide
uuaucuucuaauaaggaag

SEQ ID NO: 1101743 - RNA, 19 nt, Artificial Sequence
  Description of Artificial Sequence: Synthetic oligonucleotide
uuaacauauuuuaaagugg

SEQ ID NO: 1101744 - RNA, 19 nt, Artificial Sequence
  Description of Artificial Sequence: Synthetic oligonucleotide
gauucuguaaaguauacgc

SEQ ID NO: 1101745 - RNA, 19 nt, Artificial Sequence
  Description of Artificial Sequence: Synthetic oligonucleotide
uaaggaaguaucaaauucg

SEQ ID NO: 1101746 - RNA, 19 nt, Artificial Sequence
  Description of Artificial Sequence: Synthetic oligonucleotide
aauuaagagcuuccggugc

SEQ ID NO: 1101747 - RNA, 19 nt, Artificial Sequence
  Description of Artificial Sequence: Synthetic oligonucleotide
uguuugaaaacccagugcc

SEQ ID NO: 1101748 - RNA, 19 nt, Artificial Sequence
  Description of Artificial Sequence: Synthetic oligonucleotide
uuuacaguggucucaaacg

SEQ ID NO: 1101749 - RNA, 19 nt, Artificial Sequence
  Description of Artificial Sequence: Synthetic oligonucleotide
aagaugaauauaucccgcc

SEQ ID NO: 1101750 - RNA, 19 nt, Artificial Sequence
  Description of Artificial Sequence: Synthetic oligonucleotide
ucucccguaauuaagagcu

SEQ ID NO: 1101751 - RNA, 19 nt, Artificial Sequence
  Description of Artificial Sequence: Synthetic oligonucleotide
aaaacauaaccuuccaaga

SEQ ID NO: 1101752 - RNA, 19 nt, Artificial Sequence
  Description of Artificial Sequence: Synthetic oligonucleotide
uucauuauccgacuaagcu

SEQ ID NO: 1101753 - RNA, 19 nt, Artificial Sequence
  Description of Artificial Sequence: Synthetic oligonucleotide
auacacuucaccaaaauuc

SEQ ID NO: 1101754 - RNA, 19 nt, Artificial Sequence
  Description of Artificial Sequence: Synthetic oligonucleotide
ucugcuguuaaauuauucc

SEQ ID NO: 1101755 - RNA, 19 nt, Artificial Sequence
  Description of Artificial Sequence: Synthetic oligonucleotide
cugugguuagcuaauaugg

SEQ ID NO: 1101756 - RNA, 19 nt, Artificial Sequence
  Description of Artificial Sequence: Synthetic oligonucleotide
cauuauccgacuaagcugc

SEQ ID NO: 1101757 - RNA, 19 nt, Artificial Sequence
  Description of Artificial Sequence: Synthetic oligonucleotide
uaucaacuugauuacaaag

SEQ ID NO: 1101758 - RNA, 19 nt, Artificial Sequence
  Description of Artificial Sequence: Synthetic oligonucleotide
uuacaguggucucaaacgg

SEQ ID NO: 1101759 - RNA, 19 nt, Artificial Sequence
  Description of Artificial Sequence: Synthetic oligonucleotide
aacgguaggacucuguggu

SEQ ID NO: 1101760 - RNA, 19 nt, Artificial Sequence
  Description of Artificial Sequence: Synthetic oligonucleotide
uuagcuaauauggccaugg

SEQ ID NO: 1101761 - RNA, 19 nt, Artificial Sequence
  Description of Artificial Sequence: Synthetic oligonucleotide
agugccuucaaaucgguag

SEQ ID NO: 1101762 - RNA, 19 nt, Artificial Sequence
  Description of Artificial Sequence: Synthetic oligonucleotide
caaugaaacaucuucauga

SEQ ID NO: 1101763 - RNA, 19 nt, Artificial Sequence
  Description of Artificial Sequence: Synthetic oligonucleotide
uuuaucaacuugauuacaa

SEQ ID NO: 1101764 - RNA, 19 nt, Artificial Sequence
  Description of Artificial Sequence: Synthetic oligonucleotide
uguuguucugugaaccugg

SEQ ID NO: 1101765 - RNA, 19 nt, Artificial Sequence
  Description of Artificial Sequence: Synthetic oligonucleotide
ucauuauccgacuaagcug

SEQ ID NO: 1101766 - RNA, 19 nt, Artificial Sequence
  Description of Artificial Sequence: Synthetic oligonucleotide
guuacuugcaaacugucug

SEQ ID NO: 1101767 - RNA, 19 nt, Artificial Sequence
  Description of Artificial Sequence: Synthetic oligonucleotide
cucucaagauacaacaugc

SEQ ID NO: 1101768 - RNA, 19 nt, Artificial Sequence
  Description of Artificial Sequence: Synthetic oligonucleotide
cuucuaauaaggaaguauc

SEQ ID NO: 1101769 - RNA, 19 nt, Artificial Sequence
  Description of Artificial Sequence: Synthetic oligonucleotide
aaaguauacgcauauucuu

SEQ ID NO: 1101770 - RNA, 19 nt, Artificial Sequence
  Description of Artificial Sequence: Synthetic oligonucleotide
uguaucucccguaauuaag

SEQ ID NO: 1101771 - RNA, 19 nt, Artificial Sequence
  Description of Artificial Sequence: Synthetic oligonucleotide
aauauaucccgccgucuuc

SEQ ID NO: 1101772 - RNA, 19 nt, Artificial Sequence
  Description of Artificial Sequence: Synthetic oligonucleotide
cugaucaucaaggugagcc

SEQ ID NO: 1101773 - RNA, 19 nt, Artificial Sequence
  Description of Artificial Sequence: Synthetic oligonucleotide
cagaacguuauucucaccc

SEQ ID NO: 1101774 - RNA, 19 nt, Artificial Sequence
  Description of Artificial Sequence: Synthetic oligonucleotide
auuaucuucuaauaaggaa

SEQ ID NO: 1101775 - RNA, 19 nt, Artificial Sequence
  Description of Artificial Sequence: Synthetic oligonucleotide
ucagaagauucuucaaucc

SEQ ID NO: 1101776 - RNA, 19 nt, Artificial Sequence
  Description of Artificial Sequence: Synthetic oligonucleotide
augauugagaauccauuuc

SEQ ID NO: 1101777 - RNA, 19 nt, Artificial Sequence
  Description of Artificial Sequence: Synthetic oligonucleotide
uucuaauaaggaaguauca

SEQ ID NO: 1101778 - RNA, 19 nt, Artificial Sequence
  Description of Artificial Sequence: Synthetic oligonucleotide
aaacgguaggacucugugg

SEQ ID NO: 1101779 - RNA, 19 nt, Artificial Sequence
  Description of Artificial Sequence: Synthetic oligonucleotide
acgccuauaaguuucacga

SEQ ID NO: 1101780 - RNA, 19 nt, Artificial Sequence
  Description of Artificial Sequence: Synthetic oligonucleotide
agaugaauauaucccgccg

SEQ ID NO: 1101781 - RNA, 19 nt, Artificial Sequence
  Description of Artificial Sequence: Synthetic oligonucleotide
uaauuaagagcuuccggug

SEQ ID NO: 1101782 - RNA, 19 nt, Artificial Sequence
  Description of Artificial Sequence: Synthetic oligonucleotide
uucaacguuacuugcaaac

SEQ ID NO: 1101783 - RNA, 19 nt, Artificial Sequence
  Description of Artificial Sequence: Synthetic oligonucleotide
ugguuagcuaauauggcca

SEQ ID NO: 1101784 - RNA, 19 nt, Artificial Sequence
  Description of Artificial Sequence: Synthetic oligonucleotide
uucaaaucgguagagauua

SEQ ID NO: 1101785 - RNA, 19 nt, Artificial Sequence
  Description of Artificial Sequence: Synthetic oligonucleotide
gaaguggugaucuauaagu

SEQ ID NO: 1101786 - RNA, 19 nt, Artificial Sequence
  Description of Artificial Sequence: Synthetic oligonucleotide
gaugccaaagcuccacacg

SEQ ID NO: 1101787 - RNA, 19 nt, Artificial Sequence
  Description of Artificial Sequence: Synthetic oligonucleotide
aaaucgguagagauuauca

SEQ ID NO: 1101788 - RNA, 19 nt, Artificial Sequence
  Description of Artificial Sequence: Synthetic oligonucleotide
agucuucaacguuacuugc

SEQ ID NO: 1101789 - RNA, 19 nt, Artificial Sequence
  Description of Artificial Sequence: Synthetic oligonucleotide
uccacaugaucucauuugc

SEQ ID NO: 1101790 - RNA, 19 nt, Artificial Sequence
  Description of Artificial Sequence: Synthetic oligonucleotide
aacguuauucucacccacc

SEQ ID NO: 1101791 - RNA, 19 nt, Artificial Sequence
  Description of Artificial Sequence: Synthetic oligonucleotide
ugugcacacgccuauaagu

SEQ ID NO: 1101792 - RNA, 19 nt, Artificial Sequence
  Description of Artificial Sequence: Synthetic oligonucleotide
aaacccagugccuucaaau

SEQ ID NO: 1101793 - RNA, 19 nt, Artificial Sequence
  Description of Artificial Sequence: Synthetic oligonucleotide
aucucccguaauuaagagc

SEQ ID NO: 1101794 - RNA, 19 nt, Artificial Sequence
  Description of Artificial Sequence: Synthetic oligonucleotide
gaugcaauauccaaggaaa

SEQ ID NO: 1101795 - RNA, 19 nt, Artificial Sequence
  Description of Artificial Sequence: Synthetic oligonucleotide
ugugguuagcuaauauggc

SEQ ID NO: 1101796 - RNA, 19 nt, Artificial Sequence
  Description of Artificial Sequence: Synthetic oligonucleotide
augaauauaucccgccguc

SEQ ID NO: 1101797 - RNA, 19 nt, Artificial Sequence
  Description of Artificial Sequence: Synthetic oligonucleotide
uucuguaaaguauacgcau

SEQ ID NO: 1101798 - RNA, 19 nt, Artificial Sequence
  Description of Artificial Sequence: Synthetic oligonucleotide
ugggacuaguuccauaaug

SEQ ID NO: 1101799 - RNA, 19 nt, Artificial Sequence
  Description of Artificial Sequence: Synthetic oligonucleotide
uaaauuugccuuuaacaua

SEQ ID NO: 1101800 - RNA, 19 nt, Artificial Sequence
  Description of Artificial Sequence: Synthetic oligonucleotide
uauccuuaggaacaggauu

SEQ ID NO: 1101801 - RNA, 19 nt, Artificial Sequence
  Description of Artificial Sequence: Synthetic oligonucleotide
uuauccuucagugugcccu

SEQ ID NO: 1101802 - RNA, 19 nt, Artificial Sequence
  Description of Artificial Sequence: Synthetic oligonucleotide
aguggugaucuauaaguug

SEQ ID NO: 1101803 - RNA, 19 nt, Artificial Sequence
  Description of Artificial Sequence: Synthetic oligonucleotide
aaguuucacgauauugggg

SEQ ID NO: 1101804 - RNA, 19 nt, Artificial Sequence
  Description of Artificial Sequence: Synthetic oligonucleotide
ucucaagauacaacaugcc

SEQ ID NO: 1101805 - RNA, 19 nt, Artificial Sequence
  Description of Artificial Sequence: Synthetic oligonucleotide
gugguuagcuaauauggcc

SEQ ID NO: 1101806 - RNA, 19 nt, Artificial Sequence
  Description of Artificial Sequence: Synthetic oligonucleotide
aaucgguagagauuaucaa

SEQ ID NO: 1101807 - RNA, 19 nt, Artificial Sequence
  Description of Artificial Sequence: Synthetic oligonucleotide
cucagaagauucuucaauc

SEQ ID NO: 1101808 - RNA, 19 nt, Artificial Sequence
  Description of Artificial Sequence: Synthetic oligonucleotide
uucuugccgagacauuccg

SEQ ID NO: 1101809 - RNA, 19 nt, Artificial Sequence
  Description of Artificial Sequence: Synthetic oligonucleotide
agaugcaauauccaaggaa

SEQ ID NO: 1101810 - RNA, 19 nt, Artificial Sequence
  Description of Artificial Sequence: Synthetic oligonucleotide
guaauuaagagcuuccggu

SEQ ID NO: 1101811 - RNA, 19 nt, Artificial Sequence
  Description of Artificial Sequence: Synthetic oligonucleotide
ugugcugaaucaucagaag

SEQ ID NO: 1101812 - RNA, 19 nt, Artificial Sequence
  Description of Artificial Sequence: Synthetic oligonucleotide
uucagaucauccuuccucu

SEQ ID NO: 1101813 - RNA, 19 nt, Artificial Sequence
  Description of Artificial Sequence: Synthetic oligonucleotide
ugcgccuucauuauccgac

SEQ ID NO: 1101814 - RNA, 19 nt, Artificial Sequence
  Description of Artificial Sequence: Synthetic oligonucleotide
acccagugccuucaaaucg

SEQ ID NO: 1101815 - RNA, 19 nt, Artificial Sequence
  Description of Artificial Sequence: Synthetic oligonucleotide
ucaugauugagaauccauu

SEQ ID NO: 1101816 - RNA, 19 nt, Artificial Sequence
  Description of Artificial Sequence: Synthetic oligonucleotide
acauucgguauccucuuuc

SEQ ID NO: 1101817 - RNA, 19 nt, Artificial Sequence
  Description of Artificial Sequence: Synthetic oligonucleotide
uucagaacguuauucucac

SEQ ID NO: 1101818 - RNA, 19 nt, Artificial Sequence
  Description of Artificial Sequence: Synthetic oligonucleotide
uucgguauccucuuuccac

SEQ ID NO: 1101819 - RNA, 19 nt, Artificial Sequence
  Description of Artificial Sequence: Synthetic oligonucleotide
agauacaacaugccagaug

SEQ ID NO: 1101820 - RNA, 19 nt, Artificial Sequence
  Description of Artificial Sequence: Synthetic oligonucleotide
cucccaaugaaacaucuuc

SEQ ID NO: 1101821 - RNA, 19 nt, Artificial Sequence
  Description of Artificial Sequence: Synthetic oligonucleotide
uauggacaggcuccuaggc

SEQ ID NO: 1101822 - RNA, 19 nt, Artificial Sequence
  Description of Artificial Sequence: Synthetic oligonucleotide
uuaucaacuugauuacaaa

SEQ ID NO: 1101823 - RNA, 19 nt, Artificial Sequence
  Description of Artificial Sequence: Synthetic oligonucleotide
aguuccauaaugauguaga

SEQ ID NO: 1101824 - RNA, 19 nt, Artificial Sequence
  Description of Artificial Sequence: Synthetic oligonucleotide
uaauucaccugcacaguac

SEQ ID NO: 1101825 - RNA, 19 nt, Artificial Sequence
  Description of Artificial Sequence: Synthetic oligonucleotide
gacuaguuccauaaugaug

SEQ ID NO: 1101826 - RNA, 19 nt, Artificial Sequence
  Description of Artificial Sequence: Synthetic oligonucleotide
ucuuugugugcacacgccu

SEQ ID NO: 1101827 - RNA, 19 nt, Artificial Sequence
  Description of Artificial Sequence: Synthetic oligonucleotide
uauacgcauauucuuuauc

SEQ ID NO: 1101828 - RNA, 19 nt, Artificial Sequence
  Description of Artificial Sequence: Synthetic oligonucleotide
aguggaacagacuuucaaa

SEQ ID NO: 1101829 - RNA, 19 nt, Artificial Sequence
  Description of Artificial Sequence: Synthetic oligonucleotide
uaucucccguaauuaagag

SEQ ID NO: 1101830 - RNA, 19 nt, Artificial Sequence
  Description of Artificial Sequence: Synthetic oligonucleotide
uuaggccagaagaugaaua

SEQ ID NO: 1101831 - RNA, 19 nt, Artificial Sequence
  Description of Artificial Sequence: Synthetic oligonucleotide
ugaagcucgcugaaccuug

SEQ ID NO: 1101832 - RNA, 19 nt, Artificial Sequence
  Description of Artificial Sequence: Synthetic oligonucleotide
cagacaguuucuugcagcc

SEQ ID NO: 1101833 - RNA, 19 nt, Artificial Sequence
  Description of Artificial Sequence: Synthetic oligonucleotide
cuuauccuuaggaacagga

SEQ ID NO: 1101834 - RNA, 19 nt, Artificial Sequence
  Description of Artificial Sequence: Synthetic oligonucleotide
aacguuacuugcaaacugu

SEQ ID NO: 1101835 - RNA, 19 nt, Artificial Sequence
  Description of Artificial Sequence: Synthetic oligonucleotide
aaggaaguaucaaauucga

SEQ ID NO: 1101836 - RNA, 19 nt, Artificial Sequence
  Description of Artificial Sequence: Synthetic oligonucleotide
ucgguauccucuuuccacc

SEQ ID NO: 1101837 - RNA, 19 nt, Artificial Sequence
  Description of Artificial Sequence: Synthetic oligonucleotide
auuaagagcuuccggugcu

SEQ ID NO: 1101838 - RNA, 19 nt, Artificial Sequence
  Description of Artificial Sequence: Synthetic oligonucleotide
ugccgagacauuccgaagu

SEQ ID NO: 1101839 - RNA, 19 nt, Artificial Sequence
  Description of Artificial Sequence: Synthetic oligonucleotide
uaucccgccgucuucuugc

SEQ ID NO: 1101840 - RNA, 19 nt, Artificial Sequence
  Description of Artificial Sequence: Synthetic oligonucleotide
cauucgguauccucuuucc

SEQ ID NO: 1101841 - RNA, 19 nt, Artificial Sequence
  Description of Artificial Sequence: Synthetic oligonucleotide
cacgccuauaaguuucacg

SEQ ID NO: 1101842 - RNA, 19 nt, Artificial Sequence
  Description of Artificial Sequence: Synthetic oligonucleotide
agcuaauauggccaugggu

SEQ ID NO: 1101843 - RNA, 19 nt, Artificial Sequence
  Description of Artificial Sequence: Synthetic oligonucleotide
uuauccuuaggaacaggau

SEQ ID NO: 1101844 - RNA, 19 nt, Artificial Sequence
  Description of Artificial Sequence: Synthetic oligonucleotide
augccaaagcuccacacgu

SEQ ID NO: 1101845 - RNA, 19 nt, Artificial Sequence
  Description of Artificial Sequence: Synthetic oligonucleotide
auaaccuuccaagauggcu

SEQ ID NO: 1101846 - RNA, 19 nt, Artificial Sequence
  Description of Artificial Sequence: Synthetic oligonucleotide
uuagcagucuguuguucug

SEQ ID NO: 1101847 - RNA, 19 nt, Artificial Sequence
  Description of Artificial Sequence: Synthetic oligonucleotide
ucuucuugccgagacauuc

SEQ ID NO: 1101848 - RNA, 19 nt, Artificial Sequence
  Description of Artificial Sequence: Synthetic oligonucleotide
caucccaggguauggacag

SEQ ID NO: 1101849 - RNA, 19 nt, Artificial Sequence
  Description of Artificial Sequence: Synthetic oligonucleotide
gaacguuauucucacccac

SEQ ID NO: 1101850 - RNA, 19 nt, Artificial Sequence
  Description of Artificial Sequence: Synthetic oligonucleotide
uagcuaauauggccauggg

SEQ ID NO: 1101851 - RNA, 19 nt, Artificial Sequence
  Description of Artificial Sequence: Synthetic oligonucleotide
cucaagauacaacaugcca

SEQ ID NO: 1101852 - RNA, 19 nt, Artificial Sequence
  Description of Artificial Sequence: Synthetic oligonucleotide
ucaacguuacuugcaaacu

SEQ ID NO: 1101853 - RNA, 19 nt, Artificial Sequence
  Description of Artificial Sequence: Synthetic oligonucleotide
ugagaaguggugaucuaua

SEQ ID NO: 1101854 - RNA, 19 nt, Artificial Sequence
  Description of Artificial Sequence: Synthetic oligonucleotide
guaaugcucccaaugaaac

SEQ ID NO: 1101855 - RNA, 19 nt, Artificial Sequence
  Description of Artificial Sequence: Synthetic oligonucleotide
aguauacgcauauucuuua

SEQ ID NO: 1101856 - RNA, 19 nt, Artificial Sequence
  Description of Artificial Sequence: Synthetic oligonucleotide
guuaggacuguuuauuucu

SEQ ID NO: 1101857 - RNA, 19 nt, Artificial Sequence
  Description of Artificial Sequence: Synthetic oligonucleotide
ugaucaucaaggugagccu

SEQ ID NO: 1101858 - RNA, 19 nt, Artificial Sequence
  Description of Artificial Sequence: Synthetic oligonucleotide
caacguuacuugcaaacug

SEQ ID NO: 1101859 - RNA, 19 nt, Artificial Sequence
  Description of Artificial Sequence: Synthetic oligonucleotide
uaguuccauaaugauguag

SEQ ID NO: 1101860 - RNA, 19 nt, Artificial Sequence
  Description of Artificial Sequence: Synthetic oligonucleotide
cauuaucuucuaauaagga

SEQ ID NO: 1101861 - RNA, 19 nt, Artificial Sequence
  Description of Artificial Sequence: Synthetic oligonucleotide
ugauuacaaagauucugua

SEQ ID NO: 1101862 - RNA, 19 nt, Artificial Sequence
  Description of Artificial Sequence: Synthetic oligonucleotide
uuugaaaacccagugccuu

SEQ ID NO: 1101863 - RNA, 19 nt, Artificial Sequence
  Description of Artificial Sequence: Synthetic oligonucleotide
uaggccagaagaugaauau

SEQ ID NO: 1101864 - RNA, 19 nt, Artificial Sequence
  Description of Artificial Sequence: Synthetic oligonucleotide
agaacguuauucucaccca

SEQ ID NO: 1101865 - RNA, 19 nt, Artificial Sequence
  Description of Artificial Sequence: Synthetic oligonucleotide
uaauauggccauggguuag

SEQ ID NO: 1101866 - RNA, 19 nt, Artificial Sequence
  Description of Artificial Sequence: Synthetic oligonucleotide
acguugcugacaguaauuc

SEQ ID NO: 1101867 - RNA, 19 nt, Artificial Sequence
  Description of Artificial Sequence: Synthetic oligonucleotide
ugcaguaaggugguaugcc

SEQ ID NO: 1101868 - RNA, 19 nt, Artificial Sequence
  Description of Artificial Sequence: Synthetic oligonucleotide
auguuccgcuuccaucugc

SEQ ID NO: 1101869 - RNA, 19 nt, Artificial Sequence
  Description of Artificial Sequence: Synthetic oligonucleotide
aaguauacgcauauucuuu

SEQ ID NO: 1101870 - RNA, 19 nt, Artificial Sequence
  Description of Artificial Sequence: Synthetic oligonucleotide
gcucgcugaaccuugggcg

SEQ ID NO: 1101871 - RNA, 19 nt, Artificial Sequence
  Description of Artificial Sequence: Synthetic oligonucleotide
ugcuuuaggccagaagaug

SEQ ID NO: 1101872 - RNA, 19 nt, Artificial Sequence
  Description of Artificial Sequence: Synthetic oligonucleotide
cucgcugaaccuugggcgg

SEQ ID NO: 1101873 - RNA, 19 nt, Artificial Sequence
  Description of Artificial Sequence: Synthetic oligonucleotide
uacaguggucucaaacggu

SEQ ID NO: 1101874 - RNA, 19 nt, Artificial Sequence
  Description of Artificial Sequence: Synthetic oligonucleotide
uuugugugcacacgccuau

SEQ ID NO: 1101875 - RNA, 19 nt, Artificial Sequence
  Description of Artificial Sequence: Synthetic oligonucleotide
gaugaauauaucccgccgu

SEQ ID NO: 1101876 - RNA, 19 nt, Artificial Sequence
  Description of Artificial Sequence: Synthetic oligonucleotide
auucuguaaaguauacgca

SEQ ID NO: 1101877 - RNA, 19 nt, Artificial Sequence
  Description of Artificial Sequence: Synthetic oligonucleotide
ugugugcacacgccuauaa

SEQ ID NO: 1101878 - RNA, 19 nt, Artificial Sequence
  Description of Artificial Sequence: Synthetic oligonucleotide
uuucacgauauugggguga

SEQ ID NO: 1101879 - RNA, 19 nt, Artificial Sequence
  Description of Artificial Sequence: Synthetic oligonucleotide
ucgauuucuuguuucuuua

SEQ ID NO: 1101880 - RNA, 19 nt, Artificial Sequence
  Description of Artificial Sequence: Synthetic oligonucleotide
ugugaagcucgcugaaccu

SEQ ID NO: 1101881 - RNA, 19 nt, Artificial Sequence
  Description of Artificial Sequence: Synthetic oligonucleotide
uccccugaucaucaaggug

SEQ ID NO: 1101882 - RNA, 19 nt, Artificial Sequence
  Description of Artificial Sequence: Synthetic oligonucleotide
gaaaucaccuccugggacu

SEQ ID NO: 1101883 - RNA, 19 nt, Artificial Sequence
  Description of Artificial Sequence: Synthetic oligonucleotide
uguuccgcuuccaucugcu

SEQ ID NO: 1101884 - RNA, 19 nt, Artificial Sequence
  Description of Artificial Sequence: Synthetic oligonucleotide
uuccccuugcccaguaaug

SEQ ID NO: 1101885 - RNA, 19 nt, Artificial Sequence
  Description of Artificial Sequence: Synthetic oligonucleotide
gaaucaucagaagccagga

SEQ ID NO: 1101886 - RNA, 19 nt, Artificial Sequence
  Description of Artificial Sequence: Synthetic oligonucleotide
ucaaacgguaggacucugu

SEQ ID NO: 1101887 - RNA, 19 nt, Artificial Sequence
  Description of Artificial Sequence: Synthetic oligonucleotide
uuggggugaucauauugcu

SEQ ID NO: 1101888 - RNA, 19 nt, Artificial Sequence
  Description of Artificial Sequence: Synthetic oligonucleotide
aggaaaacuucacgagcug

SEQ ID NO: 1101889 - RNA, 19 nt, Artificial Sequence
  Description of Artificial Sequence: Synthetic oligonucleotide
aguaaugcucccaaugaaa

SEQ ID NO: 1101890 - RNA, 19 nt, Artificial Sequence
  Description of Artificial Sequence: Synthetic oligonucleotide
uccgcgugcgccuucauua

SEQ ID NO: 1101891 - RNA, 19 nt, Artificial Sequence
  Description of Artificial Sequence: Synthetic oligonucleotide
ugacaguaauucaccugca

SEQ ID NO: 1101892 - RNA, 19 nt, Artificial Sequence
  Description of Artificial Sequence: Synthetic oligonucleotide
ugcugacaguaauucaccu

SEQ ID NO: 1101893 - RNA, 19 nt, Artificial Sequence
  Description of Artificial Sequence: Synthetic oligonucleotide
ugaauauaucccgccgucu

SEQ ID NO: 1101894 - RNA, 19 nt, Artificial Sequence
  Description of Artificial Sequence: Synthetic oligonucleotide
gcucucaagauacaacaug

SEQ ID NO: 1101895 - RNA, 19 nt, Artificial Sequence
  Description of Artificial Sequence: Synthetic oligonucleotide
aagcacaaugucagacuuc

SEQ ID NO: 1101896 - RNA, 19 nt, Artificial Sequence
  Description of Artificial Sequence: Synthetic oligonucleotide
gugaucauauugcuugaga

SEQ ID NO: 1101897 - RNA, 19 nt, Artificial Sequence
  Description of Artificial Sequence: Synthetic oligonucleotide
ucccuguguauacaguuuu

SEQ ID NO: 1101898 - RNA, 19 nt, Artificial Sequence
  Description of Artificial Sequence: Synthetic oligonucleotide
ugcucucaagauacaacau

SEQ ID NO: 1101899 - RNA, 19 nt, Artificial Sequence
  Description of Artificial Sequence: Synthetic oligonucleotide
uuaggacuguuuauuucuu

SEQ ID NO: 1101900 - RNA, 19 nt, Artificial Sequence
  Description of Artificial Sequence: Synthetic oligonucleotide
gauauuggggugaucauau

SEQ ID NO: 1101901 - RNA, 19 nt, Artificial Sequence
  Description of Artificial Sequence: Synthetic oligonucleotide
uccccuugcccaguaaugc

SEQ ID NO: 1101902 - RNA, 19 nt, Artificial Sequence
  Description of Artificial Sequence: Synthetic oligonucleotide
guaucucccguaauuaaga

SEQ ID NO: 1101903 - RNA, 19 nt, Artificial Sequence
  Description of Artificial Sequence: Synthetic oligonucleotide
aguaauucaccugcacagu

SEQ ID NO: 1101904 - RNA, 19 nt, Artificial Sequence
  Description of Artificial Sequence: Synthetic oligonucleotide
cuugccgagacauuccgaa

SEQ ID NO: 1101905 - RNA, 19 nt, Artificial Sequence
  Description of Artificial Sequence: Synthetic oligonucleotide
ugcccaguaaugcucccaa

SEQ ID NO: 1101906 - RNA, 19 nt, Artificial Sequence
  Description of Artificial Sequence: Synthetic oligonucleotide
gacauuccgaagucacuga

SEQ ID NO: 1101907 - RNA, 19 nt, Artificial Sequence
  Description of Artificial Sequence: Synthetic oligonucleotide
caggauucagcagaaccac

SEQ ID NO: 1101908 - RNA, 19 nt, Artificial Sequence
  Description of Artificial Sequence: Synthetic oligonucleotide
aaccuggauuuuaauuucu

SEQ ID NO: 1101909 - RNA, 19 nt, Artificial Sequence
  Description of Artificial Sequence: Synthetic oligonucleotide
uggcacuaugugauuuucu

SEQ ID NO: 1101910 - RNA, 19 nt, Artificial Sequence
  Description of Artificial Sequence: Synthetic oligonucleotide
cuugcaaacugucugcugu

SEQ ID NO: 1101911 - RNA, 19 nt, Artificial Sequence
  Description of Artificial Sequence: Synthetic oligonucleotide
auucgguauccucuuucca

SEQ ID NO: 1101912 - RNA, 19 nt, Artificial Sequence
  Description of Artificial Sequence: Synthetic oligonucleotide
ggugaucuauaaguugggg

SEQ ID NO: 1101913 - RNA, 19 nt, Artificial Sequence
  Description of Artificial Sequence: Synthetic oligonucleotide
cguaauuaagagcuuccgg

SEQ ID NO: 1101914 - RNA, 19 nt, Artificial Sequence
  Description of Artificial Sequence: Synthetic oligonucleotide
guuucacgauauuggggug

SEQ ID NO: 1101915 - RNA, 19 nt, Artificial Sequence
  Description of Artificial Sequence: Synthetic oligonucleotide
aaguggugaucuauaaguu

SEQ ID NO: 1101916 - RNA, 19 nt, Artificial Sequence
  Description of Artificial Sequence: Synthetic oligonucleotide
cuggacaguucuguggggc

SEQ ID NO: 1101917 - RNA, 19 nt, Artificial Sequence
  Description of Artificial Sequence: Synthetic oligonucleotide
ucagaacguuauucucacc

SEQ ID NO: 1101918 - RNA, 19 nt, Artificial Sequence
  Description of Artificial Sequence: Synthetic oligonucleotide
gccuuuaacauauuuuaaa

SEQ ID NO: 1101919 - RNA, 19 nt, Artificial Sequence
  Description of Artificial Sequence: Synthetic oligonucleotide
ucuugccgagacauuccga

SEQ ID NO: 1101920 - RNA, 19 nt, Artificial Sequence
  Description of Artificial Sequence: Synthetic oligonucleotide
caaaucgguagagauuauc

SEQ ID NO: 1101921 - RNA, 19 nt, Artificial Sequence
  Description of Artificial Sequence: Synthetic oligonucleotide
acacguugcugacaguaau

SEQ ID NO: 1101922 - RNA, 19 nt, Artificial Sequence
  Description of Artificial Sequence: Synthetic oligonucleotide
gcaguaaggugguaugccc

SEQ ID NO: 1101923 - RNA, 19 nt, Artificial Sequence
  Description of Artificial Sequence: Synthetic oligonucleotide
auauugcuugagaauuuug

SEQ ID NO: 1101924 - RNA, 19 nt, Artificial Sequence
  Description of Artificial Sequence: Synthetic oligonucleotide
cuccacacgucacuuucag

SEQ ID NO: 1101925 - RNA, 19 nt, Artificial Sequence
  Description of Artificial Sequence: Synthetic oligonucleotide
ggaaaacuucacgagcugc

SEQ ID NO: 1101926 - RNA, 19 nt, Artificial Sequence
  Description of Artificial Sequence: Synthetic oligonucleotide
acauuccgaagucacugau

SEQ ID NO: 1101927 - RNA, 19 nt, Artificial Sequence
  Description of Artificial Sequence: Synthetic oligonucleotide
uuuaggccagaagaugaau

SEQ ID NO: 1101928 - RNA, 19 nt, Artificial Sequence
  Description of Artificial Sequence: Synthetic oligonucleotide
uucucacccaccagacagu

SEQ ID NO: 1101929 - RNA, 19 nt, Artificial Sequence
  Description of Artificial Sequence: Synthetic oligonucleotide
ucucaaacgguaggacucu

SEQ ID NO: 1101930 - RNA, 19 nt, Artificial Sequence
  Description of Artificial Sequence: Synthetic oligonucleotide
caucuguugugucugugca

SEQ ID NO: 1101931 - RNA, 19 nt, Artificial Sequence
  Description of Artificial Sequence: Synthetic oligonucleotide
cacuccagacuucuuggug

SEQ ID NO: 1101932 - RNA, 19 nt, Artificial Sequence
  Description of Artificial Sequence: Synthetic oligonucleotide
uguaaaguauacgcauauu

SEQ ID NO: 1101933 - RNA, 19 nt, Artificial Sequence
  Description of Artificial Sequence: Synthetic oligonucleotide
ucccguaauuaagagcuuc

SEQ ID NO: 1101934 - RNA, 19 nt, Artificial Sequence
  Description of Artificial Sequence: Synthetic oligonucleotide
uacuugcaaacugucugcu

SEQ ID NO: 1101935 - RNA, 19 nt, Artificial Sequence
  Description of Artificial Sequence: Synthetic oligonucleotide
acguuacuugcaaacuguc

SEQ ID NO: 1101936 - RNA, 19 nt, Artificial Sequence
  Description of Artificial Sequence: Synthetic oligonucleotide
gauguagacaggcugucuu

SEQ ID NO: 1101937 - RNA, 19 nt, Artificial Sequence
  Description of Artificial Sequence: Synthetic oligonucleotide
gcugacaguaauucaccug

SEQ ID NO: 1101938 - RNA, 19 nt, Artificial Sequence
  Description of Artificial Sequence: Synthetic oligonucleotide
gguuaggacuguuuauuuc

SEQ ID NO: 1101939 - RNA, 19 nt, Artificial Sequence
  Description of Artificial Sequence: Synthetic oligonucleotide
ggagcucagguccuccgcg

SEQ ID NO: 1101940 - RNA, 19 nt, Artificial Sequence
  Description of Artificial Sequence: Synthetic oligonucleotide
ccagacaguuucuugcagc

SEQ ID NO: 1101941 - RNA, 19 nt, Artificial Sequence
  Description of Artificial Sequence: Synthetic oligonucleotide
cauggguuaggacuguuua

SEQ ID NO: 1101942 - RNA, 19 nt, Artificial Sequence
  Description of Artificial Sequence: Synthetic oligonucleotide
ccccugaucaucaagguga

SEQ ID NO: 1101943 - RNA, 19 nt, Artificial Sequence
  Description of Artificial Sequence: Synthetic oligonucleotide
caacaugccagaugcaaua

SEQ ID NO: 1101944 - RNA, 19 nt, Artificial Sequence
  Description of Artificial Sequence: Synthetic oligonucleotide
gguaggacucugugguuag

SEQ ID NO: 1101945 - RNA, 19 nt, Artificial Sequence
  Description of Artificial Sequence: Synthetic oligonucleotide
auaucccgccgucuucuug

SEQ ID NO: 1101946 - RNA, 19 nt, Artificial Sequence
  Description of Artificial Sequence: Synthetic oligonucleotide
cuguuguucugugaaccug

SEQ ID NO: 1101947 - RNA, 19 nt, Artificial Sequence
  Description of Artificial Sequence: Synthetic oligonucleotide
ugggcgguucucaggcuug

SEQ ID NO: 1101948 - RNA, 19 nt, Artificial Sequence
  Description of Artificial Sequence: Synthetic oligonucleotide
cugcaguaaggugguaugc

SEQ ID NO: 1101949 - RNA, 19 nt, Artificial Sequence
  Description of Artificial Sequence: Synthetic oligonucleotide
aaauuccccuugcccagua

SEQ ID NO: 1101950 - RNA, 19 nt, Artificial Sequence
  Description of Artificial Sequence: Synthetic oligonucleotide
uggggugaucauauugcuu

SEQ ID NO: 1101951 - RNA, 19 nt, Artificial Sequence
  Description of Artificial Sequence: Synthetic oligonucleotide
gcugguucgucaucccagg

SEQ ID NO: 1101952 - RNA, 19 nt, Artificial Sequence
  Description of Artificial Sequence: Synthetic oligonucleotide
cccguaauuaagagcuucc

SEQ ID NO: 1101953 - RNA, 19 nt, Artificial Sequence
  Description of Artificial Sequence: Synthetic oligonucleotide
uccacacgucacuuucaga

SEQ ID NO: 1101954 - RNA, 19 nt, Artificial Sequence
  Description of Artificial Sequence: Synthetic oligonucleotide
ccuucauuauccgacuaag

SEQ ID NO: 1101955 - RNA, 19 nt, Artificial Sequence
  Description of Artificial Sequence: Synthetic oligonucleotide
gcuaauauggccauggguu

SEQ ID NO: 1101956 - RNA, 19 nt, Artificial Sequence
  Description of Artificial Sequence: Synthetic oligonucleotide
ccauuucuuauccuuagga

SEQ ID NO: 1101957 - RNA, 19 nt, Artificial Sequence
  Description of Artificial Sequence: Synthetic oligonucleotide
cugguucgucaucccaggg

SEQ ID NO: 1101958 - RNA, 19 nt, Artificial Sequence
  Description of Artificial Sequence: Synthetic oligonucleotide
acgauauuggggugaucau

SEQ ID NO: 1101959 - RNA, 19 nt, Artificial Sequence
  Description of Artificial Sequence: Synthetic oligonucleotide
ucaaaucgguagagauuau

SEQ ID NO: 1101960 - RNA, 19 nt, Artificial Sequence
  Description of Artificial Sequence: Synthetic oligonucleotide
cuuuaggccagaagaugaa

SEQ ID NO: 1101961 - RNA, 19 nt, Artificial Sequence
  Description of Artificial Sequence: Synthetic oligonucleotide
uugggcgguucucaggcuu

SEQ ID NO: 1101962 - RNA, 19 nt, Artificial Sequence
  Description of Artificial Sequence: Synthetic oligonucleotide
ucccgcgccugcugguucg

SEQ ID NO: 1101963 - RNA, 19 nt, Artificial Sequence
  Description of Artificial Sequence: Synthetic oligonucleotide
gcuaaagucuucaacguua

SEQ ID NO: 1101964 - RNA, 19 nt, Artificial Sequence
  Description of Artificial Sequence: Synthetic oligonucleotide
ggauucagcagaaccacuc

SEQ ID NO: 1101965 - RNA, 19 nt, Artificial Sequence
  Description of Artificial Sequence: Synthetic oligonucleotide
gaccuugaucauguuccgc

SEQ ID NO: 1101966 - RNA, 19 nt, Artificial Sequence
  Description of Artificial Sequence: Synthetic oligonucleotide
gaaccuugggcgguucuca

SEQ ID NO: 1101967 - RNA, 19 nt, Artificial Sequence
  Description of Artificial Sequence: Synthetic oligonucleotide
cagaagauucuucaauccu

SEQ ID NO: 1101968 - RNA, 19 nt, Artificial Sequence
  Description of Artificial Sequence: Synthetic oligonucleotide
auccgacuaagcugcucug

SEQ ID NO: 1101969 - RNA, 19 nt, Artificial Sequence
  Description of Artificial Sequence: Synthetic oligonucleotide
guuagcuaauauggccaug

SEQ ID NO: 1101970 - RNA, 19 nt, Artificial Sequence
  Description of Artificial Sequence: Synthetic oligonucleotide
gucugcuguuaaauuauuc

SEQ ID NO: 1101971 - RNA, 19 nt, Artificial Sequence
  Description of Artificial Sequence: Synthetic oligonucleotide
cuguaucucccguaauuaa

SEQ ID NO: 1101972 - RNA, 19 nt, Artificial Sequence
  Description of Artificial Sequence: Synthetic oligonucleotide
cuugcccaguaaugcuccc

SEQ ID NO: 1101973 - RNA, 19 nt, Artificial Sequence
  Description of Artificial Sequence: Synthetic oligonucleotide
uggggcugacauucgguau

SEQ ID NO: 1101974 - RNA, 19 nt, Artificial Sequence
  Description of Artificial Sequence: Synthetic oligonucleotide
gucuucaacguuacuugca

SEQ ID NO: 1101975 - RNA, 19 nt, Artificial Sequence
  Description of Artificial Sequence: Synthetic oligonucleotide
cacuuaauggggaucugcu

SEQ ID NO: 1101976 - RNA, 19 nt, Artificial Sequence
  Description of Artificial Sequence: Synthetic oligonucleotide
cuuugugugcacacgccua

SEQ ID NO: 1101977 - RNA, 19 nt, Artificial Sequence
  Description of Artificial Sequence: Synthetic oligonucleotide
uaacagcgacagcaguuuu

SEQ ID NO: 1101978 - RNA, 19 nt, Artificial Sequence
  Description of Artificial Sequence: Synthetic oligonucleotide
ccuugcccaguaaugcucc

SEQ ID NO: 1101979 - RNA, 19 nt, Artificial Sequence
  Description of Artificial Sequence: Synthetic oligonucleotide
uuauccgacuaagcugcuc

SEQ ID NO: 1101980 - RNA, 19 nt, Artificial Sequence
  Description of Artificial Sequence: Synthetic oligonucleotide
gcugacauucgguauccuc

SEQ ID NO: 1101981 - RNA, 19 nt, Artificial Sequence
  Description of Artificial Sequence: Synthetic oligonucleotide
aucaucaaggugagccugu

SEQ ID NO: 1101982 - RNA, 19 nt, Artificial Sequence
  Description of Artificial Sequence: Synthetic oligonucleotide
gccuauaaguuucacgaua

SEQ ID NO: 1101983 - RNA, 19 nt, Artificial Sequence
  Description of Artificial Sequence: Synthetic oligonucleotide
cugcuaaagucuucaacgu

SEQ ID NO: 1101984 - RNA, 19 nt, Artificial Sequence
  Description of Artificial Sequence: Synthetic oligonucleotide
cauguuccgcuuccaucug

SEQ ID NO: 1101985 - RNA, 19 nt, Artificial Sequence
  Description of Artificial Sequence: Synthetic oligonucleotide
ccguaauuaagagcuuccg

SEQ ID NO: 1101986 - RNA, 19 nt, Artificial Sequence
  Description of Artificial Sequence: Synthetic oligonucleotide
acgucacuuucagagcugu

SEQ ID NO: 1101987 - RNA, 19 nt, Artificial Sequence
  Description of Artificial Sequence: Synthetic oligonucleotide
acuucacgagcugcuugag

SEQ ID NO: 1101988 - RNA, 19 nt, Artificial Sequence
  Description of Artificial Sequence: Synthetic oligonucleotide
cuaggcugaaggucuccca

SEQ ID NO: 1101989 - RNA, 19 nt, Artificial Sequence
  Description of Artificial Sequence: Synthetic oligonucleotide
cuggcacuaugugauuuuc

SEQ ID NO: 1101990 - RNA, 19 nt, Artificial Sequence
  Description of Artificial Sequence: Synthetic oligonucleotide
cucuagcuccaggacggcc

SEQ ID NO: 1101991 - RNA, 19 nt, Artificial Sequence
  Description of Artificial Sequence: Synthetic oligonucleotide
aggaaguaucaaauucgau

SEQ ID NO: 1101992 - RNA, 19 nt, Artificial Sequence
  Description of Artificial Sequence: Synthetic oligonucleotide
auauuggggugaucauauu

SEQ ID NO: 1101993 - RNA, 19 nt, Artificial Sequence
  Description of Artificial Sequence: Synthetic oligonucleotide
gcuugguugagaaguggug

SEQ ID NO: 1101994 - RNA, 19 nt, Artificial Sequence
  Description of Artificial Sequence: Synthetic oligonucleotide
cuucaacguuacuugcaaa

SEQ ID NO: 1101995 - RNA, 19 nt, Artificial Sequence
  Description of Artificial Sequence: Synthetic oligonucleotide
gaacaggauucagcagaac

SEQ ID NO: 1101996 - RNA, 19 nt, Artificial Sequence
  Description of Artificial Sequence: Synthetic oligonucleotide
ggucucaaacgguaggacu

SEQ ID NO: 1101997 - RNA, 19 nt, Artificial Sequence
  Description of Artificial Sequence: Synthetic oligonucleotide
gacacguugcugacaguaa

SEQ ID NO: 1101998 - RNA, 19 nt, Artificial Sequence
  Description of Artificial Sequence: Synthetic oligonucleotide
cagaugcaauauccaagga

SEQ ID NO: 1101999 - RNA, 19 nt, Artificial Sequence
  Description of Artificial Sequence: Synthetic oligonucleotide
auauggccauggguuagga

SEQ ID NO: 1102000 - RNA, 19 nt, Artificial Sequence
  Description of Artificial Sequence: Synthetic oligonucleotide
guauacgcauauucuuuau

SEQ ID NO: 1102001 - RNA, 19 nt, Artificial Sequence
  Description of Artificial Sequence: Synthetic oligonucleotide
guggggcugacauucggua

SEQ ID NO: 1102002 - RNA, 19 nt, Artificial Sequence
  Description of Artificial Sequence: Synthetic oligonucleotide
uuccgaagucacugauuuu

SEQ ID NO: 1102003 - RNA, 19 nt, Artificial Sequence
  Description of Artificial Sequence: Synthetic oligonucleotide
gcgugcgccuucauuaucc

SEQ ID NO: 1102004 - RNA, 19 nt, Artificial Sequence
  Description of Artificial Sequence: Synthetic oligonucleotide
uauaucccgccgucuucuu

SEQ ID NO: 1102005 - RNA, 19 nt, Artificial Sequence
  Description of Artificial Sequence: Synthetic oligonucleotide
gccgucuucuugccgagac

SEQ ID NO: 1102006 - RNA, 19 nt, Artificial Sequence
  Description of Artificial Sequence: Synthetic oligonucleotide
aggggcccggagcucaggu

SEQ ID NO: 1102007 - RNA, 19 nt, Artificial Sequence
  Description of Artificial Sequence: Synthetic oligonucleotide
cucaaacgguaggacucug

SEQ ID NO: 1102008 - RNA, 19 nt, Artificial Sequence
  Description of Artificial Sequence: Synthetic oligonucleotide
ggcacuaugugauuuucuu

SEQ ID NO: 1102009 - RNA, 19 nt, Artificial Sequence
  Description of Artificial Sequence: Synthetic oligonucleotide
ggauguuugaaaacccagu

SEQ ID NO: 1102010 - RNA, 19 nt, Artificial Sequence
  Description of Artificial Sequence: Synthetic oligonucleotide
ggacacguugcugacagua

SEQ ID NO: 1102011 - RNA, 19 nt, Artificial Sequence
  Description of Artificial Sequence: Synthetic oligonucleotide
ccgacuaagcugcucugug

SEQ ID NO: 1102012 - RNA, 19 nt, Artificial Sequence
  Description of Artificial Sequence: Synthetic oligonucleotide
cccugaucaucaaggugag

SEQ ID NO: 1102013 - RNA, 19 nt, Artificial Sequence
  Description of Artificial Sequence: Synthetic oligonucleotide
cuccuaggcugaaggucuc

SEQ ID NO: 1102014 - RNA, 19 nt, Artificial Sequence
  Description of Artificial Sequence: Synthetic oligonucleotide
ucgcugaaccuugggcggu

SEQ ID NO: 1102015 - RNA, 19 nt, Artificial Sequence
  Description of Artificial Sequence: Synthetic oligonucleotide
gccgagacauuccgaaguc

SEQ ID NO: 1102016 - RNA, 19 nt, Artificial Sequence
  Description of Artificial Sequence: Synthetic oligonucleotide
ugcugggcguccccaggua

SEQ ID NO: 1102017 - RNA, 19 nt, Artificial Sequence
  Description of Artificial Sequence: Synthetic oligonucleotide
auuauccgacuaagcugcu

SEQ ID NO: 1102018 - RNA, 19 nt, Artificial Sequence
  Description of Artificial Sequence: Synthetic oligonucleotide
gugcccuuauacacuucac

SEQ ID NO: 1102019 - RNA, 19 nt, Artificial Sequence
  Description of Artificial Sequence: Synthetic oligonucleotide
acgguaggacucugugguu

SEQ ID NO: 1102020 - RNA, 19 nt, Artificial Sequence
  Description of Artificial Sequence: Synthetic oligonucleotide
ccuaggcugaaggucuccc

SEQ ID NO: 1102021 - RNA, 19 nt, Artificial Sequence
  Description of Artificial Sequence: Synthetic oligonucleotide
ccuugcuuaagagcaucug

SEQ ID NO: 1102022 - RNA, 19 nt, Artificial Sequence
  Description of Artificial Sequence: Synthetic oligonucleotide
gguuagcuaauauggccau

SEQ ID NO: 1102023 - RNA, 19 nt, Artificial Sequence
  Description of Artificial Sequence: Synthetic oligonucleotide
gugcgccuucauuauccga

SEQ ID NO: 1102024 - RNA, 19 nt, Artificial Sequence
  Description of Artificial Sequence: Synthetic oligonucleotide
gcgguucucaggcuuguaa

SEQ ID NO: 1102025 - RNA, 19 nt, Artificial Sequence
  Description of Artificial Sequence: Synthetic oligonucleotide
guccccugaucaucaaggu

SEQ ID NO: 1102026 - RNA, 19 nt, Artificial Sequence
  Description of Artificial Sequence: Synthetic oligonucleotide
uccuccgcgugcgccuuca

SEQ ID NO: 1102027 - RNA, 19 nt, Artificial Sequence
  Description of Artificial Sequence: Synthetic oligonucleotide
gugcacacgccuauaaguu

SEQ ID NO: 1102028 - RNA, 19 nt, Artificial Sequence
  Description of Artificial Sequence: Synthetic oligonucleotide
cauuccgaagucacugauu

SEQ ID NO: 1102029 - RNA, 19 nt, Artificial Sequence
  Description of Artificial Sequence: Synthetic oligonucleotide
uugugaccuugaucauguu

SEQ ID NO: 1102030 - RNA, 19 nt, Artificial Sequence
  Description of Artificial Sequence: Synthetic oligonucleotide
gcuccuaggcugaaggucu

SEQ ID NO: 1102031 - RNA, 19 nt, Artificial Sequence
  Description of Artificial Sequence: Synthetic oligonucleotide
cacguugcugacaguaauu

SEQ ID NO: 1102032 - RNA, 19 nt, Artificial Sequence
  Description of Artificial Sequence: Synthetic oligonucleotide
cgugcgccuucauuauccg

SEQ ID NO: 1102033 - RNA, 19 nt, Artificial Sequence
  Description of Artificial Sequence: Synthetic oligonucleotide
ggacaagaaaucaccuccu

SEQ ID NO: 1102034 - RNA, 19 nt, Artificial Sequence
  Description of Artificial Sequence: Synthetic oligonucleotide
gacauucgguauccucuuu

SEQ ID NO: 1102035 - RNA, 19 nt, Artificial Sequence
  Description of Artificial Sequence: Synthetic oligonucleotide
ggcguccccagguagcucu

SEQ ID NO: 1102036 - RNA, 19 nt, Artificial Sequence
  Description of Artificial Sequence: Synthetic oligonucleotide
gccuucaaaucgguagaga

SEQ ID NO: 1102037 - RNA, 19 nt, Artificial Sequence
  Description of Artificial Sequence: Synthetic oligonucleotide
cucccgcgccugcugguuc

SEQ ID NO: 1102038 - RNA, 19 nt, Artificial Sequence
  Description of Artificial Sequence: Synthetic oligonucleotide
cagugccuucaaaucggua

SEQ ID NO: 1102039 - RNA, 19 nt, Artificial Sequence
  Description of Artificial Sequence: Synthetic oligonucleotide
cccuggcuggcacuaugug

SEQ ID NO: 1102040 - RNA, 19 nt, Artificial Sequence
  Description of Artificial Sequence: Synthetic oligonucleotide
ccugaucaucaaggugagc

SEQ ID NO: 1102041 - RNA, 19 nt, Artificial Sequence
  Description of Artificial Sequence: Synthetic oligonucleotide
cugaaccuugggcgguucu

SEQ ID NO: 1102042 - RNA, 19 nt, Artificial Sequence
  Description of Artificial Sequence: Synthetic oligonucleotide
cugcuuguccccugaucau

SEQ ID NO: 1102043 - RNA, 19 nt, Artificial Sequence
  Description of Artificial Sequence: Synthetic oligonucleotide
cuugggcgguucucaggcu

SEQ ID NO: 1102044 - RNA, 19 nt, Artificial Sequence
  Description of Artificial Sequence: Synthetic oligonucleotide
gacaggcuccuaggcugaa

SEQ ID NO: 1102045 - RNA, 19 nt, Artificial Sequence
  Description of Artificial Sequence: Synthetic oligonucleotide
cugggacuaguuccauaau

SEQ ID NO: 1102046 - RNA, 19 nt, Artificial Sequence
  Description of Artificial Sequence: Synthetic oligonucleotide
cgauauuggggugaucaua

SEQ ID NO: 1102047 - RNA, 19 nt, Artificial Sequence
  Description of Artificial Sequence: Synthetic oligonucleotide
gcgccuucauuauccgacu

SEQ ID NO: 1102048 - RNA, 19 nt, Artificial Sequence
  Description of Artificial Sequence: Synthetic oligonucleotide
ccaacacuucaucaugauu

SEQ ID NO: 1102049 - RNA, 19 nt, Artificial Sequence
  Description of Artificial Sequence: Synthetic oligonucleotide
cucccguaauuaagagcuu

SEQ ID NO: 1102050 - RNA, 19 nt, Artificial Sequence
  Description of Artificial Sequence: Synthetic oligonucleotide
cccaacacuucaucaugau

SEQ ID NO: 1102051 - RNA, 19 nt, Artificial Sequence
  Description of Artificial Sequence: Synthetic oligonucleotide
cgacuaagcugcucugugu

SEQ ID NO: 1102052 - RNA, 19 nt, Artificial Sequence
  Description of Artificial Sequence: Synthetic oligonucleotide
ccccuugcccaguaaugcu

SEQ ID NO: 1102053 - RNA, 19 nt, Artificial Sequence
  Description of Artificial Sequence: Synthetic oligonucleotide
cgcgccugcugguucguca

SEQ ID NO: 1102054 - RNA, 19 nt, Artificial Sequence
  Description of Artificial Sequence: Synthetic oligonucleotide
cuccgcgugcgccuucauu

SEQ ID NO: 1102055 - RNA, 19 nt, Artificial Sequence
  Description of Artificial Sequence: Synthetic oligonucleotide
cgcgugcgccuucauuauc

SEQ ID NO: 1102056 - RNA, 19 nt, Artificial Sequence
  Description of Artificial Sequence: Synthetic oligonucleotide
gcgccugcugguucgucau

SEQ ID NO: 1102057 - RNA, 19 nt, Artificial Sequence
  Description of Artificial Sequence: Synthetic oligonucleotide
cugcugcuuguccccugau

SEQ ID NO: 1102058 - RNA, 19 nt, Artificial Sequence
  Description of Artificial Sequence: Synthetic oligonucleotide
cgccuauaaguuucacgau

SEQ ID NO: 1102059 - RNA, 19 nt, Artificial Sequence
  Description of Artificial Sequence: Synthetic oligonucleotide
ggcgguucucaggcuugua

SEQ ID NO: 1102060 - RNA, 19 nt, Artificial Sequence
  Description of Artificial Sequence: Synthetic oligonucleotide
ggacggccuccuccuugcu

SEQ ID NO: 1102061 - RNA, 19 nt, Artificial Sequence
  Description of Artificial Sequence: Synthetic oligonucleotide
ccgcgugcgccuucauuau

SEQ ID NO: 1102062 - RNA, 19 nt, Artificial Sequence
  Description of Artificial Sequence: Synthetic oligonucleotide
gccauggguuaggacuguu

SEQ ID NO: 1102063 - RNA, 19 nt, Artificial Sequence
  Description of Artificial Sequence: Synthetic oligonucleotide
ccgcgccugcugguucguc

SEQ ID NO: 1102064 - RNA, 19 nt, Artificial Sequence
  Description of Artificial Sequence: Synthetic oligonucleotide
gcucccgcgccugcugguu

SEQ ID NO: 1102065 - RNA, 19 nt, Artificial Sequence
  Description of Artificial Sequence: Synthetic oligonucleotide
ccuccgcgugcgccuucau

SEQ ID NO: 1102066 - RNA, 19 nt, Artificial Sequence
  Description of Artificial Sequence: Synthetic oligonucleotide
cccgcgccugcugguucgu

SEQ ID NO: 1102067 - RNA, 19 nt, Artificial Sequence
  Description of Artificial Sequence: Synthetic oligonucleotide
aauaaugacaaauauguca

SEQ ID NO: 1102068 - RNA, 19 nt, Artificial Sequence
  Description of Artificial Sequence: Synthetic oligonucleotide
aacuugagaauguauaugc

SEQ ID NO: 1102069 - RNA, 19 nt, Artificial Sequence
  Description of Artificial Sequence: Synthetic oligonucleotide
uguaacacaguuuagaacc

SEQ ID NO: 1102070 - RNA, 19 nt, Artificial Sequence
  Description of Artificial Sequence: Synthetic oligonucleotide
aauguauaugcuuugcuuc

SEQ ID NO: 1102071 - RNA, 19 nt, Artificial Sequence
  Description of Artificial Sequence: Synthetic oligonucleotide
ucugauuugaaaaugguug

SEQ ID NO: 1102072 - RNA, 19 nt, Artificial Sequence
  Description of Artificial Sequence: Synthetic oligonucleotide
uguauuaucgcucauuucu

SEQ ID NO: 1102073 - RNA, 19 nt, Artificial Sequence
  Description of Artificial Sequence: Synthetic oligonucleotide
ucuagugucacauaguuca

SEQ ID NO: 1102074 - RNA, 19 nt, Artificial Sequence
  Description of Artificial Sequence: Synthetic oligonucleotide
uaugugaaaacaaacugag

SEQ ID NO: 1102075 - RNA, 19 nt, Artificial Sequence
  Description of Artificial Sequence: Synthetic oligonucleotide
cuaaguaucuguaacacag

SEQ ID NO: 1102076 - RNA, 19 nt, Artificial Sequence
  Description of Artificial Sequence: Synthetic oligonucleotide
uauuuaguaaacucuagug

SEQ ID NO: 1102077 - RNA, 19 nt, Artificial Sequence
  Description of Artificial Sequence: Synthetic oligonucleotide
aaauuaauaugugaaaaca

SEQ ID NO: 1102078 - RNA, 19 nt, Artificial Sequence
  Description of Artificial Sequence: Synthetic oligonucleotide
ugaauaugcuaugaaaucg

SEQ ID NO: 1102079 - RNA, 19 nt, Artificial Sequence
  Description of Artificial Sequence: Synthetic oligonucleotide
aauacaauccaggccaggc

SEQ ID NO: 1102080 - RNA, 19 nt, Artificial Sequence
  Description of Artificial Sequence: Synthetic oligonucleotide
uguuuguugaaauacaauc

SEQ ID NO: 1102081 - RNA, 19 nt, Artificial Sequence
  Description of Artificial Sequence: Synthetic oligonucleotide
cauuauuucagacacugcc

SEQ ID NO: 1102082 - RNA, 19 nt, Artificial Sequence
  Description of Artificial Sequence: Synthetic oligonucleotide
aaggguuuucugcaucucc

SEQ ID NO: 1102083 - RNA, 19 nt, Artificial Sequence
  Description of Artificial Sequence: Synthetic oligonucleotide
uaugcuaugaaaucgugaa

SEQ ID NO: 1102084 - RNA, 19 nt, Artificial Sequence
  Description of Artificial Sequence: Synthetic oligonucleotide
uuaaguaucucuugguugu

SEQ ID NO: 1102085 - RNA, 19 nt, Artificial Sequence
  Description of Artificial Sequence: Synthetic oligonucleotide
uucaguagacucaagcuug

SEQ ID NO: 1102086 - RNA, 19 nt, Artificial Sequence
  Description of Artificial Sequence: Synthetic oligonucleotide
uuaaacuucuucuaaguau

SEQ ID NO: 1102087 - RNA, 19 nt, Artificial Sequence
  Description of Artificial Sequence: Synthetic oligonucleotide
uauugguuuuccaucuugg

SEQ ID NO: 1102088 - RNA, 19 nt, Artificial Sequence
  Description of Artificial Sequence: Synthetic oligonucleotide
auuaucacaauuuauuguu

SEQ ID NO: 1102089 - RNA, 19 nt, Artificial Sequence
  Description of Artificial Sequence: Synthetic oligonucleotide
uuuaccucggacaugucug

SEQ ID NO: 1102090 - RNA, 19 nt, Artificial Sequence
  Description of Artificial Sequence: Synthetic oligonucleotide
auuaucgcucauuucugcc

SEQ ID NO: 1102091 - RNA, 19 nt, Artificial Sequence
  Description of Artificial Sequence: Synthetic oligonucleotide
ucauguauggaucuuugga

SEQ ID NO: 1102092 - RNA, 19 nt, Artificial Sequence
  Description of Artificial Sequence: Synthetic oligonucleotide
uugaggauaaaguaagaac

SEQ ID NO: 1102093 - RNA, 19 nt, Artificial Sequence
  Description of Artificial Sequence: Synthetic oligonucleotide
uuaaaguccagguucacaa

SEQ ID NO: 1102094 - RNA, 19 nt, Artificial Sequence
  Description of Artificial Sequence: Synthetic oligonucleotide
aaugguuguauuaucgcuc

SEQ ID NO: 1102095 - RNA, 19 nt, Artificial Sequence
  Description of Artificial Sequence: Synthetic oligonucleotide
uaauaugcuauugucauac

SEQ ID NO: 1102096 - RNA, 19 nt, Artificial Sequence
  Description of Artificial Sequence: Synthetic oligonucleotide
agcauaaccaguuaauaga

SEQ ID NO: 1102097 - RNA, 19 nt, Artificial Sequence
  Description of Artificial Sequence: Synthetic oligonucleotide
aacugaguuucauaaguug

SEQ ID NO: 1102098 - RNA, 19 nt, Artificial Sequence
  Description of Artificial Sequence: Synthetic oligonucleotide
uguauuuaguaaacucuag

SEQ ID NO: 1102099 - RNA, 19 nt, Artificial Sequence
  Description of Artificial Sequence: Synthetic oligonucleotide
uuaaacugauuuuauucug

SEQ ID NO: 1102100 - RNA, 19 nt, Artificial Sequence
  Description of Artificial Sequence: Synthetic oligonucleotide
auuauuucagacacugccc

SEQ ID NO: 1102101 - RNA, 19 nt, Artificial Sequence
  Description of Artificial Sequence: Synthetic oligonucleotide
ugaauuaauuuucauggua

SEQ ID NO: 1102102 - RNA, 19 nt, Artificial Sequence
  Description of Artificial Sequence: Synthetic oligonucleotide
uuagaaccuuugcaaaagg

SEQ ID NO: 1102103 - RNA, 19 nt, Artificial Sequence
  Description of Artificial Sequence: Synthetic oligonucleotide
uaucuuuaaagcaggcuca

SEQ ID NO: 1102104 - RNA, 19 nt, Artificial Sequence
  Description of Artificial Sequence: Synthetic oligonucleotide
cucauuaagguuuugcauc

SEQ ID NO: 1102105 - RNA, 19 nt, Artificial Sequence
  Description of Artificial Sequence: Synthetic oligonucleotide
ugacaaauaugucauaauu

SEQ ID NO: 1102106 - RNA, 19 nt, Artificial Sequence
  Description of Artificial Sequence: Synthetic oligonucleotide
uucuauagcuggcaaaugu

SEQ ID NO: 1102107 - RNA, 19 nt, Artificial Sequence
  Description of Artificial Sequence: Synthetic oligonucleotide
ucuauagcuggcaaaugug

SEQ ID NO: 1102108 - RNA, 19 nt, Artificial Sequence
  Description of Artificial Sequence: Synthetic oligonucleotide
uuuagaaccuuugcaaaag

SEQ ID NO: 1102109 - RNA, 19 nt, Artificial Sequence
  Description of Artificial Sequence: Synthetic oligonucleotide
ugucuggaaauuaaacuga

SEQ ID NO: 1102110 - RNA, 19 nt, Artificial Sequence
  Description of Artificial Sequence: Synthetic oligonucleotide
uuguugaaauacaauccag

SEQ ID NO: 1102111 - RNA, 19 nt, Artificial Sequence
  Description of Artificial Sequence: Synthetic oligonucleotide
ugagcucaaacuucaaagc

SEQ ID NO: 1102112 - RNA, 19 nt, Artificial Sequence
  Description of Artificial Sequence: Synthetic oligonucleotide
uggauugcauuuucuauag

SEQ ID NO: 1102113 - RNA, 19 nt, Artificial Sequence
  Description of Artificial Sequence: Synthetic oligonucleotide
uaaacugauuuuauucugu

SEQ ID NO: 1102114 - RNA, 19 nt, Artificial Sequence
  Description of Artificial Sequence: Synthetic oligonucleotide
aaaguuuauuggucagauc

SEQ ID NO: 1102115 - RNA, 19 nt, Artificial Sequence
  Description of Artificial Sequence: Synthetic oligonucleotide
uucaacuuuggguucguag

SEQ ID NO: 1102116 - RNA, 19 nt, Artificial Sequence
  Description of Artificial Sequence: Synthetic oligonucleotide
caguauguaggacagguag

SEQ ID NO: 1102117 - RNA, 19 nt, Artificial Sequence
  Description of Artificial Sequence: Synthetic oligonucleotide
uucucauuaagguuuugca

SEQ ID NO: 1102118 - RNA, 19 nt, Artificial Sequence
  Description of Artificial Sequence: Synthetic oligonucleotide
uauagcuggcaaaugugcc

SEQ ID NO: 1102119 - RNA, 19 nt, Artificial Sequence
  Description of Artificial Sequence: Synthetic oligonucleotide
uuuugugugagcaucucau

SEQ ID NO: 1102120 - RNA, 19 nt, Artificial Sequence
  Description of Artificial Sequence: Synthetic oligonucleotide
uuuagaacaaccaguucau

SEQ ID NO: 1102121 - RNA, 19 nt, Artificial Sequence
  Description of Artificial Sequence: Synthetic oligonucleotide
acaguuuagaaccuuugca

SEQ ID NO: 1102122 - RNA, 19 nt, Artificial Sequence
  Description of Artificial Sequence: Synthetic oligonucleotide
ugggucaucaaagccaugg

SEQ ID NO: 1102123 - RNA, 19 nt, Artificial Sequence
  Description of Artificial Sequence: Synthetic oligonucleotide
cugaguuucauaaguuggg

SEQ ID NO: 1102124 - RNA, 19 nt, Artificial Sequence
  Description of Artificial Sequence: Synthetic oligonucleotide
ucuagguuauauuucucca

SEQ ID NO: 1102125 - RNA, 19 nt, Artificial Sequence
  Description of Artificial Sequence: Synthetic oligonucleotide
ucaaagcauaaccaguuaa

SEQ ID NO: 1102126 - RNA, 19 nt, Artificial Sequence
  Description of Artificial Sequence: Synthetic oligonucleotide
uuaucacaauuuauuguug

SEQ ID NO: 1102127 - RNA, 19 nt, Artificial Sequence
  Description of Artificial Sequence: Synthetic oligonucleotide
cuauagcuggcaaaugugc

SEQ ID NO: 1102128 - RNA, 19 nt, Artificial Sequence
  Description of Artificial Sequence: Synthetic oligonucleotide
acauaguucaaacuucaga

SEQ ID NO: 1102129 - RNA, 19 nt, Artificial Sequence
  Description of Artificial Sequence: Synthetic oligonucleotide
ucauuaagguuuugcaucu

SEQ ID NO: 1102130 - RNA, 19 nt, Artificial Sequence
  Description of Artificial Sequence: Synthetic oligonucleotide
ucagcugaauuaauuuuca

SEQ ID NO: 1102131 - RNA, 19 nt, Artificial Sequence
  Description of Artificial Sequence: Synthetic oligonucleotide
uuuaaagcaggcucaggcu

SEQ ID NO: 1102132 - RNA, 19 nt, Artificial Sequence
  Description of Artificial Sequence: Synthetic oligonucleotide
auaugcuauugucauacug

SEQ ID NO: 1102133 - RNA, 19 nt, Artificial Sequence
  Description of Artificial Sequence: Synthetic oligonucleotide
uuucaguagacucaagcuu

SEQ ID NO: 1102134 - RNA, 19 nt, Artificial Sequence
  Description of Artificial Sequence: Synthetic oligonucleotide
aaucuuuuagccguuuggu

SEQ ID NO: 1102135 - RNA, 19 nt, Artificial Sequence
  Description of Artificial Sequence: Synthetic oligonucleotide
cuuaccgggguaccgaugg

SEQ ID NO: 1102136 - RNA, 19 nt, Artificial Sequence
  Description of Artificial Sequence: Synthetic oligonucleotide
gauacuuucaguagacuca

SEQ ID NO: 1102137 - RNA, 19 nt, Artificial Sequence
  Description of Artificial Sequence: Synthetic oligonucleotide
agaaccuuugcaaaagguc

SEQ ID NO: 1102138 - RNA, 19 nt, Artificial Sequence
  Description of Artificial Sequence: Synthetic oligonucleotide
ucaugguaacuugagaaug

SEQ ID NO: 1102139 - RNA, 19 nt, Artificial Sequence
  Description of Artificial Sequence: Synthetic oligonucleotide
uccugggacacucugagaa

SEQ ID NO: 1102140 - RNA, 19 nt, Artificial Sequence
  Description of Artificial Sequence: Synthetic oligonucleotide
uuuuauucuguaguccuug

SEQ ID NO: 1102141 - RNA, 19 nt, Artificial Sequence
  Description of Artificial Sequence: Synthetic oligonucleotide
agucucaguauguaggaca

SEQ ID NO: 1102142 - RNA, 19 nt, Artificial Sequence
  Description of Artificial Sequence: Synthetic oligonucleotide
uauuaucgcucauuucugc

SEQ ID NO: 1102143 - RNA, 19 nt, Artificial Sequence
  Description of Artificial Sequence: Synthetic oligonucleotide
uugcaaaaggucaccagcu

SEQ ID NO: 1102144 - RNA, 19 nt, Artificial Sequence
  Description of Artificial Sequence: Synthetic oligonucleotide
aguagacucaagcuugucu

SEQ ID NO: 1102145 - RNA, 19 nt, Artificial Sequence
  Description of Artificial Sequence: Synthetic oligonucleotide
aaguaucuguaacacaguu

SEQ ID NO: 1102146 - RNA, 19 nt, Artificial Sequence
  Description of Artificial Sequence: Synthetic oligonucleotide
ucuugguuguauuuaguaa

SEQ ID NO: 1102147 - RNA, 19 nt, Artificial Sequence
  Description of Artificial Sequence: Synthetic oligonucleotide
ucuaaguaucuguaacaca

SEQ ID NO: 1102148 - RNA, 19 nt, Artificial Sequence
  Description of Artificial Sequence: Synthetic oligonucleotide
uucuaaguaucuguaacac

SEQ ID NO: 1102149 - RNA, 19 nt, Artificial Sequence
  Description of Artificial Sequence: Synthetic oligonucleotide
uucguaguuggaaaguuua

SEQ ID NO: 1102150 - RNA, 19 nt, Artificial Sequence
  Description of Artificial Sequence: Synthetic oligonucleotide
ucucauuaagguuuugcau

SEQ ID NO: 1102151 - RNA, 19 nt, Artificial Sequence
  Description of Artificial Sequence: Synthetic oligonucleotide
gaaccuuugcaaaagguca

SEQ ID NO: 1102152 - RNA, 19 nt, Artificial Sequence
  Description of Artificial Sequence: Synthetic oligonucleotide
ugauguuucguaguguacu

SEQ ID NO: 1102153 - RNA, 19 nt, Artificial Sequence
  Description of Artificial Sequence: Synthetic oligonucleotide
ucccuuauuuucuagguua

SEQ ID NO: 1102154 - RNA, 19 nt, Artificial Sequence
  Description of Artificial Sequence: Synthetic oligonucleotide
cuuuuagccguuuggugag

SEQ ID NO: 1102155 - RNA, 19 nt, Artificial Sequence
  Description of Artificial Sequence: Synthetic oligonucleotide
aauuaaaguccagguucac

SEQ ID NO: 1102156 - RNA, 19 nt, Artificial Sequence
  Description of Artificial Sequence: Synthetic oligonucleotide
aauaugcuaugaaaucgug

SEQ ID NO: 1102157 - RNA, 19 nt, Artificial Sequence
  Description of Artificial Sequence: Synthetic oligonucleotide
aaacugauuuuauucugua

SEQ ID NO: 1102158 - RNA, 19 nt, Artificial Sequence
  Description of Artificial Sequence: Synthetic oligonucleotide
uuaucgcucauuucugcca

SEQ ID NO: 1102159 - RNA, 19 nt, Artificial Sequence
  Description of Artificial Sequence: Synthetic oligonucleotide
uguucugauguuucguagu

SEQ ID NO: 1102160 - RNA, 19 nt, Artificial Sequence
  Description of Artificial Sequence: Synthetic oligonucleotide
ugucauacugaauucccuc

SEQ ID NO: 1102161 - RNA, 19 nt, Artificial Sequence
  Description of Artificial Sequence: Synthetic oligonucleotide
uguagcuuccugcaggaua

SEQ ID NO: 1102162 - RNA, 19 nt, Artificial Sequence
  Description of Artificial Sequence: Synthetic oligonucleotide
auaguaaggucuuccauuu

SEQ ID NO: 1102163 - RNA, 19 nt, Artificial Sequence
  Description of Artificial Sequence: Synthetic oligonucleotide
auguauaugcuuugcuucu

SEQ ID NO: 1102164 - RNA, 19 nt, Artificial Sequence
  Description of Artificial Sequence: Synthetic oligonucleotide
augcuaugaaaucgugaac

SEQ ID NO: 1102165 - RNA, 19 nt, Artificial Sequence
  Description of Artificial Sequence: Synthetic oligonucleotide
uucaugguaacuugagaau

SEQ ID NO: 1102166 - RNA, 19 nt, Artificial Sequence
  Description of Artificial Sequence: Synthetic oligonucleotide
guauguaggacagguagcc

SEQ ID NO: 1102167 - RNA, 19 nt, Artificial Sequence
  Description of Artificial Sequence: Synthetic oligonucleotide
ucaucacuauucucaaugu

SEQ ID NO: 1102168 - RNA, 19 nt, Artificial Sequence
  Description of Artificial Sequence: Synthetic oligonucleotide
uguuucguaguguacuguc

SEQ ID NO: 1102169 - RNA, 19 nt, Artificial Sequence
  Description of Artificial Sequence: Synthetic oligonucleotide
ugugagcucaaacuucaaa

SEQ ID NO: 1102170 - RNA, 19 nt, Artificial Sequence
  Description of Artificial Sequence: Synthetic oligonucleotide
augaaaucgugaacuuucc

SEQ ID NO: 1102171 - RNA, 19 nt, Artificial Sequence
  Description of Artificial Sequence: Synthetic oligonucleotide
uuaagguuuugcaucuuuu

SEQ ID NO: 1102172 - RNA, 19 nt, Artificial Sequence
  Description of Artificial Sequence: Synthetic oligonucleotide
uuaccucggacaugucugg

SEQ ID NO: 1102173 - RNA, 19 nt, Artificial Sequence
  Description of Artificial Sequence: Synthetic oligonucleotide
uggguucguaguuggaaag

SEQ ID NO: 1102174 - RNA, 19 nt, Artificial Sequence
  Description of Artificial Sequence: Synthetic oligonucleotide
aauaugcuauugucauacu

SEQ ID NO: 1102175 - RNA, 19 nt, Artificial Sequence
  Description of Artificial Sequence: Synthetic oligonucleotide
caguuaauagaaaaggcua

SEQ ID NO: 1102176 - RNA, 19 nt, Artificial Sequence
  Description of Artificial Sequence: Synthetic oligonucleotide
uugucauacugaauucccu

SEQ ID NO: 1102177 - RNA, 19 nt, Artificial Sequence
  Description of Artificial Sequence: Synthetic oligonucleotide
augguuguauuaucgcuca

SEQ ID NO: 1102178 - RNA, 19 nt, Artificial Sequence
  Description of Artificial Sequence: Synthetic oligonucleotide
uuuugcucagcugaauuaa

SEQ ID NO: 1102179 - RNA, 19 nt, Artificial Sequence
  Description of Artificial Sequence: Synthetic oligonucleotide
ugccuugcauucuucaacu

SEQ ID NO: 1102180 - RNA, 19 nt, Artificial Sequence
  Description of Artificial Sequence: Synthetic oligonucleotide
acucuagugucacauaguu

SEQ ID NO: 1102181 - RNA, 19 nt, Artificial Sequence
  Description of Artificial Sequence: Synthetic oligonucleotide
uaguguacugucuuccaaa

SEQ ID NO: 1102182 - RNA, 19 nt, Artificial Sequence
  Description of Artificial Sequence: Synthetic oligonucleotide
uuucguaguguacugucuu

SEQ ID NO: 1102183 - RNA, 19 nt, Artificial Sequence
  Description of Artificial Sequence: Synthetic oligonucleotide
ugcuucugauuugaaaaug

SEQ ID NO: 1102184 - RNA, 19 nt, Artificial Sequence
  Description of Artificial Sequence: Synthetic oligonucleotide
aacuuuggguucguaguug

SEQ ID NO: 1102185 - RNA, 19 nt, Artificial Sequence
  Description of Artificial Sequence: Synthetic oligonucleotide
gaguuucauaaguugggga

SEQ ID NO: 1102186 - RNA, 19 nt, Artificial Sequence
  Description of Artificial Sequence: Synthetic oligonucleotide
caguuuagaaccuuugcaa

SEQ ID NO: 1102187 - RNA, 19 nt, Artificial Sequence
  Description of Artificial Sequence: Synthetic oligonucleotide
ggauacuuucaguagacuc

SEQ ID NO: 1102188 - RNA, 19 nt, Artificial Sequence
  Description of Artificial Sequence: Synthetic oligonucleotide
caggauacuuucaguagac

SEQ ID NO: 1102189 - RNA, 19 nt, Artificial Sequence
  Description of Artificial Sequence: Synthetic oligonucleotide
aauucccucaaggguuuuc

SEQ ID NO: 1102190 - RNA, 19 nt, Artificial Sequence
  Description of Artificial Sequence: Synthetic oligonucleotide
aguuaauagaaaaggcuau

SEQ ID NO: 1102191 - RNA, 19 nt, Artificial Sequence
  Description of Artificial Sequence: Synthetic oligonucleotide
aagguacucugugagcuca

SEQ ID NO: 1102192 - RNA, 19 nt, Artificial Sequence
  Description of Artificial Sequence: Synthetic oligonucleotide
ucucaacugcuuuuguguc

SEQ ID NO: 1102193 - RNA, 19 nt, Artificial Sequence
  Description of Artificial Sequence: Synthetic oligonucleotide
uuuggguucguaguuggaa

SEQ ID NO: 1102194 - RNA, 19 nt, Artificial Sequence
  Description of Artificial Sequence: Synthetic oligonucleotide
ucguaguguacugucuucc

SEQ ID NO: 1102195 - RNA, 19 nt, Artificial Sequence
  Description of Artificial Sequence: Synthetic oligonucleotide
ucagcggcaggccccuugg

SEQ ID NO: 1102196 - RNA, 19 nt, Artificial Sequence
  Description of Artificial Sequence: Synthetic oligonucleotide
uauagaucugcuugccuuu

SEQ ID NO: 1102197 - RNA, 19 nt, Artificial Sequence
  Description of Artificial Sequence: Synthetic oligonucleotide
uuggguucguaguuggaaa

SEQ ID NO: 1102198 - RNA, 19 nt, Artificial Sequence
  Description of Artificial Sequence: Synthetic oligonucleotide
augcuauugucauacugaa

SEQ ID NO: 1102199 - RNA, 19 nt, Artificial Sequence
  Description of Artificial Sequence: Synthetic oligonucleotide
guagcuuccugcaggauac

SEQ ID NO: 1102200 - RNA, 19 nt, Artificial Sequence
  Description of Artificial Sequence: Synthetic oligonucleotide
aguguacugucuuccaaau

SEQ ID NO: 1102201 - RNA, 19 nt, Artificial Sequence
  Description of Artificial Sequence: Synthetic oligonucleotide
ugagcaucucaucacuauu

SEQ ID NO: 1102202 - RNA, 19 nt, Artificial Sequence
  Description of Artificial Sequence: Synthetic oligonucleotide
ucuggcuaggagugagugc

SEQ ID NO: 1102203 - RNA, 19 nt, Artificial Sequence
  Description of Artificial Sequence: Synthetic oligonucleotide
aaucgugaacuuucccuuu

SEQ ID NO: 1102204 - RNA, 19 nt, Artificial Sequence
  Description of Artificial Sequence: Synthetic oligonucleotide
guauuaucgcucauuucug

SEQ ID NO: 1102205 - RNA, 19 nt, Artificial Sequence
  Description of Artificial Sequence: Synthetic oligonucleotide
accauaccuagcuccagcu

SEQ ID NO: 1102206 - RNA, 19 nt, Artificial Sequence
  Description of Artificial Sequence: Synthetic oligonucleotide
uguauaugcuuugcuucug

SEQ ID NO: 1102207 - RNA, 19 nt, Artificial Sequence
  Description of Artificial Sequence: Synthetic oligonucleotide
aaacugaguuucauaaguu

SEQ ID NO: 1102208 - RNA, 19 nt, Artificial Sequence
  Description of Artificial Sequence: Synthetic oligonucleotide
acuguucugauguuucgua

SEQ ID NO: 1102209 - RNA, 19 nt, Artificial Sequence
  Description of Artificial Sequence: Synthetic oligonucleotide
uuguauuaucgcucauuuc

SEQ ID NO: 1102210 - RNA, 19 nt, Artificial Sequence
  Description of Artificial Sequence: Synthetic oligonucleotide
ucggacaugucuggcaccc

SEQ ID NO: 1102211 - RNA, 19 nt, Artificial Sequence
  Description of Artificial Sequence: Synthetic oligonucleotide
ugaauucccucaaggguuu

SEQ ID NO: 1102212 - RNA, 19 nt, Artificial Sequence
  Description of Artificial Sequence: Synthetic oligonucleotide
cugcccuuagcauaucauc

SEQ ID NO: 1102213 - RNA, 19 nt, Artificial Sequence
  Description of Artificial Sequence: Synthetic oligonucleotide
gucacauaguucaaacuuc

SEQ ID NO: 1102214 - RNA, 19 nt, Artificial Sequence
  Description of Artificial Sequence: Synthetic oligonucleotide
caucacuauucucaauguc

SEQ ID NO: 1102215 - RNA, 19 nt, Artificial Sequence
  Description of Artificial Sequence: Synthetic oligonucleotide
uaccgauggacguggcugc

SEQ ID NO: 1102216 - RNA, 19 nt, Artificial Sequence
  Description of Artificial Sequence: Synthetic oligonucleotide
ucgggguucuuccugccgu

SEQ ID NO: 1102217 - RNA, 19 nt, Artificial Sequence
  Description of Artificial Sequence: Synthetic oligonucleotide
gaauaugcuaugaaaucgu

SEQ ID NO: 1102218 - RNA, 19 nt, Artificial Sequence
  Description of Artificial Sequence: Synthetic oligonucleotide
gugccuugcauucuucaac

SEQ ID NO: 1102219 - RNA, 19 nt, Artificial Sequence
  Description of Artificial Sequence: Synthetic oligonucleotide
uugcucagcugaauuaauu

SEQ ID NO: 1102220 - RNA, 19 nt, Artificial Sequence
  Description of Artificial Sequence: Synthetic oligonucleotide
aacucuagugucacauagu

SEQ ID NO: 1102221 - RNA, 19 nt, Artificial Sequence
  Description of Artificial Sequence: Synthetic oligonucleotide
cugauguuucguaguguac

SEQ ID NO: 1102222 - RNA, 19 nt, Artificial Sequence
  Description of Artificial Sequence: Synthetic oligonucleotide
uugugucagagcugagcug

SEQ ID NO: 1102223 - RNA, 19 nt, Artificial Sequence
  Description of Artificial Sequence: Synthetic oligonucleotide
uaaacucuagugucacaua

SEQ ID NO: 1102224 - RNA, 19 nt, Artificial Sequence
  Description of Artificial Sequence: Synthetic oligonucleotide
ugagaacagaguggauugc

SEQ ID NO: 1102225 - RNA, 19 nt, Artificial Sequence
  Description of Artificial Sequence: Synthetic oligonucleotide
ucguaguuggaaaguuuau

SEQ ID NO: 1102226 - RNA, 19 nt, Artificial Sequence
  Description of Artificial Sequence: Synthetic oligonucleotide
ugauuugaaaaugguugua

SEQ ID NO: 1102227 - RNA, 19 nt, Artificial Sequence
  Description of Artificial Sequence: Synthetic oligonucleotide
uucguaguguacugucuuc

SEQ ID NO: 1102228 - RNA, 19 nt, Artificial Sequence
  Description of Artificial Sequence: Synthetic oligonucleotide
ucuuccggcucuuuaccuc

SEQ ID NO: 1102229 - RNA, 19 nt, Artificial Sequence
  Description of Artificial Sequence: Synthetic oligonucleotide
gaaaguuuauuggucagau

SEQ ID NO: 1102230 - RNA, 19 nt, Artificial Sequence
  Description of Artificial Sequence: Synthetic oligonucleotide
uucuuccggcucuuuaccu

SEQ ID NO: 1102231 - RNA, 19 nt, Artificial Sequence
  Description of Artificial Sequence: Synthetic oligonucleotide
ugccucuacuuggagaaga

SEQ ID NO: 1102232 - RNA, 19 nt, Artificial Sequence
  Description of Artificial Sequence: Synthetic oligonucleotide
guuguauuaucgcucauuu

SEQ ID NO: 1102233 - RNA, 19 nt, Artificial Sequence
  Description of Artificial Sequence: Synthetic oligonucleotide
gguuauauuucuccaaagu

SEQ ID NO: 1102234 - RNA, 19 nt, Artificial Sequence
  Description of Artificial Sequence: Synthetic oligonucleotide
caccauaccuagcuccagc

SEQ ID NO: 1102235 - RNA, 19 nt, Artificial Sequence
  Description of Artificial Sequence: Synthetic oligonucleotide
uucauaaguuggggaaucu

SEQ ID NO: 1102236 - RNA, 19 nt, Artificial Sequence
  Description of Artificial Sequence: Synthetic oligonucleotide
guauaugcuuugcuucuga

SEQ ID NO: 1102237 - RNA, 19 nt, Artificial Sequence
  Description of Artificial Sequence: Synthetic oligonucleotide
ucgcucauuucugccagag

SEQ ID NO: 1102238 - RNA, 19 nt, Artificial Sequence
  Description of Artificial Sequence: Synthetic oligonucleotide
uuuagccguuuggugagca

SEQ ID NO: 1102239 - RNA, 19 nt, Artificial Sequence
  Description of Artificial Sequence: Synthetic oligonucleotide
ugcuauugucauacugaau

SEQ ID NO: 1102240 - RNA, 19 nt, Artificial Sequence
  Description of Artificial Sequence: Synthetic oligonucleotide
uacuuucaguagacucaag

SEQ ID NO: 1102241 - RNA, 19 nt, Artificial Sequence
  Description of Artificial Sequence: Synthetic oligonucleotide
uguccccaucagauccugg

SEQ ID NO: 1102242 - RNA, 19 nt, Artificial Sequence
  Description of Artificial Sequence: Synthetic oligonucleotide
aaguaucucuugguuguau

SEQ ID NO: 1102243 - RNA, 19 nt, Artificial Sequence
  Description of Artificial Sequence: Synthetic oligonucleotide
uuggucagaucuucaucuc

SEQ ID NO: 1102244 - RNA, 19 nt, Artificial Sequence
  Description of Artificial Sequence: Synthetic oligonucleotide
cauaguaaggucuuccauu

SEQ ID NO: 1102245 - RNA, 19 nt, Artificial Sequence
  Description of Artificial Sequence: Synthetic oligonucleotide
guaaacucuagugucacau

SEQ ID NO: 1102246 - RNA, 19 nt, Artificial Sequence
  Description of Artificial Sequence: Synthetic oligonucleotide
cugcaggauacuuucagua

SEQ ID NO: 1102247 - RNA, 19 nt, Artificial Sequence
  Description of Artificial Sequence: Synthetic oligonucleotide
gcaggauacuuucaguaga

SEQ ID NO: 1102248 - RNA, 19 nt, Artificial Sequence
  Description of Artificial Sequence: Synthetic oligonucleotide
aguaucuguaacacaguuu

SEQ ID NO: 1102249 - RNA, 19 nt, Artificial Sequence
  Description of Artificial Sequence: Synthetic oligonucleotide
auaccuagcuccagcucuc

SEQ ID NO: 1102250 - RNA, 19 nt, Artificial Sequence
  Description of Artificial Sequence: Synthetic oligonucleotide
cagaguggauugcauuuuc

SEQ ID NO: 1102251 - RNA, 19 nt, Artificial Sequence
  Description of Artificial Sequence: Synthetic oligonucleotide
caaagguacucugugagcu

SEQ ID NO: 1102252 - RNA, 19 nt, Artificial Sequence
  Description of Artificial Sequence: Synthetic oligonucleotide
cucaacugcuuuuguguca

SEQ ID NO: 1102253 - RNA, 19 nt, Artificial Sequence
  Description of Artificial Sequence: Synthetic oligonucleotide
cugaauucccucaaggguu

SEQ ID NO: 1102254 - RNA, 19 nt, Artificial Sequence
  Description of Artificial Sequence: Synthetic oligonucleotide
accucggacaugucuggca

SEQ ID NO: 1102255 - RNA, 19 nt, Artificial Sequence
  Description of Artificial Sequence: Synthetic oligonucleotide
cuauuugcaguaacuggua

SEQ ID NO: 1102256 - RNA, 19 nt, Artificial Sequence
  Description of Artificial Sequence: Synthetic oligonucleotide
caugguaacuugagaaugu

SEQ ID NO: 1102257 - RNA, 19 nt, Artificial Sequence
  Description of Artificial Sequence: Synthetic oligonucleotide
guccagauacuuccuguuc

SEQ ID NO: 1102258 - RNA, 19 nt, Artificial Sequence
  Description of Artificial Sequence: Synthetic oligonucleotide
accgggguaccgauggacg

SEQ ID NO: 1102259 - RNA, 19 nt, Artificial Sequence
  Description of Artificial Sequence: Synthetic oligonucleotide
guaguguacugucuuccaa

SEQ ID NO: 1102260 - RNA, 19 nt, Artificial Sequence
  Description of Artificial Sequence: Synthetic oligonucleotide
guugaacaucugcauagua

SEQ ID NO: 1102261 - RNA, 19 nt, Artificial Sequence
  Description of Artificial Sequence: Synthetic oligonucleotide
gccgccagcgauaacaggc

SEQ ID NO: 1102262 - RNA, 19 nt, Artificial Sequence
  Description of Artificial Sequence: Synthetic oligonucleotide
ccaguuaauagaaaaggcu

SEQ ID NO: 1102263 - RNA, 19 nt, Artificial Sequence
  Description of Artificial Sequence: Synthetic oligonucleotide
ucgugaacuuucccuuuua

SEQ ID NO: 1102264 - RNA, 19 nt, Artificial Sequence
  Description of Artificial Sequence: Synthetic oligonucleotide
aucgugaacuuucccuuuu

SEQ ID NO: 1102265 - RNA, 19 nt, Artificial Sequence
  Description of Artificial Sequence: Synthetic oligonucleotide
cuuuaccucggacaugucu

SEQ ID NO: 1102266 - RNA, 19 nt, Artificial Sequence
  Description of Artificial Sequence: Synthetic oligonucleotide
cugaauuaauuuucauggu

SEQ ID NO: 1102267 - RNA, 19 nt, Artificial Sequence
  Description of Artificial Sequence: Synthetic oligonucleotide
cuuuugugucagagcugag

SEQ ID NO: 1102268 - RNA, 19 nt, Artificial Sequence
  Description of Artificial Sequence: Synthetic oligonucleotide
agaguggauugcauuuucu

SEQ ID NO: 1102269 - RNA, 19 nt, Artificial Sequence
  Description of Artificial Sequence: Synthetic oligonucleotide
uagccguuuggugagcaau

SEQ ID NO: 1102270 - RNA, 19 nt, Artificial Sequence
  Description of Artificial Sequence: Synthetic oligonucleotide
uuuuagccguuuggugagc

SEQ ID NO: 1102271 - RNA, 19 nt, Artificial Sequence
  Description of Artificial Sequence: Synthetic oligonucleotide
cucgggguucuuccugccg

SEQ ID NO: 1102272 - RNA, 19 nt, Artificial Sequence
  Description of Artificial Sequence: Synthetic oligonucleotide
cacuugaauaugcuaugaa

SEQ ID NO: 1102273 - RNA, 19 nt, Artificial Sequence
  Description of Artificial Sequence: Synthetic oligonucleotide
cacgccgccagcgauaaca

SEQ ID NO: 1102274 - RNA, 19 nt, Artificial Sequence
  Description of Artificial Sequence: Synthetic oligonucleotide
ugcgaggguccgcccaacc

SEQ ID NO: 1102275 - RNA, 19 nt, Artificial Sequence
  Description of Artificial Sequence: Synthetic oligonucleotide
auguuucguaguguacugu

SEQ ID NO: 1102276 - RNA, 19 nt, Artificial Sequence
  Description of Artificial Sequence: Synthetic oligonucleotide
uuagccguuuggugagcaa

SEQ ID NO: 1102277 - RNA, 19 nt, Artificial Sequence
  Description of Artificial Sequence: Synthetic oligonucleotide
cucuuuaccucggacaugu

SEQ ID NO: 1102278 - RNA, 19 nt, Artificial Sequence
  Description of Artificial Sequence: Synthetic oligonucleotide
agaacagaguggauugcau

SEQ ID NO: 1102279 - RNA, 19 nt, Artificial Sequence
  Description of Artificial Sequence: Synthetic oligonucleotide
aggauacuuucaguagacu

SEQ ID NO: 1102280 - RNA, 19 nt, Artificial Sequence
  Description of Artificial Sequence: Synthetic oligonucleotide
aaagcaggcucaggcuuau

SEQ ID NO: 1102281 - RNA, 19 nt, Artificial Sequence
  Description of Artificial Sequence: Synthetic oligonucleotide
guguacugucuuccaaauc

SEQ ID NO: 1102282 - RNA, 19 nt, Artificial Sequence
  Description of Artificial Sequence: Synthetic oligonucleotide
cuggcuaggagugagugcu

SEQ ID NO: 1102283 - RNA, 19 nt, Artificial Sequence
  Description of Artificial Sequence: Synthetic oligonucleotide
agugagugcuguucuucuu

SEQ ID NO: 1102284 - RNA, 19 nt, Artificial Sequence
  Description of Artificial Sequence: Synthetic oligonucleotide
uuagaacaaccaguucauu

SEQ ID NO: 1102285 - RNA, 19 nt, Artificial Sequence
  Description of Artificial Sequence: Synthetic oligonucleotide
uaccgggguaccgauggac

SEQ ID NO: 1102286 - RNA, 19 nt, Artificial Sequence
  Description of Artificial Sequence: Synthetic oligonucleotide
gcauaaccaguuaauagaa

SEQ ID NO: 1102287 - RNA, 19 nt, Artificial Sequence
  Description of Artificial Sequence: Synthetic oligonucleotide
uagcuggcaaaugugccuu

SEQ ID NO: 1102288 - RNA, 19 nt, Artificial Sequence
  Description of Artificial Sequence: Synthetic oligonucleotide
ggaaaguuuauuggucaga

SEQ ID NO: 1102289 - RNA, 19 nt, Artificial Sequence
  Description of Artificial Sequence: Synthetic oligonucleotide
uuaccgggguaccgaugga

SEQ ID NO: 1102290 - RNA, 19 nt, Artificial Sequence
  Description of Artificial Sequence: Synthetic oligonucleotide
augguaacuugagaaugua

SEQ ID NO: 1102291 - RNA, 19 nt, Artificial Sequence
  Description of Artificial Sequence: Synthetic oligonucleotide
acagaguggauugcauuuu

SEQ ID NO: 1102292 - RNA, 19 nt, Artificial Sequence
  Description of Artificial Sequence: Synthetic oligonucleotide
guaaggucuuccauuuucu

SEQ ID NO: 1102293 - RNA, 19 nt, Artificial Sequence
  Description of Artificial Sequence: Synthetic oligonucleotide
gggguaccgauggacgugg

SEQ ID NO: 1102294 - RNA, 19 nt, Artificial Sequence
  Description of Artificial Sequence: Synthetic oligonucleotide
ugguuguauuaucgcucau

SEQ ID NO: 1102295 - RNA, 19 nt, Artificial Sequence
  Description of Artificial Sequence: Synthetic oligonucleotide
guaucucuugguuguauuu

SEQ ID NO: 1102296 - RNA, 19 nt, Artificial Sequence
  Description of Artificial Sequence: Synthetic oligonucleotide
gaggguccgcccaacccgc

SEQ ID NO: 1102297 - RNA, 19 nt, Artificial Sequence
  Description of Artificial Sequence: Synthetic oligonucleotide
uaccucggacaugucuggc

SEQ ID NO: 1102298 - RNA, 19 nt, Artificial Sequence
  Description of Artificial Sequence: Synthetic oligonucleotide
cuagugucacauaguucaa

SEQ ID NO: 1102299 - RNA, 19 nt, Artificial Sequence
  Description of Artificial Sequence: Synthetic oligonucleotide
cgauaacaggcugagcccg

SEQ ID NO: 1102300 - RNA, 19 nt, Artificial Sequence
  Description of Artificial Sequence: Synthetic oligonucleotide
cuuuggguucguaguugga

SEQ ID NO: 1102301 - RNA, 19 nt, Artificial Sequence
  Description of Artificial Sequence: Synthetic oligonucleotide
cuguaguccuugaaacucu

SEQ ID NO: 1102302 - RNA, 19 nt, Artificial Sequence
  Description of Artificial Sequence: Synthetic oligonucleotide
gacguggcugcagcgcggc

SEQ ID NO: 1102303 - RNA, 19 nt, Artificial Sequence
  Description of Artificial Sequence: Synthetic oligonucleotide
ucuuuaccucggacauguc

SEQ ID NO: 1102304 - RNA, 19 nt, Artificial Sequence
  Description of Artificial Sequence: Synthetic oligonucleotide
guuucauaaguuggggaau

SEQ ID NO: 1102305 - RNA, 19 nt, Artificial Sequence
  Description of Artificial Sequence: Synthetic oligonucleotide
ccagcgauaacaggcugag

SEQ ID NO: 1102306 - RNA, 19 nt, Artificial Sequence
  Description of Artificial Sequence: Synthetic oligonucleotide
caggcuuauugacauauuu

SEQ ID NO: 1102307 - RNA, 19 nt, Artificial Sequence
  Description of Artificial Sequence: Synthetic oligonucleotide
cuggcaaaugugccuugca

SEQ ID NO: 1102308 - RNA, 19 nt, Artificial Sequence
  Description of Artificial Sequence: Synthetic oligonucleotide
ccucggacaugucuggcac

SEQ ID NO: 1102309 - RNA, 19 nt, Artificial Sequence
  Description of Artificial Sequence: Synthetic oligonucleotide
cgaggguccgcccaacccg

SEQ ID NO: 1102310 - RNA, 19 nt, Artificial Sequence
  Description of Artificial Sequence: Synthetic oligonucleotide
guuucguaguguacugucu

SEQ ID NO: 1102311 - RNA, 19 nt, Artificial Sequence
  Description of Artificial Sequence: Synthetic oligonucleotide
guccgcccaacccgcgccg

SEQ ID NO: 1102312 - RNA, 19 nt, Artificial Sequence
  Description of Artificial Sequence: Synthetic oligonucleotide
guuuacuguucugauguuu

SEQ ID NO: 1102313 - RNA, 19 nt, Artificial Sequence
  Description of Artificial Sequence: Synthetic oligonucleotide
ggcucuuuaccucggacau

SEQ ID NO: 1102314 - RNA, 19 nt, Artificial Sequence
  Description of Artificial Sequence: Synthetic oligonucleotide
gcacuugaauaugcuauga

SEQ ID NO: 1102315 - RNA, 19 nt, Artificial Sequence
  Description of Artificial Sequence: Synthetic oligonucleotide
gcgaggguccgcccaaccc

SEQ ID NO: 1102316 - RNA, 19 nt, Artificial Sequence
  Description of Artificial Sequence: Synthetic oligonucleotide
gguccgcccaacccgcgcc

SEQ ID NO: 1102317 - RNA, 19 nt, Artificial Sequence
  Description of Artificial Sequence: Synthetic oligonucleotide
caagccgggcggccuuacc

SEQ ID NO: 1102318 - RNA, 19 nt, Artificial Sequence
  Description of Artificial Sequence: Synthetic oligonucleotide
cuaugaaaucgugaacuuu

SEQ ID NO: 1102319 - RNA, 19 nt, Artificial Sequence
  Description of Artificial Sequence: Synthetic oligonucleotide
gagugcuguucuucuucua

SEQ ID NO: 1102320 - RNA, 19 nt, Artificial Sequence
  Description of Artificial Sequence: Synthetic oligonucleotide
gccgucgcucagcuucucg

SEQ ID NO: 1102321 - RNA, 19 nt, Artificial Sequence
  Description of Artificial Sequence: Synthetic oligonucleotide
gagcccggugcgagggucc

SEQ ID NO: 1102322 - RNA, 19 nt, Artificial Sequence
  Description of Artificial Sequence: Synthetic oligonucleotide
cugggucaucaaagccaug

SEQ ID NO: 1102323 - RNA, 19 nt, Artificial Sequence
  Description of Artificial Sequence: Synthetic oligonucleotide
agccguuuggugagcaauu

SEQ ID NO: 1102324 - RNA, 19 nt, Artificial Sequence
  Description of Artificial Sequence: Synthetic oligonucleotide
guaggacagguagccuuga

SEQ ID NO: 1102325 - RNA, 19 nt, Artificial Sequence
  Description of Artificial Sequence: Synthetic oligonucleotide
cagcgauaacaggcugagc

SEQ ID NO: 1102326 - RNA, 19 nt, Artificial Sequence
  Description of Artificial Sequence: Synthetic oligonucleotide
gcauaguaaggucuuccau

SEQ ID NO: 1102327 - RNA, 19 nt, Artificial Sequence
  Description of Artificial Sequence: Synthetic oligonucleotide
cgauggacguggcugcagc

SEQ ID NO: 1102328 - RNA, 19 nt, Artificial Sequence
  Description of Artificial Sequence: Synthetic oligonucleotide
ggcugagcccggugcgagg

SEQ ID NO: 1102329 - RNA, 19 nt, Artificial Sequence
  Description of Artificial Sequence: Synthetic oligonucleotide
guucguaguuggaaaguuu

SEQ ID NO: 1102330 - RNA, 19 nt, Artificial Sequence
  Description of Artificial Sequence: Synthetic oligonucleotide
ggccgaggcacgccgccag

SEQ ID NO: 1102331 - RNA, 19 nt, Artificial Sequence
  Description of Artificial Sequence: Synthetic oligonucleotide
ccagauacuuccuguucaa

SEQ ID NO: 1102332 - RNA, 19 nt, Artificial Sequence
  Description of Artificial Sequence: Synthetic oligonucleotide
gguuguauuaucgcucauu

SEQ ID NO: 1102333 - RNA, 19 nt, Artificial Sequence
  Description of Artificial Sequence: Synthetic oligonucleotide
cagcggcaggccccuuggg

SEQ ID NO: 1102334 - RNA, 19 nt, Artificial Sequence
  Description of Artificial Sequence: Synthetic oligonucleotide
accgauggacguggcugca

SEQ ID NO: 1102335 - RNA, 19 nt, Artificial Sequence
  Description of Artificial Sequence: Synthetic oligonucleotide
gccagcgauaacaggcuga

SEQ ID NO: 1102336 - RNA, 19 nt, Artificial Sequence
  Description of Artificial Sequence: Synthetic oligonucleotide
gcucuuuaccucggacaug

SEQ ID NO: 1102337 - RNA, 19 nt, Artificial Sequence
  Description of Artificial Sequence: Synthetic oligonucleotide
ccuuaccgggguaccgaug

SEQ ID NO: 1102338 - RNA, 19 nt, Artificial Sequence
  Description of Artificial Sequence: Synthetic oligonucleotide
gaggcacgccgccagcgau

SEQ ID NO: 1102339 - RNA, 19 nt, Artificial Sequence
  Description of Artificial Sequence: Synthetic oligonucleotide
ccggcucuuuaccucggac

SEQ ID NO: 1102340 - RNA, 19 nt, Artificial Sequence
  Description of Artificial Sequence: Synthetic oligonucleotide
gguaccgauggacguggcu

SEQ ID NO: 1102341 - RNA, 19 nt, Artificial Sequence
  Description of Artificial Sequence: Synthetic oligonucleotide
cguaguguacugucuucca

SEQ ID NO: 1102342 - RNA, 19 nt, Artificial Sequence
  Description of Artificial Sequence: Synthetic oligonucleotide
gguucguaguuggaaaguu

SEQ ID NO: 1102343 - RNA, 19 nt, Artificial Sequence
  Description of Artificial Sequence: Synthetic oligonucleotide
cggcucuuuaccucggaca

SEQ ID NO: 1102344 - RNA, 19 nt, Artificial Sequence
  Description of Artificial Sequence: Synthetic oligonucleotide
ggugcgaggguccgcccaa

SEQ ID NO: 1102345 - RNA, 19 nt, Artificial Sequence
  Description of Artificial Sequence: Synthetic oligonucleotide
ggguccgcccaacccgcgc

SEQ ID NO: 1102346 - RNA, 19 nt, Artificial Sequence
  Description of Artificial Sequence: Synthetic oligonucleotide
ggccuuaccgggguaccga

SEQ ID NO: 1102347 - RNA, 19 nt, Artificial Sequence
  Description of Artificial Sequence: Synthetic oligonucleotide
ggcggccuuaccgggguac

SEQ ID NO: 1102348 - RNA, 19 nt, Artificial Sequence
  Description of Artificial Sequence: Synthetic oligonucleotide
cccggugcgaggguccgcc

SEQ ID NO: 1102349 - RNA, 19 nt, Artificial Sequence
  Description of Artificial Sequence: Synthetic oligonucleotide
ggguucguaguuggaaagu

SEQ ID NO: 1102350 - RNA, 19 nt, Artificial Sequence
  Description of Artificial Sequence: Synthetic oligonucleotide
ccgaggcacgccgccagcg

SEQ ID NO: 1102351 - RNA, 19 nt, Artificial Sequence
  Description of Artificial Sequence: Synthetic oligonucleotide
ccaccauaccuagcuccag

SEQ ID NO: 1102352 - RNA, 19 nt, Artificial Sequence
  Description of Artificial Sequence: Synthetic oligonucleotide
gcccuuagcauaucaucuu

SEQ ID NO: 1102353 - RNA, 19 nt, Artificial Sequence
  Description of Artificial Sequence: Synthetic oligonucleotide
cucugagaacagaguggau

SEQ ID NO: 1102354 - RNA, 19 nt, Artificial Sequence
  Description of Artificial Sequence: Synthetic oligonucleotide
ggcuaggagugagugcugu

SEQ ID NO: 1102355 - RNA, 19 nt, Artificial Sequence
  Description of Artificial Sequence: Synthetic oligonucleotide
gcggccuuaccgggguacc

SEQ ID NO: 1102356 - RNA, 19 nt, Artificial Sequence
  Description of Artificial Sequence: Synthetic oligonucleotide
aggcacgccgccagcgaua

SEQ ID NO: 1102357 - RNA, 19 nt, Artificial Sequence
  Description of Artificial Sequence: Synthetic oligonucleotide
uccugccgucgcucagcuu

SEQ ID NO: 1102358 - RNA, 19 nt, Artificial Sequence
  Description of Artificial Sequence: Synthetic oligonucleotide
gcccaacccgcgccgcccc

SEQ ID NO: 1102359 - RNA, 19 nt, Artificial Sequence
  Description of Artificial Sequence: Synthetic oligonucleotide
gugcgaggguccgcccaac

SEQ ID NO: 1102360 - RNA, 19 nt, Artificial Sequence
  Description of Artificial Sequence: Synthetic oligonucleotide
ugccgucgcucagcuucuc

SEQ ID NO: 1102361 - RNA, 19 nt, Artificial Sequence
  Description of Artificial Sequence: Synthetic oligonucleotide
cgccagcgauaacaggcug

SEQ ID NO: 1102362 - RNA, 19 nt, Artificial Sequence
  Description of Artificial Sequence: Synthetic oligonucleotide
cgggguaccgauggacgug

SEQ ID NO: 1102363 - RNA, 19 nt, Artificial Sequence
  Description of Artificial Sequence: Synthetic oligonucleotide
cguaguuggaaaguuuauu

SEQ ID NO: 1102364 - RNA, 19 nt, Artificial Sequence
  Description of Artificial Sequence: Synthetic oligonucleotide
gcuaggagugagugcuguu

SEQ ID NO: 1102365 - RNA, 19 nt, Artificial Sequence
  Description of Artificial Sequence: Synthetic oligonucleotide
cccaacccgcgccgccccg

SEQ ID NO: 1102366 - RNA, 19 nt, Artificial Sequence
  Description of Artificial Sequence: Synthetic oligonucleotide
cggccuuaccgggguaccg

SEQ ID NO: 1102367 - RNA, 19 nt, Artificial Sequence
  Description of Artificial Sequence: Synthetic oligonucleotide
ccaacccgcgccgccccgc

SEQ ID NO: 1102368 - RNA, 19 nt, Artificial Sequence
  Description of Artificial Sequence: Synthetic oligonucleotide
ccgccagcgauaacaggcu

SEQ ID NO: 1102369 - RNA, 19 nt, Artificial Sequence
  Description of Artificial Sequence: Synthetic oligonucleotide
gccuuaccgggguaccgau

SEQ ID NO: 1102370 - RNA, 19 nt, Artificial Sequence
  Description of Artificial Sequence: Synthetic oligonucleotide
gccuugcauucuucaacuu

SEQ ID NO: 1102371 - RNA, 19 nt, Artificial Sequence
  Description of Artificial Sequence: Synthetic oligonucleotide
cugagcccggugcgagggu

SEQ ID NO: 1102372 - RNA, 19 nt, Artificial Sequence
  Description of Artificial Sequence: Synthetic oligonucleotide
ccaagccgggcggccuuac

SEQ ID NO: 1102373 - RNA, 19 nt, Artificial Sequence
  Description of Artificial Sequence: Synthetic oligonucleotide
cgcccaacccgcgccgccc

SEQ ID NO: 1102374 - RNA, 19 nt, Artificial Sequence
  Description of Artificial Sequence: Synthetic oligonucleotide
cgaggcacgccgccagcga

SEQ ID NO: 1102375 - RNA, 19 nt, Artificial Sequence
  Description of Artificial Sequence: Synthetic oligonucleotide
cggugcgaggguccgccca

SEQ ID NO: 1102376 - RNA, 19 nt, Artificial Sequence
  Description of Artificial Sequence: Synthetic oligonucleotide
gcacgccgccagcgauaac

SEQ ID NO: 1102377 - RNA, 19 nt, Artificial Sequence
  Description of Artificial Sequence: Synthetic oligonucleotide
cgcucauuucugccagagu

SEQ ID NO: 1102378 - RNA, 19 nt, Artificial Sequence
  Description of Artificial Sequence: Synthetic oligonucleotide
ccgcgccucgggguucuuc

SEQ ID NO: 1102379 - RNA, 19 nt, Artificial Sequence
  Description of Artificial Sequence: Synthetic oligonucleotide
gggcggccuuaccggggua

SEQ ID NO: 1102380 - RNA, 19 nt, Artificial Sequence
  Description of Artificial Sequence: Synthetic oligonucleotide
ccccgcgccucgggguucu

SEQ ID NO: 1102381 - RNA, 19 nt, Artificial Sequence
  Description of Artificial Sequence: Synthetic oligonucleotide
cccgcgccucgggguucuu

SEQ ID NO: 1102382 - RNA, 19 nt, Artificial Sequence
  Description of Artificial Sequence: Synthetic oligonucleotide
auugaaguaauucauaagc

SEQ ID NO: 1102383 - RNA, 19 nt, Artificial Sequence
  Description of Artificial Sequence: Synthetic oligonucleotide
aaacuguuaacauuuaugg

SEQ ID NO: 1102384 - RNA, 19 nt, Artificial Sequence
  Description of Artificial Sequence: Synthetic oligonucleotide
gauguaaugagucagacgc

SEQ ID NO: 1102385 - RNA, 19 nt, Artificial Sequence
  Description of Artificial Sequence: Synthetic oligonucleotide
aagaguaucauuuaugaga

SEQ ID NO: 1102386 - RNA, 19 nt, Artificial Sequence
  Description of Artificial Sequence: Synthetic oligonucleotide
aauauuccaaguuugacca

SEQ ID NO: 1102387 - RNA, 19 nt, Artificial Sequence
  Description of Artificial Sequence: Synthetic oligonucleotide
uuugacagcaacuuuaaag

SEQ ID NO: 1102388 - RNA, 19 nt, Artificial Sequence
  Description of Artificial Sequence: Synthetic oligonucleotide
aaugcugacagaacgaugc

SEQ ID NO: 1102389 - RNA, 19 nt, Artificial Sequence
  Description of Artificial Sequence: Synthetic oligonucleotide
uuaauuagaauauuccaag

SEQ ID NO: 1102390 - RNA, 19 nt, Artificial Sequence
  Description of Artificial Sequence: Synthetic oligonucleotide
auuaugagaguacagagag

SEQ ID NO: 1102391 - RNA, 19 nt, Artificial Sequence
  Description of Artificial Sequence: Synthetic oligonucleotide
uuuauuuaguacuagugcc

SEQ ID NO: 1102392 - RNA, 19 nt, Artificial Sequence
  Description of Artificial Sequence: Synthetic oligonucleotide
gucaauuuaaucuuuauac

SEQ ID NO: 1102393 - RNA, 19 nt, Artificial Sequence
  Description of Artificial Sequence: Synthetic oligonucleotide
auaacaaagacacaugcug

SEQ ID NO: 1102394 - RNA, 19 nt, Artificial Sequence
  Description of Artificial Sequence: Synthetic oligonucleotide
gauacaagaauaaaagaag

SEQ ID NO: 1102395 - RNA, 19 nt, Artificial Sequence
  Description of Artificial Sequence: Synthetic oligonucleotide
ugagaaaguguucugauga

SEQ ID NO: 1102396 - RNA, 19 nt, Artificial Sequence
  Description of Artificial Sequence: Synthetic oligonucleotide
aauuguaauauuuccuucu

SEQ ID NO: 1102397 - RNA, 19 nt, Artificial Sequence
  Description of Artificial Sequence: Synthetic oligonucleotide
uauaagaacaagaucuuga

SEQ ID NO: 1102398 - RNA, 19 nt, Artificial Sequence
  Description of Artificial Sequence: Synthetic oligonucleotide
uuauugaacaacuacucug

SEQ ID NO: 1102399 - RNA, 19 nt, Artificial Sequence
  Description of Artificial Sequence: Synthetic oligonucleotide
uuagaauauuccaaguuug

SEQ ID NO: 1102400 - RNA, 19 nt, Artificial Sequence
  Description of Artificial Sequence: Synthetic oligonucleotide
ugucaaaucccaacaagcg

SEQ ID NO: 1102401 - RNA, 19 nt, Artificial Sequence
  Description of Artificial Sequence: Synthetic oligonucleotide
aacagauauuuauugaaca

SEQ ID NO: 1102402 - RNA, 19 nt, Artificial Sequence
  Description of Artificial Sequence: Synthetic oligonucleotide
aauugaaguaauucauaag

SEQ ID NO: 1102403 - RNA, 19 nt, Artificial Sequence
  Description of Artificial Sequence: Synthetic oligonucleotide
auagacacaaguccacucc

SEQ ID NO: 1102404 - RNA, 19 nt, Artificial Sequence
  Description of Artificial Sequence: Synthetic oligonucleotide
ucaccaaccuauaagaaca

SEQ ID NO: 1102405 - RNA, 19 nt, Artificial Sequence
  Description of Artificial Sequence: Synthetic oligonucleotide
aagaucuugacccaaacuu

SEQ ID NO: 1102406 - RNA, 19 nt, Artificial Sequence
  Description of Artificial Sequence: Synthetic oligonucleotide
aagaagauagcccugccca

SEQ ID NO: 1102407 - RNA, 19 nt, Artificial Sequence
  Description of Artificial Sequence: Synthetic oligonucleotide
agcuguaaggaugugaugc

SEQ ID NO: 1102408 - RNA, 19 nt, Artificial Sequence
  Description of Artificial Sequence: Synthetic oligonucleotide
uaaugagucagacgcaggg

SEQ ID NO: 1102409 - RNA, 19 nt, Artificial Sequence
  Description of Artificial Sequence: Synthetic oligonucleotide
acuguuaacauuuauggaa

SEQ ID NO: 1102410 - RNA, 19 nt, Artificial Sequence
  Description of Artificial Sequence: Synthetic oligonucleotide
gauacaaagagacccgucc

SEQ ID NO: 1102411 - RNA, 19 nt, Artificial Sequence
  Description of Artificial Sequence: Synthetic oligonucleotide
aagaaaauacuucaccuaa

SEQ ID NO: 1102412 - RNA, 19 nt, Artificial Sequence
  Description of Artificial Sequence: Synthetic oligonucleotide
ucauuaugagaguacagag

SEQ ID NO: 1102413 - RNA, 19 nt, Artificial Sequence
  Description of Artificial Sequence: Synthetic oligonucleotide
ugcacuguuugucaaaucc

SEQ ID NO: 1102414 - RNA, 19 nt, Artificial Sequence
  Description of Artificial Sequence: Synthetic oligonucleotide
aaucauucguccaucaggg

SEQ ID NO: 1102415 - RNA, 19 nt, Artificial Sequence
  Description of Artificial Sequence: Synthetic oligonucleotide
accuauaagaacaagaucu

SEQ ID NO: 1102416 - RNA, 19 nt, Artificial Sequence
  Description of Artificial Sequence: Synthetic oligonucleotide
caaguuugaccaaagauac

SEQ ID NO: 1102417 - RNA, 19 nt, Artificial Sequence
  Description of Artificial Sequence: Synthetic oligonucleotide
aaucccauagccauguggg

SEQ ID NO: 1102418 - RNA, 19 nt, Artificial Sequence
  Description of Artificial Sequence: Synthetic oligonucleotide
aauuagaauauuccaaguu

SEQ ID NO: 1102419 - RNA, 19 nt, Artificial Sequence
  Description of Artificial Sequence: Synthetic oligonucleotide
aauguacugauaaaugaag

SEQ ID NO: 1102420 - RNA, 19 nt, Artificial Sequence
  Description of Artificial Sequence: Synthetic oligonucleotide
uguaaguugugccuaaaac

SEQ ID NO: 1102421 - RNA, 19 nt, Artificial Sequence
  Description of Artificial Sequence: Synthetic oligonucleotide
augcuggagauuuaaauuc

SEQ ID NO: 1102422 - RNA, 19 nt, Artificial Sequence
  Description of Artificial Sequence: Synthetic oligonucleotide
uguucaccaaccuauaaga

SEQ ID NO: 1102423 - RNA, 19 nt, Artificial Sequence
  Description of Artificial Sequence: Synthetic oligonucleotide
uuucuagaauuucacaaca

SEQ ID NO: 1102424 - RNA, 19 nt, Artificial Sequence
  Description of Artificial Sequence: Synthetic oligonucleotide
uugaccaaagauacaaacc

SEQ ID NO: 1102425 - RNA, 19 nt, Artificial Sequence
  Description of Artificial Sequence: Synthetic oligonucleotide
ugugcucaauauuugacag

SEQ ID NO: 1102426 - RNA, 19 nt, Artificial Sequence
  Description of Artificial Sequence: Synthetic oligonucleotide
uuuaguacuagugccacag

SEQ ID NO: 1102427 - RNA, 19 nt, Artificial Sequence
  Description of Artificial Sequence: Synthetic oligonucleotide
aauugugguaguuuuaauu

SEQ ID NO: 1102428 - RNA, 19 nt, Artificial Sequence
  Description of Artificial Sequence: Synthetic oligonucleotide
agcgaggugagacaggucg

SEQ ID NO: 1102429 - RNA, 19 nt, Artificial Sequence
  Description of Artificial Sequence: Synthetic oligonucleotide
aaaaucucacaugagauaa

SEQ ID NO: 1102430 - RNA, 19 nt, Artificial Sequence
  Description of Artificial Sequence: Synthetic oligonucleotide
acuuaggugacaugugggc

SEQ ID NO: 1102431 - RNA, 19 nt, Artificial Sequence
  Description of Artificial Sequence: Synthetic oligonucleotide
aacuggugugccaacaucc

SEQ ID NO: 1102432 - RNA, 19 nt, Artificial Sequence
  Description of Artificial Sequence: Synthetic oligonucleotide
uauugaacaacuacucugu

SEQ ID NO: 1102433 - RNA, 19 nt, Artificial Sequence
  Description of Artificial Sequence: Synthetic oligonucleotide
ucagacgcagggaacagcg

SEQ ID NO: 1102434 - RNA, 19 nt, Artificial Sequence
  Description of Artificial Sequence: Synthetic oligonucleotide
uuugaccaaagauacaaac

SEQ ID NO: 1102435 - RNA, 19 nt, Artificial Sequence
  Description of Artificial Sequence: Synthetic oligonucleotide
aagaguuccuuauuugaug

SEQ ID NO: 1102436 - RNA, 19 nt, Artificial Sequence
  Description of Artificial Sequence: Synthetic oligonucleotide
aacgccauuaucugugcuc

SEQ ID NO: 1102437 - RNA, 19 nt, Artificial Sequence
  Description of Artificial Sequence: Synthetic oligonucleotide
auggucgaaauggagaugc

SEQ ID NO: 1102438 - RNA, 19 nt, Artificial Sequence
  Description of Artificial Sequence: Synthetic oligonucleotide
ucaauauuugacagcaacu

SEQ ID NO: 1102439 - RNA, 19 nt, Artificial Sequence
  Description of Artificial Sequence: Synthetic oligonucleotide
ucauaagccaaacaccaga

SEQ ID NO: 1102440 - RNA, 19 nt, Artificial Sequence
  Description of Artificial Sequence: Synthetic oligonucleotide
cauuuaugagaauaacgcc

SEQ ID NO: 1102441 - RNA, 19 nt, Artificial Sequence
  Description of Artificial Sequence: Synthetic oligonucleotide
cuuuaaaggccaaauguac

SEQ ID NO: 1102442 - RNA, 19 nt, Artificial Sequence
  Description of Artificial Sequence: Synthetic oligonucleotide
caacuacucuguuagaucc

SEQ ID NO: 1102443 - RNA, 19 nt, Artificial Sequence
  Description of Artificial Sequence: Synthetic oligonucleotide
gaagcaaaguucuuugaug

SEQ ID NO: 1102444 - RNA, 19 nt, Artificial Sequence
  Description of Artificial Sequence: Synthetic oligonucleotide
auuagaauauuccaaguuu

SEQ ID NO: 1102445 - RNA, 19 nt, Artificial Sequence
  Description of Artificial Sequence: Synthetic oligonucleotide
caaaccuaaauuuugguga

SEQ ID NO: 1102446 - RNA, 19 nt, Artificial Sequence
  Description of Artificial Sequence: Synthetic oligonucleotide
acaaaccuaaauuuuggug

SEQ ID NO: 1102447 - RNA, 19 nt, Artificial Sequence
  Description of Artificial Sequence: Synthetic oligonucleotide
caaucugacaauguguugg

SEQ ID NO: 1102448 - RNA, 19 nt, Artificial Sequence
  Description of Artificial Sequence: Synthetic oligonucleotide
uauacuuaauaguuuguaa

SEQ ID NO: 1102449 - RNA, 19 nt, Artificial Sequence
  Description of Artificial Sequence: Synthetic oligonucleotide
aagauauuuuguugcaaga

SEQ ID NO: 1102450 - RNA, 19 nt, Artificial Sequence
  Description of Artificial Sequence: Synthetic oligonucleotide
gaaaguguucugaugacag

SEQ ID NO: 1102451 - RNA, 19 nt, Artificial Sequence
  Description of Artificial Sequence: Synthetic oligonucleotide
gugccuaaaacuuuggcug

SEQ ID NO: 1102452 - RNA, 19 nt, Artificial Sequence
  Description of Artificial Sequence: Synthetic oligonucleotide
accuaaauugaaguaauuc

SEQ ID NO: 1102453 - RNA, 19 nt, Artificial Sequence
  Description of Artificial Sequence: Synthetic oligonucleotide
uuugggaugcagcuguaag

SEQ ID NO: 1102454 - RNA, 19 nt, Artificial Sequence
  Description of Artificial Sequence: Synthetic oligonucleotide
agaauaacgccauuaucug

SEQ ID NO: 1102455 - RNA, 19 nt, Artificial Sequence
  Description of Artificial Sequence: Synthetic oligonucleotide
ugcaagaguaucauuuaug

SEQ ID NO: 1102456 - RNA, 19 nt, Artificial Sequence
  Description of Artificial Sequence: Synthetic oligonucleotide
aauuuuggugaaagcagac

SEQ ID NO: 1102457 - RNA, 19 nt, Artificial Sequence
  Description of Artificial Sequence: Synthetic oligonucleotide
uuuaugagaauaacgccau

SEQ ID NO: 1102458 - RNA, 19 nt, Artificial Sequence
  Description of Artificial Sequence: Synthetic oligonucleotide
uuuggguaaacagucaaca

SEQ ID NO: 1102459 - RNA, 19 nt, Artificial Sequence
  Description of Artificial Sequence: Synthetic oligonucleotide
agaacgaugcugcaugguc

SEQ ID NO: 1102460 - RNA, 19 nt, Artificial Sequence
  Description of Artificial Sequence: Synthetic oligonucleotide
cucaauauuugacagcaac

SEQ ID NO: 1102461 - RNA, 19 nt, Artificial Sequence
  Description of Artificial Sequence: Synthetic oligonucleotide
aguacagagagcgaaucac

SEQ ID NO: 1102462 - RNA, 19 nt, Artificial Sequence
  Description of Artificial Sequence: Synthetic oligonucleotide
uguuagauccucucccagg

SEQ ID NO: 1102463 - RNA, 19 nt, Artificial Sequence
  Description of Artificial Sequence: Synthetic oligonucleotide
acaacuacucuguuagauc

SEQ ID NO: 1102464 - RNA, 19 nt, Artificial Sequence
  Description of Artificial Sequence: Synthetic oligonucleotide
augugaugcaguuuccacg

SEQ ID NO: 1102465 - RNA, 19 nt, Artificial Sequence
  Description of Artificial Sequence: Synthetic oligonucleotide
ugggcauaccaucugauac

SEQ ID NO: 1102466 - RNA, 19 nt, Artificial Sequence
  Description of Artificial Sequence: Synthetic oligonucleotide
gaaucccauagccaugugg

SEQ ID NO: 1102467 - RNA, 19 nt, Artificial Sequence
  Description of Artificial Sequence: Synthetic oligonucleotide
aacuguuaacauuuaugga

SEQ ID NO: 1102468 - RNA, 19 nt, Artificial Sequence
  Description of Artificial Sequence: Synthetic oligonucleotide
cuuuggcugauacaaagag

SEQ ID NO: 1102469 - RNA, 19 nt, Artificial Sequence
  Description of Artificial Sequence: Synthetic oligonucleotide
acauauguguucaccaacc

SEQ ID NO: 1102470 - RNA, 19 nt, Artificial Sequence
  Description of Artificial Sequence: Synthetic oligonucleotide
uucaacagauauuuauuga

SEQ ID NO: 1102471 - RNA, 19 nt, Artificial Sequence
  Description of Artificial Sequence: Synthetic oligonucleotide
gacagaacgaugcugcaug

SEQ ID NO: 1102472 - RNA, 19 nt, Artificial Sequence
  Description of Artificial Sequence: Synthetic oligonucleotide
uguacugauaaaugaagau

SEQ ID NO: 1102473 - RNA, 19 nt, Artificial Sequence
  Description of Artificial Sequence: Synthetic oligonucleotide
ucauucguccaucagggcu

SEQ ID NO: 1102474 - RNA, 19 nt, Artificial Sequence
  Description of Artificial Sequence: Synthetic oligonucleotide
cuaaacuauucucuuuggg

SEQ ID NO: 1102475 - RNA, 19 nt, Artificial Sequence
  Description of Artificial Sequence: Synthetic oligonucleotide
uggauacaagaauaaaaga

SEQ ID NO: 1102476 - RNA, 19 nt, Artificial Sequence
  Description of Artificial Sequence: Synthetic oligonucleotide
uuugauguagccccugccu

SEQ ID NO: 1102477 - RNA, 19 nt, Artificial Sequence
  Description of Artificial Sequence: Synthetic oligonucleotide
uacuucaccuaaauugaag

SEQ ID NO: 1102478 - RNA, 19 nt, Artificial Sequence
  Description of Artificial Sequence: Synthetic oligonucleotide
ugcucaauauuugacagca

SEQ ID NO: 1102479 - RNA, 19 nt, Artificial Sequence
  Description of Artificial Sequence: Synthetic oligonucleotide
aguauauuaauuagaauau

SEQ ID NO: 1102480 - RNA, 19 nt, Artificial Sequence
  Description of Artificial Sequence: Synthetic oligonucleotide
augccagauggccaaauac

SEQ ID NO: 1102481 - RNA, 19 nt, Artificial Sequence
  Description of Artificial Sequence: Synthetic oligonucleotide
aaugaacucuucuggacaa

SEQ ID NO: 1102482 - RNA, 19 nt, Artificial Sequence
  Description of Artificial Sequence: Synthetic oligonucleotide
aauaacaaagacacaugcu

SEQ ID NO: 1102483 - RNA, 19 nt, Artificial Sequence
  Description of Artificial Sequence: Synthetic oligonucleotide
auuaauuagaauauuccaa

SEQ ID NO: 1102484 - RNA, 19 nt, Artificial Sequence
  Description of Artificial Sequence: Synthetic oligonucleotide
uucaccaaccuauaagaac

SEQ ID NO: 1102485 - RNA, 19 nt, Artificial Sequence
  Description of Artificial Sequence: Synthetic oligonucleotide
gagcgaaucacccguagag

SEQ ID NO: 1102486 - RNA, 19 nt, Artificial Sequence
  Description of Artificial Sequence: Synthetic oligonucleotide
uuuauggaaucuucuuuug

SEQ ID NO: 1102487 - RNA, 19 nt, Artificial Sequence
  Description of Artificial Sequence: Synthetic oligonucleotide
gaauacccaagcucagugg

SEQ ID NO: 1102488 - RNA, 19 nt, Artificial Sequence
  Description of Artificial Sequence: Synthetic oligonucleotide
agauauuuuguugcaagag

SEQ ID NO: 1102489 - RNA, 19 nt, Artificial Sequence
  Description of Artificial Sequence: Synthetic oligonucleotide
ugcuuuccaaugcugagga

SEQ ID NO: 1102490 - RNA, 19 nt, Artificial Sequence
  Description of Artificial Sequence: Synthetic oligonucleotide
aaauuuuggugaaagcaga

SEQ ID NO: 1102491 - RNA, 19 nt, Artificial Sequence
  Description of Artificial Sequence: Synthetic oligonucleotide
acaagaucuugacccaaac

SEQ ID NO: 1102492 - RNA, 19 nt, Artificial Sequence
  Description of Artificial Sequence: Synthetic oligonucleotide
aagcgaaucccauagccau

SEQ ID NO: 1102493 - RNA, 19 nt, Artificial Sequence
  Description of Artificial Sequence: Synthetic oligonucleotide
ucugugcucaauauuugac

SEQ ID NO: 1102494 - RNA, 19 nt, Artificial Sequence
  Description of Artificial Sequence: Synthetic oligonucleotide
aauagcaccuuagacccug

SEQ ID NO: 1102495 - RNA, 19 nt, Artificial Sequence
  Description of Artificial Sequence: Synthetic oligonucleotide
ccuuauuugauguaaguug

SEQ ID NO: 1102496 - RNA, 19 nt, Artificial Sequence
  Description of Artificial Sequence: Synthetic oligonucleotide
uacuuaauaguuuguaauu

SEQ ID NO: 1102497 - RNA, 19 nt, Artificial Sequence
  Description of Artificial Sequence: Synthetic oligonucleotide
aagagacccguccacuaag

SEQ ID NO: 1102498 - RNA, 19 nt, Artificial Sequence
  Description of Artificial Sequence: Synthetic oligonucleotide
uaguacuagugccacaggu

SEQ ID NO: 1102499 - RNA, 19 nt, Artificial Sequence
  Description of Artificial Sequence: Synthetic oligonucleotide
gaagaagauagcccugccc

SEQ ID NO: 1102500 - RNA, 19 nt, Artificial Sequence
  Description of Artificial Sequence: Synthetic oligonucleotide
gaaaucauucguccaucag

SEQ ID NO: 1102501 - RNA, 19 nt, Artificial Sequence
  Description of Artificial Sequence: Synthetic oligonucleotide
gucgaaauggagaugcccg

SEQ ID NO: 1102502 - RNA, 19 nt, Artificial Sequence
  Description of Artificial Sequence: Synthetic oligonucleotide
ucacaugagauaacuugug

SEQ ID NO: 1102503 - RNA, 19 nt, Artificial Sequence
  Description of Artificial Sequence: Synthetic oligonucleotide
aaauggagaugcccggaug

SEQ ID NO: 1102504 - RNA, 19 nt, Artificial Sequence
  Description of Artificial Sequence: Synthetic oligonucleotide
aaucugacaauguguugga

SEQ ID NO: 1102505 - RNA, 19 nt, Artificial Sequence
  Description of Artificial Sequence: Synthetic oligonucleotide
ugagaauaacgccauuauc

SEQ ID NO: 1102506 - RNA, 19 nt, Artificial Sequence
  Description of Artificial Sequence: Synthetic oligonucleotide
aacaacuacucuguuagau

SEQ ID NO: 1102507 - RNA, 19 nt, Artificial Sequence
  Description of Artificial Sequence: Synthetic oligonucleotide
cucuguuagauccucuccc

SEQ ID NO: 1102508 - RNA, 19 nt, Artificial Sequence
  Description of Artificial Sequence: Synthetic oligonucleotide
guguucaccaaccuauaag

SEQ ID NO: 1102509 - RNA, 19 nt, Artificial Sequence
  Description of Artificial Sequence: Synthetic oligonucleotide
uuauuugauguaaguugug

SEQ ID NO: 1102510 - RNA, 19 nt, Artificial Sequence
  Description of Artificial Sequence: Synthetic oligonucleotide
ucuucgauguaaugaguca

SEQ ID NO: 1102511 - RNA, 19 nt, Artificial Sequence
  Description of Artificial Sequence: Synthetic oligonucleotide
uuccauucaacagauauuu

SEQ ID NO: 1102512 - RNA, 19 nt, Artificial Sequence
  Description of Artificial Sequence: Synthetic oligonucleotide
ugacccaaacuuauaagau

SEQ ID NO: 1102513 - RNA, 19 nt, Artificial Sequence
  Description of Artificial Sequence: Synthetic oligonucleotide
aauacuugggucacauaug

SEQ ID NO: 1102514 - RNA, 19 nt, Artificial Sequence
  Description of Artificial Sequence: Synthetic oligonucleotide
ucgaaauggagaugcccgg

SEQ ID NO: 1102515 - RNA, 19 nt, Artificial Sequence
  Description of Artificial Sequence: Synthetic oligonucleotide
uggccaaauacuuggguca

SEQ ID NO: 1102516 - RNA, 19 nt, Artificial Sequence
  Description of Artificial Sequence: Synthetic oligonucleotide
gaacgaugcugcauggucg

SEQ ID NO: 1102517 - RNA, 19 nt, Artificial Sequence
  Description of Artificial Sequence: Synthetic oligonucleotide
ugcuugagcaccgaagaag

SEQ ID NO: 1102518 - RNA, 19 nt, Artificial Sequence
  Description of Artificial Sequence: Synthetic oligonucleotide
aggaccacaucauuaugag

SEQ ID NO: 1102519 - RNA, 19 nt, Artificial Sequence
  Description of Artificial Sequence: Synthetic oligonucleotide
accuaaauuuuggugaaag

SEQ ID NO: 1102520 - RNA, 19 nt, Artificial Sequence
  Description of Artificial Sequence: Synthetic oligonucleotide
cuagcagaaggaccaauag

SEQ ID NO: 1102521 - RNA, 19 nt, Artificial Sequence
  Description of Artificial Sequence: Synthetic oligonucleotide
caaugcugaggauaggaac

SEQ ID NO: 1102522 - RNA, 19 nt, Artificial Sequence
  Description of Artificial Sequence: Synthetic oligonucleotide
gaugugaugcaguuuccac

SEQ ID NO: 1102523 - RNA, 19 nt, Artificial Sequence
  Description of Artificial Sequence: Synthetic oligonucleotide
acagagagcgaaucacccg

SEQ ID NO: 1102524 - RNA, 19 nt, Artificial Sequence
  Description of Artificial Sequence: Synthetic oligonucleotide
uaugagaauaacgccauua

SEQ ID NO: 1102525 - RNA, 19 nt, Artificial Sequence
  Description of Artificial Sequence: Synthetic oligonucleotide
uuaguacuagugccacagg

SEQ ID NO: 1102526 - RNA, 19 nt, Artificial Sequence
  Description of Artificial Sequence: Synthetic oligonucleotide
caugagauaacuuguguaa

SEQ ID NO: 1102527 - RNA, 19 nt, Artificial Sequence
  Description of Artificial Sequence: Synthetic oligonucleotide
agaagauagcccugcccac

SEQ ID NO: 1102528 - RNA, 19 nt, Artificial Sequence
  Description of Artificial Sequence: Synthetic oligonucleotide
acaugcuggagauuuaaau

SEQ ID NO: 1102529 - RNA, 19 nt, Artificial Sequence
  Description of Artificial Sequence: Synthetic oligonucleotide
uucgauguaaugagucaga

SEQ ID NO: 1102530 - RNA, 19 nt, Artificial Sequence
  Description of Artificial Sequence: Synthetic oligonucleotide
ugugguaguuuuaauugua

SEQ ID NO: 1102531 - RNA, 19 nt, Artificial Sequence
  Description of Artificial Sequence: Synthetic oligonucleotide
aacuauucucuuuggggaa

SEQ ID NO: 1102532 - RNA, 19 nt, Artificial Sequence
  Description of Artificial Sequence: Synthetic oligonucleotide
aaaguguucugaugacagu

SEQ ID NO: 1102533 - RNA, 19 nt, Artificial Sequence
  Description of Artificial Sequence: Synthetic oligonucleotide
ugagaguacagagagcgaa

SEQ ID NO: 1102534 - RNA, 19 nt, Artificial Sequence
  Description of Artificial Sequence: Synthetic oligonucleotide
uacaaagagacccguccac

SEQ ID NO: 1102535 - RNA, 19 nt, Artificial Sequence
  Description of Artificial Sequence: Synthetic oligonucleotide
uuaugagaguacagagagc

SEQ ID NO: 1102536 - RNA, 19 nt, Artificial Sequence
  Description of Artificial Sequence: Synthetic oligonucleotide
gcuucuucgauguaaugag

SEQ ID NO: 1102537 - RNA, 19 nt, Artificial Sequence
  Description of Artificial Sequence: Synthetic oligonucleotide
aaaucucacaugagauaac

SEQ ID NO: 1102538 - RNA, 19 nt, Artificial Sequence
  Description of Artificial Sequence: Synthetic oligonucleotide
ucuagcagaaggaccaaua

SEQ ID NO: 1102539 - RNA, 19 nt, Artificial Sequence
  Description of Artificial Sequence: Synthetic oligonucleotide
agaguaucauuuaugagaa

SEQ ID NO: 1102540 - RNA, 19 nt, Artificial Sequence
  Description of Artificial Sequence: Synthetic oligonucleotide
acccaaacuuauaagaucu

SEQ ID NO: 1102541 - RNA, 19 nt, Artificial Sequence
  Description of Artificial Sequence: Synthetic oligonucleotide
uucuagaauuucacaacaa

SEQ ID NO: 1102542 - RNA, 19 nt, Artificial Sequence
  Description of Artificial Sequence: Synthetic oligonucleotide
acugagcuuauuccuuuuc

SEQ ID NO: 1102543 - RNA, 19 nt, Artificial Sequence
  Description of Artificial Sequence: Synthetic oligonucleotide
acaugagauaacuugugua

SEQ ID NO: 1102544 - RNA, 19 nt, Artificial Sequence
  Description of Artificial Sequence: Synthetic oligonucleotide
caucauuaugagaguacag

SEQ ID NO: 1102545 - RNA, 19 nt, Artificial Sequence
  Description of Artificial Sequence: Synthetic oligonucleotide
augagaauaacgccauuau

SEQ ID NO: 1102546 - RNA, 19 nt, Artificial Sequence
  Description of Artificial Sequence: Synthetic oligonucleotide
cuuauuugauguaaguugu

SEQ ID NO: 1102547 - RNA, 19 nt, Artificial Sequence
  Description of Artificial Sequence: Synthetic oligonucleotide
guaguuuuaauuguaauau

SEQ ID NO: 1102548 - RNA, 19 nt, Artificial Sequence
  Description of Artificial Sequence: Synthetic oligonucleotide
cauucguccaucagggcug

SEQ ID NO: 1102549 - RNA, 19 nt, Artificial Sequence
  Description of Artificial Sequence: Synthetic oligonucleotide
cuucgauguaaugagucag

SEQ ID NO: 1102550 - RNA, 19 nt, Artificial Sequence
  Description of Artificial Sequence: Synthetic oligonucleotide
augauucaagaaccccugg

SEQ ID NO: 1102551 - RNA, 19 nt, Artificial Sequence
  Description of Artificial Sequence: Synthetic oligonucleotide
aaagagacccguccacuaa

SEQ ID NO: 1102552 - RNA, 19 nt, Artificial Sequence
  Description of Artificial Sequence: Synthetic oligonucleotide
cauuaugagaguacagaga

SEQ ID NO: 1102553 - RNA, 19 nt, Artificial Sequence
  Description of Artificial Sequence: Synthetic oligonucleotide
ugagauaacuuguguaauu

SEQ ID NO: 1102554 - RNA, 19 nt, Artificial Sequence
  Description of Artificial Sequence: Synthetic oligonucleotide
uuggggaaugaacucuucu

SEQ ID NO: 1102555 - RNA, 19 nt, Artificial Sequence
  Description of Artificial Sequence: Synthetic oligonucleotide
guagccccugccuacauug

SEQ ID NO: 1102556 - RNA, 19 nt, Artificial Sequence
  Description of Artificial Sequence: Synthetic oligonucleotide
agaaaucauucguccauca

SEQ ID NO: 1102557 - RNA, 19 nt, Artificial Sequence
  Description of Artificial Sequence: Synthetic oligonucleotide
auauuugacagcaacuuua

SEQ ID NO: 1102558 - RNA, 19 nt, Artificial Sequence
  Description of Artificial Sequence: Synthetic oligonucleotide
ugacaugugggcauaccau

SEQ ID NO: 1102559 - RNA, 19 nt, Artificial Sequence
  Description of Artificial Sequence: Synthetic oligonucleotide
uagacacaaguccacuccu

SEQ ID NO: 1102560 - RNA, 19 nt, Artificial Sequence
  Description of Artificial Sequence: Synthetic oligonucleotide
cuuuggguaaacagucaac

SEQ ID NO: 1102561 - RNA, 19 nt, Artificial Sequence
  Description of Artificial Sequence: Synthetic oligonucleotide
acagaacgaugcugcaugg

SEQ ID NO: 1102562 - RNA, 19 nt, Artificial Sequence
  Description of Artificial Sequence: Synthetic oligonucleotide
uugaacaacuacucuguua

SEQ ID NO: 1102563 - RNA, 19 nt, Artificial Sequence
  Description of Artificial Sequence: Synthetic oligonucleotide
aauggaagugacugagcuu

SEQ ID NO: 1102564 - RNA, 19 nt, Artificial Sequence
  Description of Artificial Sequence: Synthetic oligonucleotide
uuuguugcaagaguaucau

SEQ ID NO: 1102565 - RNA, 19 nt, Artificial Sequence
  Description of Artificial Sequence: Synthetic oligonucleotide
gacaugugggcauaccauc

SEQ ID NO: 1102566 - RNA, 19 nt, Artificial Sequence
  Description of Artificial Sequence: Synthetic oligonucleotide
acaguauauuaauuagaau

SEQ ID NO: 1102567 - RNA, 19 nt, Artificial Sequence
  Description of Artificial Sequence: Synthetic oligonucleotide
auauuuuguugcaagagua

SEQ ID NO: 1102568 - RNA, 19 nt, Artificial Sequence
  Description of Artificial Sequence: Synthetic oligonucleotide
aucauucguccaucagggc

SEQ ID NO: 1102569 - RNA, 19 nt, Artificial Sequence
  Description of Artificial Sequence: Synthetic oligonucleotide
aguuuccacggucucgcuc

SEQ ID NO: 1102570 - RNA, 19 nt, Artificial Sequence
  Description of Artificial Sequence: Synthetic oligonucleotide
gacccguccacuaaggcac

SEQ ID NO: 1102571 - RNA, 19 nt, Artificial Sequence
  Description of Artificial Sequence: Synthetic oligonucleotide
cacauauguguucaccaac

SEQ ID NO: 1102572 - RNA, 19 nt, Artificial Sequence
  Description of Artificial Sequence: Synthetic oligonucleotide
gagaaaguguucugaugac

SEQ ID NO: 1102573 - RNA, 19 nt, Artificial Sequence
  Description of Artificial Sequence: Synthetic oligonucleotide
gcaccuuagacccugugag

SEQ ID NO: 1102574 - RNA, 19 nt, Artificial Sequence
  Description of Artificial Sequence: Synthetic oligonucleotide
uguguucaccaaccuauaa

SEQ ID NO: 1102575 - RNA, 19 nt, Artificial Sequence
  Description of Artificial Sequence: Synthetic oligonucleotide
uauuccaaguuugaccaaa

SEQ ID NO: 1102576 - RNA, 19 nt, Artificial Sequence
  Description of Artificial Sequence: Synthetic oligonucleotide
ucgacuuaggugacaugug

SEQ ID NO: 1102577 - RNA, 19 nt, Artificial Sequence
  Description of Artificial Sequence: Synthetic oligonucleotide
uaaaggccaaauguacuga

SEQ ID NO: 1102578 - RNA, 19 nt, Artificial Sequence
  Description of Artificial Sequence: Synthetic oligonucleotide
augagucagacgcagggaa

SEQ ID NO: 1102579 - RNA, 19 nt, Artificial Sequence
  Description of Artificial Sequence: Synthetic oligonucleotide
aacaagagccacaugcaaa

SEQ ID NO: 1102580 - RNA, 19 nt, Artificial Sequence
  Description of Artificial Sequence: Synthetic oligonucleotide
uugcaagaguaucauuuau

SEQ ID NO: 1102581 - RNA, 19 nt, Artificial Sequence
  Description of Artificial Sequence: Synthetic oligonucleotide
guuuccacggucucgcuca

SEQ ID NO: 1102582 - RNA, 19 nt, Artificial Sequence
  Description of Artificial Sequence: Synthetic oligonucleotide
acuacucuguuagauccuc

SEQ ID NO: 1102583 - RNA, 19 nt, Artificial Sequence
  Description of Artificial Sequence: Synthetic oligonucleotide
ugaugcaguuuccacgguc

SEQ ID NO: 1102584 - RNA, 19 nt, Artificial Sequence
  Description of Artificial Sequence: Synthetic oligonucleotide
aucugugcucaauauuuga

SEQ ID NO: 1102585 - RNA, 19 nt, Artificial Sequence
  Description of Artificial Sequence: Synthetic oligonucleotide
gugagaaaguguucugaug

SEQ ID NO: 1102586 - RNA, 19 nt, Artificial Sequence
  Description of Artificial Sequence: Synthetic oligonucleotide
uuggguaaacagucaacaa

SEQ ID NO: 1102587 - RNA, 19 nt, Artificial Sequence
  Description of Artificial Sequence: Synthetic oligonucleotide
ggcuucuuuggguaaacag

SEQ ID NO: 1102588 - RNA, 19 nt, Artificial Sequence
  Description of Artificial Sequence: Synthetic oligonucleotide
ugccuaaaacuuuggcuga

SEQ ID NO: 1102589 - RNA, 19 nt, Artificial Sequence
  Description of Artificial Sequence: Synthetic oligonucleotide
uccuuauuugauguaaguu

SEQ ID NO: 1102590 - RNA, 19 nt, Artificial Sequence
  Description of Artificial Sequence: Synthetic oligonucleotide
agacccguccacuaaggca

SEQ ID NO: 1102591 - RNA, 19 nt, Artificial Sequence
  Description of Artificial Sequence: Synthetic oligonucleotide
uccugaucaucaguguugc

SEQ ID NO: 1102592 - RNA, 19 nt, Artificial Sequence
  Description of Artificial Sequence: Synthetic oligonucleotide
aguugugccuaaaacuuug

SEQ ID NO: 1102593 - RNA, 19 nt, Artificial Sequence
  Description of Artificial Sequence: Synthetic oligonucleotide
uucaacaacuggugugcca

SEQ ID NO: 1102594 - RNA, 19 nt, Artificial Sequence
  Description of Artificial Sequence: Synthetic oligonucleotide
uccacuccugaucaucagu

SEQ ID NO: 1102595 - RNA, 19 nt, Artificial Sequence
  Description of Artificial Sequence: Synthetic oligonucleotide
cacaugcaaaaugaccagg

SEQ ID NO: 1102596 - RNA, 19 nt, Artificial Sequence
  Description of Artificial Sequence: Synthetic oligonucleotide
gagcgcacagucuagcaga

SEQ ID NO: 1102597 - RNA, 19 nt, Artificial Sequence
  Description of Artificial Sequence: Synthetic oligonucleotide
ugauguagccccugccuac

SEQ ID NO: 1102598 - RNA, 19 nt, Artificial Sequence
  Description of Artificial Sequence: Synthetic oligonucleotide
aggacuggcuucuuugggu

SEQ ID NO: 1102599 - RNA, 19 nt, Artificial Sequence
  Description of Artificial Sequence: Synthetic oligonucleotide
gacacaaguccacuccuga

SEQ ID NO: 1102600 - RNA, 19 nt, Artificial Sequence
  Description of Artificial Sequence: Synthetic oligonucleotide
ucgauguaaugagucagac

SEQ ID NO: 1102601 - RNA, 19 nt, Artificial Sequence
  Description of Artificial Sequence: Synthetic oligonucleotide
agcgaaucacccguagagg

SEQ ID NO: 1102602 - RNA, 19 nt, Artificial Sequence
  Description of Artificial Sequence: Synthetic oligonucleotide
agaaaguguucugaugaca

SEQ ID NO: 1102603 - RNA, 19 nt, Artificial Sequence
  Description of Artificial Sequence: Synthetic oligonucleotide
auauguguucaccaaccua

SEQ ID NO: 1102604 - RNA, 19 nt, Artificial Sequence
  Description of Artificial Sequence: Synthetic oligonucleotide
agccccugccuacauuggc

SEQ ID NO: 1102605 - RNA, 19 nt, Artificial Sequence
  Description of Artificial Sequence: Synthetic oligonucleotide
gcuugagcaccgaagaagg

SEQ ID NO: 1102606 - RNA, 19 nt, Artificial Sequence
  Description of Artificial Sequence: Synthetic oligonucleotide
ucauagacacaaguccacu

SEQ ID NO: 1102607 - RNA, 19 nt, Artificial Sequence
  Description of Artificial Sequence: Synthetic oligonucleotide
gaacaagagccacaugcaa

SEQ ID NO: 1102608 - RNA, 19 nt, Artificial Sequence
  Description of Artificial Sequence: Synthetic oligonucleotide
gaguacagagagcgaauca

SEQ ID NO: 1102609 - RNA, 19 nt, Artificial Sequence
  Description of Artificial Sequence: Synthetic oligonucleotide
gagagcgaaucacccguag

SEQ ID NO: 1102610 - RNA, 19 nt, Artificial Sequence
  Description of Artificial Sequence: Synthetic oligonucleotide
agaacaagagccacaugca

SEQ ID NO: 1102611 - RNA, 19 nt, Artificial Sequence
  Description of Artificial Sequence: Synthetic oligonucleotide
uuagauccucucccaggca

SEQ ID NO: 1102612 - RNA, 19 nt, Artificial Sequence
  Description of Artificial Sequence: Synthetic oligonucleotide
aguuuguaauugugguagu

SEQ ID NO: 1102613 - RNA, 19 nt, Artificial Sequence
  Description of Artificial Sequence: Synthetic oligonucleotide
cauaagccaaacaccagaa

SEQ ID NO: 1102614 - RNA, 19 nt, Artificial Sequence
  Description of Artificial Sequence: Synthetic oligonucleotide
caaccuauaagaacaagau

SEQ ID NO: 1102615 - RNA, 19 nt, Artificial Sequence
  Description of Artificial Sequence: Synthetic oligonucleotide
ugcagcuguaaggauguga

SEQ ID NO: 1102616 - RNA, 19 nt, Artificial Sequence
  Description of Artificial Sequence: Synthetic oligonucleotide
auuuaguacuagugccaca

SEQ ID NO: 1102617 - RNA, 19 nt, Artificial Sequence
  Description of Artificial Sequence: Synthetic oligonucleotide
uacuugggucacauaugug

SEQ ID NO: 1102618 - RNA, 19 nt, Artificial Sequence
  Description of Artificial Sequence: Synthetic oligonucleotide
aggaccaauagcaccuuag

SEQ ID NO: 1102619 - RNA, 19 nt, Artificial Sequence
  Description of Artificial Sequence: Synthetic oligonucleotide
gcugauacaaagagacccg

SEQ ID NO: 1102620 - RNA, 19 nt, Artificial Sequence
  Description of Artificial Sequence: Synthetic oligonucleotide
caguguugcuugagcaccg

SEQ ID NO: 1102621 - RNA, 19 nt, Artificial Sequence
  Description of Artificial Sequence: Synthetic oligonucleotide
gacucuugucaaauguuca

SEQ ID NO: 1102622 - RNA, 19 nt, Artificial Sequence
  Description of Artificial Sequence: Synthetic oligonucleotide
ugugggcauaccaucugau

SEQ ID NO: 1102623 - RNA, 19 nt, Artificial Sequence
  Description of Artificial Sequence: Synthetic oligonucleotide
gaugcccggaugaugccag

SEQ ID NO: 1102624 - RNA, 19 nt, Artificial Sequence
  Description of Artificial Sequence: Synthetic oligonucleotide
ccaaguuugaccaaagaua

SEQ ID NO: 1102625 - RNA, 19 nt, Artificial Sequence
  Description of Artificial Sequence: Synthetic oligonucleotide
caagcgaaucccauagcca

SEQ ID NO: 1102626 - RNA, 19 nt, Artificial Sequence
  Description of Artificial Sequence: Synthetic oligonucleotide
uugggucacauauguguuc

SEQ ID NO: 1102627 - RNA, 19 nt, Artificial Sequence
  Description of Artificial Sequence: Synthetic oligonucleotide
cugcauggucgaaauggag

SEQ ID NO: 1102628 - RNA, 19 nt, Artificial Sequence
  Description of Artificial Sequence: Synthetic oligonucleotide
gaauaacgccauuaucugu

SEQ ID NO: 1102629 - RNA, 19 nt, Artificial Sequence
  Description of Artificial Sequence: Synthetic oligonucleotide
ccaaccuauaagaacaaga

SEQ ID NO: 1102630 - RNA, 19 nt, Artificial Sequence
  Description of Artificial Sequence: Synthetic oligonucleotide
uuagacccugugagaaagu

SEQ ID NO: 1102631 - RNA, 19 nt, Artificial Sequence
  Description of Artificial Sequence: Synthetic oligonucleotide
ggaagaaaucauucgucca

SEQ ID NO: 1102632 - RNA, 19 nt, Artificial Sequence
  Description of Artificial Sequence: Synthetic oligonucleotide
ccaggaauacccaagcuca

SEQ ID NO: 1102633 - RNA, 19 nt, Artificial Sequence
  Description of Artificial Sequence: Synthetic oligonucleotide
ccuggcucgacuuagguga

SEQ ID NO: 1102634 - RNA, 19 nt, Artificial Sequence
  Description of Artificial Sequence: Synthetic oligonucleotide
acaaagagacccguccacu

SEQ ID NO: 1102635 - RNA, 19 nt, Artificial Sequence
  Description of Artificial Sequence: Synthetic oligonucleotide
guugcaagaguaucauuua

SEQ ID NO: 1102636 - RNA, 19 nt, Artificial Sequence
  Description of Artificial Sequence: Synthetic oligonucleotide
cacccugaggcaaucugac

SEQ ID NO: 1102637 - RNA, 19 nt, Artificial Sequence
  Description of Artificial Sequence: Synthetic oligonucleotide
aacaagaucuugacccaaa

SEQ ID NO: 1102638 - RNA, 19 nt, Artificial Sequence
  Description of Artificial Sequence: Synthetic oligonucleotide
augagauaacuuguguaau

SEQ ID NO: 1102639 - RNA, 19 nt, Artificial Sequence
  Description of Artificial Sequence: Synthetic oligonucleotide
aggugagacaggucgcacu

SEQ ID NO: 1102640 - RNA, 19 nt, Artificial Sequence
  Description of Artificial Sequence: Synthetic oligonucleotide
ggauaggaacaaaauaaca

SEQ ID NO: 1102641 - RNA, 19 nt, Artificial Sequence
  Description of Artificial Sequence: Synthetic oligonucleotide
caauguguuggagagaacu

SEQ ID NO: 1102642 - RNA, 19 nt, Artificial Sequence
  Description of Artificial Sequence: Synthetic oligonucleotide
caugugggcauaccaucug

SEQ ID NO: 1102643 - RNA, 19 nt, Artificial Sequence
  Description of Artificial Sequence: Synthetic oligonucleotide
ucacccguagaggacuggc

SEQ ID NO: 1102644 - RNA, 19 nt, Artificial Sequence
  Description of Artificial Sequence: Synthetic oligonucleotide
uggucgaaauggagaugcc

SEQ ID NO: 1102645 - RNA, 19 nt, Artificial Sequence
  Description of Artificial Sequence: Synthetic oligonucleotide
caccgaagaaggguggccc

SEQ ID NO: 1102646 - RNA, 19 nt, Artificial Sequence
  Description of Artificial Sequence: Synthetic oligonucleotide
aacuacucuguuagauccu

SEQ ID NO: 1102647 - RNA, 19 nt, Artificial Sequence
  Description of Artificial Sequence: Synthetic oligonucleotide
accaaccuauaagaacaag

SEQ ID NO: 1102648 - RNA, 19 nt, Artificial Sequence
  Description of Artificial Sequence: Synthetic oligonucleotide
agagacccguccacuaagg

SEQ ID NO: 1102649 - RNA, 19 nt, Artificial Sequence
  Description of Artificial Sequence: Synthetic oligonucleotide
cuucaccuaaauugaagua

SEQ ID NO: 1102650 - RNA, 19 nt, Artificial Sequence
  Description of Artificial Sequence: Synthetic oligonucleotide
agaucuugacccaaacuua

SEQ ID NO: 1102651 - RNA, 19 nt, Artificial Sequence
  Description of Artificial Sequence: Synthetic oligonucleotide
gaugcugcauggucgaaau

SEQ ID NO: 1102652 - RNA, 19 nt, Artificial Sequence
  Description of Artificial Sequence: Synthetic oligonucleotide
uuaugagaauaacgccauu

SEQ ID NO: 1102653 - RNA, 19 nt, Artificial Sequence
  Description of Artificial Sequence: Synthetic oligonucleotide
ggcauaccaucugauacag

SEQ ID NO: 1102654 - RNA, 19 nt, Artificial Sequence
  Description of Artificial Sequence: Synthetic oligonucleotide
ggagcgcacagucuagcag

SEQ ID NO: 1102655 - RNA, 19 nt, Artificial Sequence
  Description of Artificial Sequence: Synthetic oligonucleotide
ucgcacuggagcuccuucu

SEQ ID NO: 1102656 - RNA, 19 nt, Artificial Sequence
  Description of Artificial Sequence: Synthetic oligonucleotide
aguacuagugccacagguu

SEQ ID NO: 1102657 - RNA, 19 nt, Artificial Sequence
  Description of Artificial Sequence: Synthetic oligonucleotide
acaccagaagaguuccuua

SEQ ID NO: 1102658 - RNA, 19 nt, Artificial Sequence
  Description of Artificial Sequence: Synthetic oligonucleotide
aaguugugccuaaaacuuu

SEQ ID NO: 1102659 - RNA, 19 nt, Artificial Sequence
  Description of Artificial Sequence: Synthetic oligonucleotide
ggucacauauguguucacc

SEQ ID NO: 1102660 - RNA, 19 nt, Artificial Sequence
  Description of Artificial Sequence: Synthetic oligonucleotide
aaggaccaauagcaccuua

SEQ ID NO: 1102661 - RNA, 19 nt, Artificial Sequence
  Description of Artificial Sequence: Synthetic oligonucleotide
gagauaacuuguguaauuu

SEQ ID NO: 1102662 - RNA, 19 nt, Artificial Sequence
  Description of Artificial Sequence: Synthetic oligonucleotide
ggucgaaauggagaugccc

SEQ ID NO: 1102663 - RNA, 19 nt, Artificial Sequence
  Description of Artificial Sequence: Synthetic oligonucleotide
gaacaacuacucuguuaga

SEQ ID NO: 1102664 - RNA, 19 nt, Artificial Sequence
  Description of Artificial Sequence: Synthetic oligonucleotide
accagaagaguuccuuauu

SEQ ID NO: 1102665 - RNA, 19 nt, Artificial Sequence
  Description of Artificial Sequence: Synthetic oligonucleotide
aucccaaccaugacucuug

SEQ ID NO: 1102666 - RNA, 19 nt, Artificial Sequence
  Description of Artificial Sequence: Synthetic oligonucleotide
cucgacuuaggugacaugu

SEQ ID NO: 1102667 - RNA, 19 nt, Artificial Sequence
  Description of Artificial Sequence: Synthetic oligonucleotide
ugacagaacgaugcugcau

SEQ ID NO: 1102668 - RNA, 19 nt, Artificial Sequence
  Description of Artificial Sequence: Synthetic oligonucleotide
gcgaaucacccguagagga

SEQ ID NO: 1102669 - RNA, 19 nt, Artificial Sequence
  Description of Artificial Sequence: Synthetic oligonucleotide
aguccacuccugaucauca

SEQ ID NO: 1102670 - RNA, 19 nt, Artificial Sequence
  Description of Artificial Sequence: Synthetic oligonucleotide
ugacaauguguuggagaga

SEQ ID NO: 1102671 - RNA, 19 nt, Artificial Sequence
  Description of Artificial Sequence: Synthetic oligonucleotide
caaccaugacucuugucaa

SEQ ID NO: 1102672 - RNA, 19 nt, Artificial Sequence
  Description of Artificial Sequence: Synthetic oligonucleotide
auauuccaaguuugaccaa

SEQ ID NO: 1102673 - RNA, 19 nt, Artificial Sequence
  Description of Artificial Sequence: Synthetic oligonucleotide
acuauucucuuuggggaau

SEQ ID NO: 1102674 - RNA, 19 nt, Artificial Sequence
  Description of Artificial Sequence: Synthetic oligonucleotide
acccguagaggacuggcuu

SEQ ID NO: 1102675 - RNA, 19 nt, Artificial Sequence
  Description of Artificial Sequence: Synthetic oligonucleotide
accgaagaaggguggccca

SEQ ID NO: 1102676 - RNA, 19 nt, Artificial Sequence
  Description of Artificial Sequence: Synthetic oligonucleotide
cgauguaaugagucagacg

SEQ ID NO: 1102677 - RNA, 19 nt, Artificial Sequence
  Description of Artificial Sequence: Synthetic oligonucleotide
cuuuaacacauaguaggua

SEQ ID NO: 1102678 - RNA, 19 nt, Artificial Sequence
  Description of Artificial Sequence: Synthetic oligonucleotide
uuguugcaagaguaucauu

SEQ ID NO: 1102679 - RNA, 19 nt, Artificial Sequence
  Description of Artificial Sequence: Synthetic oligonucleotide
cucccaggcaccauggaua

SEQ ID NO: 1102680 - RNA, 19 nt, Artificial Sequence
  Description of Artificial Sequence: Synthetic oligonucleotide
gaggcauggaggaguggug

SEQ ID NO: 1102681 - RNA, 19 nt, Artificial Sequence
  Description of Artificial Sequence: Synthetic oligonucleotide
acaauguguuggagagaac

SEQ ID NO: 1102682 - RNA, 19 nt, Artificial Sequence
  Description of Artificial Sequence: Synthetic oligonucleotide
gagacaggucgcacuggag

SEQ ID NO: 1102683 - RNA, 19 nt, Artificial Sequence
  Description of Artificial Sequence: Synthetic oligonucleotide
gcacuguuugucaaauccc

SEQ ID NO: 1102684 - RNA, 19 nt, Artificial Sequence
  Description of Artificial Sequence: Synthetic oligonucleotide
gggcauaccaucugauaca

SEQ ID NO: 1102685 - RNA, 19 nt, Artificial Sequence
  Description of Artificial Sequence: Synthetic oligonucleotide
augacucuugucaaauguu

SEQ ID NO: 1102686 - RNA, 19 nt, Artificial Sequence
  Description of Artificial Sequence: Synthetic oligonucleotide
ggaacagcgaggugagaca

SEQ ID NO: 1102687 - RNA, 19 nt, Artificial Sequence
  Description of Artificial Sequence: Synthetic oligonucleotide
cauuaucugugcucaauau

SEQ ID NO: 1102688 - RNA, 19 nt, Artificial Sequence
  Description of Artificial Sequence: Synthetic oligonucleotide
gacccugugagaaaguguu

SEQ ID NO: 1102689 - RNA, 19 nt, Artificial Sequence
  Description of Artificial Sequence: Synthetic oligonucleotide
gaacaagaucuugacccaa

SEQ ID NO: 1102690 - RNA, 19 nt, Artificial Sequence
  Description of Artificial Sequence: Synthetic oligonucleotide
gauguagccccugccuaca

SEQ ID NO: 1102691 - RNA, 19 nt, Artificial Sequence
  Description of Artificial Sequence: Synthetic oligonucleotide
auagccauguggggaagaa

SEQ ID NO: 1102692 - RNA, 19 nt, Artificial Sequence
  Description of Artificial Sequence: Synthetic oligonucleotide
gugguaguuuuaauuguaa

SEQ ID NO: 1102693 - RNA, 19 nt, Artificial Sequence
  Description of Artificial Sequence: Synthetic oligonucleotide
agacacaaguccacuccug

SEQ ID NO: 1102694 - RNA, 19 nt, Artificial Sequence
  Description of Artificial Sequence: Synthetic oligonucleotide
ggggaagaaaucauucguc

SEQ ID NO: 1102695 - RNA, 19 nt, Artificial Sequence
  Description of Artificial Sequence: Synthetic oligonucleotide
auguaaugagucagacgca

SEQ ID NO: 1102696 - RNA, 19 nt, Artificial Sequence
  Description of Artificial Sequence: Synthetic oligonucleotide
cagcuguaaggaugugaug

SEQ ID NO: 1102697 - RNA, 19 nt, Artificial Sequence
  Description of Artificial Sequence: Synthetic oligonucleotide
ggcaccauggauacaagaa

SEQ ID NO: 1102698 - RNA, 19 nt, Artificial Sequence
  Description of Artificial Sequence: Synthetic oligonucleotide
uguagccccugccuacauu

SEQ ID NO: 1102699 - RNA, 19 nt, Artificial Sequence
  Description of Artificial Sequence: Synthetic oligonucleotide
caaagagacccguccacua

SEQ ID NO: 1102700 - RNA, 19 nt, Artificial Sequence
  Description of Artificial Sequence: Synthetic oligonucleotide
cauggucgaaauggagaug

SEQ ID NO: 1102701 - RNA, 19 nt, Artificial Sequence
  Description of Artificial Sequence: Synthetic oligonucleotide
cagagagcgaaucacccgu

SEQ ID NO: 1102702 - RNA, 19 nt, Artificial Sequence
  Description of Artificial Sequence: Synthetic oligonucleotide
agcucacugcacuguuugu

SEQ ID NO: 1102703 - RNA, 19 nt, Artificial Sequence
  Description of Artificial Sequence: Synthetic oligonucleotide
agaugcccggaugaugcca

SEQ ID NO: 1102704 - RNA, 19 nt, Artificial Sequence
  Description of Artificial Sequence: Synthetic oligonucleotide
guucaccaaccuauaagaa

SEQ ID NO: 1102705 - RNA, 19 nt, Artificial Sequence
  Description of Artificial Sequence: Synthetic oligonucleotide
cugcccacaaggagcgcac

SEQ ID NO: 1102706 - RNA, 19 nt, Artificial Sequence
  Description of Artificial Sequence: Synthetic oligonucleotide
auacuucaccuaaauugaa

SEQ ID NO: 1102707 - RNA, 19 nt, Artificial Sequence
  Description of Artificial Sequence: Synthetic oligonucleotide
gauguaaguugugccuaaa

SEQ ID NO: 1102708 - RNA, 19 nt, Artificial Sequence
  Description of Artificial Sequence: Synthetic oligonucleotide
acccugaggcaaucugaca

SEQ ID NO: 1102709 - RNA, 19 nt, Artificial Sequence
  Description of Artificial Sequence: Synthetic oligonucleotide
uuuccacggucucgcucac

SEQ ID NO: 1102710 - RNA, 19 nt, Artificial Sequence
  Description of Artificial Sequence: Synthetic oligonucleotide
gaguuccuuauuugaugua

SEQ ID NO: 1102711 - RNA, 19 nt, Artificial Sequence
  Description of Artificial Sequence: Synthetic oligonucleotide
auacccaagcucaguggca

SEQ ID NO: 1102712 - RNA, 19 nt, Artificial Sequence
  Description of Artificial Sequence: Synthetic oligonucleotide
augcugcauggucgaaaug

SEQ ID NO: 1102713 - RNA, 19 nt, Artificial Sequence
  Description of Artificial Sequence: Synthetic oligonucleotide
caggcaccauggauacaag

SEQ ID NO: 1102714 - RNA, 19 nt, Artificial Sequence
  Description of Artificial Sequence: Synthetic oligonucleotide
aggugacaugugggcauac

SEQ ID NO: 1102715 - RNA, 19 nt, Artificial Sequence
  Description of Artificial Sequence: Synthetic oligonucleotide
aucacccguagaggacugg

SEQ ID NO: 1102716 - RNA, 19 nt, Artificial Sequence
  Description of Artificial Sequence: Synthetic oligonucleotide
agcgaaucccauagccaug

SEQ ID NO: 1102717 - RNA, 19 nt, Artificial Sequence
  Description of Artificial Sequence: Synthetic oligonucleotide
cuggcucgacuuaggugac

SEQ ID NO: 1102718 - RNA, 19 nt, Artificial Sequence
  Description of Artificial Sequence: Synthetic oligonucleotide
caccuuagacccugugaga

SEQ ID NO: 1102719 - RNA, 19 nt, Artificial Sequence
  Description of Artificial Sequence: Synthetic oligonucleotide
gugggcauaccaucugaua

SEQ ID NO: 1102720 - RNA, 19 nt, Artificial Sequence
  Description of Artificial Sequence: Synthetic oligonucleotide
cuucuucgauguaaugagu

SEQ ID NO: 1102721 - RNA, 19 nt, Artificial Sequence
  Description of Artificial Sequence: Synthetic oligonucleotide
cuugggucacauauguguu

SEQ ID NO: 1102722 - RNA, 19 nt, Artificial Sequence
  Description of Artificial Sequence: Synthetic oligonucleotide
ggaccacaucauuaugaga

SEQ ID NO: 1102723 - RNA, 19 nt, Artificial Sequence
  Description of Artificial Sequence: Synthetic oligonucleotide
augagaguacagagagcga

SEQ ID NO: 1102724 - RNA, 19 nt, Artificial Sequence
  Description of Artificial Sequence: Synthetic oligonucleotide
ccacuaaggcacccugagg

SEQ ID NO: 1102725 - RNA, 19 nt, Artificial Sequence
  Description of Artificial Sequence: Synthetic oligonucleotide
ggugacaugugggcauacc

SEQ ID NO: 1102726 - RNA, 19 nt, Artificial Sequence
  Description of Artificial Sequence: Synthetic oligonucleotide
gcauggucgaaauggagau

SEQ ID NO: 1102727 - RNA, 19 nt, Artificial Sequence
  Description of Artificial Sequence: Synthetic oligonucleotide
ggaugugaugcaguuucca

SEQ ID NO: 1102728 - RNA, 19 nt, Artificial Sequence
  Description of Artificial Sequence: Synthetic oligonucleotide
caccaaccuauaagaacaa

SEQ ID NO: 1102729 - RNA, 19 nt, Artificial Sequence
  Description of Artificial Sequence: Synthetic oligonucleotide
cuuuggggaaugaacucuu

SEQ ID NO: 1102730 - RNA, 19 nt, Artificial Sequence
  Description of Artificial Sequence: Synthetic oligonucleotide
acccaagcucaguggcaca

SEQ ID NO: 1102731 - RNA, 19 nt, Artificial Sequence
  Description of Artificial Sequence: Synthetic oligonucleotide
acccguccacuaaggcacc

SEQ ID NO: 1102732 - RNA, 19 nt, Artificial Sequence
  Description of Artificial Sequence: Synthetic oligonucleotide
gagaguacagagagcgaau

SEQ ID NO: 1102733 - RNA, 19 nt, Artificial Sequence
  Description of Artificial Sequence: Synthetic oligonucleotide
ccggaugaugccagauggc

SEQ ID NO: 1102734 - RNA, 19 nt, Artificial Sequence
  Description of Artificial Sequence: Synthetic oligonucleotide
auucguccaucagggcuga

SEQ ID NO: 1102735 - RNA, 19 nt, Artificial Sequence
  Description of Artificial Sequence: Synthetic oligonucleotide
cgaaucacccguagaggac

SEQ ID NO: 1102736 - RNA, 19 nt, Artificial Sequence
  Description of Artificial Sequence: Synthetic oligonucleotide
ggagugguggaaacaggga

SEQ ID NO: 1102737 - RNA, 19 nt, Artificial Sequence
  Description of Artificial Sequence: Synthetic oligonucleotide
gguaaacagucaacaagcu

SEQ ID NO: 1102738 - RNA, 19 nt, Artificial Sequence
  Description of Artificial Sequence: Synthetic oligonucleotide
auguagccccugccuacau

SEQ ID NO: 1102739 - RNA, 19 nt, Artificial Sequence
  Description of Artificial Sequence: Synthetic oligonucleotide
cugauacaaagagacccgu

SEQ ID NO: 1102740 - RNA, 19 nt, Artificial Sequence
  Description of Artificial Sequence: Synthetic oligonucleotide
guccacuaaggcacccuga

SEQ ID NO: 1102741 - RNA, 19 nt, Artificial Sequence
  Description of Artificial Sequence: Synthetic oligonucleotide
ccaggcaccauggauacaa

SEQ ID NO: 1102742 - RNA, 19 nt, Artificial Sequence
  Description of Artificial Sequence: Synthetic oligonucleotide
gcagcuguaaggaugugau

SEQ ID NO: 1102743 - RNA, 19 nt, Artificial Sequence
  Description of Artificial Sequence: Synthetic oligonucleotide
cacaaggagcgcacagucu

SEQ ID NO: 1102744 - RNA, 19 nt, Artificial Sequence
  Description of Artificial Sequence: Synthetic oligonucleotide
cauagccauguggggaaga

SEQ ID NO: 1102745 - RNA, 19 nt, Artificial Sequence
  Description of Artificial Sequence: Synthetic oligonucleotide
gaguaucauuuaugagaau

SEQ ID NO: 1102746 - RNA, 19 nt, Artificial Sequence
  Description of Artificial Sequence: Synthetic oligonucleotide
gacugagcuuauuccuuuu

SEQ ID NO: 1102747 - RNA, 19 nt, Artificial Sequence
  Description of Artificial Sequence: Synthetic oligonucleotide
uggcucgacuuaggugaca

SEQ ID NO: 1102748 - RNA, 19 nt, Artificial Sequence
  Description of Artificial Sequence: Synthetic oligonucleotide
ccaacaagcgaaucccaua

SEQ ID NO: 1102749 - RNA, 19 nt, Artificial Sequence
  Description of Artificial Sequence: Synthetic oligonucleotide
agcgcacagucuagcagaa

SEQ ID NO: 1102750 - RNA, 19 nt, Artificial Sequence
  Description of Artificial Sequence: Synthetic oligonucleotide
guagaggacuggcuucuuu

SEQ ID NO: 1102751 - RNA, 19 nt, Artificial Sequence
  Description of Artificial Sequence: Synthetic oligonucleotide
agagagcgaaucacccgua

SEQ ID NO: 1102752 - RNA, 19 nt, Artificial Sequence
  Description of Artificial Sequence: Synthetic oligonucleotide
gcucgacuuaggugacaug

SEQ ID NO: 1102753 - RNA, 19 nt, Artificial Sequence
  Description of Artificial Sequence: Synthetic oligonucleotide
caagaaccccuggcucgac

SEQ ID NO: 1102754 - RNA, 19 nt, Artificial Sequence
  Description of Artificial Sequence: Synthetic oligonucleotide
caccuaaauugaaguaauu

SEQ ID NO: 1102755 - RNA, 19 nt, Artificial Sequence
  Description of Artificial Sequence: Synthetic oligonucleotide
gcgaggugagacaggucgc

SEQ ID NO: 1102756 - RNA, 19 nt, Artificial Sequence
  Description of Artificial Sequence: Synthetic oligonucleotide
cagcaacuuuaaaggccaa

SEQ ID NO: 1102757 - RNA, 19 nt, Artificial Sequence
  Description of Artificial Sequence: Synthetic oligonucleotide
gcgaaucccauagccaugu

SEQ ID NO: 1102758 - RNA, 19 nt, Artificial Sequence
  Description of Artificial Sequence: Synthetic oligonucleotide
cacccguagaggacuggcu

SEQ ID NO: 1102759 - RNA, 19 nt, Artificial Sequence
  Description of Artificial Sequence: Synthetic oligonucleotide
caagcucacugcacuguuu

SEQ ID NO: 1102760 - RNA, 19 nt, Artificial Sequence
  Description of Artificial Sequence: Synthetic oligonucleotide
cccugugagaaaguguucu

SEQ ID NO: 1102761 - RNA, 19 nt, Artificial Sequence
  Description of Artificial Sequence: Synthetic oligonucleotide
gggaggcauggaggagugg

SEQ ID NO: 1102762 - RNA, 19 nt, Artificial Sequence
  Description of Artificial Sequence: Synthetic oligonucleotide
acgaugcugcauggucgaa

SEQ ID NO: 1102763 - RNA, 19 nt, Artificial Sequence
  Description of Artificial Sequence: Synthetic oligonucleotide
cagaacgaugcugcauggu

SEQ ID NO: 1102764 - RNA, 19 nt, Artificial Sequence
  Description of Artificial Sequence: Synthetic oligonucleotide
gcucaauauuugacagcaa

SEQ ID NO: 1102765 - RNA, 19 nt, Artificial Sequence
  Description of Artificial Sequence: Synthetic oligonucleotide
gcauaccaucugauacaga

SEQ ID NO: 1102766 - RNA, 19 nt, Artificial Sequence
  Description of Artificial Sequence: Synthetic oligonucleotide
cccaacaagcgaaucccau

SEQ ID NO: 1102767 - RNA, 19 nt, Artificial Sequence
  Description of Artificial Sequence: Synthetic oligonucleotide
uucguccaucagggcugaa

SEQ ID NO: 1102768 - RNA, 19 nt, Artificial Sequence
  Description of Artificial Sequence: Synthetic oligonucleotide
cccagccuuugggaugcag

SEQ ID NO: 1102769 - RNA, 19 nt, Artificial Sequence
  Description of Artificial Sequence: Synthetic oligonucleotide
caguuuccacggucucgcu

SEQ ID NO: 1102770 - RNA, 19 nt, Artificial Sequence
  Description of Artificial Sequence: Synthetic oligonucleotide
cgaaucccauagccaugug

SEQ ID NO: 1102771 - RNA, 19 nt, Artificial Sequence
  Description of Artificial Sequence: Synthetic oligonucleotide
cgaugcugcauggucgaaa

SEQ ID NO: 1102772 - RNA, 19 nt, Artificial Sequence
  Description of Artificial Sequence: Synthetic oligonucleotide
cccaaacuuauaagaucuu

SEQ ID NO: 1102773 - RNA, 19 nt, Artificial Sequence
  Description of Artificial Sequence: Synthetic oligonucleotide
cccacaaggagcgcacagu

SEQ ID NO: 1102774 - RNA, 19 nt, Artificial Sequence
  Description of Artificial Sequence: Synthetic oligonucleotide
ccguagaggacuggcuucu

SEQ ID NO: 1102775 - RNA, 19 nt, Artificial Sequence
  Description of Artificial Sequence: Synthetic oligonucleotide
ccccugccuacauuggcuu

SEQ ID NO: 1102776 - RNA, 19 nt, Artificial Sequence
  Description of Artificial Sequence: Synthetic oligonucleotide
ccguccacuaaggcacccu

SEQ ID NO: 1102777 - RNA, 19 nt, Artificial Sequence
  Description of Artificial Sequence: Synthetic oligonucleotide
aaacaaaucagcuacuggc

SEQ ID NO: 1102778 - RNA, 19 nt, Artificial Sequence
  Description of Artificial Sequence: Synthetic oligonucleotide
uuuacaguauuauucaugg

SEQ ID NO: 1102779 - RNA, 19 nt, Artificial Sequence
  Description of Artificial Sequence: Synthetic oligonucleotide
augacauuaauguaaaugg

SEQ ID NO: 1102780 - RNA, 19 nt, Artificial Sequence
  Description of Artificial Sequence: Synthetic oligonucleotide
acuauuuucauucacagug

SEQ ID NO: 1102781 - RNA, 19 nt, Artificial Sequence
  Description of Artificial Sequence: Synthetic oligonucleotide
aauaguaggaaacaagccu

SEQ ID NO: 1102782 - RNA, 19 nt, Artificial Sequence
  Description of Artificial Sequence: Synthetic oligonucleotide
auaguuauuagcacuaucc

SEQ ID NO: 1102783 - RNA, 19 nt, Artificial Sequence
  Description of Artificial Sequence: Synthetic oligonucleotide
auagccaccauuuugaaug

SEQ ID NO: 1102784 - RNA, 19 nt, Artificial Sequence
  Description of Artificial Sequence: Synthetic oligonucleotide
auuagcacuauccaguagg

SEQ ID NO: 1102785 - RNA, 19 nt, Artificial Sequence
  Description of Artificial Sequence: Synthetic oligonucleotide
ugagacaugauccacauaa

SEQ ID NO: 1102786 - RNA, 19 nt, Artificial Sequence
  Description of Artificial Sequence: Synthetic oligonucleotide
guuauacuuagcuugaucc

SEQ ID NO: 1102787 - RNA, 19 nt, Artificial Sequence
  Description of Artificial Sequence: Synthetic oligonucleotide
aacucugugagacaugauc

SEQ ID NO: 1102788 - RNA, 19 nt, Artificial Sequence
  Description of Artificial Sequence: Synthetic oligonucleotide
uuauagagaagccauggag

SEQ ID NO: 1102789 - RNA, 19 nt, Artificial Sequence
  Description of Artificial Sequence: Synthetic oligonucleotide
aaauccuuaagaaagccuc

SEQ ID NO: 1102790 - RNA, 19 nt, Artificial Sequence
  Description of Artificial Sequence: Synthetic oligonucleotide
aguaacucccaccagaaag

SEQ ID NO: 1102791 - RNA, 19 nt, Artificial Sequence
  Description of Artificial Sequence: Synthetic oligonucleotide
ucuguaaucauccccaaac

SEQ ID NO: 1102792 - RNA, 19 nt, Artificial Sequence
  Description of Artificial Sequence: Synthetic oligonucleotide
uaaacucuaacaaaacgga

SEQ ID NO: 1102793 - RNA, 19 nt, Artificial Sequence
  Description of Artificial Sequence: Synthetic oligonucleotide
aaaaccggggcaaagcugc

SEQ ID NO: 1102794 - RNA, 19 nt, Artificial Sequence
  Description of Artificial Sequence: Synthetic oligonucleotide
uccacauaaacaaaucagc

SEQ ID NO: 1102795 - RNA, 19 nt, Artificial Sequence
  Description of Artificial Sequence: Synthetic oligonucleotide
ugacauuaauguaaauggg

SEQ ID NO: 1102796 - RNA, 19 nt, Artificial Sequence
  Description of Artificial Sequence: Synthetic oligonucleotide
ugauccauagcccaucugc

SEQ ID NO: 1102797 - RNA, 19 nt, Artificial Sequence
  Description of Artificial Sequence: Synthetic oligonucleotide
acaauaagugacuuuguag

SEQ ID NO: 1102798 - RNA, 19 nt, Artificial Sequence
  Description of Artificial Sequence: Synthetic oligonucleotide
uggcaaauaguuauuagca

SEQ ID NO: 1102799 - RNA, 19 nt, Artificial Sequence
  Description of Artificial Sequence: Synthetic oligonucleotide
agugcaaacucguagaacu

SEQ ID NO: 1102800 - RNA, 19 nt, Artificial Sequence
  Description of Artificial Sequence: Synthetic oligonucleotide
aaaguucugggccaggaug

SEQ ID NO: 1102801 - RNA, 19 nt, Artificial Sequence
  Description of Artificial Sequence: Synthetic oligonucleotide
uuagauacuggggagacag

SEQ ID NO: 1102802 - RNA, 19 nt, Artificial Sequence
  Description of Artificial Sequence: Synthetic oligonucleotide
cucagaaaguaauaguagg

SEQ ID NO: 1102803 - RNA, 19 nt, Artificial Sequence
  Description of Artificial Sequence: Synthetic oligonucleotide
uacacaauaagugacuuug

SEQ ID NO: 1102804 - RNA, 19 nt, Artificial Sequence
  Description of Artificial Sequence: Synthetic oligonucleotide
uuaucuacugacuuguaac

SEQ ID NO: 1102805 - RNA, 19 nt, Artificial Sequence
  Description of Artificial Sequence: Synthetic oligonucleotide
uucauaugggaaaugcugc

SEQ ID NO: 1102806 - RNA, 19 nt, Artificial Sequence
  Description of Artificial Sequence: Synthetic oligonucleotide
uaauaguaggaaacaagcc

SEQ ID NO: 1102807 - RNA, 19 nt, Artificial Sequence
  Description of Artificial Sequence: Synthetic oligonucleotide
ucagaaaguaauaguagga

SEQ ID NO: 1102808 - RNA, 19 nt, Artificial Sequence
  Description of Artificial Sequence: Synthetic oligonucleotide
uacaguauuauucaugguu

SEQ ID NO: 1102809 - RNA, 19 nt, Artificial Sequence
  Description of Artificial Sequence: Synthetic oligonucleotide
gaaaauccuaccaucacag

SEQ ID NO: 1102810 - RNA, 19 nt, Artificial Sequence
  Description of Artificial Sequence: Synthetic oligonucleotide
uguacuggguuauagagaa

SEQ ID NO: 1102811 - RNA, 19 nt, Artificial Sequence
  Description of Artificial Sequence: Synthetic oligonucleotide
auagucuacagguaaaagu

SEQ ID NO: 1102812 - RNA, 19 nt, Artificial Sequence
  Description of Artificial Sequence: Synthetic oligonucleotide
agacaugauccacauaaac

SEQ ID NO: 1102813 - RNA, 19 nt, Artificial Sequence
  Description of Artificial Sequence: Synthetic oligonucleotide
uacgauagaggucuguagc

SEQ ID NO: 1102814 - RNA, 19 nt, Artificial Sequence
  Description of Artificial Sequence: Synthetic oligonucleotide
uuuguaaaugcaaugcuuu

SEQ ID NO: 1102815 - RNA, 19 nt, Artificial Sequence
  Description of Artificial Sequence: Synthetic oligonucleotide
aacacauuauaaagcaccg

SEQ ID NO: 1102816 - RNA, 19 nt, Artificial Sequence
  Description of Artificial Sequence: Synthetic oligonucleotide
aggcaaauuaaacucuaac

SEQ ID NO: 1102817 - RNA, 19 nt, Artificial Sequence
  Description of Artificial Sequence: Synthetic oligonucleotide
ugcaaaauccagauaagaa

SEQ ID NO: 1102818 - RNA, 19 nt, Artificial Sequence
  Description of Artificial Sequence: Synthetic oligonucleotide
aauaaacucugugagacau

SEQ ID NO: 1102819 - RNA, 19 nt, Artificial Sequence
  Description of Artificial Sequence: Synthetic oligonucleotide
aaaccucagaaaguaauag

SEQ ID NO: 1102820 - RNA, 19 nt, Artificial Sequence
  Description of Artificial Sequence: Synthetic oligonucleotide
aauccauagguguaaaaua

SEQ ID NO: 1102821 - RNA, 19 nt, Artificial Sequence
  Description of Artificial Sequence: Synthetic oligonucleotide
aauccuaccaucacagcuc

SEQ ID NO: 1102822 - RNA, 19 nt, Artificial Sequence
  Description of Artificial Sequence: Synthetic oligonucleotide
ucuagugcaaacucguaga

SEQ ID NO: 1102823 - RNA, 19 nt, Artificial Sequence
  Description of Artificial Sequence: Synthetic oligonucleotide
gguaaaaguacagagguag

SEQ ID NO: 1102824 - RNA, 19 nt, Artificial Sequence
  Description of Artificial Sequence: Synthetic oligonucleotide
aaaugcuuuguuugaugag

SEQ ID NO: 1102825 - RNA, 19 nt, Artificial Sequence
  Description of Artificial Sequence: Synthetic oligonucleotide
agcacuauccaguaggggu

SEQ ID NO: 1102826 - RNA, 19 nt, Artificial Sequence
  Description of Artificial Sequence: Synthetic oligonucleotide
auaguaggaaacaagccuc

SEQ ID NO: 1102827 - RNA, 19 nt, Artificial Sequence
  Description of Artificial Sequence: Synthetic oligonucleotide
uaggaaacaagccucucga

SEQ ID NO: 1102828 - RNA, 19 nt, Artificial Sequence
  Description of Artificial Sequence: Synthetic oligonucleotide
uaguuauuagcacuaucca

SEQ ID NO: 1102829 - RNA, 19 nt, Artificial Sequence
  Description of Artificial Sequence: Synthetic oligonucleotide
aauguugucaacauucuua

SEQ ID NO: 1102830 - RNA, 19 nt, Artificial Sequence
  Description of Artificial Sequence: Synthetic oligonucleotide
acugcucuagugcaaacuc

SEQ ID NO: 1102831 - RNA, 19 nt, Artificial Sequence
  Description of Artificial Sequence: Synthetic oligonucleotide
agcauucugagcuguggcc

SEQ ID NO: 1102832 - RNA, 19 nt, Artificial Sequence
  Description of Artificial Sequence: Synthetic oligonucleotide
uuuaucuacugacuuguaa

SEQ ID NO: 1102833 - RNA, 19 nt, Artificial Sequence
  Description of Artificial Sequence: Synthetic oligonucleotide
aaagucuaaaagaaucuga

SEQ ID NO: 1102834 - RNA, 19 nt, Artificial Sequence
  Description of Artificial Sequence: Synthetic oligonucleotide
ugauacacagcguucuuug

SEQ ID NO: 1102835 - RNA, 19 nt, Artificial Sequence
  Description of Artificial Sequence: Synthetic oligonucleotide
ucgauagggucccugauga

SEQ ID NO: 1102836 - RNA, 19 nt, Artificial Sequence
  Description of Artificial Sequence: Synthetic oligonucleotide
acaaaacggacuuuuaaaa

SEQ ID NO: 1102837 - RNA, 19 nt, Artificial Sequence
  Description of Artificial Sequence: Synthetic oligonucleotide
auacauaaaauaugcaaua

SEQ ID NO: 1102838 - RNA, 19 nt, Artificial Sequence
  Description of Artificial Sequence: Synthetic oligonucleotide
cccaauauuagauacuggg

SEQ ID NO: 1102839 - RNA, 19 nt, Artificial Sequence
  Description of Artificial Sequence: Synthetic oligonucleotide
uccuguacgauagaggucu

SEQ ID NO: 1102840 - RNA, 19 nt, Artificial Sequence
  Description of Artificial Sequence: Synthetic oligonucleotide
uaugcagucaccgauacuu

SEQ ID NO: 1102841 - RNA, 19 nt, Artificial Sequence
  Description of Artificial Sequence: Synthetic oligonucleotide
uuauacuuagcuugaucca

SEQ ID NO: 1102842 - RNA, 19 nt, Artificial Sequence
  Description of Artificial Sequence: Synthetic oligonucleotide
guaggaaacaagccucucg

SEQ ID NO: 1102843 - RNA, 19 nt, Artificial Sequence
  Description of Artificial Sequence: Synthetic oligonucleotide
uauaugaauguguggaaau

SEQ ID NO: 1102844 - RNA, 19 nt, Artificial Sequence
  Description of Artificial Sequence: Synthetic oligonucleotide
aacuggaacugcucuagug

SEQ ID NO: 1102845 - RNA, 19 nt, Artificial Sequence
  Description of Artificial Sequence: Synthetic oligonucleotide
uucgcgaugguuugcuugg

SEQ ID NO: 1102846 - RNA, 19 nt, Artificial Sequence
  Description of Artificial Sequence: Synthetic oligonucleotide
aggaaaauccuaccaucac

SEQ ID NO: 1102847 - RNA, 19 nt, Artificial Sequence
  Description of Artificial Sequence: Synthetic oligonucleotide
ugggcaaacucaacuacag

SEQ ID NO: 1102848 - RNA, 19 nt, Artificial Sequence
  Description of Artificial Sequence: Synthetic oligonucleotide
agaaaucaggaauacugcu

SEQ ID NO: 1102849 - RNA, 19 nt, Artificial Sequence
  Description of Artificial Sequence: Synthetic oligonucleotide
uggguuauagagaagccau

SEQ ID NO: 1102850 - RNA, 19 nt, Artificial Sequence
  Description of Artificial Sequence: Synthetic oligonucleotide
uguaaguauuuaaacuaaa

SEQ ID NO: 1102851 - RNA, 19 nt, Artificial Sequence
  Description of Artificial Sequence: Synthetic oligonucleotide
uaugcaauauuuacagcau

SEQ ID NO: 1102852 - RNA, 19 nt, Artificial Sequence
  Description of Artificial Sequence: Synthetic oligonucleotide
aauguguggaaauccuuaa

SEQ ID NO: 1102853 - RNA, 19 nt, Artificial Sequence
  Description of Artificial Sequence: Synthetic oligonucleotide
uaugggcaaacucaacuac

SEQ ID NO: 1102854 - RNA, 19 nt, Artificial Sequence
  Description of Artificial Sequence: Synthetic oligonucleotide
auggaguugccauaugcag

SEQ ID NO: 1102855 - RNA, 19 nt, Artificial Sequence
  Description of Artificial Sequence: Synthetic oligonucleotide
ucguuaauuagguuauacu

SEQ ID NO: 1102856 - RNA, 19 nt, Artificial Sequence
  Description of Artificial Sequence: Synthetic oligonucleotide
ugaaugacaaggugcaaaa

SEQ ID NO: 1102857 - RNA, 19 nt, Artificial Sequence
  Description of Artificial Sequence: Synthetic oligonucleotide
uuuauaugaauguguggaa

SEQ ID NO: 1102858 - RNA, 19 nt, Artificial Sequence
  Description of Artificial Sequence: Synthetic oligonucleotide
gauagaggucuguagcacc

SEQ ID NO: 1102859 - RNA, 19 nt, Artificial Sequence
  Description of Artificial Sequence: Synthetic oligonucleotide
ucuuacuauuuucauucac

SEQ ID NO: 1102860 - RNA, 19 nt, Artificial Sequence
  Description of Artificial Sequence: Synthetic oligonucleotide
acagguaaaaguacagagg

SEQ ID NO: 1102861 - RNA, 19 nt, Artificial Sequence
  Description of Artificial Sequence: Synthetic oligonucleotide
cucauuacacaauaaguga

SEQ ID NO: 1102862 - RNA, 19 nt, Artificial Sequence
  Description of Artificial Sequence: Synthetic oligonucleotide
acagcgugggcucugauga

SEQ ID NO: 1102863 - RNA, 19 nt, Artificial Sequence
  Description of Artificial Sequence: Synthetic oligonucleotide
ccaaaugucagacugcugc

SEQ ID NO: 1102864 - RNA, 19 nt, Artificial Sequence
  Description of Artificial Sequence: Synthetic oligonucleotide
agaaaguacucguuaauua

SEQ ID NO: 1102865 - RNA, 19 nt, Artificial Sequence
  Description of Artificial Sequence: Synthetic oligonucleotide
aagccuacauaaauauggg

SEQ ID NO: 1102866 - RNA, 19 nt, Artificial Sequence
  Description of Artificial Sequence: Synthetic oligonucleotide
uagguuauacuuagcuuga

SEQ ID NO: 1102867 - RNA, 19 nt, Artificial Sequence
  Description of Artificial Sequence: Synthetic oligonucleotide
ucuaacaaaacggacuuuu

SEQ ID NO: 1102868 - RNA, 19 nt, Artificial Sequence
  Description of Artificial Sequence: Synthetic oligonucleotide
uacucguuaauuagguuau

SEQ ID NO: 1102869 - RNA, 19 nt, Artificial Sequence
  Description of Artificial Sequence: Synthetic oligonucleotide
uccaauaaacucugugaga

SEQ ID NO: 1102870 - RNA, 19 nt, Artificial Sequence
  Description of Artificial Sequence: Synthetic oligonucleotide
uccgucuccuuaauccugg

SEQ ID NO: 1102871 - RNA, 19 nt, Artificial Sequence
  Description of Artificial Sequence: Synthetic oligonucleotide
auagaggucuguagcaccc

SEQ ID NO: 1102872 - RNA, 19 nt, Artificial Sequence
  Description of Artificial Sequence: Synthetic oligonucleotide
auaaauaauuacuccuuua

SEQ ID NO: 1102873 - RNA, 19 nt, Artificial Sequence
  Description of Artificial Sequence: Synthetic oligonucleotide
uuauaugaauguguggaaa

SEQ ID NO: 1102874 - RNA, 19 nt, Artificial Sequence
  Description of Artificial Sequence: Synthetic oligonucleotide
uugccauaugcagucaccg

SEQ ID NO: 1102875 - RNA, 19 nt, Artificial Sequence
  Description of Artificial Sequence: Synthetic oligonucleotide
ugguccaaauacauaaaau

SEQ ID NO: 1102876 - RNA, 19 nt, Artificial Sequence
  Description of Artificial Sequence: Synthetic oligonucleotide
uagguguaaaauagccacc

SEQ ID NO: 1102877 - RNA, 19 nt, Artificial Sequence
  Description of Artificial Sequence: Synthetic oligonucleotide
aauagccaccauuuugaau

SEQ ID NO: 1102878 - RNA, 19 nt, Artificial Sequence
  Description of Artificial Sequence: Synthetic oligonucleotide
acauuauaaagcaccguag

SEQ ID NO: 1102879 - RNA, 19 nt, Artificial Sequence
  Description of Artificial Sequence: Synthetic oligonucleotide
uucacaccgaauuuugcaa

SEQ ID NO: 1102880 - RNA, 19 nt, Artificial Sequence
  Description of Artificial Sequence: Synthetic oligonucleotide
caacauucuuagaaauacc

SEQ ID NO: 1102881 - RNA, 19 nt, Artificial Sequence
  Description of Artificial Sequence: Synthetic oligonucleotide
ucaccgauacuucagugua

SEQ ID NO: 1102882 - RNA, 19 nt, Artificial Sequence
  Description of Artificial Sequence: Synthetic oligonucleotide
ucguagaacucauuuucca

SEQ ID NO: 1102883 - RNA, 19 nt, Artificial Sequence
  Description of Artificial Sequence: Synthetic oligonucleotide
ccucuuacuauuuucauuc

SEQ ID NO: 1102884 - RNA, 19 nt, Artificial Sequence
  Description of Artificial Sequence: Synthetic oligonucleotide
uucacucaguucgacuucg

SEQ ID NO: 1102885 - RNA, 19 nt, Artificial Sequence
  Description of Artificial Sequence: Synthetic oligonucleotide
ccaauauuagauacugggg

SEQ ID NO: 1102886 - RNA, 19 nt, Artificial Sequence
  Description of Artificial Sequence: Synthetic oligonucleotide
uauuagauacuggggagac

SEQ ID NO: 1102887 - RNA, 19 nt, Artificial Sequence
  Description of Artificial Sequence: Synthetic oligonucleotide
uggaguugccauaugcagu

SEQ ID NO: 1102888 - RNA, 19 nt, Artificial Sequence
  Description of Artificial Sequence: Synthetic oligonucleotide
agaaggugaagaauuaaga

SEQ ID NO: 1102889 - RNA, 19 nt, Artificial Sequence
  Description of Artificial Sequence: Synthetic oligonucleotide
guacucguuaauuagguua

SEQ ID NO: 1102890 - RNA, 19 nt, Artificial Sequence
  Description of Artificial Sequence: Synthetic oligonucleotide
aaguacucguuaauuaggu

SEQ ID NO: 1102891 - RNA, 19 nt, Artificial Sequence
  Description of Artificial Sequence: Synthetic oligonucleotide
uugaaugacaaggugcaaa

SEQ ID NO: 1102892 - RNA, 19 nt, Artificial Sequence
  Description of Artificial Sequence: Synthetic oligonucleotide
acacagcguucuuugcucc

SEQ ID NO: 1102893 - RNA, 19 nt, Artificial Sequence
  Description of Artificial Sequence: Synthetic oligonucleotide
uauacuuagcuugauccau

SEQ ID NO: 1102894 - RNA, 19 nt, Artificial Sequence
  Description of Artificial Sequence: Synthetic oligonucleotide
uaauuagguuauacuuagc

SEQ ID NO: 1102895 - RNA, 19 nt, Artificial Sequence
  Description of Artificial Sequence: Synthetic oligonucleotide
ucuucacaccgaauuuugc

SEQ ID NO: 1102896 - RNA, 19 nt, Artificial Sequence
  Description of Artificial Sequence: Synthetic oligonucleotide
auacacagcguucuuugcu

SEQ ID NO: 1102897 - RNA, 19 nt, Artificial Sequence
  Description of Artificial Sequence: Synthetic oligonucleotide
aacucguagaacucauuuu

SEQ ID NO: 1102898 - RNA, 19 nt, Artificial Sequence
  Description of Artificial Sequence: Synthetic oligonucleotide
guaaaaguacagagguagg

SEQ ID NO: 1102899 - RNA, 19 nt, Artificial Sequence
  Description of Artificial Sequence: Synthetic oligonucleotide
gagguaggaaaauccuacc

SEQ ID NO: 1102900 - RNA, 19 nt, Artificial Sequence
  Description of Artificial Sequence: Synthetic oligonucleotide
ccauagguguaaaauagcc

SEQ ID NO: 1102901 - RNA, 19 nt, Artificial Sequence
  Description of Artificial Sequence: Synthetic oligonucleotide
uccuuuagucuuucuaagu

SEQ ID NO: 1102902 - RNA, 19 nt, Artificial Sequence
  Description of Artificial Sequence: Synthetic oligonucleotide
auaugggaaaugcugcuau

SEQ ID NO: 1102903 - RNA, 19 nt, Artificial Sequence
  Description of Artificial Sequence: Synthetic oligonucleotide
uaagugacuuuguagccau

SEQ ID NO: 1102904 - RNA, 19 nt, Artificial Sequence
  Description of Artificial Sequence: Synthetic oligonucleotide
gauacacagcguucuuugc

SEQ ID NO: 1102905 - RNA, 19 nt, Artificial Sequence
  Description of Artificial Sequence: Synthetic oligonucleotide
augacaaggugcaaaacca

SEQ ID NO: 1102906 - RNA, 19 nt, Artificial Sequence
  Description of Artificial Sequence: Synthetic oligonucleotide
ucuccuuaauccuggucug

SEQ ID NO: 1102907 - RNA, 19 nt, Artificial Sequence
  Description of Artificial Sequence: Synthetic oligonucleotide
ucugaugaacuggaacugc

SEQ ID NO: 1102908 - RNA, 19 nt, Artificial Sequence
  Description of Artificial Sequence: Synthetic oligonucleotide
aaaaguucugggccaggau

SEQ ID NO: 1102909 - RNA, 19 nt, Artificial Sequence
  Description of Artificial Sequence: Synthetic oligonucleotide
gguaaaucuuuucauagaa

SEQ ID NO: 1102910 - RNA, 19 nt, Artificial Sequence
  Description of Artificial Sequence: Synthetic oligonucleotide
ugacaaggugcaaaaccac

SEQ ID NO: 1102911 - RNA, 19 nt, Artificial Sequence
  Description of Artificial Sequence: Synthetic oligonucleotide
caaaacuccaacacagcca

SEQ ID NO: 1102912 - RNA, 19 nt, Artificial Sequence
  Description of Artificial Sequence: Synthetic oligonucleotide
guaaucauccccaaaccuc

SEQ ID NO: 1102913 - RNA, 19 nt, Artificial Sequence
  Description of Artificial Sequence: Synthetic oligonucleotide
guuauuagcacuauccagu

SEQ ID NO: 1102914 - RNA, 19 nt, Artificial Sequence
  Description of Artificial Sequence: Synthetic oligonucleotide
guuaauuagguuauacuua

SEQ ID NO: 1102915 - RNA, 19 nt, Artificial Sequence
  Description of Artificial Sequence: Synthetic oligonucleotide
acgauagaggucuguagca

SEQ ID NO: 1102916 - RNA, 19 nt, Artificial Sequence
  Description of Artificial Sequence: Synthetic oligonucleotide
guacgauagaggucuguag

SEQ ID NO: 1102917 - RNA, 19 nt, Artificial Sequence
  Description of Artificial Sequence: Synthetic oligonucleotide
ucgacuucggguaaaucuu

SEQ ID NO: 1102918 - RNA, 19 nt, Artificial Sequence
  Description of Artificial Sequence: Synthetic oligonucleotide
auguguggaaauccuuaag

SEQ ID NO: 1102919 - RNA, 19 nt, Artificial Sequence
  Description of Artificial Sequence: Synthetic oligonucleotide
cauagguguaaaauagcca

SEQ ID NO: 1102920 - RNA, 19 nt, Artificial Sequence
  Description of Artificial Sequence: Synthetic oligonucleotide
acuggguuauagagaagcc

SEQ ID NO: 1102921 - RNA, 19 nt, Artificial Sequence
  Description of Artificial Sequence: Synthetic oligonucleotide
uguaaaugggcuucuucuu

SEQ ID NO: 1102922 - RNA, 19 nt, Artificial Sequence
  Description of Artificial Sequence: Synthetic oligonucleotide
guaaaugggcuucuucuuc

SEQ ID NO: 1102923 - RNA, 19 nt, Artificial Sequence
  Description of Artificial Sequence: Synthetic oligonucleotide
ccaauaaacucugugagac

SEQ ID NO: 1102924 - RNA, 19 nt, Artificial Sequence
  Description of Artificial Sequence: Synthetic oligonucleotide
auaugggcaaacucaacua

SEQ ID NO: 1102925 - RNA, 19 nt, Artificial Sequence
  Description of Artificial Sequence: Synthetic oligonucleotide
ugcuccucucauuacacaa

SEQ ID NO: 1102926 - RNA, 19 nt, Artificial Sequence
  Description of Artificial Sequence: Synthetic oligonucleotide
uaccaccccaauauuagau

SEQ ID NO: 1102927 - RNA, 19 nt, Artificial Sequence
  Description of Artificial Sequence: Synthetic oligonucleotide
cacauuauaaagcaccgua

SEQ ID NO: 1102928 - RNA, 19 nt, Artificial Sequence
  Description of Artificial Sequence: Synthetic oligonucleotide
agguucaagacugcucugg

SEQ ID NO: 1102929 - RNA, 19 nt, Artificial Sequence
  Description of Artificial Sequence: Synthetic oligonucleotide
uacacagcguucuuugcuc

SEQ ID NO: 1102930 - RNA, 19 nt, Artificial Sequence
  Description of Artificial Sequence: Synthetic oligonucleotide
accccaauauuagauacug

SEQ ID NO: 1102931 - RNA, 19 nt, Artificial Sequence
  Description of Artificial Sequence: Synthetic oligonucleotide
aagaauuaagaggcaaauu

SEQ ID NO: 1102932 - RNA, 19 nt, Artificial Sequence
  Description of Artificial Sequence: Synthetic oligonucleotide
agaggucuguagcaccccg

SEQ ID NO: 1102933 - RNA, 19 nt, Artificial Sequence
  Description of Artificial Sequence: Synthetic oligonucleotide
aauccuuaagaaagccuca

SEQ ID NO: 1102934 - RNA, 19 nt, Artificial Sequence
  Description of Artificial Sequence: Synthetic oligonucleotide
cuuagaaauaccaccccaa

SEQ ID NO: 1102935 - RNA, 19 nt, Artificial Sequence
  Description of Artificial Sequence: Synthetic oligonucleotide
cuucacaccgaauuuugca

SEQ ID NO: 1102936 - RNA, 19 nt, Artificial Sequence
  Description of Artificial Sequence: Synthetic oligonucleotide
cucguuaauuagguuauac

SEQ ID NO: 1102937 - RNA, 19 nt, Artificial Sequence
  Description of Artificial Sequence: Synthetic oligonucleotide
gacuuuguagccaucuguc

SEQ ID NO: 1102938 - RNA, 19 nt, Artificial Sequence
  Description of Artificial Sequence: Synthetic oligonucleotide
cagguaaaaguacagaggu

SEQ ID NO: 1102939 - RNA, 19 nt, Artificial Sequence
  Description of Artificial Sequence: Synthetic oligonucleotide
acuuucacucaguucgacu

SEQ ID NO: 1102940 - RNA, 19 nt, Artificial Sequence
  Description of Artificial Sequence: Synthetic oligonucleotide
agguguaaaauagccacca

SEQ ID NO: 1102941 - RNA, 19 nt, Artificial Sequence
  Description of Artificial Sequence: Synthetic oligonucleotide
gaaguuucuucucuguggu

SEQ ID NO: 1102942 - RNA, 19 nt, Artificial Sequence
  Description of Artificial Sequence: Synthetic oligonucleotide
aacugcucuagugcaaacu

SEQ ID NO: 1102943 - RNA, 19 nt, Artificial Sequence
  Description of Artificial Sequence: Synthetic oligonucleotide
ucggguaaaucuuuucaua

SEQ ID NO: 1102944 - RNA, 19 nt, Artificial Sequence
  Description of Artificial Sequence: Synthetic oligonucleotide
gcuuuguuugaugaggucc

SEQ ID NO: 1102945 - RNA, 19 nt, Artificial Sequence
  Description of Artificial Sequence: Synthetic oligonucleotide
gucuccuuaauccuggucu

SEQ ID NO: 1102946 - RNA, 19 nt, Artificial Sequence
  Description of Artificial Sequence: Synthetic oligonucleotide
uuguaaaugcaaugcuuua

SEQ ID NO: 1102947 - RNA, 19 nt, Artificial Sequence
  Description of Artificial Sequence: Synthetic oligonucleotide
aagccucagauaauguugu

SEQ ID NO: 1102948 - RNA, 19 nt, Artificial Sequence
  Description of Artificial Sequence: Synthetic oligonucleotide
cuuaagaaagccucagaua

SEQ ID NO: 1102949 - RNA, 19 nt, Artificial Sequence
  Description of Artificial Sequence: Synthetic oligonucleotide
acacuaaugaucauccaaa

SEQ ID NO: 1102950 - RNA, 19 nt, Artificial Sequence
  Description of Artificial Sequence: Synthetic oligonucleotide
aaauaguuauuagcacuau

SEQ ID NO: 1102951 - RNA, 19 nt, Artificial Sequence
  Description of Artificial Sequence: Synthetic oligonucleotide
cuucggguaaaucuuuuca

SEQ ID NO: 1102952 - RNA, 19 nt, Artificial Sequence
  Description of Artificial Sequence: Synthetic oligonucleotide
agucuaaaagaaucugauu

SEQ ID NO: 1102953 - RNA, 19 nt, Artificial Sequence
  Description of Artificial Sequence: Synthetic oligonucleotide
guuauagagaagccaugga

SEQ ID NO: 1102954 - RNA, 19 nt, Artificial Sequence
  Description of Artificial Sequence: Synthetic oligonucleotide
caagccucucgauaggguc

SEQ ID NO: 1102955 - RNA, 19 nt, Artificial Sequence
  Description of Artificial Sequence: Synthetic oligonucleotide
ucacaccgaauuuugcaaa

SEQ ID NO: 1102956 - RNA, 19 nt, Artificial Sequence
  Description of Artificial Sequence: Synthetic oligonucleotide
uauccaguaggggugugca

SEQ ID NO: 1102957 - RNA, 19 nt, Artificial Sequence
  Description of Artificial Sequence: Synthetic oligonucleotide
uuccgucuccuuaauccug

SEQ ID NO: 1102958 - RNA, 19 nt, Artificial Sequence
  Description of Artificial Sequence: Synthetic oligonucleotide
ugcugcuauguccucuuac

SEQ ID NO: 1102959 - RNA, 19 nt, Artificial Sequence
  Description of Artificial Sequence: Synthetic oligonucleotide
gacagcgugggcucugaug

SEQ ID NO: 1102960 - RNA, 19 nt, Artificial Sequence
  Description of Artificial Sequence: Synthetic oligonucleotide
agucaccgauacuucagug

SEQ ID NO: 1102961 - RNA, 19 nt, Artificial Sequence
  Description of Artificial Sequence: Synthetic oligonucleotide
uguacgauagaggucugua

SEQ ID NO: 1102962 - RNA, 19 nt, Artificial Sequence
  Description of Artificial Sequence: Synthetic oligonucleotide
accucagaaaguaauagua

SEQ ID NO: 1102963 - RNA, 19 nt, Artificial Sequence
  Description of Artificial Sequence: Synthetic oligonucleotide
ccucagaaaguaauaguag

SEQ ID NO: 1102964 - RNA, 19 nt, Artificial Sequence
  Description of Artificial Sequence: Synthetic oligonucleotide
ggcaaauaguuauuagcac

SEQ ID NO: 1102965 - RNA, 19 nt, Artificial Sequence
  Description of Artificial Sequence: Synthetic oligonucleotide
uuacaguauuauucauggu

SEQ ID NO: 1102966 - RNA, 19 nt, Artificial Sequence
  Description of Artificial Sequence: Synthetic oligonucleotide
uucuaagugcuuucugaua

SEQ ID NO: 1102967 - RNA, 19 nt, Artificial Sequence
  Description of Artificial Sequence: Synthetic oligonucleotide
auuacacaauaagugacuu

SEQ ID NO: 1102968 - RNA, 19 nt, Artificial Sequence
  Description of Artificial Sequence: Synthetic oligonucleotide
gccuacauaaauaugggca

SEQ ID NO: 1102969 - RNA, 19 nt, Artificial Sequence
  Description of Artificial Sequence: Synthetic oligonucleotide
ugggaaguuucuucucugu

SEQ ID NO: 1102970 - RNA, 19 nt, Artificial Sequence
  Description of Artificial Sequence: Synthetic oligonucleotide
cucaguucgacuucgggua

SEQ ID NO: 1102971 - RNA, 19 nt, Artificial Sequence
  Description of Artificial Sequence: Synthetic oligonucleotide
ggaguugccauaugcaguc

SEQ ID NO: 1102972 - RNA, 19 nt, Artificial Sequence
  Description of Artificial Sequence: Synthetic oligonucleotide
ggaaauccuuaagaaagcc

SEQ ID NO: 1102973 - RNA, 19 nt, Artificial Sequence
  Description of Artificial Sequence: Synthetic oligonucleotide
acaugaucaaacauuccaa

SEQ ID NO: 1102974 - RNA, 19 nt, Artificial Sequence
  Description of Artificial Sequence: Synthetic oligonucleotide
agauacuggggagacagaa

SEQ ID NO: 1102975 - RNA, 19 nt, Artificial Sequence
  Description of Artificial Sequence: Synthetic oligonucleotide
cucagauaauguugucaac

SEQ ID NO: 1102976 - RNA, 19 nt, Artificial Sequence
  Description of Artificial Sequence: Synthetic oligonucleotide
cauuauaaagcaccguagu

SEQ ID NO: 1102977 - RNA, 19 nt, Artificial Sequence
  Description of Artificial Sequence: Synthetic oligonucleotide
aaaaugggaucuggagcca

SEQ ID NO: 1102978 - RNA, 19 nt, Artificial Sequence
  Description of Artificial Sequence: Synthetic oligonucleotide
ccuguaaguauuuaaacua

SEQ ID NO: 1102979 - RNA, 19 nt, Artificial Sequence
  Description of Artificial Sequence: Synthetic oligonucleotide
aguaggaaacaagccucuc

SEQ ID NO: 1102980 - RNA, 19 nt, Artificial Sequence
  Description of Artificial Sequence: Synthetic oligonucleotide
uugauccauagcccaucug

SEQ ID NO: 1102981 - RNA, 19 nt, Artificial Sequence
  Description of Artificial Sequence: Synthetic oligonucleotide
uguuuccgucuccuuaauc

SEQ ID NO: 1102982 - RNA, 19 nt, Artificial Sequence
  Description of Artificial Sequence: Synthetic oligonucleotide
uuuuaucuacugacuugua

SEQ ID NO: 1102983 - RNA, 19 nt, Artificial Sequence
  Description of Artificial Sequence: Synthetic oligonucleotide
cuuuuguaaaugcaaugcu

SEQ ID NO: 1102984 - RNA, 19 nt, Artificial Sequence
  Description of Artificial Sequence: Synthetic oligonucleotide
aguaggggugugcaacaca

SEQ ID NO: 1102985 - RNA, 19 nt, Artificial Sequence
  Description of Artificial Sequence: Synthetic oligonucleotide
auaccaccccaauauuaga

SEQ ID NO: 1102986 - RNA, 19 nt, Artificial Sequence
  Description of Artificial Sequence: Synthetic oligonucleotide
accgauacuucaguguacu

SEQ ID NO: 1102987 - RNA, 19 nt, Artificial Sequence
  Description of Artificial Sequence: Synthetic oligonucleotide
cauuacacaauaagugacu

SEQ ID NO: 1102988 - RNA, 19 nt, Artificial Sequence
  Description of Artificial Sequence: Synthetic oligonucleotide
gugggaaguuucuucucug

SEQ ID NO: 1102989 - RNA, 19 nt, Artificial Sequence
  Description of Artificial Sequence: Synthetic oligonucleotide
gguuauacuuagcuugauc

SEQ ID NO: 1102990 - RNA, 19 nt, Artificial Sequence
  Description of Artificial Sequence: Synthetic oligonucleotide
ugccauaugcagucaccga

SEQ ID NO: 1102991 - RNA, 19 nt, Artificial Sequence
  Description of Artificial Sequence: Synthetic oligonucleotide
caaaugucagacugcugca

SEQ ID NO: 1102992 - RNA, 19 nt, Artificial Sequence
  Description of Artificial Sequence: Synthetic oligonucleotide
gaaugacaaggugcaaaac

SEQ ID NO: 1102993 - RNA, 19 nt, Artificial Sequence
  Description of Artificial Sequence: Synthetic oligonucleotide
gcuacuggcaaauaguuau

SEQ ID NO: 1102994 - RNA, 19 nt, Artificial Sequence
  Description of Artificial Sequence: Synthetic oligonucleotide
cuuuguuugaugagguccu

SEQ ID NO: 1102995 - RNA, 19 nt, Artificial Sequence
  Description of Artificial Sequence: Synthetic oligonucleotide
gaaagccucagauaauguu

SEQ ID NO: 1102996 - RNA, 19 nt, Artificial Sequence
  Description of Artificial Sequence: Synthetic oligonucleotide
ucaguucgacuucggguaa

SEQ ID NO: 1102997 - RNA, 19 nt, Artificial Sequence
  Description of Artificial Sequence: Synthetic oligonucleotide
agcgugggcucugaugaac

SEQ ID NO: 1102998 - RNA, 19 nt, Artificial Sequence
  Description of Artificial Sequence: Synthetic oligonucleotide
aaaccggggcaaagcugcc

SEQ ID NO: 1102999 - RNA, 19 nt, Artificial Sequence
  Description of Artificial Sequence: Synthetic oligonucleotide
uuccuguacgauagagguc

SEQ ID NO: 1103000 - RNA, 19 nt, Artificial Sequence
  Description of Artificial Sequence: Synthetic oligonucleotide
ugccucgaguagcaugaug

SEQ ID NO: 1103001 - RNA, 19 nt, Artificial Sequence
  Description of Artificial Sequence: Synthetic oligonucleotide
ucugauacacagcguucuu

SEQ ID NO: 1103002 - RNA, 19 nt, Artificial Sequence
  Description of Artificial Sequence: Synthetic oligonucleotide
cggguaaaucuuuucauag

SEQ ID NO: 1103003 - RNA, 19 nt, Artificial Sequence
  Description of Artificial Sequence: Synthetic oligonucleotide
ugagguccuguaaguauuu

SEQ ID NO: 1103004 - RNA, 19 nt, Artificial Sequence
  Description of Artificial Sequence: Synthetic oligonucleotide
cuauuucauaugggaaaug

SEQ ID NO: 1103005 - RNA, 19 nt, Artificial Sequence
  Description of Artificial Sequence: Synthetic oligonucleotide
aggucuguagcaccccgga

SEQ ID NO: 1103006 - RNA, 19 nt, Artificial Sequence
  Description of Artificial Sequence: Synthetic oligonucleotide
ugcuuuguuugaugagguc

SEQ ID NO: 1103007 - RNA, 19 nt, Artificial Sequence
  Description of Artificial Sequence: Synthetic oligonucleotide
gaugguuugcuugguggga

SEQ ID NO: 1103008 - RNA, 19 nt, Artificial Sequence
  Description of Artificial Sequence: Synthetic oligonucleotide
uagauacuggggagacaga

SEQ ID NO: 1103009 - RNA, 19 nt, Artificial Sequence
  Description of Artificial Sequence: Synthetic oligonucleotide
cuacagguaaaaguacaga

SEQ ID NO: 1103010 - RNA, 19 nt, Artificial Sequence
  Description of Artificial Sequence: Synthetic oligonucleotide
acacauuauaaagcaccgu

SEQ ID NO: 1103011 - RNA, 19 nt, Artificial Sequence
  Description of Artificial Sequence: Synthetic oligonucleotide
cuauccaguaggggugugc

SEQ ID NO: 1103012 - RNA, 19 nt, Artificial Sequence
  Description of Artificial Sequence: Synthetic oligonucleotide
guacagagguaggaaaauc

SEQ ID NO: 1103013 - RNA, 19 nt, Artificial Sequence
  Description of Artificial Sequence: Synthetic oligonucleotide
cacuaaugaucauccaaaa

SEQ ID NO: 1103014 - RNA, 19 nt, Artificial Sequence
  Description of Artificial Sequence: Synthetic oligonucleotide
ccaccccaauauuagauac

SEQ ID NO: 1103015 - RNA, 19 nt, Artificial Sequence
  Description of Artificial Sequence: Synthetic oligonucleotide
ggguaaaucuuuucauaga

SEQ ID NO: 1103016 - RNA, 19 nt, Artificial Sequence
  Description of Artificial Sequence: Synthetic oligonucleotide
cuggguuauagagaagcca

SEQ ID NO: 1103017 - RNA, 19 nt, Artificial Sequence
  Description of Artificial Sequence: Synthetic oligonucleotide
agaaagccucagauaaugu

SEQ ID NO: 1103018 - RNA, 19 nt, Artificial Sequence
  Description of Artificial Sequence: Synthetic oligonucleotide
acaaggugcaaaaccacuu

SEQ ID NO: 1103019 - RNA, 19 nt, Artificial Sequence
  Description of Artificial Sequence: Synthetic oligonucleotide
ccggagcacagucugagcc

SEQ ID NO: 1103020 - RNA, 19 nt, Artificial Sequence
  Description of Artificial Sequence: Synthetic oligonucleotide
ccuacauaaauaugggcaa

SEQ ID NO: 1103021 - RNA, 19 nt, Artificial Sequence
  Description of Artificial Sequence: Synthetic oligonucleotide
cuagugcaaacucguagaa

SEQ ID NO: 1103022 - RNA, 19 nt, Artificial Sequence
  Description of Artificial Sequence: Synthetic oligonucleotide
gucaccgauacuucagugu

SEQ ID NO: 1103023 - RNA, 19 nt, Artificial Sequence
  Description of Artificial Sequence: Synthetic oligonucleotide
auuagauacuggggagaca

SEQ ID NO: 1103024 - RNA, 19 nt, Artificial Sequence
  Description of Artificial Sequence: Synthetic oligonucleotide
ucugagccgcccucagcca

SEQ ID NO: 1103025 - RNA, 19 nt, Artificial Sequence
  Description of Artificial Sequence: Synthetic oligonucleotide
caccgauacuucaguguac

SEQ ID NO: 1103026 - RNA, 19 nt, Artificial Sequence
  Description of Artificial Sequence: Synthetic oligonucleotide
guguacuggguuauagaga

SEQ ID NO: 1103027 - RNA, 19 nt, Artificial Sequence
  Description of Artificial Sequence: Synthetic oligonucleotide
gccucgaguagcaugauga

SEQ ID NO: 1103028 - RNA, 19 nt, Artificial Sequence
  Description of Artificial Sequence: Synthetic oligonucleotide
guaacucccaccagaaagu

SEQ ID NO: 1103029 - RNA, 19 nt, Artificial Sequence
  Description of Artificial Sequence: Synthetic oligonucleotide
agaggcaaauuaaacucua

SEQ ID NO: 1103030 - RNA, 19 nt, Artificial Sequence
  Description of Artificial Sequence: Synthetic oligonucleotide
uccggagcacagucugagc

SEQ ID NO: 1103031 - RNA, 19 nt, Artificial Sequence
  Description of Artificial Sequence: Synthetic oligonucleotide
aucuacugacuuguaacuu

SEQ ID NO: 1103032 - RNA, 19 nt, Artificial Sequence
  Description of Artificial Sequence: Synthetic oligonucleotide
augagguccuguaaguauu

SEQ ID NO: 1103033 - RNA, 19 nt, Artificial Sequence
  Description of Artificial Sequence: Synthetic oligonucleotide
gaaauaccaccccaauauu

SEQ ID NO: 1103034 - RNA, 19 nt, Artificial Sequence
  Description of Artificial Sequence: Synthetic oligonucleotide
ggcaaagcugccucgagua

SEQ ID NO: 1103035 - RNA, 19 nt, Artificial Sequence
  Description of Artificial Sequence: Synthetic oligonucleotide
uuguuuccgucuccuuaau

SEQ ID NO: 1103036 - RNA, 19 nt, Artificial Sequence
  Description of Artificial Sequence: Synthetic oligonucleotide
uagaggucuguagcacccc

SEQ ID NO: 1103037 - RNA, 19 nt, Artificial Sequence
  Description of Artificial Sequence: Synthetic oligonucleotide
uaacucccaccagaaagua

SEQ ID NO: 1103038 - RNA, 19 nt, Artificial Sequence
  Description of Artificial Sequence: Synthetic oligonucleotide
cacaccgaauuuugcaaaa

SEQ ID NO: 1103039 - RNA, 19 nt, Artificial Sequence
  Description of Artificial Sequence: Synthetic oligonucleotide
gcacuauccaguaggggug

SEQ ID NO: 1103040 - RNA, 19 nt, Artificial Sequence
  Description of Artificial Sequence: Synthetic oligonucleotide
auaaagcaccguaguaaaa

SEQ ID NO: 1103041 - RNA, 19 nt, Artificial Sequence
  Description of Artificial Sequence: Synthetic oligonucleotide
cugaugaacuggaacugcu

SEQ ID NO: 1103042 - RNA, 19 nt, Artificial Sequence
  Description of Artificial Sequence: Synthetic oligonucleotide
cagguucaagacugcucug

SEQ ID NO: 1103043 - RNA, 19 nt, Artificial Sequence
  Description of Artificial Sequence: Synthetic oligonucleotide
uaauguaaaugggcuucuu

SEQ ID NO: 1103044 - RNA, 19 nt, Artificial Sequence
  Description of Artificial Sequence: Synthetic oligonucleotide
gcagucaccgauacuucag

SEQ ID NO: 1103045 - RNA, 19 nt, Artificial Sequence
  Description of Artificial Sequence: Synthetic oligonucleotide
cugagccgcccucagccac

SEQ ID NO: 1103046 - RNA, 19 nt, Artificial Sequence
  Description of Artificial Sequence: Synthetic oligonucleotide
ucccacauuccagcauucu

SEQ ID NO: 1103047 - RNA, 19 nt, Artificial Sequence
  Description of Artificial Sequence: Synthetic oligonucleotide
ccccaauauuagauacugg

SEQ ID NO: 1103048 - RNA, 19 nt, Artificial Sequence
  Description of Artificial Sequence: Synthetic oligonucleotide
gugguggagcaggugacac

SEQ ID NO: 1103049 - RNA, 19 nt, Artificial Sequence
  Description of Artificial Sequence: Synthetic oligonucleotide
auacuuagcuugauccaua

SEQ ID NO: 1103050 - RNA, 19 nt, Artificial Sequence
  Description of Artificial Sequence: Synthetic oligonucleotide
cucccaccagaaaguacuc

SEQ ID NO: 1103051 - RNA, 19 nt, Artificial Sequence
  Description of Artificial Sequence: Synthetic oligonucleotide
ccaccauuuugaaugacaa

SEQ ID NO: 1103052 - RNA, 19 nt, Artificial Sequence
  Description of Artificial Sequence: Synthetic oligonucleotide
acaagccucucgauagggu

SEQ ID NO: 1103053 - RNA, 19 nt, Artificial Sequence
  Description of Artificial Sequence: Synthetic oligonucleotide
cacuuucacucaguucgac

SEQ ID NO: 1103054 - RNA, 19 nt, Artificial Sequence
  Description of Artificial Sequence: Synthetic oligonucleotide
gucuguaaucauccccaaa

SEQ ID NO: 1103055 - RNA, 19 nt, Artificial Sequence
  Description of Artificial Sequence: Synthetic oligonucleotide
aguucgacuucggguaaau

SEQ ID NO: 1103056 - RNA, 19 nt, Artificial Sequence
  Description of Artificial Sequence: Synthetic oligonucleotide
agguaaaaguacagaggua

SEQ ID NO: 1103057 - RNA, 19 nt, Artificial Sequence
  Description of Artificial Sequence: Synthetic oligonucleotide
guacuggguuauagagaag

SEQ ID NO: 1103058 - RNA, 19 nt, Artificial Sequence
  Description of Artificial Sequence: Synthetic oligonucleotide
ccauggagaaacaaauacu

SEQ ID NO: 1103059 - RNA, 19 nt, Artificial Sequence
  Description of Artificial Sequence: Synthetic oligonucleotide
ggugaagaauuaagaggca

SEQ ID NO: 1103060 - RNA, 19 nt, Artificial Sequence
  Description of Artificial Sequence: Synthetic oligonucleotide
agcuacuggcaaauaguua

SEQ ID NO: 1103061 - RNA, 19 nt, Artificial Sequence
  Description of Artificial Sequence: Synthetic oligonucleotide
uucaguguacuggguuaua

SEQ ID NO: 1103062 - RNA, 19 nt, Artificial Sequence
  Description of Artificial Sequence: Synthetic oligonucleotide
agggucccugaugacauua

SEQ ID NO: 1103063 - RNA, 19 nt, Artificial Sequence
  Description of Artificial Sequence: Synthetic oligonucleotide
agguuauacuuagcuugau

SEQ ID NO: 1103064 - RNA, 19 nt, Artificial Sequence
  Description of Artificial Sequence: Synthetic oligonucleotide
ccauuuugaaugacaaggu

SEQ ID NO: 1103065 - RNA, 19 nt, Artificial Sequence
  Description of Artificial Sequence: Synthetic oligonucleotide
caguaggggugugcaacac

SEQ ID NO: 1103066 - RNA, 19 nt, Artificial Sequence
  Description of Artificial Sequence: Synthetic oligonucleotide
gccauaugcagucaccgau

SEQ ID NO: 1103067 - RNA, 19 nt, Artificial Sequence
  Description of Artificial Sequence: Synthetic oligonucleotide
cagcuacuggcaaauaguu

SEQ ID NO: 1103068 - RNA, 19 nt, Artificial Sequence
  Description of Artificial Sequence: Synthetic oligonucleotide
ggggcaaagcugccucgag

SEQ ID NO: 1103069 - RNA, 19 nt, Artificial Sequence
  Description of Artificial Sequence: Synthetic oligonucleotide
guucgacuucggguaaauc

SEQ ID NO: 1103070 - RNA, 19 nt, Artificial Sequence
  Description of Artificial Sequence: Synthetic oligonucleotide
caguauuauucaugguuuu

SEQ ID NO: 1103071 - RNA, 19 nt, Artificial Sequence
  Description of Artificial Sequence: Synthetic oligonucleotide
caccccaauauuagauacu

SEQ ID NO: 1103072 - RNA, 19 nt, Artificial Sequence
  Description of Artificial Sequence: Synthetic oligonucleotide
gguucaagacugcucuggu

SEQ ID NO: 1103073 - RNA, 19 nt, Artificial Sequence
  Description of Artificial Sequence: Synthetic oligonucleotide
cgaguagcaugaugaaguc

SEQ ID NO: 1103074 - RNA, 19 nt, Artificial Sequence
  Description of Artificial Sequence: Synthetic oligonucleotide
cagucaccgauacuucagu

SEQ ID NO: 1103075 - RNA, 19 nt, Artificial Sequence
  Description of Artificial Sequence: Synthetic oligonucleotide
acucguuaauuagguuaua

SEQ ID NO: 1103076 - RNA, 19 nt, Artificial Sequence
  Description of Artificial Sequence: Synthetic oligonucleotide
cgauagaggucuguagcac

SEQ ID NO: 1103077 - RNA, 19 nt, Artificial Sequence
  Description of Artificial Sequence: Synthetic oligonucleotide
ucgcgaugguuugcuuggu

SEQ ID NO: 1103078 - RNA, 19 nt, Artificial Sequence
  Description of Artificial Sequence: Synthetic oligonucleotide
cuacuggcaaauaguuauu

SEQ ID NO: 1103079 - RNA, 19 nt, Artificial Sequence
  Description of Artificial Sequence: Synthetic oligonucleotide
cagcuucgcgaugguuugc

SEQ ID NO: 1103080 - RNA, 19 nt, Artificial Sequence
  Description of Artificial Sequence: Synthetic oligonucleotide
cuucuccggagcacagucu

SEQ ID NO: 1103081 - RNA, 19 nt, Artificial Sequence
  Description of Artificial Sequence: Synthetic oligonucleotide
ccgauacuucaguguacug

SEQ ID NO: 1103082 - RNA, 19 nt, Artificial Sequence
  Description of Artificial Sequence: Synthetic oligonucleotide
ccaguaggggugugcaaca

SEQ ID NO: 1103083 - RNA, 19 nt, Artificial Sequence
  Description of Artificial Sequence: Synthetic oligonucleotide
aguucugggccaggaugua

SEQ ID NO: 1103084 - RNA, 19 nt, Artificial Sequence
  Description of Artificial Sequence: Synthetic oligonucleotide
cugauacacagcguucuuu

SEQ ID NO: 1103085 - RNA, 19 nt, Artificial Sequence
  Description of Artificial Sequence: Synthetic oligonucleotide
ggucuguagcaccccggaa

SEQ ID NO: 1103086 - RNA, 19 nt, Artificial Sequence
  Description of Artificial Sequence: Synthetic oligonucleotide
cccugaugacauuaaugua

SEQ ID NO: 1103087 - RNA, 19 nt, Artificial Sequence
  Description of Artificial Sequence: Synthetic oligonucleotide
gagccgcccucagccacac

SEQ ID NO: 1103088 - RNA, 19 nt, Artificial Sequence
  Description of Artificial Sequence: Synthetic oligonucleotide
ccccaaaccucagaaagua

SEQ ID NO: 1103089 - RNA, 19 nt, Artificial Sequence
  Description of Artificial Sequence: Synthetic oligonucleotide
ccuguacgauagaggucug

SEQ ID NO: 1103090 - RNA, 19 nt, Artificial Sequence
  Description of Artificial Sequence: Synthetic oligonucleotide
ccucgaguagcaugaugaa

SEQ ID NO: 1103091 - RNA, 19 nt, Artificial Sequence
  Description of Artificial Sequence: Synthetic oligonucleotide
cgucuccuuaauccugguc

SEQ ID NO: 1103092 - RNA, 19 nt, Artificial Sequence
  Description of Artificial Sequence: Synthetic oligonucleotide
cuguacgauagaggucugu

SEQ ID NO: 1103093 - RNA, 19 nt, Artificial Sequence
  Description of Artificial Sequence: Synthetic oligonucleotide
caguucgacuucggguaaa

SEQ ID NO: 1103094 - RNA, 19 nt, Artificial Sequence
  Description of Artificial Sequence: Synthetic oligonucleotide
ccucucgauagggucccug

SEQ ID NO: 1103095 - RNA, 19 nt, Artificial Sequence
  Description of Artificial Sequence: Synthetic oligonucleotide
cagcgugggcucugaugaa

SEQ ID NO: 1103096 - RNA, 19 nt, Artificial Sequence
  Description of Artificial Sequence: Synthetic oligonucleotide
cucuaacaaaacggacuuu

SEQ ID NO: 1103097 - RNA, 19 nt, Artificial Sequence
  Description of Artificial Sequence: Synthetic oligonucleotide
gcucuagugcaaacucgua

SEQ ID NO: 1103098 - RNA, 19 nt, Artificial Sequence
  Description of Artificial Sequence: Synthetic oligonucleotide
gcgugggcucugaugaacu

SEQ ID NO: 1103099 - RNA, 19 nt, Artificial Sequence
  Description of Artificial Sequence: Synthetic oligonucleotide
ccaccagaaaguacucguu

SEQ ID NO: 1103100 - RNA, 19 nt, Artificial Sequence
  Description of Artificial Sequence: Synthetic oligonucleotide
agccgcccucagccacaca

SEQ ID NO: 1103101 - RNA, 19 nt, Artificial Sequence
  Description of Artificial Sequence: Synthetic oligonucleotide
ggacagcgugggcucugau

SEQ ID NO: 1103102 - RNA, 19 nt, Artificial Sequence
  Description of Artificial Sequence: Synthetic oligonucleotide
cggacagcgugggcucuga

SEQ ID NO: 1103103 - RNA, 19 nt, Artificial Sequence
  Description of Artificial Sequence: Synthetic oligonucleotide
uccaucacuagcaagaugg

SEQ ID NO: 1103104 - RNA, 19 nt, Artificial Sequence
  Description of Artificial Sequence: Synthetic oligonucleotide
uaugcgaugagcaacagca

SEQ ID NO: 1103105 - RNA, 19 nt, Artificial Sequence
  Description of Artificial Sequence: Synthetic oligonucleotide
aagaaggucugccagaucu

SEQ ID NO: 1103106 - RNA, 19 nt, Artificial Sequence
  Description of Artificial Sequence: Synthetic oligonucleotide
ugucacuccagccugacug

SEQ ID NO: 1103107 - RNA, 19 nt, Artificial Sequence
  Description of Artificial Sequence: Synthetic oligonucleotide
ugugguugaagauaccgag

SEQ ID NO: 1103108 - RNA, 19 nt, Artificial Sequence
  Description of Artificial Sequence: Synthetic oligonucleotide
aaugcaaccgcagagcaug

SEQ ID NO: 1103109 - RNA, 19 nt, Artificial Sequence
  Description of Artificial Sequence: Synthetic oligonucleotide
agauacuugucacuccagc

SEQ ID NO: 1103110 - RNA, 19 nt, Artificial Sequence
  Description of Artificial Sequence: Synthetic oligonucleotide
ugauugagggccaaguaca

SEQ ID NO: 1103111 - RNA, 19 nt, Artificial Sequence
  Description of Artificial Sequence: Synthetic oligonucleotide
caggaaucauaguagaugc

SEQ ID NO: 1103112 - RNA, 19 nt, Artificial Sequence
  Description of Artificial Sequence: Synthetic oligonucleotide
aggaacuguugccaaagcc

SEQ ID NO: 1103113 - RNA, 19 nt, Artificial Sequence
  Description of Artificial Sequence: Synthetic oligonucleotide
auugguggggcucugggcg

SEQ ID NO: 1103114 - RNA, 19 nt, Artificial Sequence
  Description of Artificial Sequence: Synthetic oligonucleotide
uuguagacaaugaggaaca

SEQ ID NO: 1103115 - RNA, 19 nt, Artificial Sequence
  Description of Artificial Sequence: Synthetic oligonucleotide
ugagcaacagcacucacuc

SEQ ID NO: 1103116 - RNA, 19 nt, Artificial Sequence
  Description of Artificial Sequence: Synthetic oligonucleotide
gauacuugucacuccagcc

SEQ ID NO: 1103117 - RNA, 19 nt, Artificial Sequence
  Description of Artificial Sequence: Synthetic oligonucleotide
auacuguaccacuuccugc

SEQ ID NO: 1103118 - RNA, 19 nt, Artificial Sequence
  Description of Artificial Sequence: Synthetic oligonucleotide
agcugauucccucagccac

SEQ ID NO: 1103119 - RNA, 19 nt, Artificial Sequence
  Description of Artificial Sequence: Synthetic oligonucleotide
ucauaguagaugcuacuca

SEQ ID NO: 1103120 - RNA, 19 nt, Artificial Sequence
  Description of Artificial Sequence: Synthetic oligonucleotide
aaagagaaacaugagcagu

SEQ ID NO: 1103121 - RNA, 19 nt, Artificial Sequence
  Description of Artificial Sequence: Synthetic oligonucleotide
aaucauaguagaugcuacu

SEQ ID NO: 1103122 - RNA, 19 nt, Artificial Sequence
  Description of Artificial Sequence: Synthetic oligonucleotide
gaagcuagcggugaagcgg

SEQ ID NO: 1103123 - RNA, 19 nt, Artificial Sequence
  Description of Artificial Sequence: Synthetic oligonucleotide
ucugccagaucucauuuug

SEQ ID NO: 1103124 - RNA, 19 nt, Artificial Sequence
  Description of Artificial Sequence: Synthetic oligonucleotide
uguugccaaagccaggacc

SEQ ID NO: 1103125 - RNA, 19 nt, Artificial Sequence
  Description of Artificial Sequence: Synthetic oligonucleotide
ugagccauccuguagcgcc

SEQ ID NO: 1103126 - RNA, 19 nt, Artificial Sequence
  Description of Artificial Sequence: Synthetic oligonucleotide
agagacgcaaguaggaggc

SEQ ID NO: 1103127 - RNA, 19 nt, Artificial Sequence
  Description of Artificial Sequence: Synthetic oligonucleotide
ggaagaugaguucagguag

SEQ ID NO: 1103128 - RNA, 19 nt, Artificial Sequence
  Description of Artificial Sequence: Synthetic oligonucleotide
cauauugauaaaguggaug

SEQ ID NO: 1103129 - RNA, 19 nt, Artificial Sequence
  Description of Artificial Sequence: Synthetic oligonucleotide
augcgcaugaccauggccc

SEQ ID NO: 1103130 - RNA, 19 nt, Artificial Sequence
  Description of Artificial Sequence: Synthetic oligonucleotide
cagcuauucaccgaggugg

SEQ ID NO: 1103131 - RNA, 19 nt, Artificial Sequence
  Description of Artificial Sequence: Synthetic oligonucleotide
aaugccaaagggauaaggu

SEQ ID NO: 1103132 - RNA, 19 nt, Artificial Sequence
  Description of Artificial Sequence: Synthetic oligonucleotide
agaugggacaaacucagcu

SEQ ID NO: 1103133 - RNA, 19 nt, Artificial Sequence
  Description of Artificial Sequence: Synthetic oligonucleotide
acugguuagccauggcagc

SEQ ID NO: 1103134 - RNA, 19 nt, Artificial Sequence
  Description of Artificial Sequence: Synthetic oligonucleotide
gaagauaccgaggaacacc

SEQ ID NO: 1103135 - RNA, 19 nt, Artificial Sequence
  Description of Artificial Sequence: Synthetic oligonucleotide
ugggcgaacaggaacauau

SEQ ID NO: 1103136 - RNA, 19 nt, Artificial Sequence
  Description of Artificial Sequence: Synthetic oligonucleotide
accugaguagaacuuguuc

SEQ ID NO: 1103137 - RNA, 19 nt, Artificial Sequence
  Description of Artificial Sequence: Synthetic oligonucleotide
gauaaaguggaugaggaua

SEQ ID NO: 1103138 - RNA, 19 nt, Artificial Sequence
  Description of Artificial Sequence: Synthetic oligonucleotide
guagaugcuacucauuguc

SEQ ID NO: 1103139 - RNA, 19 nt, Artificial Sequence
  Description of Artificial Sequence: Synthetic oligonucleotide
aaaguggaugaggauacug

SEQ ID NO: 1103140 - RNA, 19 nt, Artificial Sequence
  Description of Artificial Sequence: Synthetic oligonucleotide
auacuugucacuccagccu

SEQ ID NO: 1103141 - RNA, 19 nt, Artificial Sequence
  Description of Artificial Sequence: Synthetic oligonucleotide
gaagaugguaguggcacgg

SEQ ID NO: 1103142 - RNA, 19 nt, Artificial Sequence
  Description of Artificial Sequence: Synthetic oligonucleotide
ugagcuuguagccgguacc

SEQ ID NO: 1103143 - RNA, 19 nt, Artificial Sequence
  Description of Artificial Sequence: Synthetic oligonucleotide
acggcugaagcacucauug

SEQ ID NO: 1103144 - RNA, 19 nt, Artificial Sequence
  Description of Artificial Sequence: Synthetic oligonucleotide
uagaugcuacucauugucc

SEQ ID NO: 1103145 - RNA, 19 nt, Artificial Sequence
  Description of Artificial Sequence: Synthetic oligonucleotide
uccgugacccacaucacca

SEQ ID NO: 1103146 - RNA, 19 nt, Artificial Sequence
  Description of Artificial Sequence: Synthetic oligonucleotide
uauugauaaaguggaugag

SEQ ID NO: 1103147 - RNA, 19 nt, Artificial Sequence
  Description of Artificial Sequence: Synthetic oligonucleotide
uagcgaccuccaaagaagg

SEQ ID NO: 1103148 - RNA, 19 nt, Artificial Sequence
  Description of Artificial Sequence: Synthetic oligonucleotide
ggcaaagagaaacaugagc

SEQ ID NO: 1103149 - RNA, 19 nt, Artificial Sequence
  Description of Artificial Sequence: Synthetic oligonucleotide
cagagacgcaaguaggagg

SEQ ID NO: 1103150 - RNA, 19 nt, Artificial Sequence
  Description of Artificial Sequence: Synthetic oligonucleotide
gagaacagacccaugagca

SEQ ID NO: 1103151 - RNA, 19 nt, Artificial Sequence
  Description of Artificial Sequence: Synthetic oligonucleotide
uacuugucacuccagccug

SEQ ID NO: 1103152 - RNA, 19 nt, Artificial Sequence
  Description of Artificial Sequence: Synthetic oligonucleotide
agcacucacuccuuccucg

SEQ ID NO: 1103153 - RNA, 19 nt, Artificial Sequence
  Description of Artificial Sequence: Synthetic oligonucleotide
gaggcaggaaucauaguag

SEQ ID NO: 1103154 - RNA, 19 nt, Artificial Sequence
  Description of Artificial Sequence: Synthetic oligonucleotide
gguggaagaagcaucagag

SEQ ID NO: 1103155 - RNA, 19 nt, Artificial Sequence
  Description of Artificial Sequence: Synthetic oligonucleotide
aagaugaguucagguaggg

SEQ ID NO: 1103156 - RNA, 19 nt, Artificial Sequence
  Description of Artificial Sequence: Synthetic oligonucleotide
uaugcgcaugaccauggcc

SEQ ID NO: 1103157 - RNA, 19 nt, Artificial Sequence
  Description of Artificial Sequence: Synthetic oligonucleotide
cugaguagaacuuguucug

SEQ ID NO: 1103158 - RNA, 19 nt, Artificial Sequence
  Description of Artificial Sequence: Synthetic oligonucleotide
acggccuucaucuugcgga

SEQ ID NO: 1103159 - RNA, 19 nt, Artificial Sequence
  Description of Artificial Sequence: Synthetic oligonucleotide
aagacaccggugauguugg

SEQ ID NO: 1103160 - RNA, 19 nt, Artificial Sequence
  Description of Artificial Sequence: Synthetic oligonucleotide
aguagcgaccuccaaagaa

SEQ ID NO: 1103161 - RNA, 19 nt, Artificial Sequence
  Description of Artificial Sequence: Synthetic oligonucleotide
gaaucauaguagaugcuac

SEQ ID NO: 1103162 - RNA, 19 nt, Artificial Sequence
  Description of Artificial Sequence: Synthetic oligonucleotide
gauaccgaggaacacccca

SEQ ID NO: 1103163 - RNA, 19 nt, Artificial Sequence
  Description of Artificial Sequence: Synthetic oligonucleotide
aaagaaggucugccagauc

SEQ ID NO: 1103164 - RNA, 19 nt, Artificial Sequence
  Description of Artificial Sequence: Synthetic oligonucleotide
ugccagaucucauuuugug

SEQ ID NO: 1103165 - RNA, 19 nt, Artificial Sequence
  Description of Artificial Sequence: Synthetic oligonucleotide
aggguaugcgaugagcaac

SEQ ID NO: 1103166 - RNA, 19 nt, Artificial Sequence
  Description of Artificial Sequence: Synthetic oligonucleotide
guagcgaccuccaaagaag

SEQ ID NO: 1103167 - RNA, 19 nt, Artificial Sequence
  Description of Artificial Sequence: Synthetic oligonucleotide
cuccagaucgggucaaugc

SEQ ID NO: 1103168 - RNA, 19 nt, Artificial Sequence
  Description of Artificial Sequence: Synthetic oligonucleotide
agaacagacccaugagcag

SEQ ID NO: 1103169 - RNA, 19 nt, Artificial Sequence
  Description of Artificial Sequence: Synthetic oligonucleotide
cuagcggugaagcgguugg

SEQ ID NO: 1103170 - RNA, 19 nt, Artificial Sequence
  Description of Artificial Sequence: Synthetic oligonucleotide
acuagcaagauggccacag

SEQ ID NO: 1103171 - RNA, 19 nt, Artificial Sequence
  Description of Artificial Sequence: Synthetic oligonucleotide
gaccauggcccacaggacc

SEQ ID NO: 1103172 - RNA, 19 nt, Artificial Sequence
  Description of Artificial Sequence: Synthetic oligonucleotide
caccccaaaggccaugugg

SEQ ID NO: 1103173 - RNA, 19 nt, Artificial Sequence
  Description of Artificial Sequence: Synthetic oligonucleotide
caguccgugacccacauca

SEQ ID NO: 1103174 - RNA, 19 nt, Artificial Sequence
  Description of Artificial Sequence: Synthetic oligonucleotide
cugaguauuucugcggcgg

SEQ ID NO: 1103175 - RNA, 19 nt, Artificial Sequence
  Description of Artificial Sequence: Synthetic oligonucleotide
cuauucaccgagguggaag

SEQ ID NO: 1103176 - RNA, 19 nt, Artificial Sequence
  Description of Artificial Sequence: Synthetic oligonucleotide
acaccggugauguuggggu

SEQ ID NO: 1103177 - RNA, 19 nt, Artificial Sequence
  Description of Artificial Sequence: Synthetic oligonucleotide
gaugcuacucauuguccac

SEQ ID NO: 1103178 - RNA, 19 nt, Artificial Sequence
  Description of Artificial Sequence: Synthetic oligonucleotide
aaccgcagagcauguagga

SEQ ID NO: 1103179 - RNA, 19 nt, Artificial Sequence
  Description of Artificial Sequence: Synthetic oligonucleotide
ugcccuggaagcuagcggu

SEQ ID NO: 1103180 - RNA, 19 nt, Artificial Sequence
  Description of Artificial Sequence: Synthetic oligonucleotide
cauacccaucucucgaccc

SEQ ID NO: 1103181 - RNA, 19 nt, Artificial Sequence
  Description of Artificial Sequence: Synthetic oligonucleotide
ugccauacccaucucucga

SEQ ID NO: 1103182 - RNA, 19 nt, Artificial Sequence
  Description of Artificial Sequence: Synthetic oligonucleotide
aguagaugcuacucauugu

SEQ ID NO: 1103183 - RNA, 19 nt, Artificial Sequence
  Description of Artificial Sequence: Synthetic oligonucleotide
acccaaugcaaccgcagag

SEQ ID NO: 1103184 - RNA, 19 nt, Artificial Sequence
  Description of Artificial Sequence: Synthetic oligonucleotide
agcggcccacaccauaggc

SEQ ID NO: 1103185 - RNA, 19 nt, Artificial Sequence
  Description of Artificial Sequence: Synthetic oligonucleotide
caaccgcagagcauguagg

SEQ ID NO: 1103186 - RNA, 19 nt, Artificial Sequence
  Description of Artificial Sequence: Synthetic oligonucleotide
gugacuccgaggaugacag

SEQ ID NO: 1103187 - RNA, 19 nt, Artificial Sequence
  Description of Artificial Sequence: Synthetic oligonucleotide
agccaguguagacagagaa

SEQ ID NO: 1103188 - RNA, 19 nt, Artificial Sequence
  Description of Artificial Sequence: Synthetic oligonucleotide
acaccauaggcauccacga

SEQ ID NO: 1103189 - RNA, 19 nt, Artificial Sequence
  Description of Artificial Sequence: Synthetic oligonucleotide
ugcuacucauuguccacag

SEQ ID NO: 1103190 - RNA, 19 nt, Artificial Sequence
  Description of Artificial Sequence: Synthetic oligonucleotide
uccagcuauucaccgaggu

SEQ ID NO: 1103191 - RNA, 19 nt, Artificial Sequence
  Description of Artificial Sequence: Synthetic oligonucleotide
guugacuucucgguagcgg

SEQ ID NO: 1103192 - RNA, 19 nt, Artificial Sequence
  Description of Artificial Sequence: Synthetic oligonucleotide
uggaagcuagcggugaagc

SEQ ID NO: 1103193 - RNA, 19 nt, Artificial Sequence
  Description of Artificial Sequence: Synthetic oligonucleotide
gaugguaguggcacggcug

SEQ ID NO: 1103194 - RNA, 19 nt, Artificial Sequence
  Description of Artificial Sequence: Synthetic oligonucleotide
ugugcagcuuucacagaug

SEQ ID NO: 1103195 - RNA, 19 nt, Artificial Sequence
  Description of Artificial Sequence: Synthetic oligonucleotide
guaaguagcgaccuccaaa

SEQ ID NO: 1103196 - RNA, 19 nt, Artificial Sequence
  Description of Artificial Sequence: Synthetic oligonucleotide
uucaccgagguggaagaag

SEQ ID NO: 1103197 - RNA, 19 nt, Artificial Sequence
  Description of Artificial Sequence: Synthetic oligonucleotide
agauggccgguucucagug

SEQ ID NO: 1103198 - RNA, 19 nt, Artificial Sequence
  Description of Artificial Sequence: Synthetic oligonucleotide
ugacuucucgguagcggcc

SEQ ID NO: 1103199 - RNA, 19 nt, Artificial Sequence
  Description of Artificial Sequence: Synthetic oligonucleotide
cucauuuugugcagcuuuc

SEQ ID NO: 1103200 - RNA, 19 nt, Artificial Sequence
  Description of Artificial Sequence: Synthetic oligonucleotide
caugagcaguccgugaccc

SEQ ID NO: 1103201 - RNA, 19 nt, Artificial Sequence
  Description of Artificial Sequence: Synthetic oligonucleotide
auggccgguucucagugag

SEQ ID NO: 1103202 - RNA, 19 nt, Artificial Sequence
  Description of Artificial Sequence: Synthetic oligonucleotide
gugguugaagauaccgagg

SEQ ID NO: 1103203 - RNA, 19 nt, Artificial Sequence
  Description of Artificial Sequence: Synthetic oligonucleotide
aggccuaugcgcaugacca

SEQ ID NO: 1103204 - RNA, 19 nt, Artificial Sequence
  Description of Artificial Sequence: Synthetic oligonucleotide
ugaguauuucugcggcggu

SEQ ID NO: 1103205 - RNA, 19 nt, Artificial Sequence
  Description of Artificial Sequence: Synthetic oligonucleotide
ggcgaacaggaacauauug

SEQ ID NO: 1103206 - RNA, 19 nt, Artificial Sequence
  Description of Artificial Sequence: Synthetic oligonucleotide
uagggagcaggguugacuu

SEQ ID NO: 1103207 - RNA, 19 nt, Artificial Sequence
  Description of Artificial Sequence: Synthetic oligonucleotide
cagaucucauuuugugcag

SEQ ID NO: 1103208 - RNA, 19 nt, Artificial Sequence
  Description of Artificial Sequence: Synthetic oligonucleotide
aaagugcaugugguugaag

SEQ ID NO: 1103209 - RNA, 19 nt, Artificial Sequence
  Description of Artificial Sequence: Synthetic oligonucleotide
ugguccgcacaaguguugg

SEQ ID NO: 1103210 - RNA, 19 nt, Artificial Sequence
  Description of Artificial Sequence: Synthetic oligonucleotide
acaagggugugcccagcag

SEQ ID NO: 1103211 - RNA, 19 nt, Artificial Sequence
  Description of Artificial Sequence: Synthetic oligonucleotide
guaugcgaugagcaacagc

SEQ ID NO: 1103212 - RNA, 19 nt, Artificial Sequence
  Description of Artificial Sequence: Synthetic oligonucleotide
aggaguaaguagcgaccuc

SEQ ID NO: 1103213 - RNA, 19 nt, Artificial Sequence
  Description of Artificial Sequence: Synthetic oligonucleotide
agaugguaguggcacggcu

SEQ ID NO: 1103214 - RNA, 19 nt, Artificial Sequence
  Description of Artificial Sequence: Synthetic oligonucleotide
guacacggccuucaucuug

SEQ ID NO: 1103215 - RNA, 19 nt, Artificial Sequence
  Description of Artificial Sequence: Synthetic oligonucleotide
cuugcggaucugcaccugc

SEQ ID NO: 1103216 - RNA, 19 nt, Artificial Sequence
  Description of Artificial Sequence: Synthetic oligonucleotide
caggccuaugcgcaugacc

SEQ ID NO: 1103217 - RNA, 19 nt, Artificial Sequence
  Description of Artificial Sequence: Synthetic oligonucleotide
gcaaccgcagagcauguag

SEQ ID NO: 1103218 - RNA, 19 nt, Artificial Sequence
  Description of Artificial Sequence: Synthetic oligonucleotide
agcaggauaggaacuguug

SEQ ID NO: 1103219 - RNA, 19 nt, Artificial Sequence
  Description of Artificial Sequence: Synthetic oligonucleotide
uccacccaaugcaaccgca

SEQ ID NO: 1103220 - RNA, 19 nt, Artificial Sequence
  Description of Artificial Sequence: Synthetic oligonucleotide
ggaagcuagcggugaagcg

SEQ ID NO: 1103221 - RNA, 19 nt, Artificial Sequence
  Description of Artificial Sequence: Synthetic oligonucleotide
aagcgguugguccgcacaa

SEQ ID NO: 1103222 - RNA, 19 nt, Artificial Sequence
  Description of Artificial Sequence: Synthetic oligonucleotide
gaagcgguugguccgcaca

SEQ ID NO: 1103223 - RNA, 19 nt, Artificial Sequence
  Description of Artificial Sequence: Synthetic oligonucleotide
aagcuagcggugaagcggu

SEQ ID NO: 1103224 - RNA, 19 nt, Artificial Sequence
  Description of Artificial Sequence: Synthetic oligonucleotide
cuaggcucagggcccagag

SEQ ID NO: 1103225 - RNA, 19 nt, Artificial Sequence
  Description of Artificial Sequence: Synthetic oligonucleotide
ccagaucucauuuugugca

SEQ ID NO: 1103226 - RNA, 19 nt, Artificial Sequence
  Description of Artificial Sequence: Synthetic oligonucleotide
cugguuagccauggcagcc

SEQ ID NO: 1103227 - RNA, 19 nt, Artificial Sequence
  Description of Artificial Sequence: Synthetic oligonucleotide
uggugcucacacugcacug

SEQ ID NO: 1103228 - RNA, 19 nt, Artificial Sequence
  Description of Artificial Sequence: Synthetic oligonucleotide
agcugccauacccaucucu

SEQ ID NO: 1103229 - RNA, 19 nt, Artificial Sequence
  Description of Artificial Sequence: Synthetic oligonucleotide
gaugagcaacagcacucac

SEQ ID NO: 1103230 - RNA, 19 nt, Artificial Sequence
  Description of Artificial Sequence: Synthetic oligonucleotide
guagcggcccacaccauag

SEQ ID NO: 1103231 - RNA, 19 nt, Artificial Sequence
  Description of Artificial Sequence: Synthetic oligonucleotide
cagauacuugucacuccag

SEQ ID NO: 1103232 - RNA, 19 nt, Artificial Sequence
  Description of Artificial Sequence: Synthetic oligonucleotide
cgaggaacaccccaaaggc

SEQ ID NO: 1103233 - RNA, 19 nt, Artificial Sequence
  Description of Artificial Sequence: Synthetic oligonucleotide
ugaccauggcccacaggac

SEQ ID NO: 1103234 - RNA, 19 nt, Artificial Sequence
  Description of Artificial Sequence: Synthetic oligonucleotide
cugagcuuguagccgguac

SEQ ID NO: 1103235 - RNA, 19 nt, Artificial Sequence
  Description of Artificial Sequence: Synthetic oligonucleotide
ucccgcguggcacaccaga

SEQ ID NO: 1103236 - RNA, 19 nt, Artificial Sequence
  Description of Artificial Sequence: Synthetic oligonucleotide
caugggcuaggcucagggc

SEQ ID NO: 1103237 - RNA, 19 nt, Artificial Sequence
  Description of Artificial Sequence: Synthetic oligonucleotide
gaguauuucugcggcggug

SEQ ID NO: 1103238 - RNA, 19 nt, Artificial Sequence
  Description of Artificial Sequence: Synthetic oligonucleotide
augagcaacagcacucacu

SEQ ID NO: 1103239 - RNA, 19 nt, Artificial Sequence
  Description of Artificial Sequence: Synthetic oligonucleotide
guccgugacccacaucacc

SEQ ID NO: 1103240 - RNA, 19 nt, Artificial Sequence
  Description of Artificial Sequence: Synthetic oligonucleotide
gacuucucgguagcggccc

SEQ ID NO: 1103241 - RNA, 19 nt, Artificial Sequence
  Description of Artificial Sequence: Synthetic oligonucleotide
gguaccugaguagaacuug

SEQ ID NO: 1103242 - RNA, 19 nt, Artificial Sequence
  Description of Artificial Sequence: Synthetic oligonucleotide
gaugggacaaacucagcuu

SEQ ID NO: 1103243 - RNA, 19 nt, Artificial Sequence
  Description of Artificial Sequence: Synthetic oligonucleotide
cucacuccuuccucgcuug

SEQ ID NO: 1103244 - RNA, 19 nt, Artificial Sequence
  Description of Artificial Sequence: Synthetic oligonucleotide
cauaguagaugcuacucau

SEQ ID NO: 1103245 - RNA, 19 nt, Artificial Sequence
  Description of Artificial Sequence: Synthetic oligonucleotide
aguaaguagcgaccuccaa

SEQ ID NO: 1103246 - RNA, 19 nt, Artificial Sequence
  Description of Artificial Sequence: Synthetic oligonucleotide
uggaggcaugucccggcag

SEQ ID NO: 1103247 - RNA, 19 nt, Artificial Sequence
  Description of Artificial Sequence: Synthetic oligonucleotide
aggccaugugggugacucc

SEQ ID NO: 1103248 - RNA, 19 nt, Artificial Sequence
  Description of Artificial Sequence: Synthetic oligonucleotide
agacgcaaguaggaggcug

SEQ ID NO: 1103249 - RNA, 19 nt, Artificial Sequence
  Description of Artificial Sequence: Synthetic oligonucleotide
agcggugaagcgguugguc

SEQ ID NO: 1103250 - RNA, 19 nt, Artificial Sequence
  Description of Artificial Sequence: Synthetic oligonucleotide
uauuucugcggcggugcug

SEQ ID NO: 1103251 - RNA, 19 nt, Artificial Sequence
  Description of Artificial Sequence: Synthetic oligonucleotide
ucucucgacccaugcccag

SEQ ID NO: 1103252 - RNA, 19 nt, Artificial Sequence
  Description of Artificial Sequence: Synthetic oligonucleotide
uagcggcccacaccauagg

SEQ ID NO: 1103253 - RNA, 19 nt, Artificial Sequence
  Description of Artificial Sequence: Synthetic oligonucleotide
cugaagcacucauuguaga

SEQ ID NO: 1103254 - RNA, 19 nt, Artificial Sequence
  Description of Artificial Sequence: Synthetic oligonucleotide
ccgcagagcauguaggaag

SEQ ID NO: 1103255 - RNA, 19 nt, Artificial Sequence
  Description of Artificial Sequence: Synthetic oligonucleotide
ggaaucauaguagaugcua

SEQ ID NO: 1103256 - RNA, 19 nt, Artificial Sequence
  Description of Artificial Sequence: Synthetic oligonucleotide
accggugauguugggguuc

SEQ ID NO: 1103257 - RNA, 19 nt, Artificial Sequence
  Description of Artificial Sequence: Synthetic oligonucleotide
agauaccgaggaacacccc

SEQ ID NO: 1103258 - RNA, 19 nt, Artificial Sequence
  Description of Artificial Sequence: Synthetic oligonucleotide
cuaugcgcaugaccauggc

SEQ ID NO: 1103259 - RNA, 19 nt, Artificial Sequence
  Description of Artificial Sequence: Synthetic oligonucleotide
augcuacucauuguccaca

SEQ ID NO: 1103260 - RNA, 19 nt, Artificial Sequence
  Description of Artificial Sequence: Synthetic oligonucleotide
augcgaugagcaacagcac

SEQ ID NO: 1103261 - RNA, 19 nt, Artificial Sequence
  Description of Artificial Sequence: Synthetic oligonucleotide
uaccgaggaacaccccaaa

SEQ ID NO: 1103262 - RNA, 19 nt, Artificial Sequence
  Description of Artificial Sequence: Synthetic oligonucleotide
accagaccucugcaaugag

SEQ ID NO: 1103263 - RNA, 19 nt, Artificial Sequence
  Description of Artificial Sequence: Synthetic oligonucleotide
gaguaaguagcgaccucca

SEQ ID NO: 1103264 - RNA, 19 nt, Artificial Sequence
  Description of Artificial Sequence: Synthetic oligonucleotide
uuguagccgguaccugagu

SEQ ID NO: 1103265 - RNA, 19 nt, Artificial Sequence
  Description of Artificial Sequence: Synthetic oligonucleotide
gaggaacacaagguagcca

SEQ ID NO: 1103266 - RNA, 19 nt, Artificial Sequence
  Description of Artificial Sequence: Synthetic oligonucleotide
agcauguaggaaggcugag

SEQ ID NO: 1103267 - RNA, 19 nt, Artificial Sequence
  Description of Artificial Sequence: Synthetic oligonucleotide
gcggugaagcgguuggucc

SEQ ID NO: 1103268 - RNA, 19 nt, Artificial Sequence
  Description of Artificial Sequence: Synthetic oligonucleotide
caaugaggcacuugugugu

SEQ ID NO: 1103269 - RNA, 19 nt, Artificial Sequence
  Description of Artificial Sequence: Synthetic oligonucleotide
gcaggaguaaguagcgacc

SEQ ID NO: 1103270 - RNA, 19 nt, Artificial Sequence
  Description of Artificial Sequence: Synthetic oligonucleotide
cacggccuucaucuugcgg

SEQ ID NO: 1103271 - RNA, 19 nt, Artificial Sequence
  Description of Artificial Sequence: Synthetic oligonucleotide
aggaccauggccagggcaa

SEQ ID NO: 1103272 - RNA, 19 nt, Artificial Sequence
  Description of Artificial Sequence: Synthetic oligonucleotide
gcgaacaggaacauauuga

SEQ ID NO: 1103273 - RNA, 19 nt, Artificial Sequence
  Description of Artificial Sequence: Synthetic oligonucleotide
cccgaggggaagaugguag

SEQ ID NO: 1103274 - RNA, 19 nt, Artificial Sequence
  Description of Artificial Sequence: Synthetic oligonucleotide
cuggaagcuagcggugaag

SEQ ID NO: 1103275 - RNA, 19 nt, Artificial Sequence
  Description of Artificial Sequence: Synthetic oligonucleotide
acauauugauaaaguggau

SEQ ID NO: 1103276 - RNA, 19 nt, Artificial Sequence
  Description of Artificial Sequence: Synthetic oligonucleotide
cccuccaucacuagcaaga

SEQ ID NO: 1103277 - RNA, 19 nt, Artificial Sequence
  Description of Artificial Sequence: Synthetic oligonucleotide
uugagccauccuguagcgc

SEQ ID NO: 1103278 - RNA, 19 nt, Artificial Sequence
  Description of Artificial Sequence: Synthetic oligonucleotide
accgagguggaagaagcau

SEQ ID NO: 1103279 - RNA, 19 nt, Artificial Sequence
  Description of Artificial Sequence: Synthetic oligonucleotide
uccgaggaugacagacauc

SEQ ID NO: 1103280 - RNA, 19 nt, Artificial Sequence
  Description of Artificial Sequence: Synthetic oligonucleotide
uuguccucucugcccgcug

SEQ ID NO: 1103281 - RNA, 19 nt, Artificial Sequence
  Description of Artificial Sequence: Synthetic oligonucleotide
cucucgacccaugcccagg

SEQ ID NO: 1103282 - RNA, 19 nt, Artificial Sequence
  Description of Artificial Sequence: Synthetic oligonucleotide
cucgcuugagccauccugu

SEQ ID NO: 1103283 - RNA, 19 nt, Artificial Sequence
  Description of Artificial Sequence: Synthetic oligonucleotide
gcucugggcgaacaggaac

SEQ ID NO: 1103284 - RNA, 19 nt, Artificial Sequence
  Description of Artificial Sequence: Synthetic oligonucleotide
aguccgugacccacaucac

SEQ ID NO: 1103285 - RNA, 19 nt, Artificial Sequence
  Description of Artificial Sequence: Synthetic oligonucleotide
cuugucacuccagccugac

SEQ ID NO: 1103286 - RNA, 19 nt, Artificial Sequence
  Description of Artificial Sequence: Synthetic oligonucleotide
accauggcccacaggaccu

SEQ ID NO: 1103287 - RNA, 19 nt, Artificial Sequence
  Description of Artificial Sequence: Synthetic oligonucleotide
ccucgcuugagccauccug

SEQ ID NO: 1103288 - RNA, 19 nt, Artificial Sequence
  Description of Artificial Sequence: Synthetic oligonucleotide
auaguagaugcuacucauu

SEQ ID NO: 1103289 - RNA, 19 nt, Artificial Sequence
  Description of Artificial Sequence: Synthetic oligonucleotide
ccgcacaaguguuggaggc

SEQ ID NO: 1103290 - RNA, 19 nt, Artificial Sequence
  Description of Artificial Sequence: Synthetic oligonucleotide
gccaaagggauaagguccc

SEQ ID NO: 1103291 - RNA, 19 nt, Artificial Sequence
  Description of Artificial Sequence: Synthetic oligonucleotide
ugauucccucagccacuug

SEQ ID NO: 1103292 - RNA, 19 nt, Artificial Sequence
  Description of Artificial Sequence: Synthetic oligonucleotide
gguugguccgcacaagugu

SEQ ID NO: 1103293 - RNA, 19 nt, Artificial Sequence
  Description of Artificial Sequence: Synthetic oligonucleotide
agacaccggugauguuggg

SEQ ID NO: 1103294 - RNA, 19 nt, Artificial Sequence
  Description of Artificial Sequence: Synthetic oligonucleotide
ugaagcgguugguccgcac

SEQ ID NO: 1103295 - RNA, 19 nt, Artificial Sequence
  Description of Artificial Sequence: Synthetic oligonucleotide
gauggccgguucucaguga

SEQ ID NO: 1103296 - RNA, 19 nt, Artificial Sequence
  Description of Artificial Sequence: Synthetic oligonucleotide
augaggauacugggagcug

SEQ ID NO: 1103297 - RNA, 19 nt, Artificial Sequence
  Description of Artificial Sequence: Synthetic oligonucleotide
cagaucgggucaaugccaa

SEQ ID NO: 1103298 - RNA, 19 nt, Artificial Sequence
  Description of Artificial Sequence: Synthetic oligonucleotide
cccaaugcaaccgcagagc

SEQ ID NO: 1103299 - RNA, 19 nt, Artificial Sequence
  Description of Artificial Sequence: Synthetic oligonucleotide
ggguugacuucucgguagc

SEQ ID NO: 1103300 - RNA, 19 nt, Artificial Sequence
  Description of Artificial Sequence: Synthetic oligonucleotide
ccgagguggaagaagcauc

SEQ ID NO: 1103301 - RNA, 19 nt, Artificial Sequence
  Description of Artificial Sequence: Synthetic oligonucleotide
auaccgaggaacaccccaa

SEQ ID NO: 1103302 - RNA, 19 nt, Artificial Sequence
  Description of Artificial Sequence: Synthetic oligonucleotide
gaccuccaaagaaggucug

SEQ ID NO: 1103303 - RNA, 19 nt, Artificial Sequence
  Description of Artificial Sequence: Synthetic oligonucleotide
ggcaggguaugcgaugagc

SEQ ID NO: 1103304 - RNA, 19 nt, Artificial Sequence
  Description of Artificial Sequence: Synthetic oligonucleotide
agcuauucaccgaggugga

SEQ ID NO: 1103305 - RNA, 19 nt, Artificial Sequence
  Description of Artificial Sequence: Synthetic oligonucleotide
aucucucgacccaugccca

SEQ ID NO: 1103306 - RNA, 19 nt, Artificial Sequence
  Description of Artificial Sequence: Synthetic oligonucleotide
gaguucagguagggucucc

SEQ ID NO: 1103307 - RNA, 19 nt, Artificial Sequence
  Description of Artificial Sequence: Synthetic oligonucleotide
gaacaccccaaaggccaug

SEQ ID NO: 1103308 - RNA, 19 nt, Artificial Sequence
  Description of Artificial Sequence: Synthetic oligonucleotide
ccagcuauucaccgaggug

SEQ ID NO: 1103309 - RNA, 19 nt, Artificial Sequence
  Description of Artificial Sequence: Synthetic oligonucleotide
ucugggcgaacaggaacau

SEQ ID NO: 1103310 - RNA, 19 nt, Artificial Sequence
  Description of Artificial Sequence: Synthetic oligonucleotide
ccauacccaucucucgacc

SEQ ID NO: 1103311 - RNA, 19 nt, Artificial Sequence
  Description of Artificial Sequence: Synthetic oligonucleotide
gcgaccuccaaagaagguc

SEQ ID NO: 1103312 - RNA, 19 nt, Artificial Sequence
  Description of Artificial Sequence: Synthetic oligonucleotide
caggguaugcgaugagcaa

SEQ ID NO: 1103313 - RNA, 19 nt, Artificial Sequence
  Description of Artificial Sequence: Synthetic oligonucleotide
gcugccauacccaucucuc

SEQ ID NO: 1103314 - RNA, 19 nt, Artificial Sequence
  Description of Artificial Sequence: Synthetic oligonucleotide
cagcacucacuccuuccuc

SEQ ID NO: 1103315 - RNA, 19 nt, Artificial Sequence
  Description of Artificial Sequence: Synthetic oligonucleotide
cagcugauucccucagcca

SEQ ID NO: 1103316 - RNA, 19 nt, Artificial Sequence
  Description of Artificial Sequence: Synthetic oligonucleotide
ucccggcaggguaugcgau

SEQ ID NO: 1103317 - RNA, 19 nt, Artificial Sequence
  Description of Artificial Sequence: Synthetic oligonucleotide
ggguaugcgaugagcaaca

SEQ ID NO: 1103318 - RNA, 19 nt, Artificial Sequence
  Description of Artificial Sequence: Synthetic oligonucleotide
gccauacccaucucucgac

SEQ ID NO: 1103319 - RNA, 19 nt, Artificial Sequence
  Description of Artificial Sequence: Synthetic oligonucleotide
gagcuuguagccgguaccu

SEQ ID NO: 1103320 - RNA, 19 nt, Artificial Sequence
  Description of Artificial Sequence: Synthetic oligonucleotide
augucccggcaggguaugc

SEQ ID NO: 1103321 - RNA, 19 nt, Artificial Sequence
  Description of Artificial Sequence: Synthetic oligonucleotide
gguuagccauggcagccac

SEQ ID NO: 1103322 - RNA, 19 nt, Artificial Sequence
  Description of Artificial Sequence: Synthetic oligonucleotide
accgcagagcauguaggaa

SEQ ID NO: 1103323 - RNA, 19 nt, Artificial Sequence
  Description of Artificial Sequence: Synthetic oligonucleotide
caggcuccagaucggguca

SEQ ID NO: 1103324 - RNA, 19 nt, Artificial Sequence
  Description of Artificial Sequence: Synthetic oligonucleotide
ccaaugcaaccgcagagca

SEQ ID NO: 1103325 - RNA, 19 nt, Artificial Sequence
  Description of Artificial Sequence: Synthetic oligonucleotide
ccgaggaugacagacaucu

SEQ ID NO: 1103326 - RNA, 19 nt, Artificial Sequence
  Description of Artificial Sequence: Synthetic oligonucleotide
cagcacauacuguaccacu

SEQ ID NO: 1103327 - RNA, 19 nt, Artificial Sequence
  Description of Artificial Sequence: Synthetic oligonucleotide
agcgguugguccgcacaag

SEQ ID NO: 1103328 - RNA, 19 nt, Artificial Sequence
  Description of Artificial Sequence: Synthetic oligonucleotide
gacgcaaguaggaggcugu

SEQ ID NO: 1103329 - RNA, 19 nt, Artificial Sequence
  Description of Artificial Sequence: Synthetic oligonucleotide
gguugaagauaccgaggaa

SEQ ID NO: 1103330 - RNA, 19 nt, Artificial Sequence
  Description of Artificial Sequence: Synthetic oligonucleotide
ggaacuccacccaaugcaa

SEQ ID NO: 1103331 - RNA, 19 nt, Artificial Sequence
  Description of Artificial Sequence: Synthetic oligonucleotide
guaccugaguagaacuugu

SEQ ID NO: 1103332 - RNA, 19 nt, Artificial Sequence
  Description of Artificial Sequence: Synthetic oligonucleotide
gggguucagggugagcaug

SEQ ID NO: 1103333 - RNA, 19 nt, Artificial Sequence
  Description of Artificial Sequence: Synthetic oligonucleotide
uccucgcuugagccauccu

SEQ ID NO: 1103334 - RNA, 19 nt, Artificial Sequence
  Description of Artificial Sequence: Synthetic oligonucleotide
gagagccccuccaucacua

SEQ ID NO: 1103335 - RNA, 19 nt, Artificial Sequence
  Description of Artificial Sequence: Synthetic oligonucleotide
ggugaagcgguugguccgc

SEQ ID NO: 1103336 - RNA, 19 nt, Artificial Sequence
  Description of Artificial Sequence: Synthetic oligonucleotide
ccagaucgggucaaugcca

SEQ ID NO: 1103337 - RNA, 19 nt, Artificial Sequence
  Description of Artificial Sequence: Synthetic oligonucleotide
agaucgggucaaugccaaa

SEQ ID NO: 1103338 - RNA, 19 nt, Artificial Sequence
  Description of Artificial Sequence: Synthetic oligonucleotide
gguaugcgaugagcaacag

SEQ ID NO: 1103339 - RNA, 19 nt, Artificial Sequence
  Description of Artificial Sequence: Synthetic oligonucleotide
gacccacaucaccaaacau

SEQ ID NO: 1103340 - RNA, 19 nt, Artificial Sequence
  Description of Artificial Sequence: Synthetic oligonucleotide
gccuaugcgcaugaccaug

SEQ ID NO: 1103341 - RNA, 19 nt, Artificial Sequence
  Description of Artificial Sequence: Synthetic oligonucleotide
agcgaccuccaaagaaggu

SEQ ID NO: 1103342 - RNA, 19 nt, Artificial Sequence
  Description of Artificial Sequence: Synthetic oligonucleotide
caggguugacuucucggua

SEQ ID NO: 1103343 - RNA, 19 nt, Artificial Sequence
  Description of Artificial Sequence: Synthetic oligonucleotide
caugucccggcaggguaug

SEQ ID NO: 1103344 - RNA, 19 nt, Artificial Sequence
  Description of Artificial Sequence: Synthetic oligonucleotide
ggucccgcguggcacacca

SEQ ID NO: 1103345 - RNA, 19 nt, Artificial Sequence
  Description of Artificial Sequence: Synthetic oligonucleotide
caggaguaaguagcgaccu

SEQ ID NO: 1103346 - RNA, 19 nt, Artificial Sequence
  Description of Artificial Sequence: Synthetic oligonucleotide
ccaugcccaggccuaugcg

SEQ ID NO: 1103347 - RNA, 19 nt, Artificial Sequence
  Description of Artificial Sequence: Synthetic oligonucleotide
caccgagguggaagaagca

SEQ ID NO: 1103348 - RNA, 19 nt, Artificial Sequence
  Description of Artificial Sequence: Synthetic oligonucleotide
cacagauggccgguucuca

SEQ ID NO: 1103349 - RNA, 19 nt, Artificial Sequence
  Description of Artificial Sequence: Synthetic oligonucleotide
uagcggugaagcgguuggu

SEQ ID NO: 1103350 - RNA, 19 nt, Artificial Sequence
  Description of Artificial Sequence: Synthetic oligonucleotide
gcuagcggugaagcgguug

SEQ ID NO: 1103351 - RNA, 19 nt, Artificial Sequence
  Description of Artificial Sequence: Synthetic oligonucleotide
cacugauugagggccaagu

SEQ ID NO: 1103352 - RNA, 19 nt, Artificial Sequence
  Description of Artificial Sequence: Synthetic oligonucleotide
cuccgaggaugacagacau

SEQ ID NO: 1103353 - RNA, 19 nt, Artificial Sequence
  Description of Artificial Sequence: Synthetic oligonucleotide
caaagugcaugugguugaa

SEQ ID NO: 1103354 - RNA, 19 nt, Artificial Sequence
  Description of Artificial Sequence: Synthetic oligonucleotide
gccgguaccugaguagaac

SEQ ID NO: 1103355 - RNA, 19 nt, Artificial Sequence
  Description of Artificial Sequence: Synthetic oligonucleotide
ugcaaccgcagagcaugua

SEQ ID NO: 1103356 - RNA, 19 nt, Artificial Sequence
  Description of Artificial Sequence: Synthetic oligonucleotide
ggcucagggcccagagacg

SEQ ID NO: 1103357 - RNA, 19 nt, Artificial Sequence
  Description of Artificial Sequence: Synthetic oligonucleotide
cuucucgguagcggcccac

SEQ ID NO: 1103358 - RNA, 19 nt, Artificial Sequence
  Description of Artificial Sequence: Synthetic oligonucleotide
gagcaguccgugacccaca

SEQ ID NO: 1103359 - RNA, 19 nt, Artificial Sequence
  Description of Artificial Sequence: Synthetic oligonucleotide
cugccagaucucauuuugu

SEQ ID NO: 1103360 - RNA, 19 nt, Artificial Sequence
  Description of Artificial Sequence: Synthetic oligonucleotide
gguagcggcccacaccaua

SEQ ID NO: 1103361 - RNA, 19 nt, Artificial Sequence
  Description of Artificial Sequence: Synthetic oligonucleotide
guauuucugcggcggugcu

SEQ ID NO: 1103362 - RNA, 19 nt, Artificial Sequence
  Description of Artificial Sequence: Synthetic oligonucleotide
gcuccagaucgggucaaug

SEQ ID NO: 1103363 - RNA, 19 nt, Artificial Sequence
  Description of Artificial Sequence: Synthetic oligonucleotide
aggucccgcguggcacacc

SEQ ID NO: 1103364 - RNA, 19 nt, Artificial Sequence
  Description of Artificial Sequence: Synthetic oligonucleotide
ggccaggcuccagaucggg

SEQ ID NO: 1103365 - RNA, 19 nt, Artificial Sequence
  Description of Artificial Sequence: Synthetic oligonucleotide
cuagcaagauggccacagu

SEQ ID NO: 1103366 - RNA, 19 nt, Artificial Sequence
  Description of Artificial Sequence: Synthetic oligonucleotide
caaugcaaccgcagagcau

SEQ ID NO: 1103367 - RNA, 19 nt, Artificial Sequence
  Description of Artificial Sequence: Synthetic oligonucleotide
ccgcguggcacaccagacc

SEQ ID NO: 1103368 - RNA, 19 nt, Artificial Sequence
  Description of Artificial Sequence: Synthetic oligonucleotide
guggcugauugguggggcu

SEQ ID NO: 1103369 - RNA, 19 nt, Artificial Sequence
  Description of Artificial Sequence: Synthetic oligonucleotide
augcaaccgcagagcaugu

SEQ ID NO: 1103370 - RNA, 19 nt, Artificial Sequence
  Description of Artificial Sequence: Synthetic oligonucleotide
cuggccuucucugaguauu

SEQ ID NO: 1103371 - RNA, 19 nt, Artificial Sequence
  Description of Artificial Sequence: Synthetic oligonucleotide
ggaugacagacaucuucau

SEQ ID NO: 1103372 - RNA, 19 nt, Artificial Sequence
  Description of Artificial Sequence: Synthetic oligonucleotide
agaccucagaugggacaaa

SEQ ID NO: 1103373 - RNA, 19 nt, Artificial Sequence
  Description of Artificial Sequence: Synthetic oligonucleotide
gcaugugguugaagauacc

SEQ ID NO: 1103374 - RNA, 19 nt, Artificial Sequence
  Description of Artificial Sequence: Synthetic oligonucleotide
cccgcguggcacaccagac

SEQ ID NO: 1103375 - RNA, 19 nt, Artificial Sequence
  Description of Artificial Sequence: Synthetic oligonucleotide
gcacugauugagggccaag

SEQ ID NO: 1103376 - RNA, 19 nt, Artificial Sequence
  Description of Artificial Sequence: Synthetic oligonucleotide
acccaucucucgacccaug

SEQ ID NO: 1103377 - RNA, 19 nt, Artificial Sequence
  Description of Artificial Sequence: Synthetic oligonucleotide
gcggcccacaccauaggca

SEQ ID NO: 1103378 - RNA, 19 nt, Artificial Sequence
  Description of Artificial Sequence: Synthetic oligonucleotide
gagccauccuguagcgccu

SEQ ID NO: 1103379 - RNA, 19 nt, Artificial Sequence
  Description of Artificial Sequence: Synthetic oligonucleotide
cgaccuccaaagaaggucu

SEQ ID NO: 1103380 - RNA, 19 nt, Artificial Sequence
  Description of Artificial Sequence: Synthetic oligonucleotide
ccgguaccugaguagaacu

SEQ ID NO: 1103381 - RNA, 19 nt, Artificial Sequence
  Description of Artificial Sequence: Synthetic oligonucleotide
gagacgcaaguaggaggcu

SEQ ID NO: 1103382 - RNA, 19 nt, Artificial Sequence
  Description of Artificial Sequence: Synthetic oligonucleotide
agccgguaccugaguagaa

SEQ ID NO: 1103383 - RNA, 19 nt, Artificial Sequence
  Description of Artificial Sequence: Synthetic oligonucleotide
gcgguugguccgcacaagu

SEQ ID NO: 1103384 - RNA, 19 nt, Artificial Sequence
  Description of Artificial Sequence: Synthetic oligonucleotide
aggcuccagaucgggucaa

SEQ ID NO: 1103385 - RNA, 19 nt, Artificial Sequence
  Description of Artificial Sequence: Synthetic oligonucleotide
gugaagcgguugguccgca

SEQ ID NO: 1103386 - RNA, 19 nt, Artificial Sequence
  Description of Artificial Sequence: Synthetic oligonucleotide
caccauaggcauccacgau

SEQ ID NO: 1103387 - RNA, 19 nt, Artificial Sequence
  Description of Artificial Sequence: Synthetic oligonucleotide
caggucccgcguggcacac

SEQ ID NO: 1103388 - RNA, 19 nt, Artificial Sequence
  Description of Artificial Sequence: Synthetic oligonucleotide
gcugauucccucagccacu

SEQ ID NO: 1103389 - RNA, 19 nt, Artificial Sequence
  Description of Artificial Sequence: Synthetic oligonucleotide
gcuacucauuguccacagu

SEQ ID NO: 1103390 - RNA, 19 nt, Artificial Sequence
  Description of Artificial Sequence: Synthetic oligonucleotide
ggccaaguacacggccuuc

SEQ ID NO: 1103391 - RNA, 19 nt, Artificial Sequence
  Description of Artificial Sequence: Synthetic oligonucleotide
ccuggaagcuagcggugaa

SEQ ID NO: 1103392 - RNA, 19 nt, Artificial Sequence
  Description of Artificial Sequence: Synthetic oligonucleotide
cugggcgaacaggaacaua

SEQ ID NO: 1103393 - RNA, 19 nt, Artificial Sequence
  Description of Artificial Sequence: Synthetic oligonucleotide
ggcugauugguggggcucu

SEQ ID NO: 1103394 - RNA, 19 nt, Artificial Sequence
  Description of Artificial Sequence: Synthetic oligonucleotide
gcuauucaccgagguggaa

SEQ ID NO: 1103395 - RNA, 19 nt, Artificial Sequence
  Description of Artificial Sequence: Synthetic oligonucleotide
gucccgcguggcacaccag

SEQ ID NO: 1103396 - RNA, 19 nt, Artificial Sequence
  Description of Artificial Sequence: Synthetic oligonucleotide
gcaguccgugacccacauc

SEQ ID NO: 1103397 - RNA, 19 nt, Artificial Sequence
  Description of Artificial Sequence: Synthetic oligonucleotide
gggaggcaggaaucauagu

SEQ ID NO: 1103398 - RNA, 19 nt, Artificial Sequence
  Description of Artificial Sequence: Synthetic oligonucleotide
cgcguggcacaccagaccu

SEQ ID NO: 1103399 - RNA, 19 nt, Artificial Sequence
  Description of Artificial Sequence: Synthetic oligonucleotide
cccuggaagcuagcgguga

SEQ ID NO: 1103400 - RNA, 19 nt, Artificial Sequence
  Description of Artificial Sequence: Synthetic oligonucleotide
ggccuaugcgcaugaccau

SEQ ID NO: 1103401 - RNA, 19 nt, Artificial Sequence
  Description of Artificial Sequence: Synthetic oligonucleotide
ccgugacccacaucaccaa

SEQ ID NO: 1103402 - RNA, 19 nt, Artificial Sequence
  Description of Artificial Sequence: Synthetic oligonucleotide
cgugacccacaucaccaaa

SEQ ID NO: 1103403 - RNA, 19 nt, Artificial Sequence
  Description of Artificial Sequence: Synthetic oligonucleotide
ccggugauguugggguuca

SEQ ID NO: 1103404 - RNA, 19 nt, Artificial Sequence
  Description of Artificial Sequence: Synthetic oligonucleotide
ccgaggggaagaugguagu

SEQ ID NO: 1103405 - RNA, 19 nt, Artificial Sequence
  Description of Artificial Sequence: Synthetic oligonucleotide
ccaaagggauaagguccca

SEQ ID NO: 1103406 - RNA, 19 nt, Artificial Sequence
  Description of Artificial Sequence: Synthetic oligonucleotide
caccggugauguugggguu

SEQ ID NO: 1103407 - RNA, 19 nt, Artificial Sequence
  Description of Artificial Sequence: Synthetic oligonucleotide
ccuuccucgcuugagccau

SEQ ID NO: 1103408 - RNA, 19 nt, Artificial Sequence
  Description of Artificial Sequence: Synthetic oligonucleotide
ccucagccacuuguagaca

SEQ ID NO: 1103409 - RNA, 19 nt, Artificial Sequence
  Description of Artificial Sequence: Synthetic oligonucleotide
agcuagcggugaagcgguu

SEQ ID NO: 1103410 - RNA, 19 nt, Artificial Sequence
  Description of Artificial Sequence: Synthetic oligonucleotide
gcccgaggggaagauggua

SEQ ID NO: 1103411 - RNA, 19 nt, Artificial Sequence
  Description of Artificial Sequence: Synthetic oligonucleotide
gguggggcucugggcgaac

SEQ ID NO: 1103412 - RNA, 19 nt, Artificial Sequence
  Description of Artificial Sequence: Synthetic oligonucleotide
gcguggcacaccagaccuc

SEQ ID NO: 1103413 - RNA, 19 nt, Artificial Sequence
  Description of Artificial Sequence: Synthetic oligonucleotide
cggcaggguaugcgaugag

SEQ ID NO: 1103414 - RNA, 19 nt, Artificial Sequence
  Description of Artificial Sequence: Synthetic oligonucleotide
gccggugugccuggccaaa

SEQ ID NO: 1103415 - RNA, 19 nt, Artificial Sequence
  Description of Artificial Sequence: Synthetic oligonucleotide
cugcggcggugcugccgca

SEQ ID NO: 1103416 - RNA, 19 nt, Artificial Sequence
  Description of Artificial Sequence: Synthetic oligonucleotide
gggcgaacaggaacauauu

SEQ ID NO: 1103417 - RNA, 19 nt, Artificial Sequence
  Description of Artificial Sequence: Synthetic oligonucleotide
cgguaccugaguagaacuu

SEQ ID NO: 1103418 - RNA, 19 nt, Artificial Sequence
  Description of Artificial Sequence: Synthetic oligonucleotide
ggcuccagaucgggucaau

SEQ ID NO: 1103419 - RNA, 19 nt, Artificial Sequence
  Description of Artificial Sequence: Synthetic oligonucleotide
auauauauuauauauaugu

SEQ ID NO: 1103420 - RNA, 19 nt, Artificial Sequence
  Description of Artificial Sequence: Synthetic oligonucleotide
aaagcuuggguccugcccc

SEQ ID NO: 1103421 - RNA, 19 nt, Artificial Sequence
  Description of Artificial Sequence: Synthetic oligonucleotide
ucauauauauuauauauau

SEQ ID NO: 1103422 - RNA, 19 nt, Artificial Sequence
  Description of Artificial Sequence: Synthetic oligonucleotide
ugucuuaacauuuacaguc

SEQ ID NO: 1103423 - RNA, 19 nt, Artificial Sequence
  Description of Artificial Sequence: Synthetic oligonucleotide
uauacuaauaagaacacua

SEQ ID NO: 1103424 - RNA, 19 nt, Artificial Sequence
  Description of Artificial Sequence: Synthetic oligonucleotide
uauacacuauauaacgagg

SEQ ID NO: 1103425 - RNA, 19 nt, Artificial Sequence
  Description of Artificial Sequence: Synthetic oligonucleotide
uauauagagggguacacag

SEQ ID NO: 1103426 - RNA, 19 nt, Artificial Sequence
  Description of Artificial Sequence: Synthetic oligonucleotide
uccucaagcuucuagaccg

SEQ ID NO: 1103427 - RNA, 19 nt, Artificial Sequence
  Description of Artificial Sequence: Synthetic oligonucleotide
uuuacagucguauguacag

SEQ ID NO: 1103428 - RNA, 19 nt, Artificial Sequence
  Description of Artificial Sequence: Synthetic oligonucleotide
auacacacaaucuucagug

SEQ ID NO: 1103429 - RNA, 19 nt, Artificial Sequence
  Description of Artificial Sequence: Synthetic oligonucleotide
aauaagaacacuaguuguc

SEQ ID NO: 1103430 - RNA, 19 nt, Artificial Sequence
  Description of Artificial Sequence: Synthetic oligonucleotide
auauauuauauauauguau

SEQ ID NO: 1103431 - RNA, 19 nt, Artificial Sequence
  Description of Artificial Sequence: Synthetic oligonucleotide
ucagugugaagcaauauac

SEQ ID NO: 1103432 - RNA, 19 nt, Artificial Sequence
  Description of Artificial Sequence: Synthetic oligonucleotide
gauagguguggauacaucc

SEQ ID NO: 1103433 - RNA, 19 nt, Artificial Sequence
  Description of Artificial Sequence: Synthetic oligonucleotide
uuuaccauuuuacagucgu

SEQ ID NO: 1103434 - RNA, 19 nt, Artificial Sequence
  Description of Artificial Sequence: Synthetic oligonucleotide
uaauaagaacacuaguugu

SEQ ID NO: 1103435 - RNA, 19 nt, Artificial Sequence
  Description of Artificial Sequence: Synthetic oligonucleotide
uauauauuauauauaugua

SEQ ID NO: 1103436 - RNA, 19 nt, Artificial Sequence
  Description of Artificial Sequence: Synthetic oligonucleotide
agauauaauacacacguuu

SEQ ID NO: 1103437 - RNA, 19 nt, Artificial Sequence
  Description of Artificial Sequence: Synthetic oligonucleotide
uuauguuuggggcacuuca

SEQ ID NO: 1103438 - RNA, 19 nt, Artificial Sequence
  Description of Artificial Sequence: Synthetic oligonucleotide
auacacuauauaacgaggc

SEQ ID NO: 1103439 - RNA, 19 nt, Artificial Sequence
  Description of Artificial Sequence: Synthetic oligonucleotide
aauagcaacucugcagugg

SEQ ID NO: 1103440 - RNA, 19 nt, Artificial Sequence
  Description of Artificial Sequence: Synthetic oligonucleotide
agggacaucacuguagccc

SEQ ID NO: 1103441 - RNA, 19 nt, Artificial Sequence
  Description of Artificial Sequence: Synthetic oligonucleotide
gauacauccuuuauaggag

SEQ ID NO: 1103442 - RNA, 19 nt, Artificial Sequence
  Description of Artificial Sequence: Synthetic oligonucleotide
aacaucuuuuagaaacagc

SEQ ID NO: 1103443 - RNA, 19 nt, Artificial Sequence
  Description of Artificial Sequence: Synthetic oligonucleotide
ucguuucagaacuugcagg

SEQ ID NO: 1103444 - RNA, 19 nt, Artificial Sequence
  Description of Artificial Sequence: Synthetic oligonucleotide
aacgaggccagauauaaua

SEQ ID NO: 1103445 - RNA, 19 nt, Artificial Sequence
  Description of Artificial Sequence: Synthetic oligonucleotide
uauugaagcguggacagag

SEQ ID NO: 1103446 - RNA, 19 nt, Artificial Sequence
  Description of Artificial Sequence: Synthetic oligonucleotide
uacacuauauaacgaggcc

SEQ ID NO: 1103447 - RNA, 19 nt, Artificial Sequence
  Description of Artificial Sequence: Synthetic oligonucleotide
auagcagcgacacacagaa

SEQ ID NO: 1103448 - RNA, 19 nt, Artificial Sequence
  Description of Artificial Sequence: Synthetic oligonucleotide
caaaguaaaauucuccuca

SEQ ID NO: 1103449 - RNA, 19 nt, Artificial Sequence
  Description of Artificial Sequence: Synthetic oligonucleotide
gaaacagcucgauacacac

SEQ ID NO: 1103450 - RNA, 19 nt, Artificial Sequence
  Description of Artificial Sequence: Synthetic oligonucleotide
agccucuuauguuuggggc

SEQ ID NO: 1103451 - RNA, 19 nt, Artificial Sequence
  Description of Artificial Sequence: Synthetic oligonucleotide
ugugaagcaauauacuaau

SEQ ID NO: 1103452 - RNA, 19 nt, Artificial Sequence
  Description of Artificial Sequence: Synthetic oligonucleotide
uuagaaacagcucgauaca

SEQ ID NO: 1103453 - RNA, 19 nt, Artificial Sequence
  Description of Artificial Sequence: Synthetic oligonucleotide
uucauauauauuauauaua

SEQ ID NO: 1103454 - RNA, 19 nt, Artificial Sequence
  Description of Artificial Sequence: Synthetic oligonucleotide
cacguuuaccauuuuacag

SEQ ID NO: 1103455 - RNA, 19 nt, Artificial Sequence
  Description of Artificial Sequence: Synthetic oligonucleotide
uacuaauaagaacacuagu

SEQ ID NO: 1103456 - RNA, 19 nt, Artificial Sequence
  Description of Artificial Sequence: Synthetic oligonucleotide
auguuuacggcucuuguca

SEQ ID NO: 1103457 - RNA, 19 nt, Artificial Sequence
  Description of Artificial Sequence: Synthetic oligonucleotide
acguuuaccauuuuacagu

SEQ ID NO: 1103458 - RNA, 19 nt, Artificial Sequence
  Description of Artificial Sequence: Synthetic oligonucleotide
cauauauauuauauauaug

SEQ ID NO: 1103459 - RNA, 19 nt, Artificial Sequence
  Description of Artificial Sequence: Synthetic oligonucleotide
cacuauauaacgaggccag

SEQ ID NO: 1103460 - RNA, 19 nt, Artificial Sequence
  Description of Artificial Sequence: Synthetic oligonucleotide
gguaguaggggccacagag

SEQ ID NO: 1103461 - RNA, 19 nt, Artificial Sequence
  Description of Artificial Sequence: Synthetic oligonucleotide
ugcaucaggccuauugaag

SEQ ID NO: 1103462 - RNA, 19 nt, Artificial Sequence
  Description of Artificial Sequence: Synthetic oligonucleotide
cuggaaaggggacaaacag

SEQ ID NO: 1103463 - RNA, 19 nt, Artificial Sequence
  Description of Artificial Sequence: Synthetic oligonucleotide
auauaacgaggccagauau

SEQ ID NO: 1103464 - RNA, 19 nt, Artificial Sequence
  Description of Artificial Sequence: Synthetic oligonucleotide
ucgauacacacaaucuuca

SEQ ID NO: 1103465 - RNA, 19 nt, Artificial Sequence
  Description of Artificial Sequence: Synthetic oligonucleotide
uacacgaagucuagcacug

SEQ ID NO: 1103466 - RNA, 19 nt, Artificial Sequence
  Description of Artificial Sequence: Synthetic oligonucleotide
uacggcucuugucagcugg

SEQ ID NO: 1103467 - RNA, 19 nt, Artificial Sequence
  Description of Artificial Sequence: Synthetic oligonucleotide
acgcauagcagcgacacac

SEQ ID NO: 1103468 - RNA, 19 nt, Artificial Sequence
  Description of Artificial Sequence: Synthetic oligonucleotide
uauauaacgaggccagaua

SEQ ID NO: 1103469 - RNA, 19 nt, Artificial Sequence
  Description of Artificial Sequence: Synthetic oligonucleotide
acuaauaagaacacuaguu

SEQ ID NO: 1103470 - RNA, 19 nt, Artificial Sequence
  Description of Artificial Sequence: Synthetic oligonucleotide
uguggauacauccuuuaua

SEQ ID NO: 1103471 - RNA, 19 nt, Artificial Sequence
  Description of Artificial Sequence: Synthetic oligonucleotide
cuucauauauauuauauau

SEQ ID NO: 1103472 - RNA, 19 nt, Artificial Sequence
  Description of Artificial Sequence: Synthetic oligonucleotide
auacuaauaagaacacuag

SEQ ID NO: 1103473 - RNA, 19 nt, Artificial Sequence
  Description of Artificial Sequence: Synthetic oligonucleotide
aagucuagcacugucccca

SEQ ID NO: 1103474 - RNA, 19 nt, Artificial Sequence
  Description of Artificial Sequence: Synthetic oligonucleotide
uacagucguauguacagga

SEQ ID NO: 1103475 - RNA, 19 nt, Artificial Sequence
  Description of Artificial Sequence: Synthetic oligonucleotide
agcagccggaaccaagacc

SEQ ID NO: 1103476 - RNA, 19 nt, Artificial Sequence
  Description of Artificial Sequence: Synthetic oligonucleotide
gcaagagguacuuagggcc

SEQ ID NO: 1103477 - RNA, 19 nt, Artificial Sequence
  Description of Artificial Sequence: Synthetic oligonucleotide
cucgauacacacaaucuuc

SEQ ID NO: 1103478 - RNA, 19 nt, Artificial Sequence
  Description of Artificial Sequence: Synthetic oligonucleotide
uccccaagauccuugaagu

SEQ ID NO: 1103479 - RNA, 19 nt, Artificial Sequence
  Description of Artificial Sequence: Synthetic oligonucleotide
uaguaggggccacagaggu

SEQ ID NO: 1103480 - RNA, 19 nt, Artificial Sequence
  Description of Artificial Sequence: Synthetic oligonucleotide
gucguuucagaacuugcag

SEQ ID NO: 1103481 - RNA, 19 nt, Artificial Sequence
  Description of Artificial Sequence: Synthetic oligonucleotide
uugaagcguggacagagcu

SEQ ID NO: 1103482 - RNA, 19 nt, Artificial Sequence
  Description of Artificial Sequence: Synthetic oligonucleotide
ugcauucauguuuacggcu

SEQ ID NO: 1103483 - RNA, 19 nt, Artificial Sequence
  Description of Artificial Sequence: Synthetic oligonucleotide
auagggaagggacaucacu

SEQ ID NO: 1103484 - RNA, 19 nt, Artificial Sequence
  Description of Artificial Sequence: Synthetic oligonucleotide
uaauacacacguuuaccau

SEQ ID NO: 1103485 - RNA, 19 nt, Artificial Sequence
  Description of Artificial Sequence: Synthetic oligonucleotide
cauccuuuauaggagcacg

SEQ ID NO: 1103486 - RNA, 19 nt, Artificial Sequence
  Description of Artificial Sequence: Synthetic oligonucleotide
uguucucucaagaggcaga

SEQ ID NO: 1103487 - RNA, 19 nt, Artificial Sequence
  Description of Artificial Sequence: Synthetic oligonucleotide
acacuauauaacgaggcca

SEQ ID NO: 1103488 - RNA, 19 nt, Artificial Sequence
  Description of Artificial Sequence: Synthetic oligonucleotide
caucaggccuauugaagcg

SEQ ID NO: 1103489 - RNA, 19 nt, Artificial Sequence
  Description of Artificial Sequence: Synthetic oligonucleotide
augaauguacaaccugugu

SEQ ID NO: 1103490 - RNA, 19 nt, Artificial Sequence
  Description of Artificial Sequence: Synthetic oligonucleotide
accauuuuacagucguaug

SEQ ID NO: 1103491 - RNA, 19 nt, Artificial Sequence
  Description of Artificial Sequence: Synthetic oligonucleotide
ucaaggaccggcugugggc

SEQ ID NO: 1103492 - RNA, 19 nt, Artificial Sequence
  Description of Artificial Sequence: Synthetic oligonucleotide
aaguaaaauucuccucaau

SEQ ID NO: 1103493 - RNA, 19 nt, Artificial Sequence
  Description of Artificial Sequence: Synthetic oligonucleotide
ugaagcguggacagagcug

SEQ ID NO: 1103494 - RNA, 19 nt, Artificial Sequence
  Description of Artificial Sequence: Synthetic oligonucleotide
auaacgaggccagauauaa

SEQ ID NO: 1103495 - RNA, 19 nt, Artificial Sequence
  Description of Artificial Sequence: Synthetic oligonucleotide
uuacagucguauguacagg

SEQ ID NO: 1103496 - RNA, 19 nt, Artificial Sequence
  Description of Artificial Sequence: Synthetic oligonucleotide
uucagaacuugcaggggac

SEQ ID NO: 1103497 - RNA, 19 nt, Artificial Sequence
  Description of Artificial Sequence: Synthetic oligonucleotide
caaacggacagguggguac

SEQ ID NO: 1103498 - RNA, 19 nt, Artificial Sequence
  Description of Artificial Sequence: Synthetic oligonucleotide
uacaacggcagccucuuau

SEQ ID NO: 1103499 - RNA, 19 nt, Artificial Sequence
  Description of Artificial Sequence: Synthetic oligonucleotide
cuuuauaggagcacgagau

SEQ ID NO: 1103500 - RNA, 19 nt, Artificial Sequence
  Description of Artificial Sequence: Synthetic oligonucleotide
agaaaagcuuggguccugc

SEQ ID NO: 1103501 - RNA, 19 nt, Artificial Sequence
  Description of Artificial Sequence: Synthetic oligonucleotide
uuuacggcucuugucagcu

SEQ ID NO: 1103502 - RNA, 19 nt, Artificial Sequence
  Description of Artificial Sequence: Synthetic oligonucleotide
cagucguauguacaggaag

SEQ ID NO: 1103503 - RNA, 19 nt, Artificial Sequence
  Description of Artificial Sequence: Synthetic oligonucleotide
cugcauucauguuuacggc

SEQ ID NO: 1103504 - RNA, 19 nt, Artificial Sequence
  Description of Artificial Sequence: Synthetic oligonucleotide
uaccauuuuacagucguau

SEQ ID NO: 1103505 - RNA, 19 nt, Artificial Sequence
  Description of Artificial Sequence: Synthetic oligonucleotide
cuuggauaccacaggcccc

SEQ ID NO: 1103506 - RNA, 19 nt, Artificial Sequence
  Description of Artificial Sequence: Synthetic oligonucleotide
ucuagaccgggcuccaaca

SEQ ID NO: 1103507 - RNA, 19 nt, Artificial Sequence
  Description of Artificial Sequence: Synthetic oligonucleotide
agcacgagauggucgcccc

SEQ ID NO: 1103508 - RNA, 19 nt, Artificial Sequence
  Description of Artificial Sequence: Synthetic oligonucleotide
acagcuaccuucauggccu

SEQ ID NO: 1103509 - RNA, 19 nt, Artificial Sequence
  Description of Artificial Sequence: Synthetic oligonucleotide
aagcgagcauguucccaac

SEQ ID NO: 1103510 - RNA, 19 nt, Artificial Sequence
  Description of Artificial Sequence: Synthetic oligonucleotide
uggugguugcauagggaag

SEQ ID NO: 1103511 - RNA, 19 nt, Artificial Sequence
  Description of Artificial Sequence: Synthetic oligonucleotide
cauguuuacggcucuuguc

SEQ ID NO: 1103512 - RNA, 19 nt, Artificial Sequence
  Description of Artificial Sequence: Synthetic oligonucleotide
ucguauguacaggaaguug

SEQ ID NO: 1103513 - RNA, 19 nt, Artificial Sequence
  Description of Artificial Sequence: Synthetic oligonucleotide
uauaacgaggccagauaua

SEQ ID NO: 1103514 - RNA, 19 nt, Artificial Sequence
  Description of Artificial Sequence: Synthetic oligonucleotide
uguucccaacauauauaca

SEQ ID NO: 1103515 - RNA, 19 nt, Artificial Sequence
  Description of Artificial Sequence: Synthetic oligonucleotide
cagacaaggcaagagguac

SEQ ID NO: 1103516 - RNA, 19 nt, Artificial Sequence
  Description of Artificial Sequence: Synthetic oligonucleotide
uagaaacagcucgauacac

SEQ ID NO: 1103517 - RNA, 19 nt, Artificial Sequence
  Description of Artificial Sequence: Synthetic oligonucleotide
uguacccaguguuccuggg

SEQ ID NO: 1103518 - RNA, 19 nt, Artificial Sequence
  Description of Artificial Sequence: Synthetic oligonucleotide
gaaccaagacccggggugg

SEQ ID NO: 1103519 - RNA, 19 nt, Artificial Sequence
  Description of Artificial Sequence: Synthetic oligonucleotide
acgaggccagauauaauac

SEQ ID NO: 1103520 - RNA, 19 nt, Artificial Sequence
  Description of Artificial Sequence: Synthetic oligonucleotide
agucguauguacaggaagu

SEQ ID NO: 1103521 - RNA, 19 nt, Artificial Sequence
  Description of Artificial Sequence: Synthetic oligonucleotide
uggggcacuucaaaguaaa

SEQ ID NO: 1103522 - RNA, 19 nt, Artificial Sequence
  Description of Artificial Sequence: Synthetic oligonucleotide
ccuauugaagcguggacag

SEQ ID NO: 1103523 - RNA, 19 nt, Artificial Sequence
  Description of Artificial Sequence: Synthetic oligonucleotide
gaagcgagcauguucccaa

SEQ ID NO: 1103524 - RNA, 19 nt, Artificial Sequence
  Description of Artificial Sequence: Synthetic oligonucleotide
cagcuugcaugccacgucg

SEQ ID NO: 1103525 - RNA, 19 nt, Artificial Sequence
  Description of Artificial Sequence: Synthetic oligonucleotide
acaacccgggccucacgcc

SEQ ID NO: 1103526 - RNA, 19 nt, Artificial Sequence
  Description of Artificial Sequence: Synthetic oligonucleotide
auugaagcguggacagagc

SEQ ID NO: 1103527 - RNA, 19 nt, Artificial Sequence
  Description of Artificial Sequence: Synthetic oligonucleotide
aggccuuucaauguucucu

SEQ ID NO: 1103528 - RNA, 19 nt, Artificial Sequence
  Description of Artificial Sequence: Synthetic oligonucleotide
aaggguagugauaggugug

SEQ ID NO: 1103529 - RNA, 19 nt, Artificial Sequence
  Description of Artificial Sequence: Synthetic oligonucleotide
cuggaagagaacaguuuuc

SEQ ID NO: 1103530 - RNA, 19 nt, Artificial Sequence
  Description of Artificial Sequence: Synthetic oligonucleotide
uguuuugggacagcagcac

SEQ ID NO: 1103531 - RNA, 19 nt, Artificial Sequence
  Description of Artificial Sequence: Synthetic oligonucleotide
gaagccauaagggcaccgc

SEQ ID NO: 1103532 - RNA, 19 nt, Artificial Sequence
  Description of Artificial Sequence: Synthetic oligonucleotide
uucccaacauauauacauu

SEQ ID NO: 1103533 - RNA, 19 nt, Artificial Sequence
  Description of Artificial Sequence: Synthetic oligonucleotide
ccagauauaauacacacgu

SEQ ID NO: 1103534 - RNA, 19 nt, Artificial Sequence
  Description of Artificial Sequence: Synthetic oligonucleotide
gcuaacagugcccucggcc

SEQ ID NO: 1103535 - RNA, 19 nt, Artificial Sequence
  Description of Artificial Sequence: Synthetic oligonucleotide
cagcucgauacacacaauc

SEQ ID NO: 1103536 - RNA, 19 nt, Artificial Sequence
  Description of Artificial Sequence: Synthetic oligonucleotide
acgucguuucagaacuugc

SEQ ID NO: 1103537 - RNA, 19 nt, Artificial Sequence
  Description of Artificial Sequence: Synthetic oligonucleotide
agauggucgccccggcuuc

SEQ ID NO: 1103538 - RNA, 19 nt, Artificial Sequence
  Description of Artificial Sequence: Synthetic oligonucleotide
aaggaccggcugugggcgc

SEQ ID NO: 1103539 - RNA, 19 nt, Artificial Sequence
  Description of Artificial Sequence: Synthetic oligonucleotide
acaaggguagugauaggug

SEQ ID NO: 1103540 - RNA, 19 nt, Artificial Sequence
  Description of Artificial Sequence: Synthetic oligonucleotide
ugggaucaaggaccggcug

SEQ ID NO: 1103541 - RNA, 19 nt, Artificial Sequence
  Description of Artificial Sequence: Synthetic oligonucleotide
guuuaccauuuuacagucg

SEQ ID NO: 1103542 - RNA, 19 nt, Artificial Sequence
  Description of Artificial Sequence: Synthetic oligonucleotide
cacaacccgggccucacgc

SEQ ID NO: 1103543 - RNA, 19 nt, Artificial Sequence
  Description of Artificial Sequence: Synthetic oligonucleotide
agcgacacacagaagcgag

SEQ ID NO: 1103544 - RNA, 19 nt, Artificial Sequence
  Description of Artificial Sequence: Synthetic oligonucleotide
agucuagcacuguccccac

SEQ ID NO: 1103545 - RNA, 19 nt, Artificial Sequence
  Description of Artificial Sequence: Synthetic oligonucleotide
gaagcagccggaaccaaga

SEQ ID NO: 1103546 - RNA, 19 nt, Artificial Sequence
  Description of Artificial Sequence: Synthetic oligonucleotide
guuuacggcucuugucagc

SEQ ID NO: 1103547 - RNA, 19 nt, Artificial Sequence
  Description of Artificial Sequence: Synthetic oligonucleotide
aaacggacagguggguacu

SEQ ID NO: 1103548 - RNA, 19 nt, Artificial Sequence
  Description of Artificial Sequence: Synthetic oligonucleotide
agaaacagcucgauacaca

SEQ ID NO: 1103549 - RNA, 19 nt, Artificial Sequence
  Description of Artificial Sequence: Synthetic oligonucleotide
auagguguggauacauccu

SEQ ID NO: 1103550 - RNA, 19 nt, Artificial Sequence
  Description of Artificial Sequence: Synthetic oligonucleotide
guacacgaagucuagcacu

SEQ ID NO: 1103551 - RNA, 19 nt, Artificial Sequence
  Description of Artificial Sequence: Synthetic oligonucleotide
uuaccauuuuacagucgua

SEQ ID NO: 1103552 - RNA, 19 nt, Artificial Sequence
  Description of Artificial Sequence: Synthetic oligonucleotide
cuagaccgggcuccaacag

SEQ ID NO: 1103553 - RNA, 19 nt, Artificial Sequence
  Description of Artificial Sequence: Synthetic oligonucleotide
cuuggaccccgcccgaagc

SEQ ID NO: 1103554 - RNA, 19 nt, Artificial Sequence
  Description of Artificial Sequence: Synthetic oligonucleotide
uuggcacaaggguagugau

SEQ ID NO: 1103555 - RNA, 19 nt, Artificial Sequence
  Description of Artificial Sequence: Synthetic oligonucleotide
uuagggcucugugcugugg

SEQ ID NO: 1103556 - RNA, 19 nt, Artificial Sequence
  Description of Artificial Sequence: Synthetic oligonucleotide
acgagauggucgccccggc

SEQ ID NO: 1103557 - RNA, 19 nt, Artificial Sequence
  Description of Artificial Sequence: Synthetic oligonucleotide
cacgaagucuagcacuguc

SEQ ID NO: 1103558 - RNA, 19 nt, Artificial Sequence
  Description of Artificial Sequence: Synthetic oligonucleotide
acuuggaccccgcccgaag

SEQ ID NO: 1103559 - RNA, 19 nt, Artificial Sequence
  Description of Artificial Sequence: Synthetic oligonucleotide
acacacguuuaccauuuua

SEQ ID NO: 1103560 - RNA, 19 nt, Artificial Sequence
  Description of Artificial Sequence: Synthetic oligonucleotide
ucacaacccgggccucacg

SEQ ID NO: 1103561 - RNA, 19 nt, Artificial Sequence
  Description of Artificial Sequence: Synthetic oligonucleotide
gaucaaggaccggcugugg

SEQ ID NO: 1103562 - RNA, 19 nt, Artificial Sequence
  Description of Artificial Sequence: Synthetic oligonucleotide
gaagccgcgcgccccgggg

SEQ ID NO: 1103563 - RNA, 19 nt, Artificial Sequence
  Description of Artificial Sequence: Synthetic oligonucleotide
acauuccaggccuuucaau

SEQ ID NO: 1103564 - RNA, 19 nt, Artificial Sequence
  Description of Artificial Sequence: Synthetic oligonucleotide
cauagggaagggacaucac

SEQ ID NO: 1103565 - RNA, 19 nt, Artificial Sequence
  Description of Artificial Sequence: Synthetic oligonucleotide
aaccaagacccgggguggg

SEQ ID NO: 1103566 - RNA, 19 nt, Artificial Sequence
  Description of Artificial Sequence: Synthetic oligonucleotide
ucagaacuugcaggggacu

SEQ ID NO: 1103567 - RNA, 19 nt, Artificial Sequence
  Description of Artificial Sequence: Synthetic oligonucleotide
cuaacagugcccucggccu

SEQ ID NO: 1103568 - RNA, 19 nt, Artificial Sequence
  Description of Artificial Sequence: Synthetic oligonucleotide
auuacaacggcagccucuu

SEQ ID NO: 1103569 - RNA, 19 nt, Artificial Sequence
  Description of Artificial Sequence: Synthetic oligonucleotide
agaccgggcuccaacagug

SEQ ID NO: 1103570 - RNA, 19 nt, Artificial Sequence
  Description of Artificial Sequence: Synthetic oligonucleotide
aggggacuuggaccccgcc

SEQ ID NO: 1103571 - RNA, 19 nt, Artificial Sequence
  Description of Artificial Sequence: Synthetic oligonucleotide
caccgagcuaacagugccc

SEQ ID NO: 1103572 - RNA, 19 nt, Artificial Sequence
  Description of Artificial Sequence: Synthetic oligonucleotide
cacgacgcauagcagcgac

SEQ ID NO: 1103573 - RNA, 19 nt, Artificial Sequence
  Description of Artificial Sequence: Synthetic oligonucleotide
caggccuauugaagcgugg

SEQ ID NO: 1103574 - RNA, 19 nt, Artificial Sequence
  Description of Artificial Sequence: Synthetic oligonucleotide
uguggagcacacgacgcau

SEQ ID NO: 1103575 - RNA, 19 nt, Artificial Sequence
  Description of Artificial Sequence: Synthetic oligonucleotide
auacacacguuuaccauuu

SEQ ID NO: 1103576 - RNA, 19 nt, Artificial Sequence
  Description of Artificial Sequence: Synthetic oligonucleotide
ccggcuucaugacagcugg

SEQ ID NO: 1103577 - RNA, 19 nt, Artificial Sequence
  Description of Artificial Sequence: Synthetic oligonucleotide
cacgagauggucgccccgg

SEQ ID NO: 1103578 - RNA, 19 nt, Artificial Sequence
  Description of Artificial Sequence: Synthetic oligonucleotide
agugauagguguggauaca

SEQ ID NO: 1103579 - RNA, 19 nt, Artificial Sequence
  Description of Artificial Sequence: Synthetic oligonucleotide
agccgagagaguggcaguc

SEQ ID NO: 1103580 - RNA, 19 nt, Artificial Sequence
  Description of Artificial Sequence: Synthetic oligonucleotide
ucacgccagcgcccgaagc

SEQ ID NO: 1103581 - RNA, 19 nt, Artificial Sequence
  Description of Artificial Sequence: Synthetic oligonucleotide
uaacgaggccagauauaau

SEQ ID NO: 1103582 - RNA, 19 nt, Artificial Sequence
  Description of Artificial Sequence: Synthetic oligonucleotide
gagcauguucccaacauau

SEQ ID NO: 1103583 - RNA, 19 nt, Artificial Sequence
  Description of Artificial Sequence: Synthetic oligonucleotide
accgagcuaacagugcccu

SEQ ID NO: 1103584 - RNA, 19 nt, Artificial Sequence
  Description of Artificial Sequence: Synthetic oligonucleotide
gaggaucggccacgugggg

SEQ ID NO: 1103585 - RNA, 19 nt, Artificial Sequence
  Description of Artificial Sequence: Synthetic oligonucleotide
guccaccgagcuaacagug

SEQ ID NO: 1103586 - RNA, 19 nt, Artificial Sequence
  Description of Artificial Sequence: Synthetic oligonucleotide
agaagcgagcauguuccca

SEQ ID NO: 1103587 - RNA, 19 nt, Artificial Sequence
  Description of Artificial Sequence: Synthetic oligonucleotide
agcgagcauguucccaaca

SEQ ID NO: 1103588 - RNA, 19 nt, Artificial Sequence
  Description of Artificial Sequence: Synthetic oligonucleotide
cuuauguuuggggcacuuc

SEQ ID NO: 1103589 - RNA, 19 nt, Artificial Sequence
  Description of Artificial Sequence: Synthetic oligonucleotide
acuauauaacgaggccaga

SEQ ID NO: 1103590 - RNA, 19 nt, Artificial Sequence
  Description of Artificial Sequence: Synthetic oligonucleotide
cacgucguuucagaacuug

SEQ ID NO: 1103591 - RNA, 19 nt, Artificial Sequence
  Description of Artificial Sequence: Synthetic oligonucleotide
agccggaaccaagacccgg

SEQ ID NO: 1103592 - RNA, 19 nt, Artificial Sequence
  Description of Artificial Sequence: Synthetic oligonucleotide
agagggguacacagguuug

SEQ ID NO: 1103593 - RNA, 19 nt, Artificial Sequence
  Description of Artificial Sequence: Synthetic oligonucleotide
cagaagcgagcauguuccc

SEQ ID NO: 1103594 - RNA, 19 nt, Artificial Sequence
  Description of Artificial Sequence: Synthetic oligonucleotide
gccggguuuuggcagaggc

SEQ ID NO: 1103595 - RNA, 19 nt, Artificial Sequence
  Description of Artificial Sequence: Synthetic oligonucleotide
agguuagggcucugugcug

SEQ ID NO: 1103596 - RNA, 19 nt, Artificial Sequence
  Description of Artificial Sequence: Synthetic oligonucleotide
cguuuaccauuuuacaguc

SEQ ID NO: 1103597 - RNA, 19 nt, Artificial Sequence
  Description of Artificial Sequence: Synthetic oligonucleotide
cucgccaagucuggccugg

SEQ ID NO: 1103598 - RNA, 19 nt, Artificial Sequence
  Description of Artificial Sequence: Synthetic oligonucleotide
aggccuauugaagcgugga

SEQ ID NO: 1103599 - RNA, 19 nt, Artificial Sequence
  Description of Artificial Sequence: Synthetic oligonucleotide
acggacagguggguacugg

SEQ ID NO: 1103600 - RNA, 19 nt, Artificial Sequence
  Description of Artificial Sequence: Synthetic oligonucleotide
gggguacacagguuuguac

SEQ ID NO: 1103601 - RNA, 19 nt, Artificial Sequence
  Description of Artificial Sequence: Synthetic oligonucleotide
ucuuauguuuggggcacuu

SEQ ID NO: 1103602 - RNA, 19 nt, Artificial Sequence
  Description of Artificial Sequence: Synthetic oligonucleotide
uuacggcucuugucagcug

SEQ ID NO: 1103603 - RNA, 19 nt, Artificial Sequence
  Description of Artificial Sequence: Synthetic oligonucleotide
aggccucauguacccagug

SEQ ID NO: 1103604 - RNA, 19 nt, Artificial Sequence
  Description of Artificial Sequence: Synthetic oligonucleotide
aacggacagguggguacug

SEQ ID NO: 1103605 - RNA, 19 nt, Artificial Sequence
  Description of Artificial Sequence: Synthetic oligonucleotide
gccuauugaagcguggaca

SEQ ID NO: 1103606 - RNA, 19 nt, Artificial Sequence
  Description of Artificial Sequence: Synthetic oligonucleotide
ugcaugccacgucguuuca

SEQ ID NO: 1103607 - RNA, 19 nt, Artificial Sequence
  Description of Artificial Sequence: Synthetic oligonucleotide
gcauagggaagggacauca

SEQ ID NO: 1103608 - RNA, 19 nt, Artificial Sequence
  Description of Artificial Sequence: Synthetic oligonucleotide
uagcacuguccccacccau

SEQ ID NO: 1103609 - RNA, 19 nt, Artificial Sequence
  Description of Artificial Sequence: Synthetic oligonucleotide
ggcucuugucagcuggggc

SEQ ID NO: 1103610 - RNA, 19 nt, Artificial Sequence
  Description of Artificial Sequence: Synthetic oligonucleotide
ugguugcauagggaaggga

SEQ ID NO: 1103611 - RNA, 19 nt, Artificial Sequence
  Description of Artificial Sequence: Synthetic oligonucleotide
gccacgucguuucagaacu

SEQ ID NO: 1103612 - RNA, 19 nt, Artificial Sequence
  Description of Artificial Sequence: Synthetic oligonucleotide
cacaaggguagugauaggu

SEQ ID NO: 1103613 - RNA, 19 nt, Artificial Sequence
  Description of Artificial Sequence: Synthetic oligonucleotide
gguuuuggcagaggcagca

SEQ ID NO: 1103614 - RNA, 19 nt, Artificial Sequence
  Description of Artificial Sequence: Synthetic oligonucleotide
ccaacagugggguggaaga

SEQ ID NO: 1103615 - RNA, 19 nt, Artificial Sequence
  Description of Artificial Sequence: Synthetic oligonucleotide
gcauucauguuuacggcuc

SEQ ID NO: 1103616 - RNA, 19 nt, Artificial Sequence
  Description of Artificial Sequence: Synthetic oligonucleotide
acaccccgcugguccacac

SEQ ID NO: 1103617 - RNA, 19 nt, Artificial Sequence
  Description of Artificial Sequence: Synthetic oligonucleotide
cuauauaacgaggccagau

SEQ ID NO: 1103618 - RNA, 19 nt, Artificial Sequence
  Description of Artificial Sequence: Synthetic oligonucleotide
gccucuuauguuuggggca

SEQ ID NO: 1103619 - RNA, 19 nt, Artificial Sequence
  Description of Artificial Sequence: Synthetic oligonucleotide
cccaugagccgagagagug

SEQ ID NO: 1103620 - RNA, 19 nt, Artificial Sequence
  Description of Artificial Sequence: Synthetic oligonucleotide
auguacaaccugugucauu

SEQ ID NO: 1103621 - RNA, 19 nt, Artificial Sequence
  Description of Artificial Sequence: Synthetic oligonucleotide
cacgccagcgcccgaagca

SEQ ID NO: 1103622 - RNA, 19 nt, Artificial Sequence
  Description of Artificial Sequence: Synthetic oligonucleotide
ccauuuuacagucguaugu

SEQ ID NO: 1103623 - RNA, 19 nt, Artificial Sequence
  Description of Artificial Sequence: Synthetic oligonucleotide
acaaacggacaggugggua

SEQ ID NO: 1103624 - RNA, 19 nt, Artificial Sequence
  Description of Artificial Sequence: Synthetic oligonucleotide
ucgccccggcuucaugaca

SEQ ID NO: 1103625 - RNA, 19 nt, Artificial Sequence
  Description of Artificial Sequence: Synthetic oligonucleotide
gacgcauagcagcgacaca

SEQ ID NO: 1103626 - RNA, 19 nt, Artificial Sequence
  Description of Artificial Sequence: Synthetic oligonucleotide
acagucguauguacaggaa

SEQ ID NO: 1103627 - RNA, 19 nt, Artificial Sequence
  Description of Artificial Sequence: Synthetic oligonucleotide
ggccuauugaagcguggac

SEQ ID NO: 1103628 - RNA, 19 nt, Artificial Sequence
  Description of Artificial Sequence: Synthetic oligonucleotide
aagccgcgcgccccggggu

SEQ ID NO: 1103629 - RNA, 19 nt, Artificial Sequence
  Description of Artificial Sequence: Synthetic oligonucleotide
gccagguuagggcucugug

SEQ ID NO: 1103630 - RNA, 19 nt, Artificial Sequence
  Description of Artificial Sequence: Synthetic oligonucleotide
cagccggaaccaagacccg

SEQ ID NO: 1103631 - RNA, 19 nt, Artificial Sequence
  Description of Artificial Sequence: Synthetic oligonucleotide
cacauuccaggccuuucaa

SEQ ID NO: 1103632 - RNA, 19 nt, Artificial Sequence
  Description of Artificial Sequence: Synthetic oligonucleotide
caagacccggggugggauc

SEQ ID NO: 1103633 - RNA, 19 nt, Artificial Sequence
  Description of Artificial Sequence: Synthetic oligonucleotide
uuggguccugccccacguc

SEQ ID NO: 1103634 - RNA, 19 nt, Artificial Sequence
  Description of Artificial Sequence: Synthetic oligonucleotide
ccucuuauguuuggggcac

SEQ ID NO: 1103635 - RNA, 19 nt, Artificial Sequence
  Description of Artificial Sequence: Synthetic oligonucleotide
cucacgccagcgcccgaag

SEQ ID NO: 1103636 - RNA, 19 nt, Artificial Sequence
  Description of Artificial Sequence: Synthetic oligonucleotide
ccucaagcuucuagaccgg

SEQ ID NO: 1103637 - RNA, 19 nt, Artificial Sequence
  Description of Artificial Sequence: Synthetic oligonucleotide
caacccgggccucacgcca

SEQ ID NO: 1103638 - RNA, 19 nt, Artificial Sequence
  Description of Artificial Sequence: Synthetic oligonucleotide
ggcccaauuuccucaagcu

SEQ ID NO: 1103639 - RNA, 19 nt, Artificial Sequence
  Description of Artificial Sequence: Synthetic oligonucleotide
uuacaacggcagccucuua

SEQ ID NO: 1103640 - RNA, 19 nt, Artificial Sequence
  Description of Artificial Sequence: Synthetic oligonucleotide
ugugggcgcagcuccucuu

SEQ ID NO: 1103641 - RNA, 19 nt, Artificial Sequence
  Description of Artificial Sequence: Synthetic oligonucleotide
aagcguggacagagcugag

SEQ ID NO: 1103642 - RNA, 19 nt, Artificial Sequence
  Description of Artificial Sequence: Synthetic oligonucleotide
gcacaaggguagugauagg

SEQ ID NO: 1103643 - RNA, 19 nt, Artificial Sequence
  Description of Artificial Sequence: Synthetic oligonucleotide
cauucauguuuacggcucu

SEQ ID NO: 1103644 - RNA, 19 nt, Artificial Sequence
  Description of Artificial Sequence: Synthetic oligonucleotide
ggucuggccgcccgguggc

SEQ ID NO: 1103645 - RNA, 19 nt, Artificial Sequence
  Description of Artificial Sequence: Synthetic oligonucleotide
cuauugaagcguggacaga

SEQ ID NO: 1103646 - RNA, 19 nt, Artificial Sequence
  Description of Artificial Sequence: Synthetic oligonucleotide
gaacccaaggugguguuuu

SEQ ID NO: 1103647 - RNA, 19 nt, Artificial Sequence
  Description of Artificial Sequence: Synthetic oligonucleotide
caggggacuuggaccccgc

SEQ ID NO: 1103648 - RNA, 19 nt, Artificial Sequence
  Description of Artificial Sequence: Synthetic oligonucleotide
gucgccccggcuucaugac

SEQ ID NO: 1103649 - RNA, 19 nt, Artificial Sequence
  Description of Artificial Sequence: Synthetic oligonucleotide
caggcccaauuuccucaag

SEQ ID NO: 1103650 - RNA, 19 nt, Artificial Sequence
  Description of Artificial Sequence: Synthetic oligonucleotide
ccccacgucguccaccgag

SEQ ID NO: 1103651 - RNA, 19 nt, Artificial Sequence
  Description of Artificial Sequence: Synthetic oligonucleotide
cuaccccgcccaaggccag

SEQ ID NO: 1103652 - RNA, 19 nt, Artificial Sequence
  Description of Artificial Sequence: Synthetic oligonucleotide
acacgaagucuagcacugu

SEQ ID NO: 1103653 - RNA, 19 nt, Artificial Sequence
  Description of Artificial Sequence: Synthetic oligonucleotide
gugauagguguggauacau

SEQ ID NO: 1103654 - RNA, 19 nt, Artificial Sequence
  Description of Artificial Sequence: Synthetic oligonucleotide
uggccggguuuuggcagag

SEQ ID NO: 1103655 - RNA, 19 nt, Artificial Sequence
  Description of Artificial Sequence: Synthetic oligonucleotide
cccacgucguccaccgagc

SEQ ID NO: 1103656 - RNA, 19 nt, Artificial Sequence
  Description of Artificial Sequence: Synthetic oligonucleotide
gcacgagauggucgccccg

SEQ ID NO: 1103657 - RNA, 19 nt, Artificial Sequence
  Description of Artificial Sequence: Synthetic oligonucleotide
cccggcuucaugacagcug

SEQ ID NO: 1103658 - RNA, 19 nt, Artificial Sequence
  Description of Artificial Sequence: Synthetic oligonucleotide
uacaccccgcugguccaca

SEQ ID NO: 1103659 - RNA, 19 nt, Artificial Sequence
  Description of Artificial Sequence: Synthetic oligonucleotide
gcucgauacacacaaucuu

SEQ ID NO: 1103660 - RNA, 19 nt, Artificial Sequence
  Description of Artificial Sequence: Synthetic oligonucleotide
ccuagaggguagccaggcc

SEQ ID NO: 1103661 - RNA, 19 nt, Artificial Sequence
  Description of Artificial Sequence: Synthetic oligonucleotide
cagcgacacacagaagcga

SEQ ID NO: 1103662 - RNA, 19 nt, Artificial Sequence
  Description of Artificial Sequence: Synthetic oligonucleotide
uaccccgcccaaggccagg

SEQ ID NO: 1103663 - RNA, 19 nt, Artificial Sequence
  Description of Artificial Sequence: Synthetic oligonucleotide
gacccggggugggaucaag

SEQ ID NO: 1103664 - RNA, 19 nt, Artificial Sequence
  Description of Artificial Sequence: Synthetic oligonucleotide
ccuaccccgcccaaggcca

SEQ ID NO: 1103665 - RNA, 19 nt, Artificial Sequence
  Description of Artificial Sequence: Synthetic oligonucleotide
gcaggggacuuggaccccg

SEQ ID NO: 1103666 - RNA, 19 nt, Artificial Sequence
  Description of Artificial Sequence: Synthetic oligonucleotide
gaccccgcccgaagccgcg

SEQ ID NO: 1103667 - RNA, 19 nt, Artificial Sequence
  Description of Artificial Sequence: Synthetic oligonucleotide
cgacgcauagcagcgacac

SEQ ID NO: 1103668 - RNA, 19 nt, Artificial Sequence
  Description of Artificial Sequence: Synthetic oligonucleotide
gggauuacaacggcagccu

SEQ ID NO: 1103669 - RNA, 19 nt, Artificial Sequence
  Description of Artificial Sequence: Synthetic oligonucleotide
acacgacgcauagcagcga

SEQ ID NO: 1103670 - RNA, 19 nt, Artificial Sequence
  Description of Artificial Sequence: Synthetic oligonucleotide
gagccgagagaguggcagu

SEQ ID NO: 1103671 - RNA, 19 nt, Artificial Sequence
  Description of Artificial Sequence: Synthetic oligonucleotide
gauggucgccccggcuuca

SEQ ID NO: 1103672 - RNA, 19 nt, Artificial Sequence
  Description of Artificial Sequence: Synthetic oligonucleotide
acgacgcauagcagcgaca

SEQ ID NO: 1103673 - RNA, 19 nt, Artificial Sequence
  Description of Artificial Sequence: Synthetic oligonucleotide
gcgacacacagaagcgagc

SEQ ID NO: 1103674 - RNA, 19 nt, Artificial Sequence
  Description of Artificial Sequence: Synthetic oligonucleotide
agcuugcaugccacgucgu

SEQ ID NO: 1103675 - RNA, 19 nt, Artificial Sequence
  Description of Artificial Sequence: Synthetic oligonucleotide
gcaugccacgucguuucag

SEQ ID NO: 1103676 - RNA, 19 nt, Artificial Sequence
  Description of Artificial Sequence: Synthetic oligonucleotide
cgaggccagauauaauaca

SEQ ID NO: 1103677 - RNA, 19 nt, Artificial Sequence
  Description of Artificial Sequence: Synthetic oligonucleotide
gucguauguacaggaaguu

SEQ ID NO: 1103678 - RNA, 19 nt, Artificial Sequence
  Description of Artificial Sequence: Synthetic oligonucleotide
aggaccggcugugggcgca

SEQ ID NO: 1103679 - RNA, 19 nt, Artificial Sequence
  Description of Artificial Sequence: Synthetic oligonucleotide
uagccccuaccccgcccaa

SEQ ID NO: 1103680 - RNA, 19 nt, Artificial Sequence
  Description of Artificial Sequence: Synthetic oligonucleotide
gacuuggaccccgcccgaa

SEQ ID NO: 1103681 - RNA, 19 nt, Artificial Sequence
  Description of Artificial Sequence: Synthetic oligonucleotide
ggagcacgagauggucgcc

SEQ ID NO: 1103682 - RNA, 19 nt, Artificial Sequence
  Description of Artificial Sequence: Synthetic oligonucleotide
ccggguuuuggcagaggca

SEQ ID NO: 1103683 - RNA, 19 nt, Artificial Sequence
  Description of Artificial Sequence: Synthetic oligonucleotide
cccgaagccgcgcgccccg

SEQ ID NO: 1103684 - RNA, 19 nt, Artificial Sequence
  Description of Artificial Sequence: Synthetic oligonucleotide
cacgucguccaccgagcua

SEQ ID NO: 1103685 - RNA, 19 nt, Artificial Sequence
  Description of Artificial Sequence: Synthetic oligonucleotide
ccccugaccaucacagcaa

SEQ ID NO: 1103686 - RNA, 19 nt, Artificial Sequence
  Description of Artificial Sequence: Synthetic oligonucleotide
ggacuuggaccccgcccga

SEQ ID NO: 1103687 - RNA, 19 nt, Artificial Sequence
  Description of Artificial Sequence: Synthetic oligonucleotide
gaccggcugugggcgcagc

SEQ ID NO: 1103688 - RNA, 19 nt, Artificial Sequence
  Description of Artificial Sequence: Synthetic oligonucleotide
ggcaguguucaggguagua

SEQ ID NO: 1103689 - RNA, 19 nt, Artificial Sequence
  Description of Artificial Sequence: Synthetic oligonucleotide
auggucgccccggcuucau

SEQ ID NO: 1103690 - RNA, 19 nt, Artificial Sequence
  Description of Artificial Sequence: Synthetic oligonucleotide
gccccggcuucaugacagc

SEQ ID NO: 1103691 - RNA, 19 nt, Artificial Sequence
  Description of Artificial Sequence: Synthetic oligonucleotide
ccgagcuaacagugcccuc

SEQ ID NO: 1103692 - RNA, 19 nt, Artificial Sequence
  Description of Artificial Sequence: Synthetic oligonucleotide
cgagcauguucccaacaua

SEQ ID NO: 1103693 - RNA, 19 nt, Artificial Sequence
  Description of Artificial Sequence: Synthetic oligonucleotide
cucuuauguuuggggcacu

SEQ ID NO: 1103694 - RNA, 19 nt, Artificial Sequence
  Description of Artificial Sequence: Synthetic oligonucleotide
ggaccggcugugggcgcag

SEQ ID NO: 1103695 - RNA, 19 nt, Artificial Sequence
  Description of Artificial Sequence: Synthetic oligonucleotide
ccggcugugggcgcagcuc

SEQ ID NO: 1103696 - RNA, 19 nt, Artificial Sequence
  Description of Artificial Sequence: Synthetic oligonucleotide
ccugaccaucacagcaaua

SEQ ID NO: 1103697 - RNA, 19 nt, Artificial Sequence
  Description of Artificial Sequence: Synthetic oligonucleotide
ccggggucuggccgcccgg

SEQ ID NO: 1103698 - RNA, 19 nt, Artificial Sequence
  Description of Artificial Sequence: Synthetic oligonucleotide
ccccgcccgaagccgcgcg

SEQ ID NO: 1103699 - RNA, 19 nt, Artificial Sequence
  Description of Artificial Sequence: Synthetic oligonucleotide
cgaagccgcgcgccccggg

SEQ ID NO: 1103700 - RNA, 19 nt, Artificial Sequence
  Description of Artificial Sequence: Synthetic oligonucleotide
cgcccaaggccagguuagg

SEQ ID NO: 1103701 - RNA, 19 nt, Artificial Sequence
  Description of Artificial Sequence: Synthetic oligonucleotide
ggaacccaaggugguguuu

SEQ ID NO: 1103702 - RNA, 19 nt, Artificial Sequence
  Description of Artificial Sequence: Synthetic oligonucleotide
ccccaagauccuugaaguu

SEQ ID NO: 1103703 - RNA, 19 nt, Artificial Sequence
  Description of Artificial Sequence: Synthetic oligonucleotide
cuccaacagugggguggaa

SEQ ID NO: 1103704 - RNA, 19 nt, Artificial Sequence
  Description of Artificial Sequence: Synthetic oligonucleotide
ccgaagccgcgcgccccgg

SEQ ID NO: 1103705 - RNA, 19 nt, Artificial Sequence
  Description of Artificial Sequence: Synthetic oligonucleotide
caggccccagaugcauggu

SEQ ID NO: 1103706 - RNA, 19 nt, Artificial Sequence
  Description of Artificial Sequence: Synthetic oligonucleotide
gggucugcaucaggccuau

SEQ ID NO: 1103707 - RNA, 19 nt, Artificial Sequence
  Description of Artificial Sequence: Synthetic oligonucleotide
ccacgucguccaccgagcu

SEQ ID NO: 1103708 - RNA, 19 nt, Artificial Sequence
  Description of Artificial Sequence: Synthetic oligonucleotide
gccgcccgguggccugccc

SEQ ID NO: 1103709 - RNA, 19 nt, Artificial Sequence
  Description of Artificial Sequence: Synthetic oligonucleotide
gcgcccgaagcagccggaa

SEQ ID NO: 1103710 - RNA, 19 nt, Artificial Sequence
  Description of Artificial Sequence: Synthetic oligonucleotide
cgagauggucgccccggcu

SEQ ID NO: 1103711 - RNA, 19 nt, Artificial Sequence
  Description of Artificial Sequence: Synthetic oligonucleotide
ccccggcuucaugacagcu

SEQ ID NO: 1103712 - RNA, 19 nt, Artificial Sequence
  Description of Artificial Sequence: Synthetic oligonucleotide
ccacgucguuucagaacuu

SEQ ID NO: 1103713 - RNA, 19 nt, Artificial Sequence
  Description of Artificial Sequence: Synthetic oligonucleotide
cgcgcgccccggggucugg

SEQ ID NO: 1103714 - RNA, 19 nt, Artificial Sequence
  Description of Artificial Sequence: Synthetic oligonucleotide
aaauacacaacacauaaac

SEQ ID NO: 1103715 - RNA, 19 nt, Artificial Sequence
  Description of Artificial Sequence: Synthetic oligonucleotide
caaauuuuggucuugcucg

SEQ ID NO: 1103716 - RNA, 19 nt, Artificial Sequence
  Description of Artificial Sequence: Synthetic oligonucleotide
uacauaacagauuaaagac

SEQ ID NO: 1103717 - RNA, 19 nt, Artificial Sequence
  Description of Artificial Sequence: Synthetic oligonucleotide
auacauaacagauuaaaga

SEQ ID NO: 1103718 - RNA, 19 nt, Artificial Sequence
  Description of Artificial Sequence: Synthetic oligonucleotide
uuuugucuugccauaaagg

SEQ ID NO: 1103719 - RNA, 19 nt, Artificial Sequence
  Description of Artificial Sequence: Synthetic oligonucleotide
ugagucacaauuaaggagu

SEQ ID NO: 1103720 - RNA, 19 nt, Artificial Sequence
  Description of Artificial Sequence: Synthetic oligonucleotide
ugcacaaugcacuaugacg

SEQ ID NO: 1103721 - RNA, 19 nt, Artificial Sequence
  Description of Artificial Sequence: Synthetic oligonucleotide
uggacaaugcauuucaucc

SEQ ID NO: 1103722 - RNA, 19 nt, Artificial Sequence
  Description of Artificial Sequence: Synthetic oligonucleotide
uaggauacuacacacacac

SEQ ID NO: 1103723 - RNA, 19 nt, Artificial Sequence
  Description of Artificial Sequence: Synthetic oligonucleotide
uuaaggaguacucauacaa

SEQ ID NO: 1103724 - RNA, 19 nt, Artificial Sequence
  Description of Artificial Sequence: Synthetic oligonucleotide
ucaguaauaggccuuaagu

SEQ ID NO: 1103725 - RNA, 19 nt, Artificial Sequence
  Description of Artificial Sequence: Synthetic oligonucleotide
agcauuuugaucuggguuc

SEQ ID NO: 1103726 - RNA, 19 nt, Artificial Sequence
  Description of Artificial Sequence: Synthetic oligonucleotide
aauagaaagacggucuguc

SEQ ID NO: 1103727 - RNA, 19 nt, Artificial Sequence
  Description of Artificial Sequence: Synthetic oligonucleotide
uaaauuguucuccaggacu

SEQ ID NO: 1103728 - RNA, 19 nt, Artificial Sequence
  Description of Artificial Sequence: Synthetic oligonucleotide
aguaauaggccuuaaguga

SEQ ID NO: 1103729 - RNA, 19 nt, Artificial Sequence
  Description of Artificial Sequence: Synthetic oligonucleotide
gaacgaaguggauagagag

SEQ ID NO: 1103730 - RNA, 19 nt, Artificial Sequence
  Description of Artificial Sequence: Synthetic oligonucleotide
aaaaccauacucaaaguug

SEQ ID NO: 1103731 - RNA, 19 nt, Artificial Sequence
  Description of Artificial Sequence: Synthetic oligonucleotide
aaucgcacaugccauuucg

SEQ ID NO: 1103732 - RNA, 19 nt, Artificial Sequence
  Description of Artificial Sequence: Synthetic oligonucleotide
uuugucuugccauaaaggu

SEQ ID NO: 1103733 - RNA, 19 nt, Artificial Sequence
  Description of Artificial Sequence: Synthetic oligonucleotide
aagcuaucgauauacaaaa

SEQ ID NO: 1103734 - RNA, 19 nt, Artificial Sequence
  Description of Artificial Sequence: Synthetic oligonucleotide
acaacacauaaacuaauag

SEQ ID NO: 1103735 - RNA, 19 nt, Artificial Sequence
  Description of Artificial Sequence: Synthetic oligonucleotide
aggucuaacagucuauuuc

SEQ ID NO: 1103736 - RNA, 19 nt, Artificial Sequence
  Description of Artificial Sequence: Synthetic oligonucleotide
auuaagaaucauaauuuac

SEQ ID NO: 1103737 - RNA, 19 nt, Artificial Sequence
  Description of Artificial Sequence: Synthetic oligonucleotide
uaugacgugaggcugaaaa

SEQ ID NO: 1103738 - RNA, 19 nt, Artificial Sequence
  Description of Artificial Sequence: Synthetic oligonucleotide
uugccauaaagguucaggg

SEQ ID NO: 1103739 - RNA, 19 nt, Artificial Sequence
  Description of Artificial Sequence: Synthetic oligonucleotide
cuaucgauauacaaaaguc

SEQ ID NO: 1103740 - RNA, 19 nt, Artificial Sequence
  Description of Artificial Sequence: Synthetic oligonucleotide
aacuggaauucucaaaaca

SEQ ID NO: 1103741 - RNA, 19 nt, Artificial Sequence
  Description of Artificial Sequence: Synthetic oligonucleotide
aauaucacuugggacagag

SEQ ID NO: 1103742 - RNA, 19 nt, Artificial Sequence
  Description of Artificial Sequence: Synthetic oligonucleotide
aagcacguaaugaacaccg

SEQ ID NO: 1103743 - RNA, 19 nt, Artificial Sequence
  Description of Artificial Sequence: Synthetic oligonucleotide
aaagcacguaaugaacacc

SEQ ID NO: 1103744 - RNA, 19 nt, Artificial Sequence
  Description of Artificial Sequence: Synthetic oligonucleotide
gaaguuauaggaauggaca

SEQ ID NO: 1103745 - RNA, 19 nt, Artificial Sequence
  Description of Artificial Sequence: Synthetic oligonucleotide
uucuuugauuccaauccgg

SEQ ID NO: 1103746 - RNA, 19 nt, Artificial Sequence
  Description of Artificial Sequence: Synthetic oligonucleotide
agaacuggaauucucaaaa

SEQ ID NO: 1103747 - RNA, 19 nt, Artificial Sequence
  Description of Artificial Sequence: Synthetic oligonucleotide
uuuugaucuggguucaagc

SEQ ID NO: 1103748 - RNA, 19 nt, Artificial Sequence
  Description of Artificial Sequence: Synthetic oligonucleotide
aauccaacagguucacuug

SEQ ID NO: 1103749 - RNA, 19 nt, Artificial Sequence
  Description of Artificial Sequence: Synthetic oligonucleotide
ugaagugucaggcuauaca

SEQ ID NO: 1103750 - RNA, 19 nt, Artificial Sequence
  Description of Artificial Sequence: Synthetic oligonucleotide
auuuggagcagucaagcug

SEQ ID NO: 1103751 - RNA, 19 nt, Artificial Sequence
  Description of Artificial Sequence: Synthetic oligonucleotide
aaggaguacucauacaaaa

SEQ ID NO: 1103752 - RNA, 19 nt, Artificial Sequence
  Description of Artificial Sequence: Synthetic oligonucleotide
auucuuugauuccaauccg

SEQ ID NO: 1103753 - RNA, 19 nt, Artificial Sequence
  Description of Artificial Sequence: Synthetic oligonucleotide
uuaagugacugcucgggag

SEQ ID NO: 1103754 - RNA, 19 nt, Artificial Sequence
  Description of Artificial Sequence: Synthetic oligonucleotide
uuugaucuggguucaagca

SEQ ID NO: 1103755 - RNA, 19 nt, Artificial Sequence
  Description of Artificial Sequence: Synthetic oligonucleotide
aaguuauaggaauggacaa

SEQ ID NO: 1103756 - RNA, 19 nt, Artificial Sequence
  Description of Artificial Sequence: Synthetic oligonucleotide
uccaauuuggagcagucaa

SEQ ID NO: 1103757 - RNA, 19 nt, Artificial Sequence
  Description of Artificial Sequence: Synthetic oligonucleotide
caguaauaggccuuaagug

SEQ ID NO: 1103758 - RNA, 19 nt, Artificial Sequence
  Description of Artificial Sequence: Synthetic oligonucleotide
auaaacuaauagaaagacg

SEQ ID NO: 1103759 - RNA, 19 nt, Artificial Sequence
  Description of Artificial Sequence: Synthetic oligonucleotide
aacgaaguggauagagagc

SEQ ID NO: 1103760 - RNA, 19 nt, Artificial Sequence
  Description of Artificial Sequence: Synthetic oligonucleotide
accugaaggaucaugaguc

SEQ ID NO: 1103761 - RNA, 19 nt, Artificial Sequence
  Description of Artificial Sequence: Synthetic oligonucleotide
ggauacuacacacacacug

SEQ ID NO: 1103762 - RNA, 19 nt, Artificial Sequence
  Description of Artificial Sequence: Synthetic oligonucleotide
aagcaaagcacguaaugaa

SEQ ID NO: 1103763 - RNA, 19 nt, Artificial Sequence
  Description of Artificial Sequence: Synthetic oligonucleotide
guaacuagaacacgccugc

SEQ ID NO: 1103764 - RNA, 19 nt, Artificial Sequence
  Description of Artificial Sequence: Synthetic oligonucleotide
ugccauaaagguucagggg

SEQ ID NO: 1103765 - RNA, 19 nt, Artificial Sequence
  Description of Artificial Sequence: Synthetic oligonucleotide
ucauccaaggucuaacagu

SEQ ID NO: 1103766 - RNA, 19 nt, Artificial Sequence
  Description of Artificial Sequence: Synthetic oligonucleotide
gaauggacaaugcauuuca

SEQ ID NO: 1103767 - RNA, 19 nt, Artificial Sequence
  Description of Artificial Sequence: Synthetic oligonucleotide
agugucaggcuauacaagu

SEQ ID NO: 1103768 - RNA, 19 nt, Artificial Sequence
  Description of Artificial Sequence: Synthetic oligonucleotide
aagcauuuugaucuggguu

SEQ ID NO: 1103769 - RNA, 19 nt, Artificial Sequence
  Description of Artificial Sequence: Synthetic oligonucleotide
acguaaugaacaccgauga

SEQ ID NO: 1103770 - RNA, 19 nt, Artificial Sequence
  Description of Artificial Sequence: Synthetic oligonucleotide
ugucgaugaggaaaggcca

SEQ ID NO: 1103771 - RNA, 19 nt, Artificial Sequence
  Description of Artificial Sequence: Synthetic oligonucleotide
ucuaccagccggcagcugc

SEQ ID NO: 1103772 - RNA, 19 nt, Artificial Sequence
  Description of Artificial Sequence: Synthetic oligonucleotide
gaagugucaggcuauacaa

SEQ ID NO: 1103773 - RNA, 19 nt, Artificial Sequence
  Description of Artificial Sequence: Synthetic oligonucleotide
uuccaauccggaauggugu

SEQ ID NO: 1103774 - RNA, 19 nt, Artificial Sequence
  Description of Artificial Sequence: Synthetic oligonucleotide
acuaauagaaagacggucu

SEQ ID NO: 1103775 - RNA, 19 nt, Artificial Sequence
  Description of Artificial Sequence: Synthetic oligonucleotide
aaugcacuaugacgugagg

SEQ ID NO: 1103776 - RNA, 19 nt, Artificial Sequence
  Description of Artificial Sequence: Synthetic oligonucleotide
aauuuggagcagucaagcu

SEQ ID NO: 1103777 - RNA, 19 nt, Artificial Sequence
  Description of Artificial Sequence: Synthetic oligonucleotide
cauccaaggucuaacaguc

SEQ ID NO: 1103778 - RNA, 19 nt, Artificial Sequence
  Description of Artificial Sequence: Synthetic oligonucleotide
cuugccauaaagguucagg

SEQ ID NO: 1103779 - RNA, 19 nt, Artificial Sequence
  Description of Artificial Sequence: Synthetic oligonucleotide
ugagcuaauguagaugaga

SEQ ID NO: 1103780 - RNA, 19 nt, Artificial Sequence
  Description of Artificial Sequence: Synthetic oligonucleotide
ucacaauuaaggaguacuc

SEQ ID NO: 1103781 - RNA, 19 nt, Artificial Sequence
  Description of Artificial Sequence: Synthetic oligonucleotide
gaaagagacagauauguau

SEQ ID NO: 1103782 - RNA, 19 nt, Artificial Sequence
  Description of Artificial Sequence: Synthetic oligonucleotide
cacguaaugaacaccgaug

SEQ ID NO: 1103783 - RNA, 19 nt, Artificial Sequence
  Description of Artificial Sequence: Synthetic oligonucleotide
uagaacacgccugcuaggg

SEQ ID NO: 1103784 - RNA, 19 nt, Artificial Sequence
  Description of Artificial Sequence: Synthetic oligonucleotide
ucgauauacaaaagucaac

SEQ ID NO: 1103785 - RNA, 19 nt, Artificial Sequence
  Description of Artificial Sequence: Synthetic oligonucleotide
cuaauagaaagacggucug

SEQ ID NO: 1103786 - RNA, 19 nt, Artificial Sequence
  Description of Artificial Sequence: Synthetic oligonucleotide
uucguacuuggucaucugc

SEQ ID NO: 1103787 - RNA, 19 nt, Artificial Sequence
  Description of Artificial Sequence: Synthetic oligonucleotide
uaccugaaggaucaugagu

SEQ ID NO: 1103788 - RNA, 19 nt, Artificial Sequence
  Description of Artificial Sequence: Synthetic oligonucleotide
gaagcuaucgauauacaaa

SEQ ID NO: 1103789 - RNA, 19 nt, Artificial Sequence
  Description of Artificial Sequence: Synthetic oligonucleotide
uaaagacucaagcguaaaa

SEQ ID NO: 1103790 - RNA, 19 nt, Artificial Sequence
  Description of Artificial Sequence: Synthetic oligonucleotide
uaggaauggacaaugcauu

SEQ ID NO: 1103791 - RNA, 19 nt, Artificial Sequence
  Description of Artificial Sequence: Synthetic oligonucleotide
uuucauccaaggucuaaca

SEQ ID NO: 1103792 - RNA, 19 nt, Artificial Sequence
  Description of Artificial Sequence: Synthetic oligonucleotide
acauaaacuaauagaaaga

SEQ ID NO: 1103793 - RNA, 19 nt, Artificial Sequence
  Description of Artificial Sequence: Synthetic oligonucleotide
augaaugaggugaugaacu

SEQ ID NO: 1103794 - RNA, 19 nt, Artificial Sequence
  Description of Artificial Sequence: Synthetic oligonucleotide
ugacuuguugcugaacugc

SEQ ID NO: 1103795 - RNA, 19 nt, Artificial Sequence
  Description of Artificial Sequence: Synthetic oligonucleotide
ugguauaucuucuucugua

SEQ ID NO: 1103796 - RNA, 19 nt, Artificial Sequence
  Description of Artificial Sequence: Synthetic oligonucleotide
aaucugagcuaauguagau

SEQ ID NO: 1103797 - RNA, 19 nt, Artificial Sequence
  Description of Artificial Sequence: Synthetic oligonucleotide
uugaucuggguucaagcaa

SEQ ID NO: 1103798 - RNA, 19 nt, Artificial Sequence
  Description of Artificial Sequence: Synthetic oligonucleotide
auuucuggggcguugcgcu

SEQ ID NO: 1103799 - RNA, 19 nt, Artificial Sequence
  Description of Artificial Sequence: Synthetic oligonucleotide
uuccccuagugcaacagca

SEQ ID NO: 1103800 - RNA, 19 nt, Artificial Sequence
  Description of Artificial Sequence: Synthetic oligonucleotide
agcaaagcacguaaugaac

SEQ ID NO: 1103801 - RNA, 19 nt, Artificial Sequence
  Description of Artificial Sequence: Synthetic oligonucleotide
uggauagagagcucuuucu

SEQ ID NO: 1103802 - RNA, 19 nt, Artificial Sequence
  Description of Artificial Sequence: Synthetic oligonucleotide
acauacuauacuuuucauu

SEQ ID NO: 1103803 - RNA, 19 nt, Artificial Sequence
  Description of Artificial Sequence: Synthetic oligonucleotide
acuggcuacauccuucaca

SEQ ID NO: 1103804 - RNA, 19 nt, Artificial Sequence
  Description of Artificial Sequence: Synthetic oligonucleotide
agccccuaaauuguucucc

SEQ ID NO: 1103805 - RNA, 19 nt, Artificial Sequence
  Description of Artificial Sequence: Synthetic oligonucleotide
cagagcgauucuuugauuc

SEQ ID NO: 1103806 - RNA, 19 nt, Artificial Sequence
  Description of Artificial Sequence: Synthetic oligonucleotide
caaugcacuaugacgugag

SEQ ID NO: 1103807 - RNA, 19 nt, Artificial Sequence
  Description of Artificial Sequence: Synthetic oligonucleotide
auuaaggaguacucauaca

SEQ ID NO: 1103808 - RNA, 19 nt, Artificial Sequence
  Description of Artificial Sequence: Synthetic oligonucleotide
cuaaauuguucuccaggac

SEQ ID NO: 1103809 - RNA, 19 nt, Artificial Sequence
  Description of Artificial Sequence: Synthetic oligonucleotide
acauaacagauuaaagacu

SEQ ID NO: 1103810 - RNA, 19 nt, Artificial Sequence
  Description of Artificial Sequence: Synthetic oligonucleotide
aaugguguccgcuggccaa

SEQ ID NO: 1103811 - RNA, 19 nt, Artificial Sequence
  Description of Artificial Sequence: Synthetic oligonucleotide
gauuaaagacucaagcgua

SEQ ID NO: 1103812 - RNA, 19 nt, Artificial Sequence
  Description of Artificial Sequence: Synthetic oligonucleotide
gaucaugagucacaauuaa

SEQ ID NO: 1103813 - RNA, 19 nt, Artificial Sequence
  Description of Artificial Sequence: Synthetic oligonucleotide
gauacuacacacacacuga

SEQ ID NO: 1103814 - RNA, 19 nt, Artificial Sequence
  Description of Artificial Sequence: Synthetic oligonucleotide
gugaaagguccccuuaaug

SEQ ID NO: 1103815 - RNA, 19 nt, Artificial Sequence
  Description of Artificial Sequence: Synthetic oligonucleotide
uaggccuuaagugacugcu

SEQ ID NO: 1103816 - RNA, 19 nt, Artificial Sequence
  Description of Artificial Sequence: Synthetic oligonucleotide
uccgacguuccccuagugc

SEQ ID NO: 1103817 - RNA, 19 nt, Artificial Sequence
  Description of Artificial Sequence: Synthetic oligonucleotide
gucaguaauaggccuuaag

SEQ ID NO: 1103818 - RNA, 19 nt, Artificial Sequence
  Description of Artificial Sequence: Synthetic oligonucleotide
ugaaagagacagauaugua

SEQ ID NO: 1103819 - RNA, 19 nt, Artificial Sequence
  Description of Artificial Sequence: Synthetic oligonucleotide
ugacgugaggcugaaaauc

SEQ ID NO: 1103820 - RNA, 19 nt, Artificial Sequence
  Description of Artificial Sequence: Synthetic oligonucleotide
ggucuaacagucuauuuca

SEQ ID NO: 1103821 - RNA, 19 nt, Artificial Sequence
  Description of Artificial Sequence: Synthetic oligonucleotide
cagucuauuucaucccagc

SEQ ID NO: 1103822 - RNA, 19 nt, Artificial Sequence
  Description of Artificial Sequence: Synthetic oligonucleotide
uuccccauacagaacugga

SEQ ID NO: 1103823 - RNA, 19 nt, Artificial Sequence
  Description of Artificial Sequence: Synthetic oligonucleotide
auuuugaucuggguucaag

SEQ ID NO: 1103824 - RNA, 19 nt, Artificial Sequence
  Description of Artificial Sequence: Synthetic oligonucleotide
aaaaggcauggcugcccuc

SEQ ID NO: 1103825 - RNA, 19 nt, Artificial Sequence
  Description of Artificial Sequence: Synthetic oligonucleotide
accacauguaugaaauauc

SEQ ID NO: 1103826 - RNA, 19 nt, Artificial Sequence
  Description of Artificial Sequence: Synthetic oligonucleotide
gugaaagagacagauaugu

SEQ ID NO: 1103827 - RNA, 19 nt, Artificial Sequence
  Description of Artificial Sequence: Synthetic oligonucleotide
ucgucgaaagccacagcca

SEQ ID NO: 1103828 - RNA, 19 nt, Artificial Sequence
  Description of Artificial Sequence: Synthetic oligonucleotide
cacauaaucugagcuaaug

SEQ ID NO: 1103829 - RNA, 19 nt, Artificial Sequence
  Description of Artificial Sequence: Synthetic oligonucleotide
auuccaauccggaauggug

SEQ ID NO: 1103830 - RNA, 19 nt, Artificial Sequence
  Description of Artificial Sequence: Synthetic oligonucleotide
aagugucaggcuauacaag

SEQ ID NO: 1103831 - RNA, 19 nt, Artificial Sequence
  Description of Artificial Sequence: Synthetic oligonucleotide
uaauaggccuuaagugacu

SEQ ID NO: 1103832 - RNA, 19 nt, Artificial Sequence
  Description of Artificial Sequence: Synthetic oligonucleotide
ggccuuaagugacugcucg

SEQ ID NO: 1103833 - RNA, 19 nt, Artificial Sequence
  Description of Artificial Sequence: Synthetic oligonucleotide
gccauaaagguucagggga

SEQ ID NO: 1103834 - RNA, 19 nt, Artificial Sequence
  Description of Artificial Sequence: Synthetic oligonucleotide
uguggcgcccguaacuaga

SEQ ID NO: 1103835 - RNA, 19 nt, Artificial Sequence
  Description of Artificial Sequence: Synthetic oligonucleotide
aaggucuaacagucuauuu

SEQ ID NO: 1103836 - RNA, 19 nt, Artificial Sequence
  Description of Artificial Sequence: Synthetic oligonucleotide
cuuugcgccgccgcaaucg

SEQ ID NO: 1103837 - RNA, 19 nt, Artificial Sequence
  Description of Artificial Sequence: Synthetic oligonucleotide
uucaagcaaagcacguaau

SEQ ID NO: 1103838 - RNA, 19 nt, Artificial Sequence
  Description of Artificial Sequence: Synthetic oligonucleotide
uuuuggucuugcucgucga

SEQ ID NO: 1103839 - RNA, 19 nt, Artificial Sequence
  Description of Artificial Sequence: Synthetic oligonucleotide
uccggaaugguguccgcug

SEQ ID NO: 1103840 - RNA, 19 nt, Artificial Sequence
  Description of Artificial Sequence: Synthetic oligonucleotide
aaucaugaaugaggugaug

SEQ ID NO: 1103841 - RNA, 19 nt, Artificial Sequence
  Description of Artificial Sequence: Synthetic oligonucleotide
gaagcugccuccuuugcua

SEQ ID NO: 1103842 - RNA, 19 nt, Artificial Sequence
  Description of Artificial Sequence: Synthetic oligonucleotide
uuaaagacucaagcguaaa

SEQ ID NO: 1103843 - RNA, 19 nt, Artificial Sequence
  Description of Artificial Sequence: Synthetic oligonucleotide
gacgugaggcugaaaauca

SEQ ID NO: 1103844 - RNA, 19 nt, Artificial Sequence
  Description of Artificial Sequence: Synthetic oligonucleotide
ucaacaacaucuggucuuc

SEQ ID NO: 1103845 - RNA, 19 nt, Artificial Sequence
  Description of Artificial Sequence: Synthetic oligonucleotide
agugaaagagacagauaug

SEQ ID NO: 1103846 - RNA, 19 nt, Artificial Sequence
  Description of Artificial Sequence: Synthetic oligonucleotide
gucacaauuaaggaguacu

SEQ ID NO: 1103847 - RNA, 19 nt, Artificial Sequence
  Description of Artificial Sequence: Synthetic oligonucleotide
uccccauacagaacuggaa

SEQ ID NO: 1103848 - RNA, 19 nt, Artificial Sequence
  Description of Artificial Sequence: Synthetic oligonucleotide
guggauagagagcucuuuc

SEQ ID NO: 1103849 - RNA, 19 nt, Artificial Sequence
  Description of Artificial Sequence: Synthetic oligonucleotide
uccccuuaauggauggauc

SEQ ID NO: 1103850 - RNA, 19 nt, Artificial Sequence
  Description of Artificial Sequence: Synthetic oligonucleotide
ggugcuaugaaggugaagu

SEQ ID NO: 1103851 - RNA, 19 nt, Artificial Sequence
  Description of Artificial Sequence: Synthetic oligonucleotide
aggcuauacaaguucugau

SEQ ID NO: 1103852 - RNA, 19 nt, Artificial Sequence
  Description of Artificial Sequence: Synthetic oligonucleotide
cuccaaucgaagcugccuc

SEQ ID NO: 1103853 - RNA, 19 nt, Artificial Sequence
  Description of Artificial Sequence: Synthetic oligonucleotide
ucuggcugacucucaacaa

SEQ ID NO: 1103854 - RNA, 19 nt, Artificial Sequence
  Description of Artificial Sequence: Synthetic oligonucleotide
uuguucaaauuuuggucuu

SEQ ID NO: 1103855 - RNA, 19 nt, Artificial Sequence
  Description of Artificial Sequence: Synthetic oligonucleotide
ucucaagugugugccacac

SEQ ID NO: 1103856 - RNA, 19 nt, Artificial Sequence
  Description of Artificial Sequence: Synthetic oligonucleotide
augacgugaggcugaaaau

SEQ ID NO: 1103857 - RNA, 19 nt, Artificial Sequence
  Description of Artificial Sequence: Synthetic oligonucleotide
auuaaagacucaagcguaa

SEQ ID NO: 1103858 - RNA, 19 nt, Artificial Sequence
  Description of Artificial Sequence: Synthetic oligonucleotide
cacaauuaaggaguacuca

SEQ ID NO: 1103859 - RNA, 19 nt, Artificial Sequence
  Description of Artificial Sequence: Synthetic oligonucleotide
ugcucauugccagaccagu

SEQ ID NO: 1103860 - RNA, 19 nt, Artificial Sequence
  Description of Artificial Sequence: Synthetic oligonucleotide
ccacauguaugaaauauca

SEQ ID NO: 1103861 - RNA, 19 nt, Artificial Sequence
  Description of Artificial Sequence: Synthetic oligonucleotide
cacaaugcacuaugacgug

SEQ ID NO: 1103862 - RNA, 19 nt, Artificial Sequence
  Description of Artificial Sequence: Synthetic oligonucleotide
uuugcgccgccgcaaucgc

SEQ ID NO: 1103863 - RNA, 19 nt, Artificial Sequence
  Description of Artificial Sequence: Synthetic oligonucleotide
gcuaucgauauacaaaagu

SEQ ID NO: 1103864 - RNA, 19 nt, Artificial Sequence
  Description of Artificial Sequence: Synthetic oligonucleotide
cugagcuaauguagaugag

SEQ ID NO: 1103865 - RNA, 19 nt, Artificial Sequence
  Description of Artificial Sequence: Synthetic oligonucleotide
ccccuuaauggauggaucc

SEQ ID NO: 1103866 - RNA, 19 nt, Artificial Sequence
  Description of Artificial Sequence: Synthetic oligonucleotide
ggauagagagcucuuucuc

SEQ ID NO: 1103867 - RNA, 19 nt, Artificial Sequence
  Description of Artificial Sequence: Synthetic oligonucleotide
cugaaggaucaugagucac

SEQ ID NO: 1103868 - RNA, 19 nt, Artificial Sequence
  Description of Artificial Sequence: Synthetic oligonucleotide
ccgggaacgaaguggauag

SEQ ID NO: 1103869 - RNA, 19 nt, Artificial Sequence
  Description of Artificial Sequence: Synthetic oligonucleotide
acaugaguggggaaccucu

SEQ ID NO: 1103870 - RNA, 19 nt, Artificial Sequence
  Description of Artificial Sequence: Synthetic oligonucleotide
agguugaaggcaucugcaa

SEQ ID NO: 1103871 - RNA, 19 nt, Artificial Sequence
  Description of Artificial Sequence: Synthetic oligonucleotide
ucgcacaugccauuucgua

SEQ ID NO: 1103872 - RNA, 19 nt, Artificial Sequence
  Description of Artificial Sequence: Synthetic oligonucleotide
acaaugcacuaugacguga

SEQ ID NO: 1103873 - RNA, 19 nt, Artificial Sequence
  Description of Artificial Sequence: Synthetic oligonucleotide
aggaaguuauaggaaugga

SEQ ID NO: 1103874 - RNA, 19 nt, Artificial Sequence
  Description of Artificial Sequence: Synthetic oligonucleotide
gggaacgaaguggauagag

SEQ ID NO: 1103875 - RNA, 19 nt, Artificial Sequence
  Description of Artificial Sequence: Synthetic oligonucleotide
guauaucuucuucuguaua

SEQ ID NO: 1103876 - RNA, 19 nt, Artificial Sequence
  Description of Artificial Sequence: Synthetic oligonucleotide
caugaguggggaaccucug

SEQ ID NO: 1103877 - RNA, 19 nt, Artificial Sequence
  Description of Artificial Sequence: Synthetic oligonucleotide
cucaagugugugccacacg

SEQ ID NO: 1103878 - RNA, 19 nt, Artificial Sequence
  Description of Artificial Sequence: Synthetic oligonucleotide
aaucgcgaccgcagccuac

SEQ ID NO: 1103879 - RNA, 19 nt, Artificial Sequence
  Description of Artificial Sequence: Synthetic oligonucleotide
cuuaagugacugcucggga

SEQ ID NO: 1103880 - RNA, 19 nt, Artificial Sequence
  Description of Artificial Sequence: Synthetic oligonucleotide
ugccacacggugcuaugaa

SEQ ID NO: 1103881 - RNA, 19 nt, Artificial Sequence
  Description of Artificial Sequence: Synthetic oligonucleotide
cugcucauugccagaccag

SEQ ID NO: 1103882 - RNA, 19 nt, Artificial Sequence
  Description of Artificial Sequence: Synthetic oligonucleotide
uguccgacguuccccuagu

SEQ ID NO: 1103883 - RNA, 19 nt, Artificial Sequence
  Description of Artificial Sequence: Synthetic oligonucleotide
aauggacaaugcauuucau

SEQ ID NO: 1103884 - RNA, 19 nt, Artificial Sequence
  Description of Artificial Sequence: Synthetic oligonucleotide
guuccccuagugcaacagc

SEQ ID NO: 1103885 - RNA, 19 nt, Artificial Sequence
  Description of Artificial Sequence: Synthetic oligonucleotide
ccuuaagugacugcucggg

SEQ ID NO: 1103886 - RNA, 19 nt, Artificial Sequence
  Description of Artificial Sequence: Synthetic oligonucleotide
ucaaaacagcagccccuaa

SEQ ID NO: 1103887 - RNA, 19 nt, Artificial Sequence
  Description of Artificial Sequence: Synthetic oligonucleotide
agcuaucgauauacaaaag

SEQ ID NO: 1103888 - RNA, 19 nt, Artificial Sequence
  Description of Artificial Sequence: Synthetic oligonucleotide
acacgcacucucaagugug

SEQ ID NO: 1103889 - RNA, 19 nt, Artificial Sequence
  Description of Artificial Sequence: Synthetic oligonucleotide
cgauauacaaaagucaaca

SEQ ID NO: 1103890 - RNA, 19 nt, Artificial Sequence
  Description of Artificial Sequence: Synthetic oligonucleotide
ggcuauacaaguucugaua

SEQ ID NO: 1103891 - RNA, 19 nt, Artificial Sequence
  Description of Artificial Sequence: Synthetic oligonucleotide
auaggauacuacacacaca

SEQ ID NO: 1103892 - RNA, 19 nt, Artificial Sequence
  Description of Artificial Sequence: Synthetic oligonucleotide
gagcgauucuuugauucca

SEQ ID NO: 1103893 - RNA, 19 nt, Artificial Sequence
  Description of Artificial Sequence: Synthetic oligonucleotide
ccagaccagugaaaggucc

SEQ ID NO: 1103894 - RNA, 19 nt, Artificial Sequence
  Description of Artificial Sequence: Synthetic oligonucleotide
aacacgccugcuagggaug

SEQ ID NO: 1103895 - RNA, 19 nt, Artificial Sequence
  Description of Artificial Sequence: Synthetic oligonucleotide
gcuauacaaguucugauau

SEQ ID NO: 1103896 - RNA, 19 nt, Artificial Sequence
  Description of Artificial Sequence: Synthetic oligonucleotide
agaacacgccugcuaggga

SEQ ID NO: 1103897 - RNA, 19 nt, Artificial Sequence
  Description of Artificial Sequence: Synthetic oligonucleotide
gaacacgccugcuagggau

SEQ ID NO: 1103898 - RNA, 19 nt, Artificial Sequence
  Description of Artificial Sequence: Synthetic oligonucleotide
gugacugcucgggagguug

SEQ ID NO: 1103899 - RNA, 19 nt, Artificial Sequence
  Description of Artificial Sequence: Synthetic oligonucleotide
acggucugucuccaucucu

SEQ ID NO: 1103900 - RNA, 19 nt, Artificial Sequence
  Description of Artificial Sequence: Synthetic oligonucleotide
ugacugcucgggagguuga

SEQ ID NO: 1103901 - RNA, 19 nt, Artificial Sequence
  Description of Artificial Sequence: Synthetic oligonucleotide
ugcaaucgcacaugccauu

SEQ ID NO: 1103902 - RNA, 19 nt, Artificial Sequence
  Description of Artificial Sequence: Synthetic oligonucleotide
cacacacugaagcuaucga

SEQ ID NO: 1103903 - RNA, 19 nt, Artificial Sequence
  Description of Artificial Sequence: Synthetic oligonucleotide
cacuaugacgugaggcuga

SEQ ID NO: 1103904 - RNA, 19 nt, Artificial Sequence
  Description of Artificial Sequence: Synthetic oligonucleotide
caacuuccccauacagaac

SEQ ID NO: 1103905 - RNA, 19 nt, Artificial Sequence
  Description of Artificial Sequence: Synthetic oligonucleotide
aaauaucacuugggacaga

SEQ ID NO: 1103906 - RNA, 19 nt, Artificial Sequence
  Description of Artificial Sequence: Synthetic oligonucleotide
gcacaaugcacuaugacgu

SEQ ID NO: 1103907 - RNA, 19 nt, Artificial Sequence
  Description of Artificial Sequence: Synthetic oligonucleotide
agcagccccuaaauuguuc

SEQ ID NO: 1103908 - RNA, 19 nt, Artificial Sequence
  Description of Artificial Sequence: Synthetic oligonucleotide
cagucuguccgacguuccc

SEQ ID NO: 1103909 - RNA, 19 nt, Artificial Sequence
  Description of Artificial Sequence: Synthetic oligonucleotide
cccguaacuagaacacgcc

SEQ ID NO: 1103910 - RNA, 19 nt, Artificial Sequence
  Description of Artificial Sequence: Synthetic oligonucleotide
acacggugcuaugaaggug

SEQ ID NO: 1103911 - RNA, 19 nt, Artificial Sequence
  Description of Artificial Sequence: Synthetic oligonucleotide
gccuuaagugacugcucgg

SEQ ID NO: 1103912 - RNA, 19 nt, Artificial Sequence
  Description of Artificial Sequence: Synthetic oligonucleotide
uaacuagaacacgccugcu

SEQ ID NO: 1103913 - RNA, 19 nt, Artificial Sequence
  Description of Artificial Sequence: Synthetic oligonucleotide
aguggauagagagcucuuu

SEQ ID NO: 1103914 - RNA, 19 nt, Artificial Sequence
  Description of Artificial Sequence: Synthetic oligonucleotide
ugccggcacacacuggcua

SEQ ID NO: 1103915 - RNA, 19 nt, Artificial Sequence
  Description of Artificial Sequence: Synthetic oligonucleotide
ggauguuuacuuccuccuc

SEQ ID NO: 1103916 - RNA, 19 nt, Artificial Sequence
  Description of Artificial Sequence: Synthetic oligonucleotide
ucacaugaguggggaaccu

SEQ ID NO: 1103917 - RNA, 19 nt, Artificial Sequence
  Description of Artificial Sequence: Synthetic oligonucleotide
acugcucgggagguugaag

SEQ ID NO: 1103918 - RNA, 19 nt, Artificial Sequence
  Description of Artificial Sequence: Synthetic oligonucleotide
ggaauggacaaugcauuuc

SEQ ID NO: 1103919 - RNA, 19 nt, Artificial Sequence
  Description of Artificial Sequence: Synthetic oligonucleotide
cgauucuuugauuccaauc

SEQ ID NO: 1103920 - RNA, 19 nt, Artificial Sequence
  Description of Artificial Sequence: Synthetic oligonucleotide
uggggcguugcgcuccuau

SEQ ID NO: 1103921 - RNA, 19 nt, Artificial Sequence
  Description of Artificial Sequence: Synthetic oligonucleotide
gcccguaacuagaacacgc

SEQ ID NO: 1103922 - RNA, 19 nt, Artificial Sequence
  Description of Artificial Sequence: Synthetic oligonucleotide
caaucgcacaugccauuuc

SEQ ID NO: 1103923 - RNA, 19 nt, Artificial Sequence
  Description of Artificial Sequence: Synthetic oligonucleotide
gauuccaauccggaauggu

SEQ ID NO: 1103924 - RNA, 19 nt, Artificial Sequence
  Description of Artificial Sequence: Synthetic oligonucleotide
ucuuugcgccgccgcaauc

SEQ ID NO: 1103925 - RNA, 19 nt, Artificial Sequence
  Description of Artificial Sequence: Synthetic oligonucleotide
ggcguugcgcuccuauuac

SEQ ID NO: 1103926 - RNA, 19 nt, Artificial Sequence
  Description of Artificial Sequence: Synthetic oligonucleotide
gccacacggugcuaugaag

SEQ ID NO: 1103927 - RNA, 19 nt, Artificial Sequence
  Description of Artificial Sequence: Synthetic oligonucleotide
cguugcgcuccuauuacag

SEQ ID NO: 1103928 - RNA, 19 nt, Artificial Sequence
  Description of Artificial Sequence: Synthetic oligonucleotide
ccgacguuccccuagugca

SEQ ID NO: 1103929 - RNA, 19 nt, Artificial Sequence
  Description of Artificial Sequence: Synthetic oligonucleotide
aaguggauagagagcucuu

SEQ ID NO: 1103930 - RNA, 19 nt, Artificial Sequence
  Description of Artificial Sequence: Synthetic oligonucleotide
cuguggcgcccguaacuag

SEQ ID NO: 1103931 - RNA, 19 nt, Artificial Sequence
  Description of Artificial Sequence: Synthetic oligonucleotide
cauuucguacuuggucauc

SEQ ID NO: 1103932 - RNA, 19 nt, Artificial Sequence
  Description of Artificial Sequence: Synthetic oligonucleotide
ccgucuaauuuugucuugc

SEQ ID NO: 1103933 - RNA, 19 nt, Artificial Sequence
  Description of Artificial Sequence: Synthetic oligonucleotide
cacaugaguggggaaccuc

SEQ ID NO: 1103934 - RNA, 19 nt, Artificial Sequence
  Description of Artificial Sequence: Synthetic oligonucleotide
gugaagugucaggcuauac

SEQ ID NO: 1103935 - RNA, 19 nt, Artificial Sequence
  Description of Artificial Sequence: Synthetic oligonucleotide
ugucaguaauaggccuuaa

SEQ ID NO: 1103936 - RNA, 19 nt, Artificial Sequence
  Description of Artificial Sequence: Synthetic oligonucleotide
aucgcgaccgcagccuacu

SEQ ID NO: 1103937 - RNA, 19 nt, Artificial Sequence
  Description of Artificial Sequence: Synthetic oligonucleotide
aucgcacaugccauuucgu

SEQ ID NO: 1103938 - RNA, 19 nt, Artificial Sequence
  Description of Artificial Sequence: Synthetic oligonucleotide
auaucacuugggacagagu

SEQ ID NO: 1103939 - RNA, 19 nt, Artificial Sequence
  Description of Artificial Sequence: Synthetic oligonucleotide
cagccccuaaauuguucuc

SEQ ID NO: 1103940 - RNA, 19 nt, Artificial Sequence
  Description of Artificial Sequence: Synthetic oligonucleotide
acuaugacgugaggcugaa

SEQ ID NO: 1103941 - RNA, 19 nt, Artificial Sequence
  Description of Artificial Sequence: Synthetic oligonucleotide
aggauacuacacacacacu

SEQ ID NO: 1103942 - RNA, 19 nt, Artificial Sequence
  Description of Artificial Sequence: Synthetic oligonucleotide
acgcacucucaagugugug

SEQ ID NO: 1103943 - RNA, 19 nt, Artificial Sequence
  Description of Artificial Sequence: Synthetic oligonucleotide
agcgauucuuugauuccaa

SEQ ID NO: 1103944 - RNA, 19 nt, Artificial Sequence
  Description of Artificial Sequence: Synthetic oligonucleotide
aggugaagugucaggcuau

SEQ ID NO: 1103945 - RNA, 19 nt, Artificial Sequence
  Description of Artificial Sequence: Synthetic oligonucleotide
ucgggagguugaaggcauc

SEQ ID NO: 1103946 - RNA, 19 nt, Artificial Sequence
  Description of Artificial Sequence: Synthetic oligonucleotide
agcacguaaugaacaccga

SEQ ID NO: 1103947 - RNA, 19 nt, Artificial Sequence
  Description of Artificial Sequence: Synthetic oligonucleotide
ccggaaugguguccgcugg

SEQ ID NO: 1103948 - RNA, 19 nt, Artificial Sequence
  Description of Artificial Sequence: Synthetic oligonucleotide
acauuacuuggaacagcaa

SEQ ID NO: 1103949 - RNA, 19 nt, Artificial Sequence
  Description of Artificial Sequence: Synthetic oligonucleotide
cagucaagcugagcauuuc

SEQ ID NO: 1103950 - RNA, 19 nt, Artificial Sequence
  Description of Artificial Sequence: Synthetic oligonucleotide
gccgcaaucgcgaccgcag

SEQ ID NO: 1103951 - RNA, 19 nt, Artificial Sequence
  Description of Artificial Sequence: Synthetic oligonucleotide
gucuguccgacguuccccu

SEQ ID NO: 1103952 - RNA, 19 nt, Artificial Sequence
  Description of Artificial Sequence: Synthetic oligonucleotide
cacucucaagugugugcca

SEQ ID NO: 1103953 - RNA, 19 nt, Artificial Sequence
  Description of Artificial Sequence: Synthetic oligonucleotide
acacgccugcuagggaugu

SEQ ID NO: 1103954 - RNA, 19 nt, Artificial Sequence
  Description of Artificial Sequence: Synthetic oligonucleotide
acgccugcuagggauguuu

SEQ ID NO: 1103955 - RNA, 19 nt, Artificial Sequence
  Description of Artificial Sequence: Synthetic oligonucleotide
agccaaugguaugccaguu

SEQ ID NO: 1103956 - RNA, 19 nt, Artificial Sequence
  Description of Artificial Sequence: Synthetic oligonucleotide
cugucaguaauaggccuua

SEQ ID NO: 1103957 - RNA, 19 nt, Artificial Sequence
  Description of Artificial Sequence: Synthetic oligonucleotide
cugcaaucgcacaugccau

SEQ ID NO: 1103958 - RNA, 19 nt, Artificial Sequence
  Description of Artificial Sequence: Synthetic oligonucleotide
gguguccgcuggccaaugc

SEQ ID NO: 1103959 - RNA, 19 nt, Artificial Sequence
  Description of Artificial Sequence: Synthetic oligonucleotide
guaugccaguuacuuugcu

SEQ ID NO: 1103960 - RNA, 19 nt, Artificial Sequence
  Description of Artificial Sequence: Synthetic oligonucleotide
ugguguccgcuggccaaug

SEQ ID NO: 1103961 - RNA, 19 nt, Artificial Sequence
  Description of Artificial Sequence: Synthetic oligonucleotide
gcgcccguaacuagaacac

SEQ ID NO: 1103962 - RNA, 19 nt, Artificial Sequence
  Description of Artificial Sequence: Synthetic oligonucleotide
acgugaggcugaaaaucau

SEQ ID NO: 1103963 - RNA, 19 nt, Artificial Sequence
  Description of Artificial Sequence: Synthetic oligonucleotide
ucuguccgacguuccccua

SEQ ID NO: 1103964 - RNA, 19 nt, Artificial Sequence
  Description of Artificial Sequence: Synthetic oligonucleotide
ccaauccggaauggugucc

SEQ ID NO: 1103965 - RNA, 19 nt, Artificial Sequence
  Description of Artificial Sequence: Synthetic oligonucleotide
gccggcacacacuggcuac

SEQ ID NO: 1103966 - RNA, 19 nt, Artificial Sequence
  Description of Artificial Sequence: Synthetic oligonucleotide
gcuccuauuacagggcugu

SEQ ID NO: 1103967 - RNA, 19 nt, Artificial Sequence
  Description of Artificial Sequence: Synthetic oligonucleotide
cucgggagguugaaggcau

SEQ ID NO: 1103968 - RNA, 19 nt, Artificial Sequence
  Description of Artificial Sequence: Synthetic oligonucleotide
cagguucacuuguucaaau

SEQ ID NO: 1103969 - RNA, 19 nt, Artificial Sequence
  Description of Artificial Sequence: Synthetic oligonucleotide
gcacguaaugaacaccgau

SEQ ID NO: 1103970 - RNA, 19 nt, Artificial Sequence
  Description of Artificial Sequence: Synthetic oligonucleotide
gccagagcgauucuuugau

SEQ ID NO: 1103971 - RNA, 19 nt, Artificial Sequence
  Description of Artificial Sequence: Synthetic oligonucleotide
gugccacacggugcuauga

SEQ ID NO: 1103972 - RNA, 19 nt, Artificial Sequence
  Description of Artificial Sequence: Synthetic oligonucleotide
gggcguugcgcuccuauua

SEQ ID NO: 1103973 - RNA, 19 nt, Artificial Sequence
  Description of Artificial Sequence: Synthetic oligonucleotide
cacugaagcuaucgauaua

SEQ ID NO: 1103974 - RNA, 19 nt, Artificial Sequence
  Description of Artificial Sequence: Synthetic oligonucleotide
gccaaugguaugccaguua

SEQ ID NO: 1103975 - RNA, 19 nt, Artificial Sequence
  Description of Artificial Sequence: Synthetic oligonucleotide
caaggucuaacagucuauu

SEQ ID NO: 1103976 - RNA, 19 nt, Artificial Sequence
  Description of Artificial Sequence: Synthetic oligonucleotide
cgcaaucgcgaccgcagcc

SEQ ID NO: 1103977 - RNA, 19 nt, Artificial Sequence
  Description of Artificial Sequence: Synthetic oligonucleotide
gcgaccgcagccuacuccu

SEQ ID NO: 1103978 - RNA, 19 nt, Artificial Sequence
  Description of Artificial Sequence: Synthetic oligonucleotide
cuccuauuacagggcuguc

SEQ ID NO: 1103979 - RNA, 19 nt, Artificial Sequence
  Description of Artificial Sequence: Synthetic oligonucleotide
ucgcgaccgcagccuacuc

SEQ ID NO: 1103980 - RNA, 19 nt, Artificial Sequence
  Description of Artificial Sequence: Synthetic oligonucleotide
cugagcauuucuggggcgu

SEQ ID NO: 1103981 - RNA, 19 nt, Artificial Sequence
  Description of Artificial Sequence: Synthetic oligonucleotide
gcucgucgaaagccacagc

SEQ ID NO: 1103982 - RNA, 19 nt, Artificial Sequence
  Description of Artificial Sequence: Synthetic oligonucleotide
cacgcacucucaagugugu

SEQ ID NO: 1103983 - RNA, 19 nt, Artificial Sequence
  Description of Artificial Sequence: Synthetic oligonucleotide
gccagaccagugaaagguc

SEQ ID NO: 1103984 - RNA, 19 nt, Artificial Sequence
  Description of Artificial Sequence: Synthetic oligonucleotide
gcguugcgcuccuauuaca

SEQ ID NO: 1103985 - RNA, 19 nt, Artificial Sequence
  Description of Artificial Sequence: Synthetic oligonucleotide
caaucgcgaccgcagccua

SEQ ID NO: 1103986 - RNA, 19 nt, Artificial Sequence
  Description of Artificial Sequence: Synthetic oligonucleotide
cagccgucuuugcgccgcc

SEQ ID NO: 1103987 - RNA, 19 nt, Artificial Sequence
  Description of Artificial Sequence: Synthetic oligonucleotide
gugucaggcuauacaaguu

SEQ ID NO: 1103988 - RNA, 19 nt, Artificial Sequence
  Description of Artificial Sequence: Synthetic oligonucleotide
ccgcaaucgcgaccgcagc

SEQ ID NO: 1103989 - RNA, 19 nt, Artificial Sequence
  Description of Artificial Sequence: Synthetic oligonucleotide
cgcgaccgcagccuacucc

SEQ ID NO: 1103990 - RNA, 19 nt, Artificial Sequence
  Description of Artificial Sequence: Synthetic oligonucleotide
gcuccaaucgaagcugccu

SEQ ID NO: 1103991 - RNA, 19 nt, Artificial Sequence
  Description of Artificial Sequence: Synthetic oligonucleotide
gccgggaacgaaguggaua

SEQ ID NO: 1103992 - RNA, 19 nt, Artificial Sequence
  Description of Artificial Sequence: Synthetic oligonucleotide
ccauaaagguucaggggau

SEQ ID NO: 1103993 - RNA, 19 nt, Artificial Sequence
  Description of Artificial Sequence: Synthetic oligonucleotide
gccaguuacuuugcugaaa

SEQ ID NO: 1103994 - RNA, 19 nt, Artificial Sequence
  Description of Artificial Sequence: Synthetic oligonucleotide
gucuuugcgccgccgcaau

SEQ ID NO: 1103995 - RNA, 19 nt, Artificial Sequence
  Description of Artificial Sequence: Synthetic oligonucleotide
ggugaagugucaggcuaua

SEQ ID NO: 1103996 - RNA, 19 nt, Artificial Sequence
  Description of Artificial Sequence: Synthetic oligonucleotide
cgcuccuauuacagggcug

SEQ ID NO: 1103997 - RNA, 19 nt, Artificial Sequence
  Description of Artificial Sequence: Synthetic oligonucleotide
cucuaccagccggcagcug

SEQ ID NO: 1103998 - RNA, 19 nt, Artificial Sequence
  Description of Artificial Sequence: Synthetic oligonucleotide
ccguaacuagaacacgccu

SEQ ID NO: 1103999 - RNA, 19 nt, Artificial Sequence
  Description of Artificial Sequence: Synthetic oligonucleotide
cgcccguaacuagaacacg

SEQ ID NO: 1104000 - RNA, 19 nt, Artificial Sequence
  Description of Artificial Sequence: Synthetic oligonucleotide
ccaaggucuaacagucuau

SEQ ID NO: 1104001 - RNA, 19 nt, Artificial Sequence
  Description of Artificial Sequence: Synthetic oligonucleotide
gugugccacacggugcuau

SEQ ID NO: 1104002 - RNA, 19 nt, Artificial Sequence
  Description of Artificial Sequence: Synthetic oligonucleotide
cuauuucaucccagcucuu

SEQ ID NO: 1104003 - RNA, 19 nt, Artificial Sequence
  Description of Artificial Sequence: Synthetic oligonucleotide
gcgcuccuauuacagggcu

SEQ ID NO: 1104004 - RNA, 19 nt, Artificial Sequence
  Description of Artificial Sequence: Synthetic oligonucleotide
ccgcagccuacuccugcgc

SEQ ID NO: 1104005 - RNA, 19 nt, Artificial Sequence
  Description of Artificial Sequence: Synthetic oligonucleotide
caaucgaagcugccuccuu

SEQ ID NO: 1104006 - RNA, 19 nt, Artificial Sequence
  Description of Artificial Sequence: Synthetic oligonucleotide
cgcuggccaaugcccagag

SEQ ID NO: 1104007 - RNA, 19 nt, Artificial Sequence
  Description of Artificial Sequence: Synthetic oligonucleotide
gcaaucgcacaugccauuu

SEQ ID NO: 1104008 - RNA, 19 nt, Artificial Sequence
  Description of Artificial Sequence: Synthetic oligonucleotide
cuaugacgugaggcugaaa

SEQ ID NO: 1104009 - RNA, 19 nt, Artificial Sequence
  Description of Artificial Sequence: Synthetic oligonucleotide
ccuguggcgcccguaacua

SEQ ID NO: 1104010 - RNA, 19 nt, Artificial Sequence
  Description of Artificial Sequence: Synthetic oligonucleotide
ccgucuuugcgccgccgca

SEQ ID NO: 1104011 - RNA, 19 nt, Artificial Sequence
  Description of Artificial Sequence: Synthetic oligonucleotide
ggcugacucucaacaacau

SEQ ID NO: 1104012 - RNA, 19 nt, Artificial Sequence
  Description of Artificial Sequence: Synthetic oligonucleotide
cgcagccuacuccugcgca

SEQ ID NO: 1104013 - RNA, 19 nt, Artificial Sequence
  Description of Artificial Sequence: Synthetic oligonucleotide
cacccacauucagcuggga

SEQ ID NO: 1104014 - RNA, 19 nt, Artificial Sequence
  Description of Artificial Sequence: Synthetic oligonucleotide
cauuuaccugaaggaucau

SEQ ID NO: 1104015 - RNA, 19 nt, Artificial Sequence
  Description of Artificial Sequence: Synthetic oligonucleotide
cgacguuccccuagugcaa

SEQ ID NO: 1104016 - RNA, 19 nt, Artificial Sequence
  Description of Artificial Sequence: Synthetic oligonucleotide
ccaaucgaagcugccuccu

SEQ ID NO: 1104017 - RNA, 19 nt, Artificial Sequence
  Description of Artificial Sequence: Synthetic oligonucleotide
ccagagcgauucuuugauu

SEQ ID NO: 1104018 - RNA, 19 nt, Artificial Sequence
  Description of Artificial Sequence: Synthetic oligonucleotide
cgucuuugcgccgccgcaa

SEQ ID NO: 1104019 - RNA, 19 nt, Artificial Sequence
  Description of Artificial Sequence: Synthetic oligonucleotide
ccgcuggccaaugcccaga

SEQ ID NO: 1104020 - RNA, 19 nt, Artificial Sequence
  Description of Artificial Sequence: Synthetic oligonucleotide
ccucuaccagccggcagcu

SEQ ID NO: 1104021 - RNA, 19 nt, Artificial Sequence
  Description of Artificial Sequence: Synthetic oligonucleotide
cgccgcaaucgcgaccgca

SEQ ID NO: 1104022 - RNA, 19 nt, Artificial Sequence
  Description of Artificial Sequence: Synthetic oligonucleotide
ccucagucuguccgacguu

SEQ ID NO: 1104023 - RNA, 19 nt, Artificial Sequence
  Description of Artificial Sequence: Synthetic oligonucleotide
cacgccugcuagggauguu

SEQ ID NO: 1104024 - RNA, 19 nt, Artificial Sequence
  Description of Artificial Sequence: Synthetic oligonucleotide
aaaaccuucguucagcacc

SEQ ID NO: 1104025 - RNA, 19 nt, Artificial Sequence
  Description of Artificial Sequence: Synthetic oligonucleotide
aaaggauuuguucaaggcc

SEQ ID NO: 1104026 - RNA, 19 nt, Artificial Sequence
  Description of Artificial Sequence: Synthetic oligonucleotide
auuaaauccugcuacgugc

SEQ ID NO: 1104027 - RNA, 19 nt, Artificial Sequence
  Description of Artificial Sequence: Synthetic oligonucleotide
aaagcuaggacuugauccc

SEQ ID NO: 1104028 - RNA, 19 nt, Artificial Sequence
  Description of Artificial Sequence: Synthetic oligonucleotide
aaggauucagcaucgaugg

SEQ ID NO: 1104029 - RNA, 19 nt, Artificial Sequence
  Description of Artificial Sequence: Synthetic oligonucleotide
auuuguacgaaguuuacag

SEQ ID NO: 1104030 - RNA, 19 nt, Artificial Sequence
  Description of Artificial Sequence: Synthetic oligonucleotide
uucgauugaagccauacug

SEQ ID NO: 1104031 - RNA, 19 nt, Artificial Sequence
  Description of Artificial Sequence: Synthetic oligonucleotide
aauaugacaucguuggggu

SEQ ID NO: 1104032 - RNA, 19 nt, Artificial Sequence
  Description of Artificial Sequence: Synthetic oligonucleotide
gcuaauaugacaucguugg

SEQ ID NO: 1104033 - RNA, 19 nt, Artificial Sequence
  Description of Artificial Sequence: Synthetic oligonucleotide
agaguugggguacuuagcc

SEQ ID NO: 1104034 - RNA, 19 nt, Artificial Sequence
  Description of Artificial Sequence: Synthetic oligonucleotide
aauuaaauccugcuacgug

SEQ ID NO: 1104035 - RNA, 19 nt, Artificial Sequence
  Description of Artificial Sequence: Synthetic oligonucleotide
uaguuagugguaaagcuag

SEQ ID NO: 1104036 - RNA, 19 nt, Artificial Sequence
  Description of Artificial Sequence: Synthetic oligonucleotide
uaauaugacaucguugggg

SEQ ID NO: 1104037 - RNA, 19 nt, Artificial Sequence
  Description of Artificial Sequence: Synthetic oligonucleotide
uccuuaacagguuauuggg

SEQ ID NO: 1104038 - RNA, 19 nt, Artificial Sequence
  Description of Artificial Sequence: Synthetic oligonucleotide
ugaguagcuaauaugacau

SEQ ID NO: 1104039 - RNA, 19 nt, Artificial Sequence
  Description of Artificial Sequence: Synthetic oligonucleotide
ugugucuuaccccagucag

SEQ ID NO: 1104040 - RNA, 19 nt, Artificial Sequence
  Description of Artificial Sequence: Synthetic oligonucleotide
aguagcuaauaugacaucg

SEQ ID NO: 1104041 - RNA, 19 nt, Artificial Sequence
  Description of Artificial Sequence: Synthetic oligonucleotide
auacuuaacauuuguacga

SEQ ID NO: 1104042 - RNA, 19 nt, Artificial Sequence
  Description of Artificial Sequence: Synthetic oligonucleotide
uuuguacgaaguuuacagg

SEQ ID NO: 1104043 - RNA, 19 nt, Artificial Sequence
  Description of Artificial Sequence: Synthetic oligonucleotide
aaaggauucagcaucgaug

SEQ ID NO: 1104044 - RNA, 19 nt, Artificial Sequence
  Description of Artificial Sequence: Synthetic oligonucleotide
ugcauaauuagucccgggc

SEQ ID NO: 1104045 - RNA, 19 nt, Artificial Sequence
  Description of Artificial Sequence: Synthetic oligonucleotide
aagaacucgaaauacuguu

SEQ ID NO: 1104046 - RNA, 19 nt, Artificial Sequence
  Description of Artificial Sequence: Synthetic oligonucleotide
ucgauugaagccauacugc

SEQ ID NO: 1104047 - RNA, 19 nt, Artificial Sequence
  Description of Artificial Sequence: Synthetic oligonucleotide
uuagugguaaagcuaggac

SEQ ID NO: 1104048 - RNA, 19 nt, Artificial Sequence
  Description of Artificial Sequence: Synthetic oligonucleotide
cuuugaagcccuuaugaac

SEQ ID NO: 1104049 - RNA, 19 nt, Artificial Sequence
  Description of Artificial Sequence: Synthetic oligonucleotide
uuacuuugauccaacauuu

SEQ ID NO: 1104050 - RNA, 19 nt, Artificial Sequence
  Description of Artificial Sequence: Synthetic oligonucleotide
auaaucgccgcuggcaucc

SEQ ID NO: 1104051 - RNA, 19 nt, Artificial Sequence
  Description of Artificial Sequence: Synthetic oligonucleotide
uauugcguugguuuucugc

SEQ ID NO: 1104052 - RNA, 19 nt, Artificial Sequence
  Description of Artificial Sequence: Synthetic oligonucleotide
uuaccugguccacggaucg

SEQ ID NO: 1104053 - RNA, 19 nt, Artificial Sequence
  Description of Artificial Sequence: Synthetic oligonucleotide
gauggcguaggacauuugc

SEQ ID NO: 1104054 - RNA, 19 nt, Artificial Sequence
  Description of Artificial Sequence: Synthetic oligonucleotide
cuacgugcagcucacaggc

SEQ ID NO: 1104055 - RNA, 19 nt, Artificial Sequence
  Description of Artificial Sequence: Synthetic oligonucleotide
uuaaauccugcuacgugca

SEQ ID NO: 1104056 - RNA, 19 nt, Artificial Sequence
  Description of Artificial Sequence: Synthetic oligonucleotide
aggagaccccuguagacgc

SEQ ID NO: 1104057 - RNA, 19 nt, Artificial Sequence
  Description of Artificial Sequence: Synthetic oligonucleotide
aaaggaucuuauugcguug

SEQ ID NO: 1104058 - RNA, 19 nt, Artificial Sequence
  Description of Artificial Sequence: Synthetic oligonucleotide
acaucguugggguccaugg

SEQ ID NO: 1104059 - RNA, 19 nt, Artificial Sequence
  Description of Artificial Sequence: Synthetic oligonucleotide
accucuguagaguggaggg

SEQ ID NO: 1104060 - RNA, 19 nt, Artificial Sequence
  Description of Artificial Sequence: Synthetic oligonucleotide
uaaaggaucuuauugcguu

SEQ ID NO: 1104061 - RNA, 19 nt, Artificial Sequence
  Description of Artificial Sequence: Synthetic oligonucleotide
uguagacgcgauaaucgcc

SEQ ID NO: 1104062 - RNA, 19 nt, Artificial Sequence
  Description of Artificial Sequence: Synthetic oligonucleotide
auuagucccgggcugggcg

SEQ ID NO: 1104063 - RNA, 19 nt, Artificial Sequence
  Description of Artificial Sequence: Synthetic oligonucleotide
uacgaaguuuacaggaugu

SEQ ID NO: 1104064 - RNA, 19 nt, Artificial Sequence
  Description of Artificial Sequence: Synthetic oligonucleotide
cucgaaauacuguuccugc

SEQ ID NO: 1104065 - RNA, 19 nt, Artificial Sequence
  Description of Artificial Sequence: Synthetic oligonucleotide
uggcugauucgauugaagc

SEQ ID NO: 1104066 - RNA, 19 nt, Artificial Sequence
  Description of Artificial Sequence: Synthetic oligonucleotide
agauuuaccgcagccugcc

SEQ ID NO: 1104067 - RNA, 19 nt, Artificial Sequence
  Description of Artificial Sequence: Synthetic oligonucleotide
cauaacgugagggacacac

SEQ ID NO: 1104068 - RNA, 19 nt, Artificial Sequence
  Description of Artificial Sequence: Synthetic oligonucleotide
guacuuagccuucaacucc

SEQ ID NO: 1104069 - RNA, 19 nt, Artificial Sequence
  Description of Artificial Sequence: Synthetic oligonucleotide
aauagaaggggcggacuuc

SEQ ID NO: 1104070 - RNA, 19 nt, Artificial Sequence
  Description of Artificial Sequence: Synthetic oligonucleotide
ugucuuaccccagucaggc

SEQ ID NO: 1104071 - RNA, 19 nt, Artificial Sequence
  Description of Artificial Sequence: Synthetic oligonucleotide
agguuauugggguaggaga

SEQ ID NO: 1104072 - RNA, 19 nt, Artificial Sequence
  Description of Artificial Sequence: Synthetic oligonucleotide
guagacgcgauaaucgccg

SEQ ID NO: 1104073 - RNA, 19 nt, Artificial Sequence
  Description of Artificial Sequence: Synthetic oligonucleotide
ggcagguugacccagcggg

SEQ ID NO: 1104074 - RNA, 19 nt, Artificial Sequence
  Description of Artificial Sequence: Synthetic oligonucleotide
aagcgcucaucaaaggugg

SEQ ID NO: 1104075 - RNA, 19 nt, Artificial Sequence
  Description of Artificial Sequence: Synthetic oligonucleotide
acgugagggacacacgagg

SEQ ID NO: 1104076 - RNA, 19 nt, Artificial Sequence
  Description of Artificial Sequence: Synthetic oligonucleotide
aaugguucccagggguccc

SEQ ID NO: 1104077 - RNA, 19 nt, Artificial Sequence
  Description of Artificial Sequence: Synthetic oligonucleotide
ucagcaucgauggggagag

SEQ ID NO: 1104078 - RNA, 19 nt, Artificial Sequence
  Description of Artificial Sequence: Synthetic oligonucleotide
gauucgauugaagccauac

SEQ ID NO: 1104079 - RNA, 19 nt, Artificial Sequence
  Description of Artificial Sequence: Synthetic oligonucleotide
uucaaacgcaggcaccacc

SEQ ID NO: 1104080 - RNA, 19 nt, Artificial Sequence
  Description of Artificial Sequence: Synthetic oligonucleotide
uuuaccgcagccugccgag

SEQ ID NO: 1104081 - RNA, 19 nt, Artificial Sequence
  Description of Artificial Sequence: Synthetic oligonucleotide
uguacgaaguuuacaggau

SEQ ID NO: 1104082 - RNA, 19 nt, Artificial Sequence
  Description of Artificial Sequence: Synthetic oligonucleotide
cuaauaugacaucguuggg

SEQ ID NO: 1104083 - RNA, 19 nt, Artificial Sequence
  Description of Artificial Sequence: Synthetic oligonucleotide
ugcgacuuuaccuggucca

SEQ ID NO: 1104084 - RNA, 19 nt, Artificial Sequence
  Description of Artificial Sequence: Synthetic oligonucleotide
agaaaaccuucguucagca

SEQ ID NO: 1104085 - RNA, 19 nt, Artificial Sequence
  Description of Artificial Sequence: Synthetic oligonucleotide
ucuacgcuggcaugaguag

SEQ ID NO: 1104086 - RNA, 19 nt, Artificial Sequence
  Description of Artificial Sequence: Synthetic oligonucleotide
acacacgaggugcauggcg

SEQ ID NO: 1104087 - RNA, 19 nt, Artificial Sequence
  Description of Artificial Sequence: Synthetic oligonucleotide
auagaaggggcggacuucg

SEQ ID NO: 1104088 - RNA, 19 nt, Artificial Sequence
  Description of Artificial Sequence: Synthetic oligonucleotide
acuuaacauuuguacgaag

SEQ ID NO: 1104089 - RNA, 19 nt, Artificial Sequence
  Description of Artificial Sequence: Synthetic oligonucleotide
ugguagaaggcgcaucgga

SEQ ID NO: 1104090 - RNA, 19 nt, Artificial Sequence
  Description of Artificial Sequence: Synthetic oligonucleotide
agcggugcggaguugcgac

SEQ ID NO: 1104091 - RNA, 19 nt, Artificial Sequence
  Description of Artificial Sequence: Synthetic oligonucleotide
uuauugggguaggagaugu

SEQ ID NO: 1104092 - RNA, 19 nt, Artificial Sequence
  Description of Artificial Sequence: Synthetic oligonucleotide
uacagacgggguauuggag

SEQ ID NO: 1104093 - RNA, 19 nt, Artificial Sequence
  Description of Artificial Sequence: Synthetic oligonucleotide
ggaguugcgacuuuaccug

SEQ ID NO: 1104094 - RNA, 19 nt, Artificial Sequence
  Description of Artificial Sequence: Synthetic oligonucleotide
ggauucagcaucgaugggg

SEQ ID NO: 1104095 - RNA, 19 nt, Artificial Sequence
  Description of Artificial Sequence: Synthetic oligonucleotide
caugaguagcuaauaugac

SEQ ID NO: 1104096 - RNA, 19 nt, Artificial Sequence
  Description of Artificial Sequence: Synthetic oligonucleotide
guacgaaguuuacaggaug

SEQ ID NO: 1104097 - RNA, 19 nt, Artificial Sequence
  Description of Artificial Sequence: Synthetic oligonucleotide
guagaaggcgcaucggaug

SEQ ID NO: 1104098 - RNA, 19 nt, Artificial Sequence
  Description of Artificial Sequence: Synthetic oligonucleotide
uaauagaaggggcggacuu

SEQ ID NO: 1104099 - RNA, 19 nt, Artificial Sequence
  Description of Artificial Sequence: Synthetic oligonucleotide
auuccuuaacagguuauug

SEQ ID NO: 1104100 - RNA, 19 nt, Artificial Sequence
  Description of Artificial Sequence: Synthetic oligonucleotide
ggagggaugugucuuaccc

SEQ ID NO: 1104101 - RNA, 19 nt, Artificial Sequence
  Description of Artificial Sequence: Synthetic oligonucleotide
agugcauaauuagucccgg

SEQ ID NO: 1104102 - RNA, 19 nt, Artificial Sequence
  Description of Artificial Sequence: Synthetic oligonucleotide
gcgguaaaggaucuuauug

SEQ ID NO: 1104103 - RNA, 19 nt, Artificial Sequence
  Description of Artificial Sequence: Synthetic oligonucleotide
cuuaugaaccagaaaaccu

SEQ ID NO: 1104104 - RNA, 19 nt, Artificial Sequence
  Description of Artificial Sequence: Synthetic oligonucleotide
gauuucaaacgcaggcacc

SEQ ID NO: 1104105 - RNA, 19 nt, Artificial Sequence
  Description of Artificial Sequence: Synthetic oligonucleotide
agcgggaguaguugguggg

SEQ ID NO: 1104106 - RNA, 19 nt, Artificial Sequence
  Description of Artificial Sequence: Synthetic oligonucleotide
ugguccacggaucgcgggg

SEQ ID NO: 1104107 - RNA, 19 nt, Artificial Sequence
  Description of Artificial Sequence: Synthetic oligonucleotide
auaguuggccucuucucga

SEQ ID NO: 1104108 - RNA, 19 nt, Artificial Sequence
  Description of Artificial Sequence: Synthetic oligonucleotide
ucucgagccaaauuccuua

SEQ ID NO: 1104109 - RNA, 19 nt, Artificial Sequence
  Description of Artificial Sequence: Synthetic oligonucleotide
uagucaaguccaguguucc

SEQ ID NO: 1104110 - RNA, 19 nt, Artificial Sequence
  Description of Artificial Sequence: Synthetic oligonucleotide
auucgauugaagccauacu

SEQ ID NO: 1104111 - RNA, 19 nt, Artificial Sequence
  Description of Artificial Sequence: Synthetic oligonucleotide
gaguugcgacuuuaccugg

SEQ ID NO: 1104112 - RNA, 19 nt, Artificial Sequence
  Description of Artificial Sequence: Synthetic oligonucleotide
ggacacacgaggugcaugg

SEQ ID NO: 1104113 - RNA, 19 nt, Artificial Sequence
  Description of Artificial Sequence: Synthetic oligonucleotide
cuaccaacaugagagcggc

SEQ ID NO: 1104114 - RNA, 19 nt, Artificial Sequence
  Description of Artificial Sequence: Synthetic oligonucleotide
ucgaaauacuguuccugcu

SEQ ID NO: 1104115 - RNA, 19 nt, Artificial Sequence
  Description of Artificial Sequence: Synthetic oligonucleotide
aauucucagaccaggggaa

SEQ ID NO: 1104116 - RNA, 19 nt, Artificial Sequence
  Description of Artificial Sequence: Synthetic oligonucleotide
acgaggugcauggcgaccc

SEQ ID NO: 1104117 - RNA, 19 nt, Artificial Sequence
  Description of Artificial Sequence: Synthetic oligonucleotide
auuuaccgcagccugccga

SEQ ID NO: 1104118 - RNA, 19 nt, Artificial Sequence
  Description of Artificial Sequence: Synthetic oligonucleotide
uugcgacuuuaccuggucc

SEQ ID NO: 1104119 - RNA, 19 nt, Artificial Sequence
  Description of Artificial Sequence: Synthetic oligonucleotide
ggcaugaguagcuaauaug

SEQ ID NO: 1104120 - RNA, 19 nt, Artificial Sequence
  Description of Artificial Sequence: Synthetic oligonucleotide
ggguauuggaggcucagag

SEQ ID NO: 1104121 - RNA, 19 nt, Artificial Sequence
  Description of Artificial Sequence: Synthetic oligonucleotide
acagugggcccucccagcg

SEQ ID NO: 1104122 - RNA, 19 nt, Artificial Sequence
  Description of Artificial Sequence: Synthetic oligonucleotide
acucgaaauacuguuccug

SEQ ID NO: 1104123 - RNA, 19 nt, Artificial Sequence
  Description of Artificial Sequence: Synthetic oligonucleotide
uggcguaggacauuugcau

SEQ ID NO: 1104124 - RNA, 19 nt, Artificial Sequence
  Description of Artificial Sequence: Synthetic oligonucleotide
gguacuuagccuucaacuc

SEQ ID NO: 1104125 - RNA, 19 nt, Artificial Sequence
  Description of Artificial Sequence: Synthetic oligonucleotide
ggcugauucgauugaagcc

SEQ ID NO: 1104126 - RNA, 19 nt, Artificial Sequence
  Description of Artificial Sequence: Synthetic oligonucleotide
uggccgcgaacacugauac

SEQ ID NO: 1104127 - RNA, 19 nt, Artificial Sequence
  Description of Artificial Sequence: Synthetic oligonucleotide
cuaguuagugguaaagcua

SEQ ID NO: 1104128 - RNA, 19 nt, Artificial Sequence
  Description of Artificial Sequence: Synthetic oligonucleotide
aaaccuucguucagcaccu

SEQ ID NO: 1104129 - RNA, 19 nt, Artificial Sequence
  Description of Artificial Sequence: Synthetic oligonucleotide
cauaauagaaggggcggac

SEQ ID NO: 1104130 - RNA, 19 nt, Artificial Sequence
  Description of Artificial Sequence: Synthetic oligonucleotide
agugguaaagcuaggacuu

SEQ ID NO: 1104131 - RNA, 19 nt, Artificial Sequence
  Description of Artificial Sequence: Synthetic oligonucleotide
ggauuucaaacgcaggcac

SEQ ID NO: 1104132 - RNA, 19 nt, Artificial Sequence
  Description of Artificial Sequence: Synthetic oligonucleotide
guuugaacuggcgguaaag

SEQ ID NO: 1104133 - RNA, 19 nt, Artificial Sequence
  Description of Artificial Sequence: Synthetic oligonucleotide
uaccgcagccugccgagcg

SEQ ID NO: 1104134 - RNA, 19 nt, Artificial Sequence
  Description of Artificial Sequence: Synthetic oligonucleotide
uuuuguucaugggcauccg

SEQ ID NO: 1104135 - RNA, 19 nt, Artificial Sequence
  Description of Artificial Sequence: Synthetic oligonucleotide
accaacaugagagcggcca

SEQ ID NO: 1104136 - RNA, 19 nt, Artificial Sequence
  Description of Artificial Sequence: Synthetic oligonucleotide
ggguaggagauguuggugc

SEQ ID NO: 1104137 - RNA, 19 nt, Artificial Sequence
  Description of Artificial Sequence: Synthetic oligonucleotide
guaaagcuaggacuugauc

SEQ ID NO: 1104138 - RNA, 19 nt, Artificial Sequence
  Description of Artificial Sequence: Synthetic oligonucleotide
gcaugaguagcuaauauga

SEQ ID NO: 1104139 - RNA, 19 nt, Artificial Sequence
  Description of Artificial Sequence: Synthetic oligonucleotide
gcggauuucaaacgcaggc

SEQ ID NO: 1104140 - RNA, 19 nt, Artificial Sequence
  Description of Artificial Sequence: Synthetic oligonucleotide
ugcaggagguugucuacgc

SEQ ID NO: 1104141 - RNA, 19 nt, Artificial Sequence
  Description of Artificial Sequence: Synthetic oligonucleotide
caccccauagucaagucca

SEQ ID NO: 1104142 - RNA, 19 nt, Artificial Sequence
  Description of Artificial Sequence: Synthetic oligonucleotide
gaaggcgcaucggauggcg

SEQ ID NO: 1104143 - RNA, 19 nt, Artificial Sequence
  Description of Artificial Sequence: Synthetic oligonucleotide
uacuuaacauuuguacgaa

SEQ ID NO: 1104144 - RNA, 19 nt, Artificial Sequence
  Description of Artificial Sequence: Synthetic oligonucleotide
gaaaaccuucguucagcac

SEQ ID NO: 1104145 - RNA, 19 nt, Artificial Sequence
  Description of Artificial Sequence: Synthetic oligonucleotide
gacgcgauaaucgccgcug

SEQ ID NO: 1104146 - RNA, 19 nt, Artificial Sequence
  Description of Artificial Sequence: Synthetic oligonucleotide
gccgcgaacacugauacag

SEQ ID NO: 1104147 - RNA, 19 nt, Artificial Sequence
  Description of Artificial Sequence: Synthetic oligonucleotide
gaacuggcgguaaaggauc

SEQ ID NO: 1104148 - RNA, 19 nt, Artificial Sequence
  Description of Artificial Sequence: Synthetic oligonucleotide
cucauaacgugagggacac

SEQ ID NO: 1104149 - RNA, 19 nt, Artificial Sequence
  Description of Artificial Sequence: Synthetic oligonucleotide
ccuuaacagguuauugggg

SEQ ID NO: 1104150 - RNA, 19 nt, Artificial Sequence
  Description of Artificial Sequence: Synthetic oligonucleotide
aaggccacacagcuaguua

SEQ ID NO: 1104151 - RNA, 19 nt, Artificial Sequence
  Description of Artificial Sequence: Synthetic oligonucleotide
uaauuagucccgggcuggg

SEQ ID NO: 1104152 - RNA, 19 nt, Artificial Sequence
  Description of Artificial Sequence: Synthetic oligonucleotide
gauuuaccgcagccugccg

SEQ ID NO: 1104153 - RNA, 19 nt, Artificial Sequence
  Description of Artificial Sequence: Synthetic oligonucleotide
guuagugguaaagcuagga

SEQ ID NO: 1104154 - RNA, 19 nt, Artificial Sequence
  Description of Artificial Sequence: Synthetic oligonucleotide
cuggcugauucgauugaag

SEQ ID NO: 1104155 - RNA, 19 nt, Artificial Sequence
  Description of Artificial Sequence: Synthetic oligonucleotide
aacgugagggacacacgag

SEQ ID NO: 1104156 - RNA, 19 nt, Artificial Sequence
  Description of Artificial Sequence: Synthetic oligonucleotide
uguuugaacuggcgguaaa

SEQ ID NO: 1104157 - RNA, 19 nt, Artificial Sequence
  Description of Artificial Sequence: Synthetic oligonucleotide
caggagaccccuguagacg

SEQ ID NO: 1104158 - RNA, 19 nt, Artificial Sequence
  Description of Artificial Sequence: Synthetic oligonucleotide
ugguaaagcuaggacuuga

SEQ ID NO: 1104159 - RNA, 19 nt, Artificial Sequence
  Description of Artificial Sequence: Synthetic oligonucleotide
auaauagaaggggcggacu

SEQ ID NO: 1104160 - RNA, 19 nt, Artificial Sequence
  Description of Artificial Sequence: Synthetic oligonucleotide
agccucauaacgugaggga

SEQ ID NO: 1104161 - RNA, 19 nt, Artificial Sequence
  Description of Artificial Sequence: Synthetic oligonucleotide
gaugcggggaccaccggcc

SEQ ID NO: 1104162 - RNA, 19 nt, Artificial Sequence
  Description of Artificial Sequence: Synthetic oligonucleotide
ugguuacuuugauccaaca

SEQ ID NO: 1104163 - RNA, 19 nt, Artificial Sequence
  Description of Artificial Sequence: Synthetic oligonucleotide
cagguuauugggguaggag

SEQ ID NO: 1104164 - RNA, 19 nt, Artificial Sequence
  Description of Artificial Sequence: Synthetic oligonucleotide
gugcauaauuagucccggg

SEQ ID NO: 1104165 - RNA, 19 nt, Artificial Sequence
  Description of Artificial Sequence: Synthetic oligonucleotide
cugauagagcugcacuaac

SEQ ID NO: 1104166 - RNA, 19 nt, Artificial Sequence
  Description of Artificial Sequence: Synthetic oligonucleotide
gaucccggcgcgaugcggg

SEQ ID NO: 1104167 - RNA, 19 nt, Artificial Sequence
  Description of Artificial Sequence: Synthetic oligonucleotide
ugcguugguuuucugccuc

SEQ ID NO: 1104168 - RNA, 19 nt, Artificial Sequence
  Description of Artificial Sequence: Synthetic oligonucleotide
agcugcacuaacucguuuu

SEQ ID NO: 1104169 - RNA, 19 nt, Artificial Sequence
  Description of Artificial Sequence: Synthetic oligonucleotide
agagguaaaaggauuuguu

SEQ ID NO: 1104170 - RNA, 19 nt, Artificial Sequence
  Description of Artificial Sequence: Synthetic oligonucleotide
accugauagagcugcacua

SEQ ID NO: 1104171 - RNA, 19 nt, Artificial Sequence
  Description of Artificial Sequence: Synthetic oligonucleotide
gauaaucgccgcuggcauc

SEQ ID NO: 1104172 - RNA, 19 nt, Artificial Sequence
  Description of Artificial Sequence: Synthetic oligonucleotide
aggauucagcaucgauggg

SEQ ID NO: 1104173 - RNA, 19 nt, Artificial Sequence
  Description of Artificial Sequence: Synthetic oligonucleotide
ucuccgggaucccggcgcg

SEQ ID NO: 1104174 - RNA, 19 nt, Artificial Sequence
  Description of Artificial Sequence: Synthetic oligonucleotide
auaacgugagggacacacg

SEQ ID NO: 1104175 - RNA, 19 nt, Artificial Sequence
  Description of Artificial Sequence: Synthetic oligonucleotide
agugguuacuuugauccaa

SEQ ID NO: 1104176 - RNA, 19 nt, Artificial Sequence
  Description of Artificial Sequence: Synthetic oligonucleotide
gcuaccaacaugagagcgg

SEQ ID NO: 1104177 - RNA, 19 nt, Artificial Sequence
  Description of Artificial Sequence: Synthetic oligonucleotide
cagcgggaguaguuggugg

SEQ ID NO: 1104178 - RNA, 19 nt, Artificial Sequence
  Description of Artificial Sequence: Synthetic oligonucleotide
ucgagccaaauuccuuaac

SEQ ID NO: 1104179 - RNA, 19 nt, Artificial Sequence
  Description of Artificial Sequence: Synthetic oligonucleotide
cagcauugcuaccaacaug

SEQ ID NO: 1104180 - RNA, 19 nt, Artificial Sequence
  Description of Artificial Sequence: Synthetic oligonucleotide
uuuggggauggaacuucaa

SEQ ID NO: 1104181 - RNA, 19 nt, Artificial Sequence
  Description of Artificial Sequence: Synthetic oligonucleotide
ugcggaguugcgacuuuac

SEQ ID NO: 1104182 - RNA, 19 nt, Artificial Sequence
  Description of Artificial Sequence: Synthetic oligonucleotide
accggccguagccucugcc

SEQ ID NO: 1104183 - RNA, 19 nt, Artificial Sequence
  Description of Artificial Sequence: Synthetic oligonucleotide
acgcgauaaucgccgcugg

SEQ ID NO: 1104184 - RNA, 19 nt, Artificial Sequence
  Description of Artificial Sequence: Synthetic oligonucleotide
cacacgaggugcauggcga

SEQ ID NO: 1104185 - RNA, 19 nt, Artificial Sequence
  Description of Artificial Sequence: Synthetic oligonucleotide
aguuagugguaaagcuagg

SEQ ID NO: 1104186 - RNA, 19 nt, Artificial Sequence
  Description of Artificial Sequence: Synthetic oligonucleotide
aggcucagagagguaaaag

SEQ ID NO: 1104187 - RNA, 19 nt, Artificial Sequence
  Description of Artificial Sequence: Synthetic oligonucleotide
aaucgccgcuggcauccag

SEQ ID NO: 1104188 - RNA, 19 nt, Artificial Sequence
  Description of Artificial Sequence: Synthetic oligonucleotide
gauacagacagugggcccu

SEQ ID NO: 1104189 - RNA, 19 nt, Artificial Sequence
  Description of Artificial Sequence: Synthetic oligonucleotide
agaaggcgcaucggauggc

SEQ ID NO: 1104190 - RNA, 19 nt, Artificial Sequence
  Description of Artificial Sequence: Synthetic oligonucleotide
ggguacuuagccuucaacu

SEQ ID NO: 1104191 - RNA, 19 nt, Artificial Sequence
  Description of Artificial Sequence: Synthetic oligonucleotide
cuacgcuggcaugaguagc

SEQ ID NO: 1104192 - RNA, 19 nt, Artificial Sequence
  Description of Artificial Sequence: Synthetic oligonucleotide
cgauugaagccauacugcc

SEQ ID NO: 1104193 - RNA, 19 nt, Artificial Sequence
  Description of Artificial Sequence: Synthetic oligonucleotide
agucaaguccaguguucca

SEQ ID NO: 1104194 - RNA, 19 nt, Artificial Sequence
  Description of Artificial Sequence: Synthetic oligonucleotide
uucgcccaccugauagagc

SEQ ID NO: 1104195 - RNA, 19 nt, Artificial Sequence
  Description of Artificial Sequence: Synthetic oligonucleotide
agugggcccucccagcgcu

SEQ ID NO: 1104196 - RNA, 19 nt, Artificial Sequence
  Description of Artificial Sequence: Synthetic oligonucleotide
cauuuguacgaaguuuaca

SEQ ID NO: 1104197 - RNA, 19 nt, Artificial Sequence
  Description of Artificial Sequence: Synthetic oligonucleotide
gugucuuaccccagucagg

SEQ ID NO: 1104198 - RNA, 19 nt, Artificial Sequence
  Description of Artificial Sequence: Synthetic oligonucleotide
agcagccucauaacgugag

SEQ ID NO: 1104199 - RNA, 19 nt, Artificial Sequence
  Description of Artificial Sequence: Synthetic oligonucleotide
uugucuacgcuggcaugag

SEQ ID NO: 1104200 - RNA, 19 nt, Artificial Sequence
  Description of Artificial Sequence: Synthetic oligonucleotide
uuauugcguugguuuucug

SEQ ID NO: 1104201 - RNA, 19 nt, Artificial Sequence
  Description of Artificial Sequence: Synthetic oligonucleotide
acuucgcccaccugauaga

SEQ ID NO: 1104202 - RNA, 19 nt, Artificial Sequence
  Description of Artificial Sequence: Synthetic oligonucleotide
accuucguucagcaccuca

SEQ ID NO: 1104203 - RNA, 19 nt, Artificial Sequence
  Description of Artificial Sequence: Synthetic oligonucleotide
gguauuggaggcucagaga

SEQ ID NO: 1104204 - RNA, 19 nt, Artificial Sequence
  Description of Artificial Sequence: Synthetic oligonucleotide
acgcaggcaccaccagggc

SEQ ID NO: 1104205 - RNA, 19 nt, Artificial Sequence
  Description of Artificial Sequence: Synthetic oligonucleotide
ugucuacgcuggcaugagu

SEQ ID NO: 1104206 - RNA, 19 nt, Artificial Sequence
  Description of Artificial Sequence: Synthetic oligonucleotide
cuucgcccaccugauagag

SEQ ID NO: 1104207 - RNA, 19 nt, Artificial Sequence
  Description of Artificial Sequence: Synthetic oligonucleotide
gagagguaaaaggauuugu

SEQ ID NO: 1104208 - RNA, 19 nt, Artificial Sequence
  Description of Artificial Sequence: Synthetic oligonucleotide
uagacgcgauaaucgccgc

SEQ ID NO: 1104209 - RNA, 19 nt, Artificial Sequence
  Description of Artificial Sequence: Synthetic oligonucleotide
guugcgacuuuaccugguc

SEQ ID NO: 1104210 - RNA, 19 nt, Artificial Sequence
  Description of Artificial Sequence: Synthetic oligonucleotide
uacgugcagcucacaggcc

SEQ ID NO: 1104211 - RNA, 19 nt, Artificial Sequence
  Description of Artificial Sequence: Synthetic oligonucleotide
cugguccacggaucgcggg

SEQ ID NO: 1104212 - RNA, 19 nt, Artificial Sequence
  Description of Artificial Sequence: Synthetic oligonucleotide
gggaccaccggccguagcc

SEQ ID NO: 1104213 - RNA, 19 nt, Artificial Sequence
  Description of Artificial Sequence: Synthetic oligonucleotide
caugccaucccagugguua

SEQ ID NO: 1104214 - RNA, 19 nt, Artificial Sequence
  Description of Artificial Sequence: Synthetic oligonucleotide
gacccagcgggaguaguug

SEQ ID NO: 1104215 - RNA, 19 nt, Artificial Sequence
  Description of Artificial Sequence: Synthetic oligonucleotide
cugugccuccucuuuggug

SEQ ID NO: 1104216 - RNA, 19 nt, Artificial Sequence
  Description of Artificial Sequence: Synthetic oligonucleotide
aggaucuuauugcguuggu

SEQ ID NO: 1104217 - RNA, 19 nt, Artificial Sequence
  Description of Artificial Sequence: Synthetic oligonucleotide
guggcuacucagcgcguag

SEQ ID NO: 1104218 - RNA, 19 nt, Artificial Sequence
  Description of Artificial Sequence: Synthetic oligonucleotide
cuagcuugucaaagaccuc

SEQ ID NO: 1104219 - RNA, 19 nt, Artificial Sequence
  Description of Artificial Sequence: Synthetic oligonucleotide
cauccggcgggcccggcgg

SEQ ID NO: 1104220 - RNA, 19 nt, Artificial Sequence
  Description of Artificial Sequence: Synthetic oligonucleotide
caguccggagagcagcgac

SEQ ID NO: 1104221 - RNA, 19 nt, Artificial Sequence
  Description of Artificial Sequence: Synthetic oligonucleotide
agcaucgauggggagaguu

SEQ ID NO: 1104222 - RNA, 19 nt, Artificial Sequence
  Description of Artificial Sequence: Synthetic oligonucleotide
uccacggaucgcggggacg

SEQ ID NO: 1104223 - RNA, 19 nt, Artificial Sequence
  Description of Artificial Sequence: Synthetic oligonucleotide
gugguuacuuugauccaac

SEQ ID NO: 1104224 - RNA, 19 nt, Artificial Sequence
  Description of Artificial Sequence: Synthetic oligonucleotide
agacgcgauaaucgccgcu

SEQ ID NO: 1104225 - RNA, 19 nt, Artificial Sequence
  Description of Artificial Sequence: Synthetic oligonucleotide
cagcgcuccagaaguccgg

SEQ ID NO: 1104226 - RNA, 19 nt, Artificial Sequence
  Description of Artificial Sequence: Synthetic oligonucleotide
ugacccagcgggaguaguu

SEQ ID NO: 1104227 - RNA, 19 nt, Artificial Sequence
  Description of Artificial Sequence: Synthetic oligonucleotide
uaccaacaugagagcggcc

SEQ ID NO: 1104228 - RNA, 19 nt, Artificial Sequence
  Description of Artificial Sequence: Synthetic oligonucleotide
gaaguccggacaggugcag

SEQ ID NO: 1104229 - RNA, 19 nt, Artificial Sequence
  Description of Artificial Sequence: Synthetic oligonucleotide
cuuugguggccgcgaacac

SEQ ID NO: 1104230 - RNA, 19 nt, Artificial Sequence
  Description of Artificial Sequence: Synthetic oligonucleotide
acuuuaccugguccacgga

SEQ ID NO: 1104231 - RNA, 19 nt, Artificial Sequence
  Description of Artificial Sequence: Synthetic oligonucleotide
uggugcccagugcauaauu

SEQ ID NO: 1104232 - RNA, 19 nt, Artificial Sequence
  Description of Artificial Sequence: Synthetic oligonucleotide
gcaccccauagucaagucc

SEQ ID NO: 1104233 - RNA, 19 nt, Artificial Sequence
  Description of Artificial Sequence: Synthetic oligonucleotide
cagagcggugcggaguugc

SEQ ID NO: 1104234 - RNA, 19 nt, Artificial Sequence
  Description of Artificial Sequence: Synthetic oligonucleotide
gcauaauuagucccgggcu

SEQ ID NO: 1104235 - RNA, 19 nt, Artificial Sequence
  Description of Artificial Sequence: Synthetic oligonucleotide
ucccagugguuacuuugau

SEQ ID NO: 1104236 - RNA, 19 nt, Artificial Sequence
  Description of Artificial Sequence: Synthetic oligonucleotide
auacagcaccucaucugag

SEQ ID NO: 1104237 - RNA, 19 nt, Artificial Sequence
  Description of Artificial Sequence: Synthetic oligonucleotide
aggugugcacagcccauaa

SEQ ID NO: 1104238 - RNA, 19 nt, Artificial Sequence
  Description of Artificial Sequence: Synthetic oligonucleotide
cagguugacccagcgggag

SEQ ID NO: 1104239 - RNA, 19 nt, Artificial Sequence
  Description of Artificial Sequence: Synthetic oligonucleotide
agcccuuaugaaccagaaa

SEQ ID NO: 1104240 - RNA, 19 nt, Artificial Sequence
  Description of Artificial Sequence: Synthetic oligonucleotide
acgcaucucagggcagugg

SEQ ID NO: 1104241 - RNA, 19 nt, Artificial Sequence
  Description of Artificial Sequence: Synthetic oligonucleotide
agaaguccggacaggugca

SEQ ID NO: 1104242 - RNA, 19 nt, Artificial Sequence
  Description of Artificial Sequence: Synthetic oligonucleotide
gucuacgcuggcaugagua

SEQ ID NO: 1104243 - RNA, 19 nt, Artificial Sequence
  Description of Artificial Sequence: Synthetic oligonucleotide
agguugacccagcgggagu

SEQ ID NO: 1104244 - RNA, 19 nt, Artificial Sequence
  Description of Artificial Sequence: Synthetic oligonucleotide
guaaaggaucuuauugcgu

SEQ ID NO: 1104245 - RNA, 19 nt, Artificial Sequence
  Description of Artificial Sequence: Synthetic oligonucleotide
ggcccggcggauuucaaac

SEQ ID NO: 1104246 - RNA, 19 nt, Artificial Sequence
  Description of Artificial Sequence: Synthetic oligonucleotide
ugauucgauugaagccaua

SEQ ID NO: 1104247 - RNA, 19 nt, Artificial Sequence
  Description of Artificial Sequence: Synthetic oligonucleotide
agaaaggauucagcaucga

SEQ ID NO: 1104248 - RNA, 19 nt, Artificial Sequence
  Description of Artificial Sequence: Synthetic oligonucleotide
gcagccucauaacgugagg

SEQ ID NO: 1104249 - RNA, 19 nt, Artificial Sequence
  Description of Artificial Sequence: Synthetic oligonucleotide
gugguaaagcuaggacuug

SEQ ID NO: 1104250 - RNA, 19 nt, Artificial Sequence
  Description of Artificial Sequence: Synthetic oligonucleotide
cauagucaaguccaguguu

SEQ ID NO: 1104251 - RNA, 19 nt, Artificial Sequence
  Description of Artificial Sequence: Synthetic oligonucleotide
ggcggauuucaaacgcagg

SEQ ID NO: 1104252 - RNA, 19 nt, Artificial Sequence
  Description of Artificial Sequence: Synthetic oligonucleotide
gcuaggacuugaucccagc

SEQ ID NO: 1104253 - RNA, 19 nt, Artificial Sequence
  Description of Artificial Sequence: Synthetic oligonucleotide
caccacguaggcaggucuc

SEQ ID NO: 1104254 - RNA, 19 nt, Artificial Sequence
  Description of Artificial Sequence: Synthetic oligonucleotide
gcggacuucgcccaccuga

SEQ ID NO: 1104255 - RNA, 19 nt, Artificial Sequence
  Description of Artificial Sequence: Synthetic oligonucleotide
acggaucgcggggacggcg

SEQ ID NO: 1104256 - RNA, 19 nt, Artificial Sequence
  Description of Artificial Sequence: Synthetic oligonucleotide
gacggcgggaagaacucga

SEQ ID NO: 1104257 - RNA, 19 nt, Artificial Sequence
  Description of Artificial Sequence: Synthetic oligonucleotide
ggcgacccuggcuagcuug

SEQ ID NO: 1104258 - RNA, 19 nt, Artificial Sequence
  Description of Artificial Sequence: Synthetic oligonucleotide
gguuacuuugauccaacau

SEQ ID NO: 1104259 - RNA, 19 nt, Artificial Sequence
  Description of Artificial Sequence: Synthetic oligonucleotide
acagguuauugggguagga

SEQ ID NO: 1104260 - RNA, 19 nt, Artificial Sequence
  Description of Artificial Sequence: Synthetic oligonucleotide
gucuuaccccagucaggcc

SEQ ID NO: 1104261 - RNA, 19 nt, Artificial Sequence
  Description of Artificial Sequence: Synthetic oligonucleotide
gacacacgaggugcauggc

SEQ ID NO: 1104262 - RNA, 19 nt, Artificial Sequence
  Description of Artificial Sequence: Synthetic oligonucleotide
ggcgggaagaacucgaaau

SEQ ID NO: 1104263 - RNA, 19 nt, Artificial Sequence
  Description of Artificial Sequence: Synthetic oligonucleotide
gcggaguugcgacuuuacc

SEQ ID NO: 1104264 - RNA, 19 nt, Artificial Sequence
  Description of Artificial Sequence: Synthetic oligonucleotide
cuucguucagcaccucaaa

SEQ ID NO: 1104265 - RNA, 19 nt, Artificial Sequence
  Description of Artificial Sequence: Synthetic oligonucleotide
cucgagccaaauuccuuaa

SEQ ID NO: 1104266 - RNA, 19 nt, Artificial Sequence
  Description of Artificial Sequence: Synthetic oligonucleotide
gccucauaacgugagggac

SEQ ID NO: 1104267 - RNA, 19 nt, Artificial Sequence
  Description of Artificial Sequence: Synthetic oligonucleotide
caaacuccccaggcucccg

SEQ ID NO: 1104268 - RNA, 19 nt, Artificial Sequence
  Description of Artificial Sequence: Synthetic oligonucleotide
aguugcgacuuuaccuggu

SEQ ID NO: 1104269 - RNA, 19 nt, Artificial Sequence
  Description of Artificial Sequence: Synthetic oligonucleotide
agagcggugcggaguugcg

SEQ ID NO: 1104270 - RNA, 19 nt, Artificial Sequence
  Description of Artificial Sequence: Synthetic oligonucleotide
cagugguuacuuugaucca

SEQ ID NO: 1104271 - RNA, 19 nt, Artificial Sequence
  Description of Artificial Sequence: Synthetic oligonucleotide
cagaacgccuccggaggcc

SEQ ID NO: 1104272 - RNA, 19 nt, Artificial Sequence
  Description of Artificial Sequence: Synthetic oligonucleotide
agaacgccuccggaggcca

SEQ ID NO: 1104273 - RNA, 19 nt, Artificial Sequence
  Description of Artificial Sequence: Synthetic oligonucleotide
accacguaggcaggucuca

SEQ ID NO: 1104274 - RNA, 19 nt, Artificial Sequence
  Description of Artificial Sequence: Synthetic oligonucleotide
gcccgugcaguccggagag

SEQ ID NO: 1104275 - RNA, 19 nt, Artificial Sequence
  Description of Artificial Sequence: Synthetic oligonucleotide
aacgccuccggaggccaga

SEQ ID NO: 1104276 - RNA, 19 nt, Artificial Sequence
  Description of Artificial Sequence: Synthetic oligonucleotide
aguccggagagcagcgaca

SEQ ID NO: 1104277 - RNA, 19 nt, Artificial Sequence
  Description of Artificial Sequence: Synthetic oligonucleotide
cacgaggugcauggcgacc

SEQ ID NO: 1104278 - RNA, 19 nt, Artificial Sequence
  Description of Artificial Sequence: Synthetic oligonucleotide
aggcgcaucggauggcgua

SEQ ID NO: 1104279 - RNA, 19 nt, Artificial Sequence
  Description of Artificial Sequence: Synthetic oligonucleotide
aaccuucguucagcaccuc

SEQ ID NO: 1104280 - RNA, 19 nt, Artificial Sequence
  Description of Artificial Sequence: Synthetic oligonucleotide
ccaacaugagagcggccag

SEQ ID NO: 1104281 - RNA, 19 nt, Artificial Sequence
  Description of Artificial Sequence: Synthetic oligonucleotide
cccggcggauuucaaacgc

SEQ ID NO: 1104282 - RNA, 19 nt, Artificial Sequence
  Description of Artificial Sequence: Synthetic oligonucleotide
cgagccaaauuccuuaaca

SEQ ID NO: 1104283 - RNA, 19 nt, Artificial Sequence
  Description of Artificial Sequence: Synthetic oligonucleotide
guugacccagcgggaguag

SEQ ID NO: 1104284 - RNA, 19 nt, Artificial Sequence
  Description of Artificial Sequence: Synthetic oligonucleotide
gcgauaaucgccgcuggca

SEQ ID NO: 1104285 - RNA, 19 nt, Artificial Sequence
  Description of Artificial Sequence: Synthetic oligonucleotide
gcccggcggauuucaaacg

SEQ ID NO: 1104286 - RNA, 19 nt, Artificial Sequence
  Description of Artificial Sequence: Synthetic oligonucleotide
gagaccccuguagacgcga

SEQ ID NO: 1104287 - RNA, 19 nt, Artificial Sequence
  Description of Artificial Sequence: Synthetic oligonucleotide
gguuauugggguaggagau

SEQ ID NO: 1104288 - RNA, 19 nt, Artificial Sequence
  Description of Artificial Sequence: Synthetic oligonucleotide
cugccgagcgcagccgagg

SEQ ID NO: 1104289 - RNA, 19 nt, Artificial Sequence
  Description of Artificial Sequence: Synthetic oligonucleotide
guggagggaugugucuuac

SEQ ID NO: 1104290 - RNA, 19 nt, Artificial Sequence
  Description of Artificial Sequence: Synthetic oligonucleotide
ugccaucccagugguuacu

SEQ ID NO: 1104291 - RNA, 19 nt, Artificial Sequence
  Description of Artificial Sequence: Synthetic oligonucleotide
aaggcgcaucggauggcgu

SEQ ID NO: 1104292 - RNA, 19 nt, Artificial Sequence
  Description of Artificial Sequence: Synthetic oligonucleotide
ccacauaaaaugguuccca

SEQ ID NO: 1104293 - RNA, 19 nt, Artificial Sequence
  Description of Artificial Sequence: Synthetic oligonucleotide
uacagacagugggcccucc

SEQ ID NO: 1104294 - RNA, 19 nt, Artificial Sequence
  Description of Artificial Sequence: Synthetic oligonucleotide
cagugggcccucccagcgc

SEQ ID NO: 1104295 - RNA, 19 nt, Artificial Sequence
  Description of Artificial Sequence: Synthetic oligonucleotide
ggcgcaucggauggcguag

SEQ ID NO: 1104296 - RNA, 19 nt, Artificial Sequence
  Description of Artificial Sequence: Synthetic oligonucleotide
ugggcccucccagcgcucc

SEQ ID NO: 1104297 - RNA, 19 nt, Artificial Sequence
  Description of Artificial Sequence: Synthetic oligonucleotide
aucgccgcuggcauccaga

SEQ ID NO: 1104298 - RNA, 19 nt, Artificial Sequence
  Description of Artificial Sequence: Synthetic oligonucleotide
accccauagucaaguccag

SEQ ID NO: 1104299 - RNA, 19 nt, Artificial Sequence
  Description of Artificial Sequence: Synthetic oligonucleotide
ucauaacgugagggacaca

SEQ ID NO: 1104300 - RNA, 19 nt, Artificial Sequence
  Description of Artificial Sequence: Synthetic oligonucleotide
ccagaacgccuccggaggc

SEQ ID NO: 1104301 - RNA, 19 nt, Artificial Sequence
  Description of Artificial Sequence: Synthetic oligonucleotide
cagcagccucauaacguga

SEQ ID NO: 1104302 - RNA, 19 nt, Artificial Sequence
  Description of Artificial Sequence: Synthetic oligonucleotide
aguggcuacucagcgcgua

SEQ ID NO: 1104303 - RNA, 19 nt, Artificial Sequence
  Description of Artificial Sequence: Synthetic oligonucleotide
cucuguagaguggagggau

SEQ ID NO: 1104304 - RNA, 19 nt, Artificial Sequence
  Description of Artificial Sequence: Synthetic oligonucleotide
cgcgaugcggggaccaccg

SEQ ID NO: 1104305 - RNA, 19 nt, Artificial Sequence
  Description of Artificial Sequence: Synthetic oligonucleotide
agagcugcacuaacucguu

SEQ ID NO: 1104306 - RNA, 19 nt, Artificial Sequence
  Description of Artificial Sequence: Synthetic oligonucleotide
gcgcucaucaaaggugggc

SEQ ID NO: 1104307 - RNA, 19 nt, Artificial Sequence
  Description of Artificial Sequence: Synthetic oligonucleotide
cacgcaucucagggcagug

SEQ ID NO: 1104308 - RNA, 19 nt, Artificial Sequence
  Description of Artificial Sequence: Synthetic oligonucleotide
cggcggauuucaaacgcag

SEQ ID NO: 1104309 - RNA, 19 nt, Artificial Sequence
  Description of Artificial Sequence: Synthetic oligonucleotide
cugauucgauugaagccau

SEQ ID NO: 1104310 - RNA, 19 nt, Artificial Sequence
  Description of Artificial Sequence: Synthetic oligonucleotide
cuggcaugaguagcuaaua

SEQ ID NO: 1104311 - RNA, 19 nt, Artificial Sequence
  Description of Artificial Sequence: Synthetic oligonucleotide
gggacacacgaggugcaug

SEQ ID NO: 1104312 - RNA, 19 nt, Artificial Sequence
  Description of Artificial Sequence: Synthetic oligonucleotide
ggaucgcggggacggcggg

SEQ ID NO: 1104313 - RNA, 19 nt, Artificial Sequence
  Description of Artificial Sequence: Synthetic oligonucleotide
aggaccgcagcagggcaaa

SEQ ID NO: 1104314 - RNA, 19 nt, Artificial Sequence
  Description of Artificial Sequence: Synthetic oligonucleotide
gagcggugcggaguugcga

SEQ ID NO: 1104315 - RNA, 19 nt, Artificial Sequence
  Description of Artificial Sequence: Synthetic oligonucleotide
gcauugcuaccaacaugag

SEQ ID NO: 1104316 - RNA, 19 nt, Artificial Sequence
  Description of Artificial Sequence: Synthetic oligonucleotide
ggagaccccuguagacgcg

SEQ ID NO: 1104317 - RNA, 19 nt, Artificial Sequence
  Description of Artificial Sequence: Synthetic oligonucleotide
gccauacugccggaagcgc

SEQ ID NO: 1104318 - RNA, 19 nt, Artificial Sequence
  Description of Artificial Sequence: Synthetic oligonucleotide
ggaucccggcgcgaugcgg

SEQ ID NO: 1104319 - RNA, 19 nt, Artificial Sequence
  Description of Artificial Sequence: Synthetic oligonucleotide
aucgcggggacggcgggaa

SEQ ID NO: 1104320 - RNA, 19 nt, Artificial Sequence
  Description of Artificial Sequence: Synthetic oligonucleotide
uggcgacccuggcacgcau

SEQ ID NO: 1104321 - RNA, 19 nt, Artificial Sequence
  Description of Artificial Sequence: Synthetic oligonucleotide
gaccccuguagacgcgaua

SEQ ID NO: 1104322 - RNA, 19 nt, Artificial Sequence
  Description of Artificial Sequence: Synthetic oligonucleotide
cgccagggcaccacguagg

SEQ ID NO: 1104323 - RNA, 19 nt, Artificial Sequence
  Description of Artificial Sequence: Synthetic oligonucleotide
ucggauggcguaggacauu

SEQ ID NO: 1104324 - RNA, 19 nt, Artificial Sequence
  Description of Artificial Sequence: Synthetic oligonucleotide
gguagaaggcgcaucggau

SEQ ID NO: 1104325 - RNA, 19 nt, Artificial Sequence
  Description of Artificial Sequence: Synthetic oligonucleotide
guccacggaucgcggggac

SEQ ID NO: 1104326 - RNA, 19 nt, Artificial Sequence
  Description of Artificial Sequence: Synthetic oligonucleotide
uaaucgccgcuggcaucca

SEQ ID NO: 1104327 - RNA, 19 nt, Artificial Sequence
  Description of Artificial Sequence: Synthetic oligonucleotide
gaccgcagcagggcaaacu

SEQ ID NO: 1104328 - RNA, 19 nt, Artificial Sequence
  Description of Artificial Sequence: Synthetic oligonucleotide
gcaggaccgcagcagggca

SEQ ID NO: 1104329 - RNA, 19 nt, Artificial Sequence
  Description of Artificial Sequence: Synthetic oligonucleotide
gcgacuuuaccugguccac

SEQ ID NO: 1104330 - RNA, 19 nt, Artificial Sequence
  Description of Artificial Sequence: Synthetic oligonucleotide
ccauaauagaaggggcgga

SEQ ID NO: 1104331 - RNA, 19 nt, Artificial Sequence
  Description of Artificial Sequence: Synthetic oligonucleotide
ggauggaacuucaaugcuu

SEQ ID NO: 1104332 - RNA, 19 nt, Artificial Sequence
  Description of Artificial Sequence: Synthetic oligonucleotide
guucaaggccacacagcua

SEQ ID NO: 1104333 - RNA, 19 nt, Artificial Sequence
  Description of Artificial Sequence: Synthetic oligonucleotide
guggccgcgaacacugaua

SEQ ID NO: 1104334 - RNA, 19 nt, Artificial Sequence
  Description of Artificial Sequence: Synthetic oligonucleotide
gggaucccggcgcgaugcg

SEQ ID NO: 1104335 - RNA, 19 nt, Artificial Sequence
  Description of Artificial Sequence: Synthetic oligonucleotide
cugggcgacccuggcuagc

SEQ ID NO: 1104336 - RNA, 19 nt, Artificial Sequence
  Description of Artificial Sequence: Synthetic oligonucleotide
cggaguugcgacuuuaccu

SEQ ID NO: 1104337 - RNA, 19 nt, Artificial Sequence
  Description of Artificial Sequence: Synthetic oligonucleotide
gcugggcgacccuggcuag

SEQ ID NO: 1104338 - RNA, 19 nt, Artificial Sequence
  Description of Artificial Sequence: Synthetic oligonucleotide
gguugacccagcgggagua

SEQ ID NO: 1104339 - RNA, 19 nt, Artificial Sequence
  Description of Artificial Sequence: Synthetic oligonucleotide
ccgccagggcaccacguag

SEQ ID NO: 1104340 - RNA, 19 nt, Artificial Sequence
  Description of Artificial Sequence: Synthetic oligonucleotide
cgacuuuaccugguccacg

SEQ ID NO: 1104341 - RNA, 19 nt, Artificial Sequence
  Description of Artificial Sequence: Synthetic oligonucleotide
ggggacggcgggaagaacu

SEQ ID NO: 1104342 - RNA, 19 nt, Artificial Sequence
  Description of Artificial Sequence: Synthetic oligonucleotide
acggcgggaagaacucgaa

SEQ ID NO: 1104343 - RNA, 19 nt, Artificial Sequence
  Description of Artificial Sequence: Synthetic oligonucleotide
cggaucgcggggacggcgg

SEQ ID NO: 1104344 - RNA, 19 nt, Artificial Sequence
  Description of Artificial Sequence: Synthetic oligonucleotide
cugccuccuuuuggggaug

SEQ ID NO: 1104345 - RNA, 19 nt, Artificial Sequence
  Description of Artificial Sequence: Synthetic oligonucleotide
ggggucgggcacagcagcc

SEQ ID NO: 1104346 - RNA, 19 nt, Artificial Sequence
  Description of Artificial Sequence: Synthetic oligonucleotide
gucgggcacagcagccuca

SEQ ID NO: 1104347 - RNA, 19 nt, Artificial Sequence
  Description of Artificial Sequence: Synthetic oligonucleotide
caccgcaagcccagauuua

SEQ ID NO: 1104348 - RNA, 19 nt, Artificial Sequence
  Description of Artificial Sequence: Synthetic oligonucleotide
ggcgguaaaggaucuuauu

SEQ ID NO: 1104349 - RNA, 19 nt, Artificial Sequence
  Description of Artificial Sequence: Synthetic oligonucleotide
gaguaguuggugggugcau

SEQ ID NO: 1104350 - RNA, 19 nt, Artificial Sequence
  Description of Artificial Sequence: Synthetic oligonucleotide
acgggguauuggaggcuca

SEQ ID NO: 1104351 - RNA, 19 nt, Artificial Sequence
  Description of Artificial Sequence: Synthetic oligonucleotide
cacggaucgcggggacggc

SEQ ID NO: 1104352 - RNA, 19 nt, Artificial Sequence
  Description of Artificial Sequence: Synthetic oligonucleotide
ccugccgagcgcagccgag

SEQ ID NO: 1104353 - RNA, 19 nt, Artificial Sequence
  Description of Artificial Sequence: Synthetic oligonucleotide
gagcugcacuaacucguuu

SEQ ID NO: 1104354 - RNA, 19 nt, Artificial Sequence
  Description of Artificial Sequence: Synthetic oligonucleotide
gcgaugcggggaccaccgg

SEQ ID NO: 1104355 - RNA, 19 nt, Artificial Sequence
  Description of Artificial Sequence: Synthetic oligonucleotide
gcuggcaugaguagcuaau

SEQ ID NO: 1104356 - RNA, 19 nt, Artificial Sequence
  Description of Artificial Sequence: Synthetic oligonucleotide
gguccacggaucgcgggga

SEQ ID NO: 1104357 - RNA, 19 nt, Artificial Sequence
  Description of Artificial Sequence: Synthetic oligonucleotide
ggauggcguaggacauuug

SEQ ID NO: 1104358 - RNA, 19 nt, Artificial Sequence
  Description of Artificial Sequence: Synthetic oligonucleotide
ccggagagcagcgacaggu

SEQ ID NO: 1104359 - RNA, 19 nt, Artificial Sequence
  Description of Artificial Sequence: Synthetic oligonucleotide
gcgcaucggauggcguagg

SEQ ID NO: 1104360 - RNA, 19 nt, Artificial Sequence
  Description of Artificial Sequence: Synthetic oligonucleotide
ccggcggauuucaaacgca

SEQ ID NO: 1104361 - RNA, 19 nt, Artificial Sequence
  Description of Artificial Sequence: Synthetic oligonucleotide
cgggaucccggcgcgaugc

SEQ ID NO: 1104362 - RNA, 19 nt, Artificial Sequence
  Description of Artificial Sequence: Synthetic oligonucleotide
caaggccacacagcuaguu

SEQ ID NO: 1104363 - RNA, 19 nt, Artificial Sequence
  Description of Artificial Sequence: Synthetic oligonucleotide
caccggccguagccucugc

SEQ ID NO: 1104364 - RNA, 19 nt, Artificial Sequence
  Description of Artificial Sequence: Synthetic oligonucleotide
gggcccggcggauuucaaa

SEQ ID NO: 1104365 - RNA, 19 nt, Artificial Sequence
  Description of Artificial Sequence: Synthetic oligonucleotide
ccgcgaacacugauacaga

SEQ ID NO: 1104366 - RNA, 19 nt, Artificial Sequence
  Description of Artificial Sequence: Synthetic oligonucleotide
ggcggacuucgcccaccug

SEQ ID NO: 1104367 - RNA, 19 nt, Artificial Sequence
  Description of Artificial Sequence: Synthetic oligonucleotide
ccucuguagaguggaggga

SEQ ID NO: 1104368 - RNA, 19 nt, Artificial Sequence
  Description of Artificial Sequence: Synthetic oligonucleotide
ggccgcgaacacugauaca

SEQ ID NO: 1104369 - RNA, 19 nt, Artificial Sequence
  Description of Artificial Sequence: Synthetic oligonucleotide
ggggcggacuucgcccacc

SEQ ID NO: 1104370 - RNA, 19 nt, Artificial Sequence
  Description of Artificial Sequence: Synthetic oligonucleotide
caggccuggcugauucgau

SEQ ID NO: 1104371 - RNA, 19 nt, Artificial Sequence
  Description of Artificial Sequence: Synthetic oligonucleotide
cgggguauuggaggcucag

SEQ ID NO: 1104372 - RNA, 19 nt, Artificial Sequence
  Description of Artificial Sequence: Synthetic oligonucleotide
ugacaucguugggguccau

SEQ ID NO: 1104373 - RNA, 19 nt, Artificial Sequence
  Description of Artificial Sequence: Synthetic oligonucleotide
ggacuucgcccaccugaua

SEQ ID NO: 1104374 - RNA, 19 nt, Artificial Sequence
  Description of Artificial Sequence: Synthetic oligonucleotide
cgauaaucgccgcuggcau

SEQ ID NO: 1104375 - RNA, 19 nt, Artificial Sequence
  Description of Artificial Sequence: Synthetic oligonucleotide
cgaaguuuacaggauguuu

SEQ ID NO: 1104376 - RNA, 19 nt, Artificial Sequence
  Description of Artificial Sequence: Synthetic oligonucleotide
ggaccaccggccguagccu

SEQ ID NO: 1104377 - RNA, 19 nt, Artificial Sequence
  Description of Artificial Sequence: Synthetic oligonucleotide
ggccagagcggugcggagu

SEQ ID NO: 1104378 - RNA, 19 nt, Artificial Sequence
  Description of Artificial Sequence: Synthetic oligonucleotide
cccucgcugggcaccaugu

SEQ ID NO: 1104379 - RNA, 19 nt, Artificial Sequence
  Description of Artificial Sequence: Synthetic oligonucleotide
gggcggacuucgcccaccu

SEQ ID NO: 1104380 - RNA, 19 nt, Artificial Sequence
  Description of Artificial Sequence: Synthetic oligonucleotide
ccgggaucccggcgcgaug

SEQ ID NO: 1104381 - RNA, 19 nt, Artificial Sequence
  Description of Artificial Sequence: Synthetic oligonucleotide
gggucgggcacagcagccu

SEQ ID NO: 1104382 - RNA, 19 nt, Artificial Sequence
  Description of Artificial Sequence: Synthetic oligonucleotide
cgcuggcauccagaacgcc

SEQ ID NO: 1104383 - RNA, 19 nt, Artificial Sequence
  Description of Artificial Sequence: Synthetic oligonucleotide
gcgggcccggcggauuuca

SEQ ID NO: 1104384 - RNA, 19 nt, Artificial Sequence
  Description of Artificial Sequence: Synthetic oligonucleotide
ccagagcggugcggaguug

SEQ ID NO: 1104385 - RNA, 19 nt, Artificial Sequence
  Description of Artificial Sequence: Synthetic oligonucleotide
ggugcggaguugcgacuuu

SEQ ID NO: 1104386 - RNA, 19 nt, Artificial Sequence
  Description of Artificial Sequence: Synthetic oligonucleotide
gcgacccuggcuagcuugu

SEQ ID NO: 1104387 - RNA, 19 nt, Artificial Sequence
  Description of Artificial Sequence: Synthetic oligonucleotide
cuccgggaucccggcgcga

SEQ ID NO: 1104388 - RNA, 19 nt, Artificial Sequence
  Description of Artificial Sequence: Synthetic oligonucleotide
cgcaucggauggcguagga

SEQ ID NO: 1104389 - RNA, 19 nt, Artificial Sequence
  Description of Artificial Sequence: Synthetic oligonucleotide
cccgccagggcaccacgua

SEQ ID NO: 1104390 - RNA, 19 nt, Artificial Sequence
  Description of Artificial Sequence: Synthetic oligonucleotide
cggcgggaagaacucgaaa

SEQ ID NO: 1104391 - RNA, 19 nt, Artificial Sequence
  Description of Artificial Sequence: Synthetic oligonucleotide
ccccauagucaaguccagu

SEQ ID NO: 1104392 - RNA, 19 nt, Artificial Sequence
  Description of Artificial Sequence: Synthetic oligonucleotide
ggcgggcccggcggauuuc

SEQ ID NO: 1104393 - RNA, 19 nt, Artificial Sequence
  Description of Artificial Sequence: Synthetic oligonucleotide
gcgcguaggccagcacugu

SEQ ID NO: 1104394 - RNA, 19 nt, Artificial Sequence
  Description of Artificial Sequence: Synthetic oligonucleotide
cggauggcguaggacauuu

SEQ ID NO: 1104395 - RNA, 19 nt, Artificial Sequence
  Description of Artificial Sequence: Synthetic oligonucleotide
ccccuguagacgcgauaau

SEQ ID NO: 1104396 - RNA, 19 nt, Artificial Sequence
  Description of Artificial Sequence: Synthetic oligonucleotide
cggggacggcgggaagaac

SEQ ID NO: 1104397 - RNA, 19 nt, Artificial Sequence
  Description of Artificial Sequence: Synthetic oligonucleotide
cagcaucgauggggagagu

SEQ ID NO: 1104398 - RNA, 19 nt, Artificial Sequence
  Description of Artificial Sequence: Synthetic oligonucleotide
gggcgacccuggcuagcuu

SEQ ID NO: 1104399 - RNA, 19 nt, Artificial Sequence
  Description of Artificial Sequence: Synthetic oligonucleotide
cggcgcgaugcggggacca

SEQ ID NO: 1104400 - RNA, 19 nt, Artificial Sequence
  Description of Artificial Sequence: Synthetic oligonucleotide
cggugcggaguugcgacuu

SEQ ID NO: 1104401 - RNA, 19 nt, Artificial Sequence
  Description of Artificial Sequence: Synthetic oligonucleotide
cggcgggcccggcggauuu

SEQ ID NO: 1104402 - RNA, 19 nt, Artificial Sequence
  Description of Artificial Sequence: Synthetic oligonucleotide
aauaaugaguuucucuucc

SEQ ID NO: 1104403 - RNA, 19 nt, Artificial Sequence
  Description of Artificial Sequence: Synthetic oligonucleotide
uuuaucaccacuuagguug

SEQ ID NO: 1104404 - RNA, 19 nt, Artificial Sequence
  Description of Artificial Sequence: Synthetic oligonucleotide
aacacaacuauggagacac

SEQ ID NO: 1104405 - RNA, 19 nt, Artificial Sequence
  Description of Artificial Sequence: Synthetic oligonucleotide
uacuacaugaugaugauga

SEQ ID NO: 1104406 - RNA, 19 nt, Artificial Sequence
  Description of Artificial Sequence: Synthetic oligonucleotide
auuaacagacaacacaggg

SEQ ID NO: 1104407 - RNA, 19 nt, Artificial Sequence
  Description of Artificial Sequence: Synthetic oligonucleotide
aaacuuccucuuuauaacc

SEQ ID NO: 1104408 - RNA, 19 nt, Artificial Sequence
  Description of Artificial Sequence: Synthetic oligonucleotide
uuagauaaugaacugcaag

SEQ ID NO: 1104409 - RNA, 19 nt, Artificial Sequence
  Description of Artificial Sequence: Synthetic oligonucleotide
cuaauuagguaguaaaggg

SEQ ID NO: 1104410 - RNA, 19 nt, Artificial Sequence
  Description of Artificial Sequence: Synthetic oligonucleotide
cuuagaaaggcaaaguccc

SEQ ID NO: 1104411 - RNA, 19 nt, Artificial Sequence
  Description of Artificial Sequence: Synthetic oligonucleotide
uacacaaccuuuuagagac

SEQ ID NO: 1104412 - RNA, 19 nt, Artificial Sequence
  Description of Artificial Sequence: Synthetic oligonucleotide
gucauuauaaacaagcugc

SEQ ID NO: 1104413 - RNA, 19 nt, Artificial Sequence
  Description of Artificial Sequence: Synthetic oligonucleotide
uauuguaaacaacacaacu

SEQ ID NO: 1104414 - RNA, 19 nt, Artificial Sequence
  Description of Artificial Sequence: Synthetic oligonucleotide
uuuacgaguaccuuguuga

SEQ ID NO: 1104415 - RNA, 19 nt, Artificial Sequence
  Description of Artificial Sequence: Synthetic oligonucleotide
ugaagcagucuacugaugg

SEQ ID NO: 1104416 - RNA, 19 nt, Artificial Sequence
  Description of Artificial Sequence: Synthetic oligonucleotide
ucuuagauaaugaacugca

SEQ ID NO: 1104417 - RNA, 19 nt, Artificial Sequence
  Description of Artificial Sequence: Synthetic oligonucleotide
uuugccuccagcuaauuag

SEQ ID NO: 1104418 - RNA, 19 nt, Artificial Sequence
  Description of Artificial Sequence: Synthetic oligonucleotide
auuauuuaguguguaagcg

SEQ ID NO: 1104419 - RNA, 19 nt, Artificial Sequence
  Description of Artificial Sequence: Synthetic oligonucleotide
uuuuauaauuugaggaggc

SEQ ID NO: 1104420 - RNA, 19 nt, Artificial Sequence
  Description of Artificial Sequence: Synthetic oligonucleotide
aaaucugaguuccuguaag

SEQ ID NO: 1104421 - RNA, 19 nt, Artificial Sequence
  Description of Artificial Sequence: Synthetic oligonucleotide
ucuuguuuauugaaaaugu

SEQ ID NO: 1104422 - RNA, 19 nt, Artificial Sequence
  Description of Artificial Sequence: Synthetic oligonucleotide
uauuauuuaguguguaagc

SEQ ID NO: 1104423 - RNA, 19 nt, Artificial Sequence
  Description of Artificial Sequence: Synthetic oligonucleotide
aaucuuuacgaguaccuug

SEQ ID NO: 1104424 - RNA, 19 nt, Artificial Sequence
  Description of Artificial Sequence: Synthetic oligonucleotide
gagaccuaagcacagacag

SEQ ID NO: 1104425 - RNA, 19 nt, Artificial Sequence
  Description of Artificial Sequence: Synthetic oligonucleotide
acugccuuuaaauguauac

SEQ ID NO: 1104426 - RNA, 19 nt, Artificial Sequence
  Description of Artificial Sequence: Synthetic oligonucleotide
uaaacaguaucaacaaggc

SEQ ID NO: 1104427 - RNA, 19 nt, Artificial Sequence
  Description of Artificial Sequence: Synthetic oligonucleotide
uguaagaagggacaugaca

SEQ ID NO: 1104428 - RNA, 19 nt, Artificial Sequence
  Description of Artificial Sequence: Synthetic oligonucleotide
acaaguaucagucaaccga

SEQ ID NO: 1104429 - RNA, 19 nt, Artificial Sequence
  Description of Artificial Sequence: Synthetic oligonucleotide
ugucauuauaaacaagcug

SEQ ID NO: 1104430 - RNA, 19 nt, Artificial Sequence
  Description of Artificial Sequence: Synthetic oligonucleotide
uauuuaguguguaagcgca

SEQ ID NO: 1104431 - RNA, 19 nt, Artificial Sequence
  Description of Artificial Sequence: Synthetic oligonucleotide
cauagcaaaguauuggggc

SEQ ID NO: 1104432 - RNA, 19 nt, Artificial Sequence
  Description of Artificial Sequence: Synthetic oligonucleotide
uuaacagacaacacagggc

SEQ ID NO: 1104433 - RNA, 19 nt, Artificial Sequence
  Description of Artificial Sequence: Synthetic oligonucleotide
uucaauaucccaaguacca

SEQ ID NO: 1104434 - RNA, 19 nt, Artificial Sequence
  Description of Artificial Sequence: Synthetic oligonucleotide
accuuuuagagaccuaagc

SEQ ID NO: 1104435 - RNA, 19 nt, Artificial Sequence
  Description of Artificial Sequence: Synthetic oligonucleotide
aaaauuggcgcuugugcag

SEQ ID NO: 1104436 - RNA, 19 nt, Artificial Sequence
  Description of Artificial Sequence: Synthetic oligonucleotide
auaaacaagcugcucugcc

SEQ ID NO: 1104437 - RNA, 19 nt, Artificial Sequence
  Description of Artificial Sequence: Synthetic oligonucleotide
uuugaggaggcuccaaggg

SEQ ID NO: 1104438 - RNA, 19 nt, Artificial Sequence
  Description of Artificial Sequence: Synthetic oligonucleotide
cucaagcaaacaaaggugg

SEQ ID NO: 1104439 - RNA, 19 nt, Artificial Sequence
  Description of Artificial Sequence: Synthetic oligonucleotide
ugcuuaugggagaauaggg

SEQ ID NO: 1104440 - RNA, 19 nt, Artificial Sequence
  Description of Artificial Sequence: Synthetic oligonucleotide
uugguauuaacagacaaca

SEQ ID NO: 1104441 - RNA, 19 nt, Artificial Sequence
  Description of Artificial Sequence: Synthetic oligonucleotide
uuuaauuacagaguauugu

SEQ ID NO: 1104442 - RNA, 19 nt, Artificial Sequence
  Description of Artificial Sequence: Synthetic oligonucleotide
aagaagauugaguacuaca

SEQ ID NO: 1104443 - RNA, 19 nt, Artificial Sequence
  Description of Artificial Sequence: Synthetic oligonucleotide
uuauuuaguguguaagcgc

SEQ ID NO: 1104444 - RNA, 19 nt, Artificial Sequence
  Description of Artificial Sequence: Synthetic oligonucleotide
aauuagguaguaaagggcu

SEQ ID NO: 1104445 - RNA, 19 nt, Artificial Sequence
  Description of Artificial Sequence: Synthetic oligonucleotide
uguacacaaccuuuuagag

SEQ ID NO: 1104446 - RNA, 19 nt, Artificial Sequence
  Description of Artificial Sequence: Synthetic oligonucleotide
ugugaauuagcuuugccuc

SEQ ID NO: 1104447 - RNA, 19 nt, Artificial Sequence
  Description of Artificial Sequence: Synthetic oligonucleotide
aauuugaggaggcuccaag

SEQ ID NO: 1104448 - RNA, 19 nt, Artificial Sequence
  Description of Artificial Sequence: Synthetic oligonucleotide
uuguaaacaacacaacuau

SEQ ID NO: 1104449 - RNA, 19 nt, Artificial Sequence
  Description of Artificial Sequence: Synthetic oligonucleotide
caaguuuagaaaaucugag

SEQ ID NO: 1104450 - RNA, 19 nt, Artificial Sequence
  Description of Artificial Sequence: Synthetic oligonucleotide
guaacugugggacagaauc

SEQ ID NO: 1104451 - RNA, 19 nt, Artificial Sequence
  Description of Artificial Sequence: Synthetic oligonucleotide
uaucagucaaccgauagcc

SEQ ID NO: 1104452 - RNA, 19 nt, Artificial Sequence
  Description of Artificial Sequence: Synthetic oligonucleotide
aguauuguaaacaacacaa

SEQ ID NO: 1104453 - RNA, 19 nt, Artificial Sequence
  Description of Artificial Sequence: Synthetic oligonucleotide
acuacuuacaaagucaaug

SEQ ID NO: 1104454 - RNA, 19 nt, Artificial Sequence
  Description of Artificial Sequence: Synthetic oligonucleotide
aacaaguaucagucaaccg

SEQ ID NO: 1104455 - RNA, 19 nt, Artificial Sequence
  Description of Artificial Sequence: Synthetic oligonucleotide
auuggggccauuuuaucac

SEQ ID NO: 1104456 - RNA, 19 nt, Artificial Sequence
  Description of Artificial Sequence: Synthetic oligonucleotide
ucuaaucacguauucuucc

SEQ ID NO: 1104457 - RNA, 19 nt, Artificial Sequence
  Description of Artificial Sequence: Synthetic oligonucleotide
aaaucauucagcuggccau

SEQ ID NO: 1104458 - RNA, 19 nt, Artificial Sequence
  Description of Artificial Sequence: Synthetic oligonucleotide
uauuaacagacaacacagg

SEQ ID NO: 1104459 - RNA, 19 nt, Artificial Sequence
  Description of Artificial Sequence: Synthetic oligonucleotide
aauuagcuuugccuccagc

SEQ ID NO: 1104460 - RNA, 19 nt, Artificial Sequence
  Description of Artificial Sequence: Synthetic oligonucleotide
uguuguuucaucuacucua

SEQ ID NO: 1104461 - RNA, 19 nt, Artificial Sequence
  Description of Artificial Sequence: Synthetic oligonucleotide
ugaacacucaagcaaacaa

SEQ ID NO: 1104462 - RNA, 19 nt, Artificial Sequence
  Description of Artificial Sequence: Synthetic oligonucleotide
cagcaguuuaauuacagag

SEQ ID NO: 1104463 - RNA, 19 nt, Artificial Sequence
  Description of Artificial Sequence: Synthetic oligonucleotide
cuuuauaaccuagagcugc

SEQ ID NO: 1104464 - RNA, 19 nt, Artificial Sequence
  Description of Artificial Sequence: Synthetic oligonucleotide
gguuuuauaauuugaggag

SEQ ID NO: 1104465 - RNA, 19 nt, Artificial Sequence
  Description of Artificial Sequence: Synthetic oligonucleotide
gacacaugugaacaucugg

SEQ ID NO: 1104466 - RNA, 19 nt, Artificial Sequence
  Description of Artificial Sequence: Synthetic oligonucleotide
acgguuuuauaauuugagg

SEQ ID NO: 1104467 - RNA, 19 nt, Artificial Sequence
  Description of Artificial Sequence: Synthetic oligonucleotide
uguuucaucuacucuagac

SEQ ID NO: 1104468 - RNA, 19 nt, Artificial Sequence
  Description of Artificial Sequence: Synthetic oligonucleotide
uaaauguauaccagcacaa

SEQ ID NO: 1104469 - RNA, 19 nt, Artificial Sequence
  Description of Artificial Sequence: Synthetic oligonucleotide
cuucaauaucccaaguacc

SEQ ID NO: 1104470 - RNA, 19 nt, Artificial Sequence
  Description of Artificial Sequence: Synthetic oligonucleotide
ucaagcaaacaaagguggg

SEQ ID NO: 1104471 - RNA, 19 nt, Artificial Sequence
  Description of Artificial Sequence: Synthetic oligonucleotide
aaucacguauucuuccuca

SEQ ID NO: 1104472 - RNA, 19 nt, Artificial Sequence
  Description of Artificial Sequence: Synthetic oligonucleotide
acagucaaaucauucagcu

SEQ ID NO: 1104473 - RNA, 19 nt, Artificial Sequence
  Description of Artificial Sequence: Synthetic oligonucleotide
uaauuacagaguauuguaa

SEQ ID NO: 1104474 - RNA, 19 nt, Artificial Sequence
  Description of Artificial Sequence: Synthetic oligonucleotide
gguaguaaagggcuguugg

SEQ ID NO: 1104475 - RNA, 19 nt, Artificial Sequence
  Description of Artificial Sequence: Synthetic oligonucleotide
aagcagucuacugauggac

SEQ ID NO: 1104476 - RNA, 19 nt, Artificial Sequence
  Description of Artificial Sequence: Synthetic oligonucleotide
augucuuagauaaugaacu

SEQ ID NO: 1104477 - RNA, 19 nt, Artificial Sequence
  Description of Artificial Sequence: Synthetic oligonucleotide
gaaaauuggcgcuugugca

SEQ ID NO: 1104478 - RNA, 19 nt, Artificial Sequence
  Description of Artificial Sequence: Synthetic oligonucleotide
acaguuggaguuccuacac

SEQ ID NO: 1104479 - RNA, 19 nt, Artificial Sequence
  Description of Artificial Sequence: Synthetic oligonucleotide
uauaaccuagagcugcuga

SEQ ID NO: 1104480 - RNA, 19 nt, Artificial Sequence
  Description of Artificial Sequence: Synthetic oligonucleotide
ucaaccgauagccaaguaa

SEQ ID NO: 1104481 - RNA, 19 nt, Artificial Sequence
  Description of Artificial Sequence: Synthetic oligonucleotide
aaggcucuuuucuucaaug

SEQ ID NO: 1104482 - RNA, 19 nt, Artificial Sequence
  Description of Artificial Sequence: Synthetic oligonucleotide
acaaugaugcuuaugggag

SEQ ID NO: 1104483 - RNA, 19 nt, Artificial Sequence
  Description of Artificial Sequence: Synthetic oligonucleotide
agauaaugaacugcaagag

SEQ ID NO: 1104484 - RNA, 19 nt, Artificial Sequence
  Description of Artificial Sequence: Synthetic oligonucleotide
cauccuucaaggcauaaac

SEQ ID NO: 1104485 - RNA, 19 nt, Artificial Sequence
  Description of Artificial Sequence: Synthetic oligonucleotide
ucguaggcaaccuaaacuc

SEQ ID NO: 1104486 - RNA, 19 nt, Artificial Sequence
  Description of Artificial Sequence: Synthetic oligonucleotide
aaacaguaucaacaaggcu

SEQ ID NO: 1104487 - RNA, 19 nt, Artificial Sequence
  Description of Artificial Sequence: Synthetic oligonucleotide
uuuaguguguaagcgcagg

SEQ ID NO: 1104488 - RNA, 19 nt, Artificial Sequence
  Description of Artificial Sequence: Synthetic oligonucleotide
ugaaucugcuuccucgcag

SEQ ID NO: 1104489 - RNA, 19 nt, Artificial Sequence
  Description of Artificial Sequence: Synthetic oligonucleotide
cacgguuuuauaauuugag

SEQ ID NO: 1104490 - RNA, 19 nt, Artificial Sequence
  Description of Artificial Sequence: Synthetic oligonucleotide
aagggaauaagggcauuac

SEQ ID NO: 1104491 - RNA, 19 nt, Artificial Sequence
  Description of Artificial Sequence: Synthetic oligonucleotide
uucauauuucugaacuacu

SEQ ID NO: 1104492 - RNA, 19 nt, Artificial Sequence
  Description of Artificial Sequence: Synthetic oligonucleotide
agggacaugacaaacaaga

SEQ ID NO: 1104493 - RNA, 19 nt, Artificial Sequence
  Description of Artificial Sequence: Synthetic oligonucleotide
ugucuacugaaucugcuuc

SEQ ID NO: 1104494 - RNA, 19 nt, Artificial Sequence
  Description of Artificial Sequence: Synthetic oligonucleotide
aaugaacacucaagcaaac

SEQ ID NO: 1104495 - RNA, 19 nt, Artificial Sequence
  Description of Artificial Sequence: Synthetic oligonucleotide
aguaccuuguugaaaauug

SEQ ID NO: 1104496 - RNA, 19 nt, Artificial Sequence
  Description of Artificial Sequence: Synthetic oligonucleotide
ugaagaaacuuccucuuua

SEQ ID NO: 1104497 - RNA, 19 nt, Artificial Sequence
  Description of Artificial Sequence: Synthetic oligonucleotide
accacuuagguuguuuccc

SEQ ID NO: 1104498 - RNA, 19 nt, Artificial Sequence
  Description of Artificial Sequence: Synthetic oligonucleotide
guaguaaagggcuguuggg

SEQ ID NO: 1104499 - RNA, 19 nt, Artificial Sequence
  Description of Artificial Sequence: Synthetic oligonucleotide
guacacacuguucuucugg

SEQ ID NO: 1104500 - RNA, 19 nt, Artificial Sequence
  Description of Artificial Sequence: Synthetic oligonucleotide
acacaugugaacaucuggg

SEQ ID NO: 1104501 - RNA, 19 nt, Artificial Sequence
  Description of Artificial Sequence: Synthetic oligonucleotide
uuauaauuugaggaggcuc

SEQ ID NO: 1104502 - RNA, 19 nt, Artificial Sequence
  Description of Artificial Sequence: Synthetic oligonucleotide
ugucuuagauaaugaacug

SEQ ID NO: 1104503 - RNA, 19 nt, Artificial Sequence
  Description of Artificial Sequence: Synthetic oligonucleotide
caagcuucaauaucccaag

SEQ ID NO: 1104504 - RNA, 19 nt, Artificial Sequence
  Description of Artificial Sequence: Synthetic oligonucleotide
aaacuccacgguuuuauaa

SEQ ID NO: 1104505 - RNA, 19 nt, Artificial Sequence
  Description of Artificial Sequence: Synthetic oligonucleotide
aacuccacgguuuuauaau

SEQ ID NO: 1104506 - RNA, 19 nt, Artificial Sequence
  Description of Artificial Sequence: Synthetic oligonucleotide
auggucuaaguggaggugc

SEQ ID NO: 1104507 - RNA, 19 nt, Artificial Sequence
  Description of Artificial Sequence: Synthetic oligonucleotide
ucuggguuacuacuguugu

SEQ ID NO: 1104508 - RNA, 19 nt, Artificial Sequence
  Description of Artificial Sequence: Synthetic oligonucleotide
ucuuuauaaccuagagcug

SEQ ID NO: 1104509 - RNA, 19 nt, Artificial Sequence
  Description of Artificial Sequence: Synthetic oligonucleotide
ucuagacacagccugugaa

SEQ ID NO: 1104510 - RNA, 19 nt, Artificial Sequence
  Description of Artificial Sequence: Synthetic oligonucleotide
gcuaaaagaagauugagua

SEQ ID NO: 1104511 - RNA, 19 nt, Artificial Sequence
  Description of Artificial Sequence: Synthetic oligonucleotide
accuuguugaaaauuggcg

SEQ ID NO: 1104512 - RNA, 19 nt, Artificial Sequence
  Description of Artificial Sequence: Synthetic oligonucleotide
uuuauaaccuagagcugcu

SEQ ID NO: 1104513 - RNA, 19 nt, Artificial Sequence
  Description of Artificial Sequence: Synthetic oligonucleotide
cuggauucagcucgaaugc

SEQ ID NO: 1104514 - RNA, 19 nt, Artificial Sequence
  Description of Artificial Sequence: Synthetic oligonucleotide
uugccuccagcuaauuagg

SEQ ID NO: 1104515 - RNA, 19 nt, Artificial Sequence
  Description of Artificial Sequence: Synthetic oligonucleotide
aaguauuggggccauuuua

SEQ ID NO: 1104516 - RNA, 19 nt, Artificial Sequence
  Description of Artificial Sequence: Synthetic oligonucleotide
uacuuacaaagucaauggu

SEQ ID NO: 1104517 - RNA, 19 nt, Artificial Sequence
  Description of Artificial Sequence: Synthetic oligonucleotide
uuuucuaaucacguauucu

SEQ ID NO: 1104518 - RNA, 19 nt, Artificial Sequence
  Description of Artificial Sequence: Synthetic oligonucleotide
agccaaguaaugaacacuc

SEQ ID NO: 1104519 - RNA, 19 nt, Artificial Sequence
  Description of Artificial Sequence: Synthetic oligonucleotide
uuaguguguaagcgcaggc

SEQ ID NO: 1104520 - RNA, 19 nt, Artificial Sequence
  Description of Artificial Sequence: Synthetic oligonucleotide
ucgucuguuugcuucaaca

SEQ ID NO: 1104521 - RNA, 19 nt, Artificial Sequence
  Description of Artificial Sequence: Synthetic oligonucleotide
cugaaaggccucuaagggc

SEQ ID NO: 1104522 - RNA, 19 nt, Artificial Sequence
  Description of Artificial Sequence: Synthetic oligonucleotide
cugaacuacuuacaaaguc

SEQ ID NO: 1104523 - RNA, 19 nt, Artificial Sequence
  Description of Artificial Sequence: Synthetic oligonucleotide
cuuguuuauugaaaauguc

SEQ ID NO: 1104524 - RNA, 19 nt, Artificial Sequence
  Description of Artificial Sequence: Synthetic oligonucleotide
acgaguaccuuguugaaaa

SEQ ID NO: 1104525 - RNA, 19 nt, Artificial Sequence
  Description of Artificial Sequence: Synthetic oligonucleotide
ucagucaaccgauagccaa

SEQ ID NO: 1104526 - RNA, 19 nt, Artificial Sequence
  Description of Artificial Sequence: Synthetic oligonucleotide
uagagaccuaagcacagac

SEQ ID NO: 1104527 - RNA, 19 nt, Artificial Sequence
  Description of Artificial Sequence: Synthetic oligonucleotide
ucuacucuagacacagccu

SEQ ID NO: 1104528 - RNA, 19 nt, Artificial Sequence
  Description of Artificial Sequence: Synthetic oligonucleotide
uucagcucgaaugcauucg

SEQ ID NO: 1104529 - RNA, 19 nt, Artificial Sequence
  Description of Artificial Sequence: Synthetic oligonucleotide
uucuaaucacguauucuuc

SEQ ID NO: 1104530 - RNA, 19 nt, Artificial Sequence
  Description of Artificial Sequence: Synthetic oligonucleotide
augcuuaugggagaauagg

SEQ ID NO: 1104531 - RNA, 19 nt, Artificial Sequence
  Description of Artificial Sequence: Synthetic oligonucleotide
cacaacuauggagacacgg

SEQ ID NO: 1104532 - RNA, 19 nt, Artificial Sequence
  Description of Artificial Sequence: Synthetic oligonucleotide
uaguaaagggcuguugggc

SEQ ID NO: 1104533 - RNA, 19 nt, Artificial Sequence
  Description of Artificial Sequence: Synthetic oligonucleotide
uucgaucaccuuaaggauc

SEQ ID NO: 1104534 - RNA, 19 nt, Artificial Sequence
  Description of Artificial Sequence: Synthetic oligonucleotide
guaagaagggacaugacaa

SEQ ID NO: 1104535 - RNA, 19 nt, Artificial Sequence
  Description of Artificial Sequence: Synthetic oligonucleotide
uguaagcgcaggcagccca

SEQ ID NO: 1104536 - RNA, 19 nt, Artificial Sequence
  Description of Artificial Sequence: Synthetic oligonucleotide
guaucagucaaccgauagc

SEQ ID NO: 1104537 - RNA, 19 nt, Artificial Sequence
  Description of Artificial Sequence: Synthetic oligonucleotide
auuguaaacaacacaacua

SEQ ID NO: 1104538 - RNA, 19 nt, Artificial Sequence
  Description of Artificial Sequence: Synthetic oligonucleotide
ccuuguugaaaauuggcgc

SEQ ID NO: 1104539 - RNA, 19 nt, Artificial Sequence
  Description of Artificial Sequence: Synthetic oligonucleotide
acucaagcaaacaaaggug

SEQ ID NO: 1104540 - RNA, 19 nt, Artificial Sequence
  Description of Artificial Sequence: Synthetic oligonucleotide
uguuucuuguacacacugu

SEQ ID NO: 1104541 - RNA, 19 nt, Artificial Sequence
  Description of Artificial Sequence: Synthetic oligonucleotide
agaagauugaguacuacau

SEQ ID NO: 1104542 - RNA, 19 nt, Artificial Sequence
  Description of Artificial Sequence: Synthetic oligonucleotide
gcuucaauaucccaaguac

SEQ ID NO: 1104543 - RNA, 19 nt, Artificial Sequence
  Description of Artificial Sequence: Synthetic oligonucleotide
uuccccuauuaaaacaagu

SEQ ID NO: 1104544 - RNA, 19 nt, Artificial Sequence
  Description of Artificial Sequence: Synthetic oligonucleotide
guuggguuaacauggcuuc

SEQ ID NO: 1104545 - RNA, 19 nt, Artificial Sequence
  Description of Artificial Sequence: Synthetic oligonucleotide
cuauuaaaacaaguaucag

SEQ ID NO: 1104546 - RNA, 19 nt, Artificial Sequence
  Description of Artificial Sequence: Synthetic oligonucleotide
gucuguuugcuucaacagc

SEQ ID NO: 1104547 - RNA, 19 nt, Artificial Sequence
  Description of Artificial Sequence: Synthetic oligonucleotide
ugcauauguacacaaccuu

SEQ ID NO: 1104548 - RNA, 19 nt, Artificial Sequence
  Description of Artificial Sequence: Synthetic oligonucleotide
uuuauaauuugaggaggcu

SEQ ID NO: 1104549 - RNA, 19 nt, Artificial Sequence
  Description of Artificial Sequence: Synthetic oligonucleotide
cuuuacgaguaccuuguug

SEQ ID NO: 1104550 - RNA, 19 nt, Artificial Sequence
  Description of Artificial Sequence: Synthetic oligonucleotide
agcucgaaugcauucgucu

SEQ ID NO: 1104551 - RNA, 19 nt, Artificial Sequence
  Description of Artificial Sequence: Synthetic oligonucleotide
ugggcauagcaaaguauug

SEQ ID NO: 1104552 - RNA, 19 nt, Artificial Sequence
  Description of Artificial Sequence: Synthetic oligonucleotide
gaccuaagcacagacagga

SEQ ID NO: 1104553 - RNA, 19 nt, Artificial Sequence
  Description of Artificial Sequence: Synthetic oligonucleotide
agcuaauuagguaguaaag

SEQ ID NO: 1104554 - RNA, 19 nt, Artificial Sequence
  Description of Artificial Sequence: Synthetic oligonucleotide
aaugauggucugcccguug

SEQ ID NO: 1104555 - RNA, 19 nt, Artificial Sequence
  Description of Artificial Sequence: Synthetic oligonucleotide
ugguauuaacagacaacac

SEQ ID NO: 1104556 - RNA, 19 nt, Artificial Sequence
  Description of Artificial Sequence: Synthetic oligonucleotide
cuacuguuguuucuuguac

SEQ ID NO: 1104557 - RNA, 19 nt, Artificial Sequence
  Description of Artificial Sequence: Synthetic oligonucleotide
aaaguauuggggccauuuu

SEQ ID NO: 1104558 - RNA, 19 nt, Artificial Sequence
  Description of Artificial Sequence: Synthetic oligonucleotide
aauaucccaaguaccaaaa

SEQ ID NO: 1104559 - RNA, 19 nt, Artificial Sequence
  Description of Artificial Sequence: Synthetic oligonucleotide
auaagggcauuacacugcu

SEQ ID NO: 1104560 - RNA, 19 nt, Artificial Sequence
  Description of Artificial Sequence: Synthetic oligonucleotide
uuggcgcuugugcaguagg

SEQ ID NO: 1104561 - RNA, 19 nt, Artificial Sequence
  Description of Artificial Sequence: Synthetic oligonucleotide
uaggcuucgaucaccuuaa

SEQ ID NO: 1104562 - RNA, 19 nt, Artificial Sequence
  Description of Artificial Sequence: Synthetic oligonucleotide
aaggcauaaacaguaucaa

SEQ ID NO: 1104563 - RNA, 19 nt, Artificial Sequence
  Description of Artificial Sequence: Synthetic oligonucleotide
uugaaaauuggcgcuugug

SEQ ID NO: 1104564 - RNA, 19 nt, Artificial Sequence
  Description of Artificial Sequence: Synthetic oligonucleotide
acagaguauuguaaacaac

SEQ ID NO: 1104565 - RNA, 19 nt, Artificial Sequence
  Description of Artificial Sequence: Synthetic oligonucleotide
ggcaaccuaaacuccacgg

SEQ ID NO: 1104566 - RNA, 19 nt, Artificial Sequence
  Description of Artificial Sequence: Synthetic oligonucleotide
uuccucgcaguucauauuu

SEQ ID NO: 1104567 - RNA, 19 nt, Artificial Sequence
  Description of Artificial Sequence: Synthetic oligonucleotide
agcaaacaaagguggggag

SEQ ID NO: 1104568 - RNA, 19 nt, Artificial Sequence
  Description of Artificial Sequence: Synthetic oligonucleotide
caugagacagcccagggaa

SEQ ID NO: 1104569 - RNA, 19 nt, Artificial Sequence
  Description of Artificial Sequence: Synthetic oligonucleotide
uugguguggacaguuggag

SEQ ID NO: 1104570 - RNA, 19 nt, Artificial Sequence
  Description of Artificial Sequence: Synthetic oligonucleotide
agcuaaaagaagauugagu

SEQ ID NO: 1104571 - RNA, 19 nt, Artificial Sequence
  Description of Artificial Sequence: Synthetic oligonucleotide
cccuauuaaaacaaguauc

SEQ ID NO: 1104572 - RNA, 19 nt, Artificial Sequence
  Description of Artificial Sequence: Synthetic oligonucleotide
agaaucuuuacgaguaccu

SEQ ID NO: 1104573 - RNA, 19 nt, Artificial Sequence
  Description of Artificial Sequence: Synthetic oligonucleotide
ggaguaguaacugugggac

SEQ ID NO: 1104574 - RNA, 19 nt, Artificial Sequence
  Description of Artificial Sequence: Synthetic oligonucleotide
uuacuacuguuguuucuug

SEQ ID NO: 1104575 - RNA, 19 nt, Artificial Sequence
  Description of Artificial Sequence: Synthetic oligonucleotide
aaauguauaccagcacaaa

SEQ ID NO: 1104576 - RNA, 19 nt, Artificial Sequence
  Description of Artificial Sequence: Synthetic oligonucleotide
ucagcucgaaugcauucgu

SEQ ID NO: 1104577 - RNA, 19 nt, Artificial Sequence
  Description of Artificial Sequence: Synthetic oligonucleotide
guaccuuguugaaaauugg

SEQ ID NO: 1104578 - RNA, 19 nt, Artificial Sequence
  Description of Artificial Sequence: Synthetic oligonucleotide
guacacaaccuuuuagaga

SEQ ID NO: 1104579 - RNA, 19 nt, Artificial Sequence
  Description of Artificial Sequence: Synthetic oligonucleotide
aaauuggcgcuugugcagu

SEQ ID NO: 1104580 - RNA, 19 nt, Artificial Sequence
  Description of Artificial Sequence: Synthetic oligonucleotide
uguugggcauagcaaagua

SEQ ID NO: 1104581 - RNA, 19 nt, Artificial Sequence
  Description of Artificial Sequence: Synthetic oligonucleotide
ugaauuagcuuugccucca

SEQ ID NO: 1104582 - RNA, 19 nt, Artificial Sequence
  Description of Artificial Sequence: Synthetic oligonucleotide
gucuaaguggaggugcagg

SEQ ID NO: 1104583 - RNA, 19 nt, Artificial Sequence
  Description of Artificial Sequence: Synthetic oligonucleotide
uaugggagaauaggggacu

SEQ ID NO: 1104584 - RNA, 19 nt, Artificial Sequence
  Description of Artificial Sequence: Synthetic oligonucleotide
agggaauaagggcauuaca

SEQ ID NO: 1104585 - RNA, 19 nt, Artificial Sequence
  Description of Artificial Sequence: Synthetic oligonucleotide
uauggagacacggcuguug

SEQ ID NO: 1104586 - RNA, 19 nt, Artificial Sequence
  Description of Artificial Sequence: Synthetic oligonucleotide
  modified_base (14)..(14): a, c, u, g, unknown or other
ggucagucuguucngcugc

SEQ ID NO: 1104587 - RNA, 19 nt, Artificial Sequence
  Description of Artificial Sequence: Synthetic oligonucleotide
uggguuacuacuguuguuu

SEQ ID NO: 1104588 - RNA, 19 nt, Artificial Sequence
  Description of Artificial Sequence: Synthetic oligonucleotide
caugugaacaucuggguua

SEQ ID NO: 1104589 - RNA, 19 nt, Artificial Sequence
  Description of Artificial Sequence: Synthetic oligonucleotide
acaagcuucaauaucccaa

SEQ ID NO: 1104590 - RNA, 19 nt, Artificial Sequence
  Description of Artificial Sequence: Synthetic oligonucleotide
uuaucaccacuuagguugu

SEQ ID NO: 1104591 - RNA, 19 nt, Artificial Sequence
  Description of Artificial Sequence: Synthetic oligonucleotide
uguugaaaauuggcgcuug

SEQ ID NO: 1104592 - RNA, 19 nt, Artificial Sequence
  Description of Artificial Sequence: Synthetic oligonucleotide
ugaugcuuaugggagaaua

SEQ ID NO: 1104593 - RNA, 19 nt, Artificial Sequence
  Description of Artificial Sequence: Synthetic oligonucleotide
aaccuuuuagagaccuaag

SEQ ID NO: 1104594 - RNA, 19 nt, Artificial Sequence
  Description of Artificial Sequence: Synthetic oligonucleotide
ucaccacuuagguuguuuc

SEQ ID NO: 1104595 - RNA, 19 nt, Artificial Sequence
  Description of Artificial Sequence: Synthetic oligonucleotide
gcacagucaaaucauucag

SEQ ID NO: 1104596 - RNA, 19 nt, Artificial Sequence
  Description of Artificial Sequence: Synthetic oligonucleotide
aucuuuacgaguaccuugu

SEQ ID NO: 1104597 - RNA, 19 nt, Artificial Sequence
  Description of Artificial Sequence: Synthetic oligonucleotide
agcuucaauaucccaagua

SEQ ID NO: 1104598 - RNA, 19 nt, Artificial Sequence
  Description of Artificial Sequence: Synthetic oligonucleotide
accgauagccaaguaauga

SEQ ID NO: 1104599 - RNA, 19 nt, Artificial Sequence
  Description of Artificial Sequence: Synthetic oligonucleotide
uagccaaguaaugaacacu

SEQ ID NO: 1104600 - RNA, 19 nt, Artificial Sequence
  Description of Artificial Sequence: Synthetic oligonucleotide
  modified_base (15)..(15): a, c, u, g, unknown or other
uggucagucuguucngcug

SEQ ID NO: 1104601 - RNA, 19 nt, Artificial Sequence
  Description of Artificial Sequence: Synthetic oligonucleotide
ggagacagaucccaaacca

SEQ ID NO: 1104602 - RNA, 19 nt, Artificial Sequence
  Description of Artificial Sequence: Synthetic oligonucleotide
acugcucuugguauuaaca

SEQ ID NO: 1104603 - RNA, 19 nt, Artificial Sequence
  Description of Artificial Sequence: Synthetic oligonucleotide
gaacacucaagcaaacaaa

SEQ ID NO: 1104604 - RNA, 19 nt, Artificial Sequence
  Description of Artificial Sequence: Synthetic oligonucleotide
cagucaaccgauagccaag

SEQ ID NO: 1104605 - RNA, 19 nt, Artificial Sequence
  Description of Artificial Sequence: Synthetic oligonucleotide
gaagcagucuacugaugga

SEQ ID NO: 1104606 - RNA, 19 nt, Artificial Sequence
  Description of Artificial Sequence: Synthetic oligonucleotide
caccacuuagguuguuucc

SEQ ID NO: 1104607 - RNA, 19 nt, Artificial Sequence
  Description of Artificial Sequence: Synthetic oligonucleotide
aguauuggggccauuuuau

SEQ ID NO: 1104608 - RNA, 19 nt, Artificial Sequence
  Description of Artificial Sequence: Synthetic oligonucleotide
aaaagaagauugaguacua

SEQ ID NO: 1104609 - RNA, 19 nt, Artificial Sequence
  Description of Artificial Sequence: Synthetic oligonucleotide
uccucgacuucaauucuuc

SEQ ID NO: 1104610 - RNA, 19 nt, Artificial Sequence
  Description of Artificial Sequence: Synthetic oligonucleotide
cucgcaguucauauuucug

SEQ ID NO: 1104611 - RNA, 19 nt, Artificial Sequence
  Description of Artificial Sequence: Synthetic oligonucleotide
uggucuaaguggaggugca

SEQ ID NO: 1104612 - RNA, 19 nt, Artificial Sequence
  Description of Artificial Sequence: Synthetic oligonucleotide
gggacagaaucuuuacgag

SEQ ID NO: 1104613 - RNA, 19 nt, Artificial Sequence
  Description of Artificial Sequence: Synthetic oligonucleotide
aagggacaugacaaacaag

SEQ ID NO: 1104614 - RNA, 19 nt, Artificial Sequence
  Description of Artificial Sequence: Synthetic oligonucleotide
ccucuuuauaaccuagagc

SEQ ID NO: 1104615 - RNA, 19 nt, Artificial Sequence
  Description of Artificial Sequence: Synthetic oligonucleotide
caguucauauuucugaacu

SEQ ID NO: 1104616 - RNA, 19 nt, Artificial Sequence
  Description of Artificial Sequence: Synthetic oligonucleotide
gggagaauaggggacuugg

SEQ ID NO: 1104617 - RNA, 19 nt, Artificial Sequence
  Description of Artificial Sequence: Synthetic oligonucleotide
gauggucuaaguggaggug

SEQ ID NO: 1104618 - RNA, 19 nt, Artificial Sequence
  Description of Artificial Sequence: Synthetic oligonucleotide
gggcauagcaaaguauugg

SEQ ID NO: 1104619 - RNA, 19 nt, Artificial Sequence
  Description of Artificial Sequence: Synthetic oligonucleotide
ugaggugcacagucaaauc

SEQ ID NO: 1104620 - RNA, 19 nt, Artificial Sequence
  Description of Artificial Sequence: Synthetic oligonucleotide
auaggggacuuggugcugg

SEQ ID NO: 1104621 - RNA, 19 nt, Artificial Sequence
  Description of Artificial Sequence: Synthetic oligonucleotide
uagcaaaguauuggggcca

SEQ ID NO: 1104622 - RNA, 19 nt, Artificial Sequence
  Description of Artificial Sequence: Synthetic oligonucleotide
gaauaggggacuuggugcu

SEQ ID NO: 1104623 - RNA, 19 nt, Artificial Sequence
  Description of Artificial Sequence: Synthetic oligonucleotide
cugugaauuagcuuugccu

SEQ ID NO: 1104624 - RNA, 19 nt, Artificial Sequence
  Description of Artificial Sequence: Synthetic oligonucleotide
uuccggaccagcuuuucua

SEQ ID NO: 1104625 - RNA, 19 nt, Artificial Sequence
  Description of Artificial Sequence: Synthetic oligonucleotide
gguuguuuccccuauuaaa

SEQ ID NO: 1104626 - RNA, 19 nt, Artificial Sequence
  Description of Artificial Sequence: Synthetic oligonucleotide
auuagguaguaaagggcug

SEQ ID NO: 1104627 - RNA, 19 nt, Artificial Sequence
  Description of Artificial Sequence: Synthetic oligonucleotide
ccaaacaugcauauguaca

SEQ ID NO: 1104628 - RNA, 19 nt, Artificial Sequence
  Description of Artificial Sequence: Synthetic oligonucleotide
gucguaggcaaccuaaacu

SEQ ID NO: 1104629 - RNA, 19 nt, Artificial Sequence
  Description of Artificial Sequence: Synthetic oligonucleotide
caauaucccaaguaccaaa

SEQ ID NO: 1104630 - RNA, 19 nt, Artificial Sequence
  Description of Artificial Sequence: Synthetic oligonucleotide
uuagagaccuaagcacaga

SEQ ID NO: 1104631 - RNA, 19 nt, Artificial Sequence
  Description of Artificial Sequence: Synthetic oligonucleotide
ucauugggcaaagguguug

SEQ ID NO: 1104632 - RNA, 19 nt, Artificial Sequence
  Description of Artificial Sequence: Synthetic oligonucleotide
uaucaacaaggcucuuuuc

SEQ ID NO: 1104633 - RNA, 19 nt, Artificial Sequence
  Description of Artificial Sequence: Synthetic oligonucleotide
aaccgauagccaaguaaug

SEQ ID NO: 1104634 - RNA, 19 nt, Artificial Sequence
  Description of Artificial Sequence: Synthetic oligonucleotide
aucuggguuacuacuguug

SEQ ID NO: 1104635 - RNA, 19 nt, Artificial Sequence
  Description of Artificial Sequence: Synthetic oligonucleotide
uggggccauuuuaucacca

SEQ ID NO: 1104636 - RNA, 19 nt, Artificial Sequence
  Description of Artificial Sequence: Synthetic oligonucleotide
ugcccguugcuucugguuu

SEQ ID NO: 1104637 - RNA, 19 nt, Artificial Sequence
  Description of Artificial Sequence: Synthetic oligonucleotide
cgguuuuauaauuugagga

SEQ ID NO: 1104638 - RNA, 19 nt, Artificial Sequence
  Description of Artificial Sequence: Synthetic oligonucleotide
acuacaugaugaugaugau

SEQ ID NO: 1104639 - RNA, 19 nt, Artificial Sequence
  Description of Artificial Sequence: Synthetic oligonucleotide
uuucuagguccuuccucga

SEQ ID NO: 1104640 - RNA, 19 nt, Artificial Sequence
  Description of Artificial Sequence: Synthetic oligonucleotide
augaacacucaagcaaaca

SEQ ID NO: 1104641 - RNA, 19 nt, Artificial Sequence
  Description of Artificial Sequence: Synthetic oligonucleotide
agaccuaagcacagacagg

SEQ ID NO: 1104642 - RNA, 19 nt, Artificial Sequence
  Description of Artificial Sequence: Synthetic oligonucleotide
agucaaugguuugucauua

SEQ ID NO: 1104643 - RNA, 19 nt, Artificial Sequence
  Description of Artificial Sequence: Synthetic oligonucleotide
ggaauaagggcauuacacu

SEQ ID NO: 1104644 - RNA, 19 nt, Artificial Sequence
  Description of Artificial Sequence: Synthetic oligonucleotide
auaauuugaggaggcucca

SEQ ID NO: 1104645 - RNA, 19 nt, Artificial Sequence
  Description of Artificial Sequence: Synthetic oligonucleotide
acuccacgguuuuauaauu

SEQ ID NO: 1104646 - RNA, 19 nt, Artificial Sequence
  Description of Artificial Sequence: Synthetic oligonucleotide
auuuaguguguaagcgcag

SEQ ID NO: 1104647 - RNA, 19 nt, Artificial Sequence
  Description of Artificial Sequence: Synthetic oligonucleotide
  modified_base (18)..(18): a, c, u, g, unknown or other
cucuggucagucuguucng

SEQ ID NO: 1104648 - RNA, 19 nt, Artificial Sequence
  Description of Artificial Sequence: Synthetic oligonucleotide
uucuucuggggcugucuac

SEQ ID NO: 1104649 - RNA, 19 nt, Artificial Sequence
  Description of Artificial Sequence: Synthetic oligonucleotide
aguaucaacaaggcucuuu

SEQ ID NO: 1104650 - RNA, 19 nt, Artificial Sequence
  Description of Artificial Sequence: Synthetic oligonucleotide
caaccgauagccaaguaau

SEQ ID NO: 1104651 - RNA, 19 nt, Artificial Sequence
  Description of Artificial Sequence: Synthetic oligonucleotide
acagaucccaaaccacaaa

SEQ ID NO: 1104652 - RNA, 19 nt, Artificial Sequence
  Description of Artificial Sequence: Synthetic oligonucleotide
uucgcucagucuuucuuuu

SEQ ID NO: 1104653 - RNA, 19 nt, Artificial Sequence
  Description of Artificial Sequence: Synthetic oligonucleotide
guauuggggccauuuuauc

SEQ ID NO: 1104654 - RNA, 19 nt, Artificial Sequence
  Description of Artificial Sequence: Synthetic oligonucleotide
agcacuguuuauucuuguu

SEQ ID NO: 1104655 - RNA, 19 nt, Artificial Sequence
  Description of Artificial Sequence: Synthetic oligonucleotide
gcauucgucuguuugcuuc

SEQ ID NO: 1104656 - RNA, 19 nt, Artificial Sequence
  Description of Artificial Sequence: Synthetic oligonucleotide
acuuagguuguuuccccua

SEQ ID NO: 1104657 - RNA, 19 nt, Artificial Sequence
  Description of Artificial Sequence: Synthetic oligonucleotide
aagcgcaggcagcccacug

SEQ ID NO: 1104658 - RNA, 19 nt, Artificial Sequence
  Description of Artificial Sequence: Synthetic oligonucleotide
guacuacaugaugaugaug

SEQ ID NO: 1104659 - RNA, 19 nt, Artificial Sequence
  Description of Artificial Sequence: Synthetic oligonucleotide
gaucaccuuaaggaucuga

SEQ ID NO: 1104660 - RNA, 19 nt, Artificial Sequence
  Description of Artificial Sequence: Synthetic oligonucleotide
uuccucgacuucaauucuu

SEQ ID NO: 1104661 - RNA, 19 nt, Artificial Sequence
  Description of Artificial Sequence: Synthetic oligonucleotide
cauucgucuguuugcuuca

SEQ ID NO: 1104662 - RNA, 19 nt, Artificial Sequence
  Description of Artificial Sequence: Synthetic oligonucleotide
caaguaucagucaaccgau

SEQ ID NO: 1104663 - RNA, 19 nt, Artificial Sequence
  Description of Artificial Sequence: Synthetic oligonucleotide
uuagguuguuuccccuauu

SEQ ID NO: 1104664 - RNA, 19 nt, Artificial Sequence
  Description of Artificial Sequence: Synthetic oligonucleotide
uuggguuaacauggcuuca

SEQ ID NO: 1104665 - RNA, 19 nt, Artificial Sequence
  Description of Artificial Sequence: Synthetic oligonucleotide
aggguggagacagauccca

SEQ ID NO: 1104666 - RNA, 19 nt, Artificial Sequence
  Description of Artificial Sequence: Synthetic oligonucleotide
aacuacuuacaaagucaau

SEQ ID NO: 1104667 - RNA, 19 nt, Artificial Sequence
  Description of Artificial Sequence: Synthetic oligonucleotide
gacagaucccaaaccacaa

SEQ ID NO: 1104668 - RNA, 19 nt, Artificial Sequence
  Description of Artificial Sequence: Synthetic oligonucleotide
cuaaucacguauucuuccu

SEQ ID NO: 1104669 - RNA, 19 nt, Artificial Sequence
  Description of Artificial Sequence: Synthetic oligonucleotide
agagaccuaagcacagaca

SEQ ID NO: 1104670 - RNA, 19 nt, Artificial Sequence
  Description of Artificial Sequence: Synthetic oligonucleotide
uggguuaacauggcuucau

SEQ ID NO: 1104671 - RNA, 19 nt, Artificial Sequence
  Description of Artificial Sequence: Synthetic oligonucleotide
agguaguaaagggcuguug

SEQ ID NO: 1104672 - RNA, 19 nt, Artificial Sequence
  Description of Artificial Sequence: Synthetic oligonucleotide
uaauuugaggaggcuccaa

SEQ ID NO: 1104673 - RNA, 19 nt, Artificial Sequence
  Description of Artificial Sequence: Synthetic oligonucleotide
caacaagugcugaaggccu

SEQ ID NO: 1104674 - RNA, 19 nt, Artificial Sequence
  Description of Artificial Sequence: Synthetic oligonucleotide
caggucguaggcaaccuaa

SEQ ID NO: 1104675 - RNA, 19 nt, Artificial Sequence
  Description of Artificial Sequence: Synthetic oligonucleotide
uccucgcaguucauauuuc

SEQ ID NO: 1104676 - RNA, 19 nt, Artificial Sequence
  Description of Artificial Sequence: Synthetic oligonucleotide
ucgaaugcauucgucuguu

SEQ ID NO: 1104677 - RNA, 19 nt, Artificial Sequence
  Description of Artificial Sequence: Synthetic oligonucleotide
ggucguaggcaaccuaaac

SEQ ID NO: 1104678 - RNA, 19 nt, Artificial Sequence
  Description of Artificial Sequence: Synthetic oligonucleotide
cuacugaaucugcuuccuc

SEQ ID NO: 1104679 - RNA, 19 nt, Artificial Sequence
  Description of Artificial Sequence: Synthetic oligonucleotide
ucuuuacgaguaccuuguu

SEQ ID NO: 1104680 - RNA, 19 nt, Artificial Sequence
  Description of Artificial Sequence: Synthetic oligonucleotide
gugaacaucuggguuacua

SEQ ID NO: 1104681 - RNA, 19 nt, Artificial Sequence
  Description of Artificial Sequence: Synthetic oligonucleotide
ggcuccaaggguccucggg

SEQ ID NO: 1104682 - RNA, 19 nt, Artificial Sequence
  Description of Artificial Sequence: Synthetic oligonucleotide
cuacugauggacugagugu

SEQ ID NO: 1104683 - RNA, 19 nt, Artificial Sequence
  Description of Artificial Sequence: Synthetic oligonucleotide
aagggcuguugggcauagc

SEQ ID NO: 1104684 - RNA, 19 nt, Artificial Sequence
  Description of Artificial Sequence: Synthetic oligonucleotide
cacguauucuuccucagau

SEQ ID NO: 1104685 - RNA, 19 nt, Artificial Sequence
  Description of Artificial Sequence: Synthetic oligonucleotide
caagugcugaaggccuggg

SEQ ID NO: 1104686 - RNA, 19 nt, Artificial Sequence
  Description of Artificial Sequence: Synthetic oligonucleotide
guuggaguuccuacaccac

SEQ ID NO: 1104687 - RNA, 19 nt, Artificial Sequence
  Description of Artificial Sequence: Synthetic oligonucleotide
guuacuacuguuguuucuu

SEQ ID NO: 1104688 - RNA, 19 nt, Artificial Sequence
  Description of Artificial Sequence: Synthetic oligonucleotide
cgauagccaaguaaugaac

SEQ ID NO: 1104689 - RNA, 19 nt, Artificial Sequence
  Description of Artificial Sequence: Synthetic oligonucleotide
uaagggcauuacacugcuc

SEQ ID NO: 1104690 - RNA, 19 nt, Artificial Sequence
  Description of Artificial Sequence: Synthetic oligonucleotide
agacacggcuguuggguua

SEQ ID NO: 1104691 - RNA, 19 nt, Artificial Sequence
  Description of Artificial Sequence: Synthetic oligonucleotide
ugcaggucguaggcaaccu

SEQ ID NO: 1104692 - RNA, 19 nt, Artificial Sequence
  Description of Artificial Sequence: Synthetic oligonucleotide
aucagucaaccgauagcca

SEQ ID NO: 1104693 - RNA, 19 nt, Artificial Sequence
  Description of Artificial Sequence: Synthetic oligonucleotide
cuagagcugcugauggucu

SEQ ID NO: 1104694 - RNA, 19 nt, Artificial Sequence
  Description of Artificial Sequence: Synthetic oligonucleotide
ggacagaaucuuuacgagu

SEQ ID NO: 1104695 - RNA, 19 nt, Artificial Sequence
  Description of Artificial Sequence: Synthetic oligonucleotide
cugaaucugcuuccucgca

SEQ ID NO: 1104696 - RNA, 19 nt, Artificial Sequence
  Description of Artificial Sequence: Synthetic oligonucleotide
cuuugccuccagcuaauua

SEQ ID NO: 1104697 - RNA, 19 nt, Artificial Sequence
  Description of Artificial Sequence: Synthetic oligonucleotide
cagcucgaaugcauucguc

SEQ ID NO: 1104698 - RNA, 19 nt, Artificial Sequence
  Description of Artificial Sequence: Synthetic oligonucleotide
gaaucuuuacgaguaccuu

SEQ ID NO: 1104699 - RNA, 19 nt, Artificial Sequence
  Description of Artificial Sequence: Synthetic oligonucleotide
cucuagacacagccuguga

SEQ ID NO: 1104700 - RNA, 19 nt, Artificial Sequence
  Description of Artificial Sequence: Synthetic oligonucleotide
gguggagacagaucccaaa

SEQ ID NO: 1104701 - RNA, 19 nt, Artificial Sequence
  Description of Artificial Sequence: Synthetic oligonucleotide
cucgacuucaauucuucuu

SEQ ID NO: 1104702 - RNA, 19 nt, Artificial Sequence
  Description of Artificial Sequence: Synthetic oligonucleotide
caaccuaaacuccacgguu

SEQ ID NO: 1104703 - RNA, 19 nt, Artificial Sequence
  Description of Artificial Sequence: Synthetic oligonucleotide
cucgaaugcauucgucugu

SEQ ID NO: 1104704 - RNA, 19 nt, Artificial Sequence
  Description of Artificial Sequence: Synthetic oligonucleotide
gguuaacauggcuucauuu

SEQ ID NO: 1104705 - RNA, 19 nt, Artificial Sequence
  Description of Artificial Sequence: Synthetic oligonucleotide
  modified_base (12)..(12): a, c, u, g, unknown or other
ucagucuguucngcugcuc

SEQ ID NO: 1104706 - RNA, 19 nt, Artificial Sequence
  Description of Artificial Sequence: Synthetic oligonucleotide
acacaacuauggagacacg

SEQ ID NO: 1104707 - RNA, 19 nt, Artificial Sequence
  Description of Artificial Sequence: Synthetic oligonucleotide
guagagcuaaaagaagauu

SEQ ID NO: 1104708 - RNA, 19 nt, Artificial Sequence
  Description of Artificial Sequence: Synthetic oligonucleotide
cacaaccuuuuagagaccu

SEQ ID NO: 1104709 - RNA, 19 nt, Artificial Sequence
  Description of Artificial Sequence: Synthetic oligonucleotide
agcaaaguauuggggccau

SEQ ID NO: 1104710 - RNA, 19 nt, Artificial Sequence
  Description of Artificial Sequence: Synthetic oligonucleotide
cgacuucaauucuucuucc

SEQ ID NO: 1104711 - RNA, 19 nt, Artificial Sequence
  Description of Artificial Sequence: Synthetic oligonucleotide
guaguaacugugggacaga

SEQ ID NO: 1104712 - RNA, 19 nt, Artificial Sequence
  Description of Artificial Sequence: Synthetic oligonucleotide
guaagcgcaggcagcccac

SEQ ID NO: 1104713 - RNA, 19 nt, Artificial Sequence
  Description of Artificial Sequence: Synthetic oligonucleotide
ccgauagccaaguaaugaa

SEQ ID NO: 1104714 - RNA, 19 nt, Artificial Sequence
  Description of Artificial Sequence: Synthetic oligonucleotide
gcaaccuaaacuccacggu

SEQ ID NO: 1104715 - RNA, 19 nt, Artificial Sequence
  Description of Artificial Sequence: Synthetic oligonucleotide
gaguaccuuguugaaaauu

SEQ ID NO: 1104716 - RNA, 19 nt, Artificial Sequence
  Description of Artificial Sequence: Synthetic oligonucleotide
gacacggcuguuggguuaa

SEQ ID NO: 1104717 - RNA, 19 nt, Artificial Sequence
  Description of Artificial Sequence: Synthetic oligonucleotide
ggggccauuuuaucaccac

SEQ ID NO: 1104718 - RNA, 19 nt, Artificial Sequence
  Description of Artificial Sequence: Synthetic oligonucleotide
caacacagggcaagaauuu

SEQ ID NO: 1104719 - RNA, 19 nt, Artificial Sequence
  Description of Artificial Sequence: Synthetic oligonucleotide
gguuacuacuguuguuucu

SEQ ID NO: 1104720 - RNA, 19 nt, Artificial Sequence
  Description of Artificial Sequence: Synthetic oligonucleotide
cagucuacugauggacuga

SEQ ID NO: 1104721 - RNA, 19 nt, Artificial Sequence
  Description of Artificial Sequence: Synthetic oligonucleotide
ccacgguuuuauaauuuga

SEQ ID NO: 1104722 - RNA, 19 nt, Artificial Sequence
  Description of Artificial Sequence: Synthetic oligonucleotide
gccauuuuaucaccacuua

SEQ ID NO: 1104723 - RNA, 19 nt, Artificial Sequence
  Description of Artificial Sequence: Synthetic oligonucleotide
guugggcauagcaaaguau

SEQ ID NO: 1104724 - RNA, 19 nt, Artificial Sequence
  Description of Artificial Sequence: Synthetic oligonucleotide
aucauugggcaaagguguu

SEQ ID NO: 1104725 - RNA, 19 nt, Artificial Sequence
  Description of Artificial Sequence: Synthetic oligonucleotide
ggucuaaguggaggugcag

SEQ ID NO: 1104726 - RNA, 19 nt, Artificial Sequence
  Description of Artificial Sequence: Synthetic oligonucleotide
guguaagcgcaggcagccc

SEQ ID NO: 1104727 - RNA, 19 nt, Artificial Sequence
  Description of Artificial Sequence: Synthetic oligonucleotide
cggcuguuggguuaacaug

SEQ ID NO: 1104728 - RNA, 19 nt, Artificial Sequence
  Description of Artificial Sequence: Synthetic oligonucleotide
gggacaugacaaacaagaa

SEQ ID NO: 1104729 - RNA, 19 nt, Artificial Sequence
  Description of Artificial Sequence: Synthetic oligonucleotide
auucgucuguuugcuucaa

SEQ ID NO: 1104730 - RNA, 19 nt, Artificial Sequence
  Description of Artificial Sequence: Synthetic oligonucleotide
agcuuugccuccagcuaau

SEQ ID NO: 1104731 - RNA, 19 nt, Artificial Sequence
  Description of Artificial Sequence: Synthetic oligonucleotide
gagacacggcuguuggguu

SEQ ID NO: 1104732 - RNA, 19 nt, Artificial Sequence
  Description of Artificial Sequence: Synthetic oligonucleotide
acaaccuuuuagagaccua

SEQ ID NO: 1104733 - RNA, 19 nt, Artificial Sequence
  Description of Artificial Sequence: Synthetic oligonucleotide
cuccacgguuuuauaauuu

SEQ ID NO: 1104734 - RNA, 19 nt, Artificial Sequence
  Description of Artificial Sequence: Synthetic oligonucleotide
gggccauuuuaucaccacu

SEQ ID NO: 1104735 - RNA, 19 nt, Artificial Sequence
  Description of Artificial Sequence: Synthetic oligonucleotide
gccuccagcuaauuaggua

SEQ ID NO: 1104736 - RNA, 19 nt, Artificial Sequence
  Description of Artificial Sequence: Synthetic oligonucleotide
gucaaccgauagccaagua

SEQ ID NO: 1104737 - RNA, 19 nt, Artificial Sequence
  Description of Artificial Sequence: Synthetic oligonucleotide
cuuccggaccagcuuuucu

SEQ ID NO: 1104738 - RNA, 19 nt, Artificial Sequence
  Description of Artificial Sequence: Synthetic oligonucleotide
gccaaguaaugaacacuca

SEQ ID NO: 1104739 - RNA, 19 nt, Artificial Sequence
  Description of Artificial Sequence: Synthetic oligonucleotide
gccugugaauuagcuuugc

SEQ ID NO: 1104740 - RNA, 19 nt, Artificial Sequence
  Description of Artificial Sequence: Synthetic oligonucleotide
gcuuuucgcucagucuuuc

SEQ ID NO: 1104741 - RNA, 19 nt, Artificial Sequence
  Description of Artificial Sequence: Synthetic oligonucleotide
acacggcuguuggguuaac

SEQ ID NO: 1104742 - RNA, 19 nt, Artificial Sequence
  Description of Artificial Sequence: Synthetic oligonucleotide
cacggcuguuggguuaaca

SEQ ID NO: 1104743 - RNA, 19 nt, Artificial Sequence
  Description of Artificial Sequence: Synthetic oligonucleotide
aggaggcuccaaggguccu

SEQ ID NO: 1104744 - RNA, 19 nt, Artificial Sequence
  Description of Artificial Sequence: Synthetic oligonucleotide
ccagcuaauuagguaguaa

SEQ ID NO: 1104745 - RNA, 19 nt, Artificial Sequence
  Description of Artificial Sequence: Synthetic oligonucleotide
cuuccucgcaguucauauu

SEQ ID NO: 1104746 - RNA, 19 nt, Artificial Sequence
  Description of Artificial Sequence: Synthetic oligonucleotide
cuggguuacuacuguuguu

SEQ ID NO: 1104747 - RNA, 19 nt, Artificial Sequence
  Description of Artificial Sequence: Synthetic oligonucleotide
ggagaauaggggacuuggu

SEQ ID NO: 1104748 - RNA, 19 nt, Artificial Sequence
  Description of Artificial Sequence: Synthetic oligonucleotide
ccucgcaguucauauuucu

SEQ ID NO: 1104749 - RNA, 19 nt, Artificial Sequence
  Description of Artificial Sequence: Synthetic oligonucleotide
ggguuaacauggcuucauu

SEQ ID NO: 1104750 - RNA, 19 nt, Artificial Sequence
  Description of Artificial Sequence: Synthetic oligonucleotide
gcaggucguaggcaaccua

SEQ ID NO: 1104751 - RNA, 19 nt, Artificial Sequence
  Description of Artificial Sequence: Synthetic oligonucleotide
gcugguccucuggucaguc

SEQ ID NO: 1104752 - RNA, 19 nt, Artificial Sequence
  Description of Artificial Sequence: Synthetic oligonucleotide
gcauuacacugcucuuggu

SEQ ID NO: 1104753 - RNA, 19 nt, Artificial Sequence
  Description of Artificial Sequence: Synthetic oligonucleotide
ggguggagacagaucccaa

SEQ ID NO: 1104754 - RNA, 19 nt, Artificial Sequence
  Description of Artificial Sequence: Synthetic oligonucleotide
ccucgacuucaauucuucu

SEQ ID NO: 1104755 - RNA, 19 nt, Artificial Sequence
  Description of Artificial Sequence: Synthetic oligonucleotide
ccuaaacuccacgguuuua

SEQ ID NO: 1104756 - RNA, 19 nt, Artificial Sequence
  Description of Artificial Sequence: Synthetic oligonucleotide
cuauggagacacggcuguu

SEQ ID NO: 1104757 - RNA, 19 nt, Artificial Sequence
  Description of Artificial Sequence: Synthetic oligonucleotide
cgaguaccuuguugaaaau

SEQ ID NO: 1104758 - RNA, 19 nt, Artificial Sequence
  Description of Artificial Sequence: Synthetic oligonucleotide
gcuuugccuccagcuaauu

SEQ ID NO: 1104759 - RNA, 19 nt, Artificial Sequence
  Description of Artificial Sequence: Synthetic oligonucleotide
cccguugcuucugguuucu

SEQ ID NO: 1104760 - RNA, 19 nt, Artificial Sequence
  Description of Artificial Sequence: Synthetic oligonucleotide
ucuauuagcuaaacgaggg

SEQ ID NO: 1104761 - RNA, 19 nt, Artificial Sequence
  Description of Artificial Sequence: Synthetic oligonucleotide
gauucuauuagcuaaacga

SEQ ID NO: 1104762 - RNA, 19 nt, Artificial Sequence
  Description of Artificial Sequence: Synthetic oligonucleotide
uuuuauaccucuuaugaca

SEQ ID NO: 1104763 - RNA, 19 nt, Artificial Sequence
  Description of Artificial Sequence: Synthetic oligonucleotide
aguaguaaccuaaugaggc

SEQ ID NO: 1104764 - RNA, 19 nt, Artificial Sequence
  Description of Artificial Sequence: Synthetic oligonucleotide
aauccuuauaccccgggac

SEQ ID NO: 1104765 - RNA, 19 nt, Artificial Sequence
  Description of Artificial Sequence: Synthetic oligonucleotide
uuuucgaugauguucucgg

SEQ ID NO: 1104766 - RNA, 19 nt, Artificial Sequence
  Description of Artificial Sequence: Synthetic oligonucleotide
aguguauuuuaauaccacc

SEQ ID NO: 1104767 - RNA, 19 nt, Artificial Sequence
  Description of Artificial Sequence: Synthetic oligonucleotide
cauggugagauaaugaagc

SEQ ID NO: 1104768 - RNA, 19 nt, Artificial Sequence
  Description of Artificial Sequence: Synthetic oligonucleotide
aagaagagccucuuuaaag

SEQ ID NO: 1104769 - RNA, 19 nt, Artificial Sequence
  Description of Artificial Sequence: Synthetic oligonucleotide
acaguaguaaccuaaugag

SEQ ID NO: 1104770 - RNA, 19 nt, Artificial Sequence
  Description of Artificial Sequence: Synthetic oligonucleotide
uaauuuucgaugauguucu

SEQ ID NO: 1104771 - RNA, 19 nt, Artificial Sequence
  Description of Artificial Sequence: Synthetic oligonucleotide
aaaccucuaacacaacauc

SEQ ID NO: 1104772 - RNA, 19 nt, Artificial Sequence
  Description of Artificial Sequence: Synthetic oligonucleotide
uucuauuagcuaaacgagg

SEQ ID NO: 1104773 - RNA, 19 nt, Artificial Sequence
  Description of Artificial Sequence: Synthetic oligonucleotide
aagcuauuaaugaugcugc

SEQ ID NO: 1104774 - RNA, 19 nt, Artificial Sequence
  Description of Artificial Sequence: Synthetic oligonucleotide
aagcuuacaaagugcuucc

SEQ ID NO: 1104775 - RNA, 19 nt, Artificial Sequence
  Description of Artificial Sequence: Synthetic oligonucleotide
uugacuaucagccugggau

SEQ ID NO: 1104776 - RNA, 19 nt, Artificial Sequence
  Description of Artificial Sequence: Synthetic oligonucleotide
uuuuaauaccaccuguuga

SEQ ID NO: 1104777 - RNA, 19 nt, Artificial Sequence
  Description of Artificial Sequence: Synthetic oligonucleotide
auuuuauaccucuuaugac

SEQ ID NO: 1104778 - RNA, 19 nt, Artificial Sequence
  Description of Artificial Sequence: Synthetic oligonucleotide
aauaauuuagccaguucuc

SEQ ID NO: 1104779 - RNA, 19 nt, Artificial Sequence
  Description of Artificial Sequence: Synthetic oligonucleotide
ugcgaaaugaagcuguggc

SEQ ID NO: 1104780 - RNA, 19 nt, Artificial Sequence
  Description of Artificial Sequence: Synthetic oligonucleotide
auaauuuagccaguucucc

SEQ ID NO: 1104781 - RNA, 19 nt, Artificial Sequence
  Description of Artificial Sequence: Synthetic oligonucleotide
cagcagaggaguuacaugg

SEQ ID NO: 1104782 - RNA, 19 nt, Artificial Sequence
  Description of Artificial Sequence: Synthetic oligonucleotide
cauuagauugcucaucgcc

SEQ ID NO: 1104783 - RNA, 19 nt, Artificial Sequence
  Description of Artificial Sequence: Synthetic oligonucleotide
cuuauguccacuuuggaca

SEQ ID NO: 1104784 - RNA, 19 nt, Artificial Sequence
  Description of Artificial Sequence: Synthetic oligonucleotide
aacuucggccgcuucaugg

SEQ ID NO: 1104785 - RNA, 19 nt, Artificial Sequence
  Description of Artificial Sequence: Synthetic oligonucleotide
uucucauuaaaauguggag

SEQ ID NO: 1104786 - RNA, 19 nt, Artificial Sequence
  Description of Artificial Sequence: Synthetic oligonucleotide
uuaaguuccugacaaugca

SEQ ID NO: 1104787 - RNA, 19 nt, Artificial Sequence
  Description of Artificial Sequence: Synthetic oligonucleotide
ucuuaugacaggucauacg

SEQ ID NO: 1104788 - RNA, 19 nt, Artificial Sequence
  Description of Artificial Sequence: Synthetic oligonucleotide
aacaguacauauccguucu

SEQ ID NO: 1104789 - RNA, 19 nt, Artificial Sequence
  Description of Artificial Sequence: Synthetic oligonucleotide
uugccuaucaaguuucugc

SEQ ID NO: 1104790 - RNA, 19 nt, Artificial Sequence
  Description of Artificial Sequence: Synthetic oligonucleotide
uauuagcuaaacgagggcc

SEQ ID NO: 1104791 - RNA, 19 nt, Artificial Sequence
  Description of Artificial Sequence: Synthetic oligonucleotide
aaccuaaugaggcaccugu

SEQ ID NO: 1104792 - RNA, 19 nt, Artificial Sequence
  Description of Artificial Sequence: Synthetic oligonucleotide
auccguucuuguuuuaagc

SEQ ID NO: 1104793 - RNA, 19 nt, Artificial Sequence
  Description of Artificial Sequence: Synthetic oligonucleotide
ugucaggugguuuauuugc

SEQ ID NO: 1104794 - RNA, 19 nt, Artificial Sequence
  Description of Artificial Sequence: Synthetic oligonucleotide
ucuuauguccacuuuggac

SEQ ID NO: 1104795 - RNA, 19 nt, Artificial Sequence
  Description of Artificial Sequence: Synthetic oligonucleotide
uuuggaacggaacagcuuu

SEQ ID NO: 1104796 - RNA, 19 nt, Artificial Sequence
  Description of Artificial Sequence: Synthetic oligonucleotide
auucggaagagaccgcagc

SEQ ID NO: 1104797 - RNA, 19 nt, Artificial Sequence
  Description of Artificial Sequence: Synthetic oligonucleotide
ucuuguuuuaagcuauuaa

SEQ ID NO: 1104798 - RNA, 19 nt, Artificial Sequence
  Description of Artificial Sequence: Synthetic oligonucleotide
ugcugaaaacuucugagaa

SEQ ID NO: 1104799 - RNA, 19 nt, Artificial Sequence
  Description of Artificial Sequence: Synthetic oligonucleotide
aaaaggauucuauuagcua

SEQ ID NO: 1104800 - RNA, 19 nt, Artificial Sequence
  Description of Artificial Sequence: Synthetic oligonucleotide
uuuaacuucggccgcuuca

SEQ ID NO: 1104801 - RNA, 19 nt, Artificial Sequence
  Description of Artificial Sequence: Synthetic oligonucleotide
gauaaugaagcauggacua

SEQ ID NO: 1104802 - RNA, 19 nt, Artificial Sequence
  Description of Artificial Sequence: Synthetic oligonucleotide
auuagcuaaacgagggccc

SEQ ID NO: 1104803 - RNA, 19 nt, Artificial Sequence
  Description of Artificial Sequence: Synthetic oligonucleotide
guaucagcuucuuaugucc

SEQ ID NO: 1104804 - RNA, 19 nt, Artificial Sequence
  Description of Artificial Sequence: Synthetic oligonucleotide
aauuuagccaguucuccaa

SEQ ID NO: 1104805 - RNA, 19 nt, Artificial Sequence
  Description of Artificial Sequence: Synthetic oligonucleotide
cuaucuaugacugugaucu

SEQ ID NO: 1104806 - RNA, 19 nt, Artificial Sequence
  Description of Artificial Sequence: Synthetic oligonucleotide
gacuccguaaagcaagugc

SEQ ID NO: 1104807 - RNA, 19 nt, Artificial Sequence
  Description of Artificial Sequence: Synthetic oligonucleotide
uccaacaguacauauccgu

SEQ ID NO: 1104808 - RNA, 19 nt, Artificial Sequence
  Description of Artificial Sequence: Synthetic oligonucleotide
cauggacuaucuaugacug

SEQ ID NO: 1104809 - RNA, 19 nt, Artificial Sequence
  Description of Artificial Sequence: Synthetic oligonucleotide
uacuagaucugauuuauuu

SEQ ID NO: 1104810 - RNA, 19 nt, Artificial Sequence
  Description of Artificial Sequence: Synthetic oligonucleotide
caguaguaaccuaaugagg

SEQ ID NO: 1104811 - RNA, 19 nt, Artificial Sequence
  Description of Artificial Sequence: Synthetic oligonucleotide
ucgaugauguucucggacc

SEQ ID NO: 1104812 - RNA, 19 nt, Artificial Sequence
  Description of Artificial Sequence: Synthetic oligonucleotide
uguccaacgggacaaucug

SEQ ID NO: 1104813 - RNA, 19 nt, Artificial Sequence
  Description of Artificial Sequence: Synthetic oligonucleotide
accaauuacuccaaccugg

SEQ ID NO: 1104814 - RNA, 19 nt, Artificial Sequence
  Description of Artificial Sequence: Synthetic oligonucleotide
ugagguuccacauuagauu

SEQ ID NO: 1104815 - RNA, 19 nt, Artificial Sequence
  Description of Artificial Sequence: Synthetic oligonucleotide
acuaucuaugacugugauc

SEQ ID NO: 1104816 - RNA, 19 nt, Artificial Sequence
  Description of Artificial Sequence: Synthetic oligonucleotide
aauaccaccuguugacuau

SEQ ID NO: 1104817 - RNA, 19 nt, Artificial Sequence
  Description of Artificial Sequence: Synthetic oligonucleotide
agagaccgcagcuacgccg

SEQ ID NO: 1104818 - RNA, 19 nt, Artificial Sequence
  Description of Artificial Sequence: Synthetic oligonucleotide
agauaaugaagcauggacu

SEQ ID NO: 1104819 - RNA, 19 nt, Artificial Sequence
  Description of Artificial Sequence: Synthetic oligonucleotide
aacuccaacaguacauauc

SEQ ID NO: 1104820 - RNA, 19 nt, Artificial Sequence
  Description of Artificial Sequence: Synthetic oligonucleotide
uucgaugauguucucggac

SEQ ID NO: 1104821 - RNA, 19 nt, Artificial Sequence
  Description of Artificial Sequence: Synthetic oligonucleotide
aaaaccucuaacacaacau

SEQ ID NO: 1104822 - RNA, 19 nt, Artificial Sequence
  Description of Artificial Sequence: Synthetic oligonucleotide
gaacggaacagcuuucuuc

SEQ ID NO: 1104823 - RNA, 19 nt, Artificial Sequence
  Description of Artificial Sequence: Synthetic oligonucleotide
uccguucuuguuuuaagcu

SEQ ID NO: 1104824 - RNA, 19 nt, Artificial Sequence
  Description of Artificial Sequence: Synthetic oligonucleotide
uccagagaauccuuauacc

SEQ ID NO: 1104825 - RNA, 19 nt, Artificial Sequence
  Description of Artificial Sequence: Synthetic oligonucleotide
cuggacuccguaaagcaag

SEQ ID NO: 1104826 - RNA, 19 nt, Artificial Sequence
  Description of Artificial Sequence: Synthetic oligonucleotide
uccaacgggacaaucugca

SEQ ID NO: 1104827 - RNA, 19 nt, Artificial Sequence
  Description of Artificial Sequence: Synthetic oligonucleotide
acaaucugcaugcuccuug

SEQ ID NO: 1104828 - RNA, 19 nt, Artificial Sequence
  Description of Artificial Sequence: Synthetic oligonucleotide
acauuagauugcucaucgc

SEQ ID NO: 1104829 - RNA, 19 nt, Artificial Sequence
  Description of Artificial Sequence: Synthetic oligonucleotide
uauccguucuuguuuuaag

SEQ ID NO: 1104830 - RNA, 19 nt, Artificial Sequence
  Description of Artificial Sequence: Synthetic oligonucleotide
aacgagggcccuucaggac

SEQ ID NO: 1104831 - RNA, 19 nt, Artificial Sequence
  Description of Artificial Sequence: Synthetic oligonucleotide
aagagaccgcagcuacgcc

SEQ ID NO: 1104832 - RNA, 19 nt, Artificial Sequence
  Description of Artificial Sequence: Synthetic oligonucleotide
uguugauuccacagguaac

SEQ ID NO: 1104833 - RNA, 19 nt, Artificial Sequence
  Description of Artificial Sequence: Synthetic oligonucleotide
ggugagauaaugaagcaug

SEQ ID NO: 1104834 - RNA, 19 nt, Artificial Sequence
  Description of Artificial Sequence: Synthetic oligonucleotide
ucuuaguacuucaaugcuu

SEQ ID NO: 1104835 - RNA, 19 nt, Artificial Sequence
  Description of Artificial Sequence: Synthetic oligonucleotide
uacuggacuccguaaagca

SEQ ID NO: 1104836 - RNA, 19 nt, Artificial Sequence
  Description of Artificial Sequence: Synthetic oligonucleotide
aguaaccuaaugaggcacc

SEQ ID NO: 1104837 - RNA, 19 nt, Artificial Sequence
  Description of Artificial Sequence: Synthetic oligonucleotide
ucgguacuagaucugauuu

SEQ ID NO: 1104838 - RNA, 19 nt, Artificial Sequence
  Description of Artificial Sequence: Synthetic oligonucleotide
aagcauggacuaucuauga

SEQ ID NO: 1104839 - RNA, 19 nt, Artificial Sequence
  Description of Artificial Sequence: Synthetic oligonucleotide
cuccagauucggaagagac

SEQ ID NO: 1104840 - RNA, 19 nt, Artificial Sequence
  Description of Artificial Sequence: Synthetic oligonucleotide
uuguccaacgggacaaucu

SEQ ID NO: 1104841 - RNA, 19 nt, Artificial Sequence
  Description of Artificial Sequence: Synthetic oligonucleotide
ugaucuucaguauucuguu

SEQ ID NO: 1104842 - RNA, 19 nt, Artificial Sequence
  Description of Artificial Sequence: Synthetic oligonucleotide
agaccauagcaguuuagca

SEQ ID NO: 1104843 - RNA, 19 nt, Artificial Sequence
  Description of Artificial Sequence: Synthetic oligonucleotide
uuuggugcagaccucuuuu

SEQ ID NO: 1104844 - RNA, 19 nt, Artificial Sequence
  Description of Artificial Sequence: Synthetic oligonucleotide
cuauuagcuaaacgagggc

SEQ ID NO: 1104845 - RNA, 19 nt, Artificial Sequence
  Description of Artificial Sequence: Synthetic oligonucleotide
uugacucauuucauccaag

SEQ ID NO: 1104846 - RNA, 19 nt, Artificial Sequence
  Description of Artificial Sequence: Synthetic oligonucleotide
agaguuuccuuuggaacgg

SEQ ID NO: 1104847 - RNA, 19 nt, Artificial Sequence
  Description of Artificial Sequence: Synthetic oligonucleotide
ggacaguguauuuuaauac

SEQ ID NO: 1104848 - RNA, 19 nt, Artificial Sequence
  Description of Artificial Sequence: Synthetic oligonucleotide
ucuccuucgguacuagauc

SEQ ID NO: 1104849 - RNA, 19 nt, Artificial Sequence
  Description of Artificial Sequence: Synthetic oligonucleotide
auuagauugcucaucgcca

SEQ ID NO: 1104850 - RNA, 19 nt, Artificial Sequence
  Description of Artificial Sequence: Synthetic oligonucleotide
ccagauucggaagagaccg

SEQ ID NO: 1104851 - RNA, 19 nt, Artificial Sequence
  Description of Artificial Sequence: Synthetic oligonucleotide
uggacaauagcuucuucua

SEQ ID NO: 1104852 - RNA, 19 nt, Artificial Sequence
  Description of Artificial Sequence: Synthetic oligonucleotide
caaccaagaggaucucugg

SEQ ID NO: 1104853 - RNA, 19 nt, Artificial Sequence
  Description of Artificial Sequence: Synthetic oligonucleotide
cuuaguacuucaaugcuua

SEQ ID NO: 1104854 - RNA, 19 nt, Artificial Sequence
  Description of Artificial Sequence: Synthetic oligonucleotide
guacuucaaugcuuacugg

SEQ ID NO: 1104855 - RNA, 19 nt, Artificial Sequence
  Description of Artificial Sequence: Synthetic oligonucleotide
cauuuguggggccagagga

SEQ ID NO: 1104856 - RNA, 19 nt, Artificial Sequence
  Description of Artificial Sequence: Synthetic oligonucleotide
uaaugaagcauggacuauc

SEQ ID NO: 1104857 - RNA, 19 nt, Artificial Sequence
  Description of Artificial Sequence: Synthetic oligonucleotide
ugaagcuguggcccgacgu

SEQ ID NO: 1104858 - RNA, 19 nt, Artificial Sequence
  Description of Artificial Sequence: Synthetic oligonucleotide
ugggauagaauggcacugg

SEQ ID NO: 1104859 - RNA, 19 nt, Artificial Sequence
  Description of Artificial Sequence: Synthetic oligonucleotide
uuaaaauguggaggauucc

SEQ ID NO: 1104860 - RNA, 19 nt, Artificial Sequence
  Description of Artificial Sequence: Synthetic oligonucleotide
uaucagcuucuuaugucca

SEQ ID NO: 1104861 - RNA, 19 nt, Artificial Sequence
  Description of Artificial Sequence: Synthetic oligonucleotide
ggauuuuauaccucuuaug

SEQ ID NO: 1104862 - RNA, 19 nt, Artificial Sequence
  Description of Artificial Sequence: Synthetic oligonucleotide
agauugcucaucgccaggg

SEQ ID NO: 1104863 - RNA, 19 nt, Artificial Sequence
  Description of Artificial Sequence: Synthetic oligonucleotide
ugaaaacuucugagaagcu

SEQ ID NO: 1104864 - RNA, 19 nt, Artificial Sequence
  Description of Artificial Sequence: Synthetic oligonucleotide
auaggaacuccaacaguac

SEQ ID NO: 1104865 - RNA, 19 nt, Artificial Sequence
  Description of Artificial Sequence: Synthetic oligonucleotide
caaaaccucuaacacaaca

SEQ ID NO: 1104866 - RNA, 19 nt, Artificial Sequence
  Description of Artificial Sequence: Synthetic oligonucleotide
caagcugcuguuuccuuag

SEQ ID NO: 1104867 - RNA, 19 nt, Artificial Sequence
  Description of Artificial Sequence: Synthetic oligonucleotide
uacuccaaccuggauaucu

SEQ ID NO: 1104868 - RNA, 19 nt, Artificial Sequence
  Description of Artificial Sequence: Synthetic oligonucleotide
caacaguacauauccguuc

SEQ ID NO: 1104869 - RNA, 19 nt, Artificial Sequence
  Description of Artificial Sequence: Synthetic oligonucleotide
uucggccgcuucauggugg

SEQ ID NO: 1104870 - RNA, 19 nt, Artificial Sequence
  Description of Artificial Sequence: Synthetic oligonucleotide
uucuuauguccacuuugga

SEQ ID NO: 1104871 - RNA, 19 nt, Artificial Sequence
  Description of Artificial Sequence: Synthetic oligonucleotide
uaguaaccuaaugaggcac

SEQ ID NO: 1104872 - RNA, 19 nt, Artificial Sequence
  Description of Artificial Sequence: Synthetic oligonucleotide
cagaccauagcaguuuagc

SEQ ID NO: 1104873 - RNA, 19 nt, Artificial Sequence
  Description of Artificial Sequence: Synthetic oligonucleotide
uuauguccacuuuggacaa

SEQ ID NO: 1104874 - RNA, 19 nt, Artificial Sequence
  Description of Artificial Sequence: Synthetic oligonucleotide
auauucucauuaaaaugug

SEQ ID NO: 1104875 - RNA, 19 nt, Artificial Sequence
  Description of Artificial Sequence: Synthetic oligonucleotide
caugacugcugaaaacuuc

SEQ ID NO: 1104876 - RNA, 19 nt, Artificial Sequence
  Description of Artificial Sequence: Synthetic oligonucleotide
uccuuagcucagcuucacg

SEQ ID NO: 1104877 - RNA, 19 nt, Artificial Sequence
  Description of Artificial Sequence: Synthetic oligonucleotide
ugucgaagcuuugaacacc

SEQ ID NO: 1104878 - RNA, 19 nt, Artificial Sequence
  Description of Artificial Sequence: Synthetic oligonucleotide
uccguaaagcaagugcagc

SEQ ID NO: 1104879 - RNA, 19 nt, Artificial Sequence
  Description of Artificial Sequence: Synthetic oligonucleotide
guaaaugaucugucaggug

SEQ ID NO: 1104880 - RNA, 19 nt, Artificial Sequence
  Description of Artificial Sequence: Synthetic oligonucleotide
auccuuauaccccgggaca

SEQ ID NO: 1104881 - RNA, 19 nt, Artificial Sequence
  Description of Artificial Sequence: Synthetic oligonucleotide
ugucugucgaagcuuugaa

SEQ ID NO: 1104882 - RNA, 19 nt, Artificial Sequence
  Description of Artificial Sequence: Synthetic oligonucleotide
uguucucggaccuucuuuu

SEQ ID NO: 1104883 - RNA, 19 nt, Artificial Sequence
  Description of Artificial Sequence: Synthetic oligonucleotide
acuccguaaagcaagugca

SEQ ID NO: 1104884 - RNA, 19 nt, Artificial Sequence
  Description of Artificial Sequence: Synthetic oligonucleotide
uccuuauaccccgggacag

SEQ ID NO: 1104885 - RNA, 19 nt, Artificial Sequence
  Description of Artificial Sequence: Synthetic oligonucleotide
uuaauaccaccuguugacu

SEQ ID NO: 1104886 - RNA, 19 nt, Artificial Sequence
  Description of Artificial Sequence: Synthetic oligonucleotide
gacugcugaaaacuucuga

SEQ ID NO: 1104887 - RNA, 19 nt, Artificial Sequence
  Description of Artificial Sequence: Synthetic oligonucleotide
ugugugcauuauuuguuuc

SEQ ID NO: 1104888 - RNA, 19 nt, Artificial Sequence
  Description of Artificial Sequence: Synthetic oligonucleotide
guccacucagaccauagca

SEQ ID NO: 1104889 - RNA, 19 nt, Artificial Sequence
  Description of Artificial Sequence: Synthetic oligonucleotide
ugcgccacgugcgaaauga

SEQ ID NO: 1104890 - RNA, 19 nt, Artificial Sequence
  Description of Artificial Sequence: Synthetic oligonucleotide
auggugagauaaugaagca

SEQ ID NO: 1104891 - RNA, 19 nt, Artificial Sequence
  Description of Artificial Sequence: Synthetic oligonucleotide
uugcucaucgccaggguua

SEQ ID NO: 1104892 - RNA, 19 nt, Artificial Sequence
  Description of Artificial Sequence: Synthetic oligonucleotide
gggacaaucugcaugcucc

SEQ ID NO: 1104893 - RNA, 19 nt, Artificial Sequence
  Description of Artificial Sequence: Synthetic oligonucleotide
guaguaaccuaaugaggca

SEQ ID NO: 1104894 - RNA, 19 nt, Artificial Sequence
  Description of Artificial Sequence: Synthetic oligonucleotide
uuuggauuuuauaccucuu

SEQ ID NO: 1104895 - RNA, 19 nt, Artificial Sequence
  Description of Artificial Sequence: Synthetic oligonucleotide
uggugcagaccucuuuucu

SEQ ID NO: 1104896 - RNA, 19 nt, Artificial Sequence
  Description of Artificial Sequence: Synthetic oligonucleotide
uuaauacaaguaucagcuu

SEQ ID NO: 1104897 - RNA, 19 nt, Artificial Sequence
  Description of Artificial Sequence: Synthetic oligonucleotide
cuaaugaggcaccugucca

SEQ ID NO: 1104898 - RNA, 19 nt, Artificial Sequence
  Description of Artificial Sequence: Synthetic oligonucleotide
ggauaucuuucccacauga

SEQ ID NO: 1104899 - RNA, 19 nt, Artificial Sequence
  Description of Artificial Sequence: Synthetic oligonucleotide
gacuaucagccugggauag

SEQ ID NO: 1104900 - RNA, 19 nt, Artificial Sequence
  Description of Artificial Sequence: Synthetic oligonucleotide
cugucgaagcuuugaacac

SEQ ID NO: 1104901 - RNA, 19 nt, Artificial Sequence
  Description of Artificial Sequence: Synthetic oligonucleotide
cuccguaaagcaagugcag

SEQ ID NO: 1104902 - RNA, 19 nt, Artificial Sequence
  Description of Artificial Sequence: Synthetic oligonucleotide
ugacuaucagccugggaua

SEQ ID NO: 1104903 - RNA, 19 nt, Artificial Sequence
  Description of Artificial Sequence: Synthetic oligonucleotide
auggucuuaguacuucaau

SEQ ID NO: 1104904 - RNA, 19 nt, Artificial Sequence
  Description of Artificial Sequence: Synthetic oligonucleotide
cuauuaaugaugcugcuuu

SEQ ID NO: 1104905 - RNA, 19 nt, Artificial Sequence
  Description of Artificial Sequence: Synthetic oligonucleotide
caguuuagcagcacuuuca

SEQ ID NO: 1104906 - RNA, 19 nt, Artificial Sequence
  Description of Artificial Sequence: Synthetic oligonucleotide
uuugccuaucaaguuucug

SEQ ID NO: 1104907 - RNA, 19 nt, Artificial Sequence
  Description of Artificial Sequence: Synthetic oligonucleotide
uucaauauuugggcuucca

SEQ ID NO: 1104908 - RNA, 19 nt, Artificial Sequence
  Description of Artificial Sequence: Synthetic oligonucleotide
uuagcuaaacgagggcccu

SEQ ID NO: 1104909 - RNA, 19 nt, Artificial Sequence
  Description of Artificial Sequence: Synthetic oligonucleotide
guaaagcaagugcagcaga

SEQ ID NO: 1104910 - RNA, 19 nt, Artificial Sequence
  Description of Artificial Sequence: Synthetic oligonucleotide
uuucgaugauguucucgga

SEQ ID NO: 1104911 - RNA, 19 nt, Artificial Sequence
  Description of Artificial Sequence: Synthetic oligonucleotide
cagcggacccuccagauuc

SEQ ID NO: 1104912 - RNA, 19 nt, Artificial Sequence
  Description of Artificial Sequence: Synthetic oligonucleotide
acgagggcccuucaggacu

SEQ ID NO: 1104913 - RNA, 19 nt, Artificial Sequence
  Description of Artificial Sequence: Synthetic oligonucleotide
caguacauauccguucuug

SEQ ID NO: 1104914 - RNA, 19 nt, Artificial Sequence
  Description of Artificial Sequence: Synthetic oligonucleotide
uuaguacuucaaugcuuac

SEQ ID NO: 1104915 - RNA, 19 nt, Artificial Sequence
  Description of Artificial Sequence: Synthetic oligonucleotide
cuucggguaugucuguuuc

SEQ ID NO: 1104916 - RNA, 19 nt, Artificial Sequence
  Description of Artificial Sequence: Synthetic oligonucleotide
uucuacuugaggacaccua

SEQ ID NO: 1104917 - RNA, 19 nt, Artificial Sequence
  Description of Artificial Sequence: Synthetic oligonucleotide
uuaacuucggccgcuucau

SEQ ID NO: 1104918 - RNA, 19 nt, Artificial Sequence
  Description of Artificial Sequence: Synthetic oligonucleotide
uguggcccgacgucacgcg

SEQ ID NO: 1104919 - RNA, 19 nt, Artificial Sequence
  Description of Artificial Sequence: Synthetic oligonucleotide
guaacaucucccuggcguc

SEQ ID NO: 1104920 - RNA, 19 nt, Artificial Sequence
  Description of Artificial Sequence: Synthetic oligonucleotide
ucccuggcgucuucuacag

SEQ ID NO: 1104921 - RNA, 19 nt, Artificial Sequence
  Description of Artificial Sequence: Synthetic oligonucleotide
aauggucuuaguacuucaa

SEQ ID NO: 1104922 - RNA, 19 nt, Artificial Sequence
  Description of Artificial Sequence: Synthetic oligonucleotide
agcuaaacgagggcccuuc

SEQ ID NO: 1104923 - RNA, 19 nt, Artificial Sequence
  Description of Artificial Sequence: Synthetic oligonucleotide
uuauuccauuuguggggcc

SEQ ID NO: 1104924 - RNA, 19 nt, Artificial Sequence
  Description of Artificial Sequence: Synthetic oligonucleotide
auuuagccaguucuccaaa

SEQ ID NO: 1104925 - RNA, 19 nt, Artificial Sequence
  Description of Artificial Sequence: Synthetic oligonucleotide
gucugucgaagcuuugaac

SEQ ID NO: 1104926 - RNA, 19 nt, Artificial Sequence
  Description of Artificial Sequence: Synthetic oligonucleotide
uggugagauaaugaagcau

SEQ ID NO: 1104927 - RNA, 19 nt, Artificial Sequence
  Description of Artificial Sequence: Synthetic oligonucleotide
gcuuugaacaccacuguug

SEQ ID NO: 1104928 - RNA, 19 nt, Artificial Sequence
  Description of Artificial Sequence: Synthetic oligonucleotide
uccuucgguacuagaucug

SEQ ID NO: 1104929 - RNA, 19 nt, Artificial Sequence
  Description of Artificial Sequence: Synthetic oligonucleotide
gauucggaagagaccgcag

SEQ ID NO: 1104930 - RNA, 19 nt, Artificial Sequence
  Description of Artificial Sequence: Synthetic oligonucleotide
gacuuguaugcugugugca

SEQ ID NO: 1104931 - RNA, 19 nt, Artificial Sequence
  Description of Artificial Sequence: Synthetic oligonucleotide
aucgccaggguuaacuuca

SEQ ID NO: 1104932 - RNA, 19 nt, Artificial Sequence
  Description of Artificial Sequence: Synthetic oligonucleotide
aaugcuuacuggacuccgu

SEQ ID NO: 1104933 - RNA, 19 nt, Artificial Sequence
  Description of Artificial Sequence: Synthetic oligonucleotide
accggaaaaggauucuauu

SEQ ID NO: 1104934 - RNA, 19 nt, Artificial Sequence
  Description of Artificial Sequence: Synthetic oligonucleotide
agauucggaagagaccgca

SEQ ID NO: 1104935 - RNA, 19 nt, Artificial Sequence
  Description of Artificial Sequence: Synthetic oligonucleotide
cucuuaugacaggucauac

SEQ ID NO: 1104936 - RNA, 19 nt, Artificial Sequence
  Description of Artificial Sequence: Synthetic oligonucleotide
uccugacaaugcaauuuuc

SEQ ID NO: 1104937 - RNA, 19 nt, Artificial Sequence
  Description of Artificial Sequence: Synthetic oligonucleotide
uggacuccguaaagcaagu

SEQ ID NO: 1104938 - RNA, 19 nt, Artificial Sequence
  Description of Artificial Sequence: Synthetic oligonucleotide
cugggauagaauggcacug

SEQ ID NO: 1104939 - RNA, 19 nt, Artificial Sequence
  Description of Artificial Sequence: Synthetic oligonucleotide
acuuuggacaauagcuucu

SEQ ID NO: 1104940 - RNA, 19 nt, Artificial Sequence
  Description of Artificial Sequence: Synthetic oligonucleotide
cuucuauuauuccauuugu

SEQ ID NO: 1104941 - RNA, 19 nt, Artificial Sequence
  Description of Artificial Sequence: Synthetic oligonucleotide
cuucacgaagaagagccuc

SEQ ID NO: 1104942 - RNA, 19 nt, Artificial Sequence
  Description of Artificial Sequence: Synthetic oligonucleotide
agcagcacuuucaauauuu

SEQ ID NO: 1104943 - RNA, 19 nt, Artificial Sequence
  Description of Artificial Sequence: Synthetic oligonucleotide
uuauaccccgggacagugu

SEQ ID NO: 1104944 - RNA, 19 nt, Artificial Sequence
  Description of Artificial Sequence: Synthetic oligonucleotide
uucggguaugucuguuucu

SEQ ID NO: 1104945 - RNA, 19 nt, Artificial Sequence
  Description of Artificial Sequence: Synthetic oligonucleotide
ggugcagaccucuuuucug

SEQ ID NO: 1104946 - RNA, 19 nt, Artificial Sequence
  Description of Artificial Sequence: Synthetic oligonucleotide
gcgaaaugaagcuguggcc

SEQ ID NO: 1104947 - RNA, 19 nt, Artificial Sequence
  Description of Artificial Sequence: Synthetic oligonucleotide
gaugcugcuuuuccccaca

SEQ ID NO: 1104948 - RNA, 19 nt, Artificial Sequence
  Description of Artificial Sequence: Synthetic oligonucleotide
ucccacaugacugcugaaa

SEQ ID NO: 1104949 - RNA, 19 nt, Artificial Sequence
  Description of Artificial Sequence: Synthetic oligonucleotide
cgaaaugaagcuguggccc

SEQ ID NO: 1104950 - RNA, 19 nt, Artificial Sequence
  Description of Artificial Sequence: Synthetic oligonucleotide
agccucuuuaaagggagca

SEQ ID NO: 1104951 - RNA, 19 nt, Artificial Sequence
  Description of Artificial Sequence: Synthetic oligonucleotide
uaagucccauaggaacucc

SEQ ID NO: 1104952 - RNA, 19 nt, Artificial Sequence
  Description of Artificial Sequence: Synthetic oligonucleotide
gggacaguguauuuuaaua

SEQ ID NO: 1104953 - RNA, 19 nt, Artificial Sequence
  Description of Artificial Sequence: Synthetic oligonucleotide
gccacgugcgaaaugaagc

SEQ ID NO: 1104954 - RNA, 19 nt, Artificial Sequence
  Description of Artificial Sequence: Synthetic oligonucleotide
uaaccuaaugaggcaccug

SEQ ID NO: 1104955 - RNA, 19 nt, Artificial Sequence
  Description of Artificial Sequence: Synthetic oligonucleotide
augaagcuguggcccgacg

SEQ ID NO: 1104956 - RNA, 19 nt, Artificial Sequence
  Description of Artificial Sequence: Synthetic oligonucleotide
ggacuuguaugcugugugc

SEQ ID NO: 1104957 - RNA, 19 nt, Artificial Sequence
  Description of Artificial Sequence: Synthetic oligonucleotide
aguuccugacaaugcaauu

SEQ ID NO: 1104958 - RNA, 19 nt, Artificial Sequence
  Description of Artificial Sequence: Synthetic oligonucleotide
acgugcgaaaugaagcugu

SEQ ID NO: 1104959 - RNA, 19 nt, Artificial Sequence
  Description of Artificial Sequence: Synthetic oligonucleotide
auaaugaagcauggacuau

SEQ ID NO: 1104960 - RNA, 19 nt, Artificial Sequence
  Description of Artificial Sequence: Synthetic oligonucleotide
guaagucccauaggaacuc

SEQ ID NO: 1104961 - RNA, 19 nt, Artificial Sequence
  Description of Artificial Sequence: Synthetic oligonucleotide
gaggaccggaaaaggauuc

SEQ ID NO: 1104962 - RNA, 19 nt, Artificial Sequence
  Description of Artificial Sequence: Synthetic oligonucleotide
ucuucggguaugucuguuu

SEQ ID NO: 1104963 - RNA, 19 nt, Artificial Sequence
  Description of Artificial Sequence: Synthetic oligonucleotide
aaugaucugucaggugguu

SEQ ID NO: 1104964 - RNA, 19 nt, Artificial Sequence
  Description of Artificial Sequence: Synthetic oligonucleotide
ucggguaugucuguuucuu

SEQ ID NO: 1104965 - RNA, 19 nt, Artificial Sequence
  Description of Artificial Sequence: Synthetic oligonucleotide
auauccguucuuguuuuaa

SEQ ID NO: 1104966 - RNA, 19 nt, Artificial Sequence
  Description of Artificial Sequence: Synthetic oligonucleotide
gucgaagcuuugaacacca

SEQ ID NO: 1104967 - RNA, 19 nt, Artificial Sequence
  Description of Artificial Sequence: Synthetic oligonucleotide
auucuucggguaugucugu

SEQ ID NO: 1104968 - RNA, 19 nt, Artificial Sequence
  Description of Artificial Sequence: Synthetic oligonucleotide
cuggugagguuccacauua

SEQ ID NO: 1104969 - RNA, 19 nt, Artificial Sequence
  Description of Artificial Sequence: Synthetic oligonucleotide
cagauucggaagagaccgc

SEQ ID NO: 1104970 - RNA, 19 nt, Artificial Sequence
  Description of Artificial Sequence: Synthetic oligonucleotide
accuaaugaggcaccuguc

SEQ ID NO: 1104971 - RNA, 19 nt, Artificial Sequence
  Description of Artificial Sequence: Synthetic oligonucleotide
gcauggacuaucuaugacu

SEQ ID NO: 1104972 - RNA, 19 nt, Artificial Sequence
  Description of Artificial Sequence: Synthetic oligonucleotide
gggauagaauggcacuggc

SEQ ID NO: 1104973 - RNA, 19 nt, Artificial Sequence
  Description of Artificial Sequence: Synthetic oligonucleotide
ccuuagcucagcuucacga

SEQ ID NO: 1104974 - RNA, 19 nt, Artificial Sequence
  Description of Artificial Sequence: Synthetic oligonucleotide
ggaauuccaggguccuucc

SEQ ID NO: 1104975 - RNA, 19 nt, Artificial Sequence
  Description of Artificial Sequence: Synthetic oligonucleotide
cuccaauggucuuaguacu

SEQ ID NO: 1104976 - RNA, 19 nt, Artificial Sequence
  Description of Artificial Sequence: Synthetic oligonucleotide
gcugcaauauucucauuaa

SEQ ID NO: 1104977 - RNA, 19 nt, Artificial Sequence
  Description of Artificial Sequence: Synthetic oligonucleotide
aggacaccuacaaccaaga

SEQ ID NO: 1104978 - RNA, 19 nt, Artificial Sequence
  Description of Artificial Sequence: Synthetic oligonucleotide
aguuacauggugagauaau

SEQ ID NO: 1104979 - RNA, 19 nt, Artificial Sequence
  Description of Artificial Sequence: Synthetic oligonucleotide
cuccuucgguacuagaucu

SEQ ID NO: 1104980 - RNA, 19 nt, Artificial Sequence
  Description of Artificial Sequence: Synthetic oligonucleotide
cugcaauauucucauuaaa

SEQ ID NO: 1104981 - RNA, 19 nt, Artificial Sequence
  Description of Artificial Sequence: Synthetic oligonucleotide
ucggccgcuucaugguggc

SEQ ID NO: 1104982 - RNA, 19 nt, Artificial Sequence
  Description of Artificial Sequence: Synthetic oligonucleotide
uggcccgacgucacgcgcu

SEQ ID NO: 1104983 - RNA, 19 nt, Artificial Sequence
  Description of Artificial Sequence: Synthetic oligonucleotide
ucgaagcuuugaacaccac

SEQ ID NO: 1104984 - RNA, 19 nt, Artificial Sequence
  Description of Artificial Sequence: Synthetic oligonucleotide
guccaacgggacaaucugc

SEQ ID NO: 1104985 - RNA, 19 nt, Artificial Sequence
  Description of Artificial Sequence: Synthetic oligonucleotide
cacgugcgaaaugaagcug

SEQ ID NO: 1104986 - RNA, 19 nt, Artificial Sequence
  Description of Artificial Sequence: Synthetic oligonucleotide
ucggaagagaccgcagcua

SEQ ID NO: 1104987 - RNA, 19 nt, Artificial Sequence
  Description of Artificial Sequence: Synthetic oligonucleotide
agaggaccggaaaaggauu

SEQ ID NO: 1104988 - RNA, 19 nt, Artificial Sequence
  Description of Artificial Sequence: Synthetic oligonucleotide
cuucggccgcuucauggug

SEQ ID NO: 1104989 - RNA, 19 nt, Artificial Sequence
  Description of Artificial Sequence: Synthetic oligonucleotide
guugacuaucagccuggga

SEQ ID NO: 1104990 - RNA, 19 nt, Artificial Sequence
  Description of Artificial Sequence: Synthetic oligonucleotide
guacauauccguucuuguu

SEQ ID NO: 1104991 - RNA, 19 nt, Artificial Sequence
  Description of Artificial Sequence: Synthetic oligonucleotide
ccacaugacugcugaaaac

SEQ ID NO: 1104992 - RNA, 19 nt, Artificial Sequence
  Description of Artificial Sequence: Synthetic oligonucleotide
acaguacauauccguucuu

SEQ ID NO: 1104993 - RNA, 19 nt, Artificial Sequence
  Description of Artificial Sequence: Synthetic oligonucleotide
acaugacugcugaaaacuu

SEQ ID NO: 1104994 - RNA, 19 nt, Artificial Sequence
  Description of Artificial Sequence: Synthetic oligonucleotide
gagccucuuuaaagggagc

SEQ ID NO: 1104995 - RNA, 19 nt, Artificial Sequence
  Description of Artificial Sequence: Synthetic oligonucleotide
gguacuagaucugauuuau

SEQ ID NO: 1104996 - RNA, 19 nt, Artificial Sequence
  Description of Artificial Sequence: Synthetic oligonucleotide
ggcaauucuuuacucaaau

SEQ ID NO: 1104997 - RNA, 19 nt, Artificial Sequence
  Description of Artificial Sequence: Synthetic oligonucleotide
ucgugcgccacgugcgaaa

SEQ ID NO: 1104998 - RNA, 19 nt, Artificial Sequence
  Description of Artificial Sequence: Synthetic oligonucleotide
ugcucaucgccaggguuaa

SEQ ID NO: 1104999 - RNA, 19 nt, Artificial Sequence
  Description of Artificial Sequence: Synthetic oligonucleotide
aggaccggaaaaggauucu

SEQ ID NO: 1105000 - RNA, 19 nt, Artificial Sequence
  Description of Artificial Sequence: Synthetic oligonucleotide
ugcugcuuuuccccacauu

SEQ ID NO: 1105001 - RNA, 19 nt, Artificial Sequence
  Description of Artificial Sequence: Synthetic oligonucleotide
ucacgaagaagagccucuu

SEQ ID NO: 1105002 - RNA, 19 nt, Artificial Sequence
  Description of Artificial Sequence: Synthetic oligonucleotide
ccguaaagcaagugcagca

SEQ ID NO: 1105003 - RNA, 19 nt, Artificial Sequence
  Description of Artificial Sequence: Synthetic oligonucleotide
agaagcuuacaaagugcuu

SEQ ID NO: 1105004 - RNA, 19 nt, Artificial Sequence
  Description of Artificial Sequence: Synthetic oligonucleotide
uaccccgggacaguguauu

SEQ ID NO: 1105005 - RNA, 19 nt, Artificial Sequence
  Description of Artificial Sequence: Synthetic oligonucleotide
accucuuaugacaggucau

SEQ ID NO: 1105006 - RNA, 19 nt, Artificial Sequence
  Description of Artificial Sequence: Synthetic oligonucleotide
ccaauuacuccaaccugga

SEQ ID NO: 1105007 - RNA, 19 nt, Artificial Sequence
  Description of Artificial Sequence: Synthetic oligonucleotide
acuaucagccugggauaga

SEQ ID NO: 1105008 - RNA, 19 nt, Artificial Sequence
  Description of Artificial Sequence: Synthetic oligonucleotide
guaaccuaaugaggcaccu

SEQ ID NO: 1105009 - RNA, 19 nt, Artificial Sequence
  Description of Artificial Sequence: Synthetic oligonucleotide
gaccgcagcuacgccgugc

SEQ ID NO: 1105010 - RNA, 19 nt, Artificial Sequence
  Description of Artificial Sequence: Synthetic oligonucleotide
ggacuaucuaugacuguga

SEQ ID NO: 1105011 - RNA, 19 nt, Artificial Sequence
  Description of Artificial Sequence: Synthetic oligonucleotide
guggcccgacgucacgcgc

SEQ ID NO: 1105012 - RNA, 19 nt, Artificial Sequence
  Description of Artificial Sequence: Synthetic oligonucleotide
gauguucucggaccuucuu

SEQ ID NO: 1105013 - RNA, 19 nt, Artificial Sequence
  Description of Artificial Sequence: Synthetic oligonucleotide
caggguuaacuucauguuu

SEQ ID NO: 1105014 - RNA, 19 nt, Artificial Sequence
  Description of Artificial Sequence: Synthetic oligonucleotide
agcggacccuccagauucg

SEQ ID NO: 1105015 - RNA, 19 nt, Artificial Sequence
  Description of Artificial Sequence: Synthetic oligonucleotide
gaccggaaaaggauucuau

SEQ ID NO: 1105016 - RNA, 19 nt, Artificial Sequence
  Description of Artificial Sequence: Synthetic oligonucleotide
ggagcacuauuuggaauuc

SEQ ID NO: 1105017 - RNA, 19 nt, Artificial Sequence
  Description of Artificial Sequence: Synthetic oligonucleotide
cuuuggaacggaacagcuu

SEQ ID NO: 1105018 - RNA, 19 nt, Artificial Sequence
  Description of Artificial Sequence: Synthetic oligonucleotide
gagaccgcagcuacgccgu

SEQ ID NO: 1105019 - RNA, 19 nt, Artificial Sequence
  Description of Artificial Sequence: Synthetic oligonucleotide
ccacauuagauugcucauc

SEQ ID NO: 1105020 - RNA, 19 nt, Artificial Sequence
  Description of Artificial Sequence: Synthetic oligonucleotide
ucgccaggguuaacuucau

SEQ ID NO: 1105021 - RNA, 19 nt, Artificial Sequence
  Description of Artificial Sequence: Synthetic oligonucleotide
gcagcuacgccgugccuuc

SEQ ID NO: 1105022 - RNA, 19 nt, Artificial Sequence
  Description of Artificial Sequence: Synthetic oligonucleotide
cccacaugacugcugaaaa

SEQ ID NO: 1105023 - RNA, 19 nt, Artificial Sequence
  Description of Artificial Sequence: Synthetic oligonucleotide
ccguucuuguuuuaagcua

SEQ ID NO: 1105024 - RNA, 19 nt, Artificial Sequence
  Description of Artificial Sequence: Synthetic oligonucleotide
uagcuaaacgagggcccuu

SEQ ID NO: 1105025 - RNA, 19 nt, Artificial Sequence
  Description of Artificial Sequence: Synthetic oligonucleotide
ggacuccguaaagcaagug

SEQ ID NO: 1105026 - RNA, 19 nt, Artificial Sequence
  Description of Artificial Sequence: Synthetic oligonucleotide
agaccgcagcuacgccgug

SEQ ID NO: 1105027 - RNA, 19 nt, Artificial Sequence
  Description of Artificial Sequence: Synthetic oligonucleotide
gugcgccacgugcgaaaug

SEQ ID NO: 1105028 - RNA, 19 nt, Artificial Sequence
  Description of Artificial Sequence: Synthetic oligonucleotide
gggaaaccaauuacuccaa

SEQ ID NO: 1105029 - RNA, 19 nt, Artificial Sequence
  Description of Artificial Sequence: Synthetic oligonucleotide
cuucgguacuagaucugau

SEQ ID NO: 1105030 - RNA, 19 nt, Artificial Sequence
  Description of Artificial Sequence: Synthetic oligonucleotide
cacucagaccauagcaguu

SEQ ID NO: 1105031 - RNA, 19 nt, Artificial Sequence
  Description of Artificial Sequence: Synthetic oligonucleotide
ccuucgguacuagaucuga

SEQ ID NO: 1105032 - RNA, 19 nt, Artificial Sequence
  Description of Artificial Sequence: Synthetic oligonucleotide
accccgggacaguguauuu

SEQ ID NO: 1105033 - RNA, 19 nt, Artificial Sequence
  Description of Artificial Sequence: Synthetic oligonucleotide
caauuacuccaaccuggau

SEQ ID NO: 1105034 - RNA, 19 nt, Artificial Sequence
  Description of Artificial Sequence: Synthetic oligonucleotide
ccucuuuaaagggagcacu

SEQ ID NO: 1105035 - RNA, 19 nt, Artificial Sequence
  Description of Artificial Sequence: Synthetic oligonucleotide
ccacucagaccauagcagu

SEQ ID NO: 1105036 - RNA, 19 nt, Artificial Sequence
  Description of Artificial Sequence: Synthetic oligonucleotide
acgggacaaucugcaugcu

SEQ ID NO: 1105037 - RNA, 19 nt, Artificial Sequence
  Description of Artificial Sequence: Synthetic oligonucleotide
ccaacaguacauauccguu

SEQ ID NO: 1105038 - RNA, 19 nt, Artificial Sequence
  Description of Artificial Sequence: Synthetic oligonucleotide
gcugugugcauuauuuguu

SEQ ID NO: 1105039 - RNA, 19 nt, Artificial Sequence
  Description of Artificial Sequence: Synthetic oligonucleotide
cucggaccuucuuuuggau

SEQ ID NO: 1105040 - RNA, 19 nt, Artificial Sequence
  Description of Artificial Sequence: Synthetic oligonucleotide
ggaccggaaaaggauucua

SEQ ID NO: 1105041 - RNA, 19 nt, Artificial Sequence
  Description of Artificial Sequence: Synthetic oligonucleotide
cccgggacaguguauuuua

SEQ ID NO: 1105042 - RNA, 19 nt, Artificial Sequence
  Description of Artificial Sequence: Synthetic oligonucleotide
ccucuuaugacaggucaua

SEQ ID NO: 1105043 - RNA, 19 nt, Artificial Sequence
  Description of Artificial Sequence: Synthetic oligonucleotide
ccaagaggaucucuggcau

SEQ ID NO: 1105044 - RNA, 19 nt, Artificial Sequence
  Description of Artificial Sequence: Synthetic oligonucleotide
cgggacaaucugcaugcuc

SEQ ID NO: 1105045 - RNA, 19 nt, Artificial Sequence
  Description of Artificial Sequence: Synthetic oligonucleotide
gcggacccuccagauucgg

SEQ ID NO: 1105046 - RNA, 19 nt, Artificial Sequence
  Description of Artificial Sequence: Synthetic oligonucleotide
cggguaugucuguuucuuc

SEQ ID NO: 1105047 - RNA, 19 nt, Artificial Sequence
  Description of Artificial Sequence: Synthetic oligonucleotide
guacuagaucugauuuauu

SEQ ID NO: 1105048 - RNA, 19 nt, Artificial Sequence
  Description of Artificial Sequence: Synthetic oligonucleotide
cacgaagaagagccucuuu

SEQ ID NO: 1105049 - RNA, 19 nt, Artificial Sequence
  Description of Artificial Sequence: Synthetic oligonucleotide
cuacgccgugccuucucgu

SEQ ID NO: 1105050 - RNA, 19 nt, Artificial Sequence
  Description of Artificial Sequence: Synthetic oligonucleotide
ccgcuucaugguggcagcg

SEQ ID NO: 1105051 - RNA, 19 nt, Artificial Sequence
  Description of Artificial Sequence: Synthetic oligonucleotide
gucauacguuugcuugcuu

SEQ ID NO: 1105052 - RNA, 19 nt, Artificial Sequence
  Description of Artificial Sequence: Synthetic oligonucleotide
cgguacuagaucugauuua

SEQ ID NO: 1105053 - RNA, 19 nt, Artificial Sequence
  Description of Artificial Sequence: Synthetic oligonucleotide
ccuucucgugcgccacgug

SEQ ID NO: 1105054 - RNA, 19 nt, Artificial Sequence
  Description of Artificial Sequence: Synthetic oligonucleotide
ccgggacaguguauuuuaa

SEQ ID NO: 1105055 - RNA, 19 nt, Artificial Sequence
  Description of Artificial Sequence: Synthetic oligonucleotide
gcagcggacccuccagauu

SEQ ID NO: 1105056 - RNA, 19 nt, Artificial Sequence
  Description of Artificial Sequence: Synthetic oligonucleotide
ccaacgggacaaucugcau

SEQ ID NO: 1105057 - RNA, 19 nt, Artificial Sequence
  Description of Artificial Sequence: Synthetic oligonucleotide
ccuuauaccccgggacagu

SEQ ID NO: 1105058 - RNA, 19 nt, Artificial Sequence
  Description of Artificial Sequence: Synthetic oligonucleotide
gcgccacgugcgaaaugaa

SEQ ID NO: 1105059 - RNA, 19 nt, Artificial Sequence
  Description of Artificial Sequence: Synthetic oligonucleotide
cagcuacgccgugccuucu

SEQ ID NO: 1105060 - RNA, 19 nt, Artificial Sequence
  Description of Artificial Sequence: Synthetic oligonucleotide
cgcagcuacgccgugccuu

SEQ ID NO: 1105061 - RNA, 19 nt, Artificial Sequence
  Description of Artificial Sequence: Synthetic oligonucleotide
ccccgggacaguguauuuu

SEQ ID NO: 1105062 - RNA, 19 nt, Artificial Sequence
  Description of Artificial Sequence: Synthetic oligonucleotide
cgugcgccacgugcgaaau

SEQ ID NO: 1105063 - RNA, 19 nt, Artificial Sequence
  Description of Artificial Sequence: Synthetic oligonucleotide
ccgcagcuacgccgugccu

SEQ ID NO: 1105064 - RNA, 19 nt, Artificial Sequence
  Description of Artificial Sequence: Synthetic oligonucleotide
cggccgcuucaugguggca

SEQ ID NO: 1105065 - RNA, 19 nt, Artificial Sequence
  Description of Artificial Sequence: Synthetic oligonucleotide
aaugguuacggucugcugc

SEQ ID NO: 1105066 - RNA, 19 nt, Artificial Sequence
  Description of Artificial Sequence: Synthetic oligonucleotide
aauacuguggucgacgccc

SEQ ID NO: 1105067 - RNA, 19 nt, Artificial Sequence
  Description of Artificial Sequence: Synthetic oligonucleotide
uguuggaugaccaaaccgg

SEQ ID NO: 1105068 - RNA, 19 nt, Artificial Sequence
  Description of Artificial Sequence: Synthetic oligonucleotide
uggauagcgucuauaaugg

SEQ ID NO: 1105069 - RNA, 19 nt, Artificial Sequence
  Description of Artificial Sequence: Synthetic oligonucleotide
agauaaugcagauaguucu

SEQ ID NO: 1105070 - RNA, 19 nt, Artificial Sequence
  Description of Artificial Sequence: Synthetic oligonucleotide
uauucugucucacuggucu

SEQ ID NO: 1105071 - RNA, 19 nt, Artificial Sequence
  Description of Artificial Sequence: Synthetic oligonucleotide
uuguuggaugaccaaaccg

SEQ ID NO: 1105072 - RNA, 19 nt, Artificial Sequence
  Description of Artificial Sequence: Synthetic oligonucleotide
gauaccgacguugaggugg

SEQ ID NO: 1105073 - RNA, 19 nt, Artificial Sequence
  Description of Artificial Sequence: Synthetic oligonucleotide
aaauacgucuuccuuggug

SEQ ID NO: 1105074 - RNA, 19 nt, Artificial Sequence
  Description of Artificial Sequence: Synthetic oligonucleotide
aacuugaccagauaugaaa

SEQ ID NO: 1105075 - RNA, 19 nt, Artificial Sequence
  Description of Artificial Sequence: Synthetic oligonucleotide
auugccguccucucuaggc

SEQ ID NO: 1105076 - RNA, 19 nt, Artificial Sequence
  Description of Artificial Sequence: Synthetic oligonucleotide
guggauagcgucuauaaug

SEQ ID NO: 1105077 - RNA, 19 nt, Artificial Sequence
  Description of Artificial Sequence: Synthetic oligonucleotide
aaggcgugcgcccaacacc

SEQ ID NO: 1105078 - RNA, 19 nt, Artificial Sequence
  Description of Artificial Sequence: Synthetic oligonucleotide
gaucgaacuagcgagaaug

SEQ ID NO: 1105079 - RNA, 19 nt, Artificial Sequence
  Description of Artificial Sequence: Synthetic oligonucleotide
uauuaacagaugcuugcag

SEQ ID NO: 1105080 - RNA, 19 nt, Artificial Sequence
  Description of Artificial Sequence: Synthetic oligonucleotide
uaagccggcauuuacucag

SEQ ID NO: 1105081 - RNA, 19 nt, Artificial Sequence
  Description of Artificial Sequence: Synthetic oligonucleotide
gaugcuugcaguuuguuaa

SEQ ID NO: 1105082 - RNA, 19 nt, Artificial Sequence
  Description of Artificial Sequence: Synthetic oligonucleotide
uaccgaucgaacuagcgag

SEQ ID NO: 1105083 - RNA, 19 nt, Artificial Sequence
  Description of Artificial Sequence: Synthetic oligonucleotide
uuaagaccuuuauuaacag

SEQ ID NO: 1105084 - RNA, 19 nt, Artificial Sequence
  Description of Artificial Sequence: Synthetic oligonucleotide
uaguguaucuggucaacgg

SEQ ID NO: 1105085 - RNA, 19 nt, Artificial Sequence
  Description of Artificial Sequence: Synthetic oligonucleotide
acauauucugucucacugg

SEQ ID NO: 1105086 - RNA, 19 nt, Artificial Sequence
  Description of Artificial Sequence: Synthetic oligonucleotide
aaaggcgugcgcccaacac

SEQ ID NO: 1105087 - RNA, 19 nt, Artificial Sequence
  Description of Artificial Sequence: Synthetic oligonucleotide
uggaugaccaaaccggaug

SEQ ID NO: 1105088 - RNA, 19 nt, Artificial Sequence
  Description of Artificial Sequence: Synthetic oligonucleotide
ucugcgucgguaauugaag

SEQ ID NO: 1105089 - RNA, 19 nt, Artificial Sequence
  Description of Artificial Sequence: Synthetic oligonucleotide
gguaauugaaguugcggcg

SEQ ID NO: 1105090 - RNA, 19 nt, Artificial Sequence
  Description of Artificial Sequence: Synthetic oligonucleotide
uagauaaugcagauaguuc

SEQ ID NO: 1105091 - RNA, 19 nt, Artificial Sequence
  Description of Artificial Sequence: Synthetic oligonucleotide
gaugaaaccguauccguuc

SEQ ID NO: 1105092 - RNA, 19 nt, Artificial Sequence
  Description of Artificial Sequence: Synthetic oligonucleotide
uguaacauuugcugccucc

SEQ ID NO: 1105093 - RNA, 19 nt, Artificial Sequence
  Description of Artificial Sequence: Synthetic oligonucleotide
acgaauucucagcuggugg

SEQ ID NO: 1105094 - RNA, 19 nt, Artificial Sequence
  Description of Artificial Sequence: Synthetic oligonucleotide
ucuuguuggaugaccaaac

SEQ ID NO: 1105095 - RNA, 19 nt, Artificial Sequence
  Description of Artificial Sequence: Synthetic oligonucleotide
uccuacacugcgaagguac

SEQ ID NO: 1105096 - RNA, 19 nt, Artificial Sequence
  Description of Artificial Sequence: Synthetic oligonucleotide
uucgccuacgauagggccg

SEQ ID NO: 1105097 - RNA, 19 nt, Artificial Sequence
  Description of Artificial Sequence: Synthetic oligonucleotide
aaccccgauacauauucug

SEQ ID NO: 1105098 - RNA, 19 nt, Artificial Sequence
  Description of Artificial Sequence: Synthetic oligonucleotide
augaaaccguauccguucc

SEQ ID NO: 1105099 - RNA, 19 nt, Artificial Sequence
  Description of Artificial Sequence: Synthetic oligonucleotide
aaggugggaaccuucgccu

SEQ ID NO: 1105100 - RNA, 19 nt, Artificial Sequence
  Description of Artificial Sequence: Synthetic oligonucleotide
aaaaccauuaaagguguau

SEQ ID NO: 1105101 - RNA, 19 nt, Artificial Sequence
  Description of Artificial Sequence: Synthetic oligonucleotide
guuuaggguucucugggcg

SEQ ID NO: 1105102 - RNA, 19 nt, Artificial Sequence
  Description of Artificial Sequence: Synthetic oligonucleotide
gaaccuucgccuacgauag

SEQ ID NO: 1105103 - RNA, 19 nt, Artificial Sequence
  Description of Artificial Sequence: Synthetic oligonucleotide
ucgguaauugaaguugcgg

SEQ ID NO: 1105104 - RNA, 19 nt, Artificial Sequence
  Description of Artificial Sequence: Synthetic oligonucleotide
auagauaaugcagauaguu

SEQ ID NO: 1105105 - RNA, 19 nt, Artificial Sequence
  Description of Artificial Sequence: Synthetic oligonucleotide
guggucgacgcccauaggg

SEQ ID NO: 1105106 - RNA, 19 nt, Artificial Sequence
  Description of Artificial Sequence: Synthetic oligonucleotide
aaucgcggucuguaacccc

SEQ ID NO: 1105107 - RNA, 19 nt, Artificial Sequence
  Description of Artificial Sequence: Synthetic oligonucleotide
acucucacuauucugguaa

SEQ ID NO: 1105108 - RNA, 19 nt, Artificial Sequence
  Description of Artificial Sequence: Synthetic oligonucleotide
augguuacggucugcugcg

SEQ ID NO: 1105109 - RNA, 19 nt, Artificial Sequence
  Description of Artificial Sequence: Synthetic oligonucleotide
agauaguucuaguguaucu

SEQ ID NO: 1105110 - RNA, 19 nt, Artificial Sequence
  Description of Artificial Sequence: Synthetic oligonucleotide
ugcgaagguacuuccuggg

SEQ ID NO: 1105111 - RNA, 19 nt, Artificial Sequence
  Description of Artificial Sequence: Synthetic oligonucleotide
aaccccaugcugcauagau

SEQ ID NO: 1105112 - RNA, 19 nt, Artificial Sequence
  Description of Artificial Sequence: Synthetic oligonucleotide
acacugcgaagguacuucc

SEQ ID NO: 1105113 - RNA, 19 nt, Artificial Sequence
  Description of Artificial Sequence: Synthetic oligonucleotide
cuuguuggaugaccaaacc

SEQ ID NO: 1105114 - RNA, 19 nt, Artificial Sequence
  Description of Artificial Sequence: Synthetic oligonucleotide
acacccauuauuauuuaag

SEQ ID NO: 1105115 - RNA, 19 nt, Artificial Sequence
  Description of Artificial Sequence: Synthetic oligonucleotide
acugcgaagguacuuccug

SEQ ID NO: 1105116 - RNA, 19 nt, Artificial Sequence
  Description of Artificial Sequence: Synthetic oligonucleotide
uucagcuccaaucuuuguu

SEQ ID NO: 1105117 - RNA, 19 nt, Artificial Sequence
  Description of Artificial Sequence: Synthetic oligonucleotide
ucccaaaaccuucguugcg

SEQ ID NO: 1105118 - RNA, 19 nt, Artificial Sequence
  Description of Artificial Sequence: Synthetic oligonucleotide
auaaugcagauaguucuag

SEQ ID NO: 1105119 - RNA, 19 nt, Artificial Sequence
  Description of Artificial Sequence: Synthetic oligonucleotide
auuuacucagccccgcccu

SEQ ID NO: 1105120 - RNA, 19 nt, Artificial Sequence
  Description of Artificial Sequence: Synthetic oligonucleotide
gaucccucguucuuuuccc

SEQ ID NO: 1105121 - RNA, 19 nt, Artificial Sequence
  Description of Artificial Sequence: Synthetic oligonucleotide
ucuaccuugcucuccugca

SEQ ID NO: 1105122 - RNA, 19 nt, Artificial Sequence
  Description of Artificial Sequence: Synthetic oligonucleotide
aguaaggugggaaccuucg

SEQ ID NO: 1105123 - RNA, 19 nt, Artificial Sequence
  Description of Artificial Sequence: Synthetic oligonucleotide
auagggccggcguuguugg

SEQ ID NO: 1105124 - RNA, 19 nt, Artificial Sequence
  Description of Artificial Sequence: Synthetic oligonucleotide
gcgucuauaaugguuacgg

SEQ ID NO: 1105125 - RNA, 19 nt, Artificial Sequence
  Description of Artificial Sequence: Synthetic oligonucleotide
uauccguuccuuacauuga

SEQ ID NO: 1105126 - RNA, 19 nt, Artificial Sequence
  Description of Artificial Sequence: Synthetic oligonucleotide
ugguaagccggcauuuacu

SEQ ID NO: 1105127 - RNA, 19 nt, Artificial Sequence
  Description of Artificial Sequence: Synthetic oligonucleotide
uucguugcgaugaccuucu

SEQ ID NO: 1105128 - RNA, 19 nt, Artificial Sequence
  Description of Artificial Sequence: Synthetic oligonucleotide
ugaugaaaccguauccguu

SEQ ID NO: 1105129 - RNA, 19 nt, Artificial Sequence
  Description of Artificial Sequence: Synthetic oligonucleotide
cauuuacucagccccgccc

SEQ ID NO: 1105130 - RNA, 19 nt, Artificial Sequence
  Description of Artificial Sequence: Synthetic oligonucleotide
gguaauugcguggaggacc

SEQ ID NO: 1105131 - RNA, 19 nt, Artificial Sequence
  Description of Artificial Sequence: Synthetic oligonucleotide
uucaggagcgcuuuccgau

SEQ ID NO: 1105132 - RNA, 19 nt, Artificial Sequence
  Description of Artificial Sequence: Synthetic oligonucleotide
ucuguaaccccgauacaua

SEQ ID NO: 1105133 - RNA, 19 nt, Artificial Sequence
  Description of Artificial Sequence: Synthetic oligonucleotide
gugucggcggcgcugaggg

SEQ ID NO: 1105134 - RNA, 19 nt, Artificial Sequence
  Description of Artificial Sequence: Synthetic oligonucleotide
uaaugcagauaguucuagu

SEQ ID NO: 1105135 - RNA, 19 nt, Artificial Sequence
  Description of Artificial Sequence: Synthetic oligonucleotide
uacgacguggauagcgucu

SEQ ID NO: 1105136 - RNA, 19 nt, Artificial Sequence
  Description of Artificial Sequence: Synthetic oligonucleotide
auacauauucugucucacu

SEQ ID NO: 1105137 - RNA, 19 nt, Artificial Sequence
  Description of Artificial Sequence: Synthetic oligonucleotide
cuucgccuacgauagggcc

SEQ ID NO: 1105138 - RNA, 19 nt, Artificial Sequence
  Description of Artificial Sequence: Synthetic oligonucleotide
cuaguguaucuggucaacg

SEQ ID NO: 1105139 - RNA, 19 nt, Artificial Sequence
  Description of Artificial Sequence: Synthetic oligonucleotide
cugcgaagguacuuccugg

SEQ ID NO: 1105140 - RNA, 19 nt, Artificial Sequence
  Description of Artificial Sequence: Synthetic oligonucleotide
aaaccggaugaugguagag

SEQ ID NO: 1105141 - RNA, 19 nt, Artificial Sequence
  Description of Artificial Sequence: Synthetic oligonucleotide
cauuuuacuguucccaaaa

SEQ ID NO: 1105142 - RNA, 19 nt, Artificial Sequence
  Description of Artificial Sequence: Synthetic oligonucleotide
gauagggccggcguuguug

SEQ ID NO: 1105143 - RNA, 19 nt, Artificial Sequence
  Description of Artificial Sequence: Synthetic oligonucleotide
aauugcguggaggaccccu

SEQ ID NO: 1105144 - RNA, 19 nt, Artificial Sequence
  Description of Artificial Sequence: Synthetic oligonucleotide
aauaaaggcgugcgcccaa

SEQ ID NO: 1105145 - RNA, 19 nt, Artificial Sequence
  Description of Artificial Sequence: Synthetic oligonucleotide
agcggacgaauucucagcu

SEQ ID NO: 1105146 - RNA, 19 nt, Artificial Sequence
  Description of Artificial Sequence: Synthetic oligonucleotide
guaauugcguggaggaccc

SEQ ID NO: 1105147 - RNA, 19 nt, Artificial Sequence
  Description of Artificial Sequence: Synthetic oligonucleotide
cgaacuagcgagaauggcg

SEQ ID NO: 1105148 - RNA, 19 nt, Artificial Sequence
  Description of Artificial Sequence: Synthetic oligonucleotide
aaccuucguugcgaugacc

SEQ ID NO: 1105149 - RNA, 19 nt, Artificial Sequence
  Description of Artificial Sequence: Synthetic oligonucleotide
cacccauuauuauuuaaga

SEQ ID NO: 1105150 - RNA, 19 nt, Artificial Sequence
  Description of Artificial Sequence: Synthetic oligonucleotide
gagcggacgaauucucagc

SEQ ID NO: 1105151 - RNA, 19 nt, Artificial Sequence
  Description of Artificial Sequence: Synthetic oligonucleotide
aaccggaugaugguagaga

SEQ ID NO: 1105152 - RNA, 19 nt, Artificial Sequence
  Description of Artificial Sequence: Synthetic oligonucleotide
uauaaugguuacggucugc

SEQ ID NO: 1105153 - RNA, 19 nt, Artificial Sequence
  Description of Artificial Sequence: Synthetic oligonucleotide
aucccucguucuuuucccc

SEQ ID NO: 1105154 - RNA, 19 nt, Artificial Sequence
  Description of Artificial Sequence: Synthetic oligonucleotide
uggucgacgcccauagggu

SEQ ID NO: 1105155 - RNA, 19 nt, Artificial Sequence
  Description of Artificial Sequence: Synthetic oligonucleotide
auagcgucuauaaugguua

SEQ ID NO: 1105156 - RNA, 19 nt, Artificial Sequence
  Description of Artificial Sequence: Synthetic oligonucleotide
gaauacuguggucgacgcc

SEQ ID NO: 1105157 - RNA, 19 nt, Artificial Sequence
  Description of Artificial Sequence: Synthetic oligonucleotide
ugcguggaggaccccuacg

SEQ ID NO: 1105158 - RNA, 19 nt, Artificial Sequence
  Description of Artificial Sequence: Synthetic oligonucleotide
ggaaucgcggucuguaacc

SEQ ID NO: 1105159 - RNA, 19 nt, Artificial Sequence
  Description of Artificial Sequence: Synthetic oligonucleotide
acacguuugucauuaccaa

SEQ ID NO: 1105160 - RNA, 19 nt, Artificial Sequence
  Description of Artificial Sequence: Synthetic oligonucleotide
auacgucuuccuugguguc

SEQ ID NO: 1105161 - RNA, 19 nt, Artificial Sequence
  Description of Artificial Sequence: Synthetic oligonucleotide
aucgaacuagcgagaaugg

SEQ ID NO: 1105162 - RNA, 19 nt, Artificial Sequence
  Description of Artificial Sequence: Synthetic oligonucleotide
ucgccuacgauagggccgg

SEQ ID NO: 1105163 - RNA, 19 nt, Artificial Sequence
  Description of Artificial Sequence: Synthetic oligonucleotide
ccggcauuuacucagcccc

SEQ ID NO: 1105164 - RNA, 19 nt, Artificial Sequence
  Description of Artificial Sequence: Synthetic oligonucleotide
guaauugaaguugcggcga

SEQ ID NO: 1105165 - RNA, 19 nt, Artificial Sequence
  Description of Artificial Sequence: Synthetic oligonucleotide
uuuacucagccccgcccug

SEQ ID NO: 1105166 - RNA, 19 nt, Artificial Sequence
  Description of Artificial Sequence: Synthetic oligonucleotide
cuguggucgacgcccauag

SEQ ID NO: 1105167 - RNA, 19 nt, Artificial Sequence
  Description of Artificial Sequence: Synthetic oligonucleotide
uuccuuacauugaaccauu

SEQ ID NO: 1105168 - RNA, 19 nt, Artificial Sequence
  Description of Artificial Sequence: Synthetic oligonucleotide
uucuuauugcuggaauuuc

SEQ ID NO: 1105169 - RNA, 19 nt, Artificial Sequence
  Description of Artificial Sequence: Synthetic oligonucleotide
ccguuccuuacauugaacc

SEQ ID NO: 1105170 - RNA, 19 nt, Artificial Sequence
  Description of Artificial Sequence: Synthetic oligonucleotide
uaguaaggugggaaccuuc

SEQ ID NO: 1105171 - RNA, 19 nt, Artificial Sequence
  Description of Artificial Sequence: Synthetic oligonucleotide
acguuugucauuaccaaaa

SEQ ID NO: 1105172 - RNA, 19 nt, Artificial Sequence
  Description of Artificial Sequence: Synthetic oligonucleotide
ucgaacuagcgagaauggc

SEQ ID NO: 1105173 - RNA, 19 nt, Artificial Sequence
  Description of Artificial Sequence: Synthetic oligonucleotide
ggcgauaccgacguugagg

SEQ ID NO: 1105174 - RNA, 19 nt, Artificial Sequence
  Description of Artificial Sequence: Synthetic oligonucleotide
uaauugaaguugcggcgau

SEQ ID NO: 1105175 - RNA, 19 nt, Artificial Sequence
  Description of Artificial Sequence: Synthetic oligonucleotide
uagggucuccgcauguagu

SEQ ID NO: 1105176 - RNA, 19 nt, Artificial Sequence
  Description of Artificial Sequence: Synthetic oligonucleotide
cuccgcauguaguaaggug

SEQ ID NO: 1105177 - RNA, 19 nt, Artificial Sequence
  Description of Artificial Sequence: Synthetic oligonucleotide
ucuaguguaucuggucaac

SEQ ID NO: 1105178 - RNA, 19 nt, Artificial Sequence
  Description of Artificial Sequence: Synthetic oligonucleotide
uacgauagggccggcguug

SEQ ID NO: 1105179 - RNA, 19 nt, Artificial Sequence
  Description of Artificial Sequence: Synthetic oligonucleotide
cuaccgaucgaacuagcga

SEQ ID NO: 1105180 - RNA, 19 nt, Artificial Sequence
  Description of Artificial Sequence: Synthetic oligonucleotide
agagaugguaagccggcau

SEQ ID NO: 1105181 - RNA, 19 nt, Artificial Sequence
  Description of Artificial Sequence: Synthetic oligonucleotide
agccggcauuuacucagcc

SEQ ID NO: 1105182 - RNA, 19 nt, Artificial Sequence
  Description of Artificial Sequence: Synthetic oligonucleotide
acgcccauagggucuccgc

SEQ ID NO: 1105183 - RNA, 19 nt, Artificial Sequence
  Description of Artificial Sequence: Synthetic oligonucleotide
gacgaauucucagcuggug

SEQ ID NO: 1105184 - RNA, 19 nt, Artificial Sequence
  Description of Artificial Sequence: Synthetic oligonucleotide
aucgcggucuguaaccccg

SEQ ID NO: 1105185 - RNA, 19 nt, Artificial Sequence
  Description of Artificial Sequence: Synthetic oligonucleotide
agaugcuugcaguuuguua

SEQ ID NO: 1105186 - RNA, 19 nt, Artificial Sequence
  Description of Artificial Sequence: Synthetic oligonucleotide
aaaccguauccguuccuua

SEQ ID NO: 1105187 - RNA, 19 nt, Artificial Sequence
  Description of Artificial Sequence: Synthetic oligonucleotide
ggaaccuucgccuacgaua

SEQ ID NO: 1105188 - RNA, 19 nt, Artificial Sequence
  Description of Artificial Sequence: Synthetic oligonucleotide
gguaagccggcauuuacuc

SEQ ID NO: 1105189 - RNA, 19 nt, Artificial Sequence
  Description of Artificial Sequence: Synthetic oligonucleotide
uuggaugaccaaaccggau

SEQ ID NO: 1105190 - RNA, 19 nt, Artificial Sequence
  Description of Artificial Sequence: Synthetic oligonucleotide
gaaucgcggucuguaaccc

SEQ ID NO: 1105191 - RNA, 19 nt, Artificial Sequence
  Description of Artificial Sequence: Synthetic oligonucleotide
gccuguaacauuugcugcc

SEQ ID NO: 1105192 - RNA, 19 nt, Artificial Sequence
  Description of Artificial Sequence: Synthetic oligonucleotide
uccuguugaugaaaccgua

SEQ ID NO: 1105193 - RNA, 19 nt, Artificial Sequence
  Description of Artificial Sequence: Synthetic oligonucleotide
ucauugccguccucucuag

SEQ ID NO: 1105194 - RNA, 19 nt, Artificial Sequence
  Description of Artificial Sequence: Synthetic oligonucleotide
gcugguaauugcguggagg

SEQ ID NO: 1105195 - RNA, 19 nt, Artificial Sequence
  Description of Artificial Sequence: Synthetic oligonucleotide
guaaggugggaaccuucgc

SEQ ID NO: 1105196 - RNA, 19 nt, Artificial Sequence
  Description of Artificial Sequence: Synthetic oligonucleotide
agcgucuauaaugguuacg

SEQ ID NO: 1105197 - RNA, 19 nt, Artificial Sequence
  Description of Artificial Sequence: Synthetic oligonucleotide
ugcugcguauuuacugccu

SEQ ID NO: 1105198 - RNA, 19 nt, Artificial Sequence
  Description of Artificial Sequence: Synthetic oligonucleotide
ggagcggacgaauucucag

SEQ ID NO: 1105199 - RNA, 19 nt, Artificial Sequence
  Description of Artificial Sequence: Synthetic oligonucleotide
cugcugcguauuuacugcc

SEQ ID NO: 1105200 - RNA, 19 nt, Artificial Sequence
  Description of Artificial Sequence: Synthetic oligonucleotide
uguggucgacgcccauagg

SEQ ID NO: 1105201 - RNA, 19 nt, Artificial Sequence
  Description of Artificial Sequence: Synthetic oligonucleotide
cuucguugcgaugaccuuc

SEQ ID NO: 1105202 - RNA, 19 nt, Artificial Sequence
  Description of Artificial Sequence: Synthetic oligonucleotide
gaugugaggccgcccgggc

SEQ ID NO: 1105203 - RNA, 19 nt, Artificial Sequence
  Description of Artificial Sequence: Synthetic oligonucleotide
accguauccguuccuuaca

SEQ ID NO: 1105204 - RNA, 19 nt, Artificial Sequence
  Description of Artificial Sequence: Synthetic oligonucleotide
uaaaggcgugcgcccaaca

SEQ ID NO: 1105205 - RNA, 19 nt, Artificial Sequence
  Description of Artificial Sequence: Synthetic oligonucleotide
accuucguugcgaugaccu

SEQ ID NO: 1105206 - RNA, 19 nt, Artificial Sequence
  Description of Artificial Sequence: Synthetic oligonucleotide
gaauaaaggcgugcgccca

SEQ ID NO: 1105207 - RNA, 19 nt, Artificial Sequence
  Description of Artificial Sequence: Synthetic oligonucleotide
gaggugguugcugacccug

SEQ ID NO: 1105208 - RNA, 19 nt, Artificial Sequence
  Description of Artificial Sequence: Synthetic oligonucleotide
gcugcauagauaaugcaga

SEQ ID NO: 1105209 - RNA, 19 nt, Artificial Sequence
  Description of Artificial Sequence: Synthetic oligonucleotide
uuuccgaucccucguucuu

SEQ ID NO: 1105210 - RNA, 19 nt, Artificial Sequence
  Description of Artificial Sequence: Synthetic oligonucleotide
aggagcgcuuuccgauccc

SEQ ID NO: 1105211 - RNA, 19 nt, Artificial Sequence
  Description of Artificial Sequence: Synthetic oligonucleotide
cugcguauuuacugccuug

SEQ ID NO: 1105212 - RNA, 19 nt, Artificial Sequence
  Description of Artificial Sequence: Synthetic oligonucleotide
aguugcggcgauaccgacg

SEQ ID NO: 1105213 - RNA, 19 nt, Artificial Sequence
  Description of Artificial Sequence: Synthetic oligonucleotide
ugggguuauucuucuuuau

SEQ ID NO: 1105214 - RNA, 19 nt, Artificial Sequence
  Description of Artificial Sequence: Synthetic oligonucleotide
ucccgcuaccgaucgaacu

SEQ ID NO: 1105215 - RNA, 19 nt, Artificial Sequence
  Description of Artificial Sequence: Synthetic oligonucleotide
gucgguaauugaaguugcg

SEQ ID NO: 1105216 - RNA, 19 nt, Artificial Sequence
  Description of Artificial Sequence: Synthetic oligonucleotide
ugcgucgguaauugaaguu

SEQ ID NO: 1105217 - RNA, 19 nt, Artificial Sequence
  Description of Artificial Sequence: Synthetic oligonucleotide
ugcugguaauugcguggag

SEQ ID NO: 1105218 - RNA, 19 nt, Artificial Sequence
  Description of Artificial Sequence: Synthetic oligonucleotide
guugcggcgauaccgacgu

SEQ ID NO: 1105219 - RNA, 19 nt, Artificial Sequence
  Description of Artificial Sequence: Synthetic oligonucleotide
ucaggagcgcuuuccgauc

SEQ ID NO: 1105220 - RNA, 19 nt, Artificial Sequence
  Description of Artificial Sequence: Synthetic oligonucleotide
ugccguccucucuaggcug

SEQ ID NO: 1105221 - RNA, 19 nt, Artificial Sequence
  Description of Artificial Sequence: Synthetic oligonucleotide
ggaugaccaaaccggauga

SEQ ID NO: 1105222 - RNA, 19 nt, Artificial Sequence
  Description of Artificial Sequence: Synthetic oligonucleotide
ucccucguucuuuucccca

SEQ ID NO: 1105223 - RNA, 19 nt, Artificial Sequence
  Description of Artificial Sequence: Synthetic oligonucleotide
gucuccgcauguaguaagg

SEQ ID NO: 1105224 - RNA, 19 nt, Artificial Sequence
  Description of Artificial Sequence: Synthetic oligonucleotide
caggagcgcuuuccgaucc

SEQ ID NO: 1105225 - RNA, 19 nt, Artificial Sequence
  Description of Artificial Sequence: Synthetic oligonucleotide
ucgggagcggacgaauucu

SEQ ID NO: 1105226 - RNA, 19 nt, Artificial Sequence
  Description of Artificial Sequence: Synthetic oligonucleotide
gauagcgucuauaaugguu

SEQ ID NO: 1105227 - RNA, 19 nt, Artificial Sequence
  Description of Artificial Sequence: Synthetic oligonucleotide
guuggaugaccaaaccgga

SEQ ID NO: 1105228 - RNA, 19 nt, Artificial Sequence
  Description of Artificial Sequence: Synthetic oligonucleotide
uagcgucuauaaugguuac

SEQ ID NO: 1105229 - RNA, 19 nt, Artificial Sequence
  Description of Artificial Sequence: Synthetic oligonucleotide
uuaggguucucugggcguc

SEQ ID NO: 1105230 - RNA, 19 nt, Artificial Sequence
  Description of Artificial Sequence: Synthetic oligonucleotide
cggucuguaaccccgauac

SEQ ID NO: 1105231 - RNA, 19 nt, Artificial Sequence
  Description of Artificial Sequence: Synthetic oligonucleotide
uuuccccacucucacuauu

SEQ ID NO: 1105232 - RNA, 19 nt, Artificial Sequence
  Description of Artificial Sequence: Synthetic oligonucleotide
cggacgaauucucagcugg

SEQ ID NO: 1105233 - RNA, 19 nt, Artificial Sequence
  Description of Artificial Sequence: Synthetic oligonucleotide
gugacuaggccggcggcgg

SEQ ID NO: 1105234 - RNA, 19 nt, Artificial Sequence
  Description of Artificial Sequence: Synthetic oligonucleotide
cuacgacguggauagcguc

SEQ ID NO: 1105235 - RNA, 19 nt, Artificial Sequence
  Description of Artificial Sequence: Synthetic oligonucleotide
guaagccggcauuuacuca

SEQ ID NO: 1105236 - RNA, 19 nt, Artificial Sequence
  Description of Artificial Sequence: Synthetic oligonucleotide
cguauuuacugccuugaac

SEQ ID NO: 1105237 - RNA, 19 nt, Artificial Sequence
  Description of Artificial Sequence: Synthetic oligonucleotide
cuacccgcgccgcugcccg

SEQ ID NO: 1105238 - RNA, 19 nt, Artificial Sequence
  Description of Artificial Sequence: Synthetic oligonucleotide
ugguaauugcguggaggac

SEQ ID NO: 1105239 - RNA, 19 nt, Artificial Sequence
  Description of Artificial Sequence: Synthetic oligonucleotide
gacggcugcggcuccuccc

SEQ ID NO: 1105240 - RNA, 19 nt, Artificial Sequence
  Description of Artificial Sequence: Synthetic oligonucleotide
cauugccguccucucuagg

SEQ ID NO: 1105241 - RNA, 19 nt, Artificial Sequence
  Description of Artificial Sequence: Synthetic oligonucleotide
ugguggaucggcugcuuuu

SEQ ID NO: 1105242 - RNA, 19 nt, Artificial Sequence
  Description of Artificial Sequence: Synthetic oligonucleotide
gcgaagguacuuccugggg

SEQ ID NO: 1105243 - RNA, 19 nt, Artificial Sequence
  Description of Artificial Sequence: Synthetic oligonucleotide
gugggaaccuucgccuacg

SEQ ID NO: 1105244 - RNA, 19 nt, Artificial Sequence
  Description of Artificial Sequence: Synthetic oligonucleotide
gcuaccgaucgaacuagcg

SEQ ID NO: 1105245 - RNA, 19 nt, Artificial Sequence
  Description of Artificial Sequence: Synthetic oligonucleotide
ugcggaaucgcggucugua

SEQ ID NO: 1105246 - RNA, 19 nt, Artificial Sequence
  Description of Artificial Sequence: Synthetic oligonucleotide
aauugaaguugcggcgaua

SEQ ID NO: 1105247 - RNA, 19 nt, Artificial Sequence
  Description of Artificial Sequence: Synthetic oligonucleotide
accccgauacauauucugu

SEQ ID NO: 1105248 - RNA, 19 nt, Artificial Sequence
  Description of Artificial Sequence: Synthetic oligonucleotide
ccgacguugaggugguugc

SEQ ID NO: 1105249 - RNA, 19 nt, Artificial Sequence
  Description of Artificial Sequence: Synthetic oligonucleotide
uugcguggaggaccccuac

SEQ ID NO: 1105250 - RNA, 19 nt, Artificial Sequence
  Description of Artificial Sequence: Synthetic oligonucleotide
ccgcauguaguaagguggg

SEQ ID NO: 1105251 - RNA, 19 nt, Artificial Sequence
  Description of Artificial Sequence: Synthetic oligonucleotide
gucuguaaccccgauacau

SEQ ID NO: 1105252 - RNA, 19 nt, Artificial Sequence
  Description of Artificial Sequence: Synthetic oligonucleotide
caaaccggaugaugguaga

SEQ ID NO: 1105253 - RNA, 19 nt, Artificial Sequence
  Description of Artificial Sequence: Synthetic oligonucleotide
gucagcacccuccaucacu

SEQ ID NO: 1105254 - RNA, 19 nt, Artificial Sequence
  Description of Artificial Sequence: Synthetic oligonucleotide
cugggguuauucuucuuua

SEQ ID NO: 1105255 - RNA, 19 nt, Artificial Sequence
  Description of Artificial Sequence: Synthetic oligonucleotide
ggcgccgccgaugugaggc

SEQ ID NO: 1105256 - RNA, 19 nt, Artificial Sequence
  Description of Artificial Sequence: Synthetic oligonucleotide
ugacuaggccggcggcggc

SEQ ID NO: 1105257 - RNA, 19 nt, Artificial Sequence
  Description of Artificial Sequence: Synthetic oligonucleotide
uccgaucccucguucuuuu

SEQ ID NO: 1105258 - RNA, 19 nt, Artificial Sequence
  Description of Artificial Sequence: Synthetic oligonucleotide
cccuacgacguggauagcg

SEQ ID NO: 1105259 - RNA, 19 nt, Artificial Sequence
  Description of Artificial Sequence: Synthetic oligonucleotide
cucuccgcucccgcuaccg

SEQ ID NO: 1105260 - RNA, 19 nt, Artificial Sequence
  Description of Artificial Sequence: Synthetic oligonucleotide
uacggucugcugcguauuu

SEQ ID NO: 1105261 - RNA, 19 nt, Artificial Sequence
  Description of Artificial Sequence: Synthetic oligonucleotide
uccucucuaggcugucuuu

SEQ ID NO: 1105262 - RNA, 19 nt, Artificial Sequence
  Description of Artificial Sequence: Synthetic oligonucleotide
gucugcgucgguaauugaa

SEQ ID NO: 1105263 - RNA, 19 nt, Artificial Sequence
  Description of Artificial Sequence: Synthetic oligonucleotide
cauagauaaugcagauagu

SEQ ID NO: 1105264 - RNA, 19 nt, Artificial Sequence
  Description of Artificial Sequence: Synthetic oligonucleotide
cgucgguaauugaaguugc

SEQ ID NO: 1105265 - RNA, 19 nt, Artificial Sequence
  Description of Artificial Sequence: Synthetic oligonucleotide
ccgauacauauucugucuc

SEQ ID NO: 1105266 - RNA, 19 nt, Artificial Sequence
  Description of Artificial Sequence: Synthetic oligonucleotide
aagguacuuccugggguua

SEQ ID NO: 1105267 - RNA, 19 nt, Artificial Sequence
  Description of Artificial Sequence: Synthetic oligonucleotide
gcgauaccgacguugaggu

SEQ ID NO: 1105268 - RNA, 19 nt, Artificial Sequence
  Description of Artificial Sequence: Synthetic oligonucleotide
ccuucgccuacgauagggc

SEQ ID NO: 1105269 - RNA, 19 nt, Artificial Sequence
  Description of Artificial Sequence: Synthetic oligonucleotide
guuacggucugcugcguau

SEQ ID NO: 1105270 - RNA, 19 nt, Artificial Sequence
  Description of Artificial Sequence: Synthetic oligonucleotide
ccccgauacauauucuguc

SEQ ID NO: 1105271 - RNA, 19 nt, Artificial Sequence
  Description of Artificial Sequence: Synthetic oligonucleotide
ggugggaaccuucgccuac

SEQ ID NO: 1105272 - RNA, 19 nt, Artificial Sequence
  Description of Artificial Sequence: Synthetic oligonucleotide
cucacuauucugguaauuu

SEQ ID NO: 1105273 - RNA, 19 nt, Artificial Sequence
  Description of Artificial Sequence: Synthetic oligonucleotide
cucugggcgucugcgucgg

SEQ ID NO: 1105274 - RNA, 19 nt, Artificial Sequence
  Description of Artificial Sequence: Synthetic oligonucleotide
gagccgggcuuggugucgg

SEQ ID NO: 1105275 - RNA, 19 nt, Artificial Sequence
  Description of Artificial Sequence: Synthetic oligonucleotide
accgaucgaacuagcgaga

SEQ ID NO: 1105276 - RNA, 19 nt, Artificial Sequence
  Description of Artificial Sequence: Synthetic oligonucleotide
uuacggucugcugcguauu

SEQ ID NO: 1105277 - RNA, 19 nt, Artificial Sequence
  Description of Artificial Sequence: Synthetic oligonucleotide
ucgcggucuguaaccccga

SEQ ID NO: 1105278 - RNA, 19 nt, Artificial Sequence
  Description of Artificial Sequence: Synthetic oligonucleotide
cgaucccucguucuuuucc

SEQ ID NO: 1105279 - RNA, 19 nt, Artificial Sequence
  Description of Artificial Sequence: Synthetic oligonucleotide
gaaaccguauccguuccuu

SEQ ID NO: 1105280 - RNA, 19 nt, Artificial Sequence
  Description of Artificial Sequence: Synthetic oligonucleotide
gacguggauagcgucuaua

SEQ ID NO: 1105281 - RNA, 19 nt, Artificial Sequence
  Description of Artificial Sequence: Synthetic oligonucleotide
uuccgaucccucguucuuu

SEQ ID NO: 1105282 - RNA, 19 nt, Artificial Sequence
  Description of Artificial Sequence: Synthetic oligonucleotide
cucccgcuaccgaucgaac

SEQ ID NO: 1105283 - RNA, 19 nt, Artificial Sequence
  Description of Artificial Sequence: Synthetic oligonucleotide
ggucgacgcccauaggguc

SEQ ID NO: 1105284 - RNA, 19 nt, Artificial Sequence
  Description of Artificial Sequence: Synthetic oligonucleotide
aggugggaaccuucgccua

SEQ ID NO: 1105285 - RNA, 19 nt, Artificial Sequence
  Description of Artificial Sequence: Synthetic oligonucleotide
ccaacacccauuauuauuu

SEQ ID NO: 1105286 - RNA, 19 nt, Artificial Sequence
  Description of Artificial Sequence: Synthetic oligonucleotide
gcguggaggaccccuacga

SEQ ID NO: 1105287 - RNA, 19 nt, Artificial Sequence
  Description of Artificial Sequence: Synthetic oligonucleotide
gcgucugcgucgguaauug

SEQ ID NO: 1105288 - RNA, 19 nt, Artificial Sequence
  Description of Artificial Sequence: Synthetic oligonucleotide
uaauugcguggaggacccc

SEQ ID NO: 1105289 - RNA, 19 nt, Artificial Sequence
  Description of Artificial Sequence: Synthetic oligonucleotide
cuuguccccgccggcgggc

SEQ ID NO: 1105290 - RNA, 19 nt, Artificial Sequence
  Description of Artificial Sequence: Synthetic oligonucleotide
caacacccauuauuauuua

SEQ ID NO: 1105291 - RNA, 19 nt, Artificial Sequence
  Description of Artificial Sequence: Synthetic oligonucleotide
acgacguggauagcgucua

SEQ ID NO: 1105292 - RNA, 19 nt, Artificial Sequence
  Description of Artificial Sequence: Synthetic oligonucleotide
ugcgcccaacacccauuau

SEQ ID NO: 1105293 - RNA, 19 nt, Artificial Sequence
  Description of Artificial Sequence: Synthetic oligonucleotide
ccucucuaggcugucuuug

SEQ ID NO: 1105294 - RNA, 19 nt, Artificial Sequence
  Description of Artificial Sequence: Synthetic oligonucleotide
cugcgucgguaauugaagu

SEQ ID NO: 1105295 - RNA, 19 nt, Artificial Sequence
  Description of Artificial Sequence: Synthetic oligonucleotide
ccucgcugcucaugguugc

SEQ ID NO: 1105296 - RNA, 19 nt, Artificial Sequence
  Description of Artificial Sequence: Synthetic oligonucleotide
uacuguggucgacgcccau

SEQ ID NO: 1105297 - RNA, 19 nt, Artificial Sequence
  Description of Artificial Sequence: Synthetic oligonucleotide
gcggacgaauucucagcug

SEQ ID NO: 1105298 - RNA, 19 nt, Artificial Sequence
  Description of Artificial Sequence: Synthetic oligonucleotide
acgauagggccggcguugu

SEQ ID NO: 1105299 - RNA, 19 nt, Artificial Sequence
  Description of Artificial Sequence: Synthetic oligonucleotide
cuuuggcgaggagggcccc

SEQ ID NO: 1105300 - RNA, 19 nt, Artificial Sequence
  Description of Artificial Sequence: Synthetic oligonucleotide
ccuuuauuaacagaugcuu

SEQ ID NO: 1105301 - RNA, 19 nt, Artificial Sequence
  Description of Artificial Sequence: Synthetic oligonucleotide
uccgcacccuuuucuccuu

SEQ ID NO: 1105302 - RNA, 19 nt, Artificial Sequence
  Description of Artificial Sequence: Synthetic oligonucleotide
gcuuuccgaucccucguuc

SEQ ID NO: 1105303 - RNA, 19 nt, Artificial Sequence
  Description of Artificial Sequence: Synthetic oligonucleotide
ggagccgggcuuggugucg

SEQ ID NO: 1105304 - RNA, 19 nt, Artificial Sequence
  Description of Artificial Sequence: Synthetic oligonucleotide
auugcguggaggaccccua

SEQ ID NO: 1105305 - RNA, 19 nt, Artificial Sequence
  Description of Artificial Sequence: Synthetic oligonucleotide
cguugcgaugaccuucuug

SEQ ID NO: 1105306 - RNA, 19 nt, Artificial Sequence
  Description of Artificial Sequence: Synthetic oligonucleotide
cccucguucuuuuccccac

SEQ ID NO: 1105307 - RNA, 19 nt, Artificial Sequence
  Description of Artificial Sequence: Synthetic oligonucleotide
ccaucuccuacacugcgaa

SEQ ID NO: 1105308 - RNA, 19 nt, Artificial Sequence
  Description of Artificial Sequence: Synthetic oligonucleotide
ugguuacggucugcugcgu

SEQ ID NO: 1105309 - RNA, 19 nt, Artificial Sequence
  Description of Artificial Sequence: Synthetic oligonucleotide
cggaaucgcggucuguaac

SEQ ID NO: 1105310 - RNA, 19 nt, Artificial Sequence
  Description of Artificial Sequence: Synthetic oligonucleotide
cccgauacauauucugucu

SEQ ID NO: 1105311 - RNA, 19 nt, Artificial Sequence
  Description of Artificial Sequence: Synthetic oligonucleotide
gugcgcccaacacccauua

SEQ ID NO: 1105312 - RNA, 19 nt, Artificial Sequence
  Description of Artificial Sequence: Synthetic oligonucleotide
gcggcgguggggcucucag

SEQ ID NO: 1105313 - RNA, 19 nt, Artificial Sequence
  Description of Artificial Sequence: Synthetic oligonucleotide
gccuacgauagggccggcg

SEQ ID NO: 1105314 - RNA, 19 nt, Artificial Sequence
  Description of Artificial Sequence: Synthetic oligonucleotide
gccuccgcacccuuuucuc

SEQ ID NO: 1105315 - RNA, 19 nt, Artificial Sequence
  Description of Artificial Sequence: Synthetic oligonucleotide
acggucugcugcguauuua

SEQ ID NO: 1105316 - RNA, 19 nt, Artificial Sequence
  Description of Artificial Sequence: Synthetic oligonucleotide
gucgacgcccauagggucu

SEQ ID NO: 1105317 - RNA, 19 nt, Artificial Sequence
  Description of Artificial Sequence: Synthetic oligonucleotide
gcguauuuacugccuugaa

SEQ ID NO: 1105318 - RNA, 19 nt, Artificial Sequence
  Description of Artificial Sequence: Synthetic oligonucleotide
ccgcuaccgaucgaacuag

SEQ ID NO: 1105319 - RNA, 19 nt, Artificial Sequence
  Description of Artificial Sequence: Synthetic oligonucleotide
gguuacggucugcugcgua

SEQ ID NO: 1105320 - RNA, 19 nt, Artificial Sequence
  Description of Artificial Sequence: Synthetic oligonucleotide
cacugcgaagguacuuccu

SEQ ID NO: 1105321 - RNA, 19 nt, Artificial Sequence
  Description of Artificial Sequence: Synthetic oligonucleotide
ggauagcgucuauaauggu

SEQ ID NO: 1105322 - RNA, 19 nt, Artificial Sequence
  Description of Artificial Sequence: Synthetic oligonucleotide
cgcccaacacccauuauua

SEQ ID NO: 1105323 - RNA, 19 nt, Artificial Sequence
  Description of Artificial Sequence: Synthetic oligonucleotide
agcaagcacuuaaggucuu

SEQ ID NO: 1105324 - RNA, 19 nt, Artificial Sequence
  Description of Artificial Sequence: Synthetic oligonucleotide
caaauacgucuuccuuggu

SEQ ID NO: 1105325 - RNA, 19 nt, Artificial Sequence
  Description of Artificial Sequence: Synthetic oligonucleotide
cccgcuaccgaucgaacua

SEQ ID NO: 1105326 - RNA, 19 nt, Artificial Sequence
  Description of Artificial Sequence: Synthetic oligonucleotide
gcaagcacuuaaggucuuc

SEQ ID NO: 1105327 - RNA, 19 nt, Artificial Sequence
  Description of Artificial Sequence: Synthetic oligonucleotide
ccuacgauagggccggcgu

SEQ ID NO: 1105328 - RNA, 19 nt, Artificial Sequence
  Description of Artificial Sequence: Synthetic oligonucleotide
ccuacgacguggauagcgu

SEQ ID NO: 1105329 - RNA, 19 nt, Artificial Sequence
  Description of Artificial Sequence: Synthetic oligonucleotide
gggagcggacgaauucuca

SEQ ID NO: 1105330 - RNA, 19 nt, Artificial Sequence
  Description of Artificial Sequence: Synthetic oligonucleotide
ucguugcgaugaccuucuu

SEQ ID NO: 1105331 - RNA, 19 nt, Artificial Sequence
  Description of Artificial Sequence: Synthetic oligonucleotide
cgaugugaggccgcccggg

SEQ ID NO: 1105332 - RNA, 19 nt, Artificial Sequence
  Description of Artificial Sequence: Synthetic oligonucleotide
gcgcccaacacccauuauu

SEQ ID NO: 1105333 - RNA, 19 nt, Artificial Sequence
  Description of Artificial Sequence: Synthetic oligonucleotide
gcggcgauaccgacguuga

SEQ ID NO: 1105334 - RNA, 19 nt, Artificial Sequence
  Description of Artificial Sequence: Synthetic oligonucleotide
cccggggugugauggugac

SEQ ID NO: 1105335 - RNA, 19 nt, Artificial Sequence
  Description of Artificial Sequence: Synthetic oligonucleotide
ccugcggaaucgcggucug

SEQ ID NO: 1105336 - RNA, 19 nt, Artificial Sequence
  Description of Artificial Sequence: Synthetic oligonucleotide
gcggaaucgcggucuguaa

SEQ ID NO: 1105337 - RNA, 19 nt, Artificial Sequence
  Description of Artificial Sequence: Synthetic oligonucleotide
cuacgauagggccggcguu

SEQ ID NO: 1105338 - RNA, 19 nt, Artificial Sequence
  Description of Artificial Sequence: Synthetic oligonucleotide
gccggcguuguugggcuug

SEQ ID NO: 1105339 - RNA, 19 nt, Artificial Sequence
  Description of Artificial Sequence: Synthetic oligonucleotide
cgaagguacuuccuggggu

SEQ ID NO: 1105340 - RNA, 19 nt, Artificial Sequence
  Description of Artificial Sequence: Synthetic oligonucleotide
cgcuaccgaucgaacuagc

SEQ ID NO: 1105341 - RNA, 19 nt, Artificial Sequence
  Description of Artificial Sequence: Synthetic oligonucleotide
gcgggcgccgccgauguga

SEQ ID NO: 1105342 - RNA, 19 nt, Artificial Sequence
  Description of Artificial Sequence: Synthetic oligonucleotide
gugaggccgcccgggccgc

SEQ ID NO: 1105343 - RNA, 19 nt, Artificial Sequence
  Description of Artificial Sequence: Synthetic oligonucleotide
agccucgggagcggacgaa

SEQ ID NO: 1105344 - RNA, 19 nt, Artificial Sequence
  Description of Artificial Sequence: Synthetic oligonucleotide
ggacgaauucucagcuggu

SEQ ID NO: 1105345 - RNA, 19 nt, Artificial Sequence
  Description of Artificial Sequence: Synthetic oligonucleotide
cgggagcggacgaauucuc

SEQ ID NO: 1105346 - RNA, 19 nt, Artificial Sequence
  Description of Artificial Sequence: Synthetic oligonucleotide
ccaaaaccuucguugcgau

SEQ ID NO: 1105347 - RNA, 19 nt, Artificial Sequence
  Description of Artificial Sequence: Synthetic oligonucleotide
uugcggcgauaccgacguu

SEQ ID NO: 1105348 - RNA, 19 nt, Artificial Sequence
  Description of Artificial Sequence: Synthetic oligonucleotide
ccgaucgaacuagcgagaa

SEQ ID NO: 1105349 - RNA, 19 nt, Artificial Sequence
  Description of Artificial Sequence: Synthetic oligonucleotide
gcgccgccgaugugaggcc

SEQ ID NO: 1105350 - RNA, 19 nt, Artificial Sequence
  Description of Artificial Sequence: Synthetic oligonucleotide
cgauaccgacguugaggug

SEQ ID NO: 1105351 - RNA, 19 nt, Artificial Sequence
  Description of Artificial Sequence: Synthetic oligonucleotide
ccgaucccucguucuuuuc

SEQ ID NO: 1105352 - RNA, 19 nt, Artificial Sequence
  Description of Artificial Sequence: Synthetic oligonucleotide
gcccguggagccgggcuug

SEQ ID NO: 1105353 - RNA, 19 nt, Artificial Sequence
  Description of Artificial Sequence: Synthetic oligonucleotide
gcgcuuuccgaucccucgu

SEQ ID NO: 1105354 - RNA, 19 nt, Artificial Sequence
  Description of Artificial Sequence: Synthetic oligonucleotide
ggagcgcuuuccgaucccu

SEQ ID NO: 1105355 - RNA, 19 nt, Artificial Sequence
  Description of Artificial Sequence: Synthetic oligonucleotide
gggcgccgccgaugugagg

SEQ ID NO: 1105356 - RNA, 19 nt, Artificial Sequence
  Description of Artificial Sequence: Synthetic oligonucleotide
cgucuauaaugguuacggu

SEQ ID NO: 1105357 - RNA, 19 nt, Artificial Sequence
  Description of Artificial Sequence: Synthetic oligonucleotide
gggaaccuucgccuacgau

SEQ ID NO: 1105358 - RNA, 19 nt, Artificial Sequence
  Description of Artificial Sequence: Synthetic oligonucleotide
cggcgguggggcucucagg

SEQ ID NO: 1105359 - RNA, 19 nt, Artificial Sequence
  Description of Artificial Sequence: Synthetic oligonucleotide
ccguauccguuccuuacau

SEQ ID NO: 1105360 - RNA, 19 nt, Artificial Sequence
  Description of Artificial Sequence: Synthetic oligonucleotide
ccgcacccuuuucuccuuc

SEQ ID NO: 1105361 - RNA, 19 nt, Artificial Sequence
  Description of Artificial Sequence: Synthetic oligonucleotide
gguacuuccugggguuauu

SEQ ID NO: 1105362 - RNA, 19 nt, Artificial Sequence
  Description of Artificial Sequence: Synthetic oligonucleotide
cguggauagcgucuauaau

SEQ ID NO: 1105363 - RNA, 19 nt, Artificial Sequence
  Description of Artificial Sequence: Synthetic oligonucleotide
cggcgauaccgacguugag

SEQ ID NO: 1105364 - RNA, 19 nt, Artificial Sequence
  Description of Artificial Sequence: Synthetic oligonucleotide
ccccugcggaaucgcgguc

SEQ ID NO: 1105365 - RNA, 19 nt, Artificial Sequence
  Description of Artificial Sequence: Synthetic oligonucleotide
gcgugcgcccaacacccau

SEQ ID NO: 1105366 - RNA, 19 nt, Artificial Sequence
  Description of Artificial Sequence: Synthetic oligonucleotide
ggcgucugcgucgguaauu

SEQ ID NO: 1105367 - RNA, 19 nt, Artificial Sequence
  Description of Artificial Sequence: Synthetic oligonucleotide
ggcgggcgccgccgaugug

SEQ ID NO: 1105368 - RNA, 19 nt, Artificial Sequence
  Description of Artificial Sequence: Synthetic oligonucleotide
ccuucguugcgaugaccuu

SEQ ID NO: 1105369 - RNA, 19 nt, Artificial Sequence
  Description of Artificial Sequence: Synthetic oligonucleotide
cccugcggaaucgcggucu

SEQ ID NO: 1105370 - RNA, 19 nt, Artificial Sequence
  Description of Artificial Sequence: Synthetic oligonucleotide
cgucugcgucgguaauuga

SEQ ID NO: 1105371 - RNA, 19 nt, Artificial Sequence
  Description of Artificial Sequence: Synthetic oligonucleotide
cugcggaaucgcggucugu

SEQ ID NO: 1105372 - RNA, 19 nt, Artificial Sequence
  Description of Artificial Sequence: Synthetic oligonucleotide
ggaccccuacgacguggau

SEQ ID NO: 1105373 - RNA, 19 nt, Artificial Sequence
  Description of Artificial Sequence: Synthetic oligonucleotide
ccgcucuccgcucccgcua

SEQ ID NO: 1105374 - RNA, 19 nt, Artificial Sequence
  Description of Artificial Sequence: Synthetic oligonucleotide
gggcgucugcgucgguaau

SEQ ID NO: 1105375 - RNA, 19 nt, Artificial Sequence
  Description of Artificial Sequence: Synthetic oligonucleotide
ccguccucucuaggcuguc

SEQ ID NO: 1105376 - RNA, 19 nt, Artificial Sequence
  Description of Artificial Sequence: Synthetic oligonucleotide
ccccuacgacguggauagc

SEQ ID NO: 1105377 - RNA, 19 nt, Artificial Sequence
  Description of Artificial Sequence: Synthetic oligonucleotide
cgaucgaacuagcgagaau

SEQ ID NO: 1105378 - RNA, 19 nt, Artificial Sequence
  Description of Artificial Sequence: Synthetic oligonucleotide
ccgcccgggccgccacuac

SEQ ID NO: 1105379 - RNA, 19 nt, Artificial Sequence
  Description of Artificial Sequence: Synthetic oligonucleotide
cgacgcccauagggucucc

SEQ ID NO: 1105380 - RNA, 19 nt, Artificial Sequence
  Description of Artificial Sequence: Synthetic oligonucleotide
cgacguugaggugguugcu

SEQ ID NO: 1105381 - RNA, 19 nt, Artificial Sequence
  Description of Artificial Sequence: Synthetic oligonucleotide
cgcuuuccgaucccucguu

SEQ ID NO: 1105382 - RNA, 19 nt, Artificial Sequence
  Description of Artificial Sequence: Synthetic oligonucleotide
ccggggugugauggugacu

SEQ ID NO: 1105383 - RNA, 19 nt, Artificial Sequence
  Description of Artificial Sequence: Synthetic oligonucleotide
ggccggcguuguugggcuu

SEQ ID NO: 1105384 - RNA, 19 nt, Artificial Sequence
  Description of Artificial Sequence: Synthetic oligonucleotide
cgccuacgauagggccggc

SEQ ID NO: 1105385 - RNA, 19 nt, Artificial Sequence
  Description of Artificial Sequence: Synthetic oligonucleotide
cggcgggcgccgccgaugu

SEQ ID NO: 1105386 - RNA, 19 nt, Artificial Sequence
  Description of Artificial Sequence: Synthetic oligonucleotide
cgacguggauagcgucuau

SEQ ID NO: 1105387 - RNA, 19 nt, Artificial Sequence
  Description of Artificial Sequence: Synthetic oligonucleotide
cgcggucuguaaccccgau

SEQ ID NO: 1105388 - RNA, 19 nt, Artificial Sequence
  Description of Artificial Sequence: Synthetic oligonucleotide
ccguggagccgggcuuggu

SEQ ID NO: 1105389 - RNA, 19 nt, Artificial Sequence
  Description of Artificial Sequence: Synthetic oligonucleotide
cgauagggccggcguuguu

SEQ ID NO: 1105390 - RNA, 19 nt, Artificial Sequence
  Description of Artificial Sequence: Synthetic oligonucleotide
aauaacauuaauuagugug

SEQ ID NO: 1105391 - RNA, 19 nt, Artificial Sequence
  Description of Artificial Sequence: Synthetic oligonucleotide
aaaacaaauggacagguag

SEQ ID NO: 1105392 - RNA, 19 nt, Artificial Sequence
  Description of Artificial Sequence: Synthetic oligonucleotide
aauauaauaaguauacaag

SEQ ID NO: 1105393 - RNA, 19 nt, Artificial Sequence
  Description of Artificial Sequence: Synthetic oligonucleotide
uugacauagacacauagug

SEQ ID NO: 1105394 - RNA, 19 nt, Artificial Sequence
  Description of Artificial Sequence: Synthetic oligonucleotide
uaagucauagcucagcugc

SEQ ID NO: 1105395 - RNA, 19 nt, Artificial Sequence
  Description of Artificial Sequence: Synthetic oligonucleotide
caagauaccauguagcucc

SEQ ID NO: 1105396 - RNA, 19 nt, Artificial Sequence
  Description of Artificial Sequence: Synthetic oligonucleotide
acaguauugguacagagag

SEQ ID NO: 1105397 - RNA, 19 nt, Artificial Sequence
  Description of Artificial Sequence: Synthetic oligonucleotide
aaaauuuagauggagcuug

SEQ ID NO: 1105398 - RNA, 19 nt, Artificial Sequence
  Description of Artificial Sequence: Synthetic oligonucleotide
gguuauuugacauagacac

SEQ ID NO: 1105399 - RNA, 19 nt, Artificial Sequence
  Description of Artificial Sequence: Synthetic oligonucleotide
aagaaaauuuagauggagc

SEQ ID NO: 1105400 - RNA, 19 nt, Artificial Sequence
  Description of Artificial Sequence: Synthetic oligonucleotide
agcagcuuaagugagaacc

SEQ ID NO: 1105401 - RNA, 19 nt, Artificial Sequence
  Description of Artificial Sequence: Synthetic oligonucleotide
auauaauaaguauacaaga

SEQ ID NO: 1105402 - RNA, 19 nt, Artificial Sequence
  Description of Artificial Sequence: Synthetic oligonucleotide
agagacaccagcuggaugg

SEQ ID NO: 1105403 - RNA, 19 nt, Artificial Sequence
  Description of Artificial Sequence: Synthetic oligonucleotide
uaauaaguauacaagaaua

SEQ ID NO: 1105404 - RNA, 19 nt, Artificial Sequence
  Description of Artificial Sequence: Synthetic oligonucleotide
agaaaauuuagauggagcu

SEQ ID NO: 1105405 - RNA, 19 nt, Artificial Sequence
  Description of Artificial Sequence: Synthetic oligonucleotide
cuugcucuaauaaaggacc

SEQ ID NO: 1105406 - RNA, 19 nt, Artificial Sequence
  Description of Artificial Sequence: Synthetic oligonucleotide
uuaagugagaaccuauaca

SEQ ID NO: 1105407 - RNA, 19 nt, Artificial Sequence
  Description of Artificial Sequence: Synthetic oligonucleotide
uuaaccuucacaguggagc

SEQ ID NO: 1105408 - RNA, 19 nt, Artificial Sequence
  Description of Artificial Sequence: Synthetic oligonucleotide
ugguacauuaggcagagga

SEQ ID NO: 1105409 - RNA, 19 nt, Artificial Sequence
  Description of Artificial Sequence: Synthetic oligonucleotide
uaacaagauaccauguagc

SEQ ID NO: 1105410 - RNA, 19 nt, Artificial Sequence
  Description of Artificial Sequence: Synthetic oligonucleotide
auggccuacuaccacaucc

SEQ ID NO: 1105411 - RNA, 19 nt, Artificial Sequence
  Description of Artificial Sequence: Synthetic oligonucleotide
uuaugagucccucagcacc

SEQ ID NO: 1105412 - RNA, 19 nt, Artificial Sequence
  Description of Artificial Sequence: Synthetic oligonucleotide
aacaagauaccauguagcu

SEQ ID NO: 1105413 - RNA, 19 nt, Artificial Sequence
  Description of Artificial Sequence: Synthetic oligonucleotide
uugguuauuugacauagac

SEQ ID NO: 1105414 - RNA, 19 nt, Artificial Sequence
  Description of Artificial Sequence: Synthetic oligonucleotide
aaaccugugccauaggccu

SEQ ID NO: 1105415 - RNA, 19 nt, Artificial Sequence
  Description of Artificial Sequence: Synthetic oligonucleotide
aaaggugagacguccacug

SEQ ID NO: 1105416 - RNA, 19 nt, Artificial Sequence
  Description of Artificial Sequence: Synthetic oligonucleotide
auuugacauagacacauag

SEQ ID NO: 1105417 - RNA, 19 nt, Artificial Sequence
  Description of Artificial Sequence: Synthetic oligonucleotide
ucugcuaaaaggugagacg

SEQ ID NO: 1105418 - RNA, 19 nt, Artificial Sequence
  Description of Artificial Sequence: Synthetic oligonucleotide
auaauaaguauacaagaau

SEQ ID NO: 1105419 - RNA, 19 nt, Artificial Sequence
  Description of Artificial Sequence: Synthetic oligonucleotide
ugagaaccuauacaggacc

SEQ ID NO: 1105420 - RNA, 19 nt, Artificial Sequence
  Description of Artificial Sequence: Synthetic oligonucleotide
uaccacaucccguagacag

SEQ ID NO: 1105421 - RNA, 19 nt, Artificial Sequence
  Description of Artificial Sequence: Synthetic oligonucleotide
agugagaaccuauacagga

SEQ ID NO: 1105422 - RNA, 19 nt, Artificial Sequence
  Description of Artificial Sequence: Synthetic oligonucleotide
uucggcauggguacaaggg

SEQ ID NO: 1105423 - RNA, 19 nt, Artificial Sequence
  Description of Artificial Sequence: Synthetic oligonucleotide
aguauugguacagagagca

SEQ ID NO: 1105424 - RNA, 19 nt, Artificial Sequence
  Description of Artificial Sequence: Synthetic oligonucleotide
auucguagaggaguaagcc

SEQ ID NO: 1105425 - RNA, 19 nt, Artificial Sequence
  Description of Artificial Sequence: Synthetic oligonucleotide
gaaccuaagucauagcuca

SEQ ID NO: 1105426 - RNA, 19 nt, Artificial Sequence
  Description of Artificial Sequence: Synthetic oligonucleotide
aguacuagccccugagugg

SEQ ID NO: 1105427 - RNA, 19 nt, Artificial Sequence
  Description of Artificial Sequence: Synthetic oligonucleotide
acuaccacaucccguagac

SEQ ID NO: 1105428 - RNA, 19 nt, Artificial Sequence
  Description of Artificial Sequence: Synthetic oligonucleotide
uguguggcacccaaagggg

SEQ ID NO: 1105429 - RNA, 19 nt, Artificial Sequence
  Description of Artificial Sequence: Synthetic oligonucleotide
ggaguuaguaacaagauac

SEQ ID NO: 1105430 - RNA, 19 nt, Artificial Sequence
  Description of Artificial Sequence: Synthetic oligonucleotide
uaaccuucacaguggagcg

SEQ ID NO: 1105431 - RNA, 19 nt, Artificial Sequence
  Description of Artificial Sequence: Synthetic oligonucleotide
ugccauaggccuuugguag

SEQ ID NO: 1105432 - RNA, 19 nt, Artificial Sequence
  Description of Artificial Sequence: Synthetic oligonucleotide
agcacaacaggcugggaac

SEQ ID NO: 1105433 - RNA, 19 nt, Artificial Sequence
  Description of Artificial Sequence: Synthetic oligonucleotide
cuuucggccauuucguucc

SEQ ID NO: 1105434 - RNA, 19 nt, Artificial Sequence
  Description of Artificial Sequence: Synthetic oligonucleotide
ucuaaaucacaguauuggu

SEQ ID NO: 1105435 - RNA, 19 nt, Artificial Sequence
  Description of Artificial Sequence: Synthetic oligonucleotide
ggacauacagugcaaaggg

SEQ ID NO: 1105436 - RNA, 19 nt, Artificial Sequence
  Description of Artificial Sequence: Synthetic oligonucleotide
ucguagaggaguaagccac

SEQ ID NO: 1105437 - RNA, 19 nt, Artificial Sequence
  Description of Artificial Sequence: Synthetic oligonucleotide
uuucguuccagggauaccc

SEQ ID NO: 1105438 - RNA, 19 nt, Artificial Sequence
  Description of Artificial Sequence: Synthetic oligonucleotide
ugguuauuugacauagaca

SEQ ID NO: 1105439 - RNA, 19 nt, Artificial Sequence
  Description of Artificial Sequence: Synthetic oligonucleotide
uuugccacuccacaguacu

SEQ ID NO: 1105440 - RNA, 19 nt, Artificial Sequence
  Description of Artificial Sequence: Synthetic oligonucleotide
cauuaauuagugugguagc

SEQ ID NO: 1105441 - RNA, 19 nt, Artificial Sequence
  Description of Artificial Sequence: Synthetic oligonucleotide
ucgaagggcacccuuucgg

SEQ ID NO: 1105442 - RNA, 19 nt, Artificial Sequence
  Description of Artificial Sequence: Synthetic oligonucleotide
aaaaugguaccccaauauu

SEQ ID NO: 1105443 - RNA, 19 nt, Artificial Sequence
  Description of Artificial Sequence: Synthetic oligonucleotide
auagaggggcuccuuaagg

SEQ ID NO: 1105444 - RNA, 19 nt, Artificial Sequence
  Description of Artificial Sequence: Synthetic oligonucleotide
gauacccggauccagguac

SEQ ID NO: 1105445 - RNA, 19 nt, Artificial Sequence
  Description of Artificial Sequence: Synthetic oligonucleotide
caggcagacacauuugggg

SEQ ID NO: 1105446 - RNA, 19 nt, Artificial Sequence
  Description of Artificial Sequence: Synthetic oligonucleotide
uacauuaggcagaggagug

SEQ ID NO: 1105447 - RNA, 19 nt, Artificial Sequence
  Description of Artificial Sequence: Synthetic oligonucleotide
cacccaaaggggaagagcc

SEQ ID NO: 1105448 - RNA, 19 nt, Artificial Sequence
  Description of Artificial Sequence: Synthetic oligonucleotide
acuugcucuaauaaaggac

SEQ ID NO: 1105449 - RNA, 19 nt, Artificial Sequence
  Description of Artificial Sequence: Synthetic oligonucleotide
guucuugucccauaaaaca

SEQ ID NO: 1105450 - RNA, 19 nt, Artificial Sequence
  Description of Artificial Sequence: Synthetic oligonucleotide
ucugcaagccuccaagcca

SEQ ID NO: 1105451 - RNA, 19 nt, Artificial Sequence
  Description of Artificial Sequence: Synthetic oligonucleotide
aggugagacguccacugcc

SEQ ID NO: 1105452 - RNA, 19 nt, Artificial Sequence
  Description of Artificial Sequence: Synthetic oligonucleotide
aaggugagacguccacugc

SEQ ID NO: 1105453 - RNA, 19 nt, Artificial Sequence
  Description of Artificial Sequence: Synthetic oligonucleotide
ugguaccccaauauuaaca

SEQ ID NO: 1105454 - RNA, 19 nt, Artificial Sequence
  Description of Artificial Sequence: Synthetic oligonucleotide
aguucuugucccauaaaac

SEQ ID NO: 1105455 - RNA, 19 nt, Artificial Sequence
  Description of Artificial Sequence: Synthetic oligonucleotide
ucaagaaaauuuagaugga

SEQ ID NO: 1105456 - RNA, 19 nt, Artificial Sequence
  Description of Artificial Sequence: Synthetic oligonucleotide
caagcucaguucaaagugg

SEQ ID NO: 1105457 - RNA, 19 nt, Artificial Sequence
  Description of Artificial Sequence: Synthetic oligonucleotide
agggcuuaccaggagaccc

SEQ ID NO: 1105458 - RNA, 19 nt, Artificial Sequence
  Description of Artificial Sequence: Synthetic oligonucleotide
uuaccaggagacccaaaag

SEQ ID NO: 1105459 - RNA, 19 nt, Artificial Sequence
  Description of Artificial Sequence: Synthetic oligonucleotide
cuacuuaugagucccucag

SEQ ID NO: 1105460 - RNA, 19 nt, Artificial Sequence
  Description of Artificial Sequence: Synthetic oligonucleotide
uauugguacagagagcacu

SEQ ID NO: 1105461 - RNA, 19 nt, Artificial Sequence
  Description of Artificial Sequence: Synthetic oligonucleotide
gucauagcggaacuagggg

SEQ ID NO: 1105462 - RNA, 19 nt, Artificial Sequence
  Description of Artificial Sequence: Synthetic oligonucleotide
agucacaggggccucauug

SEQ ID NO: 1105463 - RNA, 19 nt, Artificial Sequence
  Description of Artificial Sequence: Synthetic oligonucleotide
aggagagcagcuuaaguga

SEQ ID NO: 1105464 - RNA, 19 nt, Artificial Sequence
  Description of Artificial Sequence: Synthetic oligonucleotide
cauggucuacuuaugaguc

SEQ ID NO: 1105465 - RNA, 19 nt, Artificial Sequence
  Description of Artificial Sequence: Synthetic oligonucleotide
uaaaaggugagacguccac

SEQ ID NO: 1105466 - RNA, 19 nt, Artificial Sequence
  Description of Artificial Sequence: Synthetic oligonucleotide
aagugguugcucugaagug

SEQ ID NO: 1105467 - RNA, 19 nt, Artificial Sequence
  Description of Artificial Sequence: Synthetic oligonucleotide
ugagcccugacucgaagcc

SEQ ID NO: 1105468 - RNA, 19 nt, Artificial Sequence
  Description of Artificial Sequence: Synthetic oligonucleotide
uacuugcucuaauaaagga

SEQ ID NO: 1105469 - RNA, 19 nt, Artificial Sequence
  Description of Artificial Sequence: Synthetic oligonucleotide
aggaguguguccuaaggcu

SEQ ID NO: 1105470 - RNA, 19 nt, Artificial Sequence
  Description of Artificial Sequence: Synthetic oligonucleotide
uggcccucaacacaugcag

SEQ ID NO: 1105471 - RNA, 19 nt, Artificial Sequence
  Description of Artificial Sequence: Synthetic oligonucleotide
cauucguagaggaguaagc

SEQ ID NO: 1105472 - RNA, 19 nt, Artificial Sequence
  Description of Artificial Sequence: Synthetic oligonucleotide
auuagugugguagcucugg

SEQ ID NO: 1105473 - RNA, 19 nt, Artificial Sequence
  Description of Artificial Sequence: Synthetic oligonucleotide
uaagguugagcauggugug

SEQ ID NO: 1105474 - RNA, 19 nt, Artificial Sequence
  Description of Artificial Sequence: Synthetic oligonucleotide
ucuacuuaugagucccuca

SEQ ID NO: 1105475 - RNA, 19 nt, Artificial Sequence
  Description of Artificial Sequence: Synthetic oligonucleotide
aaaugguaccccaauauua

SEQ ID NO: 1105476 - RNA, 19 nt, Artificial Sequence
  Description of Artificial Sequence: Synthetic oligonucleotide
uguuaaccuucacagugga

SEQ ID NO: 1105477 - RNA, 19 nt, Artificial Sequence
  Description of Artificial Sequence: Synthetic oligonucleotide
accuauacaggacccaaug

SEQ ID NO: 1105478 - RNA, 19 nt, Artificial Sequence
  Description of Artificial Sequence: Synthetic oligonucleotide
uuugcccauucguagagga

SEQ ID NO: 1105479 - RNA, 19 nt, Artificial Sequence
  Description of Artificial Sequence: Synthetic oligonucleotide
uucguagaggaguaagcca

SEQ ID NO: 1105480 - RNA, 19 nt, Artificial Sequence
  Description of Artificial Sequence: Synthetic oligonucleotide
ugaagugccuucggcaugg

SEQ ID NO: 1105481 - RNA, 19 nt, Artificial Sequence
  Description of Artificial Sequence: Synthetic oligonucleotide
uaauaacauuaauuagugu

SEQ ID NO: 1105482 - RNA, 19 nt, Artificial Sequence
  Description of Artificial Sequence: Synthetic oligonucleotide
aaugguaccccaauauuaa

SEQ ID NO: 1105483 - RNA, 19 nt, Artificial Sequence
  Description of Artificial Sequence: Synthetic oligonucleotide
acggaaaggaggccaggcc

SEQ ID NO: 1105484 - RNA, 19 nt, Artificial Sequence
  Description of Artificial Sequence: Synthetic oligonucleotide
uggucugcuaaaaggugag

SEQ ID NO: 1105485 - RNA, 19 nt, Artificial Sequence
  Description of Artificial Sequence: Synthetic oligonucleotide
uagucugcacguucugugg

SEQ ID NO: 1105486 - RNA, 19 nt, Artificial Sequence
  Description of Artificial Sequence: Synthetic oligonucleotide
auuaauuagugugguagcu

SEQ ID NO: 1105487 - RNA, 19 nt, Artificial Sequence
  Description of Artificial Sequence: Synthetic oligonucleotide
uacacggggcccaucaccc

SEQ ID NO: 1105488 - RNA, 19 nt, Artificial Sequence
  Description of Artificial Sequence: Synthetic oligonucleotide
uugcucuaauaaaggaccc

SEQ ID NO: 1105489 - RNA, 19 nt, Artificial Sequence
  Description of Artificial Sequence: Synthetic oligonucleotide
aguuaguaacaagauacca

SEQ ID NO: 1105490 - RNA, 19 nt, Artificial Sequence
  Description of Artificial Sequence: Synthetic oligonucleotide
uuuaagguuuucaguacuu

SEQ ID NO: 1105491 - RNA, 19 nt, Artificial Sequence
  Description of Artificial Sequence: Synthetic oligonucleotide
uggucuacuuaugaguccc

SEQ ID NO: 1105492 - RNA, 19 nt, Artificial Sequence
  Description of Artificial Sequence: Synthetic oligonucleotide
aguaacaagauaccaugua

SEQ ID NO: 1105493 - RNA, 19 nt, Artificial Sequence
  Description of Artificial Sequence: Synthetic oligonucleotide
uugggguaaguaaaauggu

SEQ ID NO: 1105494 - RNA, 19 nt, Artificial Sequence
  Description of Artificial Sequence: Synthetic oligonucleotide
guacuugcucuaauaaagg

SEQ ID NO: 1105495 - RNA, 19 nt, Artificial Sequence
  Description of Artificial Sequence: Synthetic oligonucleotide
acaagauaccauguagcuc

SEQ ID NO: 1105496 - RNA, 19 nt, Artificial Sequence
  Description of Artificial Sequence: Synthetic oligonucleotide
augguaccccaauauuaac

SEQ ID NO: 1105497 - RNA, 19 nt, Artificial Sequence
  Description of Artificial Sequence: Synthetic oligonucleotide
uggagcuugguuuguuucc

SEQ ID NO: 1105498 - RNA, 19 nt, Artificial Sequence
  Description of Artificial Sequence: Synthetic oligonucleotide
uuagcucuggcuuggugac

SEQ ID NO: 1105499 - RNA, 19 nt, Artificial Sequence
  Description of Artificial Sequence: Synthetic oligonucleotide
gaguuaguaacaagauacc

SEQ ID NO: 1105500 - RNA, 19 nt, Artificial Sequence
  Description of Artificial Sequence: Synthetic oligonucleotide
uaguacacggggcccauca

SEQ ID NO: 1105501 - RNA, 19 nt, Artificial Sequence
  Description of Artificial Sequence: Synthetic oligonucleotide
caguacuagccccugagug

SEQ ID NO: 1105502 - RNA, 19 nt, Artificial Sequence
  Description of Artificial Sequence: Synthetic oligonucleotide
ucggccauuucguuccagg

SEQ ID NO: 1105503 - RNA, 19 nt, Artificial Sequence
  Description of Artificial Sequence: Synthetic oligonucleotide
uggccuacuaccacauccc

SEQ ID NO: 1105504 - RNA, 19 nt, Artificial Sequence
  Description of Artificial Sequence: Synthetic oligonucleotide
aaaaggugagacguccacu

SEQ ID NO: 1105505 - RNA, 19 nt, Artificial Sequence
  Description of Artificial Sequence: Synthetic oligonucleotide
uucguuccagggauacccg

SEQ ID NO: 1105506 - RNA, 19 nt, Artificial Sequence
  Description of Artificial Sequence: Synthetic oligonucleotide
ucuugucccauaaaacauu

SEQ ID NO: 1105507 - RNA, 19 nt, Artificial Sequence
  Description of Artificial Sequence: Synthetic oligonucleotide
aacauuaauuaguguggua

SEQ ID NO: 1105508 - RNA, 19 nt, Artificial Sequence
  Description of Artificial Sequence: Synthetic oligonucleotide
acuccccuaguacacgggg

SEQ ID NO: 1105509 - RNA, 19 nt, Artificial Sequence
  Description of Artificial Sequence: Synthetic oligonucleotide
uacuuaugagucccucagc

SEQ ID NO: 1105510 - RNA, 19 nt, Artificial Sequence
  Description of Artificial Sequence: Synthetic oligonucleotide
augguacuugcucuaauaa

SEQ ID NO: 1105511 - RNA, 19 nt, Artificial Sequence
  Description of Artificial Sequence: Synthetic oligonucleotide
aggacccaaugguacuugc

SEQ ID NO: 1105512 - RNA, 19 nt, Artificial Sequence
  Description of Artificial Sequence: Synthetic oligonucleotide
ugagguuggcccucaacac

SEQ ID NO: 1105513 - RNA, 19 nt, Artificial Sequence
  Description of Artificial Sequence: Synthetic oligonucleotide
cuuggaccaccacagcagg

SEQ ID NO: 1105514 - RNA, 19 nt, Artificial Sequence
  Description of Artificial Sequence: Synthetic oligonucleotide
cacuccacaguacuagccc

SEQ ID NO: 1105515 - RNA, 19 nt, Artificial Sequence
  Description of Artificial Sequence: Synthetic oligonucleotide
gacccaaugguacuugcuc

SEQ ID NO: 1105516 - RNA, 19 nt, Artificial Sequence
  Description of Artificial Sequence: Synthetic oligonucleotide
uuauugguuauuugacaua

SEQ ID NO: 1105517 - RNA, 19 nt, Artificial Sequence
  Description of Artificial Sequence: Synthetic oligonucleotide
ugccauggucuacuuauga

SEQ ID NO: 1105518 - RNA, 19 nt, Artificial Sequence
  Description of Artificial Sequence: Synthetic oligonucleotide
cauagcggaacuagggguc

SEQ ID NO: 1105519 - RNA, 19 nt, Artificial Sequence
  Description of Artificial Sequence: Synthetic oligonucleotide
aagguuuucaguacuuuua

SEQ ID NO: 1105520 - RNA, 19 nt, Artificial Sequence
  Description of Artificial Sequence: Synthetic oligonucleotide
aguggagcgcagcacaaca

SEQ ID NO: 1105521 - RNA, 19 nt, Artificial Sequence
  Description of Artificial Sequence: Synthetic oligonucleotide
agacuccccuaguacacgg

SEQ ID NO: 1105522 - RNA, 19 nt, Artificial Sequence
  Description of Artificial Sequence: Synthetic oligonucleotide
ucggcauggguacaagggu

SEQ ID NO: 1105523 - RNA, 19 nt, Artificial Sequence
  Description of Artificial Sequence: Synthetic oligonucleotide
cuaagucauagcucagcug

SEQ ID NO: 1105524 - RNA, 19 nt, Artificial Sequence
  Description of Artificial Sequence: Synthetic oligonucleotide
cuuaugagucccucagcac

SEQ ID NO: 1105525 - RNA, 19 nt, Artificial Sequence
  Description of Artificial Sequence: Synthetic oligonucleotide
aacacaugcaggagagcag

SEQ ID NO: 1105526 - RNA, 19 nt, Artificial Sequence
  Description of Artificial Sequence: Synthetic oligonucleotide
cacaguacuagccccugag

SEQ ID NO: 1105527 - RNA, 19 nt, Artificial Sequence
  Description of Artificial Sequence: Synthetic oligonucleotide
uccaacauagaggggcucc

SEQ ID NO: 1105528 - RNA, 19 nt, Artificial Sequence
  Description of Artificial Sequence: Synthetic oligonucleotide
cuaaggcugccuucaaaac

SEQ ID NO: 1105529 - RNA, 19 nt, Artificial Sequence
  Description of Artificial Sequence: Synthetic oligonucleotide
caacgugcaggcaagaaaa

SEQ ID NO: 1105530 - RNA, 19 nt, Artificial Sequence
  Description of Artificial Sequence: Synthetic oligonucleotide
uaguggaguuaguaacaag

SEQ ID NO: 1105531 - RNA, 19 nt, Artificial Sequence
  Description of Artificial Sequence: Synthetic oligonucleotide
cacauuugggguaaguaaa

SEQ ID NO: 1105532 - RNA, 19 nt, Artificial Sequence
  Description of Artificial Sequence: Synthetic oligonucleotide
uggacggaaaggaggccag

SEQ ID NO: 1105533 - RNA, 19 nt, Artificial Sequence
  Description of Artificial Sequence: Synthetic oligonucleotide
gacauacagugcaaagggc

SEQ ID NO: 1105534 - RNA, 19 nt, Artificial Sequence
  Description of Artificial Sequence: Synthetic oligonucleotide
gccacuuagagacaccagc

SEQ ID NO: 1105535 - RNA, 19 nt, Artificial Sequence
  Description of Artificial Sequence: Synthetic oligonucleotide
ugcucuaauaaaggacccc

SEQ ID NO: 1105536 - RNA, 19 nt, Artificial Sequence
  Description of Artificial Sequence: Synthetic oligonucleotide
acccaaugguacuugcucu

SEQ ID NO: 1105537 - RNA, 19 nt, Artificial Sequence
  Description of Artificial Sequence: Synthetic oligonucleotide
cuuaccaggagacccaaaa

SEQ ID NO: 1105538 - RNA, 19 nt, Artificial Sequence
  Description of Artificial Sequence: Synthetic oligonucleotide
agcacuagggguccaggcu

SEQ ID NO: 1105539 - RNA, 19 nt, Artificial Sequence
  Description of Artificial Sequence: Synthetic oligonucleotide
uacaggacccaaugguacu

SEQ ID NO: 1105540 - RNA, 19 nt, Artificial Sequence
  Description of Artificial Sequence: Synthetic oligonucleotide
uacagugcaaagggcuagg

SEQ ID NO: 1105541 - RNA, 19 nt, Artificial Sequence
  Description of Artificial Sequence: Synthetic oligonucleotide
guugagcauggugugaggc

SEQ ID NO: 1105542 - RNA, 19 nt, Artificial Sequence
  Description of Artificial Sequence: Synthetic oligonucleotide
agcaauccuggccaacgug

SEQ ID NO: 1105543 - RNA, 19 nt, Artificial Sequence
  Description of Artificial Sequence: Synthetic oligonucleotide
auuucguuccagggauacc

SEQ ID NO: 1105544 - RNA, 19 nt, Artificial Sequence
  Description of Artificial Sequence: Synthetic oligonucleotide
ugugaggcaccggagacuc

SEQ ID NO: 1105545 - RNA, 19 nt, Artificial Sequence
  Description of Artificial Sequence: Synthetic oligonucleotide
gcuaaaaggugagacgucc

SEQ ID NO: 1105546 - RNA, 19 nt, Artificial Sequence
  Description of Artificial Sequence: Synthetic oligonucleotide
ucuagguugccauggucua

SEQ ID NO: 1105547 - RNA, 19 nt, Artificial Sequence
  Description of Artificial Sequence: Synthetic oligonucleotide
cuauacaggacccaauggu

SEQ ID NO: 1105548 - RNA, 19 nt, Artificial Sequence
  Description of Artificial Sequence: Synthetic oligonucleotide
cacauaguggaguuaguaa

SEQ ID NO: 1105549 - RNA, 19 nt, Artificial Sequence
  Description of Artificial Sequence: Synthetic oligonucleotide
cacuuagagacaccagcug

SEQ ID NO: 1105550 - RNA, 19 nt, Artificial Sequence
  Description of Artificial Sequence: Synthetic oligonucleotide
gcucaguucaaagugguug

SEQ ID NO: 1105551 - RNA, 19 nt, Artificial Sequence
  Description of Artificial Sequence: Synthetic oligonucleotide
acgugcaggcaagaaaauc

SEQ ID NO: 1105552 - RNA, 19 nt, Artificial Sequence
  Description of Artificial Sequence: Synthetic oligonucleotide
gguacauuaggcagaggag

SEQ ID NO: 1105553 - RNA, 19 nt, Artificial Sequence
  Description of Artificial Sequence: Synthetic oligonucleotide
guacacggggcccaucacc

SEQ ID NO: 1105554 - RNA, 19 nt, Artificial Sequence
  Description of Artificial Sequence: Synthetic oligonucleotide
ugagacguccacugcccgc

SEQ ID NO: 1105555 - RNA, 19 nt, Artificial Sequence
  Description of Artificial Sequence: Synthetic oligonucleotide
agggccuuagcucuggcuu

SEQ ID NO: 1105556 - RNA, 19 nt, Artificial Sequence
  Description of Artificial Sequence: Synthetic oligonucleotide
caucgaagccagaggacac

SEQ ID NO: 1105557 - RNA, 19 nt, Artificial Sequence
  Description of Artificial Sequence: Synthetic oligonucleotide
ugcuaaaaggugagacguc

SEQ ID NO: 1105558 - RNA, 19 nt, Artificial Sequence
  Description of Artificial Sequence: Synthetic oligonucleotide
guaaaaugguaccccaaua

SEQ ID NO: 1105559 - RNA, 19 nt, Artificial Sequence
  Description of Artificial Sequence: Synthetic oligonucleotide
gaacuagggguccaggcua

SEQ ID NO: 1105560 - RNA, 19 nt, Artificial Sequence
  Description of Artificial Sequence: Synthetic oligonucleotide
cauuucguuccagggauac

SEQ ID NO: 1105561 - RNA, 19 nt, Artificial Sequence
  Description of Artificial Sequence: Synthetic oligonucleotide
guacuagccccugaguggc

SEQ ID NO: 1105562 - RNA, 19 nt, Artificial Sequence
  Description of Artificial Sequence: Synthetic oligonucleotide
ccuauacaggacccaaugg

SEQ ID NO: 1105563 - RNA, 19 nt, Artificial Sequence
  Description of Artificial Sequence: Synthetic oligonucleotide
caguucuugucccauaaaa

SEQ ID NO: 1105564 - RNA, 19 nt, Artificial Sequence
  Description of Artificial Sequence: Synthetic oligonucleotide
uggccaacgugcaggcaag

SEQ ID NO: 1105565 - RNA, 19 nt, Artificial Sequence
  Description of Artificial Sequence: Synthetic oligonucleotide
caccaucgaagccagagga

SEQ ID NO: 1105566 - RNA, 19 nt, Artificial Sequence
  Description of Artificial Sequence: Synthetic oligonucleotide
acaguacuagccccugagu

SEQ ID NO: 1105567 - RNA, 19 nt, Artificial Sequence
  Description of Artificial Sequence: Synthetic oligonucleotide
ucagugcgcaagcucaguu

SEQ ID NO: 1105568 - RNA, 19 nt, Artificial Sequence
  Description of Artificial Sequence: Synthetic oligonucleotide
gagacuccccuaguacacg

SEQ ID NO: 1105569 - RNA, 19 nt, Artificial Sequence
  Description of Artificial Sequence: Synthetic oligonucleotide
uugccauggucuacuuaug

SEQ ID NO: 1105570 - RNA, 19 nt, Artificial Sequence
  Description of Artificial Sequence: Synthetic oligonucleotide
aacuagggguccaggcuag

SEQ ID NO: 1105571 - RNA, 19 nt, Artificial Sequence
  Description of Artificial Sequence: Synthetic oligonucleotide
cuaaaaggugagacgucca

SEQ ID NO: 1105572 - RNA, 19 nt, Artificial Sequence
  Description of Artificial Sequence: Synthetic oligonucleotide
cugagcccagucaagaaaa

SEQ ID NO: 1105573 - RNA, 19 nt, Artificial Sequence
  Description of Artificial Sequence: Synthetic oligonucleotide
uggcgauggccuacuacca

SEQ ID NO: 1105574 - RNA, 19 nt, Artificial Sequence
  Description of Artificial Sequence: Synthetic oligonucleotide
gugagcccugacucgaagc

SEQ ID NO: 1105575 - RNA, 19 nt, Artificial Sequence
  Description of Artificial Sequence: Synthetic oligonucleotide
ucgaagccagaggacacug

SEQ ID NO: 1105576 - RNA, 19 nt, Artificial Sequence
  Description of Artificial Sequence: Synthetic oligonucleotide
gacacauuugggguaagua

SEQ ID NO: 1105577 - RNA, 19 nt, Artificial Sequence
  Description of Artificial Sequence: Synthetic oligonucleotide
cuugucccauaaaacauua

SEQ ID NO: 1105578 - RNA, 19 nt, Artificial Sequence
  Description of Artificial Sequence: Synthetic oligonucleotide
uccuaaggcugccuucaaa

SEQ ID NO: 1105579 - RNA, 19 nt, Artificial Sequence
  Description of Artificial Sequence: Synthetic oligonucleotide
gacucgaagccagcgguug

SEQ ID NO: 1105580 - RNA, 19 nt, Artificial Sequence
  Description of Artificial Sequence: Synthetic oligonucleotide
agugccuucggcaugggua

SEQ ID NO: 1105581 - RNA, 19 nt, Artificial Sequence
  Description of Artificial Sequence: Synthetic oligonucleotide
gugccuucggcauggguac

SEQ ID NO: 1105582 - RNA, 19 nt, Artificial Sequence
  Description of Artificial Sequence: Synthetic oligonucleotide
accaucgaagccagaggac

SEQ ID NO: 1105583 - RNA, 19 nt, Artificial Sequence
  Description of Artificial Sequence: Synthetic oligonucleotide
gccauggucuacuuaugag

SEQ ID NO: 1105584 - RNA, 19 nt, Artificial Sequence
  Description of Artificial Sequence: Synthetic oligonucleotide
guacauuaggcagaggagu

SEQ ID NO: 1105585 - RNA, 19 nt, Artificial Sequence
  Description of Artificial Sequence: Synthetic oligonucleotide
ugcaggcaagaaaaucaua

SEQ ID NO: 1105586 - RNA, 19 nt, Artificial Sequence
  Description of Artificial Sequence: Synthetic oligonucleotide
ugcccgcaacacaugcucc

SEQ ID NO: 1105587 - RNA, 19 nt, Artificial Sequence
  Description of Artificial Sequence: Synthetic oligonucleotide
cucuagguugccauggucu

SEQ ID NO: 1105588 - RNA, 19 nt, Artificial Sequence
  Description of Artificial Sequence: Synthetic oligonucleotide
acguccacugcccgcaaca

SEQ ID NO: 1105589 - RNA, 19 nt, Artificial Sequence
  Description of Artificial Sequence: Synthetic oligonucleotide
ggcaccaucgaagccagag

SEQ ID NO: 1105590 - RNA, 19 nt, Artificial Sequence
  Description of Artificial Sequence: Synthetic oligonucleotide
gucagcugagcccagucaa

SEQ ID NO: 1105591 - RNA, 19 nt, Artificial Sequence
  Description of Artificial Sequence: Synthetic oligonucleotide
auacccggauccagguacc

SEQ ID NO: 1105592 - RNA, 19 nt, Artificial Sequence
  Description of Artificial Sequence: Synthetic oligonucleotide
agaaccuauacaggaccca

SEQ ID NO: 1105593 - RNA, 19 nt, Artificial Sequence
  Description of Artificial Sequence: Synthetic oligonucleotide
gaaccuauacaggacccaa

SEQ ID NO: 1105594 - RNA, 19 nt, Artificial Sequence
  Description of Artificial Sequence: Synthetic oligonucleotide
aaccuaagucauagcucag

SEQ ID NO: 1105595 - RNA, 19 nt, Artificial Sequence
  Description of Artificial Sequence: Synthetic oligonucleotide
agagcacuagggguccagg

SEQ ID NO: 1105596 - RNA, 19 nt, Artificial Sequence
  Description of Artificial Sequence: Synthetic oligonucleotide
ucacccacucgaagggcac

SEQ ID NO: 1105597 - RNA, 19 nt, Artificial Sequence
  Description of Artificial Sequence: Synthetic oligonucleotide
gcaauccuggccaacgugc

SEQ ID NO: 1105598 - RNA, 19 nt, Artificial Sequence
  Description of Artificial Sequence: Synthetic oligonucleotide
auugguacagagagcacua

SEQ ID NO: 1105599 - RNA, 19 nt, Artificial Sequence
  Description of Artificial Sequence: Synthetic oligonucleotide
ucaacacaugcaggagagc

SEQ ID NO: 1105600 - RNA, 19 nt, Artificial Sequence
  Description of Artificial Sequence: Synthetic oligonucleotide
guuaaccuucacaguggag

SEQ ID NO: 1105601 - RNA, 19 nt, Artificial Sequence
  Description of Artificial Sequence: Synthetic oligonucleotide
ggaaccuaagucauagcuc

SEQ ID NO: 1105602 - RNA, 19 nt, Artificial Sequence
  Description of Artificial Sequence: Synthetic oligonucleotide
ccuuugguagagucugucc

SEQ ID NO: 1105603 - RNA, 19 nt, Artificial Sequence
  Description of Artificial Sequence: Synthetic oligonucleotide
cacuagggguccaggcuag

SEQ ID NO: 1105604 - RNA, 19 nt, Artificial Sequence
  Description of Artificial Sequence: Synthetic oligonucleotide
cugcuaaaaggugagacgu

SEQ ID NO: 1105605 - RNA, 19 nt, Artificial Sequence
  Description of Artificial Sequence: Synthetic oligonucleotide
cugaagugccuucggcaug

SEQ ID NO: 1105606 - RNA, 19 nt, Artificial Sequence
  Description of Artificial Sequence: Synthetic oligonucleotide
acauuugggguaaguaaaa

SEQ ID NO: 1105607 - RNA, 19 nt, Artificial Sequence
  Description of Artificial Sequence: Synthetic oligonucleotide
uagggacauacagugcaaa

SEQ ID NO: 1105608 - RNA, 19 nt, Artificial Sequence
  Description of Artificial Sequence: Synthetic oligonucleotide
gcaccaucgaagccagagg

SEQ ID NO: 1105609 - RNA, 19 nt, Artificial Sequence
  Description of Artificial Sequence: Synthetic oligonucleotide
cuagggguccaggcuagcc

SEQ ID NO: 1105610 - RNA, 19 nt, Artificial Sequence
  Description of Artificial Sequence: Synthetic oligonucleotide
gacuccccuaguacacggg

SEQ ID NO: 1105611 - RNA, 19 nt, Artificial Sequence
  Description of Artificial Sequence: Synthetic oligonucleotide
gguagccacuuagagacac

SEQ ID NO: 1105612 - RNA, 19 nt, Artificial Sequence
  Description of Artificial Sequence: Synthetic oligonucleotide
ggagagcagcuuaagugag

SEQ ID NO: 1105613 - RNA, 19 nt, Artificial Sequence
  Description of Artificial Sequence: Synthetic oligonucleotide
agcuuaagugagaaccuau

SEQ ID NO: 1105614 - RNA, 19 nt, Artificial Sequence
  Description of Artificial Sequence: Synthetic oligonucleotide
aaccuauacaggacccaau

SEQ ID NO: 1105615 - RNA, 19 nt, Artificial Sequence
  Description of Artificial Sequence: Synthetic oligonucleotide
ucccguagacagcccacaa

SEQ ID NO: 1105616 - RNA, 19 nt, Artificial Sequence
  Description of Artificial Sequence: Synthetic oligonucleotide
gugccauaggccuuuggua

SEQ ID NO: 1105617 - RNA, 19 nt, Artificial Sequence
  Description of Artificial Sequence: Synthetic oligonucleotide
caggcaagaaaaucauaua

SEQ ID NO: 1105618 - RNA, 19 nt, Artificial Sequence
  Description of Artificial Sequence: Synthetic oligonucleotide
acguagucugcacguucug

SEQ ID NO: 1105619 - RNA, 19 nt, Artificial Sequence
  Description of Artificial Sequence: Synthetic oligonucleotide
caguucaaagugguugcuc

SEQ ID NO: 1105620 - RNA, 19 nt, Artificial Sequence
  Description of Artificial Sequence: Synthetic oligonucleotide
ggccuacuaccacaucccg

SEQ ID NO: 1105621 - RNA, 19 nt, Artificial Sequence
  Description of Artificial Sequence: Synthetic oligonucleotide
cauagacacauaguggagu

SEQ ID NO: 1105622 - RNA, 19 nt, Artificial Sequence
  Description of Artificial Sequence: Synthetic oligonucleotide
uguguccaguuguguggca

SEQ ID NO: 1105623 - RNA, 19 nt, Artificial Sequence
  Description of Artificial Sequence: Synthetic oligonucleotide
cacuuuguuucugcagcac

SEQ ID NO: 1105624 - RNA, 19 nt, Artificial Sequence
  Description of Artificial Sequence: Synthetic oligonucleotide
ugguagagucugucccaca

SEQ ID NO: 1105625 - RNA, 19 nt, Artificial Sequence
  Description of Artificial Sequence: Synthetic oligonucleotide
ccugacucgaagccagcgg

SEQ ID NO: 1105626 - RNA, 19 nt, Artificial Sequence
  Description of Artificial Sequence: Synthetic oligonucleotide
auugguuauuugacauaga

SEQ ID NO: 1105627 - RNA, 19 nt, Artificial Sequence
  Description of Artificial Sequence: Synthetic oligonucleotide
ccagcgguugguguuaacc

SEQ ID NO: 1105628 - RNA, 19 nt, Artificial Sequence
  Description of Artificial Sequence: Synthetic oligonucleotide
acuagggguccaggcuagc

SEQ ID NO: 1105629 - RNA, 19 nt, Artificial Sequence
  Description of Artificial Sequence: Synthetic oligonucleotide
acccuuucggccauuucgu

SEQ ID NO: 1105630 - RNA, 19 nt, Artificial Sequence
  Description of Artificial Sequence: Synthetic oligonucleotide
aucgaagccagaggacacu

SEQ ID NO: 1105631 - RNA, 19 nt, Artificial Sequence
  Description of Artificial Sequence: Synthetic oligonucleotide
ggauccagguacccagggc

SEQ ID NO: 1105632 - RNA, 19 nt, Artificial Sequence
  Description of Artificial Sequence: Synthetic oligonucleotide
aacgugcaggcaagaaaau

SEQ ID NO: 1105633 - RNA, 19 nt, Artificial Sequence
  Description of Artificial Sequence: Synthetic oligonucleotide
ccauucguagaggaguaag

SEQ ID NO: 1105634 - RNA, 19 nt, Artificial Sequence
  Description of Artificial Sequence: Synthetic oligonucleotide
uugccacuccacaguacua

SEQ ID NO: 1105635 - RNA, 19 nt, Artificial Sequence
  Description of Artificial Sequence: Synthetic oligonucleotide
guacccagggcuaugggcu

SEQ ID NO: 1105636 - RNA, 19 nt, Artificial Sequence
  Description of Artificial Sequence: Synthetic oligonucleotide
ggccucauugcccaccuga

SEQ ID NO: 1105637 - RNA, 19 nt, Artificial Sequence
  Description of Artificial Sequence: Synthetic oligonucleotide
accggagacuccccuagua

SEQ ID NO: 1105638 - RNA, 19 nt, Artificial Sequence
  Description of Artificial Sequence: Synthetic oligonucleotide
uuucggccauuucguucca

SEQ ID NO: 1105639 - RNA, 19 nt, Artificial Sequence
  Description of Artificial Sequence: Synthetic oligonucleotide
cccggauccagguacccag

SEQ ID NO: 1105640 - RNA, 19 nt, Artificial Sequence
  Description of Artificial Sequence: Synthetic oligonucleotide
ccuacuaccacaucccgua

SEQ ID NO: 1105641 - RNA, 19 nt, Artificial Sequence
  Description of Artificial Sequence: Synthetic oligonucleotide
auggugugaggcaccggag

SEQ ID NO: 1105642 - RNA, 19 nt, Artificial Sequence
  Description of Artificial Sequence: Synthetic oligonucleotide
gucuacuuaugagucccuc

SEQ ID NO: 1105643 - RNA, 19 nt, Artificial Sequence
  Description of Artificial Sequence: Synthetic oligonucleotide
gcaggcaagaaaaucauau

SEQ ID NO: 1105644 - RNA, 19 nt, Artificial Sequence
  Description of Artificial Sequence: Synthetic oligonucleotide
ugguugcucugaagugccu

SEQ ID NO: 1105645 - RNA, 19 nt, Artificial Sequence
  Description of Artificial Sequence: Synthetic oligonucleotide
guagccacuuagagacacc

SEQ ID NO: 1105646 - RNA, 19 nt, Artificial Sequence
  Description of Artificial Sequence: Synthetic oligonucleotide
gguggcgauggccuacuac

SEQ ID NO: 1105647 - RNA, 19 nt, Artificial Sequence
  Description of Artificial Sequence: Synthetic oligonucleotide
cauggguacaagggugguc

SEQ ID NO: 1105648 - RNA, 19 nt, Artificial Sequence
  Description of Artificial Sequence: Synthetic oligonucleotide
gcgcaagcucaguucaaag

SEQ ID NO: 1105649 - RNA, 19 nt, Artificial Sequence
  Description of Artificial Sequence: Synthetic oligonucleotide
gcaccggagacuccccuag

SEQ ID NO: 1105650 - RNA, 19 nt, Artificial Sequence
  Description of Artificial Sequence: Synthetic oligonucleotide
ggaacuagggguccaggcu

SEQ ID NO: 1105651 - RNA, 19 nt, Artificial Sequence
  Description of Artificial Sequence: Synthetic oligonucleotide
ugcaagccuccaagccaca

SEQ ID NO: 1105652 - RNA, 19 nt, Artificial Sequence
  Description of Artificial Sequence: Synthetic oligonucleotide
ccuuucggccauuucguuc

SEQ ID NO: 1105653 - RNA, 19 nt, Artificial Sequence
  Description of Artificial Sequence: Synthetic oligonucleotide
agcggaacuagggguccag

SEQ ID NO: 1105654 - RNA, 19 nt, Artificial Sequence
  Description of Artificial Sequence: Synthetic oligonucleotide
ccguagacagcccacaaaa

SEQ ID NO: 1105655 - RNA, 19 nt, Artificial Sequence
  Description of Artificial Sequence: Synthetic oligonucleotide
uucggccauuucguuccag

SEQ ID NO: 1105656 - RNA, 19 nt, Artificial Sequence
  Description of Artificial Sequence: Synthetic oligonucleotide
agggcuaggcaugguacau

SEQ ID NO: 1105657 - RNA, 19 nt, Artificial Sequence
  Description of Artificial Sequence: Synthetic oligonucleotide
cacguagucugcacguucu

SEQ ID NO: 1105658 - RNA, 19 nt, Artificial Sequence
  Description of Artificial Sequence: Synthetic oligonucleotide
gacguccacugcccgcaac

SEQ ID NO: 1105659 - RNA, 19 nt, Artificial Sequence
  Description of Artificial Sequence: Synthetic oligonucleotide
cagggcuuaccaggagacc

SEQ ID NO: 1105660 - RNA, 19 nt, Artificial Sequence
  Description of Artificial Sequence: Synthetic oligonucleotide
uccccgggccagcuugcug

SEQ ID NO: 1105661 - RNA, 19 nt, Artificial Sequence
  Description of Artificial Sequence: Synthetic oligonucleotide
gcgauggccuacuaccaca

SEQ ID NO: 1105662 - RNA, 19 nt, Artificial Sequence
  Description of Artificial Sequence: Synthetic oligonucleotide
gccauuucguuccagggau

SEQ ID NO: 1105663 - RNA, 19 nt, Artificial Sequence
  Description of Artificial Sequence: Synthetic oligonucleotide
cagcgguugguguuaaccu

SEQ ID NO: 1105664 - RNA, 19 nt, Artificial Sequence
  Description of Artificial Sequence: Synthetic oligonucleotide
acaugcaggagagcagcuu

SEQ ID NO: 1105665 - RNA, 19 nt, Artificial Sequence
  Description of Artificial Sequence: Synthetic oligonucleotide
gcucuaauaaaggaccccu

SEQ ID NO: 1105666 - RNA, 19 nt, Artificial Sequence
  Description of Artificial Sequence: Synthetic oligonucleotide
ggcgauggccuacuaccac

SEQ ID NO: 1105667 - RNA, 19 nt, Artificial Sequence
  Description of Artificial Sequence: Synthetic oligonucleotide
ccauggucuacuuaugagu

SEQ ID NO: 1105668 - RNA, 19 nt, Artificial Sequence
  Description of Artificial Sequence: Synthetic oligonucleotide
ggcccucaacacaugcagg

SEQ ID NO: 1105669 - RNA, 19 nt, Artificial Sequence
  Description of Artificial Sequence: Synthetic oligonucleotide
aggcaccggagacuccccu

SEQ ID NO: 1105670 - RNA, 19 nt, Artificial Sequence
  Description of Artificial Sequence: Synthetic oligonucleotide
cggaacuagggguccaggc

SEQ ID NO: 1105671 - RNA, 19 nt, Artificial Sequence
  Description of Artificial Sequence: Synthetic oligonucleotide
guagggacauacagugcaa

SEQ ID NO: 1105672 - RNA, 19 nt, Artificial Sequence
  Description of Artificial Sequence: Synthetic oligonucleotide
gagcccugacucgaagcca

SEQ ID NO: 1105673 - RNA, 19 nt, Artificial Sequence
  Description of Artificial Sequence: Synthetic oligonucleotide
ggcagacacauuuggggua

SEQ ID NO: 1105674 - RNA, 19 nt, Artificial Sequence
  Description of Artificial Sequence: Synthetic oligonucleotide
ggccuuagcucuggcuugg

SEQ ID NO: 1105675 - RNA, 19 nt, Artificial Sequence
  Description of Artificial Sequence: Synthetic oligonucleotide
acugcccgcaacacaugcu

SEQ ID NO: 1105676 - RNA, 19 nt, Artificial Sequence
  Description of Artificial Sequence: Synthetic oligonucleotide
gcuuaagugagaaccuaua

SEQ ID NO: 1105677 - RNA, 19 nt, Artificial Sequence
  Description of Artificial Sequence: Synthetic oligonucleotide
uagccccugaguggccuca

SEQ ID NO: 1105678 - RNA, 19 nt, Artificial Sequence
  Description of Artificial Sequence: Synthetic oligonucleotide
cauguagcuccccagccuu

SEQ ID NO: 1105679 - RNA, 19 nt, Artificial Sequence
  Description of Artificial Sequence: Synthetic oligonucleotide
gcucuagguugccaugguc

SEQ ID NO: 1105680 - RNA, 19 nt, Artificial Sequence
  Description of Artificial Sequence: Synthetic oligonucleotide
acacggggcccaucaccca

SEQ ID NO: 1105681 - RNA, 19 nt, Artificial Sequence
  Description of Artificial Sequence: Synthetic oligonucleotide
cacccacucgaagggcacc

SEQ ID NO: 1105682 - RNA, 19 nt, Artificial Sequence
  Description of Artificial Sequence: Synthetic oligonucleotide
gcacuagggguccaggcua

SEQ ID NO: 1105683 - RNA, 19 nt, Artificial Sequence
  Description of Artificial Sequence: Synthetic oligonucleotide
cgcaacacaugcuccugag

SEQ ID NO: 1105684 - RNA, 19 nt, Artificial Sequence
  Description of Artificial Sequence: Synthetic oligonucleotide
caggcuagccugggaugag

SEQ ID NO: 1105685 - RNA, 19 nt, Artificial Sequence
  Description of Artificial Sequence: Synthetic oligonucleotide
gcgguugguguuaaccuuc

SEQ ID NO: 1105686 - RNA, 19 nt, Artificial Sequence
  Description of Artificial Sequence: Synthetic oligonucleotide
gguacaaggguggucugcu

SEQ ID NO: 1105687 - RNA, 19 nt, Artificial Sequence
  Description of Artificial Sequence: Synthetic oligonucleotide
gcuaggcaugguacauuag

SEQ ID NO: 1105688 - RNA, 19 nt, Artificial Sequence
  Description of Artificial Sequence: Synthetic oligonucleotide
aaccugugccauaggccuu

SEQ ID NO: 1105689 - RNA, 19 nt, Artificial Sequence
  Description of Artificial Sequence: Synthetic oligonucleotide
ccacuuagagacaccagcu

SEQ ID NO: 1105690 - RNA, 19 nt, Artificial Sequence
  Description of Artificial Sequence: Synthetic oligonucleotide
cuccaacauagaggggcuc

SEQ ID NO: 1105691 - RNA, 19 nt, Artificial Sequence
  Description of Artificial Sequence: Synthetic oligonucleotide
ccacguagucugcacguuc

SEQ ID NO: 1105692 - RNA, 19 nt, Artificial Sequence
  Description of Artificial Sequence: Synthetic oligonucleotide
ccggauccagguacccagg

SEQ ID NO: 1105693 - RNA, 19 nt, Artificial Sequence
  Description of Artificial Sequence: Synthetic oligonucleotide
cauuugggguaaguaaaau

SEQ ID NO: 1105694 - RNA, 19 nt, Artificial Sequence
  Description of Artificial Sequence: Synthetic oligonucleotide
aggagacccaaaagaccaa

SEQ ID NO: 1105695 - RNA, 19 nt, Artificial Sequence
  Description of Artificial Sequence: Synthetic oligonucleotide
cagcuuaagugagaaccua

SEQ ID NO: 1105696 - RNA, 19 nt, Artificial Sequence
  Description of Artificial Sequence: Synthetic oligonucleotide
ccuuagcucuggcuuggug

SEQ ID NO: 1105697 - RNA, 19 nt, Artificial Sequence
  Description of Artificial Sequence: Synthetic oligonucleotide
guacaaggguggucugcua

SEQ ID NO: 1105698 - RNA, 19 nt, Artificial Sequence
  Description of Artificial Sequence: Synthetic oligonucleotide
gcggaacuagggguccagg

SEQ ID NO: 1105699 - RNA, 19 nt, Artificial Sequence
  Description of Artificial Sequence: Synthetic oligonucleotide
agcucaguucaaagugguu

SEQ ID NO: 1105700 - RNA, 19 nt, Artificial Sequence
  Description of Artificial Sequence: Synthetic oligonucleotide
cuaguacacggggcccauc

SEQ ID NO: 1105701 - RNA, 19 nt, Artificial Sequence
  Description of Artificial Sequence: Synthetic oligonucleotide
ugccuucggcauggguaca

SEQ ID NO: 1105702 - RNA, 19 nt, Artificial Sequence
  Description of Artificial Sequence: Synthetic oligonucleotide
gccuuugguagagucuguc

SEQ ID NO: 1105703 - RNA, 19 nt, Artificial Sequence
  Description of Artificial Sequence: Synthetic oligonucleotide
gagcccagucaagaaaauu

SEQ ID NO: 1105704 - RNA, 19 nt, Artificial Sequence
  Description of Artificial Sequence: Synthetic oligonucleotide
caaugguacuugcucuaau

SEQ ID NO: 1105705 - RNA, 19 nt, Artificial Sequence
  Description of Artificial Sequence: Synthetic oligonucleotide
gggcuccuuaagguugagc

SEQ ID NO: 1105706 - RNA, 19 nt, Artificial Sequence
  Description of Artificial Sequence: Synthetic oligonucleotide
gggcuuaccaggagaccca

SEQ ID NO: 1105707 - RNA, 19 nt, Artificial Sequence
  Description of Artificial Sequence: Synthetic oligonucleotide
cacucgaagggcacccuuu

SEQ ID NO: 1105708 - RNA, 19 nt, Artificial Sequence
  Description of Artificial Sequence: Synthetic oligonucleotide
cccaaugguacuugcucua

SEQ ID NO: 1105709 - RNA, 19 nt, Artificial Sequence
  Description of Artificial Sequence: Synthetic oligonucleotide
ggauacccggauccaggua

SEQ ID NO: 1105710 - RNA, 19 nt, Artificial Sequence
  Description of Artificial Sequence: Synthetic oligonucleotide
gugugaggcaccggagacu

SEQ ID NO: 1105711 - RNA, 19 nt, Artificial Sequence
  Description of Artificial Sequence: Synthetic oligonucleotide
gcagaggaguguguccuaa

SEQ ID NO: 1105712 - RNA, 19 nt, Artificial Sequence
  Description of Artificial Sequence: Synthetic oligonucleotide
cagcaauccuggccaacgu

SEQ ID NO: 1105713 - RNA, 19 nt, Artificial Sequence
  Description of Artificial Sequence: Synthetic oligonucleotide
ccccuaguacacggggccc

SEQ ID NO: 1105714 - RNA, 19 nt, Artificial Sequence
  Description of Artificial Sequence: Synthetic oligonucleotide
ggcaccggagacuccccua

SEQ ID NO: 1105715 - RNA, 19 nt, Artificial Sequence
  Description of Artificial Sequence: Synthetic oligonucleotide
agguggcgauggccuacua

SEQ ID NO: 1105716 - RNA, 19 nt, Artificial Sequence
  Description of Artificial Sequence: Synthetic oligonucleotide
agccagcgguugguguuaa

SEQ ID NO: 1105717 - RNA, 19 nt, Artificial Sequence
  Description of Artificial Sequence: Synthetic oligonucleotide
ccaaugguacuugcucuaa

SEQ ID NO: 1105718 - RNA, 19 nt, Artificial Sequence
  Description of Artificial Sequence: Synthetic oligonucleotide
ggcuuaccaggagacccaa

SEQ ID NO: 1105719 - RNA, 19 nt, Artificial Sequence
  Description of Artificial Sequence: Synthetic oligonucleotide
cccguagacagcccacaaa

SEQ ID NO: 1105720 - RNA, 19 nt, Artificial Sequence
  Description of Artificial Sequence: Synthetic oligonucleotide
ggcucuagguugccauggu

SEQ ID NO: 1105721 - RNA, 19 nt, Artificial Sequence
  Description of Artificial Sequence: Synthetic oligonucleotide
gcccauucguagaggagua

SEQ ID NO: 1105722 - RNA, 19 nt, Artificial Sequence
  Description of Artificial Sequence: Synthetic oligonucleotide
gccagcaauccuggccaac

SEQ ID NO: 1105723 - RNA, 19 nt, Artificial Sequence
  Description of Artificial Sequence: Synthetic oligonucleotide
ccauguagcuccccagccu

SEQ ID NO: 1105724 - RNA, 19 nt, Artificial Sequence
  Description of Artificial Sequence: Synthetic oligonucleotide
gccuacuaccacaucccgu

SEQ ID NO: 1105725 - RNA, 19 nt, Artificial Sequence
  Description of Artificial Sequence: Synthetic oligonucleotide
cgguugguguuaaccuuca

SEQ ID NO: 1105726 - RNA, 19 nt, Artificial Sequence
  Description of Artificial Sequence: Synthetic oligonucleotide
ccacaguacuagccccuga

SEQ ID NO: 1105727 - RNA, 19 nt, Artificial Sequence
  Description of Artificial Sequence: Synthetic oligonucleotide
cccuaguacacggggccca

SEQ ID NO: 1105728 - RNA, 19 nt, Artificial Sequence
  Description of Artificial Sequence: Synthetic oligonucleotide
ccagggauacccggaucca

SEQ ID NO: 1105729 - RNA, 19 nt, Artificial Sequence
  Description of Artificial Sequence: Synthetic oligonucleotide
ggucuacuuaugagucccu

SEQ ID NO: 1105730 - RNA, 19 nt, Artificial Sequence
  Description of Artificial Sequence: Synthetic oligonucleotide
ccauuucguuccagggaua

SEQ ID NO: 1105731 - RNA, 19 nt, Artificial Sequence
  Description of Artificial Sequence: Synthetic oligonucleotide
gccuucggcauggguacaa

SEQ ID NO: 1105732 - RNA, 19 nt, Artificial Sequence
  Description of Artificial Sequence: Synthetic oligonucleotide
gcuagccugggaugagguu

SEQ ID NO: 1105733 - RNA, 19 nt, Artificial Sequence
  Description of Artificial Sequence: Synthetic oligonucleotide
cagguggcgauggccuacu

SEQ ID NO: 1105734 - RNA, 19 nt, Artificial Sequence
  Description of Artificial Sequence: Synthetic oligonucleotide
ccaacauagaggggcuccu

SEQ ID NO: 1105735 - RNA, 19 nt, Artificial Sequence
  Description of Artificial Sequence: Synthetic oligonucleotide
caccggagacuccccuagu

SEQ ID NO: 1105736 - RNA, 19 nt, Artificial Sequence
  Description of Artificial Sequence: Synthetic oligonucleotide
gcuuaccaggagacccaaa

SEQ ID NO: 1105737 - RNA, 19 nt, Artificial Sequence
  Description of Artificial Sequence: Synthetic oligonucleotide
cccauucguagaggaguaa

SEQ ID NO: 1105738 - RNA, 19 nt, Artificial Sequence
  Description of Artificial Sequence: Synthetic oligonucleotide
cgauggccuacuaccacau

SEQ ID NO: 1105739 - RNA, 19 nt, Artificial Sequence
  Description of Artificial Sequence: Synthetic oligonucleotide
gggcuaggcaugguacauu

SEQ ID NO: 1105740 - RNA, 19 nt, Artificial Sequence
  Description of Artificial Sequence: Synthetic oligonucleotide
gccacguagucugcacguu

SEQ ID NO: 1105741 - RNA, 19 nt, Artificial Sequence
  Description of Artificial Sequence: Synthetic oligonucleotide
ggcacccuuucggccauuu

SEQ ID NO: 1105742 - RNA, 19 nt, Artificial Sequence
  Description of Artificial Sequence: Synthetic oligonucleotide
cccuuucggccauuucguu

SEQ ID NO: 1105743 - RNA, 19 nt, Artificial Sequence
  Description of Artificial Sequence: Synthetic oligonucleotide
ccacucgaagggcacccuu

SEQ ID NO: 1105744 - RNA, 19 nt, Artificial Sequence
  Description of Artificial Sequence: Synthetic oligonucleotide
cuccccgggccagcuugcu

SEQ ID NO: 1105745 - RNA, 19 nt, Artificial Sequence
  Description of Artificial Sequence: Synthetic oligonucleotide
cccacucgaagggcacccu

SEQ ID NO: 1105746 - RNA, 19 nt, Artificial Sequence
  Description of Artificial Sequence: Synthetic oligonucleotide
aauaugacaguguugagac

SEQ ID NO: 1105747 - RNA, 19 nt, Artificial Sequence
  Description of Artificial Sequence: Synthetic oligonucleotide
agaacuuugaacaagaggc

SEQ ID NO: 1105748 - RNA, 19 nt, Artificial Sequence
  Description of Artificial Sequence: Synthetic oligonucleotide
aauuugagcacauugcacg

SEQ ID NO: 1105749 - RNA, 19 nt, Artificial Sequence
  Description of Artificial Sequence: Synthetic oligonucleotide
gacuggauaauccaguugg

SEQ ID NO: 1105750 - RNA, 19 nt, Artificial Sequence
  Description of Artificial Sequence: Synthetic oligonucleotide
aguugaaucuucuucaauc

SEQ ID NO: 1105751 - RNA, 19 nt, Artificial Sequence
  Description of Artificial Sequence: Synthetic oligonucleotide
uccaacauaauaguggugg

SEQ ID NO: 1105752 - RNA, 19 nt, Artificial Sequence
  Description of Artificial Sequence: Synthetic oligonucleotide
uuugcagucaggaacgucc

SEQ ID NO: 1105753 - RNA, 19 nt, Artificial Sequence
  Description of Artificial Sequence: Synthetic oligonucleotide
auuccgaacugucagagcg

SEQ ID NO: 1105754 - RNA, 19 nt, Artificial Sequence
  Description of Artificial Sequence: Synthetic oligonucleotide
agaagcuugguccaugggc

SEQ ID NO: 1105755 - RNA, 19 nt, Artificial Sequence
  Description of Artificial Sequence: Synthetic oligonucleotide
gauguauugauacaagcac

SEQ ID NO: 1105756 - RNA, 19 nt, Artificial Sequence
  Description of Artificial Sequence: Synthetic oligonucleotide
aagucagacuggcaggucc

SEQ ID NO: 1105757 - RNA, 19 nt, Artificial Sequence
  Description of Artificial Sequence: Synthetic oligonucleotide
uguuuguugugacaaagcc

SEQ ID NO: 1105758 - RNA, 19 nt, Artificial Sequence
  Description of Artificial Sequence: Synthetic oligonucleotide
ucaauugggcaguagaugc

SEQ ID NO: 1105759 - RNA, 19 nt, Artificial Sequence
  Description of Artificial Sequence: Synthetic oligonucleotide
aguagaugcacuucaucgc

SEQ ID NO: 1105760 - RNA, 19 nt, Artificial Sequence
  Description of Artificial Sequence: Synthetic oligonucleotide
uugaauuugagcacauugc

SEQ ID NO: 1105761 - RNA, 19 nt, Artificial Sequence
  Description of Artificial Sequence: Synthetic oligonucleotide
aacguccucacucacccgc

SEQ ID NO: 1105762 - RNA, 19 nt, Artificial Sequence
  Description of Artificial Sequence: Synthetic oligonucleotide
gaugaaauucagucgagug

SEQ ID NO: 1105763 - RNA, 19 nt, Artificial Sequence
  Description of Artificial Sequence: Synthetic oligonucleotide
caguagaugcacuucaucg

SEQ ID NO: 1105764 - RNA, 19 nt, Artificial Sequence
  Description of Artificial Sequence: Synthetic oligonucleotide
aacacguuuccuccauucc

SEQ ID NO: 1105765 - RNA, 19 nt, Artificial Sequence
  Description of Artificial Sequence: Synthetic oligonucleotide
uaaugugacuggauaaucc

SEQ ID NO: 1105766 - RNA, 19 nt, Artificial Sequence
  Description of Artificial Sequence: Synthetic oligonucleotide
uauugauacaagcacucca

SEQ ID NO: 1105767 - RNA, 19 nt, Artificial Sequence
  Description of Artificial Sequence: Synthetic oligonucleotide
ugugucuuccaccuuaaug

SEQ ID NO: 1105768 - RNA, 19 nt, Artificial Sequence
  Description of Artificial Sequence: Synthetic oligonucleotide
ugugaguugaaucuucuuc

SEQ ID NO: 1105769 - RNA, 19 nt, Artificial Sequence
  Description of Artificial Sequence: Synthetic oligonucleotide
ucuaagaguucacggaugc

SEQ ID NO: 1105770 - RNA, 19 nt, Artificial Sequence
  Description of Artificial Sequence: Synthetic oligonucleotide
aaauaugacaguguugaga

SEQ ID NO: 1105771 - RNA, 19 nt, Artificial Sequence
  Description of Artificial Sequence: Synthetic oligonucleotide
agaugaugugaguugaauc

SEQ ID NO: 1105772 - RNA, 19 nt, Artificial Sequence
  Description of Artificial Sequence: Synthetic oligonucleotide
caguccaacauaauagugg

SEQ ID NO: 1105773 - RNA, 19 nt, Artificial Sequence
  Description of Artificial Sequence: Synthetic oligonucleotide
uggauaauccaguuggagc

SEQ ID NO: 1105774 - RNA, 19 nt, Artificial Sequence
  Description of Artificial Sequence: Synthetic oligonucleotide
uguauugauacaagcacuc

SEQ ID NO: 1105775 - RNA, 19 nt, Artificial Sequence
  Description of Artificial Sequence: Synthetic oligonucleotide
ucguagaucacuccagaag

SEQ ID NO: 1105776 - RNA, 19 nt, Artificial Sequence
  Description of Artificial Sequence: Synthetic oligonucleotide
acuccugucaugcugucac

SEQ ID NO: 1105777 - RNA, 19 nt, Artificial Sequence
  Description of Artificial Sequence: Synthetic oligonucleotide
ucgagugucaauugggcag

SEQ ID NO: 1105778 - RNA, 19 nt, Artificial Sequence
  Description of Artificial Sequence: Synthetic oligonucleotide
aaaucugggaaaauucaag

SEQ ID NO: 1105779 - RNA, 19 nt, Artificial Sequence
  Description of Artificial Sequence: Synthetic oligonucleotide
cauagcgucguuugaaggg

SEQ ID NO: 1105780 - RNA, 19 nt, Artificial Sequence
  Description of Artificial Sequence: Synthetic oligonucleotide
uuugacaccuggaugaaau

SEQ ID NO: 1105781 - RNA, 19 nt, Artificial Sequence
  Description of Artificial Sequence: Synthetic oligonucleotide
ucagucgagugucaauugg

SEQ ID NO: 1105782 - RNA, 19 nt, Artificial Sequence
  Description of Artificial Sequence: Synthetic oligonucleotide
agagucucgucauugucac

SEQ ID NO: 1105783 - RNA, 19 nt, Artificial Sequence
  Description of Artificial Sequence: Synthetic oligonucleotide
aauugggcaguagaugcac

SEQ ID NO: 1105784 - RNA, 19 nt, Artificial Sequence
  Description of Artificial Sequence: Synthetic oligonucleotide
aguuggagcuuccuagggc

SEQ ID NO: 1105785 - RNA, 19 nt, Artificial Sequence
  Description of Artificial Sequence: Synthetic oligonucleotide
gaugaugugaguugaaucu

SEQ ID NO: 1105786 - RNA, 19 nt, Artificial Sequence
  Description of Artificial Sequence: Synthetic oligonucleotide
aauagugguggauuugaau

SEQ ID NO: 1105787 - RNA, 19 nt, Artificial Sequence
  Description of Artificial Sequence: Synthetic oligonucleotide
ucgauguauugauacaagc

SEQ ID NO: 1105788 - RNA, 19 nt, Artificial Sequence
  Description of Artificial Sequence: Synthetic oligonucleotide
ugaaauucagucgaguguc

SEQ ID NO: 1105789 - RNA, 19 nt, Artificial Sequence
  Description of Artificial Sequence: Synthetic oligonucleotide
cuuguuauccuucgugugc

SEQ ID NO: 1105790 - RNA, 19 nt, Artificial Sequence
  Description of Artificial Sequence: Synthetic oligonucleotide
aagaguucacggaugcccc

SEQ ID NO: 1105791 - RNA, 19 nt, Artificial Sequence
  Description of Artificial Sequence: Synthetic oligonucleotide
gaaccaacacguuuccucc

SEQ ID NO: 1105792 - RNA, 19 nt, Artificial Sequence
  Description of Artificial Sequence: Synthetic oligonucleotide
uucaagugaacuguuggcc

SEQ ID NO: 1105793 - RNA, 19 nt, Artificial Sequence
  Description of Artificial Sequence: Synthetic oligonucleotide
aguccaacauaauaguggu

SEQ ID NO: 1105794 - RNA, 19 nt, Artificial Sequence
  Description of Artificial Sequence: Synthetic oligonucleotide
ucauaaugugacuggauaa

SEQ ID NO: 1105795 - RNA, 19 nt, Artificial Sequence
  Description of Artificial Sequence: Synthetic oligonucleotide
uggacaacguccccaaacc

SEQ ID NO: 1105796 - RNA, 19 nt, Artificial Sequence
  Description of Artificial Sequence: Synthetic oligonucleotide
ugugacaaagccacucggc

SEQ ID NO: 1105797 - RNA, 19 nt, Artificial Sequence
  Description of Artificial Sequence: Synthetic oligonucleotide
ucauagcgucguuugaagg

SEQ ID NO: 1105798 - RNA, 19 nt, Artificial Sequence
  Description of Artificial Sequence: Synthetic oligonucleotide
acacguuuccuccauuccg

SEQ ID NO: 1105799 - RNA, 19 nt, Artificial Sequence
  Description of Artificial Sequence: Synthetic oligonucleotide
aguacaaggaagucagacu

SEQ ID NO: 1105800 - RNA, 19 nt, Artificial Sequence
  Description of Artificial Sequence: Synthetic oligonucleotide
aagagcucagaauggaaaa

SEQ ID NO: 1105801 - RNA, 19 nt, Artificial Sequence
  Description of Artificial Sequence: Synthetic oligonucleotide
aaugagcucugcauguggg

SEQ ID NO: 1105802 - RNA, 19 nt, Artificial Sequence
  Description of Artificial Sequence: Synthetic oligonucleotide
caaucguacccucagaguc

SEQ ID NO: 1105803 - RNA, 19 nt, Artificial Sequence
  Description of Artificial Sequence: Synthetic oligonucleotide
auugauacaagcacuccag

SEQ ID NO: 1105804 - RNA, 19 nt, Artificial Sequence
  Description of Artificial Sequence: Synthetic oligonucleotide
acagaccacgugcaggggc

SEQ ID NO: 1105805 - RNA, 19 nt, Artificial Sequence
  Description of Artificial Sequence: Synthetic oligonucleotide
uuauccuucgugugcagca

SEQ ID NO: 1105806 - RNA, 19 nt, Artificial Sequence
  Description of Artificial Sequence: Synthetic oligonucleotide
aaucaggcucuguaaauau

SEQ ID NO: 1105807 - RNA, 19 nt, Artificial Sequence
  Description of Artificial Sequence: Synthetic oligonucleotide
auagcgucguuugaagggc

SEQ ID NO: 1105808 - RNA, 19 nt, Artificial Sequence
  Description of Artificial Sequence: Synthetic oligonucleotide
aucugggaaaauucaagug

SEQ ID NO: 1105809 - RNA, 19 nt, Artificial Sequence
  Description of Artificial Sequence: Synthetic oligonucleotide
guagaugcacuucaucgcc

SEQ ID NO: 1105810 - RNA, 19 nt, Artificial Sequence
  Description of Artificial Sequence: Synthetic oligonucleotide
uucgugugcagcacagccg

SEQ ID NO: 1105811 - RNA, 19 nt, Artificial Sequence
  Description of Artificial Sequence: Synthetic oligonucleotide
aaauugaggguggaaguca

SEQ ID NO: 1105812 - RNA, 19 nt, Artificial Sequence
  Description of Artificial Sequence: Synthetic oligonucleotide
agucucgucauugucacag

SEQ ID NO: 1105813 - RNA, 19 nt, Artificial Sequence
  Description of Artificial Sequence: Synthetic oligonucleotide
aacuguuggccacugggga

SEQ ID NO: 1105814 - RNA, 19 nt, Artificial Sequence
  Description of Artificial Sequence: Synthetic oligonucleotide
auaaugugacuggauaauc

SEQ ID NO: 1105815 - RNA, 19 nt, Artificial Sequence
  Description of Artificial Sequence: Synthetic oligonucleotide
gacaacguccccaaaccgg

SEQ ID NO: 1105816 - RNA, 19 nt, Artificial Sequence
  Description of Artificial Sequence: Synthetic oligonucleotide
aauuuucucauagcgucgu

SEQ ID NO: 1105817 - RNA, 19 nt, Artificial Sequence
  Description of Artificial Sequence: Synthetic oligonucleotide
agagaagcuugguccaugg

SEQ ID NO: 1105818 - RNA, 19 nt, Artificial Sequence
  Description of Artificial Sequence: Synthetic oligonucleotide
cacaaacugcucuacuggg

SEQ ID NO: 1105819 - RNA, 19 nt, Artificial Sequence
  Description of Artificial Sequence: Synthetic oligonucleotide
acuuuacucuguuuguugu

SEQ ID NO: 1105820 - RNA, 19 nt, Artificial Sequence
  Description of Artificial Sequence: Synthetic oligonucleotide
cuucgugugcagcacagcc

SEQ ID NO: 1105821 - RNA, 19 nt, Artificial Sequence
  Description of Artificial Sequence: Synthetic oligonucleotide
ugucaauugggcaguagau

SEQ ID NO: 1105822 - RNA, 19 nt, Artificial Sequence
  Description of Artificial Sequence: Synthetic oligonucleotide
ggagauacacuuuacucug

SEQ ID NO: 1105823 - RNA, 19 nt, Artificial Sequence
  Description of Artificial Sequence: Synthetic oligonucleotide
ugcuuguuauccuucgugu

SEQ ID NO: 1105824 - RNA, 19 nt, Artificial Sequence
  Description of Artificial Sequence: Synthetic oligonucleotide
agucauauccaguccgcag

SEQ ID NO: 1105825 - RNA, 19 nt, Artificial Sequence
  Description of Artificial Sequence: Synthetic oligonucleotide
uuugaacaagaggcaaagg

SEQ ID NO: 1105826 - RNA, 19 nt, Artificial Sequence
  Description of Artificial Sequence: Synthetic oligonucleotide
auaauagugguggauuuga

SEQ ID NO: 1105827 - RNA, 19 nt, Artificial Sequence
  Description of Artificial Sequence: Synthetic oligonucleotide
ugguggauuugaauuugag

SEQ ID NO: 1105828 - RNA, 19 nt, Artificial Sequence
  Description of Artificial Sequence: Synthetic oligonucleotide
ugagaaccagaacaucgcu

SEQ ID NO: 1105829 - RNA, 19 nt, Artificial Sequence
  Description of Artificial Sequence: Synthetic oligonucleotide
ucccuagaugcucaagagc

SEQ ID NO: 1105830 - RNA, 19 nt, Artificial Sequence
  Description of Artificial Sequence: Synthetic oligonucleotide
uugagagaagcuuggucca

SEQ ID NO: 1105831 - RNA, 19 nt, Artificial Sequence
  Description of Artificial Sequence: Synthetic oligonucleotide
cuguuuguugugacaaagc

SEQ ID NO: 1105832 - RNA, 19 nt, Artificial Sequence
  Description of Artificial Sequence: Synthetic oligonucleotide
agggaaccaacacguuucc

SEQ ID NO: 1105833 - RNA, 19 nt, Artificial Sequence
  Description of Artificial Sequence: Synthetic oligonucleotide
agucgagugucaauugggc

SEQ ID NO: 1105834 - RNA, 19 nt, Artificial Sequence
  Description of Artificial Sequence: Synthetic oligonucleotide
ucgugugcagcacagccga

SEQ ID NO: 1105835 - RNA, 19 nt, Artificial Sequence
  Description of Artificial Sequence: Synthetic oligonucleotide
cagucgagugucaauuggg

SEQ ID NO: 1105836 - RNA, 19 nt, Artificial Sequence
  Description of Artificial Sequence: Synthetic oligonucleotide
acucccuagaugcucaaga

SEQ ID NO: 1105837 - RNA, 19 nt, Artificial Sequence
  Description of Artificial Sequence: Synthetic oligonucleotide
ggagucgauguauugauac

SEQ ID NO: 1105838 - RNA, 19 nt, Artificial Sequence
  Description of Artificial Sequence: Synthetic oligonucleotide
gacguaagacacuuucuca

SEQ ID NO: 1105839 - RNA, 19 nt, Artificial Sequence
  Description of Artificial Sequence: Synthetic oligonucleotide
caaaccggagggaaggaug

SEQ ID NO: 1105840 - RNA, 19 nt, Artificial Sequence
  Description of Artificial Sequence: Synthetic oligonucleotide
aaggaggauccagagacgu

SEQ ID NO: 1105841 - RNA, 19 nt, Artificial Sequence
  Description of Artificial Sequence: Synthetic oligonucleotide
agacuguccgaggugaggg

SEQ ID NO: 1105842 - RNA, 19 nt, Artificial Sequence
  Description of Artificial Sequence: Synthetic oligonucleotide
ugggaaaggcgguucuggg

SEQ ID NO: 1105843 - RNA, 19 nt, Artificial Sequence
  Description of Artificial Sequence: Synthetic oligonucleotide
aaaucaggcucuguaaaua

SEQ ID NO: 1105844 - RNA, 19 nt, Artificial Sequence
  Description of Artificial Sequence: Synthetic oligonucleotide
guuggagcuuccuagggca

SEQ ID NO: 1105845 - RNA, 19 nt, Artificial Sequence
  Description of Artificial Sequence: Synthetic oligonucleotide
cacuuuacucuguuuguug

SEQ ID NO: 1105846 - RNA, 19 nt, Artificial Sequence
  Description of Artificial Sequence: Synthetic oligonucleotide
ugaggggucuaagaguuca

SEQ ID NO: 1105847 - RNA, 19 nt, Artificial Sequence
  Description of Artificial Sequence: Synthetic oligonucleotide
ggaacguccucacucaccc

SEQ ID NO: 1105848 - RNA, 19 nt, Artificial Sequence
  Description of Artificial Sequence: Synthetic oligonucleotide
ggacagaccacgugcaggg

SEQ ID NO: 1105849 - RNA, 19 nt, Artificial Sequence
  Description of Artificial Sequence: Synthetic oligonucleotide
aggucccgcaaucguaccc

SEQ ID NO: 1105850 - RNA, 19 nt, Artificial Sequence
  Description of Artificial Sequence: Synthetic oligonucleotide
gccgauaggacauggcugg

SEQ ID NO: 1105851 - RNA, 19 nt, Artificial Sequence
  Description of Artificial Sequence: Synthetic oligonucleotide
acuucaucgccagugguug

SEQ ID NO: 1105852 - RNA, 19 nt, Artificial Sequence
  Description of Artificial Sequence: Synthetic oligonucleotide
ccuggaugaaauucagucg

SEQ ID NO: 1105853 - RNA, 19 nt, Artificial Sequence
  Description of Artificial Sequence: Synthetic oligonucleotide
gaagucauauccaguccgc

SEQ ID NO: 1105854 - RNA, 19 nt, Artificial Sequence
  Description of Artificial Sequence: Synthetic oligonucleotide
guaagcaaggaggauccag

SEQ ID NO: 1105855 - RNA, 19 nt, Artificial Sequence
  Description of Artificial Sequence: Synthetic oligonucleotide
ugaguugaaucuucuucaa

SEQ ID NO: 1105856 - RNA, 19 nt, Artificial Sequence
  Description of Artificial Sequence: Synthetic oligonucleotide
uccuucgugugcagcacag

SEQ ID NO: 1105857 - RNA, 19 nt, Artificial Sequence
  Description of Artificial Sequence: Synthetic oligonucleotide
caguacaaggaagucagac

SEQ ID NO: 1105858 - RNA, 19 nt, Artificial Sequence
  Description of Artificial Sequence: Synthetic oligonucleotide
gugaacaccacacacggcu

SEQ ID NO: 1105859 - RNA, 19 nt, Artificial Sequence
  Description of Artificial Sequence: Synthetic oligonucleotide
gaggucguagaucacucca

SEQ ID NO: 1105860 - RNA, 19 nt, Artificial Sequence
  Description of Artificial Sequence: Synthetic oligonucleotide
ggggucuaagaguucacgg

SEQ ID NO: 1105861 - RNA, 19 nt, Artificial Sequence
  Description of Artificial Sequence: Synthetic oligonucleotide
aggacgaggucccgcaauc

SEQ ID NO: 1105862 - RNA, 19 nt, Artificial Sequence
  Description of Artificial Sequence: Synthetic oligonucleotide
gagaaccagaacaucgcug

SEQ ID NO: 1105863 - RNA, 19 nt, Artificial Sequence
  Description of Artificial Sequence: Synthetic oligonucleotide
ugucucggcuuccugcagc

SEQ ID NO: 1105864 - RNA, 19 nt, Artificial Sequence
  Description of Artificial Sequence: Synthetic oligonucleotide
ugacaaagccacucggcaa

SEQ ID NO: 1105865 - RNA, 19 nt, Artificial Sequence
  Description of Artificial Sequence: Synthetic oligonucleotide
cugggauggagccacucag

SEQ ID NO: 1105866 - RNA, 19 nt, Artificial Sequence
  Description of Artificial Sequence: Synthetic oligonucleotide
gaugcucaagagcucagaa

SEQ ID NO: 1105867 - RNA, 19 nt, Artificial Sequence
  Description of Artificial Sequence: Synthetic oligonucleotide
gucaauugggcaguagaug

SEQ ID NO: 1105868 - RNA, 19 nt, Artificial Sequence
  Description of Artificial Sequence: Synthetic oligonucleotide
aaucguacccucagagucu

SEQ ID NO: 1105869 - RNA, 19 nt, Artificial Sequence
  Description of Artificial Sequence: Synthetic oligonucleotide
gacaccuggaugaaauuca

SEQ ID NO: 1105870 - RNA, 19 nt, Artificial Sequence
  Description of Artificial Sequence: Synthetic oligonucleotide
ggaaccaacacguuuccuc

SEQ ID NO: 1105871 - RNA, 19 nt, Artificial Sequence
  Description of Artificial Sequence: Synthetic oligonucleotide
agucgauguauugauacaa

SEQ ID NO: 1105872 - RNA, 19 nt, Artificial Sequence
  Description of Artificial Sequence: Synthetic oligonucleotide
uacucuguuuguugugaca

SEQ ID NO: 1105873 - RNA, 19 nt, Artificial Sequence
  Description of Artificial Sequence: Synthetic oligonucleotide
caagcacuccaggaggucg

SEQ ID NO: 1105874 - RNA, 19 nt, Artificial Sequence
  Description of Artificial Sequence: Synthetic oligonucleotide
ugguuggguguacugcuca

SEQ ID NO: 1105875 - RNA, 19 nt, Artificial Sequence
  Description of Artificial Sequence: Synthetic oligonucleotide
uagaugcacuucaucgcca

SEQ ID NO: 1105876 - RNA, 19 nt, Artificial Sequence
  Description of Artificial Sequence: Synthetic oligonucleotide
uaauagugguggauuugaa

SEQ ID NO: 1105877 - RNA, 19 nt, Artificial Sequence
  Description of Artificial Sequence: Synthetic oligonucleotide
guggacaacguccccaaac

SEQ ID NO: 1105878 - RNA, 19 nt, Artificial Sequence
  Description of Artificial Sequence: Synthetic oligonucleotide
cugucaugcugucacuccc

SEQ ID NO: 1105879 - RNA, 19 nt, Artificial Sequence
  Description of Artificial Sequence: Synthetic oligonucleotide
cauaauagugguggauuug

SEQ ID NO: 1105880 - RNA, 19 nt, Artificial Sequence
  Description of Artificial Sequence: Synthetic oligonucleotide
ucucauagcgucguuugaa

SEQ ID NO: 1105881 - RNA, 19 nt, Artificial Sequence
  Description of Artificial Sequence: Synthetic oligonucleotide
gagaagcuugguccauggg

SEQ ID NO: 1105882 - RNA, 19 nt, Artificial Sequence
  Description of Artificial Sequence: Synthetic oligonucleotide
aggacagaccacgugcagg

SEQ ID NO: 1105883 - RNA, 19 nt, Artificial Sequence
  Description of Artificial Sequence: Synthetic oligonucleotide
uuacucuguuuguugugac

SEQ ID NO: 1105884 - RNA, 19 nt, Artificial Sequence
  Description of Artificial Sequence: Synthetic oligonucleotide
acucuguuuguugugacaa

SEQ ID NO: 1105885 - RNA, 19 nt, Artificial Sequence
  Description of Artificial Sequence: Synthetic oligonucleotide
cucauaaugugacuggaua

SEQ ID NO: 1105886 - RNA, 19 nt, Artificial Sequence
  Description of Artificial Sequence: Synthetic oligonucleotide
uagaucacuccagaagggu

SEQ ID NO: 1105887 - RNA, 19 nt, Artificial Sequence
  Description of Artificial Sequence: Synthetic oligonucleotide
agugguggauuugaauuug

SEQ ID NO: 1105888 - RNA, 19 nt, Artificial Sequence
  Description of Artificial Sequence: Synthetic oligonucleotide
aggugaggggucuaagagu

SEQ ID NO: 1105889 - RNA, 19 nt, Artificial Sequence
  Description of Artificial Sequence: Synthetic oligonucleotide
caacacguuuccuccauuc

SEQ ID NO: 1105890 - RNA, 19 nt, Artificial Sequence
  Description of Artificial Sequence: Synthetic oligonucleotide
guauugauacaagcacucc

SEQ ID NO: 1105891 - RNA, 19 nt, Artificial Sequence
  Description of Artificial Sequence: Synthetic oligonucleotide
aucgccagugguugguaag

SEQ ID NO: 1105892 - RNA, 19 nt, Artificial Sequence
  Description of Artificial Sequence: Synthetic oligonucleotide
ugucaugcugucacucccu

SEQ ID NO: 1105893 - RNA, 19 nt, Artificial Sequence
  Description of Artificial Sequence: Synthetic oligonucleotide
auucagucgagugucaauu

SEQ ID NO: 1105894 - RNA, 19 nt, Artificial Sequence
  Description of Artificial Sequence: Synthetic oligonucleotide
ugaaugagcucugcaugug

SEQ ID NO: 1105895 - RNA, 19 nt, Artificial Sequence
  Description of Artificial Sequence: Synthetic oligonucleotide
agagggcaccagcagacug

SEQ ID NO: 1105896 - RNA, 19 nt, Artificial Sequence
  Description of Artificial Sequence: Synthetic oligonucleotide
agcacauugcacggcaaag

SEQ ID NO: 1105897 - RNA, 19 nt, Artificial Sequence
  Description of Artificial Sequence: Synthetic oligonucleotide
aucacuccagaaggguagc

SEQ ID NO: 1105898 - RNA, 19 nt, Artificial Sequence
  Description of Artificial Sequence: Synthetic oligonucleotide
caggacaauaugaccuuug

SEQ ID NO: 1105899 - RNA, 19 nt, Artificial Sequence
  Description of Artificial Sequence: Synthetic oligonucleotide
ugaccuuuggcugugucuu

SEQ ID NO: 1105900 - RNA, 19 nt, Artificial Sequence
  Description of Artificial Sequence: Synthetic oligonucleotide
ucgccagugguugguaagg

SEQ ID NO: 1105901 - RNA, 19 nt, Artificial Sequence
  Description of Artificial Sequence: Synthetic oligonucleotide
gugguaagcaaggaggauc

SEQ ID NO: 1105902 - RNA, 19 nt, Artificial Sequence
  Description of Artificial Sequence: Synthetic oligonucleotide
gucgauguauugauacaag

SEQ ID NO: 1105903 - RNA, 19 nt, Artificial Sequence
  Description of Artificial Sequence: Synthetic oligonucleotide
aagcuugguccaugggcug

SEQ ID NO: 1105904 - RNA, 19 nt, Artificial Sequence
  Description of Artificial Sequence: Synthetic oligonucleotide
aggaacguccucacucacc

SEQ ID NO: 1105905 - RNA, 19 nt, Artificial Sequence
  Description of Artificial Sequence: Synthetic oligonucleotide
gagucgauguauugauaca

SEQ ID NO: 1105906 - RNA, 19 nt, Artificial Sequence
  Description of Artificial Sequence: Synthetic oligonucleotide
aggggucuaagaguucacg

SEQ ID NO: 1105907 - RNA, 19 nt, Artificial Sequence
  Description of Artificial Sequence: Synthetic oligonucleotide
uccagagacguaagacacu

SEQ ID NO: 1105908 - RNA, 19 nt, Artificial Sequence
  Description of Artificial Sequence: Synthetic oligonucleotide
acauugcacggcaaaguag

SEQ ID NO: 1105909 - RNA, 19 nt, Artificial Sequence
  Description of Artificial Sequence: Synthetic oligonucleotide
ccgcaguccaacauaauag

SEQ ID NO: 1105910 - RNA, 19 nt, Artificial Sequence
  Description of Artificial Sequence: Synthetic oligonucleotide
aauugaggguggaagucau

SEQ ID NO: 1105911 - RNA, 19 nt, Artificial Sequence
  Description of Artificial Sequence: Synthetic oligonucleotide
ucaugcugucacucccuag

SEQ ID NO: 1105912 - RNA, 19 nt, Artificial Sequence
  Description of Artificial Sequence: Synthetic oligonucleotide
uguuauccuucgugugcag

SEQ ID NO: 1105913 - RNA, 19 nt, Artificial Sequence
  Description of Artificial Sequence: Synthetic oligonucleotide
agauacacuuuacucuguu

SEQ ID NO: 1105914 - RNA, 19 nt, Artificial Sequence
  Description of Artificial Sequence: Synthetic oligonucleotide
uuccgaacugucagagcga

SEQ ID NO: 1105915 - RNA, 19 nt, Artificial Sequence
  Description of Artificial Sequence: Synthetic oligonucleotide
augcucaagagcucagaau

SEQ ID NO: 1105916 - RNA, 19 nt, Artificial Sequence
  Description of Artificial Sequence: Synthetic oligonucleotide
cauuccgaacugucagagc

SEQ ID NO: 1105917 - RNA, 19 nt, Artificial Sequence
  Description of Artificial Sequence: Synthetic oligonucleotide
cacaugcuuguuauccuuc

SEQ ID NO: 1105918 - RNA, 19 nt, Artificial Sequence
  Description of Artificial Sequence: Synthetic oligonucleotide
gaaaucaggcucuguaaau

SEQ ID NO: 1105919 - RNA, 19 nt, Artificial Sequence
  Description of Artificial Sequence: Synthetic oligonucleotide
aggaggucguagaucacuc

SEQ ID NO: 1105920 - RNA, 19 nt, Artificial Sequence
  Description of Artificial Sequence: Synthetic oligonucleotide
auccaguccgcaguccaac

SEQ ID NO: 1105921 - RNA, 19 nt, Artificial Sequence
  Description of Artificial Sequence: Synthetic oligonucleotide
guuggguguacugcucagg

SEQ ID NO: 1105922 - RNA, 19 nt, Artificial Sequence
  Description of Artificial Sequence: Synthetic oligonucleotide
ggacaacguccccaaaccg

SEQ ID NO: 1105923 - RNA, 19 nt, Artificial Sequence
  Description of Artificial Sequence: Synthetic oligonucleotide
ucccuagcagccagagggc

SEQ ID NO: 1105924 - RNA, 19 nt, Artificial Sequence
  Description of Artificial Sequence: Synthetic oligonucleotide
aucguacccucagagucuc

SEQ ID NO: 1105925 - RNA, 19 nt, Artificial Sequence
  Description of Artificial Sequence: Synthetic oligonucleotide
aggauccagagacguaaga

SEQ ID NO: 1105926 - RNA, 19 nt, Artificial Sequence
  Description of Artificial Sequence: Synthetic oligonucleotide
aucaugagguccauccugu

SEQ ID NO: 1105927 - RNA, 19 nt, Artificial Sequence
  Description of Artificial Sequence: Synthetic oligonucleotide
aggguagcagggaaccaac

SEQ ID NO: 1105928 - RNA, 19 nt, Artificial Sequence
  Description of Artificial Sequence: Synthetic oligonucleotide
gggagauacacuuuacucu

SEQ ID NO: 1105929 - RNA, 19 nt, Artificial Sequence
  Description of Artificial Sequence: Synthetic oligonucleotide
agcagacuguccgagguga

SEQ ID NO: 1105930 - RNA, 19 nt, Artificial Sequence
  Description of Artificial Sequence: Synthetic oligonucleotide
cuucaucgccagugguugg

SEQ ID NO: 1105931 - RNA, 19 nt, Artificial Sequence
  Description of Artificial Sequence: Synthetic oligonucleotide
ccuuaaugucacugaagcc

SEQ ID NO: 1105932 - RNA, 19 nt, Artificial Sequence
  Description of Artificial Sequence: Synthetic oligonucleotide
gucgagugucaauugggca

SEQ ID NO: 1105933 - RNA, 19 nt, Artificial Sequence
  Description of Artificial Sequence: Synthetic oligonucleotide
agguccauccugugggacu

SEQ ID NO: 1105934 - RNA, 19 nt, Artificial Sequence
  Description of Artificial Sequence: Synthetic oligonucleotide
agacaccucuccucccuag

SEQ ID NO: 1105935 - RNA, 19 nt, Artificial Sequence
  Description of Artificial Sequence: Synthetic oligonucleotide
ucaugagguccauccugug

SEQ ID NO: 1105936 - RNA, 19 nt, Artificial Sequence
  Description of Artificial Sequence: Synthetic oligonucleotide
aagugaacuguuggccacu

SEQ ID NO: 1105937 - RNA, 19 nt, Artificial Sequence
  Description of Artificial Sequence: Synthetic oligonucleotide
acaacguccccaaaccgga

SEQ ID NO: 1105938 - RNA, 19 nt, Artificial Sequence
  Description of Artificial Sequence: Synthetic oligonucleotide
gaacguccucacucacccg

SEQ ID NO: 1105939 - RNA, 19 nt, Artificial Sequence
  Description of Artificial Sequence: Synthetic oligonucleotide
cuaagaguucacggaugcc

SEQ ID NO: 1105940 - RNA, 19 nt, Artificial Sequence
  Description of Artificial Sequence: Synthetic oligonucleotide
ucagcuuauuggucugaau

SEQ ID NO: 1105941 - RNA, 19 nt, Artificial Sequence
  Description of Artificial Sequence: Synthetic oligonucleotide
gcuuguuauccuucgugug

SEQ ID NO: 1105942 - RNA, 19 nt, Artificial Sequence
  Description of Artificial Sequence: Synthetic oligonucleotide
cacguuuccuccauuccga

SEQ ID NO: 1105943 - RNA, 19 nt, Artificial Sequence
  Description of Artificial Sequence: Synthetic oligonucleotide
cacuggggagaugaaguag

SEQ ID NO: 1105944 - RNA, 19 nt, Artificial Sequence
  Description of Artificial Sequence: Synthetic oligonucleotide
ugagguccauccuguggga

SEQ ID NO: 1105945 - RNA, 19 nt, Artificial Sequence
  Description of Artificial Sequence: Synthetic oligonucleotide
augugggaaaggcgguucu

SEQ ID NO: 1105946 - RNA, 19 nt, Artificial Sequence
  Description of Artificial Sequence: Synthetic oligonucleotide
ugucacucccuagaugcuc

SEQ ID NO: 1105947 - RNA, 19 nt, Artificial Sequence
  Description of Artificial Sequence: Synthetic oligonucleotide
aaaggcgguucugggagau

SEQ ID NO: 1105948 - RNA, 19 nt, Artificial Sequence
  Description of Artificial Sequence: Synthetic oligonucleotide
gguccaugggcugaggaug

SEQ ID NO: 1105949 - RNA, 19 nt, Artificial Sequence
  Description of Artificial Sequence: Synthetic oligonucleotide
uucaucgccagugguuggu

SEQ ID NO: 1105950 - RNA, 19 nt, Artificial Sequence
  Description of Artificial Sequence: Synthetic oligonucleotide
ugagcacauugcacggcaa

SEQ ID NO: 1105951 - RNA, 19 nt, Artificial Sequence
  Description of Artificial Sequence: Synthetic oligonucleotide
acggcaaaguagggugccc

SEQ ID NO: 1105952 - RNA, 19 nt, Artificial Sequence
  Description of Artificial Sequence: Synthetic oligonucleotide
uagcgucguuugaagggca

SEQ ID NO: 1105953 - RNA, 19 nt, Artificial Sequence
  Description of Artificial Sequence: Synthetic oligonucleotide
uauccuucgugugcagcac

SEQ ID NO: 1105954 - RNA, 19 nt, Artificial Sequence
  Description of Artificial Sequence: Synthetic oligonucleotide
gcucuacugggauggagcc

SEQ ID NO: 1105955 - RNA, 19 nt, Artificial Sequence
  Description of Artificial Sequence: Synthetic oligonucleotide
ccaguuggagcuuccuagg

SEQ ID NO: 1105956 - RNA, 19 nt, Artificial Sequence
  Description of Artificial Sequence: Synthetic oligonucleotide
aggucguagaucacuccag

SEQ ID NO: 1105957 - RNA, 19 nt, Artificial Sequence
  Description of Artificial Sequence: Synthetic oligonucleotide
caauugggcaguagaugca

SEQ ID NO: 1105958 - RNA, 19 nt, Artificial Sequence
  Description of Artificial Sequence: Synthetic oligonucleotide
caauaugaccuuuggcugu

SEQ ID NO: 1105959 - RNA, 19 nt, Artificial Sequence
  Description of Artificial Sequence: Synthetic oligonucleotide
cagacuguccgaggugagg

SEQ ID NO: 1105960 - RNA, 19 nt, Artificial Sequence
  Description of Artificial Sequence: Synthetic oligonucleotide
uugacaccuggaugaaauu

SEQ ID NO: 1105961 - RNA, 19 nt, Artificial Sequence
  Description of Artificial Sequence: Synthetic oligonucleotide
cugaaugagcucugcaugu

SEQ ID NO: 1105962 - RNA, 19 nt, Artificial Sequence
  Description of Artificial Sequence: Synthetic oligonucleotide
cacauugcacggcaaagua

SEQ ID NO: 1105963 - RNA, 19 nt, Artificial Sequence
  Description of Artificial Sequence: Synthetic oligonucleotide
augaugugaguugaaucuu

SEQ ID NO: 1105964 - RNA, 19 nt, Artificial Sequence
  Description of Artificial Sequence: Synthetic oligonucleotide
gagcacauugcacggcaaa

SEQ ID NO: 1105965 - RNA, 19 nt, Artificial Sequence
  Description of Artificial Sequence: Synthetic oligonucleotide
ugcagaacucgcccaccau

SEQ ID NO: 1105966 - RNA, 19 nt, Artificial Sequence
  Description of Artificial Sequence: Synthetic oligonucleotide
gaggucccgcaaucguacc

SEQ ID NO: 1105967 - RNA, 19 nt, Artificial Sequence
  Description of Artificial Sequence: Synthetic oligonucleotide
aggcccgcggagucgaugu

SEQ ID NO: 1105968 - RNA, 19 nt, Artificial Sequence
  Description of Artificial Sequence: Synthetic oligonucleotide
caugugggaaaggcgguuc

SEQ ID NO: 1105969 - RNA, 19 nt, Artificial Sequence
  Description of Artificial Sequence: Synthetic oligonucleotide
cacggcaaaguagggugcc

SEQ ID NO: 1105970 - RNA, 19 nt, Artificial Sequence
  Description of Artificial Sequence: Synthetic oligonucleotide
gccgagacaguugccaagg

SEQ ID NO: 1105971 - RNA, 19 nt, Artificial Sequence
  Description of Artificial Sequence: Synthetic oligonucleotide
auccuucgugugcagcaca

SEQ ID NO: 1105972 - RNA, 19 nt, Artificial Sequence
  Description of Artificial Sequence: Synthetic oligonucleotide
agaugcucaagagcucaga

SEQ ID NO: 1105973 - RNA, 19 nt, Artificial Sequence
  Description of Artificial Sequence: Synthetic oligonucleotide
ucccgcaaucguacccuca

SEQ ID NO: 1105974 - RNA, 19 nt, Artificial Sequence
  Description of Artificial Sequence: Synthetic oligonucleotide
gacagaccacgugcagggg

SEQ ID NO: 1105975 - RNA, 19 nt, Artificial Sequence
  Description of Artificial Sequence: Synthetic oligonucleotide
uuggagcuuccuagggcau

SEQ ID NO: 1105976 - RNA, 19 nt, Artificial Sequence
  Description of Artificial Sequence: Synthetic oligonucleotide
ccccgugagaaccagaaca

SEQ ID NO: 1105977 - RNA, 19 nt, Artificial Sequence
  Description of Artificial Sequence: Synthetic oligonucleotide
gaguucacggaugccccac

SEQ ID NO: 1105978 - RNA, 19 nt, Artificial Sequence
  Description of Artificial Sequence: Synthetic oligonucleotide
acuggauaauccaguugga

SEQ ID NO: 1105979 - RNA, 19 nt, Artificial Sequence
  Description of Artificial Sequence: Synthetic oligonucleotide
gguuggguguacugcucag

SEQ ID NO: 1105980 - RNA, 19 nt, Artificial Sequence
  Description of Artificial Sequence: Synthetic oligonucleotide
gggauguuggagaggcccg

SEQ ID NO: 1105981 - RNA, 19 nt, Artificial Sequence
  Description of Artificial Sequence: Synthetic oligonucleotide
agaucacuccagaagggua

SEQ ID NO: 1105982 - RNA, 19 nt, Artificial Sequence
  Description of Artificial Sequence: Synthetic oligonucleotide
ggagcuuccuagggcauag

SEQ ID NO: 1105983 - RNA, 19 nt, Artificial Sequence
  Description of Artificial Sequence: Synthetic oligonucleotide
aguccgcaguccaacauaa

SEQ ID NO: 1105984 - RNA, 19 nt, Artificial Sequence
  Description of Artificial Sequence: Synthetic oligonucleotide
ggaggucguagaucacucc

SEQ ID NO: 1105985 - RNA, 19 nt, Artificial Sequence
  Description of Artificial Sequence: Synthetic oligonucleotide
aggguggaagucauaucca

SEQ ID NO: 1105986 - RNA, 19 nt, Artificial Sequence
  Description of Artificial Sequence: Synthetic oligonucleotide
cgcaaucguacccucagag

SEQ ID NO: 1105987 - RNA, 19 nt, Artificial Sequence
  Description of Artificial Sequence: Synthetic oligonucleotide
ucacuccagaaggguagca

SEQ ID NO: 1105988 - RNA, 19 nt, Artificial Sequence
  Description of Artificial Sequence: Synthetic oligonucleotide
ugaggacgaggucccgcaa

SEQ ID NO: 1105989 - RNA, 19 nt, Artificial Sequence
  Description of Artificial Sequence: Synthetic oligonucleotide
caacguccccaaaccggag

SEQ ID NO: 1105990 - RNA, 19 nt, Artificial Sequence
  Description of Artificial Sequence: Synthetic oligonucleotide
ggucguagaucacuccaga

SEQ ID NO: 1105991 - RNA, 19 nt, Artificial Sequence
  Description of Artificial Sequence: Synthetic oligonucleotide
agcucuggcaugauuucaa

SEQ ID NO: 1105992 - RNA, 19 nt, Artificial Sequence
  Description of Artificial Sequence: Synthetic oligonucleotide
acacggcugucugaaguca

SEQ ID NO: 1105993 - RNA, 19 nt, Artificial Sequence
  Description of Artificial Sequence: Synthetic oligonucleotide
guccaacauaauaguggug

SEQ ID NO: 1105994 - RNA, 19 nt, Artificial Sequence
  Description of Artificial Sequence: Synthetic oligonucleotide
caggaacguccucacucac

SEQ ID NO: 1105995 - RNA, 19 nt, Artificial Sequence
  Description of Artificial Sequence: Synthetic oligonucleotide
agcagcuuugacaccugga

SEQ ID NO: 1105996 - RNA, 19 nt, Artificial Sequence
  Description of Artificial Sequence: Synthetic oligonucleotide
gacgaggucccgcaaucgu

SEQ ID NO: 1105997 - RNA, 19 nt, Artificial Sequence
  Description of Artificial Sequence: Synthetic oligonucleotide
caccaugccgucgggguug

SEQ ID NO: 1105998 - RNA, 19 nt, Artificial Sequence
  Description of Artificial Sequence: Synthetic oligonucleotide
guacccucagagucucguc

SEQ ID NO: 1105999 - RNA, 19 nt, Artificial Sequence
  Description of Artificial Sequence: Synthetic oligonucleotide
gaagucagacuggcagguc

SEQ ID NO: 1106000 - RNA, 19 nt, Artificial Sequence
  Description of Artificial Sequence: Synthetic oligonucleotide
gaccuuuggcugugucuuc

SEQ ID NO: 1106001 - RNA, 19 nt, Artificial Sequence
  Description of Artificial Sequence: Synthetic oligonucleotide
agcgucguuugaagggcag

SEQ ID NO: 1106002 - RNA, 19 nt, Artificial Sequence
  Description of Artificial Sequence: Synthetic oligonucleotide
gauuugaauuugagcacau

SEQ ID NO: 1106003 - RNA, 19 nt, Artificial Sequence
  Description of Artificial Sequence: Synthetic oligonucleotide
acgugcaggggcugcacuu

SEQ ID NO: 1106004 - RNA, 19 nt, Artificial Sequence
  Description of Artificial Sequence: Synthetic oligonucleotide
gggugguuggguguacugc

SEQ ID NO: 1106005 - RNA, 19 nt, Artificial Sequence
  Description of Artificial Sequence: Synthetic oligonucleotide
cccgcaaucguacccucag

SEQ ID NO: 1106006 - RNA, 19 nt, Artificial Sequence
  Description of Artificial Sequence: Synthetic oligonucleotide
agcuugguccaugggcuga

SEQ ID NO: 1106007 - RNA, 19 nt, Artificial Sequence
  Description of Artificial Sequence: Synthetic oligonucleotide
agccccgugagaaccagaa

SEQ ID NO: 1106008 - RNA, 19 nt, Artificial Sequence
  Description of Artificial Sequence: Synthetic oligonucleotide
caugccgucgggguuggca

SEQ ID NO: 1106009 - RNA, 19 nt, Artificial Sequence
  Description of Artificial Sequence: Synthetic oligonucleotide
ucacucccuagaugcucaa

SEQ ID NO: 1106010 - RNA, 19 nt, Artificial Sequence
  Description of Artificial Sequence: Synthetic oligonucleotide
ggcaugauuucaauuuucu

SEQ ID NO: 1106011 - RNA, 19 nt, Artificial Sequence
  Description of Artificial Sequence: Synthetic oligonucleotide
ggacgaggucccgcaaucg

SEQ ID NO: 1106012 - RNA, 19 nt, Artificial Sequence
  Description of Artificial Sequence: Synthetic oligonucleotide
ggggaucugcgugagcccc

SEQ ID NO: 1106013 - RNA, 19 nt, Artificial Sequence
  Description of Artificial Sequence: Synthetic oligonucleotide
cucuguuuguugugacaaa

SEQ ID NO: 1106014 - RNA, 19 nt, Artificial Sequence
  Description of Artificial Sequence: Synthetic oligonucleotide
gugguggauuugaauuuga

SEQ ID NO: 1106015 - RNA, 19 nt, Artificial Sequence
  Description of Artificial Sequence: Synthetic oligonucleotide
gcgagguugcugcagaacu

SEQ ID NO: 1106016 - RNA, 19 nt, Artificial Sequence
  Description of Artificial Sequence: Synthetic oligonucleotide
cgucguuugaagggcaggg

SEQ ID NO: 1106017 - RNA, 19 nt, Artificial Sequence
  Description of Artificial Sequence: Synthetic oligonucleotide
acucgcccaccaugccguc

SEQ ID NO: 1106018 - RNA, 19 nt, Artificial Sequence
  Description of Artificial Sequence: Synthetic oligonucleotide
ccaacauaauaguggugga

SEQ ID NO: 1106019 - RNA, 19 nt, Artificial Sequence
  Description of Artificial Sequence: Synthetic oligonucleotide
cacucccuagaugcucaag

SEQ ID NO: 1106020 - RNA, 19 nt, Artificial Sequence
  Description of Artificial Sequence: Synthetic oligonucleotide
gagaggcccgcggagucga

SEQ ID NO: 1106021 - RNA, 19 nt, Artificial Sequence
  Description of Artificial Sequence: Synthetic oligonucleotide
ucaucgccagugguuggua

SEQ ID NO: 1106022 - RNA, 19 nt, Artificial Sequence
  Description of Artificial Sequence: Synthetic oligonucleotide
cucgcccaccaugccgucg

SEQ ID NO: 1106023 - RNA, 19 nt, Artificial Sequence
  Description of Artificial Sequence: Synthetic oligonucleotide
gagauacacuuuacucugu

SEQ ID NO: 1106024 - RNA, 19 nt, Artificial Sequence
  Description of Artificial Sequence: Synthetic oligonucleotide
ccuagcagccagagggcac

SEQ ID NO: 1106025 - RNA, 19 nt, Artificial Sequence
  Description of Artificial Sequence: Synthetic oligonucleotide
ggugaggggucuaagaguu

SEQ ID NO: 1106026 - RNA, 19 nt, Artificial Sequence
  Description of Artificial Sequence: Synthetic oligonucleotide
caguccgcaguccaacaua

SEQ ID NO: 1106027 - RNA, 19 nt, Artificial Sequence
  Description of Artificial Sequence: Synthetic oligonucleotide
cgaggucccgcaaucguac

SEQ ID NO: 1106028 - RNA, 19 nt, Artificial Sequence
  Description of Artificial Sequence: Synthetic oligonucleotide
gagacaccucuccucccua

SEQ ID NO: 1106029 - RNA, 19 nt, Artificial Sequence
  Description of Artificial Sequence: Synthetic oligonucleotide
ggagaggcccgcggagucg

SEQ ID NO: 1106030 - RNA, 19 nt, Artificial Sequence
  Description of Artificial Sequence: Synthetic oligonucleotide
caacauaauagugguggau

SEQ ID NO: 1106031 - RNA, 19 nt, Artificial Sequence
  Description of Artificial Sequence: Synthetic oligonucleotide
gagcgagguugcugcagaa

SEQ ID NO: 1106032 - RNA, 19 nt, Artificial Sequence
  Description of Artificial Sequence: Synthetic oligonucleotide
gaggacgaggucccgcaau

SEQ ID NO: 1106033 - RNA, 19 nt, Artificial Sequence
  Description of Artificial Sequence: Synthetic oligonucleotide
caucgccagugguugguaa

SEQ ID NO: 1106034 - RNA, 19 nt, Artificial Sequence
  Description of Artificial Sequence: Synthetic oligonucleotide
gcaaucguacccucagagu

SEQ ID NO: 1106035 - RNA, 19 nt, Artificial Sequence
  Description of Artificial Sequence: Synthetic oligonucleotide
cacuucaucgccagugguu

SEQ ID NO: 1106036 - RNA, 19 nt, Artificial Sequence
  Description of Artificial Sequence: Synthetic oligonucleotide
caugcuuguuauccuucgu

SEQ ID NO: 1106037 - RNA, 19 nt, Artificial Sequence
  Description of Artificial Sequence: Synthetic oligonucleotide
gagcuuccuagggcauagc

SEQ ID NO: 1106038 - RNA, 19 nt, Artificial Sequence
  Description of Artificial Sequence: Synthetic oligonucleotide
gcgucguuugaagggcagg

SEQ ID NO: 1106039 - RNA, 19 nt, Artificial Sequence
  Description of Artificial Sequence: Synthetic oligonucleotide
auaugaccuuuggcugugu

SEQ ID NO: 1106040 - RNA, 19 nt, Artificial Sequence
  Description of Artificial Sequence: Synthetic oligonucleotide
gaggcccgcggagucgaug

SEQ ID NO: 1106041 - RNA, 19 nt, Artificial Sequence
  Description of Artificial Sequence: Synthetic oligonucleotide
cagccgagacaguugccaa

SEQ ID NO: 1106042 - RNA, 19 nt, Artificial Sequence
  Description of Artificial Sequence: Synthetic oligonucleotide
ccuagggcauagccagagc

SEQ ID NO: 1106043 - RNA, 19 nt, Artificial Sequence
  Description of Artificial Sequence: Synthetic oligonucleotide
cuccauggaugcuggggua

SEQ ID NO: 1106044 - RNA, 19 nt, Artificial Sequence
  Description of Artificial Sequence: Synthetic oligonucleotide
gggaucugcgugagccccg

SEQ ID NO: 1106045 - RNA, 19 nt, Artificial Sequence
  Description of Artificial Sequence: Synthetic oligonucleotide
agaccacgugcaggggcug

SEQ ID NO: 1106046 - RNA, 19 nt, Artificial Sequence
  Description of Artificial Sequence: Synthetic oligonucleotide
gucccgcaaucguacccuc

SEQ ID NO: 1106047 - RNA, 19 nt, Artificial Sequence
  Description of Artificial Sequence: Synthetic oligonucleotide
guccauccugugggacugg

SEQ ID NO: 1106048 - RNA, 19 nt, Artificial Sequence
  Description of Artificial Sequence: Synthetic oligonucleotide
gguggaagucauauccagu

SEQ ID NO: 1106049 - RNA, 19 nt, Artificial Sequence
  Description of Artificial Sequence: Synthetic oligonucleotide
gcggagucgauguauugau

SEQ ID NO: 1106050 - RNA, 19 nt, Artificial Sequence
  Description of Artificial Sequence: Synthetic oligonucleotide
gcagggaaccaacacguuu

SEQ ID NO: 1106051 - RNA, 19 nt, Artificial Sequence
  Description of Artificial Sequence: Synthetic oligonucleotide
ggcagggcgaggaccucag

SEQ ID NO: 1106052 - RNA, 19 nt, Artificial Sequence
  Description of Artificial Sequence: Synthetic oligonucleotide
cguuuccuccauuccgaac

SEQ ID NO: 1106053 - RNA, 19 nt, Artificial Sequence
  Description of Artificial Sequence: Synthetic oligonucleotide
aaggcgguucugggagaua

SEQ ID NO: 1106054 - RNA, 19 nt, Artificial Sequence
  Description of Artificial Sequence: Synthetic oligonucleotide
gcagacuguccgaggugag

SEQ ID NO: 1106055 - RNA, 19 nt, Artificial Sequence
  Description of Artificial Sequence: Synthetic oligonucleotide
cccgccgauaggacauggc

SEQ ID NO: 1106056 - RNA, 19 nt, Artificial Sequence
  Description of Artificial Sequence: Synthetic oligonucleotide
gugaggggucuaagaguuc

SEQ ID NO: 1106057 - RNA, 19 nt, Artificial Sequence
  Description of Artificial Sequence: Synthetic oligonucleotide
gcacauugcacggcaaagu

SEQ ID NO: 1106058 - RNA, 19 nt, Artificial Sequence
  Description of Artificial Sequence: Synthetic oligonucleotide
cugcgugagccccgugaga

SEQ ID NO: 1106059 - RNA, 19 nt, Artificial Sequence
  Description of Artificial Sequence: Synthetic oligonucleotide
gggcauagccagagcucag

SEQ ID NO: 1106060 - RNA, 19 nt, Artificial Sequence
  Description of Artificial Sequence: Synthetic oligonucleotide
cagcccgccgauaggacau

SEQ ID NO: 1106061 - RNA, 19 nt, Artificial Sequence
  Description of Artificial Sequence: Synthetic oligonucleotide
gguaagcaaggaggaucca

SEQ ID NO: 1106062 - RNA, 19 nt, Artificial Sequence
  Description of Artificial Sequence: Synthetic oligonucleotide
gcgaggaccucagcccgcc

SEQ ID NO: 1106063 - RNA, 19 nt, Artificial Sequence
  Description of Artificial Sequence: Synthetic oligonucleotide
ggucccgcaaucguacccu

SEQ ID NO: 1106064 - RNA, 19 nt, Artificial Sequence
  Description of Artificial Sequence: Synthetic oligonucleotide
ccgcggagucgauguauug

SEQ ID NO: 1106065 - RNA, 19 nt, Artificial Sequence
  Description of Artificial Sequence: Synthetic oligonucleotide
gagccccgugagaaccaga

SEQ ID NO: 1106066 - RNA, 19 nt, Artificial Sequence
  Description of Artificial Sequence: Synthetic oligonucleotide
ccgugagaaccagaacauc

SEQ ID NO: 1106067 - RNA, 19 nt, Artificial Sequence
  Description of Artificial Sequence: Synthetic oligonucleotide
gcccgccgauaggacaugg

SEQ ID NO: 1106068 - RNA, 19 nt, Artificial Sequence
  Description of Artificial Sequence: Synthetic oligonucleotide
cacggcugucugaagucau

SEQ ID NO: 1106069 - RNA, 19 nt, Artificial Sequence
  Description of Artificial Sequence: Synthetic oligonucleotide
agcccgccgauaggacaug

SEQ ID NO: 1106070 - RNA, 19 nt, Artificial Sequence
  Description of Artificial Sequence: Synthetic oligonucleotide
gcacuucaucgccaguggu

SEQ ID NO: 1106071 - RNA, 19 nt, Artificial Sequence
  Description of Artificial Sequence: Synthetic oligonucleotide
cccgugagaaccagaacau

SEQ ID NO: 1106072 - RNA, 19 nt, Artificial Sequence
  Description of Artificial Sequence: Synthetic oligonucleotide
gcgugagccccgugagaac

SEQ ID NO: 1106073 - RNA, 19 nt, Artificial Sequence
  Description of Artificial Sequence: Synthetic oligonucleotide
ccgccgauaggacauggcu

SEQ ID NO: 1106074 - RNA, 19 nt, Artificial Sequence
  Description of Artificial Sequence: Synthetic oligonucleotide
ccagagacguaagacacuu

SEQ ID NO: 1106075 - RNA, 19 nt, Artificial Sequence
  Description of Artificial Sequence: Synthetic oligonucleotide
gggcaccagggagucugcc

SEQ ID NO: 1106076 - RNA, 19 nt, Artificial Sequence
  Description of Artificial Sequence: Synthetic oligonucleotide
cgcggagucgauguauuga

SEQ ID NO: 1106077 - RNA, 19 nt, Artificial Sequence
  Description of Artificial Sequence: Synthetic oligonucleotide
cacucacccgcuuccucuu

SEQ ID NO: 1106078 - RNA, 19 nt, Artificial Sequence
  Description of Artificial Sequence: Synthetic oligonucleotide
cggaugccccacucagaac

SEQ ID NO: 1106079 - RNA, 19 nt, Artificial Sequence
  Description of Artificial Sequence: Synthetic oligonucleotide
ccgagacaguugccaagga

SEQ ID NO: 1106080 - RNA, 19 nt, Artificial Sequence
  Description of Artificial Sequence: Synthetic oligonucleotide
gggaaccaacacguuuccu

SEQ ID NO: 1106081 - RNA, 19 nt, Artificial Sequence
  Description of Artificial Sequence: Synthetic oligonucleotide
ccgcaaucguacccucaga

SEQ ID NO: 1106082 - RNA, 19 nt, Artificial Sequence
  Description of Artificial Sequence: Synthetic oligonucleotide
ccacgugcaggggcugcac

SEQ ID NO: 1106083 - RNA, 19 nt, Artificial Sequence
  Description of Artificial Sequence: Synthetic oligonucleotide
gcaggacaauaugaccuuu

SEQ ID NO: 1106084 - RNA, 19 nt, Artificial Sequence
  Description of Artificial Sequence: Synthetic oligonucleotide
cgaggaccucagcccgccg

SEQ ID NO: 1106085 - RNA, 19 nt, Artificial Sequence
  Description of Artificial Sequence: Synthetic oligonucleotide
cccaaaccggagggaagga

SEQ ID NO: 1106086 - RNA, 19 nt, Artificial Sequence
  Description of Artificial Sequence: Synthetic oligonucleotide
cggagucgauguauugaua

SEQ ID NO: 1106087 - RNA, 19 nt, Artificial Sequence
  Description of Artificial Sequence: Synthetic oligonucleotide
cgagugucaauugggcagu

SEQ ID NO: 1106088 - RNA, 19 nt, Artificial Sequence
  Description of Artificial Sequence: Synthetic oligonucleotide
cguacccucagagucucgu

SEQ ID NO: 1106089 - RNA, 19 nt, Artificial Sequence
  Description of Artificial Sequence: Synthetic oligonucleotide
agaggcccgcggagucgau

SEQ ID NO: 1106090 - RNA, 19 nt, Artificial Sequence
  Description of Artificial Sequence: Synthetic oligonucleotide
ccaaaccggagggaaggau

SEQ ID NO: 1106091 - RNA, 19 nt, Artificial Sequence
  Description of Artificial Sequence: Synthetic oligonucleotide
gcccgcggagucgauguau

SEQ ID NO: 1106092 - RNA, 19 nt, Artificial Sequence
  Description of Artificial Sequence: Synthetic oligonucleotide
ggcccgcggagucgaugua

SEQ ID NO: 1106093 - RNA, 19 nt, Artificial Sequence
  Description of Artificial Sequence: Synthetic oligonucleotide
cccgcggagucgauguauu

SEQ ID NO: 1106094 - RNA, 19 nt, Artificial Sequence
  Description of Artificial Sequence: Synthetic oligonucleotide
cgugguaagcaaggaggau

SEQ ID NO: 1106095 - RNA, 19 nt, Artificial Sequence
  Description of Artificial Sequence: Synthetic oligonucleotide
ccgauaggacauggcuggu

SEQ ID NO: 1106096 - RNA, 19 nt, Artificial Sequence
  Description of Artificial Sequence: Synthetic oligonucleotide
ccaugccgucgggguuggc

SEQ ID NO: 1106097 - RNA, 19 nt, Artificial Sequence
  Description of Artificial Sequence: Synthetic oligonucleotide
aauacgaagacaauuacac

SEQ ID NO: 1106098 - RNA, 19 nt, Artificial Sequence
  Description of Artificial Sequence: Synthetic oligonucleotide
augaaaucgaucaacagcc

SEQ ID NO: 1106099 - RNA, 19 nt, Artificial Sequence
  Description of Artificial Sequence: Synthetic oligonucleotide
auaucggcaaaauucaugg

SEQ ID NO: 1106100 - RNA, 19 nt, Artificial Sequence
  Description of Artificial Sequence: Synthetic oligonucleotide
gauaguuagauacuccagg

SEQ ID NO: 1106101 - RNA, 19 nt, Artificial Sequence
  Description of Artificial Sequence: Synthetic oligonucleotide
ucuacaacuggaaaguugc

SEQ ID NO: 1106102 - RNA, 19 nt, Artificial Sequence
  Description of Artificial Sequence: Synthetic oligonucleotide
cuuaucuagucguagaucc

SEQ ID NO: 1106103 - RNA, 19 nt, Artificial Sequence
  Description of Artificial Sequence: Synthetic oligonucleotide
auuccuuuaaggcacgggc

SEQ ID NO: 1106104 - RNA, 19 nt, Artificial Sequence
  Description of Artificial Sequence: Synthetic oligonucleotide
aaguaauguacuuucaaga

SEQ ID NO: 1106105 - RNA, 19 nt, Artificial Sequence
  Description of Artificial Sequence: Synthetic oligonucleotide
uguaagaauuccauggcag

SEQ ID NO: 1106106 - RNA, 19 nt, Artificial Sequence
  Description of Artificial Sequence: Synthetic oligonucleotide
ucauauaaccaacuagucc

SEQ ID NO: 1106107 - RNA, 19 nt, Artificial Sequence
  Description of Artificial Sequence: Synthetic oligonucleotide
caacuugauaguuagauac

SEQ ID NO: 1106108 - RNA, 19 nt, Artificial Sequence
  Description of Artificial Sequence: Synthetic oligonucleotide
uucauggacauaaucaucu

SEQ ID NO: 1106109 - RNA, 19 nt, Artificial Sequence
  Description of Artificial Sequence: Synthetic oligonucleotide
auaguuagauacuccaggg

SEQ ID NO: 1106110 - RNA, 19 nt, Artificial Sequence
  Description of Artificial Sequence: Synthetic oligonucleotide
agauaaaccauauucuuga

SEQ ID NO: 1106111 - RNA, 19 nt, Artificial Sequence
  Description of Artificial Sequence: Synthetic oligonucleotide
aaaugauccaauaccuggc

SEQ ID NO: 1106112 - RNA, 19 nt, Artificial Sequence
  Description of Artificial Sequence: Synthetic oligonucleotide
ucuggauuguccaugcuag

SEQ ID NO: 1106113 - RNA, 19 nt, Artificial Sequence
  Description of Artificial Sequence: Synthetic oligonucleotide
aauaccuggcaauaccaag

SEQ ID NO: 1106114 - RNA, 19 nt, Artificial Sequence
  Description of Artificial Sequence: Synthetic oligonucleotide
aaaucgaucaacagcccgc

SEQ ID NO: 1106115 - RNA, 19 nt, Artificial Sequence
  Description of Artificial Sequence: Synthetic oligonucleotide
uccucauauaaccaacuag

SEQ ID NO: 1106116 - RNA, 19 nt, Artificial Sequence
  Description of Artificial Sequence: Synthetic oligonucleotide
ucuaaucaaaucucugaag

SEQ ID NO: 1106117 - RNA, 19 nt, Artificial Sequence
  Description of Artificial Sequence: Synthetic oligonucleotide
uugauaguuagauacucca

SEQ ID NO: 1106118 - RNA, 19 nt, Artificial Sequence
  Description of Artificial Sequence: Synthetic oligonucleotide
acaauacgaagacaauuac

SEQ ID NO: 1106119 - RNA, 19 nt, Artificial Sequence
  Description of Artificial Sequence: Synthetic oligonucleotide
aaauggcuuaucuagucgu

SEQ ID NO: 1106120 - RNA, 19 nt, Artificial Sequence
  Description of Artificial Sequence: Synthetic oligonucleotide
cuccauaucggcaaaauuc

SEQ ID NO: 1106121 - RNA, 19 nt, Artificial Sequence
  Description of Artificial Sequence: Synthetic oligonucleotide
gaaaucgaucaacagcccg

SEQ ID NO: 1106122 - RNA, 19 nt, Artificial Sequence
  Description of Artificial Sequence: Synthetic oligonucleotide
aaggcacgggcuaauaucc

SEQ ID NO: 1106123 - RNA, 19 nt, Artificial Sequence
  Description of Artificial Sequence: Synthetic oligonucleotide
acgauaaacauucugcagu

SEQ ID NO: 1106124 - RNA, 19 nt, Artificial Sequence
  Description of Artificial Sequence: Synthetic oligonucleotide
uccauaucggcaaaauuca

SEQ ID NO: 1106125 - RNA, 19 nt, Artificial Sequence
  Description of Artificial Sequence: Synthetic oligonucleotide
ugucuaaucaaaucucuga

SEQ ID NO: 1106126 - RNA, 19 nt, Artificial Sequence
  Description of Artificial Sequence: Synthetic oligonucleotide
auacgaagacaauuacacc

SEQ ID NO: 1106127 - RNA, 19 nt, Artificial Sequence
  Description of Artificial Sequence: Synthetic oligonucleotide
uaggaauucgcccauuugu

SEQ ID NO: 1106128 - RNA, 19 nt, Artificial Sequence
  Description of Artificial Sequence: Synthetic oligonucleotide
aucauaucaggaauugugc

SEQ ID NO: 1106129 - RNA, 19 nt, Artificial Sequence
  Description of Artificial Sequence: Synthetic oligonucleotide
caaucauuaacauauuaca

SEQ ID NO: 1106130 - RNA, 19 nt, Artificial Sequence
  Description of Artificial Sequence: Synthetic oligonucleotide
guaauguacuuucaagaag

SEQ ID NO: 1106131 - RNA, 19 nt, Artificial Sequence
  Description of Artificial Sequence: Synthetic oligonucleotide
auaaaccauauucuugaag

SEQ ID NO: 1106132 - RNA, 19 nt, Artificial Sequence
  Description of Artificial Sequence: Synthetic oligonucleotide
uuucacuauaccacugugc

SEQ ID NO: 1106133 - RNA, 19 nt, Artificial Sequence
  Description of Artificial Sequence: Synthetic oligonucleotide
acaacaguaaaccuacaga

SEQ ID NO: 1106134 - RNA, 19 nt, Artificial Sequence
  Description of Artificial Sequence: Synthetic oligonucleotide
uuagguauaggacuaucuc

SEQ ID NO: 1106135 - RNA, 19 nt, Artificial Sequence
  Description of Artificial Sequence: Synthetic oligonucleotide
ugauaguuagauacuccag

SEQ ID NO: 1106136 - RNA, 19 nt, Artificial Sequence
  Description of Artificial Sequence: Synthetic oligonucleotide
aguaauguacuuucaagaa

SEQ ID NO: 1106137 - RNA, 19 nt, Artificial Sequence
  Description of Artificial Sequence: Synthetic oligonucleotide
uagguauaggacuaucuca

SEQ ID NO: 1106138 - RNA, 19 nt, Artificial Sequence
  Description of Artificial Sequence: Synthetic oligonucleotide
ucuucaauacugcuuggga

SEQ ID NO: 1106139 - RNA, 19 nt, Artificial Sequence
  Description of Artificial Sequence: Synthetic oligonucleotide
aaugauccaauaccuggca

SEQ ID NO: 1106140 - RNA, 19 nt, Artificial Sequence
  Description of Artificial Sequence: Synthetic oligonucleotide
agccguugcauuuauuagg

SEQ ID NO: 1106141 - RNA, 19 nt, Artificial Sequence
  Description of Artificial Sequence: Synthetic oligonucleotide
uuuacaagcuaaagcacaa

SEQ ID NO: 1106142 - RNA, 19 nt, Artificial Sequence
  Description of Artificial Sequence: Synthetic oligonucleotide
agaaguuugugacaugcca

SEQ ID NO: 1106143 - RNA, 19 nt, Artificial Sequence
  Description of Artificial Sequence: Synthetic oligonucleotide
uucuacaacuggaaaguug

SEQ ID NO: 1106144 - RNA, 19 nt, Artificial Sequence
  Description of Artificial Sequence: Synthetic oligonucleotide
uagugcuuauucuacaacu

SEQ ID NO: 1106145 - RNA, 19 nt, Artificial Sequence
  Description of Artificial Sequence: Synthetic oligonucleotide
ucacgauaaacauucugca

SEQ ID NO: 1106146 - RNA, 19 nt, Artificial Sequence
  Description of Artificial Sequence: Synthetic oligonucleotide
cuugauaguuagauacucc

SEQ ID NO: 1106147 - RNA, 19 nt, Artificial Sequence
  Description of Artificial Sequence: Synthetic oligonucleotide
uucaacuugauaguuagau

SEQ ID NO: 1106148 - RNA, 19 nt, Artificial Sequence
  Description of Artificial Sequence: Synthetic oligonucleotide
cauauuacaauguagugcu

SEQ ID NO: 1106149 - RNA, 19 nt, Artificial Sequence
  Description of Artificial Sequence: Synthetic oligonucleotide
uuguaagaauuccauggca

SEQ ID NO: 1106150 - RNA, 19 nt, Artificial Sequence
  Description of Artificial Sequence: Synthetic oligonucleotide
ugauuauuuugauaacuuc

SEQ ID NO: 1106151 - RNA, 19 nt, Artificial Sequence
  Description of Artificial Sequence: Synthetic oligonucleotide
acuucaacuucccuauauc

SEQ ID NO: 1106152 - RNA, 19 nt, Artificial Sequence
  Description of Artificial Sequence: Synthetic oligonucleotide
ugaguuacauuuagugcug

SEQ ID NO: 1106153 - RNA, 19 nt, Artificial Sequence
  Description of Artificial Sequence: Synthetic oligonucleotide
uuuagugcuguguucacau

SEQ ID NO: 1106154 - RNA, 19 nt, Artificial Sequence
  Description of Artificial Sequence: Synthetic oligonucleotide
auaggacuaucucauuauc

SEQ ID NO: 1106155 - RNA, 19 nt, Artificial Sequence
  Description of Artificial Sequence: Synthetic oligonucleotide
aauuccauggcagcuugag

SEQ ID NO: 1106156 - RNA, 19 nt, Artificial Sequence
  Description of Artificial Sequence: Synthetic oligonucleotide
uugauaacuucuugagcag

SEQ ID NO: 1106157 - RNA, 19 nt, Artificial Sequence
  Description of Artificial Sequence: Synthetic oligonucleotide
auaauccucauauaaccaa

SEQ ID NO: 1106158 - RNA, 19 nt, Artificial Sequence
  Description of Artificial Sequence: Synthetic oligonucleotide
aauuccuuuaaggcacggg

SEQ ID NO: 1106159 - RNA, 19 nt, Artificial Sequence
  Description of Artificial Sequence: Synthetic oligonucleotide
caccauuacagauaaacca

SEQ ID NO: 1106160 - RNA, 19 nt, Artificial Sequence
  Description of Artificial Sequence: Synthetic oligonucleotide
aauugugccucgaacaggu

SEQ ID NO: 1106161 - RNA, 19 nt, Artificial Sequence
  Description of Artificial Sequence: Synthetic oligonucleotide
uuuauagcuuuuaggaauu

SEQ ID NO: 1106162 - RNA, 19 nt, Artificial Sequence
  Description of Artificial Sequence: Synthetic oligonucleotide
uugucuaaucaaaucucug

SEQ ID NO: 1106163 - RNA, 19 nt, Artificial Sequence
  Description of Artificial Sequence: Synthetic oligonucleotide
gaagcaauuuggcaacgug

SEQ ID NO: 1106164 - RNA, 19 nt, Artificial Sequence
  Description of Artificial Sequence: Synthetic oligonucleotide
cauaucggcaaaauucaug

SEQ ID NO: 1106165 - RNA, 19 nt, Artificial Sequence
  Description of Artificial Sequence: Synthetic oligonucleotide
uacaagcuaaagcacaaua

SEQ ID NO: 1106166 - RNA, 19 nt, Artificial Sequence
  Description of Artificial Sequence: Synthetic oligonucleotide
uauaggacuaucucauuau

SEQ ID NO: 1106167 - RNA, 19 nt, Artificial Sequence
  Description of Artificial Sequence: Synthetic oligonucleotide
ucguagauccuccaaugca

SEQ ID NO: 1106168 - RNA, 19 nt, Artificial Sequence
  Description of Artificial Sequence: Synthetic oligonucleotide
cauuaucuggaugugauuc

SEQ ID NO: 1106169 - RNA, 19 nt, Artificial Sequence
  Description of Artificial Sequence: Synthetic oligonucleotide
guaagaauuccauggcagc

SEQ ID NO: 1106170 - RNA, 19 nt, Artificial Sequence
  Description of Artificial Sequence: Synthetic oligonucleotide
uaaccaacuaguccauaug

SEQ ID NO: 1106171 - RNA, 19 nt, Artificial Sequence
  Description of Artificial Sequence: Synthetic oligonucleotide
auuuaguucuuguaagaau

SEQ ID NO: 1106172 - RNA, 19 nt, Artificial Sequence
  Description of Artificial Sequence: Synthetic oligonucleotide
ugcuaaauauuuagcuaug

SEQ ID NO: 1106173 - RNA, 19 nt, Artificial Sequence
  Description of Artificial Sequence: Synthetic oligonucleotide
ugcuaaacgaaguaaugua

SEQ ID NO: 1106174 - RNA, 19 nt, Artificial Sequence
  Description of Artificial Sequence: Synthetic oligonucleotide
uuacaaauuguuuggugau

SEQ ID NO: 1106175 - RNA, 19 nt, Artificial Sequence
  Description of Artificial Sequence: Synthetic oligonucleotide
cugaguugcaaccacaaca

SEQ ID NO: 1106176 - RNA, 19 nt, Artificial Sequence
  Description of Artificial Sequence: Synthetic oligonucleotide
aagcuaaagcacaauacga

SEQ ID NO: 1106177 - RNA, 19 nt, Artificial Sequence
  Description of Artificial Sequence: Synthetic oligonucleotide
caacaguaaaccuacagaa

SEQ ID NO: 1106178 - RNA, 19 nt, Artificial Sequence
  Description of Artificial Sequence: Synthetic oligonucleotide
uguugacuguauccaaacc

SEQ ID NO: 1106179 - RNA, 19 nt, Artificial Sequence
  Description of Artificial Sequence: Synthetic oligonucleotide
aauucgcccauuuguuuca

SEQ ID NO: 1106180 - RNA, 19 nt, Artificial Sequence
  Description of Artificial Sequence: Synthetic oligonucleotide
uggguguucuuuuauaaua

SEQ ID NO: 1106181 - RNA, 19 nt, Artificial Sequence
  Description of Artificial Sequence: Synthetic oligonucleotide
gaauucgcccauuuguuuc

SEQ ID NO: 1106182 - RNA, 19 nt, Artificial Sequence
  Description of Artificial Sequence: Synthetic oligonucleotide
auaaccaacuaguccauau

SEQ ID NO: 1106183 - RNA, 19 nt, Artificial Sequence
  Description of Artificial Sequence: Synthetic oligonucleotide
cuuaccacucgaaggaaug

SEQ ID NO: 1106184 - RNA, 19 nt, Artificial Sequence
  Description of Artificial Sequence: Synthetic oligonucleotide
ucgaucaacagcccgcaac

SEQ ID NO: 1106185 - RNA, 19 nt, Artificial Sequence
  Description of Artificial Sequence: Synthetic oligonucleotide
gacaucgcuauuuaguucu

SEQ ID NO: 1106186 - RNA, 19 nt, Artificial Sequence
  Description of Artificial Sequence: Synthetic oligonucleotide
uugagcucgguucuugcca

SEQ ID NO: 1106187 - RNA, 19 nt, Artificial Sequence
  Description of Artificial Sequence: Synthetic oligonucleotide
gcaucuuaccacucgaagg

SEQ ID NO: 1106188 - RNA, 19 nt, Artificial Sequence
  Description of Artificial Sequence: Synthetic oligonucleotide
uaaggcacgggcuaauauc

SEQ ID NO: 1106189 - RNA, 19 nt, Artificial Sequence
  Description of Artificial Sequence: Synthetic oligonucleotide
aacagcccgcaacauuagg

SEQ ID NO: 1106190 - RNA, 19 nt, Artificial Sequence
  Description of Artificial Sequence: Synthetic oligonucleotide
auuaggcaaacaugagcag

SEQ ID NO: 1106191 - RNA, 19 nt, Artificial Sequence
  Description of Artificial Sequence: Synthetic oligonucleotide
cacgauaaacauucugcag

SEQ ID NO: 1106192 - RNA, 19 nt, Artificial Sequence
  Description of Artificial Sequence: Synthetic oligonucleotide
aacuuccagagacaucgcu

SEQ ID NO: 1106193 - RNA, 19 nt, Artificial Sequence
  Description of Artificial Sequence: Synthetic oligonucleotide
cugaguuacauuuagugcu

SEQ ID NO: 1106194 - RNA, 19 nt, Artificial Sequence
  Description of Artificial Sequence: Synthetic oligonucleotide
agucguagauccuccaaug

SEQ ID NO: 1106195 - RNA, 19 nt, Artificial Sequence
  Description of Artificial Sequence: Synthetic oligonucleotide
agacaucgcuauuuaguuc

SEQ ID NO: 1106196 - RNA, 19 nt, Artificial Sequence
  Description of Artificial Sequence: Synthetic oligonucleotide
aagcaauuuggcaacguga

SEQ ID NO: 1106197 - RNA, 19 nt, Artificial Sequence
  Description of Artificial Sequence: Synthetic oligonucleotide
gaaguuugugacaugccac

SEQ ID NO: 1106198 - RNA, 19 nt, Artificial Sequence
  Description of Artificial Sequence: Synthetic oligonucleotide
agacaggacuucaacuucc

SEQ ID NO: 1106199 - RNA, 19 nt, Artificial Sequence
  Description of Artificial Sequence: Synthetic oligonucleotide
uaaacgaaguaauguacuu

SEQ ID NO: 1106200 - RNA, 19 nt, Artificial Sequence
  Description of Artificial Sequence: Synthetic oligonucleotide
ugaaaucgaucaacagccc

SEQ ID NO: 1106201 - RNA, 19 nt, Artificial Sequence
  Description of Artificial Sequence: Synthetic oligonucleotide
uucaacuucccuauaucuu

SEQ ID NO: 1106202 - RNA, 19 nt, Artificial Sequence
  Description of Artificial Sequence: Synthetic oligonucleotide
aauuacaccuucaaucauu

SEQ ID NO: 1106203 - RNA, 19 nt, Artificial Sequence
  Description of Artificial Sequence: Synthetic oligonucleotide
uauuacaauguagugcuua

SEQ ID NO: 1106204 - RNA, 19 nt, Artificial Sequence
  Description of Artificial Sequence: Synthetic oligonucleotide
uccuccaaugcauuaucug

SEQ ID NO: 1106205 - RNA, 19 nt, Artificial Sequence
  Description of Artificial Sequence: Synthetic oligonucleotide
ugauccaauaccuggcaau

SEQ ID NO: 1106206 - RNA, 19 nt, Artificial Sequence
  Description of Artificial Sequence: Synthetic oligonucleotide
uaaagggcggcaucuuacc

SEQ ID NO: 1106207 - RNA, 19 nt, Artificial Sequence
  Description of Artificial Sequence: Synthetic oligonucleotide
agagacaucgcuauuuagu

SEQ ID NO: 1106208 - RNA, 19 nt, Artificial Sequence
  Description of Artificial Sequence: Synthetic oligonucleotide
caucuuaccacucgaagga

SEQ ID NO: 1106209 - RNA, 19 nt, Artificial Sequence
  Description of Artificial Sequence: Synthetic oligonucleotide
ccaacuaguccauaugucc

SEQ ID NO: 1106210 - RNA, 19 nt, Artificial Sequence
  Description of Artificial Sequence: Synthetic oligonucleotide
auaccacugugcuaaauau

SEQ ID NO: 1106211 - RNA, 19 nt, Artificial Sequence
  Description of Artificial Sequence: Synthetic oligonucleotide
uccaugcuagaaauaauuu

SEQ ID NO: 1106212 - RNA, 19 nt, Artificial Sequence
  Description of Artificial Sequence: Synthetic oligonucleotide
aacauuagguauaggacua

SEQ ID NO: 1106213 - RNA, 19 nt, Artificial Sequence
  Description of Artificial Sequence: Synthetic oligonucleotide
ugcuguuuaugaaaucgau

SEQ ID NO: 1106214 - RNA, 19 nt, Artificial Sequence
  Description of Artificial Sequence: Synthetic oligonucleotide
gugauucuauuacugggug

SEQ ID NO: 1106215 - RNA, 19 nt, Artificial Sequence
  Description of Artificial Sequence: Synthetic oligonucleotide
uuggcaacgugauuaccca

SEQ ID NO: 1106216 - RNA, 19 nt, Artificial Sequence
  Description of Artificial Sequence: Synthetic oligonucleotide
ugugccucgaacagguaaa

SEQ ID NO: 1106217 - RNA, 19 nt, Artificial Sequence
  Description of Artificial Sequence: Synthetic oligonucleotide
gaauugugccucgaacagg

SEQ ID NO: 1106218 - RNA, 19 nt, Artificial Sequence
  Description of Artificial Sequence: Synthetic oligonucleotide
ugauaacuucuugagcagc

SEQ ID NO: 1106219 - RNA, 19 nt, Artificial Sequence
  Description of Artificial Sequence: Synthetic oligonucleotide
ggacuaucucauuaucugg

SEQ ID NO: 1106220 - RNA, 19 nt, Artificial Sequence
  Description of Artificial Sequence: Synthetic oligonucleotide
ccuccaaugcauuaucugg

SEQ ID NO: 1106221 - RNA, 19 nt, Artificial Sequence
  Description of Artificial Sequence: Synthetic oligonucleotide
ucaacuugauaguuagaua

SEQ ID NO: 1106222 - RNA, 19 nt, Artificial Sequence
  Description of Artificial Sequence: Synthetic oligonucleotide
ugaucaccccacaaccuca

SEQ ID NO: 1106223 - RNA, 19 nt, Artificial Sequence
  Description of Artificial Sequence: Synthetic oligonucleotide
ugauucuauuacugggugu

SEQ ID NO: 1106224 - RNA, 19 nt, Artificial Sequence
  Description of Artificial Sequence: Synthetic oligonucleotide
ggaauugugccucgaacag

SEQ ID NO: 1106225 - RNA, 19 nt, Artificial Sequence
  Description of Artificial Sequence: Synthetic oligonucleotide
uuaaaaucccuugucuaau

SEQ ID NO: 1106226 - RNA, 19 nt, Artificial Sequence
  Description of Artificial Sequence: Synthetic oligonucleotide
aauacugcuugggaccuga

SEQ ID NO: 1106227 - RNA, 19 nt, Artificial Sequence
  Description of Artificial Sequence: Synthetic oligonucleotide
ugcuagaaauaauuucauc

SEQ ID NO: 1106228 - RNA, 19 nt, Artificial Sequence
  Description of Artificial Sequence: Synthetic oligonucleotide
uaaaaucccuugucuaauc

SEQ ID NO: 1106229 - RNA, 19 nt, Artificial Sequence
  Description of Artificial Sequence: Synthetic oligonucleotide
cacaauacgaagacaauua

SEQ ID NO: 1106230 - RNA, 19 nt, Artificial Sequence
  Description of Artificial Sequence: Synthetic oligonucleotide
guuucacuauaccacugug

SEQ ID NO: 1106231 - RNA, 19 nt, Artificial Sequence
  Description of Artificial Sequence: Synthetic oligonucleotide
uugaguaguuucccgugcu

SEQ ID NO: 1106232 - RNA, 19 nt, Artificial Sequence
  Description of Artificial Sequence: Synthetic oligonucleotide
caauacgaagacaauuaca

SEQ ID NO: 1106233 - RNA, 19 nt, Artificial Sequence
  Description of Artificial Sequence: Synthetic oligonucleotide
ucuccgaaauggacucugg

SEQ ID NO: 1106234 - RNA, 19 nt, Artificial Sequence
  Description of Artificial Sequence: Synthetic oligonucleotide
uugugccucgaacagguaa

SEQ ID NO: 1106235 - RNA, 19 nt, Artificial Sequence
  Description of Artificial Sequence: Synthetic oligonucleotide
ucaggaaauggcuuaucua

SEQ ID NO: 1106236 - RNA, 19 nt, Artificial Sequence
  Description of Artificial Sequence: Synthetic oligonucleotide
agcgaucaucauuaaauau

SEQ ID NO: 1106237 - RNA, 19 nt, Artificial Sequence
  Description of Artificial Sequence: Synthetic oligonucleotide
uacauuuagugcuguguuc

SEQ ID NO: 1106238 - RNA, 19 nt, Artificial Sequence
  Description of Artificial Sequence: Synthetic oligonucleotide
ccgaaauggacucuggugc

SEQ ID NO: 1106239 - RNA, 19 nt, Artificial Sequence
  Description of Artificial Sequence: Synthetic oligonucleotide
aaacgaaguaauguacuuu

SEQ ID NO: 1106240 - RNA, 19 nt, Artificial Sequence
  Description of Artificial Sequence: Synthetic oligonucleotide
uagucguagauccuccaau

SEQ ID NO: 1106241 - RNA, 19 nt, Artificial Sequence
  Description of Artificial Sequence: Synthetic oligonucleotide
ccagcguacagcaaagccg

SEQ ID NO: 1106242 - RNA, 19 nt, Artificial Sequence
  Description of Artificial Sequence: Synthetic oligonucleotide
gucuaaucaaaucucugaa

SEQ ID NO: 1106243 - RNA, 19 nt, Artificial Sequence
  Description of Artificial Sequence: Synthetic oligonucleotide
ugccacuauaaauguaagu

SEQ ID NO: 1106244 - RNA, 19 nt, Artificial Sequence
  Description of Artificial Sequence: Synthetic oligonucleotide
agaauugcugcaaagcaau

SEQ ID NO: 1106245 - RNA, 19 nt, Artificial Sequence
  Description of Artificial Sequence: Synthetic oligonucleotide
uucuauuacuggguguucu

SEQ ID NO: 1106246 - RNA, 19 nt, Artificial Sequence
  Description of Artificial Sequence: Synthetic oligonucleotide
aauguacuuucaagaagcu

SEQ ID NO: 1106247 - RNA, 19 nt, Artificial Sequence
  Description of Artificial Sequence: Synthetic oligonucleotide
caacauuagguauaggacu

SEQ ID NO: 1106248 - RNA, 19 nt, Artificial Sequence
  Description of Artificial Sequence: Synthetic oligonucleotide
aucaauaauuguaaaugau

SEQ ID NO: 1106249 - RNA, 19 nt, Artificial Sequence
  Description of Artificial Sequence: Synthetic oligonucleotide
aacuaguccauauguccua

SEQ ID NO: 1106250 - RNA, 19 nt, Artificial Sequence
  Description of Artificial Sequence: Synthetic oligonucleotide
aucuagucguagauccucc

SEQ ID NO: 1106251 - RNA, 19 nt, Artificial Sequence
  Description of Artificial Sequence: Synthetic oligonucleotide
uucccuauaucuucuucaa

SEQ ID NO: 1106252 - RNA, 19 nt, Artificial Sequence
  Description of Artificial Sequence: Synthetic oligonucleotide
cuuucaccauuacagauaa

SEQ ID NO: 1106253 - RNA, 19 nt, Artificial Sequence
  Description of Artificial Sequence: Synthetic oligonucleotide
aaucgaucaacagcccgca

SEQ ID NO: 1106254 - RNA, 19 nt, Artificial Sequence
  Description of Artificial Sequence: Synthetic oligonucleotide
acuauaaauguaaguauua

SEQ ID NO: 1106255 - RNA, 19 nt, Artificial Sequence
  Description of Artificial Sequence: Synthetic oligonucleotide
uauuacuggguguucuuuu

SEQ ID NO: 1106256 - RNA, 19 nt, Artificial Sequence
  Description of Artificial Sequence: Synthetic oligonucleotide
ucagcuaaagggcggcauc

SEQ ID NO: 1106257 - RNA, 19 nt, Artificial Sequence
  Description of Artificial Sequence: Synthetic oligonucleotide
uaucuagucguagauccuc

SEQ ID NO: 1106258 - RNA, 19 nt, Artificial Sequence
  Description of Artificial Sequence: Synthetic oligonucleotide
guauaggacuaucucauua

SEQ ID NO: 1106259 - RNA, 19 nt, Artificial Sequence
  Description of Artificial Sequence: Synthetic oligonucleotide
uggcuuaucuagucguaga

SEQ ID NO: 1106260 - RNA, 19 nt, Artificial Sequence
  Description of Artificial Sequence: Synthetic oligonucleotide
ccauauguccuacagauca

SEQ ID NO: 1106261 - RNA, 19 nt, Artificial Sequence
  Description of Artificial Sequence: Synthetic oligonucleotide
uugcuuucucacgauaaac

SEQ ID NO: 1106262 - RNA, 19 nt, Artificial Sequence
  Description of Artificial Sequence: Synthetic oligonucleotide
uccaaaucauaagauugaa

SEQ ID NO: 1106263 - RNA, 19 nt, Artificial Sequence
  Description of Artificial Sequence: Synthetic oligonucleotide
uggaaaguugcagaaguuu

SEQ ID NO: 1106264 - RNA, 19 nt, Artificial Sequence
  Description of Artificial Sequence: Synthetic oligonucleotide
cuaaacgaaguaauguacu

SEQ ID NO: 1106265 - RNA, 19 nt, Artificial Sequence
  Description of Artificial Sequence: Synthetic oligonucleotide
cagaaguuugugacaugcc

SEQ ID NO: 1106266 - RNA, 19 nt, Artificial Sequence
  Description of Artificial Sequence: Synthetic oligonucleotide
acaaauuguuuggugauua

SEQ ID NO: 1106267 - RNA, 19 nt, Artificial Sequence
  Description of Artificial Sequence: Synthetic oligonucleotide
gucguagauccuccaaugc

SEQ ID NO: 1106268 - RNA, 19 nt, Artificial Sequence
  Description of Artificial Sequence: Synthetic oligonucleotide
gcuuuuaggaauucgccca

SEQ ID NO: 1106269 - RNA, 19 nt, Artificial Sequence
  Description of Artificial Sequence: Synthetic oligonucleotide
aucuggauuguccaugcua

SEQ ID NO: 1106270 - RNA, 19 nt, Artificial Sequence
  Description of Artificial Sequence: Synthetic oligonucleotide
guugcaaccacaacaguaa

SEQ ID NO: 1106271 - RNA, 19 nt, Artificial Sequence
  Description of Artificial Sequence: Synthetic oligonucleotide
acuaucucauuaucuggau

SEQ ID NO: 1106272 - RNA, 19 nt, Artificial Sequence
  Description of Artificial Sequence: Synthetic oligonucleotide
uucuugccaauacugcuuu

SEQ ID NO: 1106273 - RNA, 19 nt, Artificial Sequence
  Description of Artificial Sequence: Synthetic oligonucleotide
ucccuugucuaaucaaauc

SEQ ID NO: 1106274 - RNA, 19 nt, Artificial Sequence
  Description of Artificial Sequence: Synthetic oligonucleotide
ucugggaauuccagaggac

SEQ ID NO: 1106275 - RNA, 19 nt, Artificial Sequence
  Description of Artificial Sequence: Synthetic oligonucleotide
ucuagucguagauccucca

SEQ ID NO: 1106276 - RNA, 19 nt, Artificial Sequence
  Description of Artificial Sequence: Synthetic oligonucleotide
uggugauuauuuugauaac

SEQ ID NO: 1106277 - RNA, 19 nt, Artificial Sequence
  Description of Artificial Sequence: Synthetic oligonucleotide
agguauaggacuaucucau

SEQ ID NO: 1106278 - RNA, 19 nt, Artificial Sequence
  Description of Artificial Sequence: Synthetic oligonucleotide
auauuuaugcagcgaucau

SEQ ID NO: 1106279 - RNA, 19 nt, Artificial Sequence
  Description of Artificial Sequence: Synthetic oligonucleotide
uucuccgaaauggacucug

SEQ ID NO: 1106280 - RNA, 19 nt, Artificial Sequence
  Description of Artificial Sequence: Synthetic oligonucleotide
gcaacauuagguauaggac

SEQ ID NO: 1106281 - RNA, 19 nt, Artificial Sequence
  Description of Artificial Sequence: Synthetic oligonucleotide
aguugcaaccacaacagua

SEQ ID NO: 1106282 - RNA, 19 nt, Artificial Sequence
  Description of Artificial Sequence: Synthetic oligonucleotide
uugugacaugccacuauaa

SEQ ID NO: 1106283 - RNA, 19 nt, Artificial Sequence
  Description of Artificial Sequence: Synthetic oligonucleotide
ggcaucuuaccacucgaag

SEQ ID NO: 1106284 - RNA, 19 nt, Artificial Sequence
  Description of Artificial Sequence: Synthetic oligonucleotide
uaucggcaaaauucaugga

SEQ ID NO: 1106285 - RNA, 19 nt, Artificial Sequence
  Description of Artificial Sequence: Synthetic oligonucleotide
ucuauuacuggguguucuu

SEQ ID NO: 1106286 - RNA, 19 nt, Artificial Sequence
  Description of Artificial Sequence: Synthetic oligonucleotide
gugauauuuaugcagcgau

SEQ ID NO: 1106287 - RNA, 19 nt, Artificial Sequence
  Description of Artificial Sequence: Synthetic oligonucleotide
ggaccugaguuacauuuag

SEQ ID NO: 1106288 - RNA, 19 nt, Artificial Sequence
  Description of Artificial Sequence: Synthetic oligonucleotide
agcaauuuggcaacgugau

SEQ ID NO: 1106289 - RNA, 19 nt, Artificial Sequence
  Description of Artificial Sequence: Synthetic oligonucleotide
ucccuauaucuucuucaac

SEQ ID NO: 1106290 - RNA, 19 nt, Artificial Sequence
  Description of Artificial Sequence: Synthetic oligonucleotide
ucgcccauuuguuucacua

SEQ ID NO: 1106291 - RNA, 19 nt, Artificial Sequence
  Description of Artificial Sequence: Synthetic oligonucleotide
guugcauuuauuaggcaaa

SEQ ID NO: 1106292 - RNA, 19 nt, Artificial Sequence
  Description of Artificial Sequence: Synthetic oligonucleotide
ccaugcuagaaauaauuuc

SEQ ID NO: 1106293 - RNA, 19 nt, Artificial Sequence
  Description of Artificial Sequence: Synthetic oligonucleotide
gcuaaacgaaguaauguac

SEQ ID NO: 1106294 - RNA, 19 nt, Artificial Sequence
  Description of Artificial Sequence: Synthetic oligonucleotide
uccauauguccuacagauc

SEQ ID NO: 1106295 - RNA, 19 nt, Artificial Sequence
  Description of Artificial Sequence: Synthetic oligonucleotide
gccacuauaaauguaagua

SEQ ID NO: 1106296 - RNA, 19 nt, Artificial Sequence
  Description of Artificial Sequence: Synthetic oligonucleotide
uggacucuggugccuggcc

SEQ ID NO: 1106297 - RNA, 19 nt, Artificial Sequence
  Description of Artificial Sequence: Synthetic oligonucleotide
auucuauuacuggguguuc

SEQ ID NO: 1106298 - RNA, 19 nt, Artificial Sequence
  Description of Artificial Sequence: Synthetic oligonucleotide
ugacuguauccaaaccaua

SEQ ID NO: 1106299 - RNA, 19 nt, Artificial Sequence
  Description of Artificial Sequence: Synthetic oligonucleotide
ggcaaacaugagcagauuc

SEQ ID NO: 1106300 - RNA, 19 nt, Artificial Sequence
  Description of Artificial Sequence: Synthetic oligonucleotide
gagacaucgcuauuuaguu

SEQ ID NO: 1106301 - RNA, 19 nt, Artificial Sequence
  Description of Artificial Sequence: Synthetic oligonucleotide
ugagcucgguucuugccaa

SEQ ID NO: 1106302 - RNA, 19 nt, Artificial Sequence
  Description of Artificial Sequence: Synthetic oligonucleotide
ucgcuauuuaguucuugua

SEQ ID NO: 1106303 - RNA, 19 nt, Artificial Sequence
  Description of Artificial Sequence: Synthetic oligonucleotide
ugaagcaauuuggcaacgu

SEQ ID NO: 1106304 - RNA, 19 nt, Artificial Sequence
  Description of Artificial Sequence: Synthetic oligonucleotide
uccgcugaccugcuuucca

SEQ ID NO: 1106305 - RNA, 19 nt, Artificial Sequence
  Description of Artificial Sequence: Synthetic oligonucleotide
auuuagugcuguguucaca

SEQ ID NO: 1106306 - RNA, 19 nt, Artificial Sequence
  Description of Artificial Sequence: Synthetic oligonucleotide
ugcuugaaucugcaaucau

SEQ ID NO: 1106307 - RNA, 19 nt, Artificial Sequence
  Description of Artificial Sequence: Synthetic oligonucleotide
agggcggcaucuuaccacu

SEQ ID NO: 1106308 - RNA, 19 nt, Artificial Sequence
  Description of Artificial Sequence: Synthetic oligonucleotide
ccuugucuaaucaaaucuc

SEQ ID NO: 1106309 - RNA, 19 nt, Artificial Sequence
  Description of Artificial Sequence: Synthetic oligonucleotide
cgugauuacccacagcagc

SEQ ID NO: 1106310 - RNA, 19 nt, Artificial Sequence
  Description of Artificial Sequence: Synthetic oligonucleotide
ggcagcuugagcucgguuc

SEQ ID NO: 1106311 - RNA, 19 nt, Artificial Sequence
  Description of Artificial Sequence: Synthetic oligonucleotide
aucacaauccauggaguau

SEQ ID NO: 1106312 - RNA, 19 nt, Artificial Sequence
  Description of Artificial Sequence: Synthetic oligonucleotide
cacuauaaauguaaguauu

SEQ ID NO: 1106313 - RNA, 19 nt, Artificial Sequence
  Description of Artificial Sequence: Synthetic oligonucleotide
auauguccuacagaucaaa

SEQ ID NO: 1106314 - RNA, 19 nt, Artificial Sequence
  Description of Artificial Sequence: Synthetic oligonucleotide
cagaggacaucugcuaaac

SEQ ID NO: 1106315 - RNA, 19 nt, Artificial Sequence
  Description of Artificial Sequence: Synthetic oligonucleotide
gaucaccccacaaccucag

SEQ ID NO: 1106316 - RNA, 19 nt, Artificial Sequence
  Description of Artificial Sequence: Synthetic oligonucleotide
gauccaauaccuggcaaua

SEQ ID NO: 1106317 - RNA, 19 nt, Artificial Sequence
  Description of Artificial Sequence: Synthetic oligonucleotide
agaucaaaagagggaucug

SEQ ID NO: 1106318 - RNA, 19 nt, Artificial Sequence
  Description of Artificial Sequence: Synthetic oligonucleotide
ucucucaguucaggaaaug

SEQ ID NO: 1106319 - RNA, 19 nt, Artificial Sequence
  Description of Artificial Sequence: Synthetic oligonucleotide
ucauggacauaaucaucuu

SEQ ID NO: 1106320 - RNA, 19 nt, Artificial Sequence
  Description of Artificial Sequence: Synthetic oligonucleotide
aauggcuuaucuagucgua

SEQ ID NO: 1106321 - RNA, 19 nt, Artificial Sequence
  Description of Artificial Sequence: Synthetic oligonucleotide
cgcaacauuagguauagga

SEQ ID NO: 1106322 - RNA, 19 nt, Artificial Sequence
  Description of Artificial Sequence: Synthetic oligonucleotide
augcuguuuaugaaaucga

SEQ ID NO: 1106323 - RNA, 19 nt, Artificial Sequence
  Description of Artificial Sequence: Synthetic oligonucleotide
gcaacgugauuacccacag

SEQ ID NO: 1106324 - RNA, 19 nt, Artificial Sequence
  Description of Artificial Sequence: Synthetic oligonucleotide
guaguuucccgugcugcgc

SEQ ID NO: 1106325 - RNA, 19 nt, Artificial Sequence
  Description of Artificial Sequence: Synthetic oligonucleotide
gacuguauccaaaccauau

SEQ ID NO: 1106326 - RNA, 19 nt, Artificial Sequence
  Description of Artificial Sequence: Synthetic oligonucleotide
gccguugcauuuauuaggc

SEQ ID NO: 1106327 - RNA, 19 nt, Artificial Sequence
  Description of Artificial Sequence: Synthetic oligonucleotide
aguccagcguacagcaaag

SEQ ID NO: 1106328 - RNA, 19 nt, Artificial Sequence
  Description of Artificial Sequence: Synthetic oligonucleotide
uuacaagcuaaagcacaau

SEQ ID NO: 1106329 - RNA, 19 nt, Artificial Sequence
  Description of Artificial Sequence: Synthetic oligonucleotide
augccacuauaaauguaag

SEQ ID NO: 1106330 - RNA, 19 nt, Artificial Sequence
  Description of Artificial Sequence: Synthetic oligonucleotide
ggcggcaucuuaccacucg

SEQ ID NO: 1106331 - RNA, 19 nt, Artificial Sequence
  Description of Artificial Sequence: Synthetic oligonucleotide
uucagcuaaagggcggcau

SEQ ID NO: 1106332 - RNA, 19 nt, Artificial Sequence
  Description of Artificial Sequence: Synthetic oligonucleotide
uuuaaggcacgggcuaaua

SEQ ID NO: 1106333 - RNA, 19 nt, Artificial Sequence
  Description of Artificial Sequence: Synthetic oligonucleotide
uuuaugcagcgaucaucau

SEQ ID NO: 1106334 - RNA, 19 nt, Artificial Sequence
  Description of Artificial Sequence: Synthetic oligonucleotide
cagaucaaaagagggaucu

SEQ ID NO: 1106335 - RNA, 19 nt, Artificial Sequence
  Description of Artificial Sequence: Synthetic oligonucleotide
aguauggcuaugauccuuu

SEQ ID NO: 1106336 - RNA, 19 nt, Artificial Sequence
  Description of Artificial Sequence: Synthetic oligonucleotide
caacagcccgcaacauuag

SEQ ID NO: 1106337 - RNA, 19 nt, Artificial Sequence
  Description of Artificial Sequence: Synthetic oligonucleotide
cacucgaaggaaugcagaa

SEQ ID NO: 1106338 - RNA, 19 nt, Artificial Sequence
  Description of Artificial Sequence: Synthetic oligonucleotide
uggcaacgugauuacccac

SEQ ID NO: 1106339 - RNA, 19 nt, Artificial Sequence
  Description of Artificial Sequence: Synthetic oligonucleotide
cccauuuguuucacuauac

SEQ ID NO: 1106340 - RNA, 19 nt, Artificial Sequence
  Description of Artificial Sequence: Synthetic oligonucleotide
ggacaucugcuaaacgaag

SEQ ID NO: 1106341 - RNA, 19 nt, Artificial Sequence
  Description of Artificial Sequence: Synthetic oligonucleotide
acgugauuacccacagcag

SEQ ID NO: 1106342 - RNA, 19 nt, Artificial Sequence
  Description of Artificial Sequence: Synthetic oligonucleotide
caauaccuggcaauaccaa

SEQ ID NO: 1106343 - RNA, 19 nt, Artificial Sequence
  Description of Artificial Sequence: Synthetic oligonucleotide
agcccgcaacauuagguau

SEQ ID NO: 1106344 - RNA, 19 nt, Artificial Sequence
  Description of Artificial Sequence: Synthetic oligonucleotide
ugcgccauugccgccccag

SEQ ID NO: 1106345 - RNA, 19 nt, Artificial Sequence
  Description of Artificial Sequence: Synthetic oligonucleotide
caacgugauuacccacagc

SEQ ID NO: 1106346 - RNA, 19 nt, Artificial Sequence
  Description of Artificial Sequence: Synthetic oligonucleotide
gcgaucaucauuaaauaua

SEQ ID NO: 1106347 - RNA, 19 nt, Artificial Sequence
  Description of Artificial Sequence: Synthetic oligonucleotide
auucgcccauuuguuucac

SEQ ID NO: 1106348 - RNA, 19 nt, Artificial Sequence
  Description of Artificial Sequence: Synthetic oligonucleotide
agcagauuccaaagcuucu

SEQ ID NO: 1106349 - RNA, 19 nt, Artificial Sequence
  Description of Artificial Sequence: Synthetic oligonucleotide
aggaauucgcccauuuguu

SEQ ID NO: 1106350 - RNA, 19 nt, Artificial Sequence
  Description of Artificial Sequence: Synthetic oligonucleotide
ugcugcgccauugccgccc

SEQ ID NO: 1106351 - RNA, 19 nt, Artificial Sequence
  Description of Artificial Sequence: Synthetic oligonucleotide
acgaagacaauuacaccuu

SEQ ID NO: 1106352 - RNA, 19 nt, Artificial Sequence
  Description of Artificial Sequence: Synthetic oligonucleotide
cccuauaucuucuucaacu

SEQ ID NO: 1106353 - RNA, 19 nt, Artificial Sequence
  Description of Artificial Sequence: Synthetic oligonucleotide
acgaaguaauguacuuuca

SEQ ID NO: 1106354 - RNA, 19 nt, Artificial Sequence
  Description of Artificial Sequence: Synthetic oligonucleotide
ggugauauuuaugcagcga

SEQ ID NO: 1106355 - RNA, 19 nt, Artificial Sequence
  Description of Artificial Sequence: Synthetic oligonucleotide
cauauguccuacagaucaa

SEQ ID NO: 1106356 - RNA, 19 nt, Artificial Sequence
  Description of Artificial Sequence: Synthetic oligonucleotide
caucugcuaaacgaaguaa

SEQ ID NO: 1106357 - RNA, 19 nt, Artificial Sequence
  Description of Artificial Sequence: Synthetic oligonucleotide
cagcgaucaucauuaaaua

SEQ ID NO: 1106358 - RNA, 19 nt, Artificial Sequence
  Description of Artificial Sequence: Synthetic oligonucleotide
cugcuaaacgaaguaaugu

SEQ ID NO: 1106359 - RNA, 19 nt, Artificial Sequence
  Description of Artificial Sequence: Synthetic oligonucleotide
cuacaacuggaaaguugca

SEQ ID NO: 1106360 - RNA, 19 nt, Artificial Sequence
  Description of Artificial Sequence: Synthetic oligonucleotide
gacucuggugccuggccaa

SEQ ID NO: 1106361 - RNA, 19 nt, Artificial Sequence
  Description of Artificial Sequence: Synthetic oligonucleotide
uuucuccgaaauggacucu

SEQ ID NO: 1106362 - RNA, 19 nt, Artificial Sequence
  Description of Artificial Sequence: Synthetic oligonucleotide
cuagucguagauccuccaa

SEQ ID NO: 1106363 - RNA, 19 nt, Artificial Sequence
  Description of Artificial Sequence: Synthetic oligonucleotide
cacgggcuaauauccaaaa

SEQ ID NO: 1106364 - RNA, 19 nt, Artificial Sequence
  Description of Artificial Sequence: Synthetic oligonucleotide
uucgcccauuuguuucacu

SEQ ID NO: 1106365 - RNA, 19 nt, Artificial Sequence
  Description of Artificial Sequence: Synthetic oligonucleotide
agcuccauaucggcaaaau

SEQ ID NO: 1106366 - RNA, 19 nt, Artificial Sequence
  Description of Artificial Sequence: Synthetic oligonucleotide
agcacaauacgaagacaau

SEQ ID NO: 1106367 - RNA, 19 nt, Artificial Sequence
  Description of Artificial Sequence: Synthetic oligonucleotide
ggguguucuuuuauaauaa

SEQ ID NO: 1106368 - RNA, 19 nt, Artificial Sequence
  Description of Artificial Sequence: Synthetic oligonucleotide
guccaugcuagaaauaauu

SEQ ID NO: 1106369 - RNA, 19 nt, Artificial Sequence
  Description of Artificial Sequence: Synthetic oligonucleotide
acuauaccacugugcuaaa

SEQ ID NO: 1106370 - RNA, 19 nt, Artificial Sequence
  Description of Artificial Sequence: Synthetic oligonucleotide
gcuuaucuagucguagauc

SEQ ID NO: 1106371 - RNA, 19 nt, Artificial Sequence
  Description of Artificial Sequence: Synthetic oligonucleotide
gcuugagcucgguucuugc

SEQ ID NO: 1106372 - RNA, 19 nt, Artificial Sequence
  Description of Artificial Sequence: Synthetic oligonucleotide
ccaaugcauuaucuggaug

SEQ ID NO: 1106373 - RNA, 19 nt, Artificial Sequence
  Description of Artificial Sequence: Synthetic oligonucleotide
aguuucccgugcugcgcca

SEQ ID NO: 1106374 - RNA, 19 nt, Artificial Sequence
  Description of Artificial Sequence: Synthetic oligonucleotide
gccucgaacagguaaauuu

SEQ ID NO: 1106375 - RNA, 19 nt, Artificial Sequence
  Description of Artificial Sequence: Synthetic oligonucleotide
aucuuaccacucgaaggaa

SEQ ID NO: 1106376 - RNA, 19 nt, Artificial Sequence
  Description of Artificial Sequence: Synthetic oligonucleotide
gcuugaaucugcaaucaua

SEQ ID NO: 1106377 - RNA, 19 nt, Artificial Sequence
  Description of Artificial Sequence: Synthetic oligonucleotide
gcugaguugcaaccacaac

SEQ ID NO: 1106378 - RNA, 19 nt, Artificial Sequence
  Description of Artificial Sequence: Synthetic oligonucleotide
cagcccgcaacauuaggua

SEQ ID NO: 1106379 - RNA, 19 nt, Artificial Sequence
  Description of Artificial Sequence: Synthetic oligonucleotide
aucaggaauugugccucga

SEQ ID NO: 1106380 - RNA, 19 nt, Artificial Sequence
  Description of Artificial Sequence: Synthetic oligonucleotide
ucuugccaauacugcuuuu

SEQ ID NO: 1106381 - RNA, 19 nt, Artificial Sequence
  Description of Artificial Sequence: Synthetic oligonucleotide
cuggauuguccaugcuaga

SEQ ID NO: 1106382 - RNA, 19 nt, Artificial Sequence
  Description of Artificial Sequence: Synthetic oligonucleotide
ugccggucguacuucuguu

SEQ ID NO: 1106383 - RNA, 19 nt, Artificial Sequence
  Description of Artificial Sequence: Synthetic oligonucleotide
ccauauguuccaaaucaua

SEQ ID NO: 1106384 - RNA, 19 nt, Artificial Sequence
  Description of Artificial Sequence: Synthetic oligonucleotide
cuuuuaggaauucgcccau

SEQ ID NO: 1106385 - RNA, 19 nt, Artificial Sequence
  Description of Artificial Sequence: Synthetic oligonucleotide
caaauuguuuggugauuau

SEQ ID NO: 1106386 - RNA, 19 nt, Artificial Sequence
  Description of Artificial Sequence: Synthetic oligonucleotide
aucgaucaacagcccgcaa

SEQ ID NO: 1106387 - RNA, 19 nt, Artificial Sequence
  Description of Artificial Sequence: Synthetic oligonucleotide
cccgcaacauuagguauag

SEQ ID NO: 1106388 - RNA, 19 nt, Artificial Sequence
  Description of Artificial Sequence: Synthetic oligonucleotide
guccagcguacagcaaagc

SEQ ID NO: 1106389 - RNA, 19 nt, Artificial Sequence
  Description of Artificial Sequence: Synthetic oligonucleotide
cauugccgccccaguccag

SEQ ID NO: 1106390 - RNA, 19 nt, Artificial Sequence
  Description of Artificial Sequence: Synthetic oligonucleotide
cucgguucuugccaauacu

SEQ ID NO: 1106391 - RNA, 19 nt, Artificial Sequence
  Description of Artificial Sequence: Synthetic oligonucleotide
uuucccgugcugcgccauu

SEQ ID NO: 1106392 - RNA, 19 nt, Artificial Sequence
  Description of Artificial Sequence: Synthetic oligonucleotide
cgaucaacagcccgcaaca

SEQ ID NO: 1106393 - RNA, 19 nt, Artificial Sequence
  Description of Artificial Sequence: Synthetic oligonucleotide
ugccucgaacagguaaauu

SEQ ID NO: 1106394 - RNA, 19 nt, Artificial Sequence
  Description of Artificial Sequence: Synthetic oligonucleotide
ggcuuaucuagucguagau

SEQ ID NO: 1106395 - RNA, 19 nt, Artificial Sequence
  Description of Artificial Sequence: Synthetic oligonucleotide
cgaaguaauguacuuucaa

SEQ ID NO: 1106396 - RNA, 19 nt, Artificial Sequence
  Description of Artificial Sequence: Synthetic oligonucleotide
ggcacgggcuaauauccaa

SEQ ID NO: 1106397 - RNA, 19 nt, Artificial Sequence
  Description of Artificial Sequence: Synthetic oligonucleotide
gaguauggcuaugauccuu

SEQ ID NO: 1106398 - RNA, 19 nt, Artificial Sequence
  Description of Artificial Sequence: Synthetic oligonucleotide
gcggcaucuuaccacucga

SEQ ID NO: 1106399 - RNA, 19 nt, Artificial Sequence
  Description of Artificial Sequence: Synthetic oligonucleotide
agcucgguucuugccaaua

SEQ ID NO: 1106400 - RNA, 19 nt, Artificial Sequence
  Description of Artificial Sequence: Synthetic oligonucleotide
ggaauucgcccauuuguuu

SEQ ID NO: 1106401 - RNA, 19 nt, Artificial Sequence
  Description of Artificial Sequence: Synthetic oligonucleotide
cacaaccucagcugccggu

SEQ ID NO: 1106402 - RNA, 19 nt, Artificial Sequence
  Description of Artificial Sequence: Synthetic oligonucleotide
agcuaaagggcggcaucuu

SEQ ID NO: 1106403 - RNA, 19 nt, Artificial Sequence
  Description of Artificial Sequence: Synthetic oligonucleotide
gcacaauacgaagacaauu

SEQ ID NO: 1106404 - RNA, 19 nt, Artificial Sequence
  Description of Artificial Sequence: Synthetic oligonucleotide
cuggugccuggccaacaga

SEQ ID NO: 1106405 - RNA, 19 nt, Artificial Sequence
  Description of Artificial Sequence: Synthetic oligonucleotide
gccggucguacuucuguuc

SEQ ID NO: 1106406 - RNA, 19 nt, Artificial Sequence
  Description of Artificial Sequence: Synthetic oligonucleotide
cugccggucguacuucugu

SEQ ID NO: 1106407 - RNA, 19 nt, Artificial Sequence
  Description of Artificial Sequence: Synthetic oligonucleotide
aggcacgggcuaauaucca

SEQ ID NO: 1106408 - RNA, 19 nt, Artificial Sequence
  Description of Artificial Sequence: Synthetic oligonucleotide
ccagaggacaucugcuaaa

SEQ ID NO: 1106409 - RNA, 19 nt, Artificial Sequence
  Description of Artificial Sequence: Synthetic oligonucleotide
cuauuacuggguguucuuu

SEQ ID NO: 1106410 - RNA, 19 nt, Artificial Sequence
  Description of Artificial Sequence: Synthetic oligonucleotide
cagcuaaagggcggcaucu

SEQ ID NO: 1106411 - RNA, 19 nt, Artificial Sequence
  Description of Artificial Sequence: Synthetic oligonucleotide
cguagauccuccaaugcau

SEQ ID NO: 1106412 - RNA, 19 nt, Artificial Sequence
  Description of Artificial Sequence: Synthetic oligonucleotide
acaucgcuauuuaguucuu

SEQ ID NO: 1106413 - RNA, 19 nt, Artificial Sequence
  Description of Artificial Sequence: Synthetic oligonucleotide
gcacgggcuaauauccaaa

SEQ ID NO: 1106414 - RNA, 19 nt, Artificial Sequence
  Description of Artificial Sequence: Synthetic oligonucleotide
auugugccucgaacaggua

SEQ ID NO: 1106415 - RNA, 19 nt, Artificial Sequence
  Description of Artificial Sequence: Synthetic oligonucleotide
gcauuaucuggaugugauu

SEQ ID NO: 1106416 - RNA, 19 nt, Artificial Sequence
  Description of Artificial Sequence: Synthetic oligonucleotide
gcugcgccauugccgcccc

SEQ ID NO: 1106417 - RNA, 19 nt, Artificial Sequence
  Description of Artificial Sequence: Synthetic oligonucleotide
gcccgcaacauuagguaua

SEQ ID NO: 1106418 - RNA, 19 nt, Artificial Sequence
  Description of Artificial Sequence: Synthetic oligonucleotide
ccguugcauuuauuaggca

SEQ ID NO: 1106419 - RNA, 19 nt, Artificial Sequence
  Description of Artificial Sequence: Synthetic oligonucleotide
ccaaagcuucuugcccaug

SEQ ID NO: 1106420 - RNA, 19 nt, Artificial Sequence
  Description of Artificial Sequence: Synthetic oligonucleotide
cagcuccauaucggcaaaa

SEQ ID NO: 1106421 - RNA, 19 nt, Artificial Sequence
  Description of Artificial Sequence: Synthetic oligonucleotide
gagcucgguucuugccaau

SEQ ID NO: 1106422 - RNA, 19 nt, Artificial Sequence
  Description of Artificial Sequence: Synthetic oligonucleotide
ggucguacuucuguuccuu

SEQ ID NO: 1106423 - RNA, 19 nt, Artificial Sequence
  Description of Artificial Sequence: Synthetic oligonucleotide
ccauaucggcaaaauucau

SEQ ID NO: 1106424 - RNA, 19 nt, Artificial Sequence
  Description of Artificial Sequence: Synthetic oligonucleotide
ccgcaacauuagguauagg

SEQ ID NO: 1106425 - RNA, 19 nt, Artificial Sequence
  Description of Artificial Sequence: Synthetic oligonucleotide
guuucccgugcugcgccau

SEQ ID NO: 1106426 - RNA, 19 nt, Artificial Sequence
  Description of Artificial Sequence: Synthetic oligonucleotide
ccgccccaguccagcguac

SEQ ID NO: 1106427 - RNA, 19 nt, Artificial Sequence
  Description of Artificial Sequence: Synthetic oligonucleotide
gggcggcaucuuaccacuc

SEQ ID NO: 1106428 - RNA, 19 nt, Artificial Sequence
  Description of Artificial Sequence: Synthetic oligonucleotide
cuucuccgcugaccugcuu

SEQ ID NO: 1106429 - RNA, 19 nt, Artificial Sequence
  Description of Artificial Sequence: Synthetic oligonucleotide
cggucguacuucuguuccu

SEQ ID NO: 1106430 - RNA, 19 nt, Artificial Sequence
  Description of Artificial Sequence: Synthetic oligonucleotide
aacauuauaauuuaugugg

SEQ ID NO: 1106431 - RNA, 19 nt, Artificial Sequence
  Description of Artificial Sequence: Synthetic oligonucleotide
auaguuacaaauuaaaggc

SEQ ID NO: 1106432 - RNA, 19 nt, Artificial Sequence
  Description of Artificial Sequence: Synthetic oligonucleotide
uauaguuacaaauuaaagg

SEQ ID NO: 1106433 - RNA, 19 nt, Artificial Sequence
  Description of Artificial Sequence: Synthetic oligonucleotide
aauaauaccuuuauucucc

SEQ ID NO: 1106434 - RNA, 19 nt, Artificial Sequence
  Description of Artificial Sequence: Synthetic oligonucleotide
aaauaaucaaacugagggc

SEQ ID NO: 1106435 - RNA, 19 nt, Artificial Sequence
  Description of Artificial Sequence: Synthetic oligonucleotide
aauacuuacuguuacuguc

SEQ ID NO: 1106436 - RNA, 19 nt, Artificial Sequence
  Description of Artificial Sequence: Synthetic oligonucleotide
ucauauauagucuacaagu

SEQ ID NO: 1106437 - RNA, 19 nt, Artificial Sequence
  Description of Artificial Sequence: Synthetic oligonucleotide
acuauuuucacauguugcc

SEQ ID NO: 1106438 - RNA, 19 nt, Artificial Sequence
  Description of Artificial Sequence: Synthetic oligonucleotide
gaucuuaucacccuccugg

SEQ ID NO: 1106439 - RNA, 19 nt, Artificial Sequence
  Description of Artificial Sequence: Synthetic oligonucleotide
uuuaaguauaccuauaauc

SEQ ID NO: 1106440 - RNA, 19 nt, Artificial Sequence
  Description of Artificial Sequence: Synthetic oligonucleotide
aggagcaucauauauaguc

SEQ ID NO: 1106441 - RNA, 19 nt, Artificial Sequence
  Description of Artificial Sequence: Synthetic oligonucleotide
gaauauuagagucaguaug

SEQ ID NO: 1106442 - RNA, 19 nt, Artificial Sequence
  Description of Artificial Sequence: Synthetic oligonucleotide
aaacauuauaauuuaugug

SEQ ID NO: 1106443 - RNA, 19 nt, Artificial Sequence
  Description of Artificial Sequence: Synthetic oligonucleotide
gaugcuuuuguccagagac

SEQ ID NO: 1106444 - RNA, 19 nt, Artificial Sequence
  Description of Artificial Sequence: Synthetic oligonucleotide
gauuuugcgaguuugagca

SEQ ID NO: 1106445 - RNA, 19 nt, Artificial Sequence
  Description of Artificial Sequence: Synthetic oligonucleotide
uauaacaacggacacugag

SEQ ID NO: 1106446 - RNA, 19 nt, Artificial Sequence
  Description of Artificial Sequence: Synthetic oligonucleotide
agaucaacaagauagacaa

SEQ ID NO: 1106447 - RNA, 19 nt, Artificial Sequence
  Description of Artificial Sequence: Synthetic oligonucleotide
aauaaucaaacugagggcu

SEQ ID NO: 1106448 - RNA, 19 nt, Artificial Sequence
  Description of Artificial Sequence: Synthetic oligonucleotide
uaauuuauguggcaggagc

SEQ ID NO: 1106449 - RNA, 19 nt, Artificial Sequence
  Description of Artificial Sequence: Synthetic oligonucleotide
uauagguccauucugcacc

SEQ ID NO: 1106450 - RNA, 19 nt, Artificial Sequence
  Description of Artificial Sequence: Synthetic oligonucleotide
auuaauuacaugaaaucac

SEQ ID NO: 1106451 - RNA, 19 nt, Artificial Sequence
  Description of Artificial Sequence: Synthetic oligonucleotide
ucaauaaaguagaaacuag

SEQ ID NO: 1106452 - RNA, 19 nt, Artificial Sequence
  Description of Artificial Sequence: Synthetic oligonucleotide
uauuauuacccauauaauc

SEQ ID NO: 1106453 - RNA, 19 nt, Artificial Sequence
  Description of Artificial Sequence: Synthetic oligonucleotide
gucacuuuaguauaguucc

SEQ ID NO: 1106454 - RNA, 19 nt, Artificial Sequence
  Description of Artificial Sequence: Synthetic oligonucleotide
cuuacuguuacugucaccc

SEQ ID NO: 1106455 - RNA, 19 nt, Artificial Sequence
  Description of Artificial Sequence: Synthetic oligonucleotide
agauuuugcgaguuugagc

SEQ ID NO: 1106456 - RNA, 19 nt, Artificial Sequence
  Description of Artificial Sequence: Synthetic oligonucleotide
auuauaauuuauguggcag

SEQ ID NO: 1106457 - RNA, 19 nt, Artificial Sequence
  Description of Artificial Sequence: Synthetic oligonucleotide
uuuucgguaucucacgaag

SEQ ID NO: 1106458 - RNA, 19 nt, Artificial Sequence
  Description of Artificial Sequence: Synthetic oligonucleotide
aaucaaugaaacaaggagu

SEQ ID NO: 1106459 - RNA, 19 nt, Artificial Sequence
  Description of Artificial Sequence: Synthetic oligonucleotide
auuauuacccauauaaucu

SEQ ID NO: 1106460 - RNA, 19 nt, Artificial Sequence
  Description of Artificial Sequence: Synthetic oligonucleotide
uguacuauagguccauucu

SEQ ID NO: 1106461 - RNA, 19 nt, Artificial Sequence
  Description of Artificial Sequence: Synthetic oligonucleotide
ugcauuacgaaagaggucu

SEQ ID NO: 1106462 - RNA, 19 nt, Artificial Sequence
  Description of Artificial Sequence: Synthetic oligonucleotide
cucgauguacuauaggucc

SEQ ID NO: 1106463 - RNA, 19 nt, Artificial Sequence
  Description of Artificial Sequence: Synthetic oligonucleotide
aagcauaccagcuaagaaa

SEQ ID NO: 1106464 - RNA, 19 nt, Artificial Sequence
  Description of Artificial Sequence: Synthetic oligonucleotide
agugguaggaauauuagag

SEQ ID NO: 1106465 - RNA, 19 nt, Artificial Sequence
  Description of Artificial Sequence: Synthetic oligonucleotide
ugagcaguaaaguuuugag

SEQ ID NO: 1106466 - RNA, 19 nt, Artificial Sequence
  Description of Artificial Sequence: Synthetic oligonucleotide
aucucagaguaauacauag

SEQ ID NO: 1106467 - RNA, 19 nt, Artificial Sequence
  Description of Artificial Sequence: Synthetic oligonucleotide
aggaauaccacuugguucu

SEQ ID NO: 1106468 - RNA, 19 nt, Artificial Sequence
  Description of Artificial Sequence: Synthetic oligonucleotide
cagaguaauacauaguguc

SEQ ID NO: 1106469 - RNA, 19 nt, Artificial Sequence
  Description of Artificial Sequence: Synthetic oligonucleotide
auguuguacucucagggac

SEQ ID NO: 1106470 - RNA, 19 nt, Artificial Sequence
  Description of Artificial Sequence: Synthetic oligonucleotide
uuugaaaaccuguacucca

SEQ ID NO: 1106471 - RNA, 19 nt, Artificial Sequence
  Description of Artificial Sequence: Synthetic oligonucleotide
agaaauaguucacuggaca

SEQ ID NO: 1106472 - RNA, 19 nt, Artificial Sequence
  Description of Artificial Sequence: Synthetic oligonucleotide
uucaauuaauuacaugaaa

SEQ ID NO: 1106473 - RNA, 19 nt, Artificial Sequence
  Description of Artificial Sequence: Synthetic oligonucleotide
uacccauauaaucuuagga

SEQ ID NO: 1106474 - RNA, 19 nt, Artificial Sequence
  Description of Artificial Sequence: Synthetic oligonucleotide
ugagagaaauaguucacug

SEQ ID NO: 1106475 - RNA, 19 nt, Artificial Sequence
  Description of Artificial Sequence: Synthetic oligonucleotide
cauauauagucuacaagug

SEQ ID NO: 1106476 - RNA, 19 nt, Artificial Sequence
  Description of Artificial Sequence: Synthetic oligonucleotide
gaaauaguucacuggacac

SEQ ID NO: 1106477 - RNA, 19 nt, Artificial Sequence
  Description of Artificial Sequence: Synthetic oligonucleotide
aggucauacuuugaaaacc

SEQ ID NO: 1106478 - RNA, 19 nt, Artificial Sequence
  Description of Artificial Sequence: Synthetic oligonucleotide
uaacaacggacacugagga

SEQ ID NO: 1106479 - RNA, 19 nt, Artificial Sequence
  Description of Artificial Sequence: Synthetic oligonucleotide
acgaaagaggucuacagca

SEQ ID NO: 1106480 - RNA, 19 nt, Artificial Sequence
  Description of Artificial Sequence: Synthetic oligonucleotide
ucaacaagauagacaaagc

SEQ ID NO: 1106481 - RNA, 19 nt, Artificial Sequence
  Description of Artificial Sequence: Synthetic oligonucleotide
uguacucucagggacacag

SEQ ID NO: 1106482 - RNA, 19 nt, Artificial Sequence
  Description of Artificial Sequence: Synthetic oligonucleotide
ucuaucauggauucuuaac

SEQ ID NO: 1106483 - RNA, 19 nt, Artificial Sequence
  Description of Artificial Sequence: Synthetic oligonucleotide
caaacugcgaccaugguga

SEQ ID NO: 1106484 - RNA, 19 nt, Artificial Sequence
  Description of Artificial Sequence: Synthetic oligonucleotide
acugcgaccauggugaggg

SEQ ID NO: 1106485 - RNA, 19 nt, Artificial Sequence
  Description of Artificial Sequence: Synthetic oligonucleotide
aaagcauaccagcuaagaa

SEQ ID NO: 1106486 - RNA, 19 nt, Artificial Sequence
  Description of Artificial Sequence: Synthetic oligonucleotide
uucagccuuagucagcugc

SEQ ID NO: 1106487 - RNA, 19 nt, Artificial Sequence
  Description of Artificial Sequence: Synthetic oligonucleotide
ccuagaaagacacaguugc

SEQ ID NO: 1106488 - RNA, 19 nt, Artificial Sequence
  Description of Artificial Sequence: Synthetic oligonucleotide
uuucgguaucucacgaagg

SEQ ID NO: 1106489 - RNA, 19 nt, Artificial Sequence
  Description of Artificial Sequence: Synthetic oligonucleotide
aaaggggauauaacaacgg

SEQ ID NO: 1106490 - RNA, 19 nt, Artificial Sequence
  Description of Artificial Sequence: Synthetic oligonucleotide
uucgguaucucacgaaggc

SEQ ID NO: 1106491 - RNA, 19 nt, Artificial Sequence
  Description of Artificial Sequence: Synthetic oligonucleotide
aguaugaugaacauuaauu

SEQ ID NO: 1106492 - RNA, 19 nt, Artificial Sequence
  Description of Artificial Sequence: Synthetic oligonucleotide
aacauuacaaugaaucaau

SEQ ID NO: 1106493 - RNA, 19 nt, Artificial Sequence
  Description of Artificial Sequence: Synthetic oligonucleotide
acuaggaaaacauuacaau

SEQ ID NO: 1106494 - RNA, 19 nt, Artificial Sequence
  Description of Artificial Sequence: Synthetic oligonucleotide
agcucuauccaaacuaacc

SEQ ID NO: 1106495 - RNA, 19 nt, Artificial Sequence
  Description of Artificial Sequence: Synthetic oligonucleotide
uuacccauauaaucuuagg

SEQ ID NO: 1106496 - RNA, 19 nt, Artificial Sequence
  Description of Artificial Sequence: Synthetic oligonucleotide
aagaucaacaagauagaca

SEQ ID NO: 1106497 - RNA, 19 nt, Artificial Sequence
  Description of Artificial Sequence: Synthetic oligonucleotide
agggcugaaaucaauaaag

SEQ ID NO: 1106498 - RNA, 19 nt, Artificial Sequence
  Description of Artificial Sequence: Synthetic oligonucleotide
ugguaggaauauuagaguc

SEQ ID NO: 1106499 - RNA, 19 nt, Artificial Sequence
  Description of Artificial Sequence: Synthetic oligonucleotide
acccauauaaucuuaggaa

SEQ ID NO: 1106500 - RNA, 19 nt, Artificial Sequence
  Description of Artificial Sequence: Synthetic oligonucleotide
auguacuauagguccauuc

SEQ ID NO: 1106501 - RNA, 19 nt, Artificial Sequence
  Description of Artificial Sequence: Synthetic oligonucleotide
auagcuacaggaauaccac

SEQ ID NO: 1106502 - RNA, 19 nt, Artificial Sequence
  Description of Artificial Sequence: Synthetic oligonucleotide
ucuacaagugguaggaaua

SEQ ID NO: 1106503 - RNA, 19 nt, Artificial Sequence
  Description of Artificial Sequence: Synthetic oligonucleotide
cuaucauggauucuuaaca

SEQ ID NO: 1106504 - RNA, 19 nt, Artificial Sequence
  Description of Artificial Sequence: Synthetic oligonucleotide
aagauuuugcgaguuugag

SEQ ID NO: 1106505 - RNA, 19 nt, Artificial Sequence
  Description of Artificial Sequence: Synthetic oligonucleotide
aagugguaggaauauuaga

SEQ ID NO: 1106506 - RNA, 19 nt, Artificial Sequence
  Description of Artificial Sequence: Synthetic oligonucleotide
uuauguggcaggagcauca

SEQ ID NO: 1106507 - RNA, 19 nt, Artificial Sequence
  Description of Artificial Sequence: Synthetic oligonucleotide
auaacaacggacacugagg

SEQ ID NO: 1106508 - RNA, 19 nt, Artificial Sequence
  Description of Artificial Sequence: Synthetic oligonucleotide
aaggggauauaacaacgga

SEQ ID NO: 1106509 - RNA, 19 nt, Artificial Sequence
  Description of Artificial Sequence: Synthetic oligonucleotide
ugagugagagaaauaguuc

SEQ ID NO: 1106510 - RNA, 19 nt, Artificial Sequence
  Description of Artificial Sequence: Synthetic oligonucleotide
uuauuggcaguucuaguaa

SEQ ID NO: 1106511 - RNA, 19 nt, Artificial Sequence
  Description of Artificial Sequence: Synthetic oligonucleotide
ugaagcaaacaauaucuau

SEQ ID NO: 1106512 - RNA, 19 nt, Artificial Sequence
  Description of Artificial Sequence: Synthetic oligonucleotide
agaaucaucaggucauacu

SEQ ID NO: 1106513 - RNA, 19 nt, Artificial Sequence
  Description of Artificial Sequence: Synthetic oligonucleotide
uggccauuuaccgagagga

SEQ ID NO: 1106514 - RNA, 19 nt, Artificial Sequence
  Description of Artificial Sequence: Synthetic oligonucleotide
gucacuuuaaaucaagugu

SEQ ID NO: 1106515 - RNA, 19 nt, Artificial Sequence
  Description of Artificial Sequence: Synthetic oligonucleotide
uaccgagaggaucuuauca

SEQ ID NO: 1106516 - RNA, 19 nt, Artificial Sequence
  Description of Artificial Sequence: Synthetic oligonucleotide
guaggaauauuagagucag

SEQ ID NO: 1106517 - RNA, 19 nt, Artificial Sequence
  Description of Artificial Sequence: Synthetic oligonucleotide
agucucuuuauagcaauac

SEQ ID NO: 1106518 - RNA, 19 nt, Artificial Sequence
  Description of Artificial Sequence: Synthetic oligonucleotide
uggacacacuggaagacag

SEQ ID NO: 1106519 - RNA, 19 nt, Artificial Sequence
  Description of Artificial Sequence: Synthetic oligonucleotide
aacuguuagcaauggaaau

SEQ ID NO: 1106520 - RNA, 19 nt, Artificial Sequence
  Description of Artificial Sequence: Synthetic oligonucleotide
aacuaggaaaacauuacaa

SEQ ID NO: 1106521 - RNA, 19 nt, Artificial Sequence
  Description of Artificial Sequence: Synthetic oligonucleotide
acggacacugaggaaaucc

SEQ ID NO: 1106522 - RNA, 19 nt, Artificial Sequence
  Description of Artificial Sequence: Synthetic oligonucleotide
gaugccaggaaauaaucaa

SEQ ID NO: 1106523 - RNA, 19 nt, Artificial Sequence
  Description of Artificial Sequence: Synthetic oligonucleotide
uuuaccgagaggaucuuau

SEQ ID NO: 1106524 - RNA, 19 nt, Artificial Sequence
  Description of Artificial Sequence: Synthetic oligonucleotide
uuaaaucaaguguuggcua

SEQ ID NO: 1106525 - RNA, 19 nt, Artificial Sequence
  Description of Artificial Sequence: Synthetic oligonucleotide
cuuuauagcaauacuugga

SEQ ID NO: 1106526 - RNA, 19 nt, Artificial Sequence
  Description of Artificial Sequence: Synthetic oligonucleotide
cuuaacauuauaguuacaa

SEQ ID NO: 1106527 - RNA, 19 nt, Artificial Sequence
  Description of Artificial Sequence: Synthetic oligonucleotide
uuagcuccuccuuucaugu

SEQ ID NO: 1106528 - RNA, 19 nt, Artificial Sequence
  Description of Artificial Sequence: Synthetic oligonucleotide
ucaucucacuccauguaug

SEQ ID NO: 1106529 - RNA, 19 nt, Artificial Sequence
  Description of Artificial Sequence: Synthetic oligonucleotide
gaaacaaggaguugguucu

SEQ ID NO: 1106530 - RNA, 19 nt, Artificial Sequence
  Description of Artificial Sequence: Synthetic oligonucleotide
aaacuaaccaaaaggcaga

SEQ ID NO: 1106531 - RNA, 19 nt, Artificial Sequence
  Description of Artificial Sequence: Synthetic oligonucleotide
guuacaggaagacugagcu

SEQ ID NO: 1106532 - RNA, 19 nt, Artificial Sequence
  Description of Artificial Sequence: Synthetic oligonucleotide
gucuuggccauuuaccgag

SEQ ID NO: 1106533 - RNA, 19 nt, Artificial Sequence
  Description of Artificial Sequence: Synthetic oligonucleotide
uguuuucgguaucucacga

SEQ ID NO: 1106534 - RNA, 19 nt, Artificial Sequence
  Description of Artificial Sequence: Synthetic oligonucleotide
aaagacacaguugcuggug

SEQ ID NO: 1106535 - RNA, 19 nt, Artificial Sequence
  Description of Artificial Sequence: Synthetic oligonucleotide
uguuguacucucagggaca

SEQ ID NO: 1106536 - RNA, 19 nt, Artificial Sequence
  Description of Artificial Sequence: Synthetic oligonucleotide
agagaccuugcuuugagaa

SEQ ID NO: 1106537 - RNA, 19 nt, Artificial Sequence
  Description of Artificial Sequence: Synthetic oligonucleotide
aauaucuauuagaauuaca

SEQ ID NO: 1106538 - RNA, 19 nt, Artificial Sequence
  Description of Artificial Sequence: Synthetic oligonucleotide
auucuuaacauuauaguua

SEQ ID NO: 1106539 - RNA, 19 nt, Artificial Sequence
  Description of Artificial Sequence: Synthetic oligonucleotide
gucaguaugaugaacauua

SEQ ID NO: 1106540 - RNA, 19 nt, Artificial Sequence
  Description of Artificial Sequence: Synthetic oligonucleotide
uaaccuauguuguacucuc

SEQ ID NO: 1106541 - RNA, 19 nt, Artificial Sequence
  Description of Artificial Sequence: Synthetic oligonucleotide
auuagaagauuuugcgagu

SEQ ID NO: 1106542 - RNA, 19 nt, Artificial Sequence
  Description of Artificial Sequence: Synthetic oligonucleotide
aucacucacacagaaaacu

SEQ ID NO: 1106543 - RNA, 19 nt, Artificial Sequence
  Description of Artificial Sequence: Synthetic oligonucleotide
uucaucucacuccauguau

SEQ ID NO: 1106544 - RNA, 19 nt, Artificial Sequence
  Description of Artificial Sequence: Synthetic oligonucleotide
agggacacagcauauccug

SEQ ID NO: 1106545 - RNA, 19 nt, Artificial Sequence
  Description of Artificial Sequence: Synthetic oligonucleotide
ugccauagacuauaauuac

SEQ ID NO: 1106546 - RNA, 19 nt, Artificial Sequence
  Description of Artificial Sequence: Synthetic oligonucleotide
uguaaucagucacuuuaaa

SEQ ID NO: 1106547 - RNA, 19 nt, Artificial Sequence
  Description of Artificial Sequence: Synthetic oligonucleotide
guacuauagguccauucug

SEQ ID NO: 1106548 - RNA, 19 nt, Artificial Sequence
  Description of Artificial Sequence: Synthetic oligonucleotide
auagguccauucugcaccg

SEQ ID NO: 1106549 - RNA, 19 nt, Artificial Sequence
  Description of Artificial Sequence: Synthetic oligonucleotide
caggaauaccacuugguuc

SEQ ID NO: 1106550 - RNA, 19 nt, Artificial Sequence
  Description of Artificial Sequence: Synthetic oligonucleotide
ucaaagcauaccagcuaag

SEQ ID NO: 1106551 - RNA, 19 nt, Artificial Sequence
  Description of Artificial Sequence: Synthetic oligonucleotide
uuggccauuuaccgagagg

SEQ ID NO: 1106552 - RNA, 19 nt, Artificial Sequence
  Description of Artificial Sequence: Synthetic oligonucleotide
uccauguaugggaugacau

SEQ ID NO: 1106553 - RNA, 19 nt, Artificial Sequence
  Description of Artificial Sequence: Synthetic oligonucleotide
aggaaauaaucaaacugag

SEQ ID NO: 1106554 - RNA, 19 nt, Artificial Sequence
  Description of Artificial Sequence: Synthetic oligonucleotide
cuguuuucgguaucucacg

SEQ ID NO: 1106555 - RNA, 19 nt, Artificial Sequence
  Description of Artificial Sequence: Synthetic oligonucleotide
ugccuagaaagacacaguu

SEQ ID NO: 1106556 - RNA, 19 nt, Artificial Sequence
  Description of Artificial Sequence: Synthetic oligonucleotide
auguucaucucacuccaug

SEQ ID NO: 1106557 - RNA, 19 nt, Artificial Sequence
  Description of Artificial Sequence: Synthetic oligonucleotide
uuggcuauguagagaagaa

SEQ ID NO: 1106558 - RNA, 19 nt, Artificial Sequence
  Description of Artificial Sequence: Synthetic oligonucleotide
augacauccaagaauuuca

SEQ ID NO: 1106559 - RNA, 19 nt, Artificial Sequence
  Description of Artificial Sequence: Synthetic oligonucleotide
ucucagaguaauacauagu

SEQ ID NO: 1106560 - RNA, 19 nt, Artificial Sequence
  Description of Artificial Sequence: Synthetic oligonucleotide
uucaccucgauguacuaua

SEQ ID NO: 1106561 - RNA, 19 nt, Artificial Sequence
  Description of Artificial Sequence: Synthetic oligonucleotide
ugguucaauuaauuacaug

SEQ ID NO: 1106562 - RNA, 19 nt, Artificial Sequence
  Description of Artificial Sequence: Synthetic oligonucleotide
agaaagcaugccaauuaac

SEQ ID NO: 1106563 - RNA, 19 nt, Artificial Sequence
  Description of Artificial Sequence: Synthetic oligonucleotide
agaccuugcuuugagaacu

SEQ ID NO: 1106564 - RNA, 19 nt, Artificial Sequence
  Description of Artificial Sequence: Synthetic oligonucleotide
auuacccauauaaucuuag

SEQ ID NO: 1106565 - RNA, 19 nt, Artificial Sequence
  Description of Artificial Sequence: Synthetic oligonucleotide
aaagcucuauccaaacuaa

SEQ ID NO: 1106566 - RNA, 19 nt, Artificial Sequence
  Description of Artificial Sequence: Synthetic oligonucleotide
aaucaaguguuggcuaugu

SEQ ID NO: 1106567 - RNA, 19 nt, Artificial Sequence
  Description of Artificial Sequence: Synthetic oligonucleotide
ugcgaguuugagcaguaaa

SEQ ID NO: 1106568 - RNA, 19 nt, Artificial Sequence
  Description of Artificial Sequence: Synthetic oligonucleotide
agcaucauauauagucuac

SEQ ID NO: 1106569 - RNA, 19 nt, Artificial Sequence
  Description of Artificial Sequence: Synthetic oligonucleotide
uacuguuacugucacccaa

SEQ ID NO: 1106570 - RNA, 19 nt, Artificial Sequence
  Description of Artificial Sequence: Synthetic oligonucleotide
uacuuacuguuacugucac

SEQ ID NO: 1106571 - RNA, 19 nt, Artificial Sequence
  Description of Artificial Sequence: Synthetic oligonucleotide
aagcucuauccaaacuaac

SEQ ID NO: 1106572 - RNA, 19 nt, Artificial Sequence
  Description of Artificial Sequence: Synthetic oligonucleotide
aguuugagcaguaaaguuu

SEQ ID NO: 1106573 - RNA, 19 nt, Artificial Sequence
  Description of Artificial Sequence: Synthetic oligonucleotide
ccuauaaucaauuuucaaa

SEQ ID NO: 1106574 - RNA, 19 nt, Artificial Sequence
  Description of Artificial Sequence: Synthetic oligonucleotide
auaauuuauguggcaggag

SEQ ID NO: 1106575 - RNA, 19 nt, Artificial Sequence
  Description of Artificial Sequence: Synthetic oligonucleotide
ucaccucgauguacuauag

SEQ ID NO: 1106576 - RNA, 19 nt, Artificial Sequence
  Description of Artificial Sequence: Synthetic oligonucleotide
ucgauguacuauaggucca

SEQ ID NO: 1106577 - RNA, 19 nt, Artificial Sequence
  Description of Artificial Sequence: Synthetic oligonucleotide
acaggaauaccacuugguu

SEQ ID NO: 1106578 - RNA, 19 nt, Artificial Sequence
  Description of Artificial Sequence: Synthetic oligonucleotide
uaguuccugccauagacua

SEQ ID NO: 1106579 - RNA, 19 nt, Artificial Sequence
  Description of Artificial Sequence: Synthetic oligonucleotide
aggaguugguucuuugaga

SEQ ID NO: 1106580 - RNA, 19 nt, Artificial Sequence
  Description of Artificial Sequence: Synthetic oligonucleotide
auuacgaaagaggucuaca

SEQ ID NO: 1106581 - RNA, 19 nt, Artificial Sequence
  Description of Artificial Sequence: Synthetic oligonucleotide
ucaaugaaacaaggaguug

SEQ ID NO: 1106582 - RNA, 19 nt, Artificial Sequence
  Description of Artificial Sequence: Synthetic oligonucleotide
uacuuuaaguauaccuaua

SEQ ID NO: 1106583 - RNA, 19 nt, Artificial Sequence
  Description of Artificial Sequence: Synthetic oligonucleotide
cugccauagacuauaauua

SEQ ID NO: 1106584 - RNA, 19 nt, Artificial Sequence
  Description of Artificial Sequence: Synthetic oligonucleotide
guaauacauagugucacca

SEQ ID NO: 1106585 - RNA, 19 nt, Artificial Sequence
  Description of Artificial Sequence: Synthetic oligonucleotide
uucauguagcacagcuagc

SEQ ID NO: 1106586 - RNA, 19 nt, Artificial Sequence
  Description of Artificial Sequence: Synthetic oligonucleotide
uauuggcaguucuaguaaa

SEQ ID NO: 1106587 - RNA, 19 nt, Artificial Sequence
  Description of Artificial Sequence: Synthetic oligonucleotide
gaacuguuagcaauggaaa

SEQ ID NO: 1106588 - RNA, 19 nt, Artificial Sequence
  Description of Artificial Sequence: Synthetic oligonucleotide
accuauaaucaauuuucaa

SEQ ID NO: 1106589 - RNA, 19 nt, Artificial Sequence
  Description of Artificial Sequence: Synthetic oligonucleotide
agaguaauacauaguguca

SEQ ID NO: 1106590 - RNA, 19 nt, Artificial Sequence
  Description of Artificial Sequence: Synthetic oligonucleotide
gcaccgguaaccuauguug

SEQ ID NO: 1106591 - RNA, 19 nt, Artificial Sequence
  Description of Artificial Sequence: Synthetic oligonucleotide
acucacacagaaaacuuca

SEQ ID NO: 1106592 - RNA, 19 nt, Artificial Sequence
  Description of Artificial Sequence: Synthetic oligonucleotide
uugccugugaguagauggu

SEQ ID NO: 1106593 - RNA, 19 nt, Artificial Sequence
  Description of Artificial Sequence: Synthetic oligonucleotide
aggcagagagaaagcaugc

SEQ ID NO: 1106594 - RNA, 19 nt, Artificial Sequence
  Description of Artificial Sequence: Synthetic oligonucleotide
agcauauccugcauuacga

SEQ ID NO: 1106595 - RNA, 19 nt, Artificial Sequence
  Description of Artificial Sequence: Synthetic oligonucleotide
aggucuacagcauccuggu

SEQ ID NO: 1106596 - RNA, 19 nt, Artificial Sequence
  Description of Artificial Sequence: Synthetic oligonucleotide
uguuagcaauggaaauacu

SEQ ID NO: 1106597 - RNA, 19 nt, Artificial Sequence
  Description of Artificial Sequence: Synthetic oligonucleotide
gcucuauccaaacuaacca

SEQ ID NO: 1106598 - RNA, 19 nt, Artificial Sequence
  Description of Artificial Sequence: Synthetic oligonucleotide
aguagaugccaggaaauaa

SEQ ID NO: 1106599 - RNA, 19 nt, Artificial Sequence
  Description of Artificial Sequence: Synthetic oligonucleotide
gagggcaaacacugguagc

SEQ ID NO: 1106600 - RNA, 19 nt, Artificial Sequence
  Description of Artificial Sequence: Synthetic oligonucleotide
acaagugguaggaauauua

SEQ ID NO: 1106601 - RNA, 19 nt, Artificial Sequence
  Description of Artificial Sequence: Synthetic oligonucleotide
aguauaccuauaaucaauu

SEQ ID NO: 1106602 - RNA, 19 nt, Artificial Sequence
  Description of Artificial Sequence: Synthetic oligonucleotide
uguuggcuauguagagaag

SEQ ID NO: 1106603 - RNA, 19 nt, Artificial Sequence
  Description of Artificial Sequence: Synthetic oligonucleotide
aaccuguacuccauaaaau

SEQ ID NO: 1106604 - RNA, 19 nt, Artificial Sequence
  Description of Artificial Sequence: Synthetic oligonucleotide
uuuauguggcaggagcauc

SEQ ID NO: 1106605 - RNA, 19 nt, Artificial Sequence
  Description of Artificial Sequence: Synthetic oligonucleotide
gguguagcagguucuuuag

SEQ ID NO: 1106606 - RNA, 19 nt, Artificial Sequence
  Description of Artificial Sequence: Synthetic oligonucleotide
ugggugauagcugaauuuu

SEQ ID NO: 1106607 - RNA, 19 nt, Artificial Sequence
  Description of Artificial Sequence: Synthetic oligonucleotide
auaaucaaacugagggcug

SEQ ID NO: 1106608 - RNA, 19 nt, Artificial Sequence
  Description of Artificial Sequence: Synthetic oligonucleotide
aaacugcgaccauggugag

SEQ ID NO: 1106609 - RNA, 19 nt, Artificial Sequence
  Description of Artificial Sequence: Synthetic oligonucleotide
ggggauauaacaacggaca

SEQ ID NO: 1106610 - RNA, 19 nt, Artificial Sequence
  Description of Artificial Sequence: Synthetic oligonucleotide
guucaauuaauuacaugaa

SEQ ID NO: 1106611 - RNA, 19 nt, Artificial Sequence
  Description of Artificial Sequence: Synthetic oligonucleotide
cagagagaaagcaugccaa

SEQ ID NO: 1106612 - RNA, 19 nt, Artificial Sequence
  Description of Artificial Sequence: Synthetic oligonucleotide
agcaugccaauuaacaaaa

SEQ ID NO: 1106613 - RNA, 19 nt, Artificial Sequence
  Description of Artificial Sequence: Synthetic oligonucleotide
uucuauuauuacccauaua

SEQ ID NO: 1106614 - RNA, 19 nt, Artificial Sequence
  Description of Artificial Sequence: Synthetic oligonucleotide
ucgguaucucacgaaggcc

SEQ ID NO: 1106615 - RNA, 19 nt, Artificial Sequence
  Description of Artificial Sequence: Synthetic oligonucleotide
agcaauacuuggaucucag

SEQ ID NO: 1106616 - RNA, 19 nt, Artificial Sequence
  Description of Artificial Sequence: Synthetic oligonucleotide
agcaauggaaauacuuacu

SEQ ID NO: 1106617 - RNA, 19 nt, Artificial Sequence
  Description of Artificial Sequence: Synthetic oligonucleotide
gugauucuauuauuaccca

SEQ ID NO: 1106618 - RNA, 19 nt, Artificial Sequence
  Description of Artificial Sequence: Synthetic oligonucleotide
ggaguugguucuuugagaa

SEQ ID NO: 1106619 - RNA, 19 nt, Artificial Sequence
  Description of Artificial Sequence: Synthetic oligonucleotide
aucuuaucacccuccugga

SEQ ID NO: 1106620 - RNA, 19 nt, Artificial Sequence
  Description of Artificial Sequence: Synthetic oligonucleotide
gagcaucauauauagucua

SEQ ID NO: 1106621 - RNA, 19 nt, Artificial Sequence
  Description of Artificial Sequence: Synthetic oligonucleotide
uagcuacaggaauaccacu

SEQ ID NO: 1106622 - RNA, 19 nt, Artificial Sequence
  Description of Artificial Sequence: Synthetic oligonucleotide
ucugcaccgguaaccuaug

SEQ ID NO: 1106623 - RNA, 19 nt, Artificial Sequence
  Description of Artificial Sequence: Synthetic oligonucleotide
cauauccugcauuacgaaa

SEQ ID NO: 1106624 - RNA, 19 nt, Artificial Sequence
  Description of Artificial Sequence: Synthetic oligonucleotide
gcgaguuugagcaguaaag

SEQ ID NO: 1106625 - RNA, 19 nt, Artificial Sequence
  Description of Artificial Sequence: Synthetic oligonucleotide
uuugcgaguuugagcagua

SEQ ID NO: 1106626 - RNA, 19 nt, Artificial Sequence
  Description of Artificial Sequence: Synthetic oligonucleotide
ccuauguuguacucucagg

SEQ ID NO: 1106627 - RNA, 19 nt, Artificial Sequence
  Description of Artificial Sequence: Synthetic oligonucleotide
ugguuacaggaagacugag

SEQ ID NO: 1106628 - RNA, 19 nt, Artificial Sequence
  Description of Artificial Sequence: Synthetic oligonucleotide
guaugggaugacauccaag

SEQ ID NO: 1106629 - RNA, 19 nt, Artificial Sequence
  Description of Artificial Sequence: Synthetic oligonucleotide
auaccuuuauucucccauu

SEQ ID NO: 1106630 - RNA, 19 nt, Artificial Sequence
  Description of Artificial Sequence: Synthetic oligonucleotide
agcuuauucuccaaauaau

SEQ ID NO: 1106631 - RNA, 19 nt, Artificial Sequence
  Description of Artificial Sequence: Synthetic oligonucleotide
cauagugucaccagucacu

SEQ ID NO: 1106632 - RNA, 19 nt, Artificial Sequence
  Description of Artificial Sequence: Synthetic oligonucleotide
uagaagauuuugcgaguuu

SEQ ID NO: 1106633 - RNA, 19 nt, Artificial Sequence
  Description of Artificial Sequence: Synthetic oligonucleotide
uuaccgagaggaucuuauc

SEQ ID NO: 1106634 - RNA, 19 nt, Artificial Sequence
  Description of Artificial Sequence: Synthetic oligonucleotide
cuuggccauuuaccgagag

SEQ ID NO: 1106635 - RNA, 19 nt, Artificial Sequence
  Description of Artificial Sequence: Synthetic oligonucleotide
auuuauguggcaggagcau

SEQ ID NO: 1106636 - RNA, 19 nt, Artificial Sequence
  Description of Artificial Sequence: Synthetic oligonucleotide
ugcaccgguaaccuauguu

SEQ ID NO: 1106637 - RNA, 19 nt, Artificial Sequence
  Description of Artificial Sequence: Synthetic oligonucleotide
gcuacaggaauaccacuug

SEQ ID NO: 1106638 - RNA, 19 nt, Artificial Sequence
  Description of Artificial Sequence: Synthetic oligonucleotide
aacugcgaccauggugagg

SEQ ID NO: 1106639 - RNA, 19 nt, Artificial Sequence
  Description of Artificial Sequence: Synthetic oligonucleotide
caaagcauaccagcuaaga

SEQ ID NO: 1106640 - RNA, 19 nt, Artificial Sequence
  Description of Artificial Sequence: Synthetic oligonucleotide
cauuacgaaagaggucuac

SEQ ID NO: 1106641 - RNA, 19 nt, Artificial Sequence
  Description of Artificial Sequence: Synthetic oligonucleotide
cuauuauuacccauauaau

SEQ ID NO: 1106642 - RNA, 19 nt, Artificial Sequence
  Description of Artificial Sequence: Synthetic oligonucleotide
caccucgauguacuauagg

SEQ ID NO: 1106643 - RNA, 19 nt, Artificial Sequence
  Description of Artificial Sequence: Synthetic oligonucleotide
gguaggaauauuagaguca

SEQ ID NO: 1106644 - RNA, 19 nt, Artificial Sequence
  Description of Artificial Sequence: Synthetic oligonucleotide
ccaaacugcgaccauggug

SEQ ID NO: 1106645 - RNA, 19 nt, Artificial Sequence
  Description of Artificial Sequence: Synthetic oligonucleotide
caaagucccaaguuuaaau

SEQ ID NO: 1106646 - RNA, 19 nt, Artificial Sequence
  Description of Artificial Sequence: Synthetic oligonucleotide
gugguaggaauauuagagu

SEQ ID NO: 1106647 - RNA, 19 nt, Artificial Sequence
  Description of Artificial Sequence: Synthetic oligonucleotide
guuguacucucagggacac

SEQ ID NO: 1106648 - RNA, 19 nt, Artificial Sequence
  Description of Artificial Sequence: Synthetic oligonucleotide
gaaagacacaguugcuggu

SEQ ID NO: 1106649 - RNA, 19 nt, Artificial Sequence
  Description of Artificial Sequence: Synthetic oligonucleotide
agcuacaggaauaccacuu

SEQ ID NO: 1106650 - RNA, 19 nt, Artificial Sequence
  Description of Artificial Sequence: Synthetic oligonucleotide
ugcgaccauggugagggca

SEQ ID NO: 1106651 - RNA, 19 nt, Artificial Sequence
  Description of Artificial Sequence: Synthetic oligonucleotide
gcaguucuaguaaaaugug

SEQ ID NO: 1106652 - RNA, 19 nt, Artificial Sequence
  Description of Artificial Sequence: Synthetic oligonucleotide
guuuucgguaucucacgaa

SEQ ID NO: 1106653 - RNA, 19 nt, Artificial Sequence
  Description of Artificial Sequence: Synthetic oligonucleotide
guucaucucacuccaugua

SEQ ID NO: 1106654 - RNA, 19 nt, Artificial Sequence
  Description of Artificial Sequence: Synthetic oligonucleotide
ccgagaggaucuuaucacc

SEQ ID NO: 1106655 - RNA, 19 nt, Artificial Sequence
  Description of Artificial Sequence: Synthetic oligonucleotide
uaucucacgaaggcccaaa

SEQ ID NO: 1106656 - RNA, 19 nt, Artificial Sequence
  Description of Artificial Sequence: Synthetic oligonucleotide
augguucaauuaauuacau

SEQ ID NO: 1106657 - RNA, 19 nt, Artificial Sequence
  Description of Artificial Sequence: Synthetic oligonucleotide
cuccugacagugguaaauc

SEQ ID NO: 1106658 - RNA, 19 nt, Artificial Sequence
  Description of Artificial Sequence: Synthetic oligonucleotide
cgagaggaucuuaucaccc

SEQ ID NO: 1106659 - RNA, 19 nt, Artificial Sequence
  Description of Artificial Sequence: Synthetic oligonucleotide
gucuacaagugguaggaau

SEQ ID NO: 1106660 - RNA, 19 nt, Artificial Sequence
  Description of Artificial Sequence: Synthetic oligonucleotide
ccugacagugguaaaucuc

SEQ ID NO: 1106661 - RNA, 19 nt, Artificial Sequence
  Description of Artificial Sequence: Synthetic oligonucleotide
auuggcaguucuaguaaaa

SEQ ID NO: 1106662 - RNA, 19 nt, Artificial Sequence
  Description of Artificial Sequence: Synthetic oligonucleotide
guaaccuauguuguacucu

SEQ ID NO: 1106663 - RNA, 19 nt, Artificial Sequence
  Description of Artificial Sequence: Synthetic oligonucleotide
aaccuauguuguacucuca

SEQ ID NO: 1106664 - RNA, 19 nt, Artificial Sequence
  Description of Artificial Sequence: Synthetic oligonucleotide
agucaguaugaugaacauu

SEQ ID NO: 1106665 - RNA, 19 nt, Artificial Sequence
  Description of Artificial Sequence: Synthetic oligonucleotide
guagaugccaggaaauaau

SEQ ID NO: 1106666 - RNA, 19 nt, Artificial Sequence
  Description of Artificial Sequence: Synthetic oligonucleotide
gagucaguaugaugaacau

SEQ ID NO: 1106667 - RNA, 19 nt, Artificial Sequence
  Description of Artificial Sequence: Synthetic oligonucleotide
aaacaaggaguugguucuu

SEQ ID NO: 1106668 - RNA, 19 nt, Artificial Sequence
  Description of Artificial Sequence: Synthetic oligonucleotide
accgguaaccuauguugua

SEQ ID NO: 1106669 - RNA, 19 nt, Artificial Sequence
  Description of Artificial Sequence: Synthetic oligonucleotide
caagauagacaaagcucua

SEQ ID NO: 1106670 - RNA, 19 nt, Artificial Sequence
  Description of Artificial Sequence: Synthetic oligonucleotide
uuccugccauagacuauaa

SEQ ID NO: 1106671 - RNA, 19 nt, Artificial Sequence
  Description of Artificial Sequence: Synthetic oligonucleotide
gugagagaaauaguucacu

SEQ ID NO: 1106672 - RNA, 19 nt, Artificial Sequence
  Description of Artificial Sequence: Synthetic oligonucleotide
aucaaguguuggcuaugua

SEQ ID NO: 1106673 - RNA, 19 nt, Artificial Sequence
  Description of Artificial Sequence: Synthetic oligonucleotide
gccauuuaccgagaggauc

SEQ ID NO: 1106674 - RNA, 19 nt, Artificial Sequence
  Description of Artificial Sequence: Synthetic oligonucleotide
guauaccuauaaucaauuu

SEQ ID NO: 1106675 - RNA, 19 nt, Artificial Sequence
  Description of Artificial Sequence: Synthetic oligonucleotide
ggucuuggccauuuaccga

SEQ ID NO: 1106676 - RNA, 19 nt, Artificial Sequence
  Description of Artificial Sequence: Synthetic oligonucleotide
ucccgcccagcuuauucuc

SEQ ID NO: 1106677 - RNA, 19 nt, Artificial Sequence
  Description of Artificial Sequence: Synthetic oligonucleotide
caguaaaguuuugagugua

SEQ ID NO: 1106678 - RNA, 19 nt, Artificial Sequence
  Description of Artificial Sequence: Synthetic oligonucleotide
cuuggaucucagaguaaua

SEQ ID NO: 1106679 - RNA, 19 nt, Artificial Sequence
  Description of Artificial Sequence: Synthetic oligonucleotide
auaccacuugguucuccuu

SEQ ID NO: 1106680 - RNA, 19 nt, Artificial Sequence
  Description of Artificial Sequence: Synthetic oligonucleotide
agccuuagucagcugccua

SEQ ID NO: 1106681 - RNA, 19 nt, Artificial Sequence
  Description of Artificial Sequence: Synthetic oligonucleotide
ggauauaacaacggacacu

SEQ ID NO: 1106682 - RNA, 19 nt, Artificial Sequence
  Description of Artificial Sequence: Synthetic oligonucleotide
gcaguaaaguuuugagugu

SEQ ID NO: 1106683 - RNA, 19 nt, Artificial Sequence
  Description of Artificial Sequence: Synthetic oligonucleotide
auuuaccgagaggaucuua

SEQ ID NO: 1106684 - RNA, 19 nt, Artificial Sequence
  Description of Artificial Sequence: Synthetic oligonucleotide
ccgguaaccuauguuguac

SEQ ID NO: 1106685 - RNA, 19 nt, Artificial Sequence
  Description of Artificial Sequence: Synthetic oligonucleotide
acucuaucauggauucuua

SEQ ID NO: 1106686 - RNA, 19 nt, Artificial Sequence
  Description of Artificial Sequence: Synthetic oligonucleotide
cauucugcaccgguaaccu

SEQ ID NO: 1106687 - RNA, 19 nt, Artificial Sequence
  Description of Artificial Sequence: Synthetic oligonucleotide
cacucuaucauggauucuu

SEQ ID NO: 1106688 - RNA, 19 nt, Artificial Sequence
  Description of Artificial Sequence: Synthetic oligonucleotide
auucugcaccgguaaccua

SEQ ID NO: 1106689 - RNA, 19 nt, Artificial Sequence
  Description of Artificial Sequence: Synthetic oligonucleotide
cccauuagaauuagaagau

SEQ ID NO: 1106690 - RNA, 19 nt, Artificial Sequence
  Description of Artificial Sequence: Synthetic oligonucleotide
gcauauccugcauuacgaa

SEQ ID NO: 1106691 - RNA, 19 nt, Artificial Sequence
  Description of Artificial Sequence: Synthetic oligonucleotide
caccgguaaccuauguugu

SEQ ID NO: 1106692 - RNA, 19 nt, Artificial Sequence
  Description of Artificial Sequence: Synthetic oligonucleotide
aguuccugccauagacuau

SEQ ID NO: 1106693 - RNA, 19 nt, Artificial Sequence
  Description of Artificial Sequence: Synthetic oligonucleotide
uugcgaguuugagcaguaa

SEQ ID NO: 1106694 - RNA, 19 nt, Artificial Sequence
  Description of Artificial Sequence: Synthetic oligonucleotide
ggcccaaacugcgaccaug

SEQ ID NO: 1106695 - RNA, 19 nt, Artificial Sequence
  Description of Artificial Sequence: Synthetic oligonucleotide
cgaaggcccaaacugcgac

SEQ ID NO: 1106696 - RNA, 19 nt, Artificial Sequence
  Description of Artificial Sequence: Synthetic oligonucleotide
ggucuacagcauccuggug

SEQ ID NO: 1106697 - RNA, 19 nt, Artificial Sequence
  Description of Artificial Sequence: Synthetic oligonucleotide
acgaaggcccaaacugcga

SEQ ID NO: 1106698 - RNA, 19 nt, Artificial Sequence
  Description of Artificial Sequence: Synthetic oligonucleotide
cugccuagaaagacacagu

SEQ ID NO: 1106699 - RNA, 19 nt, Artificial Sequence
  Description of Artificial Sequence: Synthetic oligonucleotide
cagggacacagcauauccu

SEQ ID NO: 1106700 - RNA, 19 nt, Artificial Sequence
  Description of Artificial Sequence: Synthetic oligonucleotide
ggacacacuggaagacagc

SEQ ID NO: 1106701 - RNA, 19 nt, Artificial Sequence
  Description of Artificial Sequence: Synthetic oligonucleotide
gggcugaaaucaauaaagu

SEQ ID NO: 1106702 - RNA, 19 nt, Artificial Sequence
  Description of Artificial Sequence: Synthetic oligonucleotide
cccgcccagcuuauucucc

SEQ ID NO: 1106703 - RNA, 19 nt, Artificial Sequence
  Description of Artificial Sequence: Synthetic oligonucleotide
cugcgaccauggugagggc

SEQ ID NO: 1106704 - RNA, 19 nt, Artificial Sequence
  Description of Artificial Sequence: Synthetic oligonucleotide
gauguacuauagguccauu

SEQ ID NO: 1106705 - RNA, 19 nt, Artificial Sequence
  Description of Artificial Sequence: Synthetic oligonucleotide
aggcccaaacugcgaccau

SEQ ID NO: 1106706 - RNA, 19 nt, Artificial Sequence
  Description of Artificial Sequence: Synthetic oligonucleotide
ggaauaccacuugguucuc

SEQ ID NO: 1106707 - RNA, 19 nt, Artificial Sequence
  Description of Artificial Sequence: Synthetic oligonucleotide
cauguucaucucacuccau

SEQ ID NO: 1106708 - RNA, 19 nt, Artificial Sequence
  Description of Artificial Sequence: Synthetic oligonucleotide
gcauuacgaaagaggucua

SEQ ID NO: 1106709 - RNA, 19 nt, Artificial Sequence
  Description of Artificial Sequence: Synthetic oligonucleotide
ccauuagaauuagaagauu

SEQ ID NO: 1106710 - RNA, 19 nt, Artificial Sequence
  Description of Artificial Sequence: Synthetic oligonucleotide
cgguaaccuauguuguacu

SEQ ID NO: 1106711 - RNA, 19 nt, Artificial Sequence
  Description of Artificial Sequence: Synthetic oligonucleotide
ggccauuuaccgagaggau

SEQ ID NO: 1106712 - RNA, 19 nt, Artificial Sequence
  Description of Artificial Sequence: Synthetic oligonucleotide
cgauguacuauagguccau

SEQ ID NO: 1106713 - RNA, 19 nt, Artificial Sequence
  Description of Artificial Sequence: Synthetic oligonucleotide
uguacggaaaacuacucgg

SEQ ID NO: 1106714 - RNA, 19 nt, Artificial Sequence
  Description of Artificial Sequence: Synthetic oligonucleotide
ucugauauacuucugcaug

SEQ ID NO: 1106715 - RNA, 19 nt, Artificial Sequence
  Description of Artificial Sequence: Synthetic oligonucleotide
uugauagccaucuuaauga

SEQ ID NO: 1106716 - RNA, 19 nt, Artificial Sequence
  Description of Artificial Sequence: Synthetic oligonucleotide
agaacauucgaucuauggg

SEQ ID NO: 1106717 - RNA, 19 nt, Artificial Sequence
  Description of Artificial Sequence: Synthetic oligonucleotide
aacucgcuugcacugaagc

SEQ ID NO: 1106718 - RNA, 19 nt, Artificial Sequence
  Description of Artificial Sequence: Synthetic oligonucleotide
ucaacagccuuccagaaga

SEQ ID NO: 1106719 - RNA, 19 nt, Artificial Sequence
  Description of Artificial Sequence: Synthetic oligonucleotide
uguguauuccuuuaacaag

SEQ ID NO: 1106720 - RNA, 19 nt, Artificial Sequence
  Description of Artificial Sequence: Synthetic oligonucleotide
agauauuuagaccuaugag

SEQ ID NO: 1106721 - RNA, 19 nt, Artificial Sequence
  Description of Artificial Sequence: Synthetic oligonucleotide
uuggcuuagauauuuagac

SEQ ID NO: 1106722 - RNA, 19 nt, Artificial Sequence
  Description of Artificial Sequence: Synthetic oligonucleotide
uuuaacaagagugcugagg

SEQ ID NO: 1106723 - RNA, 19 nt, Artificial Sequence
  Description of Artificial Sequence: Synthetic oligonucleotide
aacaaugucugcucacagg

SEQ ID NO: 1106724 - RNA, 19 nt, Artificial Sequence
  Description of Artificial Sequence: Synthetic oligonucleotide
uuggcuaugacaggaaugg

SEQ ID NO: 1106725 - RNA, 19 nt, Artificial Sequence
  Description of Artificial Sequence: Synthetic oligonucleotide
ucagcgauggcucuuauaa

SEQ ID NO: 1106726 - RNA, 19 nt, Artificial Sequence
  Description of Artificial Sequence: Synthetic oligonucleotide
aacaagagugcugaggauc

SEQ ID NO: 1106727 - RNA, 19 nt, Artificial Sequence
  Description of Artificial Sequence: Synthetic oligonucleotide
aaaacuacucggucauccg

SEQ ID NO: 1106728 - RNA, 19 nt, Artificial Sequence
  Description of Artificial Sequence: Synthetic oligonucleotide
ugagagauaguauuaccgc

SEQ ID NO: 1106729 - RNA, 19 nt, Artificial Sequence
  Description of Artificial Sequence: Synthetic oligonucleotide
ugcauaucuccccagguag

SEQ ID NO: 1106730 - RNA, 19 nt, Artificial Sequence
  Description of Artificial Sequence: Synthetic oligonucleotide
ucgaaaguccucuaugucc

SEQ ID NO: 1106731 - RNA, 19 nt, Artificial Sequence
  Description of Artificial Sequence: Synthetic oligonucleotide
aaacuacucggucauccgg

SEQ ID NO: 1106732 - RNA, 19 nt, Artificial Sequence
  Description of Artificial Sequence: Synthetic oligonucleotide
ucugcuaugccucgcagcc

SEQ ID NO: 1106733 - RNA, 19 nt, Artificial Sequence
  Description of Artificial Sequence: Synthetic oligonucleotide
uucacaagguucaagguau

SEQ ID NO: 1106734 - RNA, 19 nt, Artificial Sequence
  Description of Artificial Sequence: Synthetic oligonucleotide
uuacaaauggcuucuugca

SEQ ID NO: 1106735 - RNA, 19 nt, Artificial Sequence
  Description of Artificial Sequence: Synthetic oligonucleotide
cuccggucaaacuugauag

SEQ ID NO: 1106736 - RNA, 19 nt, Artificial Sequence
  Description of Artificial Sequence: Synthetic oligonucleotide
ugggcuaagaccucuaacu

SEQ ID NO: 1106737 - RNA, 19 nt, Artificial Sequence
  Description of Artificial Sequence: Synthetic oligonucleotide
ugaaaugccaguccucucu

SEQ ID NO: 1106738 - RNA, 19 nt, Artificial Sequence
  Description of Artificial Sequence: Synthetic oligonucleotide
acaaugucugcucacagga

SEQ ID NO: 1106739 - RNA, 19 nt, Artificial Sequence
  Description of Artificial Sequence: Synthetic oligonucleotide
augagagauaguauuaccg

SEQ ID NO: 1106740 - RNA, 19 nt, Artificial Sequence
  Description of Artificial Sequence: Synthetic oligonucleotide
uaugagagauaguauuacc

SEQ ID NO: 1106741 - RNA, 19 nt, Artificial Sequence
  Description of Artificial Sequence: Synthetic oligonucleotide
ugcacugcauaucugauau

SEQ ID NO: 1106742 - RNA, 19 nt, Artificial Sequence
  Description of Artificial Sequence: Synthetic oligonucleotide
uuagaccuaugagagauag

SEQ ID NO: 1106743 - RNA, 19 nt, Artificial Sequence
  Description of Artificial Sequence: Synthetic oligonucleotide
aaacaaugucugcucacag

SEQ ID NO: 1106744 - RNA, 19 nt, Artificial Sequence
  Description of Artificial Sequence: Synthetic oligonucleotide
gagauaguauuaccgcugg

SEQ ID NO: 1106745 - RNA, 19 nt, Artificial Sequence
  Description of Artificial Sequence: Synthetic oligonucleotide
uuaaugaugccagagguau

SEQ ID NO: 1106746 - RNA, 19 nt, Artificial Sequence
  Description of Artificial Sequence: Synthetic oligonucleotide
cugacaacagagcagcucc

SEQ ID NO: 1106747 - RNA, 19 nt, Artificial Sequence
  Description of Artificial Sequence: Synthetic oligonucleotide
ucugguuuaggccccagca

SEQ ID NO: 1106748 - RNA, 19 nt, Artificial Sequence
  Description of Artificial Sequence: Synthetic oligonucleotide
uaucuucuagcgauggcag

SEQ ID NO: 1106749 - RNA, 19 nt, Artificial Sequence
  Description of Artificial Sequence: Synthetic oligonucleotide
cagaacauucgaucuaugg

SEQ ID NO: 1106750 - RNA, 19 nt, Artificial Sequence
  Description of Artificial Sequence: Synthetic oligonucleotide
gaaaacuacucggucaucc

SEQ ID NO: 1106751 - RNA, 19 nt, Artificial Sequence
  Description of Artificial Sequence: Synthetic oligonucleotide
uaucugauauacuucugca

SEQ ID NO: 1106752 - RNA, 19 nt, Artificial Sequence
  Description of Artificial Sequence: Synthetic oligonucleotide
auguacggaaaacuacucg

SEQ ID NO: 1106753 - RNA, 19 nt, Artificial Sequence
  Description of Artificial Sequence: Synthetic oligonucleotide
uuagauauuuagaccuaug

SEQ ID NO: 1106754 - RNA, 19 nt, Artificial Sequence
  Description of Artificial Sequence: Synthetic oligonucleotide
cuauucacaaucauuccuc

SEQ ID NO: 1106755 - RNA, 19 nt, Artificial Sequence
  Description of Artificial Sequence: Synthetic oligonucleotide
guagucaacagccuuccag

SEQ ID NO: 1106756 - RNA, 19 nt, Artificial Sequence
  Description of Artificial Sequence: Synthetic oligonucleotide
uguauuccuuuaacaagag

SEQ ID NO: 1106757 - RNA, 19 nt, Artificial Sequence
  Description of Artificial Sequence: Synthetic oligonucleotide
agcaacaaaguccacugug

SEQ ID NO: 1106758 - RNA, 19 nt, Artificial Sequence
  Description of Artificial Sequence: Synthetic oligonucleotide
auucggauuuuacagguca

SEQ ID NO: 1106759 - RNA, 19 nt, Artificial Sequence
  Description of Artificial Sequence: Synthetic oligonucleotide
cuuauaacuucacagcuga

SEQ ID NO: 1106760 - RNA, 19 nt, Artificial Sequence
  Description of Artificial Sequence: Synthetic oligonucleotide
uucacuacuucccaggguu

SEQ ID NO: 1106761 - RNA, 19 nt, Artificial Sequence
  Description of Artificial Sequence: Synthetic oligonucleotide
uucuaggggacgaaggcca

SEQ ID NO: 1106762 - RNA, 19 nt, Artificial Sequence
  Description of Artificial Sequence: Synthetic oligonucleotide
uccgggucugacaacagag

SEQ ID NO: 1106763 - RNA, 19 nt, Artificial Sequence
  Description of Artificial Sequence: Synthetic oligonucleotide
agcgauggcucuuauaacu

SEQ ID NO: 1106764 - RNA, 19 nt, Artificial Sequence
  Description of Artificial Sequence: Synthetic oligonucleotide
ggcucuuauaacuucacag

SEQ ID NO: 1106765 - RNA, 19 nt, Artificial Sequence
  Description of Artificial Sequence: Synthetic oligonucleotide
aacauucgaucuauggguc

SEQ ID NO: 1106766 - RNA, 19 nt, Artificial Sequence
  Description of Artificial Sequence: Synthetic oligonucleotide
acagacgauagcugcaguc

SEQ ID NO: 1106767 - RNA, 19 nt, Artificial Sequence
  Description of Artificial Sequence: Synthetic oligonucleotide
gaacauucgaucuaugggu

SEQ ID NO: 1106768 - RNA, 19 nt, Artificial Sequence
  Description of Artificial Sequence: Synthetic oligonucleotide
uccuuuaacaagagugcug

SEQ ID NO: 1106769 - RNA, 19 nt, Artificial Sequence
  Description of Artificial Sequence: Synthetic oligonucleotide
uugucgaaaguccucuaug

SEQ ID NO: 1106770 - RNA, 19 nt, Artificial Sequence
  Description of Artificial Sequence: Synthetic oligonucleotide
acccaaucgacccucgggg

SEQ ID NO: 1106771 - RNA, 19 nt, Artificial Sequence
  Description of Artificial Sequence: Synthetic oligonucleotide
agacuugucccacagugug

SEQ ID NO: 1106772 - RNA, 19 nt, Artificial Sequence
  Description of Artificial Sequence: Synthetic oligonucleotide
ugucgaaaguccucuaugu

SEQ ID NO: 1106773 - RNA, 19 nt, Artificial Sequence
  Description of Artificial Sequence: Synthetic oligonucleotide
caugacuucuucuagggga

SEQ ID NO: 1106774 - RNA, 19 nt, Artificial Sequence
  Description of Artificial Sequence: Synthetic oligonucleotide
uucauacauaggcuguggc

SEQ ID NO: 1106775 - RNA, 19 nt, Artificial Sequence
  Description of Artificial Sequence: Synthetic oligonucleotide
aucuaugggucguugaacu

SEQ ID NO: 1106776 - RNA, 19 nt, Artificial Sequence
  Description of Artificial Sequence: Synthetic oligonucleotide
uuugggguggauacgcucu

SEQ ID NO: 1106777 - RNA, 19 nt, Artificial Sequence
  Description of Artificial Sequence: Synthetic oligonucleotide
uggcuuagauauuuagacc

SEQ ID NO: 1106778 - RNA, 19 nt, Artificial Sequence
  Description of Artificial Sequence: Synthetic oligonucleotide
caacagagcagaacauucg

SEQ ID NO: 1106779 - RNA, 19 nt, Artificial Sequence
  Description of Artificial Sequence: Synthetic oligonucleotide
uguggacugguacuuuugc

SEQ ID NO: 1106780 - RNA, 19 nt, Artificial Sequence
  Description of Artificial Sequence: Synthetic oligonucleotide
gguacuuuugcucugcaac

SEQ ID NO: 1106781 - RNA, 19 nt, Artificial Sequence
  Description of Artificial Sequence: Synthetic oligonucleotide
uuacaacucgcuugcacug

SEQ ID NO: 1106782 - RNA, 19 nt, Artificial Sequence
  Description of Artificial Sequence: Synthetic oligonucleotide
agcaugaagcaaccuuccc

SEQ ID NO: 1106783 - RNA, 19 nt, Artificial Sequence
  Description of Artificial Sequence: Synthetic oligonucleotide
ucuuguccgggucugacaa

SEQ ID NO: 1106784 - RNA, 19 nt, Artificial Sequence
  Description of Artificial Sequence: Synthetic oligonucleotide
ucgcauauuuccugggaag

SEQ ID NO: 1106785 - RNA, 19 nt, Artificial Sequence
  Description of Artificial Sequence: Synthetic oligonucleotide
uggcacaagcaguauuugg

SEQ ID NO: 1106786 - RNA, 19 nt, Artificial Sequence
  Description of Artificial Sequence: Synthetic oligonucleotide
uagugguuaucauacugca

SEQ ID NO: 1106787 - RNA, 19 nt, Artificial Sequence
  Description of Artificial Sequence: Synthetic oligonucleotide
aggaucuugguuaggggcc

SEQ ID NO: 1106788 - RNA, 19 nt, Artificial Sequence
  Description of Artificial Sequence: Synthetic oligonucleotide
ugacuccgcagacagacga

SEQ ID NO: 1106789 - RNA, 19 nt, Artificial Sequence
  Description of Artificial Sequence: Synthetic oligonucleotide
cacauguacggaaaacuac

SEQ ID NO: 1106790 - RNA, 19 nt, Artificial Sequence
  Description of Artificial Sequence: Synthetic oligonucleotide
agaccuaugagagauagua

SEQ ID NO: 1106791 - RNA, 19 nt, Artificial Sequence
  Description of Artificial Sequence: Synthetic oligonucleotide
accuaugagagauaguauu

SEQ ID NO: 1106792 - RNA, 19 nt, Artificial Sequence
  Description of Artificial Sequence: Synthetic oligonucleotide
ucaagguaucuucuagcga

SEQ ID NO: 1106793 - RNA, 19 nt, Artificial Sequence
  Description of Artificial Sequence: Synthetic oligonucleotide
cuaugacaggaauggagag

SEQ ID NO: 1106794 - RNA, 19 nt, Artificial Sequence
  Description of Artificial Sequence: Synthetic oligonucleotide
acauucgaucuaugggucg

SEQ ID NO: 1106795 - RNA, 19 nt, Artificial Sequence
  Description of Artificial Sequence: Synthetic oligonucleotide
ugaagcaucuucaggucaa

SEQ ID NO: 1106796 - RNA, 19 nt, Artificial Sequence
  Description of Artificial Sequence: Synthetic oligonucleotide
gcucuuauaacuucacagc

SEQ ID NO: 1106797 - RNA, 19 nt, Artificial Sequence
  Description of Artificial Sequence: Synthetic oligonucleotide
guuuguguauuccuuuaac

SEQ ID NO: 1106798 - RNA, 19 nt, Artificial Sequence
  Description of Artificial Sequence: Synthetic oligonucleotide
uauuuagaccuaugagaga

SEQ ID NO: 1106799 - RNA, 19 nt, Artificial Sequence
  Description of Artificial Sequence: Synthetic oligonucleotide
auuaccgcuggacauuccu

SEQ ID NO: 1106800 - RNA, 19 nt, Artificial Sequence
  Description of Artificial Sequence: Synthetic oligonucleotide
uaguauuaccgcuggacau

SEQ ID NO: 1106801 - RNA, 19 nt, Artificial Sequence
  Description of Artificial Sequence: Synthetic oligonucleotide
acaaauggcuucuugcaua

SEQ ID NO: 1106802 - RNA, 19 nt, Artificial Sequence
  Description of Artificial Sequence: Synthetic oligonucleotide
cuaugagagauaguauuac

SEQ ID NO: 1106803 - RNA, 19 nt, Artificial Sequence
  Description of Artificial Sequence: Synthetic oligonucleotide
gaauggucucuucauagaa

SEQ ID NO: 1106804 - RNA, 19 nt, Artificial Sequence
  Description of Artificial Sequence: Synthetic oligonucleotide
uacggaaaacuacucgguc

SEQ ID NO: 1106805 - RNA, 19 nt, Artificial Sequence
  Description of Artificial Sequence: Synthetic oligonucleotide
ucuccgacaccauuccagc

SEQ ID NO: 1106806 - RNA, 19 nt, Artificial Sequence
  Description of Artificial Sequence: Synthetic oligonucleotide
guguauuccuuuaacaaga

SEQ ID NO: 1106807 - RNA, 19 nt, Artificial Sequence
  Description of Artificial Sequence: Synthetic oligonucleotide
acauguacggaaaacuacu

SEQ ID NO: 1106808 - RNA, 19 nt, Artificial Sequence
  Description of Artificial Sequence: Synthetic oligonucleotide
cuugcacugaagcaucuuc

SEQ ID NO: 1106809 - RNA, 19 nt, Artificial Sequence
  Description of Artificial Sequence: Synthetic oligonucleotide
aagcaguauuugguguugg

SEQ ID NO: 1106810 - RNA, 19 nt, Artificial Sequence
  Description of Artificial Sequence: Synthetic oligonucleotide
cuugguuaggggccucucg

SEQ ID NO: 1106811 - RNA, 19 nt, Artificial Sequence
  Description of Artificial Sequence: Synthetic oligonucleotide
ucuaugggucguugaacug

SEQ ID NO: 1106812 - RNA, 19 nt, Artificial Sequence
  Description of Artificial Sequence: Synthetic oligonucleotide
uaccgcuggacauuccuug

SEQ ID NO: 1106813 - RNA, 19 nt, Artificial Sequence
  Description of Artificial Sequence: Synthetic oligonucleotide
uggcugaaaugccaguccu

SEQ ID NO: 1106814 - RNA, 19 nt, Artificial Sequence
  Description of Artificial Sequence: Synthetic oligonucleotide
aucugauauacuucugcau

SEQ ID NO: 1106815 - RNA, 19 nt, Artificial Sequence
  Description of Artificial Sequence: Synthetic oligonucleotide
ugggucguugaacuguuuc

SEQ ID NO: 1106816 - RNA, 19 nt, Artificial Sequence
  Description of Artificial Sequence: Synthetic oligonucleotide
aggucguuccucccgguuc

SEQ ID NO: 1106817 - RNA, 19 nt, Artificial Sequence
  Description of Artificial Sequence: Synthetic oligonucleotide
uguccaauggcaucugguu

SEQ ID NO: 1106818 - RNA, 19 nt, Artificial Sequence
  Description of Artificial Sequence: Synthetic oligonucleotide
cauguacggaaaacuacuc

SEQ ID NO: 1106819 - RNA, 19 nt, Artificial Sequence
  Description of Artificial Sequence: Synthetic oligonucleotide
aaucgacccucggggaggc

SEQ ID NO: 1106820 - RNA, 19 nt, Artificial Sequence
  Description of Artificial Sequence: Synthetic oligonucleotide
aaccacccuguucuguucu

SEQ ID NO: 1106821 - RNA, 19 nt, Artificial Sequence
  Description of Artificial Sequence: Synthetic oligonucleotide
ucgugagauccuccauugg

SEQ ID NO: 1106822 - RNA, 19 nt, Artificial Sequence
  Description of Artificial Sequence: Synthetic oligonucleotide
agacgauagcugcagucug

SEQ ID NO: 1106823 - RNA, 19 nt, Artificial Sequence
  Description of Artificial Sequence: Synthetic oligonucleotide
uugcauaucuccccaggua

SEQ ID NO: 1106824 - RNA, 19 nt, Artificial Sequence
  Description of Artificial Sequence: Synthetic oligonucleotide
acaagcaguauuugguguu

SEQ ID NO: 1106825 - RNA, 19 nt, Artificial Sequence
  Description of Artificial Sequence: Synthetic oligonucleotide
gagagauaguauuaccgcu

SEQ ID NO: 1106826 - RNA, 19 nt, Artificial Sequence
  Description of Artificial Sequence: Synthetic oligonucleotide
aacuacucggucauccgga

SEQ ID NO: 1106827 - RNA, 19 nt, Artificial Sequence
  Description of Artificial Sequence: Synthetic oligonucleotide
ugguguagugguuaucaua

SEQ ID NO: 1106828 - RNA, 19 nt, Artificial Sequence
  Description of Artificial Sequence: Synthetic oligonucleotide
ucuauccgcuucacaaggu

SEQ ID NO: 1106829 - RNA, 19 nt, Artificial Sequence
  Description of Artificial Sequence: Synthetic oligonucleotide
uggcucuuauaacuucaca

SEQ ID NO: 1106830 - RNA, 19 nt, Artificial Sequence
  Description of Artificial Sequence: Synthetic oligonucleotide
ugauagccaucuuaaugau

SEQ ID NO: 1106831 - RNA, 19 nt, Artificial Sequence
  Description of Artificial Sequence: Synthetic oligonucleotide
ugcucgagccaccaucacu

SEQ ID NO: 1106832 - RNA, 19 nt, Artificial Sequence
  Description of Artificial Sequence: Synthetic oligonucleotide
agguaucuucuagcgaugg

SEQ ID NO: 1106833 - RNA, 19 nt, Artificial Sequence
  Description of Artificial Sequence: Synthetic oligonucleotide
uguggucgugagauccucc

SEQ ID NO: 1106834 - RNA, 19 nt, Artificial Sequence
  Description of Artificial Sequence: Synthetic oligonucleotide
cuucuaggggacgaaggcc

SEQ ID NO: 1106835 - RNA, 19 nt, Artificial Sequence
  Description of Artificial Sequence: Synthetic oligonucleotide
uuauaacuucacagcugac

SEQ ID NO: 1106836 - RNA, 19 nt, Artificial Sequence
  Description of Artificial Sequence: Synthetic oligonucleotide
ugacaacagagcagcuccc

SEQ ID NO: 1106837 - RNA, 19 nt, Artificial Sequence
  Description of Artificial Sequence: Synthetic oligonucleotide
gaucuaugggucguugaac

SEQ ID NO: 1106838 - RNA, 19 nt, Artificial Sequence
  Description of Artificial Sequence: Synthetic oligonucleotide
guuucauacauaggcugug

SEQ ID NO: 1106839 - RNA, 19 nt, Artificial Sequence
  Description of Artificial Sequence: Synthetic oligonucleotide
cacccaaucgacccucggg

SEQ ID NO: 1106840 - RNA, 19 nt, Artificial Sequence
  Description of Artificial Sequence: Synthetic oligonucleotide
ucgaucuaugggucguuga

SEQ ID NO: 1106841 - RNA, 19 nt, Artificial Sequence
  Description of Artificial Sequence: Synthetic oligonucleotide
uuaggggccucucgcuugc

SEQ ID NO: 1106842 - RNA, 19 nt, Artificial Sequence
  Description of Artificial Sequence: Synthetic oligonucleotide
uggauacgcucuccgguca

SEQ ID NO: 1106843 - RNA, 19 nt, Artificial Sequence
  Description of Artificial Sequence: Synthetic oligonucleotide
cuuuaacaagagugcugag

SEQ ID NO: 1106844 - RNA, 19 nt, Artificial Sequence
  Description of Artificial Sequence: Synthetic oligonucleotide
cauacugcacugcauaucu

SEQ ID NO: 1106845 - RNA, 19 nt, Artificial Sequence
  Description of Artificial Sequence: Synthetic oligonucleotide
agacagacgauagcugcag

SEQ ID NO: 1106846 - RNA, 19 nt, Artificial Sequence
  Description of Artificial Sequence: Synthetic oligonucleotide
ggcuaugacaggaauggag

SEQ ID NO: 1106847 - RNA, 19 nt, Artificial Sequence
  Description of Artificial Sequence: Synthetic oligonucleotide
ugaacugcaauggcugaaa

SEQ ID NO: 1106848 - RNA, 19 nt, Artificial Sequence
  Description of Artificial Sequence: Synthetic oligonucleotide
acucgcuugcacugaagca

SEQ ID NO: 1106849 - RNA, 19 nt, Artificial Sequence
  Description of Artificial Sequence: Synthetic oligonucleotide
acaagagugcugaggaucu

SEQ ID NO: 1106850 - RNA, 19 nt, Artificial Sequence
  Description of Artificial Sequence: Synthetic oligonucleotide
ggauguggucgugagaucc

SEQ ID NO: 1106851 - RNA, 19 nt, Artificial Sequence
  Description of Artificial Sequence: Synthetic oligonucleotide
cucuuauaacuucacagcu

SEQ ID NO: 1106852 - RNA, 19 nt, Artificial Sequence
  Description of Artificial Sequence: Synthetic oligonucleotide
cugaggucguuccucccgg

SEQ ID NO: 1106853 - RNA, 19 nt, Artificial Sequence
  Description of Artificial Sequence: Synthetic oligonucleotide
cucggggaggcccugacuc

SEQ ID NO: 1106854 - RNA, 19 nt, Artificial Sequence
  Description of Artificial Sequence: Synthetic oligonucleotide
gccaucuuaaugaugccag

SEQ ID NO: 1106855 - RNA, 19 nt, Artificial Sequence
  Description of Artificial Sequence: Synthetic oligonucleotide
uaugggucguugaacuguu

SEQ ID NO: 1106856 - RNA, 19 nt, Artificial Sequence
  Description of Artificial Sequence: Synthetic oligonucleotide
cugguuuaggccccagcac

SEQ ID NO: 1106857 - RNA, 19 nt, Artificial Sequence
  Description of Artificial Sequence: Synthetic oligonucleotide
cgcuucacaagguucaagg

SEQ ID NO: 1106858 - RNA, 19 nt, Artificial Sequence
  Description of Artificial Sequence: Synthetic oligonucleotide
aagguaucuucuagcgaug

SEQ ID NO: 1106859 - RNA, 19 nt, Artificial Sequence
  Description of Artificial Sequence: Synthetic oligonucleotide
auacgcucuccggucaaac

SEQ ID NO: 1106860 - RNA, 19 nt, Artificial Sequence
  Description of Artificial Sequence: Synthetic oligonucleotide
ggagucuuagccaagaggu

SEQ ID NO: 1106861 - RNA, 19 nt, Artificial Sequence
  Description of Artificial Sequence: Synthetic oligonucleotide
cuccgcagacagacgauag

SEQ ID NO: 1106862 - RNA, 19 nt, Artificial Sequence
  Description of Artificial Sequence: Synthetic oligonucleotide
ccgaauggucucuucauag

SEQ ID NO: 1106863 - RNA, 19 nt, Artificial Sequence
  Description of Artificial Sequence: Synthetic oligonucleotide
cuuaaugaugccagaggua

SEQ ID NO: 1106864 - RNA, 19 nt, Artificial Sequence
  Description of Artificial Sequence: Synthetic oligonucleotide
uaugccucgcagccacuga

SEQ ID NO: 1106865 - RNA, 19 nt, Artificial Sequence
  Description of Artificial Sequence: Synthetic oligonucleotide
ucugcgucugaaguuccca

SEQ ID NO: 1106866 - RNA, 19 nt, Artificial Sequence
  Description of Artificial Sequence: Synthetic oligonucleotide
gucgaaaguccucuauguc

SEQ ID NO: 1106867 - RNA, 19 nt, Artificial Sequence
  Description of Artificial Sequence: Synthetic oligonucleotide
ugccaguuucuuagacuug

SEQ ID NO: 1106868 - RNA, 19 nt, Artificial Sequence
  Description of Artificial Sequence: Synthetic oligonucleotide
caaucgacccucggggagg

SEQ ID NO: 1106869 - RNA, 19 nt, Artificial Sequence
  Description of Artificial Sequence: Synthetic oligonucleotide
uauuaccgcuggacauucc

SEQ ID NO: 1106870 - RNA, 19 nt, Artificial Sequence
  Description of Artificial Sequence: Synthetic oligonucleotide
uucgaucuaugggucguug

SEQ ID NO: 1106871 - RNA, 19 nt, Artificial Sequence
  Description of Artificial Sequence: Synthetic oligonucleotide
cugggcuaagaccucuaac

SEQ ID NO: 1106872 - RNA, 19 nt, Artificial Sequence
  Description of Artificial Sequence: Synthetic oligonucleotide
aguauuaccgcuggacauu

SEQ ID NO: 1106873 - RNA, 19 nt, Artificial Sequence
  Description of Artificial Sequence: Synthetic oligonucleotide
uagaccuaugagagauagu

SEQ ID NO: 1106874 - RNA, 19 nt, Artificial Sequence
  Description of Artificial Sequence: Synthetic oligonucleotide
ggauccucccuccuuccgg

SEQ ID NO: 1106875 - RNA, 19 nt, Artificial Sequence
  Description of Artificial Sequence: Synthetic oligonucleotide
uacgcucuccggucaaacu

SEQ ID NO: 1106876 - RNA, 19 nt, Artificial Sequence
  Description of Artificial Sequence: Synthetic oligonucleotide
agauaguauuaccgcugga

SEQ ID NO: 1106877 - RNA, 19 nt, Artificial Sequence
  Description of Artificial Sequence: Synthetic oligonucleotide
auaggcuguggcaacuucu

SEQ ID NO: 1106878 - RNA, 19 nt, Artificial Sequence
  Description of Artificial Sequence: Synthetic oligonucleotide
guggauacgcucuccgguc

SEQ ID NO: 1106879 - RNA, 19 nt, Artificial Sequence
  Description of Artificial Sequence: Synthetic oligonucleotide
gcaggauucggauuuuaca

SEQ ID NO: 1106880 - RNA, 19 nt, Artificial Sequence
  Description of Artificial Sequence: Synthetic oligonucleotide
agauccuccauuggcuaug

SEQ ID NO: 1106881 - RNA, 19 nt, Artificial Sequence
  Description of Artificial Sequence: Synthetic oligonucleotide
gcugaggucguuccucccg

SEQ ID NO: 1106882 - RNA, 19 nt, Artificial Sequence
  Description of Artificial Sequence: Synthetic oligonucleotide
uguccgggucugacaacag

SEQ ID NO: 1106883 - RNA, 19 nt, Artificial Sequence
  Description of Artificial Sequence: Synthetic oligonucleotide
ugguacuuuugcucugcaa

SEQ ID NO: 1106884 - RNA, 19 nt, Artificial Sequence
  Description of Artificial Sequence: Synthetic oligonucleotide
ugucugcucacaggaggag

SEQ ID NO: 1106885 - RNA, 19 nt, Artificial Sequence
  Description of Artificial Sequence: Synthetic oligonucleotide
ugguuaggggccucucgcu

SEQ ID NO: 1106886 - RNA, 19 nt, Artificial Sequence
  Description of Artificial Sequence: Synthetic oligonucleotide
acgcucuccggucaaacuu

SEQ ID NO: 1106887 - RNA, 19 nt, Artificial Sequence
  Description of Artificial Sequence: Synthetic oligonucleotide
aucuagcucccgaaugguc

SEQ ID NO: 1106888 - RNA, 19 nt, Artificial Sequence
  Description of Artificial Sequence: Synthetic oligonucleotide
uccggacggugcugcagcg

SEQ ID NO: 1106889 - RNA, 19 nt, Artificial Sequence
  Description of Artificial Sequence: Synthetic oligonucleotide
uuaccgcuggacauuccuu

SEQ ID NO: 1106890 - RNA, 19 nt, Artificial Sequence
  Description of Artificial Sequence: Synthetic oligonucleotide
uugguguagugguuaucau

SEQ ID NO: 1106891 - RNA, 19 nt, Artificial Sequence
  Description of Artificial Sequence: Synthetic oligonucleotide
uuuaggccccagcacccau

SEQ ID NO: 1106892 - RNA, 19 nt, Artificial Sequence
  Description of Artificial Sequence: Synthetic oligonucleotide
gauucggauuuuacagguc

SEQ ID NO: 1106893 - RNA, 19 nt, Artificial Sequence
  Description of Artificial Sequence: Synthetic oligonucleotide
auguggucgugagauccuc

SEQ ID NO: 1106894 - RNA, 19 nt, Artificial Sequence
  Description of Artificial Sequence: Synthetic oligonucleotide
ccuuuaacaagagugcuga

SEQ ID NO: 1106895 - RNA, 19 nt, Artificial Sequence
  Description of Artificial Sequence: Synthetic oligonucleotide
ucgagccaccaucacugaa

SEQ ID NO: 1106896 - RNA, 19 nt, Artificial Sequence
  Description of Artificial Sequence: Synthetic oligonucleotide
ucacuacuucccaggguua

SEQ ID NO: 1106897 - RNA, 19 nt, Artificial Sequence
  Description of Artificial Sequence: Synthetic oligonucleotide
ggccucgcauauuuccugg

SEQ ID NO: 1106898 - RNA, 19 nt, Artificial Sequence
  Description of Artificial Sequence: Synthetic oligonucleotide
cucgcauauuuccugggaa

SEQ ID NO: 1106899 - RNA, 19 nt, Artificial Sequence
  Description of Artificial Sequence: Synthetic oligonucleotide
gucacagguuuguguauuc

SEQ ID NO: 1106900 - RNA, 19 nt, Artificial Sequence
  Description of Artificial Sequence: Synthetic oligonucleotide
guggucgugagauccucca

SEQ ID NO: 1106901 - RNA, 19 nt, Artificial Sequence
  Description of Artificial Sequence: Synthetic oligonucleotide
guauuaccgcuggacauuc

SEQ ID NO: 1106902 - RNA, 19 nt, Artificial Sequence
  Description of Artificial Sequence: Synthetic oligonucleotide
ccugacuccgcagacagac

SEQ ID NO: 1106903 - RNA, 19 nt, Artificial Sequence
  Description of Artificial Sequence: Synthetic oligonucleotide
cucugcgucugaaguuccc

SEQ ID NO: 1106904 - RNA, 19 nt, Artificial Sequence
  Description of Artificial Sequence: Synthetic oligonucleotide
ugccucgcagccacugaac

SEQ ID NO: 1106905 - RNA, 19 nt, Artificial Sequence
  Description of Artificial Sequence: Synthetic oligonucleotide
aguagucaacagccuucca

SEQ ID NO: 1106906 - RNA, 19 nt, Artificial Sequence
  Description of Artificial Sequence: Synthetic oligonucleotide
cuuucacauguacggaaaa

SEQ ID NO: 1106907 - RNA, 19 nt, Artificial Sequence
  Description of Artificial Sequence: Synthetic oligonucleotide
ugcgucugaaguucccauu

SEQ ID NO: 1106908 - RNA, 19 nt, Artificial Sequence
  Description of Artificial Sequence: Synthetic oligonucleotide
cugaaaugccaguccucuc

SEQ ID NO: 1106909 - RNA, 19 nt, Artificial Sequence
  Description of Artificial Sequence: Synthetic oligonucleotide
cagcgauggcucuuauaac

SEQ ID NO: 1106910 - RNA, 19 nt, Artificial Sequence
  Description of Artificial Sequence: Synthetic oligonucleotide
ucuaggggacgaaggccau

SEQ ID NO: 1106911 - RNA, 19 nt, Artificial Sequence
  Description of Artificial Sequence: Synthetic oligonucleotide
uucagcgauggcucuuaua

SEQ ID NO: 1106912 - RNA, 19 nt, Artificial Sequence
  Description of Artificial Sequence: Synthetic oligonucleotide
agcgauggcaggauucgga

SEQ ID NO: 1106913 - RNA, 19 nt, Artificial Sequence
  Description of Artificial Sequence: Synthetic oligonucleotide
cacuacuucccaggguuac

SEQ ID NO: 1106914 - RNA, 19 nt, Artificial Sequence
  Description of Artificial Sequence: Synthetic oligonucleotide
gagucuuagccaagagguc

SEQ ID NO: 1106915 - RNA, 19 nt, Artificial Sequence
  Description of Artificial Sequence: Synthetic oligonucleotide
ucacaggaggaggcuauuc

SEQ ID NO: 1106916 - RNA, 19 nt, Artificial Sequence
  Description of Artificial Sequence: Synthetic oligonucleotide
acaguguggacugguacuu

SEQ ID NO: 1106917 - RNA, 19 nt, Artificial Sequence
  Description of Artificial Sequence: Synthetic oligonucleotide
uucuagcgauggcaggauu

SEQ ID NO: 1106918 - RNA, 19 nt, Artificial Sequence
  Description of Artificial Sequence: Synthetic oligonucleotide
cuacaagccuggccacagc

SEQ ID NO: 1106919 - RNA, 19 nt, Artificial Sequence
  Description of Artificial Sequence: Synthetic oligonucleotide
augccucgcagccacugaa

SEQ ID NO: 1106920 - RNA, 19 nt, Artificial Sequence
  Description of Artificial Sequence: Synthetic oligonucleotide
cuaugccucgcagccacug

SEQ ID NO: 1106921 - RNA, 19 nt, Artificial Sequence
  Description of Artificial Sequence: Synthetic oligonucleotide
agcucgccgggcaucuagc

SEQ ID NO: 1106922 - RNA, 19 nt, Artificial Sequence
  Description of Artificial Sequence: Synthetic oligonucleotide
uggucgugagauccuccau

SEQ ID NO: 1106923 - RNA, 19 nt, Artificial Sequence
  Description of Artificial Sequence: Synthetic oligonucleotide
cauauuuccugggaagacu

SEQ ID NO: 1106924 - RNA, 19 nt, Artificial Sequence
  Description of Artificial Sequence: Synthetic oligonucleotide
uguugguguagugguuauc

SEQ ID NO: 1106925 - RNA, 19 nt, Artificial Sequence
  Description of Artificial Sequence: Synthetic oligonucleotide
gguuuaggccccagcaccc

SEQ ID NO: 1106926 - RNA, 19 nt, Artificial Sequence
  Description of Artificial Sequence: Synthetic oligonucleotide
guauuccuuuaacaagagu

SEQ ID NO: 1106927 - RNA, 19 nt, Artificial Sequence
  Description of Artificial Sequence: Synthetic oligonucleotide
cuuguccgggucugacaac

SEQ ID NO: 1106928 - RNA, 19 nt, Artificial Sequence
  Description of Artificial Sequence: Synthetic oligonucleotide
gguuuguguauuccuuuaa

SEQ ID NO: 1106929 - RNA, 19 nt, Artificial Sequence
  Description of Artificial Sequence: Synthetic oligonucleotide
uuucagcgauggcucuuau

SEQ ID NO: 1106930 - RNA, 19 nt, Artificial Sequence
  Description of Artificial Sequence: Synthetic oligonucleotide
uggauguggucgugagauc

SEQ ID NO: 1106931 - RNA, 19 nt, Artificial Sequence
  Description of Artificial Sequence: Synthetic oligonucleotide
ccuaugagagauaguauua

SEQ ID NO: 1106932 - RNA, 19 nt, Artificial Sequence
  Description of Artificial Sequence: Synthetic oligonucleotide
uccucccuuaguggaauau

SEQ ID NO: 1106933 - RNA, 19 nt, Artificial Sequence
  Description of Artificial Sequence: Synthetic oligonucleotide
ccgacaccauuccagcagg

SEQ ID NO: 1106934 - RNA, 19 nt, Artificial Sequence
  Description of Artificial Sequence: Synthetic oligonucleotide
agcccauguugacaucaau

SEQ ID NO: 1106935 - RNA, 19 nt, Artificial Sequence
  Description of Artificial Sequence: Synthetic oligonucleotide
ggacugguacuuuugcucu

SEQ ID NO: 1106936 - RNA, 19 nt, Artificial Sequence
  Description of Artificial Sequence: Synthetic oligonucleotide
cuaugggucguugaacugu

SEQ ID NO: 1106937 - RNA, 19 nt, Artificial Sequence
  Description of Artificial Sequence: Synthetic oligonucleotide
ggcacaagcaguauuuggu

SEQ ID NO: 1106938 - RNA, 19 nt, Artificial Sequence
  Description of Artificial Sequence: Synthetic oligonucleotide
ccaaucgacccucggggag

SEQ ID NO: 1106939 - RNA, 19 nt, Artificial Sequence
  Description of Artificial Sequence: Synthetic oligonucleotide
cuuagauauuuagaccuau

SEQ ID NO: 1106940 - RNA, 19 nt, Artificial Sequence
  Description of Artificial Sequence: Synthetic oligonucleotide
gguggauacgcucuccggu

SEQ ID NO: 1106941 - RNA, 19 nt, Artificial Sequence
  Description of Artificial Sequence: Synthetic oligonucleotide
gauagagggguuccacauu

SEQ ID NO: 1106942 - RNA, 19 nt, Artificial Sequence
  Description of Artificial Sequence: Synthetic oligonucleotide
guucaaggaggggcucucc

SEQ ID NO: 1106943 - RNA, 19 nt, Artificial Sequence
  Description of Artificial Sequence: Synthetic oligonucleotide
guacggaaaacuacucggu

SEQ ID NO: 1106944 - RNA, 19 nt, Artificial Sequence
  Description of Artificial Sequence: Synthetic oligonucleotide
gacggugcugcagcgccac

SEQ ID NO: 1106945 - RNA, 19 nt, Artificial Sequence
  Description of Artificial Sequence: Synthetic oligonucleotide
gccucgcauauuuccuggg

SEQ ID NO: 1106946 - RNA, 19 nt, Artificial Sequence
  Description of Artificial Sequence: Synthetic oligonucleotide
guccgggucugacaacaga

SEQ ID NO: 1106947 - RNA, 19 nt, Artificial Sequence
  Description of Artificial Sequence: Synthetic oligonucleotide
cucgcuugcacugaagcau

SEQ ID NO: 1106948 - RNA, 19 nt, Artificial Sequence
  Description of Artificial Sequence: Synthetic oligonucleotide
acgauagcugcagucuguu

SEQ ID NO: 1106949 - RNA, 19 nt, Artificial Sequence
  Description of Artificial Sequence: Synthetic oligonucleotide
cagacgauagcugcagucu

SEQ ID NO: 1106950 - RNA, 19 nt, Artificial Sequence
  Description of Artificial Sequence: Synthetic oligonucleotide
ggcaggauucggauuuuac

SEQ ID NO: 1106951 - RNA, 19 nt, Artificial Sequence
  Description of Artificial Sequence: Synthetic oligonucleotide
gacgauagcugcagucugu

SEQ ID NO: 1106952 - RNA, 19 nt, Artificial Sequence
  Description of Artificial Sequence: Synthetic oligonucleotide
guuucagcgauggcucuua

SEQ ID NO: 1106953 - RNA, 19 nt, Artificial Sequence
  Description of Artificial Sequence: Synthetic oligonucleotide
uccgcuucacaagguucaa

SEQ ID NO: 1106954 - RNA, 19 nt, Artificial Sequence
  Description of Artificial Sequence: Synthetic oligonucleotide
gauguggucgugagauccu

SEQ ID NO: 1106955 - RNA, 19 nt, Artificial Sequence
  Description of Artificial Sequence: Synthetic oligonucleotide
gaccuaugagagauaguau

SEQ ID NO: 1106956 - RNA, 19 nt, Artificial Sequence
  Description of Artificial Sequence: Synthetic oligonucleotide
uucaggucacugggaacuu

SEQ ID NO: 1106957 - RNA, 19 nt, Artificial Sequence
  Description of Artificial Sequence: Synthetic oligonucleotide
ggcaucugguuuaggcccc

SEQ ID NO: 1106958 - RNA, 19 nt, Artificial Sequence
  Description of Artificial Sequence: Synthetic oligonucleotide
cucggucauccggagcaac

SEQ ID NO: 1106959 - RNA, 19 nt, Artificial Sequence
  Description of Artificial Sequence: Synthetic oligonucleotide
cauucgaucuaugggucgu

SEQ ID NO: 1106960 - RNA, 19 nt, Artificial Sequence
  Description of Artificial Sequence: Synthetic oligonucleotide
gauacgcucuccggucaaa

SEQ ID NO: 1106961 - RNA, 19 nt, Artificial Sequence
  Description of Artificial Sequence: Synthetic oligonucleotide
gggcgacuccagcuguucc

SEQ ID NO: 1106962 - RNA, 19 nt, Artificial Sequence
  Description of Artificial Sequence: Synthetic oligonucleotide
cguugaacuguuucauaca

SEQ ID NO: 1106963 - RNA, 19 nt, Artificial Sequence
  Description of Artificial Sequence: Synthetic oligonucleotide
auucgaucuaugggucguu

SEQ ID NO: 1106964 - RNA, 19 nt, Artificial Sequence
  Description of Artificial Sequence: Synthetic oligonucleotide
gcccauguugacaucaaua

SEQ ID NO: 1106965 - RNA, 19 nt, Artificial Sequence
  Description of Artificial Sequence: Synthetic oligonucleotide
gaucuugguuaggggccuc

SEQ ID NO: 1106966 - RNA, 19 nt, Artificial Sequence
  Description of Artificial Sequence: Synthetic oligonucleotide
cuuuuggacagcccauguu

SEQ ID NO: 1106967 - RNA, 19 nt, Artificial Sequence
  Description of Artificial Sequence: Synthetic oligonucleotide
uggcaggauucggauuuua

SEQ ID NO: 1106968 - RNA, 19 nt, Artificial Sequence
  Description of Artificial Sequence: Synthetic oligonucleotide
ggucauccggagcaacaaa

SEQ ID NO: 1106969 - RNA, 19 nt, Artificial Sequence
  Description of Artificial Sequence: Synthetic oligonucleotide
uggggcgacuccagcuguu

SEQ ID NO: 1106970 - RNA, 19 nt, Artificial Sequence
  Description of Artificial Sequence: Synthetic oligonucleotide
uaggggccucucgcuugcg

SEQ ID NO: 1106971 - RNA, 19 nt, Artificial Sequence
  Description of Artificial Sequence: Synthetic oligonucleotide
cgcucuccggucaaacuug

SEQ ID NO: 1106972 - RNA, 19 nt, Artificial Sequence
  Description of Artificial Sequence: Synthetic oligonucleotide
gagguaucuucagcuggcu

SEQ ID NO: 1106973 - RNA, 19 nt, Artificial Sequence
  Description of Artificial Sequence: Synthetic oligonucleotide
caaggccaaaggccucgca

SEQ ID NO: 1106974 - RNA, 19 nt, Artificial Sequence
  Description of Artificial Sequence: Synthetic oligonucleotide
cggacggugcugcagcgcc

SEQ ID NO: 1106975 - RNA, 19 nt, Artificial Sequence
  Description of Artificial Sequence: Synthetic oligonucleotide
aucgacccucggggaggcc

SEQ ID NO: 1106976 - RNA, 19 nt, Artificial Sequence
  Description of Artificial Sequence: Synthetic oligonucleotide
ccgcuggacauuccuuggc

SEQ ID NO: 1106977 - RNA, 19 nt, Artificial Sequence
  Description of Artificial Sequence: Synthetic oligonucleotide
ggucgugagauccuccauu

SEQ ID NO: 1106978 - RNA, 19 nt, Artificial Sequence
  Description of Artificial Sequence: Synthetic oligonucleotide
ggaaaacuacucggucauc

SEQ ID NO: 1106979 - RNA, 19 nt, Artificial Sequence
  Description of Artificial Sequence: Synthetic oligonucleotide
ggcuugucgaaaguccucu

SEQ ID NO: 1106980 - RNA, 19 nt, Artificial Sequence
  Description of Artificial Sequence: Synthetic oligonucleotide
ggcugaaaugccaguccuc

SEQ ID NO: 1106981 - RNA, 19 nt, Artificial Sequence
  Description of Artificial Sequence: Synthetic oligonucleotide
gggcuaagaccucuaacuu

SEQ ID NO: 1106982 - RNA, 19 nt, Artificial Sequence
  Description of Artificial Sequence: Synthetic oligonucleotide
ggaggcuauucacaaucau

SEQ ID NO: 1106983 - RNA, 19 nt, Artificial Sequence
  Description of Artificial Sequence: Synthetic oligonucleotide
ccucgcauauuuccuggga

SEQ ID NO: 1106984 - RNA, 19 nt, Artificial Sequence
  Description of Artificial Sequence: Synthetic oligonucleotide
acauuccuuggcacuuguu

SEQ ID NO: 1106985 - RNA, 19 nt, Artificial Sequence
  Description of Artificial Sequence: Synthetic oligonucleotide
ggauacgcucuccggucaa

SEQ ID NO: 1106986 - RNA, 19 nt, Artificial Sequence
  Description of Artificial Sequence: Synthetic oligonucleotide
cgaucuaugggucguugaa

SEQ ID NO: 1106987 - RNA, 19 nt, Artificial Sequence
  Description of Artificial Sequence: Synthetic oligonucleotide
acucggucauccggagcaa

SEQ ID NO: 1106988 - RNA, 19 nt, Artificial Sequence
  Description of Artificial Sequence: Synthetic oligonucleotide
cucccauuccucccuuagu

SEQ ID NO: 1106989 - RNA, 19 nt, Artificial Sequence
  Description of Artificial Sequence: Synthetic oligonucleotide
cugcgucugaaguucccau

SEQ ID NO: 1106990 - RNA, 19 nt, Artificial Sequence
  Description of Artificial Sequence: Synthetic oligonucleotide
cgcauauuuccugggaaga

SEQ ID NO: 1106991 - RNA, 19 nt, Artificial Sequence
  Description of Artificial Sequence: Synthetic oligonucleotide
gcgauggcaggauucggau

SEQ ID NO: 1106992 - RNA, 19 nt, Artificial Sequence
  Description of Artificial Sequence: Synthetic oligonucleotide
cccaaucgacccucgggga

SEQ ID NO: 1106993 - RNA, 19 nt, Artificial Sequence
  Description of Artificial Sequence: Synthetic oligonucleotide
cgacaccauuccagcaggc

SEQ ID NO: 1106994 - RNA, 19 nt, Artificial Sequence
  Description of Artificial Sequence: Synthetic oligonucleotide
cccuuaguggaauauucuu

SEQ ID NO: 1106995 - RNA, 19 nt, Artificial Sequence
  Description of Artificial Sequence: Synthetic oligonucleotide
cuucuagcgauggcaggau

SEQ ID NO: 1106996 - RNA, 19 nt, Artificial Sequence
  Description of Artificial Sequence: Synthetic oligonucleotide
gguuaggggccucucgcuu

SEQ ID NO: 1106997 - RNA, 19 nt, Artificial Sequence
  Description of Artificial Sequence: Synthetic oligonucleotide
gacuccgcagacagacgau

SEQ ID NO: 1106998 - RNA, 19 nt, Artificial Sequence
  Description of Artificial Sequence: Synthetic oligonucleotide
ccgcuucacaagguucaag

SEQ ID NO: 1106999 - RNA, 19 nt, Artificial Sequence
  Description of Artificial Sequence: Synthetic oligonucleotide
ccgguuccucccaugaacu

SEQ ID NO: 1107000 - RNA, 19 nt, Artificial Sequence
  Description of Artificial Sequence: Synthetic oligonucleotide
cuggggcgacuccagcugu

SEQ ID NO: 1107001 - RNA, 19 nt, Artificial Sequence
  Description of Artificial Sequence: Synthetic oligonucleotide
cgauagcugcagucuguuc

SEQ ID NO: 1107002 - RNA, 19 nt, Artificial Sequence
  Description of Artificial Sequence: Synthetic oligonucleotide
ggacaguagucaacagccu

SEQ ID NO: 1107003 - RNA, 19 nt, Artificial Sequence
  Description of Artificial Sequence: Synthetic oligonucleotide
gcauaucuccccagguagu

SEQ ID NO: 1107004 - RNA, 19 nt, Artificial Sequence
  Description of Artificial Sequence: Synthetic oligonucleotide
gcucuccggucaaacuuga

SEQ ID NO: 1107005 - RNA, 19 nt, Artificial Sequence
  Description of Artificial Sequence: Synthetic oligonucleotide
gucugacaacagagcagcu

SEQ ID NO: 1107006 - RNA, 19 nt, Artificial Sequence
  Description of Artificial Sequence: Synthetic oligonucleotide
ggggcgacuccagcuguuc

SEQ ID NO: 1107007 - RNA, 19 nt, Artificial Sequence
  Description of Artificial Sequence: Synthetic oligonucleotide
gcaagggcucucucugcgu

SEQ ID NO: 1107008 - RNA, 19 nt, Artificial Sequence
  Description of Artificial Sequence: Synthetic oligonucleotide
ccaguccucucuauccgcu

SEQ ID NO: 1107009 - RNA, 19 nt, Artificial Sequence
  Description of Artificial Sequence: Synthetic oligonucleotide
augggucguugaacuguuu

SEQ ID NO: 1107010 - RNA, 19 nt, Artificial Sequence
  Description of Artificial Sequence: Synthetic oligonucleotide
gggcaucuagcucccgaau

SEQ ID NO: 1107011 - RNA, 19 nt, Artificial Sequence
  Description of Artificial Sequence: Synthetic oligonucleotide
gcgauggcucuuauaacuu

SEQ ID NO: 1107012 - RNA, 19 nt, Artificial Sequence
  Description of Artificial Sequence: Synthetic oligonucleotide
ccggagcaacaaaguccac

SEQ ID NO: 1107013 - RNA, 19 nt, Artificial Sequence
  Description of Artificial Sequence: Synthetic oligonucleotide
ccggacggugcugcagcgc

SEQ ID NO: 1107014 - RNA, 19 nt, Artificial Sequence
  Description of Artificial Sequence: Synthetic oligonucleotide
gcucgccgggcaucuagcu

SEQ ID NO: 1107015 - RNA, 19 nt, Artificial Sequence
  Description of Artificial Sequence: Synthetic oligonucleotide
caucuggcacaagcaguau

SEQ ID NO: 1107016 - RNA, 19 nt, Artificial Sequence
  Description of Artificial Sequence: Synthetic oligonucleotide
gguuucagcgauggcucuu

SEQ ID NO: 1107017 - RNA, 19 nt, Artificial Sequence
  Description of Artificial Sequence: Synthetic oligonucleotide
cccuggggcgacuccagcu

SEQ ID NO: 1107018 - RNA, 19 nt, Artificial Sequence
  Description of Artificial Sequence: Synthetic oligonucleotide
caguguggacugguacuuu

SEQ ID NO: 1107019 - RNA, 19 nt, Artificial Sequence
  Description of Artificial Sequence: Synthetic oligonucleotide
caagagugcugaggaucuu

SEQ ID NO: 1107020 - RNA, 19 nt, Artificial Sequence
  Description of Artificial Sequence: Synthetic oligonucleotide
gggguaauuugggguggau

SEQ ID NO: 1107021 - RNA, 19 nt, Artificial Sequence
  Description of Artificial Sequence: Synthetic oligonucleotide
ccucccuuaguggaauauu

SEQ ID NO: 1107022 - RNA, 19 nt, Artificial Sequence
  Description of Artificial Sequence: Synthetic oligonucleotide
gcuaugccucgcagccacu

SEQ ID NO: 1107023 - RNA, 19 nt, Artificial Sequence
  Description of Artificial Sequence: Synthetic oligonucleotide
gccaaaggccucgcauauu

SEQ ID NO: 1107024 - RNA, 19 nt, Artificial Sequence
  Description of Artificial Sequence: Synthetic oligonucleotide
uguacugguacauagcucg

SEQ ID NO: 1107025 - RNA, 19 nt, Artificial Sequence
  Description of Artificial Sequence: Synthetic oligonucleotide
aaaggaaugccugugacuc

SEQ ID NO: 1107026 - RNA, 19 nt, Artificial Sequence
  Description of Artificial Sequence: Synthetic oligonucleotide
uuuugauaggucaagggca

SEQ ID NO: 1107027 - RNA, 19 nt, Artificial Sequence
  Description of Artificial Sequence: Synthetic oligonucleotide
ucuaggucucccuugaagg

SEQ ID NO: 1107028 - RNA, 19 nt, Artificial Sequence
  Description of Artificial Sequence: Synthetic oligonucleotide
ucuuuugauaggucaaggg

SEQ ID NO: 1107029 - RNA, 19 nt, Artificial Sequence
  Description of Artificial Sequence: Synthetic oligonucleotide
cuuuugauaggucaagggc

SEQ ID NO: 1107030 - RNA, 19 nt, Artificial Sequence
  Description of Artificial Sequence: Synthetic oligonucleotide
gauguagacaaugucaccc

SEQ ID NO: 1107031 - RNA, 19 nt, Artificial Sequence
  Description of Artificial Sequence: Synthetic oligonucleotide
uggaaauuagggcagcaag

SEQ ID NO: 1107032 - RNA, 19 nt, Artificial Sequence
  Description of Artificial Sequence: Synthetic oligonucleotide
acgaaguuccagcucaucc

SEQ ID NO: 1107033 - RNA, 19 nt, Artificial Sequence
  Description of Artificial Sequence: Synthetic oligonucleotide
cucaauaaggccuggagac

SEQ ID NO: 1107034 - RNA, 19 nt, Artificial Sequence
  Description of Artificial Sequence: Synthetic oligonucleotide
uuaggggaaacgcuguggg

SEQ ID NO: 1107035 - RNA, 19 nt, Artificial Sequence
  Description of Artificial Sequence: Synthetic oligonucleotide
uuugauaggucaagggcag

SEQ ID NO: 1107036 - RNA, 19 nt, Artificial Sequence
  Description of Artificial Sequence: Synthetic oligonucleotide
uuagaugggaagaugccca

SEQ ID NO: 1107037 - RNA, 19 nt, Artificial Sequence
  Description of Artificial Sequence: Synthetic oligonucleotide
aucucuacgucccaggaag

SEQ ID NO: 1107038 - RNA, 19 nt, Artificial Sequence
  Description of Artificial Sequence: Synthetic oligonucleotide
uugcggaucaggcagaugu

SEQ ID NO: 1107039 - RNA, 19 nt, Artificial Sequence
  Description of Artificial Sequence: Synthetic oligonucleotide
ugguacauagcucgguacg

SEQ ID NO: 1107040 - RNA, 19 nt, Artificial Sequence
  Description of Artificial Sequence: Synthetic oligonucleotide
agugcuacugcuccucacc

SEQ ID NO: 1107041 - RNA, 19 nt, Artificial Sequence
  Description of Artificial Sequence: Synthetic oligonucleotide
auauguggaggcccuaccc

SEQ ID NO: 1107042 - RNA, 19 nt, Artificial Sequence
  Description of Artificial Sequence: Synthetic oligonucleotide
auaauuuccagggaauguc

SEQ ID NO: 1107043 - RNA, 19 nt, Artificial Sequence
  Description of Artificial Sequence: Synthetic oligonucleotide
ggaacgggaagccagagcg

SEQ ID NO: 1107044 - RNA, 19 nt, Artificial Sequence
  Description of Artificial Sequence: Synthetic oligonucleotide
aauuagggcagcaagcaug

SEQ ID NO: 1107045 - RNA, 19 nt, Artificial Sequence
  Description of Artificial Sequence: Synthetic oligonucleotide
ucucaauaaggccuggaga

SEQ ID NO: 1107046 - RNA, 19 nt, Artificial Sequence
  Description of Artificial Sequence: Synthetic oligonucleotide
gaagucaaacuugagccgg

SEQ ID NO: 1107047 - RNA, 19 nt, Artificial Sequence
  Description of Artificial Sequence: Synthetic oligonucleotide
aacgcugugggugaugggg

SEQ ID NO: 1107048 - RNA, 19 nt, Artificial Sequence
  Description of Artificial Sequence: Synthetic oligonucleotide
agaguauauguggaggccc

SEQ ID NO: 1107049 - RNA, 19 nt, Artificial Sequence
  Description of Artificial Sequence: Synthetic oligonucleotide
uaauuuccagggaaugucc

SEQ ID NO: 1107050 - RNA, 19 nt, Artificial Sequence
  Description of Artificial Sequence: Synthetic oligonucleotide
ugggaaucaguccagggga

SEQ ID NO: 1107051 - RNA, 19 nt, Artificial Sequence
  Description of Artificial Sequence: Synthetic oligonucleotide
gacaaaaucucuacguccc

SEQ ID NO: 1107052 - RNA, 19 nt, Artificial Sequence
  Description of Artificial Sequence: Synthetic oligonucleotide
ggggagaccacucacaccg

SEQ ID NO: 1107053 - RNA, 19 nt, Artificial Sequence
  Description of Artificial Sequence: Synthetic oligonucleotide
aacgggaagccagagcggc

SEQ ID NO: 1107054 - RNA, 19 nt, Artificial Sequence
  Description of Artificial Sequence: Synthetic oligonucleotide
aucuggucucaauaaggcc

SEQ ID NO: 1107055 - RNA, 19 nt, Artificial Sequence
  Description of Artificial Sequence: Synthetic oligonucleotide
agugacaggguagacgagc

SEQ ID NO: 1107056 - RNA, 19 nt, Artificial Sequence
  Description of Artificial Sequence: Synthetic oligonucleotide
ugaugcgacccucauacca

SEQ ID NO: 1107057 - RNA, 19 nt, Artificial Sequence
  Description of Artificial Sequence: Synthetic oligonucleotide
uacuaggguaggaagccgg

SEQ ID NO: 1107058 - RNA, 19 nt, Artificial Sequence
  Description of Artificial Sequence: Synthetic oligonucleotide
gcuaucaucacagagccgg

SEQ ID NO: 1107059 - RNA, 19 nt, Artificial Sequence
  Description of Artificial Sequence: Synthetic oligonucleotide
cauaccaauguucauucac

SEQ ID NO: 1107060 - RNA, 19 nt, Artificial Sequence
  Description of Artificial Sequence: Synthetic oligonucleotide
ugucagaugaggugauggg

SEQ ID NO: 1107061 - RNA, 19 nt, Artificial Sequence
  Description of Artificial Sequence: Synthetic oligonucleotide
agaccacucacaccggggc

SEQ ID NO: 1107062 - RNA, 19 nt, Artificial Sequence
  Description of Artificial Sequence: Synthetic oligonucleotide
agaucugucuuuugauagg

SEQ ID NO: 1107063 - RNA, 19 nt, Artificial Sequence
  Description of Artificial Sequence: Synthetic oligonucleotide
ucucuacuaggguaggaag

SEQ ID NO: 1107064 - RNA, 19 nt, Artificial Sequence
  Description of Artificial Sequence: Synthetic oligonucleotide
ucuacuaggguaggaagcc

SEQ ID NO: 1107065 - RNA, 19 nt, Artificial Sequence
  Description of Artificial Sequence: Synthetic oligonucleotide
ucaaaggaaugccugugac

SEQ ID NO: 1107066 - RNA, 19 nt, Artificial Sequence
  Description of Artificial Sequence: Synthetic oligonucleotide
aaagggaagguugcugggg

SEQ ID NO: 1107067 - RNA, 19 nt, Artificial Sequence
  Description of Artificial Sequence: Synthetic oligonucleotide
acaccaacaaaccagccau

SEQ ID NO: 1107068 - RNA, 19 nt, Artificial Sequence
  Description of Artificial Sequence: Synthetic oligonucleotide
gagcagacuguauuugcgg

SEQ ID NO: 1107069 - RNA, 19 nt, Artificial Sequence
  Description of Artificial Sequence: Synthetic oligonucleotide
uucuauaggacggcuggcg

SEQ ID NO: 1107070 - RNA, 19 nt, Artificial Sequence
  Description of Artificial Sequence: Synthetic oligonucleotide
cucuacuaggguaggaagc

SEQ ID NO: 1107071 - RNA, 19 nt, Artificial Sequence
  Description of Artificial Sequence: Synthetic oligonucleotide
aagggaaagugguggcagg

SEQ ID NO: 1107072 - RNA, 19 nt, Artificial Sequence
  Description of Artificial Sequence: Synthetic oligonucleotide
uguauaucuguggugcuug

SEQ ID NO: 1107073 - RNA, 19 nt, Artificial Sequence
  Description of Artificial Sequence: Synthetic oligonucleotide
ucuauaggacggcuggcgc

SEQ ID NO: 1107074 - RNA, 19 nt, Artificial Sequence
  Description of Artificial Sequence: Synthetic oligonucleotide
uuuggucucuacuagggua

SEQ ID NO: 1107075 - RNA, 19 nt, Artificial Sequence
  Description of Artificial Sequence: Synthetic oligonucleotide
cucauaccaauguucauuc

SEQ ID NO: 1107076 - RNA, 19 nt, Artificial Sequence
  Description of Artificial Sequence: Synthetic oligonucleotide
aguggaguccacuugugcu

SEQ ID NO: 1107077 - RNA, 19 nt, Artificial Sequence
  Description of Artificial Sequence: Synthetic oligonucleotide
cuagauaccgggaagagcu

SEQ ID NO: 1107078 - RNA, 19 nt, Artificial Sequence
  Description of Artificial Sequence: Synthetic oligonucleotide
gaaacgcugugggugaugg

SEQ ID NO: 1107079 - RNA, 19 nt, Artificial Sequence
  Description of Artificial Sequence: Synthetic oligonucleotide
caacaaaccagccaucauc

SEQ ID NO: 1107080 - RNA, 19 nt, Artificial Sequence
  Description of Artificial Sequence: Synthetic oligonucleotide
uuauuagaggaaccccaug

SEQ ID NO: 1107081 - RNA, 19 nt, Artificial Sequence
  Description of Artificial Sequence: Synthetic oligonucleotide
gguagacaaaaucucuacg

SEQ ID NO: 1107082 - RNA, 19 nt, Artificial Sequence
  Description of Artificial Sequence: Synthetic oligonucleotide
uauauguggaggcccuacc

SEQ ID NO: 1107083 - RNA, 19 nt, Artificial Sequence
  Description of Artificial Sequence: Synthetic oligonucleotide
uucuaggcccagcuggagg

SEQ ID NO: 1107084 - RNA, 19 nt, Artificial Sequence
  Description of Artificial Sequence: Synthetic oligonucleotide
ucaucuucgggcagcaccu

SEQ ID NO: 1107085 - RNA, 19 nt, Artificial Sequence
  Description of Artificial Sequence: Synthetic oligonucleotide
accggggcuacauaauuuc

SEQ ID NO: 1107086 - RNA, 19 nt, Artificial Sequence
  Description of Artificial Sequence: Synthetic oligonucleotide
aagguguuccccaccuugc

SEQ ID NO: 1107087 - RNA, 19 nt, Artificial Sequence
  Description of Artificial Sequence: Synthetic oligonucleotide
uuggggaucucaucuucgg

SEQ ID NO: 1107088 - RNA, 19 nt, Artificial Sequence
  Description of Artificial Sequence: Synthetic oligonucleotide
uacauagcucgguacggag

SEQ ID NO: 1107089 - RNA, 19 nt, Artificial Sequence
  Description of Artificial Sequence: Synthetic oligonucleotide
auccauguuuauuuuacau

SEQ ID NO: 1107090 - RNA, 19 nt, Artificial Sequence
  Description of Artificial Sequence: Synthetic oligonucleotide
ucuacgucccaggaagggg

SEQ ID NO: 1107091 - RNA, 19 nt, Artificial Sequence
  Description of Artificial Sequence: Synthetic oligonucleotide
auuugcgggugguaagggg

SEQ ID NO: 1107092 - RNA, 19 nt, Artificial Sequence
  Description of Artificial Sequence: Synthetic oligonucleotide
auuaggggaaacgcugugg

SEQ ID NO: 1107093 - RNA, 19 nt, Artificial Sequence
  Description of Artificial Sequence: Synthetic oligonucleotide
ucauuaggggaaacgcugu

SEQ ID NO: 1107094 - RNA, 19 nt, Artificial Sequence
  Description of Artificial Sequence: Synthetic oligonucleotide
aauaaggccuggagacagc

SEQ ID NO: 1107095 - RNA, 19 nt, Artificial Sequence
  Description of Artificial Sequence: Synthetic oligonucleotide
uggagggugauggggaacg

SEQ ID NO: 1107096 - RNA, 19 nt, Artificial Sequence
  Description of Artificial Sequence: Synthetic oligonucleotide
aagccgguccuuauuagag

SEQ ID NO: 1107097 - RNA, 19 nt, Artificial Sequence
  Description of Artificial Sequence: Synthetic oligonucleotide
gagacaccaacaaaccagc

SEQ ID NO: 1107098 - RNA, 19 nt, Artificial Sequence
  Description of Artificial Sequence: Synthetic oligonucleotide
ccaauguucauucaccuug

SEQ ID NO: 1107099 - RNA, 19 nt, Artificial Sequence
  Description of Artificial Sequence: Synthetic oligonucleotide
gcuggcuccaaauugccgg

SEQ ID NO: 1107100 - RNA, 19 nt, Artificial Sequence
  Description of Artificial Sequence: Synthetic oligonucleotide
ggagacaccaacaaaccag

SEQ ID NO: 1107101 - RNA, 19 nt, Artificial Sequence
  Description of Artificial Sequence: Synthetic oligonucleotide
cucgcuggcuccaaauugc

SEQ ID NO: 1107102 - RNA, 19 nt, Artificial Sequence
  Description of Artificial Sequence: Synthetic oligonucleotide
gucagaugaggugaugggg

SEQ ID NO: 1107103 - RNA, 19 nt, Artificial Sequence
  Description of Artificial Sequence: Synthetic oligonucleotide
uccacauaauuagauggga

SEQ ID NO: 1107104 - RNA, 19 nt, Artificial Sequence
  Description of Artificial Sequence: Synthetic oligonucleotide
uccuuauuagaggaacccc

SEQ ID NO: 1107105 - RNA, 19 nt, Artificial Sequence
  Description of Artificial Sequence: Synthetic oligonucleotide
ucuguacguagcuggccgg

SEQ ID NO: 1107106 - RNA, 19 nt, Artificial Sequence
  Description of Artificial Sequence: Synthetic oligonucleotide
guauuugcgggugguaagg

SEQ ID NO: 1107107 - RNA, 19 nt, Artificial Sequence
  Description of Artificial Sequence: Synthetic oligonucleotide
cauuucuauaggacggcug

SEQ ID NO: 1107108 - RNA, 19 nt, Artificial Sequence
  Description of Artificial Sequence: Synthetic oligonucleotide
caauaaggccuggagacag

SEQ ID NO: 1107109 - RNA, 19 nt, Artificial Sequence
  Description of Artificial Sequence: Synthetic oligonucleotide
cuauaggacggcuggcgcc

SEQ ID NO: 1107110 - RNA, 19 nt, Artificial Sequence
  Description of Artificial Sequence: Synthetic oligonucleotide
acauaauuuccagggaaug

SEQ ID NO: 1107111 - RNA, 19 nt, Artificial Sequence
  Description of Artificial Sequence: Synthetic oligonucleotide
aggucaagggcaguugugg

SEQ ID NO: 1107112 - RNA, 19 nt, Artificial Sequence
  Description of Artificial Sequence: Synthetic oligonucleotide
ucugaguucuccgggagac

SEQ ID NO: 1107113 - RNA, 19 nt, Artificial Sequence
  Description of Artificial Sequence: Synthetic oligonucleotide
agagcagacuguauuugcg

SEQ ID NO: 1107114 - RNA, 19 nt, Artificial Sequence
  Description of Artificial Sequence: Synthetic oligonucleotide
ucucuacgucccaggaagg

SEQ ID NO: 1107115 - RNA, 19 nt, Artificial Sequence
  Description of Artificial Sequence: Synthetic oligonucleotide
auaggucaagggcaguugu

SEQ ID NO: 1107116 - RNA, 19 nt, Artificial Sequence
  Description of Artificial Sequence: Synthetic oligonucleotide
cagagcagacuguauuugc

SEQ ID NO: 1107117 - RNA, 19 nt, Artificial Sequence
  Description of Artificial Sequence: Synthetic oligonucleotide
agggcaccuagauaccggg

SEQ ID NO: 1107118 - RNA, 19 nt, Artificial Sequence
  Description of Artificial Sequence: Synthetic oligonucleotide
gugguugucagaugaggug

SEQ ID NO: 1107119 - RNA, 19 nt, Artificial Sequence
  Description of Artificial Sequence: Synthetic oligonucleotide
aagccuugaggcaaggccu

SEQ ID NO: 1107120 - RNA, 19 nt, Artificial Sequence
  Description of Artificial Sequence: Synthetic oligonucleotide
uccuauagugcuacugcuc

SEQ ID NO: 1107121 - RNA, 19 nt, Artificial Sequence
  Description of Artificial Sequence: Synthetic oligonucleotide
gaaugccugugacucgcgg

SEQ ID NO: 1107122 - RNA, 19 nt, Artificial Sequence
  Description of Artificial Sequence: Synthetic oligonucleotide
gaugccuuggcguccugug

SEQ ID NO: 1107123 - RNA, 19 nt, Artificial Sequence
  Description of Artificial Sequence: Synthetic oligonucleotide
uauuugcgggugguaaggg

SEQ ID NO: 1107124 - RNA, 19 nt, Artificial Sequence
  Description of Artificial Sequence: Synthetic oligonucleotide
gucuuuugauaggucaagg

SEQ ID NO: 1107125 - RNA, 19 nt, Artificial Sequence
  Description of Artificial Sequence: Synthetic oligonucleotide
cauagcucgguacggaguc

SEQ ID NO: 1107126 - RNA, 19 nt, Artificial Sequence
  Description of Artificial Sequence: Synthetic oligonucleotide
uuucggaaggacaguucca

SEQ ID NO: 1107127 - RNA, 19 nt, Artificial Sequence
  Description of Artificial Sequence: Synthetic oligonucleotide
caagguguuccccaccuug

SEQ ID NO: 1107128 - RNA, 19 nt, Artificial Sequence
  Description of Artificial Sequence: Synthetic oligonucleotide
ggucuguacugguacauag

SEQ ID NO: 1107129 - RNA, 19 nt, Artificial Sequence
  Description of Artificial Sequence: Synthetic oligonucleotide
cucuaggucucccuugaag

SEQ ID NO: 1107130 - RNA, 19 nt, Artificial Sequence
  Description of Artificial Sequence: Synthetic oligonucleotide
uucuccgggagacaccaac

SEQ ID NO: 1107131 - RNA, 19 nt, Artificial Sequence
  Description of Artificial Sequence: Synthetic oligonucleotide
aggcugacaagguguuccc

SEQ ID NO: 1107132 - RNA, 19 nt, Artificial Sequence
  Description of Artificial Sequence: Synthetic oligonucleotide
caaauugccggggagacca

SEQ ID NO: 1107133 - RNA, 19 nt, Artificial Sequence
  Description of Artificial Sequence: Synthetic oligonucleotide
ugacaggguagacgagccg

SEQ ID NO: 1107134 - RNA, 19 nt, Artificial Sequence
  Description of Artificial Sequence: Synthetic oligonucleotide
ccuauagugcuacugcucc

SEQ ID NO: 1107135 - RNA, 19 nt, Artificial Sequence
  Description of Artificial Sequence: Synthetic oligonucleotide
ggaaauuagggcagcaagc

SEQ ID NO: 1107136 - RNA, 19 nt, Artificial Sequence
  Description of Artificial Sequence: Synthetic oligonucleotide
cucgguacggaguccagug

SEQ ID NO: 1107137 - RNA, 19 nt, Artificial Sequence
  Description of Artificial Sequence: Synthetic oligonucleotide
cucaguagccucugagaag

SEQ ID NO: 1107138 - RNA, 19 nt, Artificial Sequence
  Description of Artificial Sequence: Synthetic oligonucleotide
aggggaaacgcugugggug

SEQ ID NO: 1107139 - RNA, 19 nt, Artificial Sequence
  Description of Artificial Sequence: Synthetic oligonucleotide
guccuuauuagaggaaccc

SEQ ID NO: 1107140 - RNA, 19 nt, Artificial Sequence
  Description of Artificial Sequence: Synthetic oligonucleotide
agggcagcaagcaugucuc

SEQ ID NO: 1107141 - RNA, 19 nt, Artificial Sequence
  Description of Artificial Sequence: Synthetic oligonucleotide
agauaccgggaagagcugg

SEQ ID NO: 1107142 - RNA, 19 nt, Artificial Sequence
  Description of Artificial Sequence: Synthetic oligonucleotide
aagucaaacuugagccggg

SEQ ID NO: 1107143 - RNA, 19 nt, Artificial Sequence
  Description of Artificial Sequence: Synthetic oligonucleotide
uaggucaagggcaguugug

SEQ ID NO: 1107144 - RNA, 19 nt, Artificial Sequence
  Description of Artificial Sequence: Synthetic oligonucleotide
uggggaucuggucucaaua

SEQ ID NO: 1107145 - RNA, 19 nt, Artificial Sequence
  Description of Artificial Sequence: Synthetic oligonucleotide
agccgugguugucagauga

SEQ ID NO: 1107146 - RNA, 19 nt, Artificial Sequence
  Description of Artificial Sequence: Synthetic oligonucleotide
guagccucugagaagagga

SEQ ID NO: 1107147 - RNA, 19 nt, Artificial Sequence
  Description of Artificial Sequence: Synthetic oligonucleotide
agccgguccuuauuagagg

SEQ ID NO: 1107148 - RNA, 19 nt, Artificial Sequence
  Description of Artificial Sequence: Synthetic oligonucleotide
uccaaauugccggggagac

SEQ ID NO: 1107149 - RNA, 19 nt, Artificial Sequence
  Description of Artificial Sequence: Synthetic oligonucleotide
ugaagguauacugggccac

SEQ ID NO: 1107150 - RNA, 19 nt, Artificial Sequence
  Description of Artificial Sequence: Synthetic oligonucleotide
aaacgcugugggugauggg

SEQ ID NO: 1107151 - RNA, 19 nt, Artificial Sequence
  Description of Artificial Sequence: Synthetic oligonucleotide
cucccgguuuaucuguacg

SEQ ID NO: 1107152 - RNA, 19 nt, Artificial Sequence
  Description of Artificial Sequence: Synthetic oligonucleotide
caugucucccuguagaucu

SEQ ID NO: 1107153 - RNA, 19 nt, Artificial Sequence
  Description of Artificial Sequence: Synthetic oligonucleotide
ggaagagcuggaaauuagg

SEQ ID NO: 1107154 - RNA, 19 nt, Artificial Sequence
  Description of Artificial Sequence: Synthetic oligonucleotide
ucccgguuuaucuguacgu

SEQ ID NO: 1107155 - RNA, 19 nt, Artificial Sequence
  Description of Artificial Sequence: Synthetic oligonucleotide
aggacaguuccaccucuag

SEQ ID NO: 1107156 - RNA, 19 nt, Artificial Sequence
  Description of Artificial Sequence: Synthetic oligonucleotide
acggaguccaguguauauc

SEQ ID NO: 1107157 - RNA, 19 nt, Artificial Sequence
  Description of Artificial Sequence: Synthetic oligonucleotide
agacuguauuugcgggugg

SEQ ID NO: 1107158 - RNA, 19 nt, Artificial Sequence
  Description of Artificial Sequence: Synthetic oligonucleotide
cugguacauagcucgguac

SEQ ID NO: 1107159 - RNA, 19 nt, Artificial Sequence
  Description of Artificial Sequence: Synthetic oligonucleotide
cgugaugcgacccucauac

SEQ ID NO: 1107160 - RNA, 19 nt, Artificial Sequence
  Description of Artificial Sequence: Synthetic oligonucleotide
gaagccgguccuuauuaga

SEQ ID NO: 1107161 - RNA, 19 nt, Artificial Sequence
  Description of Artificial Sequence: Synthetic oligonucleotide
agggaaugucccaaauuuc

SEQ ID NO: 1107162 - RNA, 19 nt, Artificial Sequence
  Description of Artificial Sequence: Synthetic oligonucleotide
auuagggcagcaagcaugu

SEQ ID NO: 1107163 - RNA, 19 nt, Artificial Sequence
  Description of Artificial Sequence: Synthetic oligonucleotide
ccagaguauauguggaggc

SEQ ID NO: 1107164 - RNA, 19 nt, Artificial Sequence
  Description of Artificial Sequence: Synthetic oligonucleotide
uuccagagggcaccuagau

SEQ ID NO: 1107165 - RNA, 19 nt, Artificial Sequence
  Description of Artificial Sequence: Synthetic oligonucleotide
ggggcuacauaauuuccag

SEQ ID NO: 1107166 - RNA, 19 nt, Artificial Sequence
  Description of Artificial Sequence: Synthetic oligonucleotide
cuggcuccaaauugccggg

SEQ ID NO: 1107167 - RNA, 19 nt, Artificial Sequence
  Description of Artificial Sequence: Synthetic oligonucleotide
uguccacuucuuuauggau

SEQ ID NO: 1107168 - RNA, 19 nt, Artificial Sequence
  Description of Artificial Sequence: Synthetic oligonucleotide
cagaguauauguggaggcc

SEQ ID NO: 1107169 - RNA, 19 nt, Artificial Sequence
  Description of Artificial Sequence: Synthetic oligonucleotide
gagcuggaaauuagggcag

SEQ ID NO: 1107170 - RNA, 19 nt, Artificial Sequence
  Description of Artificial Sequence: Synthetic oligonucleotide
uguagacaaugucacccuu

SEQ ID NO: 1107171 - RNA, 19 nt, Artificial Sequence
  Description of Artificial Sequence: Synthetic oligonucleotide
ugaaggcugacaagguguu

SEQ ID NO: 1107172 - RNA, 19 nt, Artificial Sequence
  Description of Artificial Sequence: Synthetic oligonucleotide
uaucuguacguagcuggcc

SEQ ID NO: 1107173 - RNA, 19 nt, Artificial Sequence
  Description of Artificial Sequence: Synthetic oligonucleotide
gagaccacucacaccgggg

SEQ ID NO: 1107174 - RNA, 19 nt, Artificial Sequence
  Description of Artificial Sequence: Synthetic oligonucleotide
cacacgguccccuucacga

SEQ ID NO: 1107175 - RNA, 19 nt, Artificial Sequence
  Description of Artificial Sequence: Synthetic oligonucleotide
agaugggaagaugcccagc

SEQ ID NO: 1107176 - RNA, 19 nt, Artificial Sequence
  Description of Artificial Sequence: Synthetic oligonucleotide
uuucuauaggacggcuggc

SEQ ID NO: 1107177 - RNA, 19 nt, Artificial Sequence
  Description of Artificial Sequence: Synthetic oligonucleotide
ggacaguuccaccucuagg

SEQ ID NO: 1107178 - RNA, 19 nt, Artificial Sequence
  Description of Artificial Sequence: Synthetic oligonucleotide
gcaguugugggccuuaguc

SEQ ID NO: 1107179 - RNA, 19 nt, Artificial Sequence
  Description of Artificial Sequence: Synthetic oligonucleotide
aguucuccgggagacacca

SEQ ID NO: 1107180 - RNA, 19 nt, Artificial Sequence
  Description of Artificial Sequence: Synthetic oligonucleotide
guagaucugucuuuugaua

SEQ ID NO: 1107181 - RNA, 19 nt, Artificial Sequence
  Description of Artificial Sequence: Synthetic oligonucleotide
ccgggagacaccaacaaac

SEQ ID NO: 1107182 - RNA, 19 nt, Artificial Sequence
  Description of Artificial Sequence: Synthetic oligonucleotide
acugguacauagcucggua

SEQ ID NO: 1107183 - RNA, 19 nt, Artificial Sequence
  Description of Artificial Sequence: Synthetic oligonucleotide
gguacauagcucgguacgg

SEQ ID NO: 1107184 - RNA, 19 nt, Artificial Sequence
  Description of Artificial Sequence: Synthetic oligonucleotide
uccaggggacuuugagggg

SEQ ID NO: 1107185 - RNA, 19 nt, Artificial Sequence
  Description of Artificial Sequence: Synthetic oligonucleotide
cagagucagcuccuugggg

SEQ ID NO: 1107186 - RNA, 19 nt, Artificial Sequence
  Description of Artificial Sequence: Synthetic oligonucleotide
ggugggaaucaguccaggg

SEQ ID NO: 1107187 - RNA, 19 nt, Artificial Sequence
  Description of Artificial Sequence: Synthetic oligonucleotide
guguuccccaccuugcuuc

SEQ ID NO: 1107188 - RNA, 19 nt, Artificial Sequence
  Description of Artificial Sequence: Synthetic oligonucleotide
gugauggggaacgggaagc

SEQ ID NO: 1107189 - RNA, 19 nt, Artificial Sequence
  Description of Artificial Sequence: Synthetic oligonucleotide
aguccaguguauaucugug

SEQ ID NO: 1107190 - RNA, 19 nt, Artificial Sequence
  Description of Artificial Sequence: Synthetic oligonucleotide
ugcggaucaggcagaugug

SEQ ID NO: 1107191 - RNA, 19 nt, Artificial Sequence
  Description of Artificial Sequence: Synthetic oligonucleotide
cucaccccauccucgcugg

SEQ ID NO: 1107192 - RNA, 19 nt, Artificial Sequence
  Description of Artificial Sequence: Synthetic oligonucleotide
uagauaccgggaagagcug

SEQ ID NO: 1107193 - RNA, 19 nt, Artificial Sequence
  Description of Artificial Sequence: Synthetic oligonucleotide
ggguagacaaaaucucuac

SEQ ID NO: 1107194 - RNA, 19 nt, Artificial Sequence
  Description of Artificial Sequence: Synthetic oligonucleotide
ugauggggaacgggaagcc

SEQ ID NO: 1107195 - RNA, 19 nt, Artificial Sequence
  Description of Artificial Sequence: Synthetic oligonucleotide
gacggcuggcgccucgagg

SEQ ID NO: 1107196 - RNA, 19 nt, Artificial Sequence
  Description of Artificial Sequence: Synthetic oligonucleotide
agguccgaccuccccaguc

SEQ ID NO: 1107197 - RNA, 19 nt, Artificial Sequence
  Description of Artificial Sequence: Synthetic oligonucleotide
auggggaacgggaagccag

SEQ ID NO: 1107198 - RNA, 19 nt, Artificial Sequence
  Description of Artificial Sequence: Synthetic oligonucleotide
uacggaguccaguguauau

SEQ ID NO: 1107199 - RNA, 19 nt, Artificial Sequence
  Description of Artificial Sequence: Synthetic oligonucleotide
ucgcgggugggaaucaguc

SEQ ID NO: 1107200 - RNA, 19 nt, Artificial Sequence
  Description of Artificial Sequence: Synthetic oligonucleotide
ggucaagggcaguuguggg

SEQ ID NO: 1107201 - RNA, 19 nt, Artificial Sequence
  Description of Artificial Sequence: Synthetic oligonucleotide
aggccuuuggucucuacua

SEQ ID NO: 1107202 - RNA, 19 nt, Artificial Sequence
  Description of Artificial Sequence: Synthetic oligonucleotide
cauuaggggaaacgcugug

SEQ ID NO: 1107203 - RNA, 19 nt, Artificial Sequence
  Description of Artificial Sequence: Synthetic oligonucleotide
agccucugagaagaggaag

SEQ ID NO: 1107204 - RNA, 19 nt, Artificial Sequence
  Description of Artificial Sequence: Synthetic oligonucleotide
cagacuguauuugcgggug

SEQ ID NO: 1107205 - RNA, 19 nt, Artificial Sequence
  Description of Artificial Sequence: Synthetic oligonucleotide
guaugugggcugcuugaug

SEQ ID NO: 1107206 - RNA, 19 nt, Artificial Sequence
  Description of Artificial Sequence: Synthetic oligonucleotide
auagcucgguacggagucc

SEQ ID NO: 1107207 - RNA, 19 nt, Artificial Sequence
  Description of Artificial Sequence: Synthetic oligonucleotide
aggaagccgguccuuauua

SEQ ID NO: 1107208 - RNA, 19 nt, Artificial Sequence
  Description of Artificial Sequence: Synthetic oligonucleotide
uccgggagacaccaacaaa

SEQ ID NO: 1107209 - RNA, 19 nt, Artificial Sequence
  Description of Artificial Sequence: Synthetic oligonucleotide
gggaucuggucucaauaag

SEQ ID NO: 1107210 - RNA, 19 nt, Artificial Sequence
  Description of Artificial Sequence: Synthetic oligonucleotide
uugcuucuaggcccagcug

SEQ ID NO: 1107211 - RNA, 19 nt, Artificial Sequence
  Description of Artificial Sequence: Synthetic oligonucleotide
cucuacgucccaggaaggg

SEQ ID NO: 1107212 - RNA, 19 nt, Artificial Sequence
  Description of Artificial Sequence: Synthetic oligonucleotide
cuacuaggguaggaagccg

SEQ ID NO: 1107213 - RNA, 19 nt, Artificial Sequence
  Description of Artificial Sequence: Synthetic oligonucleotide
ugauaggucaagggcaguu

SEQ ID NO: 1107214 - RNA, 19 nt, Artificial Sequence
  Description of Artificial Sequence: Synthetic oligonucleotide
gaacgggaagccagagcgg

SEQ ID NO: 1107215 - RNA, 19 nt, Artificial Sequence
  Description of Artificial Sequence: Synthetic oligonucleotide
cacagcgucuccguacucc

SEQ ID NO: 1107216 - RNA, 19 nt, Artificial Sequence
  Description of Artificial Sequence: Synthetic oligonucleotide
accuagauaccgggaagag

SEQ ID NO: 1107217 - RNA, 19 nt, Artificial Sequence
  Description of Artificial Sequence: Synthetic oligonucleotide
gaccuccccagucagugga

SEQ ID NO: 1107218 - RNA, 19 nt, Artificial Sequence
  Description of Artificial Sequence: Synthetic oligonucleotide
gggcuacauaauuuccagg

SEQ ID NO: 1107219 - RNA, 19 nt, Artificial Sequence
  Description of Artificial Sequence: Synthetic oligonucleotide
uuagucgggaggguccaga

SEQ ID NO: 1107220 - RNA, 19 nt, Artificial Sequence
  Description of Artificial Sequence: Synthetic oligonucleotide
ccuuauuagaggaacccca

SEQ ID NO: 1107221 - RNA, 19 nt, Artificial Sequence
  Description of Artificial Sequence: Synthetic oligonucleotide
gugacaggguagacgagcc

SEQ ID NO: 1107222 - RNA, 19 nt, Artificial Sequence
  Description of Artificial Sequence: Synthetic oligonucleotide
gacgagccgugguugucag

SEQ ID NO: 1107223 - RNA, 19 nt, Artificial Sequence
  Description of Artificial Sequence: Synthetic oligonucleotide
uaccgggaagagcuggaaa

SEQ ID NO: 1107224 - RNA, 19 nt, Artificial Sequence
  Description of Artificial Sequence: Synthetic oligonucleotide
acuugagccgggcagccuu

SEQ ID NO: 1107225 - RNA, 19 nt, Artificial Sequence
  Description of Artificial Sequence: Synthetic oligonucleotide
gucuguacugguacauagc

SEQ ID NO: 1107226 - RNA, 19 nt, Artificial Sequence
  Description of Artificial Sequence: Synthetic oligonucleotide
caucacagagccggagccg

SEQ ID NO: 1107227 - RNA, 19 nt, Artificial Sequence
  Description of Artificial Sequence: Synthetic oligonucleotide
gugggccuuagucgggagg

SEQ ID NO: 1107228 - RNA, 19 nt, Artificial Sequence
  Description of Artificial Sequence: Synthetic oligonucleotide
ucgguacggaguccagugu

SEQ ID NO: 1107229 - RNA, 19 nt, Artificial Sequence
  Description of Artificial Sequence: Synthetic oligonucleotide
gaugcgacccucauaccaa

SEQ ID NO: 1107230 - RNA, 19 nt, Artificial Sequence
  Description of Artificial Sequence: Synthetic oligonucleotide
ggagaccacucacaccggg

SEQ ID NO: 1107231 - RNA, 19 nt, Artificial Sequence
  Description of Artificial Sequence: Synthetic oligonucleotide
ggaggcccuacccaggggc

SEQ ID NO: 1107232 - RNA, 19 nt, Artificial Sequence
  Description of Artificial Sequence: Synthetic oligonucleotide
ugugcccgugaugcgaccc

SEQ ID NO: 1107233 - RNA, 19 nt, Artificial Sequence
  Description of Artificial Sequence: Synthetic oligonucleotide
aauugccggggagaccacu

SEQ ID NO: 1107234 - RNA, 19 nt, Artificial Sequence
  Description of Artificial Sequence: Synthetic oligonucleotide
uccugugcccgugaugcga

SEQ ID NO: 1107235 - RNA, 19 nt, Artificial Sequence
  Description of Artificial Sequence: Synthetic oligonucleotide
cacgguccccuucacgaag

SEQ ID NO: 1107236 - RNA, 19 nt, Artificial Sequence
  Description of Artificial Sequence: Synthetic oligonucleotide
guacugguacauagcucgg

SEQ ID NO: 1107237 - RNA, 19 nt, Artificial Sequence
  Description of Artificial Sequence: Synthetic oligonucleotide
ugugacucgcgggugggaa

SEQ ID NO: 1107238 - RNA, 19 nt, Artificial Sequence
  Description of Artificial Sequence: Synthetic oligonucleotide
aaauugccggggagaccac

SEQ ID NO: 1107239 - RNA, 19 nt, Artificial Sequence
  Description of Artificial Sequence: Synthetic oligonucleotide
ggccuuuggucucuacuag

SEQ ID NO: 1107240 - RNA, 19 nt, Artificial Sequence
  Description of Artificial Sequence: Synthetic oligonucleotide
ugugggccuuagucgggag

SEQ ID NO: 1107241 - RNA, 19 nt, Artificial Sequence
  Description of Artificial Sequence: Synthetic oligonucleotide
uguuccccaccuugcuucu

SEQ ID NO: 1107242 - RNA, 19 nt, Artificial Sequence
  Description of Artificial Sequence: Synthetic oligonucleotide
cagggaaugucccaaauuu

SEQ ID NO: 1107243 - RNA, 19 nt, Artificial Sequence
  Description of Artificial Sequence: Synthetic oligonucleotide
aggguagacgagccguggu

SEQ ID NO: 1107244 - RNA, 19 nt, Artificial Sequence
  Description of Artificial Sequence: Synthetic oligonucleotide
ggaucaggcagauguguuc

SEQ ID NO: 1107245 - RNA, 19 nt, Artificial Sequence
  Description of Artificial Sequence: Synthetic oligonucleotide
gucaaacuugagccgggca

SEQ ID NO: 1107246 - RNA, 19 nt, Artificial Sequence
  Description of Artificial Sequence: Synthetic oligonucleotide
uacgucccaggaaggggcu

SEQ ID NO: 1107247 - RNA, 19 nt, Artificial Sequence
  Description of Artificial Sequence: Synthetic oligonucleotide
uagcucgguacggagucca

SEQ ID NO: 1107248 - RNA, 19 nt, Artificial Sequence
  Description of Artificial Sequence: Synthetic oligonucleotide
gucccaaauuucugaguuc

SEQ ID NO: 1107249 - RNA, 19 nt, Artificial Sequence
  Description of Artificial Sequence: Synthetic oligonucleotide
acaccggggcuacauaauu

SEQ ID NO: 1107250 - RNA, 19 nt, Artificial Sequence
  Description of Artificial Sequence: Synthetic oligonucleotide
cauaauuuccagggaaugu

SEQ ID NO: 1107251 - RNA, 19 nt, Artificial Sequence
  Description of Artificial Sequence: Synthetic oligonucleotide
gcucaguagccucugagaa

SEQ ID NO: 1107252 - RNA, 19 nt, Artificial Sequence
  Description of Artificial Sequence: Synthetic oligonucleotide
cucgaggaugggacagggc

SEQ ID NO: 1107253 - RNA, 19 nt, Artificial Sequence
  Description of Artificial Sequence: Synthetic oligonucleotide
gauaccgggaagagcugga

SEQ ID NO: 1107254 - RNA, 19 nt, Artificial Sequence
  Description of Artificial Sequence: Synthetic oligonucleotide
ccgguuuaucuguacguag

SEQ ID NO: 1107255 - RNA, 19 nt, Artificial Sequence
  Description of Artificial Sequence: Synthetic oligonucleotide
ucccuguagaucugucuuu

SEQ ID NO: 1107256 - RNA, 19 nt, Artificial Sequence
  Description of Artificial Sequence: Synthetic oligonucleotide
cgguuuaucuguacguagc

SEQ ID NO: 1107257 - RNA, 19 nt, Artificial Sequence
  Description of Artificial Sequence: Synthetic oligonucleotide
uguacguagcuggccggga

SEQ ID NO: 1107258 - RNA, 19 nt, Artificial Sequence
  Description of Artificial Sequence: Synthetic oligonucleotide
acauagcucgguacggagu

SEQ ID NO: 1107259 - RNA, 19 nt, Artificial Sequence
  Description of Artificial Sequence: Synthetic oligonucleotide
uggcuccaaauugccgggg

SEQ ID NO: 1107260 - RNA, 19 nt, Artificial Sequence
  Description of Artificial Sequence: Synthetic oligonucleotide
aaucaguccaggggacuuu

SEQ ID NO: 1107261 - RNA, 19 nt, Artificial Sequence
  Description of Artificial Sequence: Synthetic oligonucleotide
cucccuccuauagugcuac

SEQ ID NO: 1107262 - RNA, 19 nt, Artificial Sequence
  Description of Artificial Sequence: Synthetic oligonucleotide
gucucuacuaggguaggaa

SEQ ID NO: 1107263 - RNA, 19 nt, Artificial Sequence
  Description of Artificial Sequence: Synthetic oligonucleotide
ccaguguauaucuguggug

SEQ ID NO: 1107264 - RNA, 19 nt, Artificial Sequence
  Description of Artificial Sequence: Synthetic oligonucleotide
ugacucgcgggugggaauc

SEQ ID NO: 1107265 - RNA, 19 nt, Artificial Sequence
  Description of Artificial Sequence: Synthetic oligonucleotide
uguggcggagcuggaguga

SEQ ID NO: 1107266 - RNA, 19 nt, Artificial Sequence
  Description of Artificial Sequence: Synthetic oligonucleotide
gggcacuaggcucucgggc

SEQ ID NO: 1107267 - RNA, 19 nt, Artificial Sequence
  Description of Artificial Sequence: Synthetic oligonucleotide
ggugaagcgagagccaguc

SEQ ID NO: 1107268 - RNA, 19 nt, Artificial Sequence
  Description of Artificial Sequence: Synthetic oligonucleotide
uugugggccuuagucggga

SEQ ID NO: 1107269 - RNA, 19 nt, Artificial Sequence
  Description of Artificial Sequence: Synthetic oligonucleotide
caggguagacgagccgugg

SEQ ID NO: 1107270 - RNA, 19 nt, Artificial Sequence
  Description of Artificial Sequence: Synthetic oligonucleotide
guugucagaugaggugaug

SEQ ID NO: 1107271 - RNA, 19 nt, Artificial Sequence
  Description of Artificial Sequence: Synthetic oligonucleotide
gcgggugggaaucagucca

SEQ ID NO: 1107272 - RNA, 19 nt, Artificial Sequence
  Description of Artificial Sequence: Synthetic oligonucleotide
aggguccagaguauaugug

SEQ ID NO: 1107273 - RNA, 19 nt, Artificial Sequence
  Description of Artificial Sequence: Synthetic oligonucleotide
gggcucaguagccucugag

SEQ ID NO: 1107274 - RNA, 19 nt, Artificial Sequence
  Description of Artificial Sequence: Synthetic oligonucleotide
gggagacaccaacaaacca

SEQ ID NO: 1107275 - RNA, 19 nt, Artificial Sequence
  Description of Artificial Sequence: Synthetic oligonucleotide
agacgagccgugguuguca

SEQ ID NO: 1107276 - RNA, 19 nt, Artificial Sequence
  Description of Artificial Sequence: Synthetic oligonucleotide
guacauagcucgguacgga

SEQ ID NO: 1107277 - RNA, 19 nt, Artificial Sequence
  Description of Artificial Sequence: Synthetic oligonucleotide
auccucgcuggcuccaaau

SEQ ID NO: 1107278 - RNA, 19 nt, Artificial Sequence
  Description of Artificial Sequence: Synthetic oligonucleotide
gccgguccuuauuagagga

SEQ ID NO: 1107279 - RNA, 19 nt, Artificial Sequence
  Description of Artificial Sequence: Synthetic oligonucleotide
gauucuggguuuggggucu

SEQ ID NO: 1107280 - RNA, 19 nt, Artificial Sequence
  Description of Artificial Sequence: Synthetic oligonucleotide
guccgaccuccccagucag

SEQ ID NO: 1107281 - RNA, 19 nt, Artificial Sequence
  Description of Artificial Sequence: Synthetic oligonucleotide
gguuuaucuguacguagcu

SEQ ID NO: 1107282 - RNA, 19 nt, Artificial Sequence
  Description of Artificial Sequence: Synthetic oligonucleotide
cuggugggaaaugggagga

SEQ ID NO: 1107283 - RNA, 19 nt, Artificial Sequence
  Description of Artificial Sequence: Synthetic oligonucleotide
acuaggguaggaagccggu

SEQ ID NO: 1107284 - RNA, 19 nt, Artificial Sequence
  Description of Artificial Sequence: Synthetic oligonucleotide
ccuagauaccgggaagagc

SEQ ID NO: 1107285 - RNA, 19 nt, Artificial Sequence
  Description of Artificial Sequence: Synthetic oligonucleotide
gugaugcgacccucauacc

SEQ ID NO: 1107286 - RNA, 19 nt, Artificial Sequence
  Description of Artificial Sequence: Synthetic oligonucleotide
uccucaccccauccucgcu

SEQ ID NO: 1107287 - RNA, 19 nt, Artificial Sequence
  Description of Artificial Sequence: Synthetic oligonucleotide
cuccuauagugcuacugcu

SEQ ID NO: 1107288 - RNA, 19 nt, Artificial Sequence
  Description of Artificial Sequence: Synthetic oligonucleotide
cuaggguaggaagccgguc

SEQ ID NO: 1107289 - RNA, 19 nt, Artificial Sequence
  Description of Artificial Sequence: Synthetic oligonucleotide
ccucgcuggcuccaaauug

SEQ ID NO: 1107290 - RNA, 19 nt, Artificial Sequence
  Description of Artificial Sequence: Synthetic oligonucleotide
ggggcacuaggcucucggg

SEQ ID NO: 1107291 - RNA, 19 nt, Artificial Sequence
  Description of Artificial Sequence: Synthetic oligonucleotide
gggaacgggaagccagagc

SEQ ID NO: 1107292 - RNA, 19 nt, Artificial Sequence
  Description of Artificial Sequence: Synthetic oligonucleotide
augcgacccucauaccaau

SEQ ID NO: 1107293 - RNA, 19 nt, Artificial Sequence
  Description of Artificial Sequence: Synthetic oligonucleotide
gagccgugguugucagaug

SEQ ID NO: 1107294 - RNA, 19 nt, Artificial Sequence
  Description of Artificial Sequence: Synthetic oligonucleotide
ggccuugaaggcugacaag

SEQ ID NO: 1107295 - RNA, 19 nt, Artificial Sequence
  Description of Artificial Sequence: Synthetic oligonucleotide
ggggcucccgguuuaucug

SEQ ID NO: 1107296 - RNA, 19 nt, Artificial Sequence
  Description of Artificial Sequence: Synthetic oligonucleotide
caguagccucugagaagag

SEQ ID NO: 1107297 - RNA, 19 nt, Artificial Sequence
  Description of Artificial Sequence: Synthetic oligonucleotide
acuguauuugcggguggua

SEQ ID NO: 1107298 - RNA, 19 nt, Artificial Sequence
  Description of Artificial Sequence: Synthetic oligonucleotide
aaggacaguuccaccucua

SEQ ID NO: 1107299 - RNA, 19 nt, Artificial Sequence
  Description of Artificial Sequence: Synthetic oligonucleotide
ggcgccucgaggaugggac

SEQ ID NO: 1107300 - RNA, 19 nt, Artificial Sequence
  Description of Artificial Sequence: Synthetic oligonucleotide
cagccggccgugguguucc

SEQ ID NO: 1107301 - RNA, 19 nt, Artificial Sequence
  Description of Artificial Sequence: Synthetic oligonucleotide
ccggggcuacauaauuucc

SEQ ID NO: 1107302 - RNA, 19 nt, Artificial Sequence
  Description of Artificial Sequence: Synthetic oligonucleotide
ccgugguugucagaugagg

SEQ ID NO: 1107303 - RNA, 19 nt, Artificial Sequence
  Description of Artificial Sequence: Synthetic oligonucleotide
acgggaagccagagcggcg

SEQ ID NO: 1107304 - RNA, 19 nt, Artificial Sequence
  Description of Artificial Sequence: Synthetic oligonucleotide
gucucccuugaagguauac

SEQ ID NO: 1107305 - RNA, 19 nt, Artificial Sequence
  Description of Artificial Sequence: Synthetic oligonucleotide
gguccgaccuccccaguca

SEQ ID NO: 1107306 - RNA, 19 nt, Artificial Sequence
  Description of Artificial Sequence: Synthetic oligonucleotide
gacuguauuugcggguggu

SEQ ID NO: 1107307 - RNA, 19 nt, Artificial Sequence
  Description of Artificial Sequence: Synthetic oligonucleotide
cuccgggagacaccaacaa

SEQ ID NO: 1107308 - RNA, 19 nt, Artificial Sequence
  Description of Artificial Sequence: Synthetic oligonucleotide
uagacgagccgugguuguc

SEQ ID NO: 1107309 - RNA, 19 nt, Artificial Sequence
  Description of Artificial Sequence: Synthetic oligonucleotide
accacucacaccggggcua

SEQ ID NO: 1107310 - RNA, 19 nt, Artificial Sequence
  Description of Artificial Sequence: Synthetic oligonucleotide
gccuuagucgggagggucc

SEQ ID NO: 1107311 - RNA, 19 nt, Artificial Sequence
  Description of Artificial Sequence: Synthetic oligonucleotide
aguauauguggaggcccua

SEQ ID NO: 1107312 - RNA, 19 nt, Artificial Sequence
  Description of Artificial Sequence: Synthetic oligonucleotide
gggagguccgaccucccca

SEQ ID NO: 1107313 - RNA, 19 nt, Artificial Sequence
  Description of Artificial Sequence: Synthetic oligonucleotide
cuuagucgggaggguccag

SEQ ID NO: 1107314 - RNA, 19 nt, Artificial Sequence
  Description of Artificial Sequence: Synthetic oligonucleotide
auaccgggaagagcuggaa

SEQ ID NO: 1107315 - RNA, 19 nt, Artificial Sequence
  Description of Artificial Sequence: Synthetic oligonucleotide
gaaucaguccaggggacuu

SEQ ID NO: 1107316 - RNA, 19 nt, Artificial Sequence
  Description of Artificial Sequence: Synthetic oligonucleotide
aggcccuacccaggggcuc

SEQ ID NO: 1107317 - RNA, 19 nt, Artificial Sequence
  Description of Artificial Sequence: Synthetic oligonucleotide
ggaagccuugaggcaaggc

SEQ ID NO: 1107318 - RNA, 19 nt, Artificial Sequence
  Description of Artificial Sequence: Synthetic oligonucleotide
gaccacucacaccggggcu

SEQ ID NO: 1107319 - RNA, 19 nt, Artificial Sequence
  Description of Artificial Sequence: Synthetic oligonucleotide
ggaaugccugugacucgcg

SEQ ID NO: 1107320 - RNA, 19 nt, Artificial Sequence
  Description of Artificial Sequence: Synthetic oligonucleotide
auacugggccacagcgucu

SEQ ID NO: 1107321 - RNA, 19 nt, Artificial Sequence
  Description of Artificial Sequence: Synthetic oligonucleotide
acuaggcucucgggcugag

SEQ ID NO: 1107322 - RNA, 19 nt, Artificial Sequence
  Description of Artificial Sequence: Synthetic oligonucleotide
gguuuggggucugggcugc

SEQ ID NO: 1107323 - RNA, 19 nt, Artificial Sequence
  Description of Artificial Sequence: Synthetic oligonucleotide
aggggagguccgaccuccc

SEQ ID NO: 1107324 - RNA, 19 nt, Artificial Sequence
  Description of Artificial Sequence: Synthetic oligonucleotide
uggcguccugugcccguga

SEQ ID NO: 1107325 - RNA, 19 nt, Artificial Sequence
  Description of Artificial Sequence: Synthetic oligonucleotide
ccggggagaccacucacac

SEQ ID NO: 1107326 - RNA, 19 nt, Artificial Sequence
  Description of Artificial Sequence: Synthetic oligonucleotide
cuugcggaucaggcagaug

SEQ ID NO: 1107327 - RNA, 19 nt, Artificial Sequence
  Description of Artificial Sequence: Synthetic oligonucleotide
acucgcgggugggaaucag

SEQ ID NO: 1107328 - RNA, 19 nt, Artificial Sequence
  Description of Artificial Sequence: Synthetic oligonucleotide
uggcgccucgaggauggga

SEQ ID NO: 1107329 - RNA, 19 nt, Artificial Sequence
  Description of Artificial Sequence: Synthetic oligonucleotide
acgguccccuucacgaagu

SEQ ID NO: 1107330 - RNA, 19 nt, Artificial Sequence
  Description of Artificial Sequence: Synthetic oligonucleotide
auaggacggcuggcgccuc

SEQ ID NO: 1107331 - RNA, 19 nt, Artificial Sequence
  Description of Artificial Sequence: Synthetic oligonucleotide
ggagggugauggggaacgg

SEQ ID NO: 1107332 - RNA, 19 nt, Artificial Sequence
  Description of Artificial Sequence: Synthetic oligonucleotide
ggggacugggccuggaagu

SEQ ID NO: 1107333 - RNA, 19 nt, Artificial Sequence
  Description of Artificial Sequence: Synthetic oligonucleotide
cccuccuauagugcuacug

SEQ ID NO: 1107334 - RNA, 19 nt, Artificial Sequence
  Description of Artificial Sequence: Synthetic oligonucleotide
cuccguacuccagcaccug

SEQ ID NO: 1107335 - RNA, 19 nt, Artificial Sequence
  Description of Artificial Sequence: Synthetic oligonucleotide
guaggaagccgguccuuau

SEQ ID NO: 1107336 - RNA, 19 nt, Artificial Sequence
  Description of Artificial Sequence: Synthetic oligonucleotide
gcgacccucauaccaaugu

SEQ ID NO: 1107337 - RNA, 19 nt, Artificial Sequence
  Description of Artificial Sequence: Synthetic oligonucleotide
agccggccgugguguuccc

SEQ ID NO: 1107338 - RNA, 19 nt, Artificial Sequence
  Description of Artificial Sequence: Synthetic oligonucleotide
uuagggcagcaagcauguc

SEQ ID NO: 1107339 - RNA, 19 nt, Artificial Sequence
  Description of Artificial Sequence: Synthetic oligonucleotide
ggcugacaagguguucccc

SEQ ID NO: 1107340 - RNA, 19 nt, Artificial Sequence
  Description of Artificial Sequence: Synthetic oligonucleotide
ugcccgugaugcgacccuc

SEQ ID NO: 1107341 - RNA, 19 nt, Artificial Sequence
  Description of Artificial Sequence: Synthetic oligonucleotide
gccuuggcguccugugccc

SEQ ID NO: 1107342 - RNA, 19 nt, Artificial Sequence
  Description of Artificial Sequence: Synthetic oligonucleotide
gccagagcggcgaggggag

SEQ ID NO: 1107343 - RNA, 19 nt, Artificial Sequence
  Description of Artificial Sequence: Synthetic oligonucleotide
ggggaacgggaagccagag

SEQ ID NO: 1107344 - RNA, 19 nt, Artificial Sequence
  Description of Artificial Sequence: Synthetic oligonucleotide
guacggaguccaguguaua

SEQ ID NO: 1107345 - RNA, 19 nt, Artificial Sequence
  Description of Artificial Sequence: Synthetic oligonucleotide
agcucgguacggaguccag

SEQ ID NO: 1107346 - RNA, 19 nt, Artificial Sequence
  Description of Artificial Sequence: Synthetic oligonucleotide
ggucucaauaaggccugga

SEQ ID NO: 1107347 - RNA, 19 nt, Artificial Sequence
  Description of Artificial Sequence: Synthetic oligonucleotide
guuccaccucuaggucucc

SEQ ID NO: 1107348 - RNA, 19 nt, Artificial Sequence
  Description of Artificial Sequence: Synthetic oligonucleotide
ccugugacucgcggguggg

SEQ ID NO: 1107349 - RNA, 19 nt, Artificial Sequence
  Description of Artificial Sequence: Synthetic oligonucleotide
guguauaucuguggugcuu

SEQ ID NO: 1107350 - RNA, 19 nt, Artificial Sequence
  Description of Artificial Sequence: Synthetic oligonucleotide
gggagaccacucacaccgg

SEQ ID NO: 1107351 - RNA, 19 nt, Artificial Sequence
  Description of Artificial Sequence: Synthetic oligonucleotide
gacucgcgggugggaauca

SEQ ID NO: 1107352 - RNA, 19 nt, Artificial Sequence
  Description of Artificial Sequence: Synthetic oligonucleotide
cggggcuacauaauuucca

SEQ ID NO: 1107353 - RNA, 19 nt, Artificial Sequence
  Description of Artificial Sequence: Synthetic oligonucleotide
gccgugguugucagaugag

SEQ ID NO: 1107354 - RNA, 19 nt, Artificial Sequence
  Description of Artificial Sequence: Synthetic oligonucleotide
caucuucgggcagcaccuc

SEQ ID NO: 1107355 - RNA, 19 nt, Artificial Sequence
  Description of Artificial Sequence: Synthetic oligonucleotide
cucacaccggggcuacaua

SEQ ID NO: 1107356 - RNA, 19 nt, Artificial Sequence
  Description of Artificial Sequence: Synthetic oligonucleotide
ggccuuagucgggaggguc

SEQ ID NO: 1107357 - RNA, 19 nt, Artificial Sequence
  Description of Artificial Sequence: Synthetic oligonucleotide
gcguccugugcccgugaug

SEQ ID NO: 1107358 - RNA, 19 nt, Artificial Sequence
  Description of Artificial Sequence: Synthetic oligonucleotide
cacaccggggcuacauaau

SEQ ID NO: 1107359 - RNA, 19 nt, Artificial Sequence
  Description of Artificial Sequence: Synthetic oligonucleotide
caccggggcuacauaauuu

SEQ ID NO: 1107360 - RNA, 19 nt, Artificial Sequence
  Description of Artificial Sequence: Synthetic oligonucleotide
cggaaggacaguuccaccu

SEQ ID NO: 1107361 - RNA, 19 nt, Artificial Sequence
  Description of Artificial Sequence: Synthetic oligonucleotide
ggacggcuggcgccucgag

SEQ ID NO: 1107362 - RNA, 19 nt, Artificial Sequence
  Description of Artificial Sequence: Synthetic oligonucleotide
cucgcgggugggaaucagu

SEQ ID NO: 1107363 - RNA, 19 nt, Artificial Sequence
  Description of Artificial Sequence: Synthetic oligonucleotide
cgugguugucagaugaggu

SEQ ID NO: 1107364 - RNA, 19 nt, Artificial Sequence
  Description of Artificial Sequence: Synthetic oligonucleotide
ccucauaccaauguucauu

SEQ ID NO: 1107365 - RNA, 19 nt, Artificial Sequence
  Description of Artificial Sequence: Synthetic oligonucleotide
gaggcccuacccaggggcu

SEQ ID NO: 1107366 - RNA, 19 nt, Artificial Sequence
  Description of Artificial Sequence: Synthetic oligonucleotide
cacuaggcucucgggcuga

SEQ ID NO: 1107367 - RNA, 19 nt, Artificial Sequence
  Description of Artificial Sequence: Synthetic oligonucleotide
cggggagaccacucacacc

SEQ ID NO: 1107368 - RNA, 19 nt, Artificial Sequence
  Description of Artificial Sequence: Synthetic oligonucleotide
gugacucgcgggugggaau

SEQ ID NO: 1107369 - RNA, 19 nt, Artificial Sequence
  Description of Artificial Sequence: Synthetic oligonucleotide
gcgaggggagguccgaccu

SEQ ID NO: 1107370 - RNA, 19 nt, Artificial Sequence
  Description of Artificial Sequence: Synthetic oligonucleotide
ggcuggcgccucgaggaug

SEQ ID NO: 1107371 - RNA, 19 nt, Artificial Sequence
  Description of Artificial Sequence: Synthetic oligonucleotide
cauccucgcuggcuccaaa

SEQ ID NO: 1107372 - RNA, 19 nt, Artificial Sequence
  Description of Artificial Sequence: Synthetic oligonucleotide
cgaccuccccagucagugg

SEQ ID NO: 1107373 - RNA, 19 nt, Artificial Sequence
  Description of Artificial Sequence: Synthetic oligonucleotide
ggguagacgagccgugguu

SEQ ID NO: 1107374 - RNA, 19 nt, Artificial Sequence
  Description of Artificial Sequence: Synthetic oligonucleotide
gguacggaguccaguguau

SEQ ID NO: 1107375 - RNA, 19 nt, Artificial Sequence
  Description of Artificial Sequence: Synthetic oligonucleotide
gggcucccgguuuaucugu

SEQ ID NO: 1107376 - RNA, 19 nt, Artificial Sequence
  Description of Artificial Sequence: Synthetic oligonucleotide
gguaugugggcugcuugau

SEQ ID NO: 1107377 - RNA, 19 nt, Artificial Sequence
  Description of Artificial Sequence: Synthetic oligonucleotide
gccggggagaccacucaca

SEQ ID NO: 1107378 - RNA, 19 nt, Artificial Sequence
  Description of Artificial Sequence: Synthetic oligonucleotide
ccuuagucgggagggucca

SEQ ID NO: 1107379 - RNA, 19 nt, Artificial Sequence
  Description of Artificial Sequence: Synthetic oligonucleotide
gguugucagaugaggugau

SEQ ID NO: 1107380 - RNA, 19 nt, Artificial Sequence
  Description of Artificial Sequence: Synthetic oligonucleotide
gagguccgaccuccccagu

SEQ ID NO: 1107381 - RNA, 19 nt, Artificial Sequence
  Description of Artificial Sequence: Synthetic oligonucleotide
gggcaccuagauaccggga

SEQ ID NO: 1107382 - RNA, 19 nt, Artificial Sequence
  Description of Artificial Sequence: Synthetic oligonucleotide
ggccuggagacagccucca

SEQ ID NO: 1107383 - RNA, 19 nt, Artificial Sequence
  Description of Artificial Sequence: Synthetic oligonucleotide
ggcaguugugggccuuagu

SEQ ID NO: 1107384 - RNA, 19 nt, Artificial Sequence
  Description of Artificial Sequence: Synthetic oligonucleotide
acgucccaggaaggggcuu

SEQ ID NO: 1107385 - RNA, 19 nt, Artificial Sequence
  Description of Artificial Sequence: Synthetic oligonucleotide
gcgccucgaggaugggaca

SEQ ID NO: 1107386 - RNA, 19 nt, Artificial Sequence
  Description of Artificial Sequence: Synthetic oligonucleotide
ccgguccuuauuagaggaa

SEQ ID NO: 1107387 - RNA, 19 nt, Artificial Sequence
  Description of Artificial Sequence: Synthetic oligonucleotide
caccccauccucgcuggcu

SEQ ID NO: 1107388 - RNA, 19 nt, Artificial Sequence
  Description of Artificial Sequence: Synthetic oligonucleotide
cgucuccguacuccagcac

SEQ ID NO: 1107389 - RNA, 19 nt, Artificial Sequence
  Description of Artificial Sequence: Synthetic oligonucleotide
ccauuucuauaggacggcu

SEQ ID NO: 1107390 - RNA, 19 nt, Artificial Sequence
  Description of Artificial Sequence: Synthetic oligonucleotide
ccagggaaugucccaaauu

SEQ ID NO: 1107391 - RNA, 19 nt, Artificial Sequence
  Description of Artificial Sequence: Synthetic oligonucleotide
cgguacggaguccagugua

SEQ ID NO: 1107392 - RNA, 19 nt, Artificial Sequence
  Description of Artificial Sequence: Synthetic oligonucleotide
ccagagcggcgaggggagg

SEQ ID NO: 1107393 - RNA, 19 nt, Artificial Sequence
  Description of Artificial Sequence: Synthetic oligonucleotide
gggguucaaagggaagguu

SEQ ID NO: 1107394 - RNA, 19 nt, Artificial Sequence
  Description of Artificial Sequence: Synthetic oligonucleotide
cgggaagagcuggaaauua

SEQ ID NO: 1107395 - RNA, 19 nt, Artificial Sequence
  Description of Artificial Sequence: Synthetic oligonucleotide
cgagccgugguugucagau

SEQ ID NO: 1107396 - RNA, 19 nt, Artificial Sequence
  Description of Artificial Sequence: Synthetic oligonucleotide
ccucauucuggggucugua

SEQ ID NO: 1107397 - RNA, 19 nt, Artificial Sequence
  Description of Artificial Sequence: Synthetic oligonucleotide
ccgugaugcgacccucaua

SEQ ID NO: 1107398 - RNA, 19 nt, Artificial Sequence
  Description of Artificial Sequence: Synthetic oligonucleotide
cccuguagaucugucuuuu

SEQ ID NO: 1107399 - RNA, 19 nt, Artificial Sequence
  Description of Artificial Sequence: Synthetic oligonucleotide
ggcguccugugcccgugau

SEQ ID NO: 1107400 - RNA, 19 nt, Artificial Sequence
  Description of Artificial Sequence: Synthetic oligonucleotide
cccuuucggaaggacaguu

SEQ ID NO: 1107401 - RNA, 19 nt, Artificial Sequence
  Description of Artificial Sequence: Synthetic oligonucleotide
cggaucaggcagauguguu

SEQ ID NO: 1107402 - RNA, 19 nt, Artificial Sequence
  Description of Artificial Sequence: Synthetic oligonucleotide
gcggcgaggggagguccga

SEQ ID NO: 1107403 - RNA, 19 nt, Artificial Sequence
  Description of Artificial Sequence: Synthetic oligonucleotide
gggaaacgcugugggugau

SEQ ID NO: 1107404 - RNA, 19 nt, Artificial Sequence
  Description of Artificial Sequence: Synthetic oligonucleotide
cgacccucauaccaauguu

SEQ ID NO: 1107405 - RNA, 19 nt, Artificial Sequence
  Description of Artificial Sequence: Synthetic oligonucleotide
ccggggcucccgguuuauc

SEQ ID NO: 1107406 - RNA, 19 nt, Artificial Sequence
  Description of Artificial Sequence: Synthetic oligonucleotide
ggguaggaagccgguccuu

SEQ ID NO: 1107407 - RNA, 19 nt, Artificial Sequence
  Description of Artificial Sequence: Synthetic oligonucleotide
ccacuucuuuauggaugua

SEQ ID NO: 1107408 - RNA, 19 nt, Artificial Sequence
  Description of Artificial Sequence: Synthetic oligonucleotide
gccggggcucccgguuuau

SEQ ID NO: 1107409 - RNA, 19 nt, Artificial Sequence
  Description of Artificial Sequence: Synthetic oligonucleotide
cggcuggcgccucgaggau

SEQ ID NO: 1107410 - RNA, 19 nt, Artificial Sequence
  Description of Artificial Sequence: Synthetic oligonucleotide
uguaaggcagauuacauug

SEQ ID NO: 1107411 - RNA, 19 nt, Artificial Sequence
  Description of Artificial Sequence: Synthetic oligonucleotide
uucaauagcaccgagagac

SEQ ID NO: 1107412 - RNA, 19 nt, Artificial Sequence
  Description of Artificial Sequence: Synthetic oligonucleotide
uguaaugagacacuccuuc

SEQ ID NO: 1107413 - RNA, 19 nt, Artificial Sequence
  Description of Artificial Sequence: Synthetic oligonucleotide
uguagagucguacaaagua

SEQ ID NO: 1107414 - RNA, 19 nt, Artificial Sequence
  Description of Artificial Sequence: Synthetic oligonucleotide
uguguagagucguacaaag

SEQ ID NO: 1107415 - RNA, 19 nt, Artificial Sequence
  Description of Artificial Sequence: Synthetic oligonucleotide
aggcagauuacauuguagg

SEQ ID NO: 1107416 - RNA, 19 nt, Artificial Sequence
  Description of Artificial Sequence: Synthetic oligonucleotide
agauaggacggauaugcac

SEQ ID NO: 1107417 - RNA, 19 nt, Artificial Sequence
  Description of Artificial Sequence: Synthetic oligonucleotide
aaacuaggcucugcgaugc

SEQ ID NO: 1107418 - RNA, 19 nt, Artificial Sequence
  Description of Artificial Sequence: Synthetic oligonucleotide
agagguuugaaggaggcgg

SEQ ID NO: 1107419 - RNA, 19 nt, Artificial Sequence
  Description of Artificial Sequence: Synthetic oligonucleotide
gacagcauaggucuuccgg

SEQ ID NO: 1107420 - RNA, 19 nt, Artificial Sequence
  Description of Artificial Sequence: Synthetic oligonucleotide
auuacauuguagggcaugc

SEQ ID NO: 1107421 - RNA, 19 nt, Artificial Sequence
  Description of Artificial Sequence: Synthetic oligonucleotide
augacauccugguaugugg

SEQ ID NO: 1107422 - RNA, 19 nt, Artificial Sequence
  Description of Artificial Sequence: Synthetic oligonucleotide
ugugucaaacaagucauag

SEQ ID NO: 1107423 - RNA, 19 nt, Artificial Sequence
  Description of Artificial Sequence: Synthetic oligonucleotide
augaaguugagggaugcgc

SEQ ID NO: 1107424 - RNA, 19 nt, Artificial Sequence
  Description of Artificial Sequence: Synthetic oligonucleotide
agccguagcacacagccac

SEQ ID NO: 1107425 - RNA, 19 nt, Artificial Sequence
  Description of Artificial Sequence: Synthetic oligonucleotide
uaucggguccuccaaaacc

SEQ ID NO: 1107426 - RNA, 19 nt, Artificial Sequence
  Description of Artificial Sequence: Synthetic oligonucleotide
agccccagagguuugaagg

SEQ ID NO: 1107427 - RNA, 19 nt, Artificial Sequence
  Description of Artificial Sequence: Synthetic oligonucleotide
gaagagaggacucccuucc

SEQ ID NO: 1107428 - RNA, 19 nt, Artificial Sequence
  Description of Artificial Sequence: Synthetic oligonucleotide
cuuggaaccagacccagag

SEQ ID NO: 1107429 - RNA, 19 nt, Artificial Sequence
  Description of Artificial Sequence: Synthetic oligonucleotide
uagagucguacaaaguagc

SEQ ID NO: 1107430 - RNA, 19 nt, Artificial Sequence
  Description of Artificial Sequence: Synthetic oligonucleotide
agugauaacgagcuccucu

SEQ ID NO: 1107431 - RNA, 19 nt, Artificial Sequence
  Description of Artificial Sequence: Synthetic oligonucleotide
agggaugcgcagaagaucc

SEQ ID NO: 1107432 - RNA, 19 nt, Artificial Sequence
  Description of Artificial Sequence: Synthetic oligonucleotide
guggauguaacuugguuug

SEQ ID NO: 1107433 - RNA, 19 nt, Artificial Sequence
  Description of Artificial Sequence: Synthetic oligonucleotide
cuuggaacuacaaggcaag

SEQ ID NO: 1107434 - RNA, 19 nt, Artificial Sequence
  Description of Artificial Sequence: Synthetic oligonucleotide
aauguggcggccacguccc

SEQ ID NO: 1107435 - RNA, 19 nt, Artificial Sequence
  Description of Artificial Sequence: Synthetic oligonucleotide
uacggaacuggaauguggc

SEQ ID NO: 1107436 - RNA, 19 nt, Artificial Sequence
  Description of Artificial Sequence: Synthetic oligonucleotide
agucuuucuuccccugucc

SEQ ID NO: 1107437 - RNA, 19 nt, Artificial Sequence
  Description of Artificial Sequence: Synthetic oligonucleotide
agugaucggugucauuggc

SEQ ID NO: 1107438 - RNA, 19 nt, Artificial Sequence
  Description of Artificial Sequence: Synthetic oligonucleotide
acguaaacuaggcucugcg

SEQ ID NO: 1107439 - RNA, 19 nt, Artificial Sequence
  Description of Artificial Sequence: Synthetic oligonucleotide
agagaauacuuggagauca

SEQ ID NO: 1107440 - RNA, 19 nt, Artificial Sequence
  Description of Artificial Sequence: Synthetic oligonucleotide
ugaucggugucauuggcca

SEQ ID NO: 1107441 - RNA, 19 nt, Artificial Sequence
  Description of Artificial Sequence: Synthetic oligonucleotide
agucauagacagcauaggu

SEQ ID NO: 1107442 - RNA, 19 nt, Artificial Sequence
  Description of Artificial Sequence: Synthetic oligonucleotide
uccacguaaacuaggcucu

SEQ ID NO: 1107443 - RNA, 19 nt, Artificial Sequence
  Description of Artificial Sequence: Synthetic oligonucleotide
agauccgaaucccaacgcg

SEQ ID NO: 1107444 - RNA, 19 nt, Artificial Sequence
  Description of Artificial Sequence: Synthetic oligonucleotide
aguguuucguuguccuggc

SEQ ID NO: 1107445 - RNA, 19 nt, Artificial Sequence
  Description of Artificial Sequence: Synthetic oligonucleotide
ugugagugguaacuggugu

SEQ ID NO: 1107446 - RNA, 19 nt, Artificial Sequence
  Description of Artificial Sequence: Synthetic oligonucleotide
uaaacuaggcucugcgaug

SEQ ID NO: 1107447 - RNA, 19 nt, Artificial Sequence
  Description of Artificial Sequence: Synthetic oligonucleotide
agguuuaccagcaagggcu

SEQ ID NO: 1107448 - RNA, 19 nt, Artificial Sequence
  Description of Artificial Sequence: Synthetic oligonucleotide
aucggguccuccaaaaccc

SEQ ID NO: 1107449 - RNA, 19 nt, Artificial Sequence
  Description of Artificial Sequence: Synthetic oligonucleotide
acugguguggaacaagcga

SEQ ID NO: 1107450 - RNA, 19 nt, Artificial Sequence
  Description of Artificial Sequence: Synthetic oligonucleotide
auagcaccgagagaccugc

SEQ ID NO: 1107451 - RNA, 19 nt, Artificial Sequence
  Description of Artificial Sequence: Synthetic oligonucleotide
gacggauaugcacugcuug

SEQ ID NO: 1107452 - RNA, 19 nt, Artificial Sequence
  Description of Artificial Sequence: Synthetic oligonucleotide
uuccgggugcccaaaauga

SEQ ID NO: 1107453 - RNA, 19 nt, Artificial Sequence
  Description of Artificial Sequence: Synthetic oligonucleotide
aguagcuggagccaucaga

SEQ ID NO: 1107454 - RNA, 19 nt, Artificial Sequence
  Description of Artificial Sequence: Synthetic oligonucleotide
cagauuacauuguagggca

SEQ ID NO: 1107455 - RNA, 19 nt, Artificial Sequence
  Description of Artificial Sequence: Synthetic oligonucleotide
cucggugcagacaaccucc

SEQ ID NO: 1107456 - RNA, 19 nt, Artificial Sequence
  Description of Artificial Sequence: Synthetic oligonucleotide
guagagucguacaaaguag

SEQ ID NO: 1107457 - RNA, 19 nt, Artificial Sequence
  Description of Artificial Sequence: Synthetic oligonucleotide
cauggggugagguucucgg

SEQ ID NO: 1107458 - RNA, 19 nt, Artificial Sequence
  Description of Artificial Sequence: Synthetic oligonucleotide
gagguuucgggaguuauug

SEQ ID NO: 1107459 - RNA, 19 nt, Artificial Sequence
  Description of Artificial Sequence: Synthetic oligonucleotide
agcgaucugccuucaauag

SEQ ID NO: 1107460 - RNA, 19 nt, Artificial Sequence
  Description of Artificial Sequence: Synthetic oligonucleotide
guccacguaaacuaggcuc

SEQ ID NO: 1107461 - RNA, 19 nt, Artificial Sequence
  Description of Artificial Sequence: Synthetic oligonucleotide
acugcuugugagugguaac

SEQ ID NO: 1107462 - RNA, 19 nt, Artificial Sequence
  Description of Artificial Sequence: Synthetic oligonucleotide
ggcagauuacauuguaggg

SEQ ID NO: 1107463 - RNA, 19 nt, Artificial Sequence
  Description of Artificial Sequence: Synthetic oligonucleotide
acucacguaccgcugugcg

SEQ ID NO: 1107464 - RNA, 19 nt, Artificial Sequence
  Description of Artificial Sequence: Synthetic oligonucleotide
gcagauaggacggauaugc

SEQ ID NO: 1107465 - RNA, 19 nt, Artificial Sequence
  Description of Artificial Sequence: Synthetic oligonucleotide
aaggcagauuacauuguag

SEQ ID NO: 1107466 - RNA, 19 nt, Artificial Sequence
  Description of Artificial Sequence: Synthetic oligonucleotide
ggagccguagcacacagcc

SEQ ID NO: 1107467 - RNA, 19 nt, Artificial Sequence
  Description of Artificial Sequence: Synthetic oligonucleotide
gaacaugcggaagagggac

SEQ ID NO: 1107468 - RNA, 19 nt, Artificial Sequence
  Description of Artificial Sequence: Synthetic oligonucleotide
auaacgagcuccucucuca

SEQ ID NO: 1107469 - RNA, 19 nt, Artificial Sequence
  Description of Artificial Sequence: Synthetic oligonucleotide
aagcgaucugccuucaaua

SEQ ID NO: 1107470 - RNA, 19 nt, Artificial Sequence
  Description of Artificial Sequence: Synthetic oligonucleotide
uugugagugguaacuggug

SEQ ID NO: 1107471 - RNA, 19 nt, Artificial Sequence
  Description of Artificial Sequence: Synthetic oligonucleotide
guauugguggagucgauga

SEQ ID NO: 1107472 - RNA, 19 nt, Artificial Sequence
  Description of Artificial Sequence: Synthetic oligonucleotide
aauggugagcgugugcaca

SEQ ID NO: 1107473 - RNA, 19 nt, Artificial Sequence
  Description of Artificial Sequence: Synthetic oligonucleotide
ucacguaccgcugugcgug

SEQ ID NO: 1107474 - RNA, 19 nt, Artificial Sequence
  Description of Artificial Sequence: Synthetic oligonucleotide
caaaaccccugcgugaacg

SEQ ID NO: 1107475 - RNA, 19 nt, Artificial Sequence
  Description of Artificial Sequence: Synthetic oligonucleotide
gugggagugacaguauugg

SEQ ID NO: 1107476 - RNA, 19 nt, Artificial Sequence
  Description of Artificial Sequence: Synthetic oligonucleotide
gugcauguaaggcagauua

SEQ ID NO: 1107477 - RNA, 19 nt, Artificial Sequence
  Description of Artificial Sequence: Synthetic oligonucleotide
aacaugcggaagagggacc

SEQ ID NO: 1107478 - RNA, 19 nt, Artificial Sequence
  Description of Artificial Sequence: Synthetic oligonucleotide
ugacauccugguaugugga

SEQ ID NO: 1107479 - RNA, 19 nt, Artificial Sequence
  Description of Artificial Sequence: Synthetic oligonucleotide
ugacagaguuggcuggcag

SEQ ID NO: 1107480 - RNA, 19 nt, Artificial Sequence
  Description of Artificial Sequence: Synthetic oligonucleotide
ugcgugaacgacaggugca

SEQ ID NO: 1107481 - RNA, 19 nt, Artificial Sequence
  Description of Artificial Sequence: Synthetic oligonucleotide
gauaacgagcuccucucuc

SEQ ID NO: 1107482 - RNA, 19 nt, Artificial Sequence
  Description of Artificial Sequence: Synthetic oligonucleotide
uaaggcagauuacauugua

SEQ ID NO: 1107483 - RNA, 19 nt, Artificial Sequence
  Description of Artificial Sequence: Synthetic oligonucleotide
auaggacggauaugcacug

SEQ ID NO: 1107484 - RNA, 19 nt, Artificial Sequence
  Description of Artificial Sequence: Synthetic oligonucleotide
ucgggaguuauugaucaug

SEQ ID NO: 1107485 - RNA, 19 nt, Artificial Sequence
  Description of Artificial Sequence: Synthetic oligonucleotide
auaugcacugcuugugagu

SEQ ID NO: 1107486 - RNA, 19 nt, Artificial Sequence
  Description of Artificial Sequence: Synthetic oligonucleotide
ucgaugaaguugagggaug

SEQ ID NO: 1107487 - RNA, 19 nt, Artificial Sequence
  Description of Artificial Sequence: Synthetic oligonucleotide
aucugugacggugucuugg

SEQ ID NO: 1107488 - RNA, 19 nt, Artificial Sequence
  Description of Artificial Sequence: Synthetic oligonucleotide
uacaaaguagcuggagcca

SEQ ID NO: 1107489 - RNA, 19 nt, Artificial Sequence
  Description of Artificial Sequence: Synthetic oligonucleotide
gguaguggauguaacuugg

SEQ ID NO: 1107490 - RNA, 19 nt, Artificial Sequence
  Description of Artificial Sequence: Synthetic oligonucleotide
gcagauccgaaucccaacg

SEQ ID NO: 1107491 - RNA, 19 nt, Artificial Sequence
  Description of Artificial Sequence: Synthetic oligonucleotide
gcagauuacauuguagggc

SEQ ID NO: 1107492 - RNA, 19 nt, Artificial Sequence
  Description of Artificial Sequence: Synthetic oligonucleotide
caagacuuauccacaucug

SEQ ID NO: 1107493 - RNA, 19 nt, Artificial Sequence
  Description of Artificial Sequence: Synthetic oligonucleotide
agcugaaucagcaucucca

SEQ ID NO: 1107494 - RNA, 19 nt, Artificial Sequence
  Description of Artificial Sequence: Synthetic oligonucleotide
gauaggacggauaugcacu

SEQ ID NO: 1107495 - RNA, 19 nt, Artificial Sequence
  Description of Artificial Sequence: Synthetic oligonucleotide
ugcauguaaggcagauuac

SEQ ID NO: 1107496 - RNA, 19 nt, Artificial Sequence
  Description of Artificial Sequence: Synthetic oligonucleotide
cagguuuaccagcaagggc

SEQ ID NO: 1107497 - RNA, 19 nt, Artificial Sequence
  Description of Artificial Sequence: Synthetic oligonucleotide
gugauaacgagcuccucuc

SEQ ID NO: 1107498 - RNA, 19 nt, Artificial Sequence
  Description of Artificial Sequence: Synthetic oligonucleotide
ugggcguuguacagcagug

SEQ ID NO: 1107499 - RNA, 19 nt, Artificial Sequence
  Description of Artificial Sequence: Synthetic oligonucleotide
gaugcgcagaagauccccg

SEQ ID NO: 1107500 - RNA, 19 nt, Artificial Sequence
  Description of Artificial Sequence: Synthetic oligonucleotide
cacugcguagcgcaggaag

SEQ ID NO: 1107501 - RNA, 19 nt, Artificial Sequence
  Description of Artificial Sequence: Synthetic oligonucleotide
aacgacaggugcagcuccc

SEQ ID NO: 1107502 - RNA, 19 nt, Artificial Sequence
  Description of Artificial Sequence: Synthetic oligonucleotide
acauacagccgcagguacc

SEQ ID NO: 1107503 - RNA, 19 nt, Artificial Sequence
  Description of Artificial Sequence: Synthetic oligonucleotide
agcggagugauaacgagcu

SEQ ID NO: 1107504 - RNA, 19 nt, Artificial Sequence
  Description of Artificial Sequence: Synthetic oligonucleotide
ucugcagauaggacggaua

SEQ ID NO: 1107505 - RNA, 19 nt, Artificial Sequence
  Description of Artificial Sequence: Synthetic oligonucleotide
cugcgugaacgacaggugc

SEQ ID NO: 1107506 - RNA, 19 nt, Artificial Sequence
  Description of Artificial Sequence: Synthetic oligonucleotide
acggaacuggaauguggcg

SEQ ID NO: 1107507 - RNA, 19 nt, Artificial Sequence
  Description of Artificial Sequence: Synthetic oligonucleotide
ugauaacgagcuccucucu

SEQ ID NO: 1107508 - RNA, 19 nt, Artificial Sequence
  Description of Artificial Sequence: Synthetic oligonucleotide
gugagugguaacuggugug

SEQ ID NO: 1107509 - RNA, 19 nt, Artificial Sequence
  Description of Artificial Sequence: Synthetic oligonucleotide
uuuaccagcaagggcucug

SEQ ID NO: 1107510 - RNA, 19 nt, Artificial Sequence
  Description of Artificial Sequence: Synthetic oligonucleotide
uauugguggagucgaugaa

SEQ ID NO: 1107511 - RNA, 19 nt, Artificial Sequence
  Description of Artificial Sequence: Synthetic oligonucleotide
ggaguuauugaucauggcu

SEQ ID NO: 1107512 - RNA, 19 nt, Artificial Sequence
  Description of Artificial Sequence: Synthetic oligonucleotide
aguaucggguccuccaaaa

SEQ ID NO: 1107513 - RNA, 19 nt, Artificial Sequence
  Description of Artificial Sequence: Synthetic oligonucleotide
ugcagauccgaaucccaac

SEQ ID NO: 1107514 - RNA, 19 nt, Artificial Sequence
  Description of Artificial Sequence: Synthetic oligonucleotide
augggcguuguacagcagu

SEQ ID NO: 1107515 - RNA, 19 nt, Artificial Sequence
  Description of Artificial Sequence: Synthetic oligonucleotide
uccccgagagaacauugcu

SEQ ID NO: 1107516 - RNA, 19 nt, Artificial Sequence
  Description of Artificial Sequence: Synthetic oligonucleotide
acgucugaugagguuggcc

SEQ ID NO: 1107517 - RNA, 19 nt, Artificial Sequence
  Description of Artificial Sequence: Synthetic oligonucleotide
aggacggauaugcacugcu

SEQ ID NO: 1107518 - RNA, 19 nt, Artificial Sequence
  Description of Artificial Sequence: Synthetic oligonucleotide
agagaggacucccuuccca

SEQ ID NO: 1107519 - RNA, 19 nt, Artificial Sequence
  Description of Artificial Sequence: Synthetic oligonucleotide
gguaccagggcacagcauc

SEQ ID NO: 1107520 - RNA, 19 nt, Artificial Sequence
  Description of Artificial Sequence: Synthetic oligonucleotide
cagcggagugauaacgagc

SEQ ID NO: 1107521 - RNA, 19 nt, Artificial Sequence
  Description of Artificial Sequence: Synthetic oligonucleotide
uucucggugcagacaaccu

SEQ ID NO: 1107522 - RNA, 19 nt, Artificial Sequence
  Description of Artificial Sequence: Synthetic oligonucleotide
guaaacuaggcucugcgau

SEQ ID NO: 1107523 - RNA, 19 nt, Artificial Sequence
  Description of Artificial Sequence: Synthetic oligonucleotide
aaccucccgaggcagcacu

SEQ ID NO: 1107524 - RNA, 19 nt, Artificial Sequence
  Description of Artificial Sequence: Synthetic oligonucleotide
caaucucuuggccaggcca

SEQ ID NO: 1107525 - RNA, 19 nt, Artificial Sequence
  Description of Artificial Sequence: Synthetic oligonucleotide
uuuggggaagagccuguaa

SEQ ID NO: 1107526 - RNA, 19 nt, Artificial Sequence
  Description of Artificial Sequence: Synthetic oligonucleotide
uuccaagacuuauccacau

SEQ ID NO: 1107527 - RNA, 19 nt, Artificial Sequence
  Description of Artificial Sequence: Synthetic oligonucleotide
augggcugacauagaagcc

SEQ ID NO: 1107528 - RNA, 19 nt, Artificial Sequence
  Description of Artificial Sequence: Synthetic oligonucleotide
gaacuacaaggcaagagcu

SEQ ID NO: 1107529 - RNA, 19 nt, Artificial Sequence
  Description of Artificial Sequence: Synthetic oligonucleotide
cugguguguauucagucca

SEQ ID NO: 1107530 - RNA, 19 nt, Artificial Sequence
  Description of Artificial Sequence: Synthetic oligonucleotide
agccuguaaugagacacuc

SEQ ID NO: 1107531 - RNA, 19 nt, Artificial Sequence
  Description of Artificial Sequence: Synthetic oligonucleotide
guucucggugcagacaacc

SEQ ID NO: 1107532 - RNA, 19 nt, Artificial Sequence
  Description of Artificial Sequence: Synthetic oligonucleotide
cagauccgaaucccaacgc

SEQ ID NO: 1107533 - RNA, 19 nt, Artificial Sequence
  Description of Artificial Sequence: Synthetic oligonucleotide
agcguccgggagaacaugc

SEQ ID NO: 1107534 - RNA, 19 nt, Artificial Sequence
  Description of Artificial Sequence: Synthetic oligonucleotide
uccaagacuuauccacauc

SEQ ID NO: 1107535 - RNA, 19 nt, Artificial Sequence
  Description of Artificial Sequence: Synthetic oligonucleotide
agugugcucagcucucccu

SEQ ID NO: 1107536 - RNA, 19 nt, Artificial Sequence
  Description of Artificial Sequence: Synthetic oligonucleotide
ugcuugugagugguaacug

SEQ ID NO: 1107537 - RNA, 19 nt, Artificial Sequence
  Description of Artificial Sequence: Synthetic oligonucleotide
gacaccacgggcacgucug

SEQ ID NO: 1107538 - RNA, 19 nt, Artificial Sequence
  Description of Artificial Sequence: Synthetic oligonucleotide
gugguaacugguguggaac

SEQ ID NO: 1107539 - RNA, 19 nt, Artificial Sequence
  Description of Artificial Sequence: Synthetic oligonucleotide
acgcguacggaacuggaau

SEQ ID NO: 1107540 - RNA, 19 nt, Artificial Sequence
  Description of Artificial Sequence: Synthetic oligonucleotide
uaacuugguuuguucuccu

SEQ ID NO: 1107541 - RNA, 19 nt, Artificial Sequence
  Description of Artificial Sequence: Synthetic oligonucleotide
uccgaaucccaacgcguac

SEQ ID NO: 1107542 - RNA, 19 nt, Artificial Sequence
  Description of Artificial Sequence: Synthetic oligonucleotide
uccaaaaccccugcgugaa

SEQ ID NO: 1107543 - RNA, 19 nt, Artificial Sequence
  Description of Artificial Sequence: Synthetic oligonucleotide
gcugacauagaagccgugg

SEQ ID NO: 1107544 - RNA, 19 nt, Artificial Sequence
  Description of Artificial Sequence: Synthetic oligonucleotide
gacggugucuuggaaccag

SEQ ID NO: 1107545 - RNA, 19 nt, Artificial Sequence
  Description of Artificial Sequence: Synthetic oligonucleotide
aucccaacgcguacggaac

SEQ ID NO: 1107546 - RNA, 19 nt, Artificial Sequence
  Description of Artificial Sequence: Synthetic oligonucleotide
uccgggugcccaaaaugac

SEQ ID NO: 1107547 - RNA, 19 nt, Artificial Sequence
  Description of Artificial Sequence: Synthetic oligonucleotide
guagaaggagccguagcac

SEQ ID NO: 1107548 - RNA, 19 nt, Artificial Sequence
  Description of Artificial Sequence: Synthetic oligonucleotide
gaucggugucauuggccag

SEQ ID NO: 1107549 - RNA, 19 nt, Artificial Sequence
  Description of Artificial Sequence: Synthetic oligonucleotide
uccgggagaacaugcggaa

SEQ ID NO: 1107550 - RNA, 19 nt, Artificial Sequence
  Description of Artificial Sequence: Synthetic oligonucleotide
guugguaguggauguaacu

SEQ ID NO: 1107551 - RNA, 19 nt, Artificial Sequence
  Description of Artificial Sequence: Synthetic oligonucleotide
ugagcguccgggagaacau

SEQ ID NO: 1107552 - RNA, 19 nt, Artificial Sequence
  Description of Artificial Sequence: Synthetic oligonucleotide
gagacacuccuucccgcug

SEQ ID NO: 1107553 - RNA, 19 nt, Artificial Sequence
  Description of Artificial Sequence: Synthetic oligonucleotide
ugagguuucgggaguuauu

SEQ ID NO: 1107554 - RNA, 19 nt, Artificial Sequence
  Description of Artificial Sequence: Synthetic oligonucleotide
accacgggcacgucugaug

SEQ ID NO: 1107555 - RNA, 19 nt, Artificial Sequence
  Description of Artificial Sequence: Synthetic oligonucleotide
ucggugcagacaaccuccc

SEQ ID NO: 1107556 - RNA, 19 nt, Artificial Sequence
  Description of Artificial Sequence: Synthetic oligonucleotide
ggcguuguacagcagugug

SEQ ID NO: 1107557 - RNA, 19 nt, Artificial Sequence
  Description of Artificial Sequence: Synthetic oligonucleotide
guuucgggaguuauugauc

SEQ ID NO: 1107558 - RNA, 19 nt, Artificial Sequence
  Description of Artificial Sequence: Synthetic oligonucleotide
gugaucggugucauuggcc

SEQ ID NO: 1107559 - RNA, 19 nt, Artificial Sequence
  Description of Artificial Sequence: Synthetic oligonucleotide
ggaccagucuuucuucccc

SEQ ID NO: 1107560 - RNA, 19 nt, Artificial Sequence
  Description of Artificial Sequence: Synthetic oligonucleotide
agagucguacaaaguagcu

SEQ ID NO: 1107561 - RNA, 19 nt, Artificial Sequence
  Description of Artificial Sequence: Synthetic oligonucleotide
ugcagauaggacggauaug

SEQ ID NO: 1107562 - RNA, 19 nt, Artificial Sequence
  Description of Artificial Sequence: Synthetic oligonucleotide
aacuacaaggcaagagcuu

SEQ ID NO: 1107563 - RNA, 19 nt, Artificial Sequence
  Description of Artificial Sequence: Synthetic oligonucleotide
agcccguagccacucacgu

SEQ ID NO: 1107564 - RNA, 19 nt, Artificial Sequence
  Description of Artificial Sequence: Synthetic oligonucleotide
ggcacgucugaugagguug

SEQ ID NO: 1107565 - RNA, 19 nt, Artificial Sequence
  Description of Artificial Sequence: Synthetic oligonucleotide
cagcccguagccacucacg

SEQ ID NO: 1107566 - RNA, 19 nt, Artificial Sequence
  Description of Artificial Sequence: Synthetic oligonucleotide
aucucuuggccaggccacc

SEQ ID NO: 1107567 - RNA, 19 nt, Artificial Sequence
  Description of Artificial Sequence: Synthetic oligonucleotide
gagggaugcgcagaagauc

SEQ ID NO: 1107568 - RNA, 19 nt, Artificial Sequence
  Description of Artificial Sequence: Synthetic oligonucleotide
ucccaacgcguacggaacu

SEQ ID NO: 1107569 - RNA, 19 nt, Artificial Sequence
  Description of Artificial Sequence: Synthetic oligonucleotide
guaucggguccuccaaaac

SEQ ID NO: 1107570 - RNA, 19 nt, Artificial Sequence
  Description of Artificial Sequence: Synthetic oligonucleotide
agcacugcguagcgcagga

SEQ ID NO: 1107571 - RNA, 19 nt, Artificial Sequence
  Description of Artificial Sequence: Synthetic oligonucleotide
cacugguuuggcugccacc

SEQ ID NO: 1107572 - RNA, 19 nt, Artificial Sequence
  Description of Artificial Sequence: Synthetic oligonucleotide
cagagguuugaaggaggcg

SEQ ID NO: 1107573 - RNA, 19 nt, Artificial Sequence
  Description of Artificial Sequence: Synthetic oligonucleotide
agacaaccucccgaggcag

SEQ ID NO: 1107574 - RNA, 19 nt, Artificial Sequence
  Description of Artificial Sequence: Synthetic oligonucleotide
guguggaacaagcgaucug

SEQ ID NO: 1107575 - RNA, 19 nt, Artificial Sequence
  Description of Artificial Sequence: Synthetic oligonucleotide
agaacaugcggaagaggga

SEQ ID NO: 1107576 - RNA, 19 nt, Artificial Sequence
  Description of Artificial Sequence: Synthetic oligonucleotide
uuggaacuacaaggcaaga

SEQ ID NO: 1107577 - RNA, 19 nt, Artificial Sequence
  Description of Artificial Sequence: Synthetic oligonucleotide
guauguggaggugggagga

SEQ ID NO: 1107578 - RNA, 19 nt, Artificial Sequence
  Description of Artificial Sequence: Synthetic oligonucleotide
ggugcacugagcauuucug

SEQ ID NO: 1107579 - RNA, 19 nt, Artificial Sequence
  Description of Artificial Sequence: Synthetic oligonucleotide
ggauaugcacugcuuguga

SEQ ID NO: 1107580 - RNA, 19 nt, Artificial Sequence
  Description of Artificial Sequence: Synthetic oligonucleotide
agaggacucccuucccagu

SEQ ID NO: 1107581 - RNA, 19 nt, Artificial Sequence
  Description of Artificial Sequence: Synthetic oligonucleotide
guccuccaaaaccccugcg

SEQ ID NO: 1107582 - RNA, 19 nt, Artificial Sequence
  Description of Artificial Sequence: Synthetic oligonucleotide
cacggggaaggcccgguag

SEQ ID NO: 1107583 - RNA, 19 nt, Artificial Sequence
  Description of Artificial Sequence: Synthetic oligonucleotide
gcagcggagugauaacgag

SEQ ID NO: 1107584 - RNA, 19 nt, Artificial Sequence
  Description of Artificial Sequence: Synthetic oligonucleotide
gcauguaaggcagauuaca

SEQ ID NO: 1107585 - RNA, 19 nt, Artificial Sequence
  Description of Artificial Sequence: Synthetic oligonucleotide
guaccagggcacagcaucc

SEQ ID NO: 1107586 - RNA, 19 nt, Artificial Sequence
  Description of Artificial Sequence: Synthetic oligonucleotide
caugcugaagucaggugua

SEQ ID NO: 1107587 - RNA, 19 nt, Artificial Sequence
  Description of Artificial Sequence: Synthetic oligonucleotide
acugcguagcgcaggaagu

SEQ ID NO: 1107588 - RNA, 19 nt, Artificial Sequence
  Description of Artificial Sequence: Synthetic oligonucleotide
cagagaauacuuggagauc

SEQ ID NO: 1107589 - RNA, 19 nt, Artificial Sequence
  Description of Artificial Sequence: Synthetic oligonucleotide
auaggucuuccgggugccc

SEQ ID NO: 1107590 - RNA, 19 nt, Artificial Sequence
  Description of Artificial Sequence: Synthetic oligonucleotide
ggaugggcguuguacagca

SEQ ID NO: 1107591 - RNA, 19 nt, Artificial Sequence
  Description of Artificial Sequence: Synthetic oligonucleotide
gugagcguccgggagaaca

SEQ ID NO: 1107592 - RNA, 19 nt, Artificial Sequence
  Description of Artificial Sequence: Synthetic oligonucleotide
cccugucccgugaugaagg

SEQ ID NO: 1107593 - RNA, 19 nt, Artificial Sequence
  Description of Artificial Sequence: Synthetic oligonucleotide
cccgagagaacauugcuga

SEQ ID NO: 1107594 - RNA, 19 nt, Artificial Sequence
  Description of Artificial Sequence: Synthetic oligonucleotide
acccgauuugggcuccuca

SEQ ID NO: 1107595 - RNA, 19 nt, Artificial Sequence
  Description of Artificial Sequence: Synthetic oligonucleotide
cacguaaacuaggcucugc

SEQ ID NO: 1107596 - RNA, 19 nt, Artificial Sequence
  Description of Artificial Sequence: Synthetic oligonucleotide
aacgcguacggaacuggaa

SEQ ID NO: 1107597 - RNA, 19 nt, Artificial Sequence
  Description of Artificial Sequence: Synthetic oligonucleotide
gaggagggcucaccuccag

SEQ ID NO: 1107598 - RNA, 19 nt, Artificial Sequence
  Description of Artificial Sequence: Synthetic oligonucleotide
gugaacgacaggugcagcu

SEQ ID NO: 1107599 - RNA, 19 nt, Artificial Sequence
  Description of Artificial Sequence: Synthetic oligonucleotide
uggauguaacuugguuugu

SEQ ID NO: 1107600 - RNA, 19 nt, Artificial Sequence
  Description of Artificial Sequence: Synthetic oligonucleotide
aacaagcgaucugccuuca

SEQ ID NO: 1107601 - RNA, 19 nt, Artificial Sequence
  Description of Artificial Sequence: Synthetic oligonucleotide
guggaacaagcgaucugcc

SEQ ID NO: 1107602 - RNA, 19 nt, Artificial Sequence
  Description of Artificial Sequence: Synthetic oligonucleotide
agcuccuuccaagacuuau

SEQ ID NO: 1107603 - RNA, 19 nt, Artificial Sequence
  Description of Artificial Sequence: Synthetic oligonucleotide
cagacaaccucccgaggca

SEQ ID NO: 1107604 - RNA, 19 nt, Artificial Sequence
  Description of Artificial Sequence: Synthetic oligonucleotide
gcgaucugccuucaauagc

SEQ ID NO: 1107605 - RNA, 19 nt, Artificial Sequence
  Description of Artificial Sequence: Synthetic oligonucleotide
ucggugucauuggccagcc

SEQ ID NO: 1107606 - RNA, 19 nt, Artificial Sequence
  Description of Artificial Sequence: Synthetic oligonucleotide
uccauuugagcuggagguu

SEQ ID NO: 1107607 - RNA, 19 nt, Artificial Sequence
  Description of Artificial Sequence: Synthetic oligonucleotide
gauccgaaucccaacgcgu

SEQ ID NO: 1107608 - RNA, 19 nt, Artificial Sequence
  Description of Artificial Sequence: Synthetic oligonucleotide
cagccccagagguuugaag

SEQ ID NO: 1107609 - RNA, 19 nt, Artificial Sequence
  Description of Artificial Sequence: Synthetic oligonucleotide
guuucguuguccuggccgu

SEQ ID NO: 1107610 - RNA, 19 nt, Artificial Sequence
  Description of Artificial Sequence: Synthetic oligonucleotide
uggcugugucaaacaaguc

SEQ ID NO: 1107611 - RNA, 19 nt, Artificial Sequence
  Description of Artificial Sequence: Synthetic oligonucleotide
cggagugauaacgagcucc

SEQ ID NO: 1107612 - RNA, 19 nt, Artificial Sequence
  Description of Artificial Sequence: Synthetic oligonucleotide
uggccaggccacccgauuu

SEQ ID NO: 1107613 - RNA, 19 nt, Artificial Sequence
  Description of Artificial Sequence: Synthetic oligonucleotide
uaggacggauaugcacugc

SEQ ID NO: 1107614 - RNA, 19 nt, Artificial Sequence
  Description of Artificial Sequence: Synthetic oligonucleotide
ccgcagagaauacuuggag

SEQ ID NO: 1107615 - RNA, 19 nt, Artificial Sequence
  Description of Artificial Sequence: Synthetic oligonucleotide
ggcccgcucaaacuggaug

SEQ ID NO: 1107616 - RNA, 19 nt, Artificial Sequence
  Description of Artificial Sequence: Synthetic oligonucleotide
gggcagcggagugauaacg

SEQ ID NO: 1107617 - RNA, 19 nt, Artificial Sequence
  Description of Artificial Sequence: Synthetic oligonucleotide
ccaagacuuauccacaucu

SEQ ID NO: 1107618 - RNA, 19 nt, Artificial Sequence
  Description of Artificial Sequence: Synthetic oligonucleotide
caccuccaguguuucguug

SEQ ID NO: 1107619 - RNA, 19 nt, Artificial Sequence
  Description of Artificial Sequence: Synthetic oligonucleotide
cagauaggacggauaugca

SEQ ID NO: 1107620 - RNA, 19 nt, Artificial Sequence
  Description of Artificial Sequence: Synthetic oligonucleotide
ucaccuccaguguuucguu

SEQ ID NO: 1107621 - RNA, 19 nt, Artificial Sequence
  Description of Artificial Sequence: Synthetic oligonucleotide
guagggcaugcugaaguca

SEQ ID NO: 1107622 - RNA, 19 nt, Artificial Sequence
  Description of Artificial Sequence: Synthetic oligonucleotide
agcccggucccaccaggag

SEQ ID NO: 1107623 - RNA, 19 nt, Artificial Sequence
  Description of Artificial Sequence: Synthetic oligonucleotide
augcggaagagggaccagu

SEQ ID NO: 1107624 - RNA, 19 nt, Artificial Sequence
  Description of Artificial Sequence: Synthetic oligonucleotide
ggaugcgcagaagaucccc

SEQ ID NO: 1107625 - RNA, 19 nt, Artificial Sequence
  Description of Artificial Sequence: Synthetic oligonucleotide
agguaauggugagcgugug

SEQ ID NO: 1107626 - RNA, 19 nt, Artificial Sequence
  Description of Artificial Sequence: Synthetic oligonucleotide
agguuugaaggaggcggug

SEQ ID NO: 1107627 - RNA, 19 nt, Artificial Sequence
  Description of Artificial Sequence: Synthetic oligonucleotide
gagguaauggugagcgugu

SEQ ID NO: 1107628 - RNA, 19 nt, Artificial Sequence
  Description of Artificial Sequence: Synthetic oligonucleotide
ccauuugagcuggagguug

SEQ ID NO: 1107629 - RNA, 19 nt, Artificial Sequence
  Description of Artificial Sequence: Synthetic oligonucleotide
cacccgauggggccugcag

SEQ ID NO: 1107630 - RNA, 19 nt, Artificial Sequence
  Description of Artificial Sequence: Synthetic oligonucleotide
cacucacguaccgcugugc

SEQ ID NO: 1107631 - RNA, 19 nt, Artificial Sequence
  Description of Artificial Sequence: Synthetic oligonucleotide
cugcgaugccagugggcag

SEQ ID NO: 1107632 - RNA, 19 nt, Artificial Sequence
  Description of Artificial Sequence: Synthetic oligonucleotide
ugguggagucgaugaaguu

SEQ ID NO: 1107633 - RNA, 19 nt, Artificial Sequence
  Description of Artificial Sequence: Synthetic oligonucleotide
guguuucguuguccuggcc

SEQ ID NO: 1107634 - RNA, 19 nt, Artificial Sequence
  Description of Artificial Sequence: Synthetic oligonucleotide
cuccgcguggccccagcag

SEQ ID NO: 1107635 - RNA, 19 nt, Artificial Sequence
  Description of Artificial Sequence: Synthetic oligonucleotide
uggccagccccagagguuu

SEQ ID NO: 1107636 - RNA, 19 nt, Artificial Sequence
  Description of Artificial Sequence: Synthetic oligonucleotide
cugcagauaggacggauau

SEQ ID NO: 1107637 - RNA, 19 nt, Artificial Sequence
  Description of Artificial Sequence: Synthetic oligonucleotide
caacgcguacggaacugga

SEQ ID NO: 1107638 - RNA, 19 nt, Artificial Sequence
  Description of Artificial Sequence: Synthetic oligonucleotide
ugacggugucuuggaacca

SEQ ID NO: 1107639 - RNA, 19 nt, Artificial Sequence
  Description of Artificial Sequence: Synthetic oligonucleotide
gguugguaguggauguaac

SEQ ID NO: 1107640 - RNA, 19 nt, Artificial Sequence
  Description of Artificial Sequence: Synthetic oligonucleotide
gcacgucugaugagguugg

SEQ ID NO: 1107641 - RNA, 19 nt, Artificial Sequence
  Description of Artificial Sequence: Synthetic oligonucleotide
gcucugcgaugccaguggg

SEQ ID NO: 1107642 - RNA, 19 nt, Artificial Sequence
  Description of Artificial Sequence: Synthetic oligonucleotide
auguggcggccacgucccc

SEQ ID NO: 1107643 - RNA, 19 nt, Artificial Sequence
  Description of Artificial Sequence: Synthetic oligonucleotide
ccgaaucccaacgcguacg

SEQ ID NO: 1107644 - RNA, 19 nt, Artificial Sequence
  Description of Artificial Sequence: Synthetic oligonucleotide
gaugggcguuguacagcag

SEQ ID NO: 1107645 - RNA, 19 nt, Artificial Sequence
  Description of Artificial Sequence: Synthetic oligonucleotide
ccugcgugaacgacaggug

SEQ ID NO: 1107646 - RNA, 19 nt, Artificial Sequence
  Description of Artificial Sequence: Synthetic oligonucleotide
agcucccgcagagaauacu

SEQ ID NO: 1107647 - RNA, 19 nt, Artificial Sequence
  Description of Artificial Sequence: Synthetic oligonucleotide
gcguuguacagcagugugc

SEQ ID NO: 1107648 - RNA, 19 nt, Artificial Sequence
  Description of Artificial Sequence: Synthetic oligonucleotide
cacguaccgcugugcgugc

SEQ ID NO: 1107649 - RNA, 19 nt, Artificial Sequence
  Description of Artificial Sequence: Synthetic oligonucleotide
agauccccgagagaacauu

SEQ ID NO: 1107650 - RNA, 19 nt, Artificial Sequence
  Description of Artificial Sequence: Synthetic oligonucleotide
cagguguaggcagguuuac

SEQ ID NO: 1107651 - RNA, 19 nt, Artificial Sequence
  Description of Artificial Sequence: Synthetic oligonucleotide
caagcgaucugccuucaau

SEQ ID NO: 1107652 - RNA, 19 nt, Artificial Sequence
  Description of Artificial Sequence: Synthetic oligonucleotide
ccucucucaggcugucgcg

SEQ ID NO: 1107653 - RNA, 19 nt, Artificial Sequence
  Description of Artificial Sequence: Synthetic oligonucleotide
gagcguccgggagaacaug

SEQ ID NO: 1107654 - RNA, 19 nt, Artificial Sequence
  Description of Artificial Sequence: Synthetic oligonucleotide
caguccacuugagcagggc

SEQ ID NO: 1107655 - RNA, 19 nt, Artificial Sequence
  Description of Artificial Sequence: Synthetic oligonucleotide
guaaggcagauuacauugu

SEQ ID NO: 1107656 - RNA, 19 nt, Artificial Sequence
  Description of Artificial Sequence: Synthetic oligonucleotide
gagaccuuggugacagagu

SEQ ID NO: 1107657 - RNA, 19 nt, Artificial Sequence
  Description of Artificial Sequence: Synthetic oligonucleotide
cgaaucccaacgcguacgg

SEQ ID NO: 1107658 - RNA, 19 nt, Artificial Sequence
  Description of Artificial Sequence: Synthetic oligonucleotide
auccgaaucccaacgcgua

SEQ ID NO: 1107659 - RNA, 19 nt, Artificial Sequence
  Description of Artificial Sequence: Synthetic oligonucleotide
gcgugaacgacaggugcag

SEQ ID NO: 1107660 - RNA, 19 nt, Artificial Sequence
  Description of Artificial Sequence: Synthetic oligonucleotide
gucgcgcgggcgcuccgcg

SEQ ID NO: 1107661 - RNA, 19 nt, Artificial Sequence
  Description of Artificial Sequence: Synthetic oligonucleotide
acaagcgaucugccuucaa

SEQ ID NO: 1107662 - RNA, 19 nt, Artificial Sequence
  Description of Artificial Sequence: Synthetic oligonucleotide
gccuguaaugagacacucc

SEQ ID NO: 1107663 - RNA, 19 nt, Artificial Sequence
  Description of Artificial Sequence: Synthetic oligonucleotide
gcccggucccaccaggagc

SEQ ID NO: 1107664 - RNA, 19 nt, Artificial Sequence
  Description of Artificial Sequence: Synthetic oligonucleotide
cugcuugugagugguaacu

SEQ ID NO: 1107665 - RNA, 19 nt, Artificial Sequence
  Description of Artificial Sequence: Synthetic oligonucleotide
caacugaaagggucugccu

SEQ ID NO: 1107666 - RNA, 19 nt, Artificial Sequence
  Description of Artificial Sequence: Synthetic oligonucleotide
ccaacgcguacggaacugg

SEQ ID NO: 1107667 - RNA, 19 nt, Artificial Sequence
  Description of Artificial Sequence: Synthetic oligonucleotide
ccgagagaacauugcugag

SEQ ID NO: 1107668 - RNA, 19 nt, Artificial Sequence
  Description of Artificial Sequence: Synthetic oligonucleotide
auacagccgcagguaccag

SEQ ID NO: 1107669 - RNA, 19 nt, Artificial Sequence
  Description of Artificial Sequence: Synthetic oligonucleotide
guagggccucugcauuauc

SEQ ID NO: 1107670 - RNA, 19 nt, Artificial Sequence
  Description of Artificial Sequence: Synthetic oligonucleotide
ggcagcggagugauaacga

SEQ ID NO: 1107671 - RNA, 19 nt, Artificial Sequence
  Description of Artificial Sequence: Synthetic oligonucleotide
gcgcagaagauccccgaga

SEQ ID NO: 1107672 - RNA, 19 nt, Artificial Sequence
  Description of Artificial Sequence: Synthetic oligonucleotide
caguaucggguccuccaaa

SEQ ID NO: 1107673 - RNA, 19 nt, Artificial Sequence
  Description of Artificial Sequence: Synthetic oligonucleotide
cgcguacggaacuggaaug

SEQ ID NO: 1107674 - RNA, 19 nt, Artificial Sequence
  Description of Artificial Sequence: Synthetic oligonucleotide
gagccguagcacacagcca

SEQ ID NO: 1107675 - RNA, 19 nt, Artificial Sequence
  Description of Artificial Sequence: Synthetic oligonucleotide
guguagagucguacaaagu

SEQ ID NO: 1107676 - RNA, 19 nt, Artificial Sequence
  Description of Artificial Sequence: Synthetic oligonucleotide
cguagccacucacguaccg

SEQ ID NO: 1107677 - RNA, 19 nt, Artificial Sequence
  Description of Artificial Sequence: Synthetic oligonucleotide
cacgucugaugagguuggc

SEQ ID NO: 1107678 - RNA, 19 nt, Artificial Sequence
  Description of Artificial Sequence: Synthetic oligonucleotide
ggagugauaacgagcuccu

SEQ ID NO: 1107679 - RNA, 19 nt, Artificial Sequence
  Description of Artificial Sequence: Synthetic oligonucleotide
gcaggaaguagugaucggu

SEQ ID NO: 1107680 - RNA, 19 nt, Artificial Sequence
  Description of Artificial Sequence: Synthetic oligonucleotide
gguguggaacaagcgaucu

SEQ ID NO: 1107681 - RNA, 19 nt, Artificial Sequence
  Description of Artificial Sequence: Synthetic oligonucleotide
ugcgugcaggaagggcacu

SEQ ID NO: 1107682 - RNA, 19 nt, Artificial Sequence
  Description of Artificial Sequence: Synthetic oligonucleotide
aaggcccgguagggauggg

SEQ ID NO: 1107683 - RNA, 19 nt, Artificial Sequence
  Description of Artificial Sequence: Synthetic oligonucleotide
accgcugugcgugcaggaa

SEQ ID NO: 1107684 - RNA, 19 nt, Artificial Sequence
  Description of Artificial Sequence: Synthetic oligonucleotide
ggacucccuucccagucca

SEQ ID NO: 1107685 - RNA, 19 nt, Artificial Sequence
  Description of Artificial Sequence: Synthetic oligonucleotide
cccgcagagaauacuugga

SEQ ID NO: 1107686 - RNA, 19 nt, Artificial Sequence
  Description of Artificial Sequence: Synthetic oligonucleotide
gcguccgggagaacaugcg

SEQ ID NO: 1107687 - RNA, 19 nt, Artificial Sequence
  Description of Artificial Sequence: Synthetic oligonucleotide
cguaaacuaggcucugcga

SEQ ID NO: 1107688 - RNA, 19 nt, Artificial Sequence
  Description of Artificial Sequence: Synthetic oligonucleotide
ccacgggcacgucugauga

SEQ ID NO: 1107689 - RNA, 19 nt, Artificial Sequence
  Description of Artificial Sequence: Synthetic oligonucleotide
ccgcugcagauccgaaucc

SEQ ID NO: 1107690 - RNA, 19 nt, Artificial Sequence
  Description of Artificial Sequence: Synthetic oligonucleotide
cugugagcguccgggagaa

SEQ ID NO: 1107691 - RNA, 19 nt, Artificial Sequence
  Description of Artificial Sequence: Synthetic oligonucleotide
guacagcagugugcucagc

SEQ ID NO: 1107692 - RNA, 19 nt, Artificial Sequence
  Description of Artificial Sequence: Synthetic oligonucleotide
cucacguaccgcugugcgu

SEQ ID NO: 1107693 - RNA, 19 nt, Artificial Sequence
  Description of Artificial Sequence: Synthetic oligonucleotide
cgggagaacaugcggaaga

SEQ ID NO: 1107694 - RNA, 19 nt, Artificial Sequence
  Description of Artificial Sequence: Synthetic oligonucleotide
ggccacccgauuugggcuc

SEQ ID NO: 1107695 - RNA, 19 nt, Artificial Sequence
  Description of Artificial Sequence: Synthetic oligonucleotide
guugagguuucgggaguua

SEQ ID NO: 1107696 - RNA, 19 nt, Artificial Sequence
  Description of Artificial Sequence: Synthetic oligonucleotide
cccgauggggccugcagga

SEQ ID NO: 1107697 - RNA, 19 nt, Artificial Sequence
  Description of Artificial Sequence: Synthetic oligonucleotide
caaccucccgaggcagcac

SEQ ID NO: 1107698 - RNA, 19 nt, Artificial Sequence
  Description of Artificial Sequence: Synthetic oligonucleotide
agucagguguaggcagguu

SEQ ID NO: 1107699 - RNA, 19 nt, Artificial Sequence
  Description of Artificial Sequence: Synthetic oligonucleotide
accugccuuggaacuacaa

SEQ ID NO: 1107700 - RNA, 19 nt, Artificial Sequence
  Description of Artificial Sequence: Synthetic oligonucleotide
cugcguagcgcaggaagua

SEQ ID NO: 1107701 - RNA, 19 nt, Artificial Sequence
  Description of Artificial Sequence: Synthetic oligonucleotide
cccgauuugggcuccucaa

SEQ ID NO: 1107702 - RNA, 19 nt, Artificial Sequence
  Description of Artificial Sequence: Synthetic oligonucleotide
gggaugcgcagaagauccc

SEQ ID NO: 1107703 - RNA, 19 nt, Artificial Sequence
  Description of Artificial Sequence: Synthetic oligonucleotide
ccgcucaaacuggauggag

SEQ ID NO: 1107704 - RNA, 19 nt, Artificial Sequence
  Description of Artificial Sequence: Synthetic oligonucleotide
gaccugccuuggaacuaca

SEQ ID NO: 1107705 - RNA, 19 nt, Artificial Sequence
  Description of Artificial Sequence: Synthetic oligonucleotide
cugucgcgcgggcgcuccg

SEQ ID NO: 1107706 - RNA, 19 nt, Artificial Sequence
  Description of Artificial Sequence: Synthetic oligonucleotide
ccaaaaccccugcgugaac

SEQ ID NO: 1107707 - RNA, 19 nt, Artificial Sequence
  Description of Artificial Sequence: Synthetic oligonucleotide
ugugagcguccgggagaac

SEQ ID NO: 1107708 - RNA, 19 nt, Artificial Sequence
  Description of Artificial Sequence: Synthetic oligonucleotide
cguacggaacuggaaugug

SEQ ID NO: 1107709 - RNA, 19 nt, Artificial Sequence
  Description of Artificial Sequence: Synthetic oligonucleotide
cauuaucuggaggucucuu

SEQ ID NO: 1107710 - RNA, 19 nt, Artificial Sequence
  Description of Artificial Sequence: Synthetic oligonucleotide
cgagagaccugccuuggaa

SEQ ID NO: 1107711 - RNA, 19 nt, Artificial Sequence
  Description of Artificial Sequence: Synthetic oligonucleotide
acguaccgcugugcgugca

SEQ ID NO: 1107712 - RNA, 19 nt, Artificial Sequence
  Description of Artificial Sequence: Synthetic oligonucleotide
cccaacgcguacggaacug

SEQ ID NO: 1107713 - RNA, 19 nt, Artificial Sequence
  Description of Artificial Sequence: Synthetic oligonucleotide
gccguagcacacagccacc

SEQ ID NO: 1107714 - RNA, 19 nt, Artificial Sequence
  Description of Artificial Sequence: Synthetic oligonucleotide
ggcucaccuccaguguuuc

SEQ ID NO: 1107715 - RNA, 19 nt, Artificial Sequence
  Description of Artificial Sequence: Synthetic oligonucleotide
ggacaccacgggcacgucu

SEQ ID NO: 1107716 - RNA, 19 nt, Artificial Sequence
  Description of Artificial Sequence: Synthetic oligonucleotide
ggauguaacuugguuuguu

SEQ ID NO: 1107717 - RNA, 19 nt, Artificial Sequence
  Description of Artificial Sequence: Synthetic oligonucleotide
cccugcgugaacgacaggu

SEQ ID NO: 1107718 - RNA, 19 nt, Artificial Sequence
  Description of Artificial Sequence: Synthetic oligonucleotide
cgacaggugcagcucccgc

SEQ ID NO: 1107719 - RNA, 19 nt, Artificial Sequence
  Description of Artificial Sequence: Synthetic oligonucleotide
ccaguaucggguccuccaa

SEQ ID NO: 1107720 - RNA, 19 nt, Artificial Sequence
  Description of Artificial Sequence: Synthetic oligonucleotide
gcguacggaacuggaaugu

SEQ ID NO: 1107721 - RNA, 19 nt, Artificial Sequence
  Description of Artificial Sequence: Synthetic oligonucleotide
ccacguaaacuaggcucug

SEQ ID NO: 1107722 - RNA, 19 nt, Artificial Sequence
  Description of Artificial Sequence: Synthetic oligonucleotide
cugcacccgauggggccug

SEQ ID NO: 1107723 - RNA, 19 nt, Artificial Sequence
  Description of Artificial Sequence: Synthetic oligonucleotide
ccgaggcagcacugcguag

SEQ ID NO: 1107724 - RNA, 19 nt, Artificial Sequence
  Description of Artificial Sequence: Synthetic oligonucleotide
gcggagugauaacgagcuc

SEQ ID NO: 1107725 - RNA, 19 nt, Artificial Sequence
  Description of Artificial Sequence: Synthetic oligonucleotide
cacccgauuugggcuccuc

SEQ ID NO: 1107726 - RNA, 19 nt, Artificial Sequence
  Description of Artificial Sequence: Synthetic oligonucleotide
cggugcagacaaccucccg

SEQ ID NO: 1107727 - RNA, 19 nt, Artificial Sequence
  Description of Artificial Sequence: Synthetic oligonucleotide
gcugucgcgcgggcgcucc

SEQ ID NO: 1107728 - RNA, 19 nt, Artificial Sequence
  Description of Artificial Sequence: Synthetic oligonucleotide
cgugaacgacaggugcagc

SEQ ID NO: 1107729 - RNA, 19 nt, Artificial Sequence
  Description of Artificial Sequence: Synthetic oligonucleotide
ggccacguccccggagggc

SEQ ID NO: 1107730 - RNA, 19 nt, Artificial Sequence
  Description of Artificial Sequence: Synthetic oligonucleotide
gggucugccucagcuccca

SEQ ID NO: 1107731 - RNA, 19 nt, Artificial Sequence
  Description of Artificial Sequence: Synthetic oligonucleotide
gccacccgauuugggcucc

SEQ ID NO: 1107732 - RNA, 19 nt, Artificial Sequence
  Description of Artificial Sequence: Synthetic oligonucleotide
gcucccgcagagaauacuu

SEQ ID NO: 1107733 - RNA, 19 nt, Artificial Sequence
  Description of Artificial Sequence: Synthetic oligonucleotide
ccgguagggaugggcguug

SEQ ID NO: 1107734 - RNA, 19 nt, Artificial Sequence
  Description of Artificial Sequence: Synthetic oligonucleotide
ccccaguaucggguccucc

SEQ ID NO: 1107735 - RNA, 19 nt, Artificial Sequence
  Description of Artificial Sequence: Synthetic oligonucleotide
gcuccgcguggccccagca

SEQ ID NO: 1107736 - RNA, 19 nt, Artificial Sequence
  Description of Artificial Sequence: Synthetic oligonucleotide
gggcucuguguagagucgu

SEQ ID NO: 1107737 - RNA, 19 nt, Artificial Sequence
  Description of Artificial Sequence: Synthetic oligonucleotide
ggacggauaugcacugcuu

SEQ ID NO: 1107738 - RNA, 19 nt, Artificial Sequence
  Description of Artificial Sequence: Synthetic oligonucleotide
ccgauuugggcuccucaau

SEQ ID NO: 1107739 - RNA, 19 nt, Artificial Sequence
  Description of Artificial Sequence: Synthetic oligonucleotide
cccgcucaaacuggaugga

SEQ ID NO: 1107740 - RNA, 19 nt, Artificial Sequence
  Description of Artificial Sequence: Synthetic oligonucleotide
ccgagagaccugccuugga

SEQ ID NO: 1107741 - RNA, 19 nt, Artificial Sequence
  Description of Artificial Sequence: Synthetic oligonucleotide
gggcacgucugaugagguu

SEQ ID NO: 1107742 - RNA, 19 nt, Artificial Sequence
  Description of Artificial Sequence: Synthetic oligonucleotide
cgcguggccccagcagccc

SEQ ID NO: 1107743 - RNA, 19 nt, Artificial Sequence
  Description of Artificial Sequence: Synthetic oligonucleotide
gggacaccacgggcacguc

SEQ ID NO: 1107744 - RNA, 19 nt, Artificial Sequence
  Description of Artificial Sequence: Synthetic oligonucleotide
gccgugguuggggucuggu

SEQ ID NO: 1107745 - RNA, 19 nt, Artificial Sequence
  Description of Artificial Sequence: Synthetic oligonucleotide
gcacugcguagcgcaggaa

SEQ ID NO: 1107746 - RNA, 19 nt, Artificial Sequence
  Description of Artificial Sequence: Synthetic oligonucleotide
cgcuccgcguggccccagc

SEQ ID NO: 1107747 - RNA, 19 nt, Artificial Sequence
  Description of Artificial Sequence: Synthetic oligonucleotide
ggcugucgcgcgggcgcuc

SEQ ID NO: 1107748 - RNA, 19 nt, Artificial Sequence
  Description of Artificial Sequence: Synthetic oligonucleotide
cgggcacgucugaugaggu

SEQ ID NO: 1107749 - RNA, 19 nt, Artificial Sequence
  Description of Artificial Sequence: Synthetic oligonucleotide
ccgauggggccugcaggaa

SEQ ID NO: 1107750 - RNA, 19 nt, Artificial Sequence
  Description of Artificial Sequence: Synthetic oligonucleotide
gcggugggagugacaguau

SEQ ID NO: 1107751 - RNA, 19 nt, Artificial Sequence
  Description of Artificial Sequence: Synthetic oligonucleotide
agaauuauuaucuaugagg

SEQ ID NO: 1107752 - RNA, 19 nt, Artificial Sequence
  Description of Artificial Sequence: Synthetic oligonucleotide
aaaauaaguucucuaggcc

SEQ ID NO: 1107753 - RNA, 19 nt, Artificial Sequence
  Description of Artificial Sequence: Synthetic oligonucleotide
uuuacuuuaacaauuggac

SEQ ID NO: 1107754 - RNA, 19 nt, Artificial Sequence
  Description of Artificial Sequence: Synthetic oligonucleotide
aaauacaggaucguuuucc

SEQ ID NO: 1107755 - RNA, 19 nt, Artificial Sequence
  Description of Artificial Sequence: Synthetic oligonucleotide
uacuuuaacaauuggacag

SEQ ID NO: 1107756 - RNA, 19 nt, Artificial Sequence
  Description of Artificial Sequence: Synthetic oligonucleotide
agucauauaauccucucac

SEQ ID NO: 1107757 - RNA, 19 nt, Artificial Sequence
  Description of Artificial Sequence: Synthetic oligonucleotide
auuaguucauuccacuccc

SEQ ID NO: 1107758 - RNA, 19 nt, Artificial Sequence
  Description of Artificial Sequence: Synthetic oligonucleotide
aaauaaguucucuaggcca

SEQ ID NO: 1107759 - RNA, 19 nt, Artificial Sequence
  Description of Artificial Sequence: Synthetic oligonucleotide
aggaugguuaaacugaauc

SEQ ID NO: 1107760 - RNA, 19 nt, Artificial Sequence
  Description of Artificial Sequence: Synthetic oligonucleotide
aaguagguguuuuggaagg

SEQ ID NO: 1107761 - RNA, 19 nt, Artificial Sequence
  Description of Artificial Sequence: Synthetic oligonucleotide
uguuuuggaaggcaguucc

SEQ ID NO: 1107762 - RNA, 19 nt, Artificial Sequence
  Description of Artificial Sequence: Synthetic oligonucleotide
uccagauuaagacagugga

SEQ ID NO: 1107763 - RNA, 19 nt, Artificial Sequence
  Description of Artificial Sequence: Synthetic oligonucleotide
uucaguauaaggaugguua

SEQ ID NO: 1107764 - RNA, 19 nt, Artificial Sequence
  Description of Artificial Sequence: Synthetic oligonucleotide
cagguaaauauccauaccc

SEQ ID NO: 1107765 - RNA, 19 nt, Artificial Sequence
  Description of Artificial Sequence: Synthetic oligonucleotide
uauauacccagacaccaag

SEQ ID NO: 1107766 - RNA, 19 nt, Artificial Sequence
  Description of Artificial Sequence: Synthetic oligonucleotide
uaugccauaaccuuggcuu

SEQ ID NO: 1107767 - RNA, 19 nt, Artificial Sequence
  Description of Artificial Sequence: Synthetic oligonucleotide
ucguuuuccaugcaaguag

SEQ ID NO: 1107768 - RNA, 19 nt, Artificial Sequence
  Description of Artificial Sequence: Synthetic oligonucleotide
auuaagacaguggagauca

SEQ ID NO: 1107769 - RNA, 19 nt, Artificial Sequence
  Description of Artificial Sequence: Synthetic oligonucleotide
acaggaucguuuuccaugc

SEQ ID NO: 1107770 - RNA, 19 nt, Artificial Sequence
  Description of Artificial Sequence: Synthetic oligonucleotide
ucuuggaugacuugaauuc

SEQ ID NO: 1107771 - RNA, 19 nt, Artificial Sequence
  Description of Artificial Sequence: Synthetic oligonucleotide
ucguaguucucgaaggccg

SEQ ID NO: 1107772 - RNA, 19 nt, Artificial Sequence
  Description of Artificial Sequence: Synthetic oligonucleotide
uaagcuuagccguacaaga

SEQ ID NO: 1107773 - RNA, 19 nt, Artificial Sequence
  Description of Artificial Sequence: Synthetic oligonucleotide
uacccagacaccaaguuug

SEQ ID NO: 1107774 - RNA, 19 nt, Artificial Sequence
  Description of Artificial Sequence: Synthetic oligonucleotide
caagcuguaugccauaacc

SEQ ID NO: 1107775 - RNA, 19 nt, Artificial Sequence
  Description of Artificial Sequence: Synthetic oligonucleotide
auguuguagauccaaagcu

SEQ ID NO: 1107776 - RNA, 19 nt, Artificial Sequence
  Description of Artificial Sequence: Synthetic oligonucleotide
ugugaaguagguguuuugg

SEQ ID NO: 1107777 - RNA, 19 nt, Artificial Sequence
  Description of Artificial Sequence: Synthetic oligonucleotide
ucaaaaguucccaauacuu

SEQ ID NO: 1107778 - RNA, 19 nt, Artificial Sequence
  Description of Artificial Sequence: Synthetic oligonucleotide
uguaucugccaccaaacac

SEQ ID NO: 1107779 - RNA, 19 nt, Artificial Sequence
  Description of Artificial Sequence: Synthetic oligonucleotide
cauguuguagauccaaagc

SEQ ID NO: 1107780 - RNA, 19 nt, Artificial Sequence
  Description of Artificial Sequence: Synthetic oligonucleotide
uuaugauccagaaguguug

SEQ ID NO: 1107781 - RNA, 19 nt, Artificial Sequence
  Description of Artificial Sequence: Synthetic oligonucleotide
agcucuaugauggaccagc

SEQ ID NO: 1107782 - RNA, 19 nt, Artificial Sequence
  Description of Artificial Sequence: Synthetic oligonucleotide
uguauugccucuggaaugg

SEQ ID NO: 1107783 - RNA, 19 nt, Artificial Sequence
  Description of Artificial Sequence: Synthetic oligonucleotide
agaucauucauucuagcau

SEQ ID NO: 1107784 - RNA, 19 nt, Artificial Sequence
  Description of Artificial Sequence: Synthetic oligonucleotide
aguuccacgaguuggcuag

SEQ ID NO: 1107785 - RNA, 19 nt, Artificial Sequence
  Description of Artificial Sequence: Synthetic oligonucleotide
uuuaccggugguaacgggc

SEQ ID NO: 1107786 - RNA, 19 nt, Artificial Sequence
  Description of Artificial Sequence: Synthetic oligonucleotide
uucaaaaguucccaauacu

SEQ ID NO: 1107787 - RNA, 19 nt, Artificial Sequence
  Description of Artificial Sequence: Synthetic oligonucleotide
agaccuugaauccagcaug

SEQ ID NO: 1107788 - RNA, 19 nt, Artificial Sequence
  Description of Artificial Sequence: Synthetic oligonucleotide
cauauaauccucucacuug

SEQ ID NO: 1107789 - RNA, 19 nt, Artificial Sequence
  Description of Artificial Sequence: Synthetic oligonucleotide
uguccuccaaacaaguaca

SEQ ID NO: 1107790 - RNA, 19 nt, Artificial Sequence
  Description of Artificial Sequence: Synthetic oligonucleotide
uguuucagugucuaaaaua

SEQ ID NO: 1107791 - RNA, 19 nt, Artificial Sequence
  Description of Artificial Sequence: Synthetic oligonucleotide
aagucauauaauccucuca

SEQ ID NO: 1107792 - RNA, 19 nt, Artificial Sequence
  Description of Artificial Sequence: Synthetic oligonucleotide
gauuguuugcacaaccacc

SEQ ID NO: 1107793 - RNA, 19 nt, Artificial Sequence
  Description of Artificial Sequence: Synthetic oligonucleotide
uacuucauuacugugugca

SEQ ID NO: 1107794 - RNA, 19 nt, Artificial Sequence
  Description of Artificial Sequence: Synthetic oligonucleotide
aaaagaugaucugaagaga

SEQ ID NO: 1107795 - RNA, 19 nt, Artificial Sequence
  Description of Artificial Sequence: Synthetic oligonucleotide
guaaauauccauacccucc

SEQ ID NO: 1107796 - RNA, 19 nt, Artificial Sequence
  Description of Artificial Sequence: Synthetic oligonucleotide
uggagaucauucauucuag

SEQ ID NO: 1107797 - RNA, 19 nt, Artificial Sequence
  Description of Artificial Sequence: Synthetic oligonucleotide
uuuacugaugcaguaaguc

SEQ ID NO: 1107798 - RNA, 19 nt, Artificial Sequence
  Description of Artificial Sequence: Synthetic oligonucleotide
ugguguuaaauacauuuau

SEQ ID NO: 1107799 - RNA, 19 nt, Artificial Sequence
  Description of Artificial Sequence: Synthetic oligonucleotide
aaagccgagcagcggaccg

SEQ ID NO: 1107800 - RNA, 19 nt, Artificial Sequence
  Description of Artificial Sequence: Synthetic oligonucleotide
acaaguacagcacccuguc

SEQ ID NO: 1107801 - RNA, 19 nt, Artificial Sequence
  Description of Artificial Sequence: Synthetic oligonucleotide
acauaaaacccagaaagcu

SEQ ID NO: 1107802 - RNA, 19 nt, Artificial Sequence
  Description of Artificial Sequence: Synthetic oligonucleotide
aguguuguuacuaccgaac

SEQ ID NO: 1107803 - RNA, 19 nt, Artificial Sequence
  Description of Artificial Sequence: Synthetic oligonucleotide
aaugacugcuucuaagcuu

SEQ ID NO: 1107804 - RNA, 19 nt, Artificial Sequence
  Description of Artificial Sequence: Synthetic oligonucleotide
cuguaugccauaaccuugg

SEQ ID NO: 1107805 - RNA, 19 nt, Artificial Sequence
  Description of Artificial Sequence: Synthetic oligonucleotide
acaugaucauuccauccuc

SEQ ID NO: 1107806 - RNA, 19 nt, Artificial Sequence
  Description of Artificial Sequence: Synthetic oligonucleotide
uucccaauacuuuaucuuc

SEQ ID NO: 1107807 - RNA, 19 nt, Artificial Sequence
  Description of Artificial Sequence: Synthetic oligonucleotide
ggaugguuaaacugaaucc

SEQ ID NO: 1107808 - RNA, 19 nt, Artificial Sequence
  Description of Artificial Sequence: Synthetic oligonucleotide
ugcuuuaccggugguaacg

SEQ ID NO: 1107809 - RNA, 19 nt, Artificial Sequence
  Description of Artificial Sequence: Synthetic oligonucleotide
acuuuaacaauuggacagg

SEQ ID NO: 1107810 - RNA, 19 nt, Artificial Sequence
  Description of Artificial Sequence: Synthetic oligonucleotide
agugucuaaaauauguaca

SEQ ID NO: 1107811 - RNA, 19 nt, Artificial Sequence
  Description of Artificial Sequence: Synthetic oligonucleotide
acuaccgaaccucugauua

SEQ ID NO: 1107812 - RNA, 19 nt, Artificial Sequence
  Description of Artificial Sequence: Synthetic oligonucleotide
aacauguggcgcccaucgc

SEQ ID NO: 1107813 - RNA, 19 nt, Artificial Sequence
  Description of Artificial Sequence: Synthetic oligonucleotide
aguucucgaaggccgggcc

SEQ ID NO: 1107814 - RNA, 19 nt, Artificial Sequence
  Description of Artificial Sequence: Synthetic oligonucleotide
acaacaaugcauaucauua

SEQ ID NO: 1107815 - RNA, 19 nt, Artificial Sequence
  Description of Artificial Sequence: Synthetic oligonucleotide
ugcaaacuacaacaaugca

SEQ ID NO: 1107816 - RNA, 19 nt, Artificial Sequence
  Description of Artificial Sequence: Synthetic oligonucleotide
auuguuugcacaaccacca

SEQ ID NO: 1107817 - RNA, 19 nt, Artificial Sequence
  Description of Artificial Sequence: Synthetic oligonucleotide
uuggaugacuugaauucca

SEQ ID NO: 1107818 - RNA, 19 nt, Artificial Sequence
  Description of Artificial Sequence: Synthetic oligonucleotide
ucaguauaaggaugguuaa

SEQ ID NO: 1107819 - RNA, 19 nt, Artificial Sequence
  Description of Artificial Sequence: Synthetic oligonucleotide
auuacucuuguagccgccc

SEQ ID NO: 1107820 - RNA, 19 nt, Artificial Sequence
  Description of Artificial Sequence: Synthetic oligonucleotide
uuagccguacaagagauuu

SEQ ID NO: 1107821 - RNA, 19 nt, Artificial Sequence
  Description of Artificial Sequence: Synthetic oligonucleotide
uuaguggcugcuuuucagu

SEQ ID NO: 1107822 - RNA, 19 nt, Artificial Sequence
  Description of Artificial Sequence: Synthetic oligonucleotide
ucuaagcuuagccguacaa

SEQ ID NO: 1107823 - RNA, 19 nt, Artificial Sequence
  Description of Artificial Sequence: Synthetic oligonucleotide
guuacuaccgaaccucuga

SEQ ID NO: 1107824 - RNA, 19 nt, Artificial Sequence
  Description of Artificial Sequence: Synthetic oligonucleotide
ugucuaaaauauguacaug

SEQ ID NO: 1107825 - RNA, 19 nt, Artificial Sequence
  Description of Artificial Sequence: Synthetic oligonucleotide
cuuguagccgccccagacg

SEQ ID NO: 1107826 - RNA, 19 nt, Artificial Sequence
  Description of Artificial Sequence: Synthetic oligonucleotide
guuguuacuaccgaaccuc

SEQ ID NO: 1107827 - RNA, 19 nt, Artificial Sequence
  Description of Artificial Sequence: Synthetic oligonucleotide
aguucauuccacucccaug

SEQ ID NO: 1107828 - RNA, 19 nt, Artificial Sequence
  Description of Artificial Sequence: Synthetic oligonucleotide
cagacgaacauguggcgcc

SEQ ID NO: 1107829 - RNA, 19 nt, Artificial Sequence
  Description of Artificial Sequence: Synthetic oligonucleotide
aaguguuguuacuaccgaa

SEQ ID NO: 1107830 - RNA, 19 nt, Artificial Sequence
  Description of Artificial Sequence: Synthetic oligonucleotide
uucauucuagcaucucugu

SEQ ID NO: 1107831 - RNA, 19 nt, Artificial Sequence
  Description of Artificial Sequence: Synthetic oligonucleotide
cuaagcuuagccguacaag

SEQ ID NO: 1107832 - RNA, 19 nt, Artificial Sequence
  Description of Artificial Sequence: Synthetic oligonucleotide
aucuaugaggccuuaugau

SEQ ID NO: 1107833 - RNA, 19 nt, Artificial Sequence
  Description of Artificial Sequence: Synthetic oligonucleotide
cuucauuacugugugcagc

SEQ ID NO: 1107834 - RNA, 19 nt, Artificial Sequence
  Description of Artificial Sequence: Synthetic oligonucleotide
uuguagccgccccagacga

SEQ ID NO: 1107835 - RNA, 19 nt, Artificial Sequence
  Description of Artificial Sequence: Synthetic oligonucleotide
gguuaaacugaauccauuc

SEQ ID NO: 1107836 - RNA, 19 nt, Artificial Sequence
  Description of Artificial Sequence: Synthetic oligonucleotide
uaugauccagaaguguugu

SEQ ID NO: 1107837 - RNA, 19 nt, Artificial Sequence
  Description of Artificial Sequence: Synthetic oligonucleotide
cagaaguguuguuacuacc

SEQ ID NO: 1107838 - RNA, 19 nt, Artificial Sequence
  Description of Artificial Sequence: Synthetic oligonucleotide
agauuaagacaguggagau

SEQ ID NO: 1107839 - RNA, 19 nt, Artificial Sequence
  Description of Artificial Sequence: Synthetic oligonucleotide
uccagcauguagaacuuau

SEQ ID NO: 1107840 - RNA, 19 nt, Artificial Sequence
  Description of Artificial Sequence: Synthetic oligonucleotide
cuuggaugacuugaauucc

SEQ ID NO: 1107841 - RNA, 19 nt, Artificial Sequence
  Description of Artificial Sequence: Synthetic oligonucleotide
agggcauaugccuugugga

SEQ ID NO: 1107842 - RNA, 19 nt, Artificial Sequence
  Description of Artificial Sequence: Synthetic oligonucleotide
uuaccggugguaacgggcu

SEQ ID NO: 1107843 - RNA, 19 nt, Artificial Sequence
  Description of Artificial Sequence: Synthetic oligonucleotide
aucgcugacggcgacgugg

SEQ ID NO: 1107844 - RNA, 19 nt, Artificial Sequence
  Description of Artificial Sequence: Synthetic oligonucleotide
aagcuuagccguacaagag

SEQ ID NO: 1107845 - RNA, 19 nt, Artificial Sequence
  Description of Artificial Sequence: Synthetic oligonucleotide
gaugagaauuauuaucuau

SEQ ID NO: 1107846 - RNA, 19 nt, Artificial Sequence
  Description of Artificial Sequence: Synthetic oligonucleotide
aaguuuguccuuugaugau

SEQ ID NO: 1107847 - RNA, 19 nt, Artificial Sequence
  Description of Artificial Sequence: Synthetic oligonucleotide
ggugaaggugcuuuaccgg

SEQ ID NO: 1107848 - RNA, 19 nt, Artificial Sequence
  Description of Artificial Sequence: Synthetic oligonucleotide
agcuuagccguacaagaga

SEQ ID NO: 1107849 - RNA, 19 nt, Artificial Sequence
  Description of Artificial Sequence: Synthetic oligonucleotide
uuuaacaauuggacaggua

SEQ ID NO: 1107850 - RNA, 19 nt, Artificial Sequence
  Description of Artificial Sequence: Synthetic oligonucleotide
uguuacuaccgaaccucug

SEQ ID NO: 1107851 - RNA, 19 nt, Artificial Sequence
  Description of Artificial Sequence: Synthetic oligonucleotide
uaguggcugcuuuucagug

SEQ ID NO: 1107852 - RNA, 19 nt, Artificial Sequence
  Description of Artificial Sequence: Synthetic oligonucleotide
uuacucuuguagccgcccc

SEQ ID NO: 1107853 - RNA, 19 nt, Artificial Sequence
  Description of Artificial Sequence: Synthetic oligonucleotide
uuguuacuaccgaaccucu

SEQ ID NO: 1107854 - RNA, 19 nt, Artificial Sequence
  Description of Artificial Sequence: Synthetic oligonucleotide
guggagaucauucauucua

SEQ ID NO: 1107855 - RNA, 19 nt, Artificial Sequence
  Description of Artificial Sequence: Synthetic oligonucleotide
aguugcacaggcaugggca

SEQ ID NO: 1107856 - RNA, 19 nt, Artificial Sequence
  Description of Artificial Sequence: Synthetic oligonucleotide
guaaauccuccaaagagaa

SEQ ID NO: 1107857 - RNA, 19 nt, Artificial Sequence
  Description of Artificial Sequence: Synthetic oligonucleotide
aucaauucuuucccacugu

SEQ ID NO: 1107858 - RNA, 19 nt, Artificial Sequence
  Description of Artificial Sequence: Synthetic oligonucleotide
acaauuggacagguacugg

SEQ ID NO: 1107859 - RNA, 19 nt, Artificial Sequence
  Description of Artificial Sequence: Synthetic oligonucleotide
uuacuaccgaaccucugau

SEQ ID NO: 1107860 - RNA, 19 nt, Artificial Sequence
  Description of Artificial Sequence: Synthetic oligonucleotide
gauuaagacaguggagauc

SEQ ID NO: 1107861 - RNA, 19 nt, Artificial Sequence
  Description of Artificial Sequence: Synthetic oligonucleotide
agccguacaagagauuuug

SEQ ID NO: 1107862 - RNA, 19 nt, Artificial Sequence
  Description of Artificial Sequence: Synthetic oligonucleotide
ucauucuagcaucucugua

SEQ ID NO: 1107863 - RNA, 19 nt, Artificial Sequence
  Description of Artificial Sequence: Synthetic oligonucleotide
ucauuccacucccauguau

SEQ ID NO: 1107864 - RNA, 19 nt, Artificial Sequence
  Description of Artificial Sequence: Synthetic oligonucleotide
aggaacggccaacagggca

SEQ ID NO: 1107865 - RNA, 19 nt, Artificial Sequence
  Description of Artificial Sequence: Synthetic oligonucleotide
aaauauccauacccuccaa

SEQ ID NO: 1107866 - RNA, 19 nt, Artificial Sequence
  Description of Artificial Sequence: Synthetic oligonucleotide
ugguuaaacugaauccauu

SEQ ID NO: 1107867 - RNA, 19 nt, Artificial Sequence
  Description of Artificial Sequence: Synthetic oligonucleotide
guuugcacaaccaccaaaa

SEQ ID NO: 1107868 - RNA, 19 nt, Artificial Sequence
  Description of Artificial Sequence: Synthetic oligonucleotide
ugugcaccgggaccgcucc

SEQ ID NO: 1107869 - RNA, 19 nt, Artificial Sequence
  Description of Artificial Sequence: Synthetic oligonucleotide
uaugaggccuuaugaucca

SEQ ID NO: 1107870 - RNA, 19 nt, Artificial Sequence
  Description of Artificial Sequence: Synthetic oligonucleotide
gggagagcggccgagacgg

SEQ ID NO: 1107871 - RNA, 19 nt, Artificial Sequence
  Description of Artificial Sequence: Synthetic oligonucleotide
gguaaauccuccaaagaga

SEQ ID NO: 1107872 - RNA, 19 nt, Artificial Sequence
  Description of Artificial Sequence: Synthetic oligonucleotide
uguaugccauaaccuuggc

SEQ ID NO: 1107873 - RNA, 19 nt, Artificial Sequence
  Description of Artificial Sequence: Synthetic oligonucleotide
aucacuuaguggcugcuuu

SEQ ID NO: 1107874 - RNA, 19 nt, Artificial Sequence
  Description of Artificial Sequence: Synthetic oligonucleotide
aguggagaucauucauucu

SEQ ID NO: 1107875 - RNA, 19 nt, Artificial Sequence
  Description of Artificial Sequence: Synthetic oligonucleotide
augaucugaagagacuggu

SEQ ID NO: 1107876 - RNA, 19 nt, Artificial Sequence
  Description of Artificial Sequence: Synthetic oligonucleotide
ccuugaauccagcauguag

SEQ ID NO: 1107877 - RNA, 19 nt, Artificial Sequence
  Description of Artificial Sequence: Synthetic oligonucleotide
cuuuaccggugguaacggg

SEQ ID NO: 1107878 - RNA, 19 nt, Artificial Sequence
  Description of Artificial Sequence: Synthetic oligonucleotide
uucuaagcuuagccguaca

SEQ ID NO: 1107879 - RNA, 19 nt, Artificial Sequence
  Description of Artificial Sequence: Synthetic oligonucleotide
cucguaguucucgaaggcc

SEQ ID NO: 1107880 - RNA, 19 nt, Artificial Sequence
  Description of Artificial Sequence: Synthetic oligonucleotide
uuucaguauaaggaugguu

SEQ ID NO: 1107881 - RNA, 19 nt, Artificial Sequence
  Description of Artificial Sequence: Synthetic oligonucleotide
uaacgggcuggcuccaggc

SEQ ID NO: 1107882 - RNA, 19 nt, Artificial Sequence
  Description of Artificial Sequence: Synthetic oligonucleotide
auacccagacaccaaguuu

SEQ ID NO: 1107883 - RNA, 19 nt, Artificial Sequence
  Description of Artificial Sequence: Synthetic oligonucleotide
gugaaguagguguuuugga

SEQ ID NO: 1107884 - RNA, 19 nt, Artificial Sequence
  Description of Artificial Sequence: Synthetic oligonucleotide
cauguggcgcccaucgcug

SEQ ID NO: 1107885 - RNA, 19 nt, Artificial Sequence
  Description of Artificial Sequence: Synthetic oligonucleotide
guccaggcaucacuuagug

SEQ ID NO: 1107886 - RNA, 19 nt, Artificial Sequence
  Description of Artificial Sequence: Synthetic oligonucleotide
agacgaacauguggcgccc

SEQ ID NO: 1107887 - RNA, 19 nt, Artificial Sequence
  Description of Artificial Sequence: Synthetic oligonucleotide
gucuacacacacagcacag

SEQ ID NO: 1107888 - RNA, 19 nt, Artificial Sequence
  Description of Artificial Sequence: Synthetic oligonucleotide
uaccgaaccucugauuaac

SEQ ID NO: 1107889 - RNA, 19 nt, Artificial Sequence
  Description of Artificial Sequence: Synthetic oligonucleotide
guaacgggcuggcuccagg

SEQ ID NO: 1107890 - RNA, 19 nt, Artificial Sequence
  Description of Artificial Sequence: Synthetic oligonucleotide
guauaaggaugguuaaacu

SEQ ID NO: 1107891 - RNA, 19 nt, Artificial Sequence
  Description of Artificial Sequence: Synthetic oligonucleotide
gccucguaguucucgaagg

SEQ ID NO: 1107892 - RNA, 19 nt, Artificial Sequence
  Description of Artificial Sequence: Synthetic oligonucleotide
gacguggccgcugcgcucg

SEQ ID NO: 1107893 - RNA, 19 nt, Artificial Sequence
  Description of Artificial Sequence: Synthetic oligonucleotide
gauuacucuuguagccgcc

SEQ ID NO: 1107894 - RNA, 19 nt, Artificial Sequence
  Description of Artificial Sequence: Synthetic oligonucleotide
cauggccucguaguucucg

SEQ ID NO: 1107895 - RNA, 19 nt, Artificial Sequence
  Description of Artificial Sequence: Synthetic oligonucleotide
ucuuucccacuguaacacu

SEQ ID NO: 1107896 - RNA, 19 nt, Artificial Sequence
  Description of Artificial Sequence: Synthetic oligonucleotide
guccgcucgagcauccucg

SEQ ID NO: 1107897 - RNA, 19 nt, Artificial Sequence
  Description of Artificial Sequence: Synthetic oligonucleotide
ugacaaauacaggaucguu

SEQ ID NO: 1107898 - RNA, 19 nt, Artificial Sequence
  Description of Artificial Sequence: Synthetic oligonucleotide
ucuaggccauucacaugca

SEQ ID NO: 1107899 - RNA, 19 nt, Artificial Sequence
  Description of Artificial Sequence: Synthetic oligonucleotide
uggcgcccaucgcugacgg

SEQ ID NO: 1107900 - RNA, 19 nt, Artificial Sequence
  Description of Artificial Sequence: Synthetic oligonucleotide
agacggcucgcacucgcag

SEQ ID NO: 1107901 - RNA, 19 nt, Artificial Sequence
  Description of Artificial Sequence: Synthetic oligonucleotide
uccaugcaaguagaugaga

SEQ ID NO: 1107902 - RNA, 19 nt, Artificial Sequence
  Description of Artificial Sequence: Synthetic oligonucleotide
auaugccuuguggaauuag

SEQ ID NO: 1107903 - RNA, 19 nt, Artificial Sequence
  Description of Artificial Sequence: Synthetic oligonucleotide
ucgcugacggcgacguggc

SEQ ID NO: 1107904 - RNA, 19 nt, Artificial Sequence
  Description of Artificial Sequence: Synthetic oligonucleotide
gacaaauacaggaucguuu

SEQ ID NO: 1107905 - RNA, 19 nt, Artificial Sequence
  Description of Artificial Sequence: Synthetic oligonucleotide
ggacugugcaccgggaccg

SEQ ID NO: 1107906 - RNA, 19 nt, Artificial Sequence
  Description of Artificial Sequence: Synthetic oligonucleotide
ugcaccgggaccgcuccgg

SEQ ID NO: 1107907 - RNA, 19 nt, Artificial Sequence
  Description of Artificial Sequence: Synthetic oligonucleotide
aucguuuuccaugcaagua

SEQ ID NO: 1107908 - RNA, 19 nt, Artificial Sequence
  Description of Artificial Sequence: Synthetic oligonucleotide
guaguucucgaaggccggg

SEQ ID NO: 1107909 - RNA, 19 nt, Artificial Sequence
  Description of Artificial Sequence: Synthetic oligonucleotide
uaguucucgaaggccgggc

SEQ ID NO: 1107910 - RNA, 19 nt, Artificial Sequence
  Description of Artificial Sequence: Synthetic oligonucleotide
ugggcagauaaaagucaua

SEQ ID NO: 1107911 - RNA, 19 nt, Artificial Sequence
  Description of Artificial Sequence: Synthetic oligonucleotide
gaaagccgagcagcggacc

SEQ ID NO: 1107912 - RNA, 19 nt, Artificial Sequence
  Description of Artificial Sequence: Synthetic oligonucleotide
ggaauuaguucauuccacu

SEQ ID NO: 1107913 - RNA, 19 nt, Artificial Sequence
  Description of Artificial Sequence: Synthetic oligonucleotide
accggugguaacgggcugg

SEQ ID NO: 1107914 - RNA, 19 nt, Artificial Sequence
  Description of Artificial Sequence: Synthetic oligonucleotide
caauuggacagguacuggu

SEQ ID NO: 1107915 - RNA, 19 nt, Artificial Sequence
  Description of Artificial Sequence: Synthetic oligonucleotide
ucauucauucuagcaucuc

SEQ ID NO: 1107916 - RNA, 19 nt, Artificial Sequence
  Description of Artificial Sequence: Synthetic oligonucleotide
uccacgaguuggcuagcau

SEQ ID NO: 1107917 - RNA, 19 nt, Artificial Sequence
  Description of Artificial Sequence: Synthetic oligonucleotide
caggucguccgcucgagca

SEQ ID NO: 1107918 - RNA, 19 nt, Artificial Sequence
  Description of Artificial Sequence: Synthetic oligonucleotide
caucgcuugcacaagcugu

SEQ ID NO: 1107919 - RNA, 19 nt, Artificial Sequence
  Description of Artificial Sequence: Synthetic oligonucleotide
cauccucguugccaucagc

SEQ ID NO: 1107920 - RNA, 19 nt, Artificial Sequence
  Description of Artificial Sequence: Synthetic oligonucleotide
uacuaccgaaccucugauu

SEQ ID NO: 1107921 - RNA, 19 nt, Artificial Sequence
  Description of Artificial Sequence: Synthetic oligonucleotide
ugccacucugugacaaaua

SEQ ID NO: 1107922 - RNA, 19 nt, Artificial Sequence
  Description of Artificial Sequence: Synthetic oligonucleotide
uguggcgcccaucgcugac

SEQ ID NO: 1107923 - RNA, 19 nt, Artificial Sequence
  Description of Artificial Sequence: Synthetic oligonucleotide
gagcggccgagacggcucg

SEQ ID NO: 1107924 - RNA, 19 nt, Artificial Sequence
  Description of Artificial Sequence: Synthetic oligonucleotide
gcuuuaccggugguaacgg

SEQ ID NO: 1107925 - RNA, 19 nt, Artificial Sequence
  Description of Artificial Sequence: Synthetic oligonucleotide
cagugguaaauccuccaaa

SEQ ID NO: 1107926 - RNA, 19 nt, Artificial Sequence
  Description of Artificial Sequence: Synthetic oligonucleotide
auccucucacuugauuacu

SEQ ID NO: 1107927 - RNA, 19 nt, Artificial Sequence
  Description of Artificial Sequence: Synthetic oligonucleotide
uuaagacaguggagaucau

SEQ ID NO: 1107928 - RNA, 19 nt, Artificial Sequence
  Description of Artificial Sequence: Synthetic oligonucleotide
uaccggugguaacgggcug

SEQ ID NO: 1107929 - RNA, 19 nt, Artificial Sequence
  Description of Artificial Sequence: Synthetic oligonucleotide
aggcgggagacaaaggaaa

SEQ ID NO: 1107930 - RNA, 19 nt, Artificial Sequence
  Description of Artificial Sequence: Synthetic oligonucleotide
uagccguacaagagauuuu

SEQ ID NO: 1107931 - RNA, 19 nt, Artificial Sequence
  Description of Artificial Sequence: Synthetic oligonucleotide
uauuaucuaugaggccuua

SEQ ID NO: 1107932 - RNA, 19 nt, Artificial Sequence
  Description of Artificial Sequence: Synthetic oligonucleotide
aguccaggcaucacuuagu

SEQ ID NO: 1107933 - RNA, 19 nt, Artificial Sequence
  Description of Artificial Sequence: Synthetic oligonucleotide
gacgucgccuucaguguug

SEQ ID NO: 1107934 - RNA, 19 nt, Artificial Sequence
  Description of Artificial Sequence: Synthetic oligonucleotide
guagccgccccagacgaac

SEQ ID NO: 1107935 - RNA, 19 nt, Artificial Sequence
  Description of Artificial Sequence: Synthetic oligonucleotide
uggcaggucguccgcucga

SEQ ID NO: 1107936 - RNA, 19 nt, Artificial Sequence
  Description of Artificial Sequence: Synthetic oligonucleotide
ucucgaaggccgggccugg

SEQ ID NO: 1107937 - RNA, 19 nt, Artificial Sequence
  Description of Artificial Sequence: Synthetic oligonucleotide
auuacugugugcagcucua

SEQ ID NO: 1107938 - RNA, 19 nt, Artificial Sequence
  Description of Artificial Sequence: Synthetic oligonucleotide
ggugcuuuaccggugguaa

SEQ ID NO: 1107939 - RNA, 19 nt, Artificial Sequence
  Description of Artificial Sequence: Synthetic oligonucleotide
ccucugauuaacacuguga

SEQ ID NO: 1107940 - RNA, 19 nt, Artificial Sequence
  Description of Artificial Sequence: Synthetic oligonucleotide
guaugccauaaccuuggcu

SEQ ID NO: 1107941 - RNA, 19 nt, Artificial Sequence
  Description of Artificial Sequence: Synthetic oligonucleotide
ccgaaccucugauuaacac

SEQ ID NO: 1107942 - RNA, 19 nt, Artificial Sequence
  Description of Artificial Sequence: Synthetic oligonucleotide
aaccucugauuaacacugu

SEQ ID NO: 1107943 - RNA, 19 nt, Artificial Sequence
  Description of Artificial Sequence: Synthetic oligonucleotide
acccggaccgggcuccgag

SEQ ID NO: 1107944 - RNA, 19 nt, Artificial Sequence
  Description of Artificial Sequence: Synthetic oligonucleotide
gaccagcagauuguuugca

SEQ ID NO: 1107945 - RNA, 19 nt, Artificial Sequence
  Description of Artificial Sequence: Synthetic oligonucleotide
caugcaaguagaugagaau

SEQ ID NO: 1107946 - RNA, 19 nt, Artificial Sequence
  Description of Artificial Sequence: Synthetic oligonucleotide
augaggccuuaugauccag

SEQ ID NO: 1107947 - RNA, 19 nt, Artificial Sequence
  Description of Artificial Sequence: Synthetic oligonucleotide
caggaacggccaacagggc

SEQ ID NO: 1107948 - RNA, 19 nt, Artificial Sequence
  Description of Artificial Sequence: Synthetic oligonucleotide
gggccuggcaggucguccg

SEQ ID NO: 1107949 - RNA, 19 nt, Artificial Sequence
  Description of Artificial Sequence: Synthetic oligonucleotide
cuaccgaaccucugauuaa

SEQ ID NO: 1107950 - RNA, 19 nt, Artificial Sequence
  Description of Artificial Sequence: Synthetic oligonucleotide
uccgcucgagcauccucgu

SEQ ID NO: 1107951 - RNA, 19 nt, Artificial Sequence
  Description of Artificial Sequence: Synthetic oligonucleotide
cuuuaacaauuggacaggu

SEQ ID NO: 1107952 - RNA, 19 nt, Artificial Sequence
  Description of Artificial Sequence: Synthetic oligonucleotide
ccagacgaacauguggcgc

SEQ ID NO: 1107953 - RNA, 19 nt, Artificial Sequence
  Description of Artificial Sequence: Synthetic oligonucleotide
cgcggugccacccggaccg

SEQ ID NO: 1107954 - RNA, 19 nt, Artificial Sequence
  Description of Artificial Sequence: Synthetic oligonucleotide
cccagacgaacauguggcg

SEQ ID NO: 1107955 - RNA, 19 nt, Artificial Sequence
  Description of Artificial Sequence: Synthetic oligonucleotide
ggcgggagacaaaggaaag

SEQ ID NO: 1107956 - RNA, 19 nt, Artificial Sequence
  Description of Artificial Sequence: Synthetic oligonucleotide
uuacugugugcagcucuau

SEQ ID NO: 1107957 - RNA, 19 nt, Artificial Sequence
  Description of Artificial Sequence: Synthetic oligonucleotide
acggccaacagggcauaug

SEQ ID NO: 1107958 - RNA, 19 nt, Artificial Sequence
  Description of Artificial Sequence: Synthetic oligonucleotide
uguagccgccccagacgaa

SEQ ID NO: 1107959 - RNA, 19 nt, Artificial Sequence
  Description of Artificial Sequence: Synthetic oligonucleotide
acgaggugaaggugcuuua

SEQ ID NO: 1107960 - RNA, 19 nt, Artificial Sequence
  Description of Artificial Sequence: Synthetic oligonucleotide
cacgaguuggcuagcauuu

SEQ ID NO: 1107961 - RNA, 19 nt, Artificial Sequence
  Description of Artificial Sequence: Synthetic oligonucleotide
aucgcuugcacaagcugua

SEQ ID NO: 1107962 - RNA, 19 nt, Artificial Sequence
  Description of Artificial Sequence: Synthetic oligonucleotide
gggcagauaaaagucauau

SEQ ID NO: 1107963 - RNA, 19 nt, Artificial Sequence
  Description of Artificial Sequence: Synthetic oligonucleotide
gccggugucgcggggagcg

SEQ ID NO: 1107964 - RNA, 19 nt, Artificial Sequence
  Description of Artificial Sequence: Synthetic oligonucleotide
caguauaaggaugguuaaa

SEQ ID NO: 1107965 - RNA, 19 nt, Artificial Sequence
  Description of Artificial Sequence: Synthetic oligonucleotide
gccguacaagagauuuugg

SEQ ID NO: 1107966 - RNA, 19 nt, Artificial Sequence
  Description of Artificial Sequence: Synthetic oligonucleotide
ggccgggccuggcaggucg

SEQ ID NO: 1107967 - RNA, 19 nt, Artificial Sequence
  Description of Artificial Sequence: Synthetic oligonucleotide
accgaaccucugauuaaca

SEQ ID NO: 1107968 - RNA, 19 nt, Artificial Sequence
  Description of Artificial Sequence: Synthetic oligonucleotide
gugacaaauacaggaucgu

SEQ ID NO: 1107969 - RNA, 19 nt, Artificial Sequence
  Description of Artificial Sequence: Synthetic oligonucleotide
ggaccgggcuccgagcggg

SEQ ID NO: 1107970 - RNA, 19 nt, Artificial Sequence
  Description of Artificial Sequence: Synthetic oligonucleotide
uccgagcgggagagcggcc

SEQ ID NO: 1107971 - RNA, 19 nt, Artificial Sequence
  Description of Artificial Sequence: Synthetic oligonucleotide
cucgcacucgcagcccgcc

SEQ ID NO: 1107972 - RNA, 19 nt, Artificial Sequence
  Description of Artificial Sequence: Synthetic oligonucleotide
auguggcgcccaucgcuga

SEQ ID NO: 1107973 - RNA, 19 nt, Artificial Sequence
  Description of Artificial Sequence: Synthetic oligonucleotide
ucgcggggagcgcggugcc

SEQ ID NO: 1107974 - RNA, 19 nt, Artificial Sequence
  Description of Artificial Sequence: Synthetic oligonucleotide
guucucgaaggccgggccu

SEQ ID NO: 1107975 - RNA, 19 nt, Artificial Sequence
  Description of Artificial Sequence: Synthetic oligonucleotide
ggaaagccgagcagcggac

SEQ ID NO: 1107976 - RNA, 19 nt, Artificial Sequence
  Description of Artificial Sequence: Synthetic oligonucleotide
ucgcuugcacaagcuguau

SEQ ID NO: 1107977 - RNA, 19 nt, Artificial Sequence
  Description of Artificial Sequence: Synthetic oligonucleotide
ucccggccgagcgcugagg

SEQ ID NO: 1107978 - RNA, 19 nt, Artificial Sequence
  Description of Artificial Sequence: Synthetic oligonucleotide
gacugugcaccgggaccgc

SEQ ID NO: 1107979 - RNA, 19 nt, Artificial Sequence
  Description of Artificial Sequence: Synthetic oligonucleotide
ccacucugugacaaauaca

SEQ ID NO: 1107980 - RNA, 19 nt, Artificial Sequence
  Description of Artificial Sequence: Synthetic oligonucleotide
cguuuuccaugcaaguaga

SEQ ID NO: 1107981 - RNA, 19 nt, Artificial Sequence
  Description of Artificial Sequence: Synthetic oligonucleotide
guuccacgaguuggcuagc

SEQ ID NO: 1107982 - RNA, 19 nt, Artificial Sequence
  Description of Artificial Sequence: Synthetic oligonucleotide
cagcucuaugauggaccag

SEQ ID NO: 1107983 - RNA, 19 nt, Artificial Sequence
  Description of Artificial Sequence: Synthetic oligonucleotide
gcacucgcagcccgccccg

SEQ ID NO: 1107984 - RNA, 19 nt, Artificial Sequence
  Description of Artificial Sequence: Synthetic oligonucleotide
ccggaccgggcuccgagcg

SEQ ID NO: 1107985 - RNA, 19 nt, Artificial Sequence
  Description of Artificial Sequence: Synthetic oligonucleotide
aacggccaacagggcauau

SEQ ID NO: 1107986 - RNA, 19 nt, Artificial Sequence
  Description of Artificial Sequence: Synthetic oligonucleotide
agccgccccagacgaacau

SEQ ID NO: 1107987 - RNA, 19 nt, Artificial Sequence
  Description of Artificial Sequence: Synthetic oligonucleotide
gacggcgacguggccgcug

SEQ ID NO: 1107988 - RNA, 19 nt, Artificial Sequence
  Description of Artificial Sequence: Synthetic oligonucleotide
gagacggcucgcacucgca

SEQ ID NO: 1107989 - RNA, 19 nt, Artificial Sequence
  Description of Artificial Sequence: Synthetic oligonucleotide
acgucgccuucaguguuga

SEQ ID NO: 1107990 - RNA, 19 nt, Artificial Sequence
  Description of Artificial Sequence: Synthetic oligonucleotide
gcaaguagaugagaauuau

SEQ ID NO: 1107991 - RNA, 19 nt, Artificial Sequence
  Description of Artificial Sequence: Synthetic oligonucleotide
gugcaccgggaccgcuccg

SEQ ID NO: 1107992 - RNA, 19 nt, Artificial Sequence
  Description of Artificial Sequence: Synthetic oligonucleotide
ggugucgcggggagcgcgg

SEQ ID NO: 1107993 - RNA, 19 nt, Artificial Sequence
  Description of Artificial Sequence: Synthetic oligonucleotide
ggcgacguggccgcugcgc

SEQ ID NO: 1107994 - RNA, 19 nt, Artificial Sequence
  Description of Artificial Sequence: Synthetic oligonucleotide
gcuuagccguacaagagau

SEQ ID NO: 1107995 - RNA, 19 nt, Artificial Sequence
  Description of Artificial Sequence: Synthetic oligonucleotide
ccgcaggcgggagacaaag

SEQ ID NO: 1107996 - RNA, 19 nt, Artificial Sequence
  Description of Artificial Sequence: Synthetic oligonucleotide
ggacagguacugguguuaa

SEQ ID NO: 1107997 - RNA, 19 nt, Artificial Sequence
  Description of Artificial Sequence: Synthetic oligonucleotide
accuugaauccagcaugua

SEQ ID NO: 1107998 - RNA, 19 nt, Artificial Sequence
  Description of Artificial Sequence: Synthetic oligonucleotide
cauaugccuuguggaauua

SEQ ID NO: 1107999 - RNA, 19 nt, Artificial Sequence
  Description of Artificial Sequence: Synthetic oligonucleotide
cacgaggugaaggugcuuu

SEQ ID NO: 1108000 - RNA, 19 nt, Artificial Sequence
  Description of Artificial Sequence: Synthetic oligonucleotide
gguaacgggcuggcuccag

SEQ ID NO: 1108001 - RNA, 19 nt, Artificial Sequence
  Description of Artificial Sequence: Synthetic oligonucleotide
gcucuaugauggaccagca

SEQ ID NO: 1108002 - RNA, 19 nt, Artificial Sequence
  Description of Artificial Sequence: Synthetic oligonucleotide
caucgcugacggcgacgug

SEQ ID NO: 1108003 - RNA, 19 nt, Artificial Sequence
  Description of Artificial Sequence: Synthetic oligonucleotide
cuggcuccaggcaaauguu

SEQ ID NO: 1108004 - RNA, 19 nt, Artificial Sequence
  Description of Artificial Sequence: Synthetic oligonucleotide
ggcaggucguccgcucgag

SEQ ID NO: 1108005 - RNA, 19 nt, Artificial Sequence
  Description of Artificial Sequence: Synthetic oligonucleotide
cgagacggcucgcacucgc

SEQ ID NO: 1108006 - RNA, 19 nt, Artificial Sequence
  Description of Artificial Sequence: Synthetic oligonucleotide
cccggccgagcgcugaggc

SEQ ID NO: 1108007 - RNA, 19 nt, Artificial Sequence
  Description of Artificial Sequence: Synthetic oligonucleotide
gcaggucguccgcucgagc

SEQ ID NO: 1108008 - RNA, 19 nt, Artificial Sequence
  Description of Artificial Sequence: Synthetic oligonucleotide
gaacggccaacagggcaua

SEQ ID NO: 1108009 - RNA, 19 nt, Artificial Sequence
  Description of Artificial Sequence: Synthetic oligonucleotide
cuuagccguacaagagauu

SEQ ID NO: 1108010 - RNA, 19 nt, Artificial Sequence
  Description of Artificial Sequence: Synthetic oligonucleotide
ccuuaugauccagaagugu

SEQ ID NO: 1108011 - RNA, 19 nt, Artificial Sequence
  Description of Artificial Sequence: Synthetic oligonucleotide
ggucguccgcucgagcauc

SEQ ID NO: 1108012 - RNA, 19 nt, Artificial Sequence
  Description of Artificial Sequence: Synthetic oligonucleotide
ucguccgcucgagcauccu

SEQ ID NO: 1108013 - RNA, 19 nt, Artificial Sequence
  Description of Artificial Sequence: Synthetic oligonucleotide
cgcacucgcagcccgcccc

SEQ ID NO: 1108014 - RNA, 19 nt, Artificial Sequence
  Description of Artificial Sequence: Synthetic oligonucleotide
gccagcgcuggcgacccgc

SEQ ID NO: 1108015 - RNA, 19 nt, Artificial Sequence
  Description of Artificial Sequence: Synthetic oligonucleotide
ccucucacuugauuacucu

SEQ ID NO: 1108016 - RNA, 19 nt, Artificial Sequence
  Description of Artificial Sequence: Synthetic oligonucleotide
gcaccgggaccgcuccggc

SEQ ID NO: 1108017 - RNA, 19 nt, Artificial Sequence
  Description of Artificial Sequence: Synthetic oligonucleotide
ggggagcgcggugccaccc

SEQ ID NO: 1108018 - RNA, 19 nt, Artificial Sequence
  Description of Artificial Sequence: Synthetic oligonucleotide
gccgccccagacgaacaug

SEQ ID NO: 1108019 - RNA, 19 nt, Artificial Sequence
  Description of Artificial Sequence: Synthetic oligonucleotide
cccggaccgggcuccgagc

SEQ ID NO: 1108020 - RNA, 19 nt, Artificial Sequence
  Description of Artificial Sequence: Synthetic oligonucleotide
cacucgcagcccgccccgc

SEQ ID NO: 1108021 - RNA, 19 nt, Artificial Sequence
  Description of Artificial Sequence: Synthetic oligonucleotide
ccacgaguuggcuagcauu

SEQ ID NO: 1108022 - RNA, 19 nt, Artificial Sequence
  Description of Artificial Sequence: Synthetic oligonucleotide
ccgccuccagucgccaggg

SEQ ID NO: 1108023 - RNA, 19 nt, Artificial Sequence
  Description of Artificial Sequence: Synthetic oligonucleotide
ggccgagacggcucgcacu

SEQ ID NO: 1108024 - RNA, 19 nt, Artificial Sequence
  Description of Artificial Sequence: Synthetic oligonucleotide
gcggggagcgcggugccac

SEQ ID NO: 1108025 - RNA, 19 nt, Artificial Sequence
  Description of Artificial Sequence: Synthetic oligonucleotide
gccgcugcgcucggccggg

SEQ ID NO: 1108026 - RNA, 19 nt, Artificial Sequence
  Description of Artificial Sequence: Synthetic oligonucleotide
cucggccgggcaggccagc

SEQ ID NO: 1108027 - RNA, 19 nt, Artificial Sequence
  Description of Artificial Sequence: Synthetic oligonucleotide
ggacgucgccuucaguguu

SEQ ID NO: 1108028 - RNA, 19 nt, Artificial Sequence
  Description of Artificial Sequence: Synthetic oligonucleotide
ccgagcgcugaggcgcgcg

SEQ ID NO: 1108029 - RNA, 19 nt, Artificial Sequence
  Description of Artificial Sequence: Synthetic oligonucleotide
ccgccccagacgaacaugu

SEQ ID NO: 1108030 - RNA, 19 nt, Artificial Sequence
  Description of Artificial Sequence: Synthetic oligonucleotide
gcucgcacucgcagcccgc

SEQ ID NO: 1108031 - RNA, 19 nt, Artificial Sequence
  Description of Artificial Sequence: Synthetic oligonucleotide
gcgacguggccgcugcgcu

SEQ ID NO: 1108032 - RNA, 19 nt, Artificial Sequence
  Description of Artificial Sequence: Synthetic oligonucleotide
ugacggcgacguggccgcu

SEQ ID NO: 1108033 - RNA, 19 nt, Artificial Sequence
  Description of Artificial Sequence: Synthetic oligonucleotide
cguccgcucgagcauccuc

SEQ ID NO: 1108034 - RNA, 19 nt, Artificial Sequence
  Description of Artificial Sequence: Synthetic oligonucleotide
ggccauucacaugcacaua

SEQ ID NO: 1108035 - RNA, 19 nt, Artificial Sequence
  Description of Artificial Sequence: Synthetic oligonucleotide
gaccgggcuccgagcggga

SEQ ID NO: 1108036 - RNA, 19 nt, Artificial Sequence
  Description of Artificial Sequence: Synthetic oligonucleotide
cggugucgcggggagcgcg

SEQ ID NO: 1108037 - RNA, 19 nt, Artificial Sequence
  Description of Artificial Sequence: Synthetic oligonucleotide
gcccaucgcugacggcgac

SEQ ID NO: 1108038 - RNA, 19 nt, Artificial Sequence
  Description of Artificial Sequence: Synthetic oligonucleotide
cggaccgggcuccgagcgg

SEQ ID NO: 1108039 - RNA, 19 nt, Artificial Sequence
  Description of Artificial Sequence: Synthetic oligonucleotide
gcucggccgggcaggccag

SEQ ID NO: 1108040 - RNA, 19 nt, Artificial Sequence
  Description of Artificial Sequence: Synthetic oligonucleotide
ccaucgcugacggcgacgu

SEQ ID NO: 1108041 - RNA, 19 nt, Artificial Sequence
  Description of Artificial Sequence: Synthetic oligonucleotide
ccgggaccgcuccggcccc

SEQ ID NO: 1108042 - RNA, 19 nt, Artificial Sequence
  Description of Artificial Sequence: Synthetic oligonucleotide
gcggccgagacggcucgca

SEQ ID NO: 1108043 - RNA, 19 nt, Artificial Sequence
  Description of Artificial Sequence: Synthetic oligonucleotide
cgccccgccuccagucgcc

SEQ ID NO: 1108044 - RNA, 19 nt, Artificial Sequence
  Description of Artificial Sequence: Synthetic oligonucleotide
gcggaccgcggcgcgcagc

SEQ ID NO: 1108045 - RNA, 19 nt, Artificial Sequence
  Description of Artificial Sequence: Synthetic oligonucleotide
gcggugccacccggaccgg

SEQ ID NO: 1108046 - RNA, 19 nt, Artificial Sequence
  Description of Artificial Sequence: Synthetic oligonucleotide
gcgcgcggccagcggcugc

SEQ ID NO: 1108047 - RNA, 19 nt, Artificial Sequence
  Description of Artificial Sequence: Synthetic oligonucleotide
cggccgagacggcucgcac

SEQ ID NO: 1108048 - RNA, 19 nt, Artificial Sequence
  Description of Artificial Sequence: Synthetic oligonucleotide
cgcccaucgcugacggcga

SEQ ID NO: 1108049 - RNA, 19 nt, Artificial Sequence
  Description of Artificial Sequence: Synthetic oligonucleotide
ccacccggaccgggcuccg

SEQ ID NO: 1108050 - RNA, 19 nt, Artificial Sequence
  Description of Artificial Sequence: Synthetic oligonucleotide
ccggugucgcggggagcgc

SEQ ID NO: 1108051 - RNA, 19 nt, Artificial Sequence
  Description of Artificial Sequence: Synthetic oligonucleotide
cacccggaccgggcuccga

SEQ ID NO: 1108052 - RNA, 19 nt, Artificial Sequence
  Description of Artificial Sequence: Synthetic oligonucleotide
cggcgacguggccgcugcg

SEQ ID NO: 1108053 - RNA, 19 nt, Artificial Sequence
  Description of Artificial Sequence: Synthetic oligonucleotide
ggaccgcggcgcgcagcca

SEQ ID NO: 1108054 - RNA, 19 nt, Artificial Sequence
  Description of Artificial Sequence: Synthetic oligonucleotide
gcacgaggugaaggugcuu

SEQ ID NO: 1108055 - RNA, 19 nt, Artificial Sequence
  Description of Artificial Sequence: Synthetic oligonucleotide
gcgcgcgcggccagcggcu

SEQ ID NO: 1108056 - RNA, 19 nt, Artificial Sequence
  Description of Artificial Sequence: Synthetic oligonucleotide
ccgcucgagcauccucguu

SEQ ID NO: 1108057 - RNA, 19 nt, Artificial Sequence
  Description of Artificial Sequence: Synthetic oligonucleotide
ccgggcaggccagcuccau

SEQ ID NO: 1108058 - RNA, 19 nt, Artificial Sequence
  Description of Artificial Sequence: Synthetic oligonucleotide
uuuacuuggaaacaaagcg

SEQ ID NO: 1108059 - RNA, 19 nt, Artificial Sequence
  Description of Artificial Sequence: Synthetic oligonucleotide
aauaaauccauucauacgu

SEQ ID NO: 1108060 - RNA, 19 nt, Artificial Sequence
  Description of Artificial Sequence: Synthetic oligonucleotide
aacuaauauguucaaacgc

SEQ ID NO: 1108061 - RNA, 19 nt, Artificial Sequence
  Description of Artificial Sequence: Synthetic oligonucleotide
guuuauauaagccucagcc

SEQ ID NO: 1108062 - RNA, 19 nt, Artificial Sequence
  Description of Artificial Sequence: Synthetic oligonucleotide
aagacugacguucucauuc

SEQ ID NO: 1108063 - RNA, 19 nt, Artificial Sequence
  Description of Artificial Sequence: Synthetic oligonucleotide
aguggacucauucugaagc

SEQ ID NO: 1108064 - RNA, 19 nt, Artificial Sequence
  Description of Artificial Sequence: Synthetic oligonucleotide
ucgaguuucaaaaugaacu

SEQ ID NO: 1108065 - RNA, 19 nt, Artificial Sequence
  Description of Artificial Sequence: Synthetic oligonucleotide
aaaugauagaucuccuugg

SEQ ID NO: 1108066 - RNA, 19 nt, Artificial Sequence
  Description of Artificial Sequence: Synthetic oligonucleotide
aaaaugaacuauuccauca

SEQ ID NO: 1108067 - RNA, 19 nt, Artificial Sequence
  Description of Artificial Sequence: Synthetic oligonucleotide
uuauauaagccucagccug

SEQ ID NO: 1108068 - RNA, 19 nt, Artificial Sequence
  Description of Artificial Sequence: Synthetic oligonucleotide
aaggugaaaugauagaucu

SEQ ID NO: 1108069 - RNA, 19 nt, Artificial Sequence
  Description of Artificial Sequence: Synthetic oligonucleotide
ugcacuaugguuuuguaag

SEQ ID NO: 1108070 - RNA, 19 nt, Artificial Sequence
  Description of Artificial Sequence: Synthetic oligonucleotide
aacuauuccaucaaucugg

SEQ ID NO: 1108071 - RNA, 19 nt, Artificial Sequence
  Description of Artificial Sequence: Synthetic oligonucleotide
aaucaacccgcacaaaggg

SEQ ID NO: 1108072 - RNA, 19 nt, Artificial Sequence
  Description of Artificial Sequence: Synthetic oligonucleotide
gaacuaauauguucaaacg

SEQ ID NO: 1108073 - RNA, 19 nt, Artificial Sequence
  Description of Artificial Sequence: Synthetic oligonucleotide
cuuauaaucuacauuguac

SEQ ID NO: 1108074 - RNA, 19 nt, Artificial Sequence
  Description of Artificial Sequence: Synthetic oligonucleotide
uuguuauacaauuugcuug

SEQ ID NO: 1108075 - RNA, 19 nt, Artificial Sequence
  Description of Artificial Sequence: Synthetic oligonucleotide
uauacaauuugcuugcuga

SEQ ID NO: 1108076 - RNA, 19 nt, Artificial Sequence
  Description of Artificial Sequence: Synthetic oligonucleotide
uuauaaucuacauuguacu

SEQ ID NO: 1108077 - RNA, 19 nt, Artificial Sequence
  Description of Artificial Sequence: Synthetic oligonucleotide
guugguuuaauacacagac

SEQ ID NO: 1108078 - RNA, 19 nt, Artificial Sequence
  Description of Artificial Sequence: Synthetic oligonucleotide
aaaagcguagcaagcaucc

SEQ ID NO: 1108079 - RNA, 19 nt, Artificial Sequence
  Description of Artificial Sequence: Synthetic oligonucleotide
uguuauacaauuugcuugc

SEQ ID NO: 1108080 - RNA, 19 nt, Artificial Sequence
  Description of Artificial Sequence: Synthetic oligonucleotide
aaugaugcagcgugcacgg

SEQ ID NO: 1108081 - RNA, 19 nt, Artificial Sequence
  Description of Artificial Sequence: Synthetic oligonucleotide
gaaaugauagaucuccuug

SEQ ID NO: 1108082 - RNA, 19 nt, Artificial Sequence
  Description of Artificial Sequence: Synthetic oligonucleotide
aaaagaaacgagugugguc

SEQ ID NO: 1108083 - RNA, 19 nt, Artificial Sequence
  Description of Artificial Sequence: Synthetic oligonucleotide
ugaaucaacccgcacaaag

SEQ ID NO: 1108084 - RNA, 19 nt, Artificial Sequence
  Description of Artificial Sequence: Synthetic oligonucleotide
gauugaaucugcuuguccc

SEQ ID NO: 1108085 - RNA, 19 nt, Artificial Sequence
  Description of Artificial Sequence: Synthetic oligonucleotide
agugugguccuccagagcg

SEQ ID NO: 1108086 - RNA, 19 nt, Artificial Sequence
  Description of Artificial Sequence: Synthetic oligonucleotide
cuagcaaucuucaaguaag

SEQ ID NO: 1108087 - RNA, 19 nt, Artificial Sequence
  Description of Artificial Sequence: Synthetic oligonucleotide
aauccugucgcacggcagc

SEQ ID NO: 1108088 - RNA, 19 nt, Artificial Sequence
  Description of Artificial Sequence: Synthetic oligonucleotide
cuagcaucuucuuuaaacg

SEQ ID NO: 1108089 - RNA, 19 nt, Artificial Sequence
  Description of Artificial Sequence: Synthetic oligonucleotide
aaaucugucagcaguugcc

SEQ ID NO: 1108090 - RNA, 19 nt, Artificial Sequence
  Description of Artificial Sequence: Synthetic oligonucleotide
aagcgauugaaucugcuug

SEQ ID NO: 1108091 - RNA, 19 nt, Artificial Sequence
  Description of Artificial Sequence: Synthetic oligonucleotide
ugauagaucuccuuggcug

SEQ ID NO: 1108092 - RNA, 19 nt, Artificial Sequence
  Description of Artificial Sequence: Synthetic oligonucleotide
auauaugggaacuaauaug

SEQ ID NO: 1108093 - RNA, 19 nt, Artificial Sequence
  Description of Artificial Sequence: Synthetic oligonucleotide
ugaacuauuccaucaaucu

SEQ ID NO: 1108094 - RNA, 19 nt, Artificial Sequence
  Description of Artificial Sequence: Synthetic oligonucleotide
uguaacuguucauuagugg

SEQ ID NO: 1108095 - RNA, 19 nt, Artificial Sequence
  Description of Artificial Sequence: Synthetic oligonucleotide
cuaugguuuuguaagagag

SEQ ID NO: 1108096 - RNA, 19 nt, Artificial Sequence
  Description of Artificial Sequence: Synthetic oligonucleotide
uguaaucaaggacacgugc

SEQ ID NO: 1108097 - RNA, 19 nt, Artificial Sequence
  Description of Artificial Sequence: Synthetic oligonucleotide
ucugaguugguuuaauaca

SEQ ID NO: 1108098 - RNA, 19 nt, Artificial Sequence
  Description of Artificial Sequence: Synthetic oligonucleotide
acagacccagaauauaugg

SEQ ID NO: 1108099 - RNA, 19 nt, Artificial Sequence
  Description of Artificial Sequence: Synthetic oligonucleotide
uuacuuggaaacaaagcga

SEQ ID NO: 1108100 - RNA, 19 nt, Artificial Sequence
  Description of Artificial Sequence: Synthetic oligonucleotide
uuacauaacuacaaaguua

SEQ ID NO: 1108101 - RNA, 19 nt, Artificial Sequence
  Description of Artificial Sequence: Synthetic oligonucleotide
uguucaaacgcugaacucc

SEQ ID NO: 1108102 - RNA, 19 nt, Artificial Sequence
  Description of Artificial Sequence: Synthetic oligonucleotide
aagcguagcaagcauccgg

SEQ ID NO: 1108103 - RNA, 19 nt, Artificial Sequence
  Description of Artificial Sequence: Synthetic oligonucleotide
aacaaagcgauugaaucug

SEQ ID NO: 1108104 - RNA, 19 nt, Artificial Sequence
  Description of Artificial Sequence: Synthetic oligonucleotide
uuauuuggcucauugcccc

SEQ ID NO: 1108105 - RNA, 19 nt, Artificial Sequence
  Description of Artificial Sequence: Synthetic oligonucleotide
auuagaauaaccacauuug

SEQ ID NO: 1108106 - RNA, 19 nt, Artificial Sequence
  Description of Artificial Sequence: Synthetic oligonucleotide
ugacaacaaauuaugcuca

SEQ ID NO: 1108107 - RNA, 19 nt, Artificial Sequence
  Description of Artificial Sequence: Synthetic oligonucleotide
ucuaaaagagcuccaaguu

SEQ ID NO: 1108108 - RNA, 19 nt, Artificial Sequence
  Description of Artificial Sequence: Synthetic oligonucleotide
uuaucauuugagaugcuau

SEQ ID NO: 1108109 - RNA, 19 nt, Artificial Sequence
  Description of Artificial Sequence: Synthetic oligonucleotide
agaugcuaucuuuucugcc

SEQ ID NO: 1108110 - RNA, 19 nt, Artificial Sequence
  Description of Artificial Sequence: Synthetic oligonucleotide
uguaagagagcucauugua

SEQ ID NO: 1108111 - RNA, 19 nt, Artificial Sequence
  Description of Artificial Sequence: Synthetic oligonucleotide
aaauaucugaguugguuua

SEQ ID NO: 1108112 - RNA, 19 nt, Artificial Sequence
  Description of Artificial Sequence: Synthetic oligonucleotide
aggaucugacgauauuugc

SEQ ID NO: 1108113 - RNA, 19 nt, Artificial Sequence
  Description of Artificial Sequence: Synthetic oligonucleotide
cuuuaaacgggauuuccac

SEQ ID NO: 1108114 - RNA, 19 nt, Artificial Sequence
  Description of Artificial Sequence: Synthetic oligonucleotide
agaucuuuaugagagccac

SEQ ID NO: 1108115 - RNA, 19 nt, Artificial Sequence
  Description of Artificial Sequence: Synthetic oligonucleotide
ucaacccgcacaaagggca

SEQ ID NO: 1108116 - RNA, 19 nt, Artificial Sequence
  Description of Artificial Sequence: Synthetic oligonucleotide
uaugggaacuaauauguuc

SEQ ID NO: 1108117 - RNA, 19 nt, Artificial Sequence
  Description of Artificial Sequence: Synthetic oligonucleotide
cuguuaucauuugagaugc

SEQ ID NO: 1108118 - RNA, 19 nt, Artificial Sequence
  Description of Artificial Sequence: Synthetic oligonucleotide
uuaucacaaaucccaaacu

SEQ ID NO: 1108119 - RNA, 19 nt, Artificial Sequence
  Description of Artificial Sequence: Synthetic oligonucleotide
agggcaaugaugcagcgug

SEQ ID NO: 1108120 - RNA, 19 nt, Artificial Sequence
  Description of Artificial Sequence: Synthetic oligonucleotide
ucucuaaaagagcuccaag

SEQ ID NO: 1108121 - RNA, 19 nt, Artificial Sequence
  Description of Artificial Sequence: Synthetic oligonucleotide
ugccuaaagaacaaguuuu

SEQ ID NO: 1108122 - RNA, 19 nt, Artificial Sequence
  Description of Artificial Sequence: Synthetic oligonucleotide
cucgcagccgaaaagaaac

SEQ ID NO: 1108123 - RNA, 19 nt, Artificial Sequence
  Description of Artificial Sequence: Synthetic oligonucleotide
gaaucaacccgcacaaagg

SEQ ID NO: 1108124 - RNA, 19 nt, Artificial Sequence
  Description of Artificial Sequence: Synthetic oligonucleotide
ugugcuauccggcagguua

SEQ ID NO: 1108125 - RNA, 19 nt, Artificial Sequence
  Description of Artificial Sequence: Synthetic oligonucleotide
uaaauccauucauacgucc

SEQ ID NO: 1108126 - RNA, 19 nt, Artificial Sequence
  Description of Artificial Sequence: Synthetic oligonucleotide
gaacuauuccaucaaucug

SEQ ID NO: 1108127 - RNA, 19 nt, Artificial Sequence
  Description of Artificial Sequence: Synthetic oligonucleotide
aaacgcugaacuccugcuc

SEQ ID NO: 1108128 - RNA, 19 nt, Artificial Sequence
  Description of Artificial Sequence: Synthetic oligonucleotide
uuaaacgggauuuccacau

SEQ ID NO: 1108129 - RNA, 19 nt, Artificial Sequence
  Description of Artificial Sequence: Synthetic oligonucleotide
uaugcucaauaacagcucu

SEQ ID NO: 1108130 - RNA, 19 nt, Artificial Sequence
  Description of Artificial Sequence: Synthetic oligonucleotide
cugaguugguuuaauacac

SEQ ID NO: 1108131 - RNA, 19 nt, Artificial Sequence
  Description of Artificial Sequence: Synthetic oligonucleotide
uucuguuaucauuugagau

SEQ ID NO: 1108132 - RNA, 19 nt, Artificial Sequence
  Description of Artificial Sequence: Synthetic oligonucleotide
uagcauugcagcaaacucu

SEQ ID NO: 1108133 - RNA, 19 nt, Artificial Sequence
  Description of Artificial Sequence: Synthetic oligonucleotide
ugcucgguuuauauaagcc

SEQ ID NO: 1108134 - RNA, 19 nt, Artificial Sequence
  Description of Artificial Sequence: Synthetic oligonucleotide
cauaacuacaaaguuauca

SEQ ID NO: 1108135 - RNA, 19 nt, Artificial Sequence
  Description of Artificial Sequence: Synthetic oligonucleotide
ucggaugauucuaucuagg

SEQ ID NO: 1108136 - RNA, 19 nt, Artificial Sequence
  Description of Artificial Sequence: Synthetic oligonucleotide
aaacgggauuuccacauga

SEQ ID NO: 1108137 - RNA, 19 nt, Artificial Sequence
  Description of Artificial Sequence: Synthetic oligonucleotide
ucccauaugcagcaaguug

SEQ ID NO: 1108138 - RNA, 19 nt, Artificial Sequence
  Description of Artificial Sequence: Synthetic oligonucleotide
uguuucaaggccuccaguc

SEQ ID NO: 1108139 - RNA, 19 nt, Artificial Sequence
  Description of Artificial Sequence: Synthetic oligonucleotide
cauuaguggacucauucug

SEQ ID NO: 1108140 - RNA, 19 nt, Artificial Sequence
  Description of Artificial Sequence: Synthetic oligonucleotide
augcucgguuuauauaagc

SEQ ID NO: 1108141 - RNA, 19 nt, Artificial Sequence
  Description of Artificial Sequence: Synthetic oligonucleotide
auaaucuacauuguacugu

SEQ ID NO: 1108142 - RNA, 19 nt, Artificial Sequence
  Description of Artificial Sequence: Synthetic oligonucleotide
auaagccucagccuggaca

SEQ ID NO: 1108143 - RNA, 19 nt, Artificial Sequence
  Description of Artificial Sequence: Synthetic oligonucleotide
cuccaaggugaaaugauag

SEQ ID NO: 1108144 - RNA, 19 nt, Artificial Sequence
  Description of Artificial Sequence: Synthetic oligonucleotide
gagaucacaagacugacgu

SEQ ID NO: 1108145 - RNA, 19 nt, Artificial Sequence
  Description of Artificial Sequence: Synthetic oligonucleotide
ugaagugugcaaaugcuuu

SEQ ID NO: 1108146 - RNA, 19 nt, Artificial Sequence
  Description of Artificial Sequence: Synthetic oligonucleotide
cucaaaggaaaugacucgg

SEQ ID NO: 1108147 - RNA, 19 nt, Artificial Sequence
  Description of Artificial Sequence: Synthetic oligonucleotide
aagaugcuggaaccgucgg

SEQ ID NO: 1108148 - RNA, 19 nt, Artificial Sequence
  Description of Artificial Sequence: Synthetic oligonucleotide
ugacuaaucuucuccagaa

SEQ ID NO: 1108149 - RNA, 19 nt, Artificial Sequence
  Description of Artificial Sequence: Synthetic oligonucleotide
acgugcauagcauaccuug

SEQ ID NO: 1108150 - RNA, 19 nt, Artificial Sequence
  Description of Artificial Sequence: Synthetic oligonucleotide
uauuuguaacuguucauua

SEQ ID NO: 1108151 - RNA, 19 nt, Artificial Sequence
  Description of Artificial Sequence: Synthetic oligonucleotide
ucccagauaacugaauggc

SEQ ID NO: 1108152 - RNA, 19 nt, Artificial Sequence
  Description of Artificial Sequence: Synthetic oligonucleotide
aaccgucggcuguaguugc

SEQ ID NO: 1108153 - RNA, 19 nt, Artificial Sequence
  Description of Artificial Sequence: Synthetic oligonucleotide
agugaaucaacccgcacaa

SEQ ID NO: 1108154 - RNA, 19 nt, Artificial Sequence
  Description of Artificial Sequence: Synthetic oligonucleotide
uuuggugaggcauuagcau

SEQ ID NO: 1108155 - RNA, 19 nt, Artificial Sequence
  Description of Artificial Sequence: Synthetic oligonucleotide
uaucauuugagaugcuauc

SEQ ID NO: 1108156 - RNA, 19 nt, Artificial Sequence
  Description of Artificial Sequence: Synthetic oligonucleotide
cucgguuuauauaagccuc

SEQ ID NO: 1108157 - RNA, 19 nt, Artificial Sequence
  Description of Artificial Sequence: Synthetic oligonucleotide
agccuagcaaucuucaagu

SEQ ID NO: 1108158 - RNA, 19 nt, Artificial Sequence
  Description of Artificial Sequence: Synthetic oligonucleotide
cuugaagcugguucccucg

SEQ ID NO: 1108159 - RNA, 19 nt, Artificial Sequence
  Description of Artificial Sequence: Synthetic oligonucleotide
gacgauauuugcccgccag

SEQ ID NO: 1108160 - RNA, 19 nt, Artificial Sequence
  Description of Artificial Sequence: Synthetic oligonucleotide
uccagauauagccuagcaa

SEQ ID NO: 1108161 - RNA, 19 nt, Artificial Sequence
  Description of Artificial Sequence: Synthetic oligonucleotide
ugcugacaacaaauuaugc

SEQ ID NO: 1108162 - RNA, 19 nt, Artificial Sequence
  Description of Artificial Sequence: Synthetic oligonucleotide
gcaagaugcugucuuaugg

SEQ ID NO: 1108163 - RNA, 19 nt, Artificial Sequence
  Description of Artificial Sequence: Synthetic oligonucleotide
caaugaugcagcgugcacg

SEQ ID NO: 1108164 - RNA, 19 nt, Artificial Sequence
  Description of Artificial Sequence: Synthetic oligonucleotide
ugucuuauggaagcaaccu

SEQ ID NO: 1108165 - RNA, 19 nt, Artificial Sequence
  Description of Artificial Sequence: Synthetic oligonucleotide
uaaucaaggacacgugcau

SEQ ID NO: 1108166 - RNA, 19 nt, Artificial Sequence
  Description of Artificial Sequence: Synthetic oligonucleotide
uaaucuacauuguacuguu

SEQ ID NO: 1108167 - RNA, 19 nt, Artificial Sequence
  Description of Artificial Sequence: Synthetic oligonucleotide
ucugccuaaagaacaaguu

SEQ ID NO: 1108168 - RNA, 19 nt, Artificial Sequence
  Description of Artificial Sequence: Synthetic oligonucleotide
caaggugaaaugauagauc

SEQ ID NO: 1108169 - RNA, 19 nt, Artificial Sequence
  Description of Artificial Sequence: Synthetic oligonucleotide
gacucauucugaagcaggg

SEQ ID NO: 1108170 - RNA, 19 nt, Artificial Sequence
  Description of Artificial Sequence: Synthetic oligonucleotide
uggugcagugcaaagcaug

SEQ ID NO: 1108171 - RNA, 19 nt, Artificial Sequence
  Description of Artificial Sequence: Synthetic oligonucleotide
auuagcauugcagcaaacu

SEQ ID NO: 1108172 - RNA, 19 nt, Artificial Sequence
  Description of Artificial Sequence: Synthetic oligonucleotide
ucgguuuauauaagccuca

SEQ ID NO: 1108173 - RNA, 19 nt, Artificial Sequence
  Description of Artificial Sequence: Synthetic oligonucleotide
uccaaggugaaaugauaga

SEQ ID NO: 1108174 - RNA, 19 nt, Artificial Sequence
  Description of Artificial Sequence: Synthetic oligonucleotide
cucggaugauucuaucuag

SEQ ID NO: 1108175 - RNA, 19 nt, Artificial Sequence
  Description of Artificial Sequence: Synthetic oligonucleotide
uuuggaggggcagugaauc

SEQ ID NO: 1108176 - RNA, 19 nt, Artificial Sequence
  Description of Artificial Sequence: Synthetic oligonucleotide
cuucuguaaucaaggacac

SEQ ID NO: 1108177 - RNA, 19 nt, Artificial Sequence
  Description of Artificial Sequence: Synthetic oligonucleotide
gacuaaucuucuccagaag

SEQ ID NO: 1108178 - RNA, 19 nt, Artificial Sequence
  Description of Artificial Sequence: Synthetic oligonucleotide
auaaauccauucauacguc

SEQ ID NO: 1108179 - RNA, 19 nt, Artificial Sequence
  Description of Artificial Sequence: Synthetic oligonucleotide
aucugacgauauuugcccg

SEQ ID NO: 1108180 - RNA, 19 nt, Artificial Sequence
  Description of Artificial Sequence: Synthetic oligonucleotide
ucauugccccauuuauuag

SEQ ID NO: 1108181 - RNA, 19 nt, Artificial Sequence
  Description of Artificial Sequence: Synthetic oligonucleotide
gaggucgccauagaucgcg

SEQ ID NO: 1108182 - RNA, 19 nt, Artificial Sequence
  Description of Artificial Sequence: Synthetic oligonucleotide
aaaugcuuuggaggggcag

SEQ ID NO: 1108183 - RNA, 19 nt, Artificial Sequence
  Description of Artificial Sequence: Synthetic oligonucleotide
acgggauuuccacaugaag

SEQ ID NO: 1108184 - RNA, 19 nt, Artificial Sequence
  Description of Artificial Sequence: Synthetic oligonucleotide
auaaccacauuuggagagg

SEQ ID NO: 1108185 - RNA, 19 nt, Artificial Sequence
  Description of Artificial Sequence: Synthetic oligonucleotide
aucaaucuggucaauaaau

SEQ ID NO: 1108186 - RNA, 19 nt, Artificial Sequence
  Description of Artificial Sequence: Synthetic oligonucleotide
uuguuuacuuggaaacaaa

SEQ ID NO: 1108187 - RNA, 19 nt, Artificial Sequence
  Description of Artificial Sequence: Synthetic oligonucleotide
aggugauauuguuauacaa

SEQ ID NO: 1108188 - RNA, 19 nt, Artificial Sequence
  Description of Artificial Sequence: Synthetic oligonucleotide
auaccuuguaauguauuug

SEQ ID NO: 1108189 - RNA, 19 nt, Artificial Sequence
  Description of Artificial Sequence: Synthetic oligonucleotide
uacaauuugcuugcugaca

SEQ ID NO: 1108190 - RNA, 19 nt, Artificial Sequence
  Description of Artificial Sequence: Synthetic oligonucleotide
acuguucauuaguggacuc

SEQ ID NO: 1108191 - RNA, 19 nt, Artificial Sequence
  Description of Artificial Sequence: Synthetic oligonucleotide
gcagggaucucuaaaagag

SEQ ID NO: 1108192 - RNA, 19 nt, Artificial Sequence
  Description of Artificial Sequence: Synthetic oligonucleotide
ucucgaguuucaaaaugaa

SEQ ID NO: 1108193 - RNA, 19 nt, Artificial Sequence
  Description of Artificial Sequence: Synthetic oligonucleotide
caagcauccgggaacgcug

SEQ ID NO: 1108194 - RNA, 19 nt, Artificial Sequence
  Description of Artificial Sequence: Synthetic oligonucleotide
agauauagccuagcaaucu

SEQ ID NO: 1108195 - RNA, 19 nt, Artificial Sequence
  Description of Artificial Sequence: Synthetic oligonucleotide
aaugcuuuggaggggcagu

SEQ ID NO: 1108196 - RNA, 19 nt, Artificial Sequence
  Description of Artificial Sequence: Synthetic oligonucleotide
caggaucugacgauauuug

SEQ ID NO: 1108197 - RNA, 19 nt, Artificial Sequence
  Description of Artificial Sequence: Synthetic oligonucleotide
agcgauugaaucugcuugu

SEQ ID NO: 1108198 - RNA, 19 nt, Artificial Sequence
  Description of Artificial Sequence: Synthetic oligonucleotide
gucuuauggaagcaaccug

SEQ ID NO: 1108199 - RNA, 19 nt, Artificial Sequence
  Description of Artificial Sequence: Synthetic oligonucleotide
aaagcguagcaagcauccg

SEQ ID NO: 1108200 - RNA, 19 nt, Artificial Sequence
  Description of Artificial Sequence: Synthetic oligonucleotide
ucgcagccgaaaagaaacg

SEQ ID NO: 1108201 - RNA, 19 nt, Artificial Sequence
  Description of Artificial Sequence: Synthetic oligonucleotide
auaacagcucuguccaaga

SEQ ID NO: 1108202 - RNA, 19 nt, Artificial Sequence
  Description of Artificial Sequence: Synthetic oligonucleotide
ccgaggucgccauagaucg

SEQ ID NO: 1108203 - RNA, 19 nt, Artificial Sequence
  Description of Artificial Sequence: Synthetic oligonucleotide
ugcgggaccgcucgcagcc

SEQ ID NO: 1108204 - RNA, 19 nt, Artificial Sequence
  Description of Artificial Sequence: Synthetic oligonucleotide
ugcaagaugcugucuuaug

SEQ ID NO: 1108205 - RNA, 19 nt, Artificial Sequence
  Description of Artificial Sequence: Synthetic oligonucleotide
uaaacgggauuuccacaug

SEQ ID NO: 1108206 - RNA, 19 nt, Artificial Sequence
  Description of Artificial Sequence: Synthetic oligonucleotide
cagauauagccuagcaauc

SEQ ID NO: 1108207 - RNA, 19 nt, Artificial Sequence
  Description of Artificial Sequence: Synthetic oligonucleotide
gaaacgagugugguccucc

SEQ ID NO: 1108208 - RNA, 19 nt, Artificial Sequence
  Description of Artificial Sequence: Synthetic oligonucleotide
aacgagugugguccuccag

SEQ ID NO: 1108209 - RNA, 19 nt, Artificial Sequence
  Description of Artificial Sequence: Synthetic oligonucleotide
aucaacccgcacaaagggc

SEQ ID NO: 1108210 - RNA, 19 nt, Artificial Sequence
  Description of Artificial Sequence: Synthetic oligonucleotide
guuggcagggcuucucgag

SEQ ID NO: 1108211 - RNA, 19 nt, Artificial Sequence
  Description of Artificial Sequence: Synthetic oligonucleotide
acaagacugacguucucau

SEQ ID NO: 1108212 - RNA, 19 nt, Artificial Sequence
  Description of Artificial Sequence: Synthetic oligonucleotide
caaccuguuccucaaagga

SEQ ID NO: 1108213 - RNA, 19 nt, Artificial Sequence
  Description of Artificial Sequence: Synthetic oligonucleotide
agcguagcaagcauccggg

SEQ ID NO: 1108214 - RNA, 19 nt, Artificial Sequence
  Description of Artificial Sequence: Synthetic oligonucleotide
uaguggacucauucugaag

SEQ ID NO: 1108215 - RNA, 19 nt, Artificial Sequence
  Description of Artificial Sequence: Synthetic oligonucleotide
aauaucugaguugguuuaa

SEQ ID NO: 1108216 - RNA, 19 nt, Artificial Sequence
  Description of Artificial Sequence: Synthetic oligonucleotide
guaaucaaggacacgugca

SEQ ID NO: 1108217 - RNA, 19 nt, Artificial Sequence
  Description of Artificial Sequence: Synthetic oligonucleotide
uuggugaggcauuagcauu

SEQ ID NO: 1108218 - RNA, 19 nt, Artificial Sequence
  Description of Artificial Sequence: Synthetic oligonucleotide
acaaagcgauugaaucugc

SEQ ID NO: 1108219 - RNA, 19 nt, Artificial Sequence
  Description of Artificial Sequence: Synthetic oligonucleotide
uucuaguuguucuguccca

SEQ ID NO: 1108220 - RNA, 19 nt, Artificial Sequence
  Description of Artificial Sequence: Synthetic oligonucleotide
acgagugugguccuccaga

SEQ ID NO: 1108221 - RNA, 19 nt, Artificial Sequence
  Description of Artificial Sequence: Synthetic oligonucleotide
cucuaaaagagcuccaagu

SEQ ID NO: 1108222 - RNA, 19 nt, Artificial Sequence
  Description of Artificial Sequence: Synthetic oligonucleotide
gaugcucgguuuauauaag

SEQ ID NO: 1108223 - RNA, 19 nt, Artificial Sequence
  Description of Artificial Sequence: Synthetic oligonucleotide
uaucugaguugguuuaaua

SEQ ID NO: 1108224 - RNA, 19 nt, Artificial Sequence
  Description of Artificial Sequence: Synthetic oligonucleotide
cuguaaucaaggacacgug

SEQ ID NO: 1108225 - RNA, 19 nt, Artificial Sequence
  Description of Artificial Sequence: Synthetic oligonucleotide
aggcauuagcauugcagca

SEQ ID NO: 1108226 - RNA, 19 nt, Artificial Sequence
  Description of Artificial Sequence: Synthetic oligonucleotide
gaaccgucggcuguaguug

SEQ ID NO: 1108227 - RNA, 19 nt, Artificial Sequence
  Description of Artificial Sequence: Synthetic oligonucleotide
cacagacccagaauauaug

SEQ ID NO: 1108228 - RNA, 19 nt, Artificial Sequence
  Description of Artificial Sequence: Synthetic oligonucleotide
uucuguaaucaaggacacg

SEQ ID NO: 1108229 - RNA, 19 nt, Artificial Sequence
  Description of Artificial Sequence: Synthetic oligonucleotide
guaagucuccagcuuauaa

SEQ ID NO: 1108230 - RNA, 19 nt, Artificial Sequence
  Description of Artificial Sequence: Synthetic oligonucleotide
ccucaaaggaaaugacucg

SEQ ID NO: 1108231 - RNA, 19 nt, Artificial Sequence
  Description of Artificial Sequence: Synthetic oligonucleotide
uuagggaggugugugcaga

SEQ ID NO: 1108232 - RNA, 19 nt, Artificial Sequence
  Description of Artificial Sequence: Synthetic oligonucleotide
guugccgggagaucacaag

SEQ ID NO: 1108233 - RNA, 19 nt, Artificial Sequence
  Description of Artificial Sequence: Synthetic oligonucleotide
agccgaaaagaaacgagug

SEQ ID NO: 1108234 - RNA, 19 nt, Artificial Sequence
  Description of Artificial Sequence: Synthetic oligonucleotide
uggaaacaaagcgauugaa

SEQ ID NO: 1108235 - RNA, 19 nt, Artificial Sequence
  Description of Artificial Sequence: Synthetic oligonucleotide
gucugacuaaucuucucca

SEQ ID NO: 1108236 - RNA, 19 nt, Artificial Sequence
  Description of Artificial Sequence: Synthetic oligonucleotide
aaacgagugugguccucca

SEQ ID NO: 1108237 - RNA, 19 nt, Artificial Sequence
  Description of Artificial Sequence: Synthetic oligonucleotide
cauugccccauuuauuaga

SEQ ID NO: 1108238 - RNA, 19 nt, Artificial Sequence
  Description of Artificial Sequence: Synthetic oligonucleotide
augcacuaugguuuuguaa

SEQ ID NO: 1108239 - RNA, 19 nt, Artificial Sequence
  Description of Artificial Sequence: Synthetic oligonucleotide
agugugcaaaugcuuugga

SEQ ID NO: 1108240 - RNA, 19 nt, Artificial Sequence
  Description of Artificial Sequence: Synthetic oligonucleotide
uucuaucuagguacauuuu

SEQ ID NO: 1108241 - RNA, 19 nt, Artificial Sequence
  Description of Artificial Sequence: Synthetic oligonucleotide
agacugacguucucauuca

SEQ ID NO: 1108242 - RNA, 19 nt, Artificial Sequence
  Description of Artificial Sequence: Synthetic oligonucleotide
gaacccgaggucgccauag

SEQ ID NO: 1108243 - RNA, 19 nt, Artificial Sequence
  Description of Artificial Sequence: Synthetic oligonucleotide
ucagcaguugccgggagau

SEQ ID NO: 1108244 - RNA, 19 nt, Artificial Sequence
  Description of Artificial Sequence: Synthetic oligonucleotide
gguuuauauaagccucagc

SEQ ID NO: 1108245 - RNA, 19 nt, Artificial Sequence
  Description of Artificial Sequence: Synthetic oligonucleotide
aaccuguuccucaaaggaa

SEQ ID NO: 1108246 - RNA, 19 nt, Artificial Sequence
  Description of Artificial Sequence: Synthetic oligonucleotide
agggaugcucgguuuauau

SEQ ID NO: 1108247 - RNA, 19 nt, Artificial Sequence
  Description of Artificial Sequence: Synthetic oligonucleotide
gugcuguccacuccggggc

SEQ ID NO: 1108248 - RNA, 19 nt, Artificial Sequence
  Description of Artificial Sequence: Synthetic oligonucleotide
cuugucccauguuggcagg

SEQ ID NO: 1108249 - RNA, 19 nt, Artificial Sequence
  Description of Artificial Sequence: Synthetic oligonucleotide
cugacuaaucuucuccaga

SEQ ID NO: 1108250 - RNA, 19 nt, Artificial Sequence
  Description of Artificial Sequence: Synthetic oligonucleotide
cagaggaauccccaccaac

SEQ ID NO: 1108251 - RNA, 19 nt, Artificial Sequence
  Description of Artificial Sequence: Synthetic oligonucleotide
gcuucuaguuguucugucc

SEQ ID NO: 1108252 - RNA, 19 nt, Artificial Sequence
  Description of Artificial Sequence: Synthetic oligonucleotide
acgauauuugcccgccaga

SEQ ID NO: 1108253 - RNA, 19 nt, Artificial Sequence
  Description of Artificial Sequence: Synthetic oligonucleotide
ugguuuuguaagagagcuc

SEQ ID NO: 1108254 - RNA, 19 nt, Artificial Sequence
  Description of Artificial Sequence: Synthetic oligonucleotide
aaucaaggacacgugcaua

SEQ ID NO: 1108255 - RNA, 19 nt, Artificial Sequence
  Description of Artificial Sequence: Synthetic oligonucleotide
gccaaauccugucgcacgg

SEQ ID NO: 1108256 - RNA, 19 nt, Artificial Sequence
  Description of Artificial Sequence: Synthetic oligonucleotide
ggcuucucgaguuucaaaa

SEQ ID NO: 1108257 - RNA, 19 nt, Artificial Sequence
  Description of Artificial Sequence: Synthetic oligonucleotide
accgcucgcagccgaaaag

SEQ ID NO: 1108258 - RNA, 19 nt, Artificial Sequence
  Description of Artificial Sequence: Synthetic oligonucleotide
guuaucauuugagaugcua

SEQ ID NO: 1108259 - RNA, 19 nt, Artificial Sequence
  Description of Artificial Sequence: Synthetic oligonucleotide
uucaaacgcugaacuccug

SEQ ID NO: 1108260 - RNA, 19 nt, Artificial Sequence
  Description of Artificial Sequence: Synthetic oligonucleotide
uccgggaacgcugcugucc

SEQ ID NO: 1108261 - RNA, 19 nt, Artificial Sequence
  Description of Artificial Sequence: Synthetic oligonucleotide
cuauccggcagguuaggga

SEQ ID NO: 1108262 - RNA, 19 nt, Artificial Sequence
  Description of Artificial Sequence: Synthetic oligonucleotide
guccaagaugcuggaaccg

SEQ ID NO: 1108263 - RNA, 19 nt, Artificial Sequence
  Description of Artificial Sequence: Synthetic oligonucleotide
aaguaagucuccagcuuau

SEQ ID NO: 1108264 - RNA, 19 nt, Artificial Sequence
  Description of Artificial Sequence: Synthetic oligonucleotide
ugggccaaauccugucgca

SEQ ID NO: 1108265 - RNA, 19 nt, Artificial Sequence
  Description of Artificial Sequence: Synthetic oligonucleotide
gaugcaagaugcugucuua

SEQ ID NO: 1108266 - RNA, 19 nt, Artificial Sequence
  Description of Artificial Sequence: Synthetic oligonucleotide
ggagaucacaagacugacg

SEQ ID NO: 1108267 - RNA, 19 nt, Artificial Sequence
  Description of Artificial Sequence: Synthetic oligonucleotide
cauucauacguccuucugu

SEQ ID NO: 1108268 - RNA, 19 nt, Artificial Sequence
  Description of Artificial Sequence: Synthetic oligonucleotide
aggugaaaugauagaucuc

SEQ ID NO: 1108269 - RNA, 19 nt, Artificial Sequence
  Description of Artificial Sequence: Synthetic oligonucleotide
agagccacucaaauucaug

SEQ ID NO: 1108270 - RNA, 19 nt, Artificial Sequence
  Description of Artificial Sequence: Synthetic oligonucleotide
gcaccguucauccuuaaaa

SEQ ID NO: 1108271 - RNA, 19 nt, Artificial Sequence
  Description of Artificial Sequence: Synthetic oligonucleotide
aagggcaaugaugcagcgu

SEQ ID NO: 1108272 - RNA, 19 nt, Artificial Sequence
  Description of Artificial Sequence: Synthetic oligonucleotide
cagaauauaugggaacuaa

SEQ ID NO: 1108273 - RNA, 19 nt, Artificial Sequence
  Description of Artificial Sequence: Synthetic oligonucleotide
agaagguuguuuacuugga

SEQ ID NO: 1108274 - RNA, 19 nt, Artificial Sequence
  Description of Artificial Sequence: Synthetic oligonucleotide
uauaagccucagccuggac

SEQ ID NO: 1108275 - RNA, 19 nt, Artificial Sequence
  Description of Artificial Sequence: Synthetic oligonucleotide
ugacgauauuugcccgcca

SEQ ID NO: 1108276 - RNA, 19 nt, Artificial Sequence
  Description of Artificial Sequence: Synthetic oligonucleotide
gagugugguccuccagagc

SEQ ID NO: 1108277 - RNA, 19 nt, Artificial Sequence
  Description of Artificial Sequence: Synthetic oligonucleotide
acauaacuacaaaguuauc

SEQ ID NO: 1108278 - RNA, 19 nt, Artificial Sequence
  Description of Artificial Sequence: Synthetic oligonucleotide
augauucuaucuagguaca

SEQ ID NO: 1108279 - RNA, 19 nt, Artificial Sequence
  Description of Artificial Sequence: Synthetic oligonucleotide
uucccucggaugauucuau

SEQ ID NO: 1108280 - RNA, 19 nt, Artificial Sequence
  Description of Artificial Sequence: Synthetic oligonucleotide
ugguucccucggaugauuc

SEQ ID NO: 1108281 - RNA, 19 nt, Artificial Sequence
  Description of Artificial Sequence: Synthetic oligonucleotide
aggacacgugcauagcaua

SEQ ID NO: 1108282 - RNA, 19 nt, Artificial Sequence
  Description of Artificial Sequence: Synthetic oligonucleotide
gacguucucauucaccauu

SEQ ID NO: 1108283 - RNA, 19 nt, Artificial Sequence
  Description of Artificial Sequence: Synthetic oligonucleotide
ccagauauagccuagcaau

SEQ ID NO: 1108284 - RNA, 19 nt, Artificial Sequence
  Description of Artificial Sequence: Synthetic oligonucleotide
guauuuguaacuguucauu

SEQ ID NO: 1108285 - RNA, 19 nt, Artificial Sequence
  Description of Artificial Sequence: Synthetic oligonucleotide
auugccccauuuauuagaa

SEQ ID NO: 1108286 - RNA, 19 nt, Artificial Sequence
  Description of Artificial Sequence: Synthetic oligonucleotide
ugcugucuuauggaagcaa

SEQ ID NO: 1108287 - RNA, 19 nt, Artificial Sequence
  Description of Artificial Sequence: Synthetic oligonucleotide
ccuuguaauguauuuguaa

SEQ ID NO: 1108288 - RNA, 19 nt, Artificial Sequence
  Description of Artificial Sequence: Synthetic oligonucleotide
gcagccgaaaagaaacgag

SEQ ID NO: 1108289 - RNA, 19 nt, Artificial Sequence
  Description of Artificial Sequence: Synthetic oligonucleotide
gcacaaagcacuuaaguuu

SEQ ID NO: 1108290 - RNA, 19 nt, Artificial Sequence
  Description of Artificial Sequence: Synthetic oligonucleotide
auauaagccucagccugga

SEQ ID NO: 1108291 - RNA, 19 nt, Artificial Sequence
  Description of Artificial Sequence: Synthetic oligonucleotide
gaggugugugcagaaaucu

SEQ ID NO: 1108292 - RNA, 19 nt, Artificial Sequence
  Description of Artificial Sequence: Synthetic oligonucleotide
ucccauguuggcagggcuu

SEQ ID NO: 1108293 - RNA, 19 nt, Artificial Sequence
  Description of Artificial Sequence: Synthetic oligonucleotide
aacgggauuuccacaugaa

SEQ ID NO: 1108294 - RNA, 19 nt, Artificial Sequence
  Description of Artificial Sequence: Synthetic oligonucleotide
cuccagauauagccuagca

SEQ ID NO: 1108295 - RNA, 19 nt, Artificial Sequence
  Description of Artificial Sequence: Synthetic oligonucleotide
gaacgcugcuguccugcug

SEQ ID NO: 1108296 - RNA, 19 nt, Artificial Sequence
  Description of Artificial Sequence: Synthetic oligonucleotide
ugauucuaucuagguacau

SEQ ID NO: 1108297 - RNA, 19 nt, Artificial Sequence
  Description of Artificial Sequence: Synthetic oligonucleotide
uugcccgccagaucuuuau

SEQ ID NO: 1108298 - RNA, 19 nt, Artificial Sequence
  Description of Artificial Sequence: Synthetic oligonucleotide
cauaugcagcaaguugcug

SEQ ID NO: 1108299 - RNA, 19 nt, Artificial Sequence
  Description of Artificial Sequence: Synthetic oligonucleotide
ccgggagaucacaagacug

SEQ ID NO: 1108300 - RNA, 19 nt, Artificial Sequence
  Description of Artificial Sequence: Synthetic oligonucleotide
gaguuucaaaaugaacuau

SEQ ID NO: 1108301 - RNA, 19 nt, Artificial Sequence
  Description of Artificial Sequence: Synthetic oligonucleotide
cagccgaaaagaaacgagu

SEQ ID NO: 1108302 - RNA, 19 nt, Artificial Sequence
  Description of Artificial Sequence: Synthetic oligonucleotide
cuauuccaucaaucugguc

SEQ ID NO: 1108303 - RNA, 19 nt, Artificial Sequence
  Description of Artificial Sequence: Synthetic oligonucleotide
augcucaauaacagcucug

SEQ ID NO: 1108304 - RNA, 19 nt, Artificial Sequence
  Description of Artificial Sequence: Synthetic oligonucleotide
cuguucauuaguggacuca

SEQ ID NO: 1108305 - RNA, 19 nt, Artificial Sequence
  Description of Artificial Sequence: Synthetic oligonucleotide
uuugcccgccagaucuuua

SEQ ID NO: 1108306 - RNA, 19 nt, Artificial Sequence
  Description of Artificial Sequence: Synthetic oligonucleotide
ugucgcacggcagccgcca

SEQ ID NO: 1108307 - RNA, 19 nt, Artificial Sequence
  Description of Artificial Sequence: Synthetic oligonucleotide
cuaagauggugcagugcaa

SEQ ID NO: 1108308 - RNA, 19 nt, Artificial Sequence
  Description of Artificial Sequence: Synthetic oligonucleotide
agcauaccuuguaauguau

SEQ ID NO: 1108309 - RNA, 19 nt, Artificial Sequence
  Description of Artificial Sequence: Synthetic oligonucleotide
gaagcugguucccucggau

SEQ ID NO: 1108310 - RNA, 19 nt, Artificial Sequence
  Description of Artificial Sequence: Synthetic oligonucleotide
gcucgguuuauauaagccu

SEQ ID NO: 1108311 - RNA, 19 nt, Artificial Sequence
  Description of Artificial Sequence: Synthetic oligonucleotide
caaacgcugaacuccugcu

SEQ ID NO: 1108312 - RNA, 19 nt, Artificial Sequence
  Description of Artificial Sequence: Synthetic oligonucleotide
cccgccagaucuuuaugag

SEQ ID NO: 1108313 - RNA, 19 nt, Artificial Sequence
  Description of Artificial Sequence: Synthetic oligonucleotide
aaucuacauuguacuguuu

SEQ ID NO: 1108314 - RNA, 19 nt, Artificial Sequence
  Description of Artificial Sequence: Synthetic oligonucleotide
uggaaccgucggcuguagu

SEQ ID NO: 1108315 - RNA, 19 nt, Artificial Sequence
  Description of Artificial Sequence: Synthetic oligonucleotide
auaugggaacuaauauguu

SEQ ID NO: 1108316 - RNA, 19 nt, Artificial Sequence
  Description of Artificial Sequence: Synthetic oligonucleotide
cgauugaaucugcuugucc

SEQ ID NO: 1108317 - RNA, 19 nt, Artificial Sequence
  Description of Artificial Sequence: Synthetic oligonucleotide
acccgcacaaagggcaaug

SEQ ID NO: 1108318 - RNA, 19 nt, Artificial Sequence
  Description of Artificial Sequence: Synthetic oligonucleotide
ucccucggaugauucuauc

SEQ ID NO: 1108319 - RNA, 19 nt, Artificial Sequence
  Description of Artificial Sequence: Synthetic oligonucleotide
ggcauuagcauugcagcaa

SEQ ID NO: 1108320 - RNA, 19 nt, Artificial Sequence
  Description of Artificial Sequence: Synthetic oligonucleotide
gccuaaagaacaaguuuuc

SEQ ID NO: 1108321 - RNA, 19 nt, Artificial Sequence
  Description of Artificial Sequence: Synthetic oligonucleotide
caaaugcuuuggaggggca

SEQ ID NO: 1108322 - RNA, 19 nt, Artificial Sequence
  Description of Artificial Sequence: Synthetic oligonucleotide
uccggggccgucugacuaa

SEQ ID NO: 1108323 - RNA, 19 nt, Artificial Sequence
  Description of Artificial Sequence: Synthetic oligonucleotide
cccgaggucgccauagauc

SEQ ID NO: 1108324 - RNA, 19 nt, Artificial Sequence
  Description of Artificial Sequence: Synthetic oligonucleotide
ccuuugggcagcuucaaua

SEQ ID NO: 1108325 - RNA, 19 nt, Artificial Sequence
  Description of Artificial Sequence: Synthetic oligonucleotide
ggaaacaaagcgauugaau

SEQ ID NO: 1108326 - RNA, 19 nt, Artificial Sequence
  Description of Artificial Sequence: Synthetic oligonucleotide
ggccgucugacuaaucuuc

SEQ ID NO: 1108327 - RNA, 19 nt, Artificial Sequence
  Description of Artificial Sequence: Synthetic oligonucleotide
auuguaccuuugggcagcu

SEQ ID NO: 1108328 - RNA, 19 nt, Artificial Sequence
  Description of Artificial Sequence: Synthetic oligonucleotide
gcucaauaacagcucuguc

SEQ ID NO: 1108329 - RNA, 19 nt, Artificial Sequence
  Description of Artificial Sequence: Synthetic oligonucleotide
cugcgggaccgcucgcagc

SEQ ID NO: 1108330 - RNA, 19 nt, Artificial Sequence
  Description of Artificial Sequence: Synthetic oligonucleotide
gcuauccggcagguuaggg

SEQ ID NO: 1108331 - RNA, 19 nt, Artificial Sequence
  Description of Artificial Sequence: Synthetic oligonucleotide
auccggcagguuagggagg

SEQ ID NO: 1108332 - RNA, 19 nt, Artificial Sequence
  Description of Artificial Sequence: Synthetic oligonucleotide
cauccgggaacgcugcugu

SEQ ID NO: 1108333 - RNA, 19 nt, Artificial Sequence
  Description of Artificial Sequence: Synthetic oligonucleotide
aacccgcacaaagggcaau

SEQ ID NO: 1108334 - RNA, 19 nt, Artificial Sequence
  Description of Artificial Sequence: Synthetic oligonucleotide
gccccauuuauuagaauaa

SEQ ID NO: 1108335 - RNA, 19 nt, Artificial Sequence
  Description of Artificial Sequence: Synthetic oligonucleotide
aguugccgggagaucacaa

SEQ ID NO: 1108336 - RNA, 19 nt, Artificial Sequence
  Description of Artificial Sequence: Synthetic oligonucleotide
agcgugcacggggcucugc

SEQ ID NO: 1108337 - RNA, 19 nt, Artificial Sequence
  Description of Artificial Sequence: Synthetic oligonucleotide
cacuccggggccgucugac

SEQ ID NO: 1108338 - RNA, 19 nt, Artificial Sequence
  Description of Artificial Sequence: Synthetic oligonucleotide
cagagcgcaggcagaggga

SEQ ID NO: 1108339 - RNA, 19 nt, Artificial Sequence
  Description of Artificial Sequence: Synthetic oligonucleotide
gggaucucuaaaagagcuc

SEQ ID NO: 1108340 - RNA, 19 nt, Artificial Sequence
  Description of Artificial Sequence: Synthetic oligonucleotide
ggggccgucugacuaaucu

SEQ ID NO: 1108341 - RNA, 19 nt, Artificial Sequence
  Description of Artificial Sequence: Synthetic oligonucleotide
ccucggaugauucuaucua

SEQ ID NO: 1108342 - RNA, 19 nt, Artificial Sequence
  Description of Artificial Sequence: Synthetic oligonucleotide
gcugcgggaccgcucgcag

SEQ ID NO: 1108343 - RNA, 19 nt, Artificial Sequence
  Description of Artificial Sequence: Synthetic oligonucleotide
ccaccaacacuugggcugc

SEQ ID NO: 1108344 - RNA, 19 nt, Artificial Sequence
  Description of Artificial Sequence: Synthetic oligonucleotide
gacucggggcuggaccuuc

SEQ ID NO: 1108345 - RNA, 19 nt, Artificial Sequence
  Description of Artificial Sequence: Synthetic oligonucleotide
cuggaaccgucggcuguag

SEQ ID NO: 1108346 - RNA, 19 nt, Artificial Sequence
  Description of Artificial Sequence: Synthetic oligonucleotide
caacccgcacaaagggcaa

SEQ ID NO: 1108347 - RNA, 19 nt, Artificial Sequence
  Description of Artificial Sequence: Synthetic oligonucleotide
ccuccagauauagccuagc

SEQ ID NO: 1108348 - RNA, 19 nt, Artificial Sequence
  Description of Artificial Sequence: Synthetic oligonucleotide
gggccaaauccugucgcac

SEQ ID NO: 1108349 - RNA, 19 nt, Artificial Sequence
  Description of Artificial Sequence: Synthetic oligonucleotide
ggucgccauagaucgcguc

SEQ ID NO: 1108350 - RNA, 19 nt, Artificial Sequence
  Description of Artificial Sequence: Synthetic oligonucleotide
ccaaauccugucgcacggc

SEQ ID NO: 1108351 - RNA, 19 nt, Artificial Sequence
  Description of Artificial Sequence: Synthetic oligonucleotide
ccgucugacuaaucuucuc

SEQ ID NO: 1108352 - RNA, 19 nt, Artificial Sequence
  Description of Artificial Sequence: Synthetic oligonucleotide
cgguuuauauaagccucag

SEQ ID NO: 1108353 - RNA, 19 nt, Artificial Sequence
  Description of Artificial Sequence: Synthetic oligonucleotide
gcuggcaccguucauccuu

SEQ ID NO: 1108354 - RNA, 19 nt, Artificial Sequence
  Description of Artificial Sequence: Synthetic oligonucleotide
uggcaccguucauccuuaa

SEQ ID NO: 1108355 - RNA, 19 nt, Artificial Sequence
  Description of Artificial Sequence: Synthetic oligonucleotide
gugaaucaacccgcacaaa

SEQ ID NO: 1108356 - RNA, 19 nt, Artificial Sequence
  Description of Artificial Sequence: Synthetic oligonucleotide
gcgauugaaucugcuuguc

SEQ ID NO: 1108357 - RNA, 19 nt, Artificial Sequence
  Description of Artificial Sequence: Synthetic oligonucleotide
cccagaauauaugggaacu

SEQ ID NO: 1108358 - RNA, 19 nt, Artificial Sequence
  Description of Artificial Sequence: Synthetic oligonucleotide
ggcaccguucauccuuaaa

SEQ ID NO: 1108359 - RNA, 19 nt, Artificial Sequence
  Description of Artificial Sequence: Synthetic oligonucleotide
ccgccagaucuuuaugaga

SEQ ID NO: 1108360 - RNA, 19 nt, Artificial Sequence
  Description of Artificial Sequence: Synthetic oligonucleotide
gccgggagaucacaagacu

SEQ ID NO: 1108361 - RNA, 19 nt, Artificial Sequence
  Description of Artificial Sequence: Synthetic oligonucleotide
caguugccgggagaucaca

SEQ ID NO: 1108362 - RNA, 19 nt, Artificial Sequence
  Description of Artificial Sequence: Synthetic oligonucleotide
cugucccagauaacugaau

SEQ ID NO: 1108363 - RNA, 19 nt, Artificial Sequence
  Description of Artificial Sequence: Synthetic oligonucleotide
gcaguugccgggagaucac

SEQ ID NO: 1108364 - RNA, 19 nt, Artificial Sequence
  Description of Artificial Sequence: Synthetic oligonucleotide
accgucggcuguaguugcu

SEQ ID NO: 1108365 - RNA, 19 nt, Artificial Sequence
  Description of Artificial Sequence: Synthetic oligonucleotide
gcucgcagccgaaaagaaa

SEQ ID NO: 1108366 - RNA, 19 nt, Artificial Sequence
  Description of Artificial Sequence: Synthetic oligonucleotide
cccucggaugauucuaucu

SEQ ID NO: 1108367 - RNA, 19 nt, Artificial Sequence
  Description of Artificial Sequence: Synthetic oligonucleotide
cacgugcauagcauaccuu

SEQ ID NO: 1108368 - RNA, 19 nt, Artificial Sequence
  Description of Artificial Sequence: Synthetic oligonucleotide
gcaaguugcuggcaccguu

SEQ ID NO: 1108369 - RNA, 19 nt, Artificial Sequence
  Description of Artificial Sequence: Synthetic oligonucleotide
ccgcucgcagccgaaaaga

SEQ ID NO: 1108370 - RNA, 19 nt, Artificial Sequence
  Description of Artificial Sequence: Synthetic oligonucleotide
cagggaugcucgguuuaua

SEQ ID NO: 1108371 - RNA, 19 nt, Artificial Sequence
  Description of Artificial Sequence: Synthetic oligonucleotide
cgaggucgccauagaucgc

SEQ ID NO: 1108372 - RNA, 19 nt, Artificial Sequence
  Description of Artificial Sequence: Synthetic oligonucleotide
gcuggaaccgucggcugua

SEQ ID NO: 1108373 - RNA, 19 nt, Artificial Sequence
  Description of Artificial Sequence: Synthetic oligonucleotide
cgugcauagcauaccuugu

SEQ ID NO: 1108374 - RNA, 19 nt, Artificial Sequence
  Description of Artificial Sequence: Synthetic oligonucleotide
gggccgucugacuaaucuu

SEQ ID NO: 1108375 - RNA, 19 nt, Artificial Sequence
  Description of Artificial Sequence: Synthetic oligonucleotide
ccagaggaauccccaccaa

SEQ ID NO: 1108376 - RNA, 19 nt, Artificial Sequence
  Description of Artificial Sequence: Synthetic oligonucleotide
gccgucugacuaaucuucu

SEQ ID NO: 1108377 - RNA, 19 nt, Artificial Sequence
  Description of Artificial Sequence: Synthetic oligonucleotide
ggaacccgaggucgccaua

SEQ ID NO: 1108378 - RNA, 19 nt, Artificial Sequence
  Description of Artificial Sequence: Synthetic oligonucleotide
cccgcacaaagggcaauga

SEQ ID NO: 1108379 - RNA, 19 nt, Artificial Sequence
  Description of Artificial Sequence: Synthetic oligonucleotide
guccacuccggggccgucu

SEQ ID NO: 1108380 - RNA, 19 nt, Artificial Sequence
  Description of Artificial Sequence: Synthetic oligonucleotide
cgauauuugcccgccagau

SEQ ID NO: 1108381 - RNA, 19 nt, Artificial Sequence
  Description of Artificial Sequence: Synthetic oligonucleotide
gcacggggcucugccagga

SEQ ID NO: 1108382 - RNA, 19 nt, Artificial Sequence
  Description of Artificial Sequence: Synthetic oligonucleotide
cagcgugcacggggcucug

SEQ ID NO: 1108383 - RNA, 19 nt, Artificial Sequence
  Description of Artificial Sequence: Synthetic oligonucleotide
ccgggaacgcugcuguccu

SEQ ID NO: 1108384 - RNA, 19 nt, Artificial Sequence
  Description of Artificial Sequence: Synthetic oligonucleotide
cgcucgcagccgaaaagaa

SEQ ID NO: 1108385 - RNA, 19 nt, Artificial Sequence
  Description of Artificial Sequence: Synthetic oligonucleotide
caccaacacuugggcugca

SEQ ID NO: 1108386 - RNA, 19 nt, Artificial Sequence
  Description of Artificial Sequence: Synthetic oligonucleotide
gucgcacggcagccgccau

SEQ ID NO: 1108387 - RNA, 19 nt, Artificial Sequence
  Description of Artificial Sequence: Synthetic oligonucleotide
cgggaacgcugcuguccug

SEQ ID NO: 1108388 - RNA, 19 nt, Artificial Sequence
  Description of Artificial Sequence: Synthetic oligonucleotide
gggaccgcucgcagccgaa

SEQ ID NO: 1108389 - RNA, 19 nt, Artificial Sequence
  Description of Artificial Sequence: Synthetic oligonucleotide
ccggcagguuagggaggug

SEQ ID NO: 1108390 - RNA, 19 nt, Artificial Sequence
  Description of Artificial Sequence: Synthetic oligonucleotide
ccacuccggggccgucuga

SEQ ID NO: 1108391 - RNA, 19 nt, Artificial Sequence
  Description of Artificial Sequence: Synthetic oligonucleotide
cggggccgucugacuaauc

SEQ ID NO: 1108392 - RNA, 19 nt, Artificial Sequence
  Description of Artificial Sequence: Synthetic oligonucleotide
ccgucggcuguaguugcuu

SEQ ID NO: 1108393 - RNA, 19 nt, Artificial Sequence
  Description of Artificial Sequence: Synthetic oligonucleotide
ccggggccgucugacuaau

SEQ ID NO: 1108394 - RNA, 19 nt, Artificial Sequence
  Description of Artificial Sequence: Synthetic oligonucleotide
gaaaucacagcccagaggg

SEQ ID NO: 1108395 - RNA, 19 nt, Artificial Sequence
  Description of Artificial Sequence: Synthetic oligonucleotide
uguugcauaagcuucacgg

SEQ ID NO: 1108396 - RNA, 19 nt, Artificial Sequence
  Description of Artificial Sequence: Synthetic oligonucleotide
gaugacuugauucaugagg

SEQ ID NO: 1108397 - RNA, 19 nt, Artificial Sequence
  Description of Artificial Sequence: Synthetic oligonucleotide
accuacagaaaucacagcc

SEQ ID NO: 1108398 - RNA, 19 nt, Artificial Sequence
  Description of Artificial Sequence: Synthetic oligonucleotide
aucacgaggucauagagcc

SEQ ID NO: 1108399 - RNA, 19 nt, Artificial Sequence
  Description of Artificial Sequence: Synthetic oligonucleotide
aaaacggggacacucgccc

SEQ ID NO: 1108400 - RNA, 19 nt, Artificial Sequence
  Description of Artificial Sequence: Synthetic oligonucleotide
aagaaucugggacacuucc

SEQ ID NO: 1108401 - RNA, 19 nt, Artificial Sequence
  Description of Artificial Sequence: Synthetic oligonucleotide
aagaugaagagcuccaguc

SEQ ID NO: 1108402 - RNA, 19 nt, Artificial Sequence
  Description of Artificial Sequence: Synthetic oligonucleotide
ucucauggcaacaagauga

SEQ ID NO: 1108403 - RNA, 19 nt, Artificial Sequence
  Description of Artificial Sequence: Synthetic oligonucleotide
uauacauagggcuccaagg

SEQ ID NO: 1108404 - RNA, 19 nt, Artificial Sequence
  Description of Artificial Sequence: Synthetic oligonucleotide
uuuacugcagccccggacg

SEQ ID NO: 1108405 - RNA, 19 nt, Artificial Sequence
  Description of Artificial Sequence: Synthetic oligonucleotide
cuugcuauagcugaguacg

SEQ ID NO: 1108406 - RNA, 19 nt, Artificial Sequence
  Description of Artificial Sequence: Synthetic oligonucleotide
augccuaagaaucugggac

SEQ ID NO: 1108407 - RNA, 19 nt, Artificial Sequence
  Description of Artificial Sequence: Synthetic oligonucleotide
gauaugucauacuugaaca

SEQ ID NO: 1108408 - RNA, 19 nt, Artificial Sequence
  Description of Artificial Sequence: Synthetic oligonucleotide
ucaaccuacagaaaucaca

SEQ ID NO: 1108409 - RNA, 19 nt, Artificial Sequence
  Description of Artificial Sequence: Synthetic oligonucleotide
aguggcaugaugaaguccc

SEQ ID NO: 1108410 - RNA, 19 nt, Artificial Sequence
  Description of Artificial Sequence: Synthetic oligonucleotide
aaguaccacuuccaggccc

SEQ ID NO: 1108411 - RNA, 19 nt, Artificial Sequence
  Description of Artificial Sequence: Synthetic oligonucleotide
uuaaugaccaagguccugg

SEQ ID NO: 1108412 - RNA, 19 nt, Artificial Sequence
  Description of Artificial Sequence: Synthetic oligonucleotide
uguccaaccaacugcaugc

SEQ ID NO: 1108413 - RNA, 19 nt, Artificial Sequence
  Description of Artificial Sequence: Synthetic oligonucleotide
uccauaaacucaaacgcug

SEQ ID NO: 1108414 - RNA, 19 nt, Artificial Sequence
  Description of Artificial Sequence: Synthetic oligonucleotide
ugaggucucaaccaggaca

SEQ ID NO: 1108415 - RNA, 19 nt, Artificial Sequence
  Description of Artificial Sequence: Synthetic oligonucleotide
ucugccgucacauucaggu

SEQ ID NO: 1108416 - RNA, 19 nt, Artificial Sequence
  Description of Artificial Sequence: Synthetic oligonucleotide
aacucaaacgcugacagga

SEQ ID NO: 1108417 - RNA, 19 nt, Artificial Sequence
  Description of Artificial Sequence: Synthetic oligonucleotide
auaugucauacuugaacac

SEQ ID NO: 1108418 - RNA, 19 nt, Artificial Sequence
  Description of Artificial Sequence: Synthetic oligonucleotide
cucgaagcgagccauaccg

SEQ ID NO: 1108419 - RNA, 19 nt, Artificial Sequence
  Description of Artificial Sequence: Synthetic oligonucleotide
accgaggaaagccacauuc

SEQ ID NO: 1108420 - RNA, 19 nt, Artificial Sequence
  Description of Artificial Sequence: Synthetic oligonucleotide
gaagacagcaaccugaucu

SEQ ID NO: 1108421 - RNA, 19 nt, Artificial Sequence
  Description of Artificial Sequence: Synthetic oligonucleotide
guaugaugcguucaaaggc

SEQ ID NO: 1108422 - RNA, 19 nt, Artificial Sequence
  Description of Artificial Sequence: Synthetic oligonucleotide
ugcagguguugucagacgg

SEQ ID NO: 1108423 - RNA, 19 nt, Artificial Sequence
  Description of Artificial Sequence: Synthetic oligonucleotide
cuugaguuguugcauaagc

SEQ ID NO: 1108424 - RNA, 19 nt, Artificial Sequence
  Description of Artificial Sequence: Synthetic oligonucleotide
uugcauaagcuucacggcc

SEQ ID NO: 1108425 - RNA, 19 nt, Artificial Sequence
  Description of Artificial Sequence: Synthetic oligonucleotide
gauuuggccuguuugggag

SEQ ID NO: 1108426 - RNA, 19 nt, Artificial Sequence
  Description of Artificial Sequence: Synthetic oligonucleotide
cccuuaaugaccaaggucc

SEQ ID NO: 1108427 - RNA, 19 nt, Artificial Sequence
  Description of Artificial Sequence: Synthetic oligonucleotide
acugacacugccccgcugc

SEQ ID NO: 1108428 - RNA, 19 nt, Artificial Sequence
  Description of Artificial Sequence: Synthetic oligonucleotide
agggauaugucauacuuga

SEQ ID NO: 1108429 - RNA, 19 nt, Artificial Sequence
  Description of Artificial Sequence: Synthetic oligonucleotide
uggauuuuccucuggucgg

SEQ ID NO: 1108430 - RNA, 19 nt, Artificial Sequence
  Description of Artificial Sequence: Synthetic oligonucleotide
uuauagggguucaggaugc

SEQ ID NO: 1108431 - RNA, 19 nt, Artificial Sequence
  Description of Artificial Sequence: Synthetic oligonucleotide
ucauagagccgcucuacgg

SEQ ID NO: 1108432 - RNA, 19 nt, Artificial Sequence
  Description of Artificial Sequence: Synthetic oligonucleotide
cacguagcgacucagcucc

SEQ ID NO: 1108433 - RNA, 19 nt, Artificial Sequence
  Description of Artificial Sequence: Synthetic oligonucleotide
aagacagcaaccugaucug

SEQ ID NO: 1108434 - RNA, 19 nt, Artificial Sequence
  Description of Artificial Sequence: Synthetic oligonucleotide
agugccgucgcucaccagg

SEQ ID NO: 1108435 - RNA, 19 nt, Artificial Sequence
  Description of Artificial Sequence: Synthetic oligonucleotide
gguaugaugcguucaaagg

SEQ ID NO: 1108436 - RNA, 19 nt, Artificial Sequence
  Description of Artificial Sequence: Synthetic oligonucleotide
aguucuaucugcccugcuc

SEQ ID NO: 1108437 - RNA, 19 nt, Artificial Sequence
  Description of Artificial Sequence: Synthetic oligonucleotide
accagggaguucuaucugc

SEQ ID NO: 1108438 - RNA, 19 nt, Artificial Sequence
  Description of Artificial Sequence: Synthetic oligonucleotide
aaacucaaacgcugacagg

SEQ ID NO: 1108439 - RNA, 19 nt, Artificial Sequence
  Description of Artificial Sequence: Synthetic oligonucleotide
agguaugaugcguucaaag

SEQ ID NO: 1108440 - RNA, 19 nt, Artificial Sequence
  Description of Artificial Sequence: Synthetic oligonucleotide
uacuugaacacguagccau

SEQ ID NO: 1108441 - RNA, 19 nt, Artificial Sequence
  Description of Artificial Sequence: Synthetic oligonucleotide
ucugauagcaaugccuaag

SEQ ID NO: 1108442 - RNA, 19 nt, Artificial Sequence
  Description of Artificial Sequence: Synthetic oligonucleotide
cauagagccgcucuacggg

SEQ ID NO: 1108443 - RNA, 19 nt, Artificial Sequence
  Description of Artificial Sequence: Synthetic oligonucleotide
acccuuaaugaccaagguc

SEQ ID NO: 1108444 - RNA, 19 nt, Artificial Sequence
  Description of Artificial Sequence: Synthetic oligonucleotide
gaagucccgagccugcacg

SEQ ID NO: 1108445 - RNA, 19 nt, Artificial Sequence
  Description of Artificial Sequence: Synthetic oligonucleotide
uagucugcccacaaugagc

SEQ ID NO: 1108446 - RNA, 19 nt, Artificial Sequence
  Description of Artificial Sequence: Synthetic oligonucleotide
acgucauggaagcugauga

SEQ ID NO: 1108447 - RNA, 19 nt, Artificial Sequence
  Description of Artificial Sequence: Synthetic oligonucleotide
uggucgguagccauagugc

SEQ ID NO: 1108448 - RNA, 19 nt, Artificial Sequence
  Description of Artificial Sequence: Synthetic oligonucleotide
ggauaugucauacuugaac

SEQ ID NO: 1108449 - RNA, 19 nt, Artificial Sequence
  Description of Artificial Sequence: Synthetic oligonucleotide
aguaucaccucagggcugc

SEQ ID NO: 1108450 - RNA, 19 nt, Artificial Sequence
  Description of Artificial Sequence: Synthetic oligonucleotide
acaugcuuggcacgagggc

SEQ ID NO: 1108451 - RNA, 19 nt, Artificial Sequence
  Description of Artificial Sequence: Synthetic oligonucleotide
agaccaccggcauuggugg

SEQ ID NO: 1108452 - RNA, 19 nt, Artificial Sequence
  Description of Artificial Sequence: Synthetic oligonucleotide
aaacggggacacucgcccc

SEQ ID NO: 1108453 - RNA, 19 nt, Artificial Sequence
  Description of Artificial Sequence: Synthetic oligonucleotide
agacgggaggccucaaggc

SEQ ID NO: 1108454 - RNA, 19 nt, Artificial Sequence
  Description of Artificial Sequence: Synthetic oligonucleotide
aaccugaucuguugcaggu

SEQ ID NO: 1108455 - RNA, 19 nt, Artificial Sequence
  Description of Artificial Sequence: Synthetic oligonucleotide
aaaacggcagccgcugcac

SEQ ID NO: 1108456 - RNA, 19 nt, Artificial Sequence
  Description of Artificial Sequence: Synthetic oligonucleotide
ugccgucacauucagguga

SEQ ID NO: 1108457 - RNA, 19 nt, Artificial Sequence
  Description of Artificial Sequence: Synthetic oligonucleotide
gauuccggacacgucaugg

SEQ ID NO: 1108458 - RNA, 19 nt, Artificial Sequence
  Description of Artificial Sequence: Synthetic oligonucleotide
caaugccuaagaaucuggg

SEQ ID NO: 1108459 - RNA, 19 nt, Artificial Sequence
  Description of Artificial Sequence: Synthetic oligonucleotide
uggcagaccaggauuccgg

SEQ ID NO: 1108460 - RNA, 19 nt, Artificial Sequence
  Description of Artificial Sequence: Synthetic oligonucleotide
gauucucucccgaagggcc

SEQ ID NO: 1108461 - RNA, 19 nt, Artificial Sequence
  Description of Artificial Sequence: Synthetic oligonucleotide
auagagccgcucuacgggg

SEQ ID NO: 1108462 - RNA, 19 nt, Artificial Sequence
  Description of Artificial Sequence: Synthetic oligonucleotide
ugggacacuuccucggagg

SEQ ID NO: 1108463 - RNA, 19 nt, Artificial Sequence
  Description of Artificial Sequence: Synthetic oligonucleotide
agaccagggaguucuaucu

SEQ ID NO: 1108464 - RNA, 19 nt, Artificial Sequence
  Description of Artificial Sequence: Synthetic oligonucleotide
ucuacggggagggauaugu

SEQ ID NO: 1108465 - RNA, 19 nt, Artificial Sequence
  Description of Artificial Sequence: Synthetic oligonucleotide
acaaugagcuggcaggaga

SEQ ID NO: 1108466 - RNA, 19 nt, Artificial Sequence
  Description of Artificial Sequence: Synthetic oligonucleotide
ucauggaagcugaugacuu

SEQ ID NO: 1108467 - RNA, 19 nt, Artificial Sequence
  Description of Artificial Sequence: Synthetic oligonucleotide
gauagcaaugccuaagaau

SEQ ID NO: 1108468 - RNA, 19 nt, Artificial Sequence
  Description of Artificial Sequence: Synthetic oligonucleotide
caaggcaccgagcaacucc

SEQ ID NO: 1108469 - RNA, 19 nt, Artificial Sequence
  Description of Artificial Sequence: Synthetic oligonucleotide
uccggacacgucauggaag

SEQ ID NO: 1108470 - RNA, 19 nt, Artificial Sequence
  Description of Artificial Sequence: Synthetic oligonucleotide
agaccaggauuccggacac

SEQ ID NO: 1108471 - RNA, 19 nt, Artificial Sequence
  Description of Artificial Sequence: Synthetic oligonucleotide
uggguucacagccaaguuc

SEQ ID NO: 1108472 - RNA, 19 nt, Artificial Sequence
  Description of Artificial Sequence: Synthetic oligonucleotide
ugcccacccacuuagucug

SEQ ID NO: 1108473 - RNA, 19 nt, Artificial Sequence
  Description of Artificial Sequence: Synthetic oligonucleotide
auagcugaguacguucuuc

SEQ ID NO: 1108474 - RNA, 19 nt, Artificial Sequence
  Description of Artificial Sequence: Synthetic oligonucleotide
ugacaacucugccagguau

SEQ ID NO: 1108475 - RNA, 19 nt, Artificial Sequence
  Description of Artificial Sequence: Synthetic oligonucleotide
cauaaacucaaacgcugac

SEQ ID NO: 1108476 - RNA, 19 nt, Artificial Sequence
  Description of Artificial Sequence: Synthetic oligonucleotide
caaccaggacauagaaugg

SEQ ID NO: 1108477 - RNA, 19 nt, Artificial Sequence
  Description of Artificial Sequence: Synthetic oligonucleotide
caggacaguuccucgaagc

SEQ ID NO: 1108478 - RNA, 19 nt, Artificial Sequence
  Description of Artificial Sequence: Synthetic oligonucleotide
ucgcucaggagucaguauc

SEQ ID NO: 1108479 - RNA, 19 nt, Artificial Sequence
  Description of Artificial Sequence: Synthetic oligonucleotide
ugcucaaccuacagaaauc

SEQ ID NO: 1108480 - RNA, 19 nt, Artificial Sequence
  Description of Artificial Sequence: Synthetic oligonucleotide
aaguuccucugauagcaau

SEQ ID NO: 1108481 - RNA, 19 nt, Artificial Sequence
  Description of Artificial Sequence: Synthetic oligonucleotide
ugauagcaaugccuaagaa

SEQ ID NO: 1108482 - RNA, 19 nt, Artificial Sequence
  Description of Artificial Sequence: Synthetic oligonucleotide
gaucacgaggucauagagc

SEQ ID NO: 1108483 - RNA, 19 nt, Artificial Sequence
  Description of Artificial Sequence: Synthetic oligonucleotide
acugcccacccacuuaguc

SEQ ID NO: 1108484 - RNA, 19 nt, Artificial Sequence
  Description of Artificial Sequence: Synthetic oligonucleotide
cacgaggucauagagccgc

SEQ ID NO: 1108485 - RNA, 19 nt, Artificial Sequence
  Description of Artificial Sequence: Synthetic oligonucleotide
ugugacaacucugccaggu

SEQ ID NO: 1108486 - RNA, 19 nt, Artificial Sequence
  Description of Artificial Sequence: Synthetic oligonucleotide
gaguuguugcauaagcuuc

SEQ ID NO: 1108487 - RNA, 19 nt, Artificial Sequence
  Description of Artificial Sequence: Synthetic oligonucleotide
gaggcgggugcguacgucg

SEQ ID NO: 1108488 - RNA, 19 nt, Artificial Sequence
  Description of Artificial Sequence: Synthetic oligonucleotide
cagaccaccggcauuggug

SEQ ID NO: 1108489 - RNA, 19 nt, Artificial Sequence
  Description of Artificial Sequence: Synthetic oligonucleotide
aguggggaaacugcccacc

SEQ ID NO: 1108490 - RNA, 19 nt, Artificial Sequence
  Description of Artificial Sequence: Synthetic oligonucleotide
gaguacguucuucuucuug

SEQ ID NO: 1108491 - RNA, 19 nt, Artificial Sequence
  Description of Artificial Sequence: Synthetic oligonucleotide
caaccugaucuguugcagg

SEQ ID NO: 1108492 - RNA, 19 nt, Artificial Sequence
  Description of Artificial Sequence: Synthetic oligonucleotide
agggaguucuaucugcccu

SEQ ID NO: 1108493 - RNA, 19 nt, Artificial Sequence
  Description of Artificial Sequence: Synthetic oligonucleotide
gacgggaggccucaaggcc

SEQ ID NO: 1108494 - RNA, 19 nt, Artificial Sequence
  Description of Artificial Sequence: Synthetic oligonucleotide
guagccauagugccgucgc

SEQ ID NO: 1108495 - RNA, 19 nt, Artificial Sequence
  Description of Artificial Sequence: Synthetic oligonucleotide
gugcccaaugaacagcugc

SEQ ID NO: 1108496 - RNA, 19 nt, Artificial Sequence
  Description of Artificial Sequence: Synthetic oligonucleotide
gaucugugacaacucugcc

SEQ ID NO: 1108497 - RNA, 19 nt, Artificial Sequence
  Description of Artificial Sequence: Synthetic oligonucleotide
cuggucgguagccauagug

SEQ ID NO: 1108498 - RNA, 19 nt, Artificial Sequence
  Description of Artificial Sequence: Synthetic oligonucleotide
ucgaucacgaggucauaga

SEQ ID NO: 1108499 - RNA, 19 nt, Artificial Sequence
  Description of Artificial Sequence: Synthetic oligonucleotide
aagcgagccauaccgcaga

SEQ ID NO: 1108500 - RNA, 19 nt, Artificial Sequence
  Description of Artificial Sequence: Synthetic oligonucleotide
cuuuacugcagccccggac

SEQ ID NO: 1108501 - RNA, 19 nt, Artificial Sequence
  Description of Artificial Sequence: Synthetic oligonucleotide
agaaagcgcagaccaccgg

SEQ ID NO: 1108502 - RNA, 19 nt, Artificial Sequence
  Description of Artificial Sequence: Synthetic oligonucleotide
agauuuggccuguuuggga

SEQ ID NO: 1108503 - RNA, 19 nt, Artificial Sequence
  Description of Artificial Sequence: Synthetic oligonucleotide
cucaggagucaguaucacc

SEQ ID NO: 1108504 - RNA, 19 nt, Artificial Sequence
  Description of Artificial Sequence: Synthetic oligonucleotide
accgcagaaagcgcagacc

SEQ ID NO: 1108505 - RNA, 19 nt, Artificial Sequence
  Description of Artificial Sequence: Synthetic oligonucleotide
agcgugcccaaugaacagc

SEQ ID NO: 1108506 - RNA, 19 nt, Artificial Sequence
  Description of Artificial Sequence: Synthetic oligonucleotide
aagccaaggccaugcucag

SEQ ID NO: 1108507 - RNA, 19 nt, Artificial Sequence
  Description of Artificial Sequence: Synthetic oligonucleotide
uguuauccuuccucaggga

SEQ ID NO: 1108508 - RNA, 19 nt, Artificial Sequence
  Description of Artificial Sequence: Synthetic oligonucleotide
gaauggacuuucuugcacu

SEQ ID NO: 1108509 - RNA, 19 nt, Artificial Sequence
  Description of Artificial Sequence: Synthetic oligonucleotide
ugcucuggaucugugacaa

SEQ ID NO: 1108510 - RNA, 19 nt, Artificial Sequence
  Description of Artificial Sequence: Synthetic oligonucleotide
cuguccaaccaacugcaug

SEQ ID NO: 1108511 - RNA, 19 nt, Artificial Sequence
  Description of Artificial Sequence: Synthetic oligonucleotide
gcguacgucgaucacgagg

SEQ ID NO: 1108512 - RNA, 19 nt, Artificial Sequence
  Description of Artificial Sequence: Synthetic oligonucleotide
gaaaacggcagccgcugca

SEQ ID NO: 1108513 - RNA, 19 nt, Artificial Sequence
  Description of Artificial Sequence: Synthetic oligonucleotide
uacgucgaucacgagguca

SEQ ID NO: 1108514 - RNA, 19 nt, Artificial Sequence
  Description of Artificial Sequence: Synthetic oligonucleotide
caggauuccggacacguca

SEQ ID NO: 1108515 - RNA, 19 nt, Artificial Sequence
  Description of Artificial Sequence: Synthetic oligonucleotide
uugcaugucuccaguugcu

SEQ ID NO: 1108516 - RNA, 19 nt, Artificial Sequence
  Description of Artificial Sequence: Synthetic oligonucleotide
ucgaagcgagccauaccgc

SEQ ID NO: 1108517 - RNA, 19 nt, Artificial Sequence
  Description of Artificial Sequence: Synthetic oligonucleotide
uuccggacacgucauggaa

SEQ ID NO: 1108518 - RNA, 19 nt, Artificial Sequence
  Description of Artificial Sequence: Synthetic oligonucleotide
uuacugcagccccggacgc

SEQ ID NO: 1108519 - RNA, 19 nt, Artificial Sequence
  Description of Artificial Sequence: Synthetic oligonucleotide
ucacgaggucauagagccg

SEQ ID NO: 1108520 - RNA, 19 nt, Artificial Sequence
  Description of Artificial Sequence: Synthetic oligonucleotide
ucgguagccauagugccgu

SEQ ID NO: 1108521 - RNA, 19 nt, Artificial Sequence
  Description of Artificial Sequence: Synthetic oligonucleotide
cugauagcaaugccuaaga

SEQ ID NO: 1108522 - RNA, 19 nt, Artificial Sequence
  Description of Artificial Sequence: Synthetic oligonucleotide
cacguagccaucccggcug

SEQ ID NO: 1108523 - RNA, 19 nt, Artificial Sequence
  Description of Artificial Sequence: Synthetic oligonucleotide
guagcgacucagcuccucc

SEQ ID NO: 1108524 - RNA, 19 nt, Artificial Sequence
  Description of Artificial Sequence: Synthetic oligonucleotide
gguggcuugcuauagcuga

SEQ ID NO: 1108525 - RNA, 19 nt, Artificial Sequence
  Description of Artificial Sequence: Synthetic oligonucleotide
gucacauucaggugaaggu

SEQ ID NO: 1108526 - RNA, 19 nt, Artificial Sequence
  Description of Artificial Sequence: Synthetic oligonucleotide
acagccaaguuccucugau

SEQ ID NO: 1108527 - RNA, 19 nt, Artificial Sequence
  Description of Artificial Sequence: Synthetic oligonucleotide
caggguaucgcucaggagu

SEQ ID NO: 1108528 - RNA, 19 nt, Artificial Sequence
  Description of Artificial Sequence: Synthetic oligonucleotide
uaccgcagaaagcgcagac

SEQ ID NO: 1108529 - RNA, 19 nt, Artificial Sequence
  Description of Artificial Sequence: Synthetic oligonucleotide
aaggcaccgagcaacuccu

SEQ ID NO: 1108530 - RNA, 19 nt, Artificial Sequence
  Description of Artificial Sequence: Synthetic oligonucleotide
accaccggcauugguggcc

SEQ ID NO: 1108531 - RNA, 19 nt, Artificial Sequence
  Description of Artificial Sequence: Synthetic oligonucleotide
aguuccucgaagcgagcca

SEQ ID NO: 1108532 - RNA, 19 nt, Artificial Sequence
  Description of Artificial Sequence: Synthetic oligonucleotide
gucgaucacgaggucauag

SEQ ID NO: 1108533 - RNA, 19 nt, Artificial Sequence
  Description of Artificial Sequence: Synthetic oligonucleotide
ggugcuguccaaccaacug

SEQ ID NO: 1108534 - RNA, 19 nt, Artificial Sequence
  Description of Artificial Sequence: Synthetic oligonucleotide
uuuggccuguuugggagug

SEQ ID NO: 1108535 - RNA, 19 nt, Artificial Sequence
  Description of Artificial Sequence: Synthetic oligonucleotide
aggguaucgcucaggaguc

SEQ ID NO: 1108536 - RNA, 19 nt, Artificial Sequence
  Description of Artificial Sequence: Synthetic oligonucleotide
cuguguuauccuuccucag

SEQ ID NO: 1108537 - RNA, 19 nt, Artificial Sequence
  Description of Artificial Sequence: Synthetic oligonucleotide
ggucgguagccauagugcc

SEQ ID NO: 1108538 - RNA, 19 nt, Artificial Sequence
  Description of Artificial Sequence: Synthetic oligonucleotide
ggugcguacgucgaucacg

SEQ ID NO: 1108539 - RNA, 19 nt, Artificial Sequence
  Description of Artificial Sequence: Synthetic oligonucleotide
cugagcgccucugugauuc

SEQ ID NO: 1108540 - RNA, 19 nt, Artificial Sequence
  Description of Artificial Sequence: Synthetic oligonucleotide
cuccaaggcaccgagcaac

SEQ ID NO: 1108541 - RNA, 19 nt, Artificial Sequence
  Description of Artificial Sequence: Synthetic oligonucleotide
aguucaggauggucccauc

SEQ ID NO: 1108542 - RNA, 19 nt, Artificial Sequence
  Description of Artificial Sequence: Synthetic oligonucleotide
auuccggacacgucaugga

SEQ ID NO: 1108543 - RNA, 19 nt, Artificial Sequence
  Description of Artificial Sequence: Synthetic oligonucleotide
cauagugccgucgcucacc

SEQ ID NO: 1108544 - RNA, 19 nt, Artificial Sequence
  Description of Artificial Sequence: Synthetic oligonucleotide
cucaaacgcugacaggauc

SEQ ID NO: 1108545 - RNA, 19 nt, Artificial Sequence
  Description of Artificial Sequence: Synthetic oligonucleotide
uccaaggcaccgagcaacu

SEQ ID NO: 1108546 - RNA, 19 nt, Artificial Sequence
  Description of Artificial Sequence: Synthetic oligonucleotide
gcuauagcugaguacguuc

SEQ ID NO: 1108547 - RNA, 19 nt, Artificial Sequence
  Description of Artificial Sequence: Synthetic oligonucleotide
cagaccaggauuccggaca

SEQ ID NO: 1108548 - RNA, 19 nt, Artificial Sequence
  Description of Artificial Sequence: Synthetic oligonucleotide
uugcuauagcugaguacgu

SEQ ID NO: 1108549 - RNA, 19 nt, Artificial Sequence
  Description of Artificial Sequence: Synthetic oligonucleotide
agccauagugccgucgcuc

SEQ ID NO: 1108550 - RNA, 19 nt, Artificial Sequence
  Description of Artificial Sequence: Synthetic oligonucleotide
gguagccaagggaagacag

SEQ ID NO: 1108551 - RNA, 19 nt, Artificial Sequence
  Description of Artificial Sequence: Synthetic oligonucleotide
gacacgucauggaagcuga

SEQ ID NO: 1108552 - RNA, 19 nt, Artificial Sequence
  Description of Artificial Sequence: Synthetic oligonucleotide
ugaccaagguccugguguc

SEQ ID NO: 1108553 - RNA, 19 nt, Artificial Sequence
  Description of Artificial Sequence: Synthetic oligonucleotide
uaaugaccaagguccuggu

SEQ ID NO: 1108554 - RNA, 19 nt, Artificial Sequence
  Description of Artificial Sequence: Synthetic oligonucleotide
ggcauauacauagggcucc

SEQ ID NO: 1108555 - RNA, 19 nt, Artificial Sequence
  Description of Artificial Sequence: Synthetic oligonucleotide
auacuugaacacguagcca

SEQ ID NO: 1108556 - RNA, 19 nt, Artificial Sequence
  Description of Artificial Sequence: Synthetic oligonucleotide
ggucucaaccaggacauag

SEQ ID NO: 1108557 - RNA, 19 nt, Artificial Sequence
  Description of Artificial Sequence: Synthetic oligonucleotide
uggacaggaugacuucauc

SEQ ID NO: 1108558 - RNA, 19 nt, Artificial Sequence
  Description of Artificial Sequence: Synthetic oligonucleotide
uggcaacaagaugaagagc

SEQ ID NO: 1108559 - RNA, 19 nt, Artificial Sequence
  Description of Artificial Sequence: Synthetic oligonucleotide
auagugccgucgcucacca

SEQ ID NO: 1108560 - RNA, 19 nt, Artificial Sequence
  Description of Artificial Sequence: Synthetic oligonucleotide
cgagccauaccgcagaaag

SEQ ID NO: 1108561 - RNA, 19 nt, Artificial Sequence
  Description of Artificial Sequence: Synthetic oligonucleotide
agugcccguaucccaccac

SEQ ID NO: 1108562 - RNA, 19 nt, Artificial Sequence
  Description of Artificial Sequence: Synthetic oligonucleotide
uauagcugaguacguucuu

SEQ ID NO: 1108563 - RNA, 19 nt, Artificial Sequence
  Description of Artificial Sequence: Synthetic oligonucleotide
cccguaucccaccacaugc

SEQ ID NO: 1108564 - RNA, 19 nt, Artificial Sequence
  Description of Artificial Sequence: Synthetic oligonucleotide
uggggaaacugcccaccca

SEQ ID NO: 1108565 - RNA, 19 nt, Artificial Sequence
  Description of Artificial Sequence: Synthetic oligonucleotide
aaggccuaccaacccuuaa

SEQ ID NO: 1108566 - RNA, 19 nt, Artificial Sequence
  Description of Artificial Sequence: Synthetic oligonucleotide
ggcacgagggccgaggcgg

SEQ ID NO: 1108567 - RNA, 19 nt, Artificial Sequence
  Description of Artificial Sequence: Synthetic oligonucleotide
uaucgcucaggagucagua

SEQ ID NO: 1108568 - RNA, 19 nt, Artificial Sequence
  Description of Artificial Sequence: Synthetic oligonucleotide
cugaguacguucuucuucu

SEQ ID NO: 1108569 - RNA, 19 nt, Artificial Sequence
  Description of Artificial Sequence: Synthetic oligonucleotide
aggccuaccaacccuuaau

SEQ ID NO: 1108570 - RNA, 19 nt, Artificial Sequence
  Description of Artificial Sequence: Synthetic oligonucleotide
accaggauuccggacacgu

SEQ ID NO: 1108571 - RNA, 19 nt, Artificial Sequence
  Description of Artificial Sequence: Synthetic oligonucleotide
caaguaccacuuccaggcc

SEQ ID NO: 1108572 - RNA, 19 nt, Artificial Sequence
  Description of Artificial Sequence: Synthetic oligonucleotide
auuuggccuguuugggagu

SEQ ID NO: 1108573 - RNA, 19 nt, Artificial Sequence
  Description of Artificial Sequence: Synthetic oligonucleotide
uccuggugucucauggcaa

SEQ ID NO: 1108574 - RNA, 19 nt, Artificial Sequence
  Description of Artificial Sequence: Synthetic oligonucleotide
gucgguagccauagugccg

SEQ ID NO: 1108575 - RNA, 19 nt, Artificial Sequence
  Description of Artificial Sequence: Synthetic oligonucleotide
caguggaaaacggcagccg

SEQ ID NO: 1108576 - RNA, 19 nt, Artificial Sequence
  Description of Artificial Sequence: Synthetic oligonucleotide
gaaacugcccacccacuua

SEQ ID NO: 1108577 - RNA, 19 nt, Artificial Sequence
  Description of Artificial Sequence: Synthetic oligonucleotide
cagaggguccucacaguug

SEQ ID NO: 1108578 - RNA, 19 nt, Artificial Sequence
  Description of Artificial Sequence: Synthetic oligonucleotide
acacguagccaucccggcu

SEQ ID NO: 1108579 - RNA, 19 nt, Artificial Sequence
  Description of Artificial Sequence: Synthetic oligonucleotide
guaucccaccacaugcuug

SEQ ID NO: 1108580 - RNA, 19 nt, Artificial Sequence
  Description of Artificial Sequence: Synthetic oligonucleotide
ggacauagaauggacuuuc

SEQ ID NO: 1108581 - RNA, 19 nt, Artificial Sequence
  Description of Artificial Sequence: Synthetic oligonucleotide
cuauagcugaguacguucu

SEQ ID NO: 1108582 - RNA, 19 nt, Artificial Sequence
  Description of Artificial Sequence: Synthetic oligonucleotide
caguuccucgaagcgagcc

SEQ ID NO: 1108583 - RNA, 19 nt, Artificial Sequence
  Description of Artificial Sequence: Synthetic oligonucleotide
ggggaaacugcccacccac

SEQ ID NO: 1108584 - RNA, 19 nt, Artificial Sequence
  Description of Artificial Sequence: Synthetic oligonucleotide
ucuaucugcccugcucaac

SEQ ID NO: 1108585 - RNA, 19 nt, Artificial Sequence
  Description of Artificial Sequence: Synthetic oligonucleotide
acacuuuacugcagccccg

SEQ ID NO: 1108586 - RNA, 19 nt, Artificial Sequence
  Description of Artificial Sequence: Synthetic oligonucleotide
guggggaaacugcccaccc

SEQ ID NO: 1108587 - RNA, 19 nt, Artificial Sequence
  Description of Artificial Sequence: Synthetic oligonucleotide
ugcauucaguguccauaaa

SEQ ID NO: 1108588 - RNA, 19 nt, Artificial Sequence
  Description of Artificial Sequence: Synthetic oligonucleotide
uucuaucugcccugcucaa

SEQ ID NO: 1108589 - RNA, 19 nt, Artificial Sequence
  Description of Artificial Sequence: Synthetic oligonucleotide
cagcgugcccaaugaacag

SEQ ID NO: 1108590 - RNA, 19 nt, Artificial Sequence
  Description of Artificial Sequence: Synthetic oligonucleotide
uugucagacgggaggccuc

SEQ ID NO: 1108591 - RNA, 19 nt, Artificial Sequence
  Description of Artificial Sequence: Synthetic oligonucleotide
ggaguggggaaacugccca

SEQ ID NO: 1108592 - RNA, 19 nt, Artificial Sequence
  Description of Artificial Sequence: Synthetic oligonucleotide
aucccuuugcaggugcuga

SEQ ID NO: 1108593 - RNA, 19 nt, Artificial Sequence
  Description of Artificial Sequence: Synthetic oligonucleotide
cacgucauggaagcugaug

SEQ ID NO: 1108594 - RNA, 19 nt, Artificial Sequence
  Description of Artificial Sequence: Synthetic oligonucleotide
ggccucaaggccuaccaac

SEQ ID NO: 1108595 - RNA, 19 nt, Artificial Sequence
  Description of Artificial Sequence: Synthetic oligonucleotide
cugcacguagcgacucagc

SEQ ID NO: 1108596 - RNA, 19 nt, Artificial Sequence
  Description of Artificial Sequence: Synthetic oligonucleotide
caguaucaccucagggcug

SEQ ID NO: 1108597 - RNA, 19 nt, Artificial Sequence
  Description of Artificial Sequence: Synthetic oligonucleotide
caccggucagcuucucagc

SEQ ID NO: 1108598 - RNA, 19 nt, Artificial Sequence
  Description of Artificial Sequence: Synthetic oligonucleotide
gcuugcuauagcugaguac

SEQ ID NO: 1108599 - RNA, 19 nt, Artificial Sequence
  Description of Artificial Sequence: Synthetic oligonucleotide
ccggacacgucauggaagc

SEQ ID NO: 1108600 - RNA, 19 nt, Artificial Sequence
  Description of Artificial Sequence: Synthetic oligonucleotide
acauugcaugucuccaguu

SEQ ID NO: 1108601 - RNA, 19 nt, Artificial Sequence
  Description of Artificial Sequence: Synthetic oligonucleotide
gcccuuugcucccaagucc

SEQ ID NO: 1108602 - RNA, 19 nt, Artificial Sequence
  Description of Artificial Sequence: Synthetic oligonucleotide
caggagucaguaucaccuc

SEQ ID NO: 1108603 - RNA, 19 nt, Artificial Sequence
  Description of Artificial Sequence: Synthetic oligonucleotide
ggacacgucauggaagcug

SEQ ID NO: 1108604 - RNA, 19 nt, Artificial Sequence
  Description of Artificial Sequence: Synthetic oligonucleotide
ugucagacgggaggccuca

SEQ ID NO: 1108605 - RNA, 19 nt, Artificial Sequence
  Description of Artificial Sequence: Synthetic oligonucleotide
ccaaguuccucugauagca

SEQ ID NO: 1108606 - RNA, 19 nt, Artificial Sequence
  Description of Artificial Sequence: Synthetic oligonucleotide
uauagggguucaggaugcc

SEQ ID NO: 1108607 - RNA, 19 nt, Artificial Sequence
  Description of Artificial Sequence: Synthetic oligonucleotide
agccgcucuacggggaggg

SEQ ID NO: 1108608 - RNA, 19 nt, Artificial Sequence
  Description of Artificial Sequence: Synthetic oligonucleotide
uggcaugaugaagucccga

SEQ ID NO: 1108609 - RNA, 19 nt, Artificial Sequence
  Description of Artificial Sequence: Synthetic oligonucleotide
cucauggcaacaagaugaa

SEQ ID NO: 1108610 - RNA, 19 nt, Artificial Sequence
  Description of Artificial Sequence: Synthetic oligonucleotide
acggccucagguggcuugc

SEQ ID NO: 1108611 - RNA, 19 nt, Artificial Sequence
  Description of Artificial Sequence: Synthetic oligonucleotide
auagggguucaggaugccu

SEQ ID NO: 1108612 - RNA, 19 nt, Artificial Sequence
  Description of Artificial Sequence: Synthetic oligonucleotide
gaggucucaaccaggacau

SEQ ID NO: 1108613 - RNA, 19 nt, Artificial Sequence
  Description of Artificial Sequence: Synthetic oligonucleotide
gcucaaccuacagaaauca

SEQ ID NO: 1108614 - RNA, 19 nt, Artificial Sequence
  Description of Artificial Sequence: Synthetic oligonucleotide
uagccauagugccgucgcu

SEQ ID NO: 1108615 - RNA, 19 nt, Artificial Sequence
  Description of Artificial Sequence: Synthetic oligonucleotide
uaucaccucagggcugcca

SEQ ID NO: 1108616 - RNA, 19 nt, Artificial Sequence
  Description of Artificial Sequence: Synthetic oligonucleotide
gacuuucuugcacuggguu

SEQ ID NO: 1108617 - RNA, 19 nt, Artificial Sequence
  Description of Artificial Sequence: Synthetic oligonucleotide
acaguuccucgaagcgagc

SEQ ID NO: 1108618 - RNA, 19 nt, Artificial Sequence
  Description of Artificial Sequence: Synthetic oligonucleotide
gcaaccugaucuguugcag

SEQ ID NO: 1108619 - RNA, 19 nt, Artificial Sequence
  Description of Artificial Sequence: Synthetic oligonucleotide
aaccgaggaaagccacauu

SEQ ID NO: 1108620 - RNA, 19 nt, Artificial Sequence
  Description of Artificial Sequence: Synthetic oligonucleotide
ucccuuugcaggugcugaa

SEQ ID NO: 1108621 - RNA, 19 nt, Artificial Sequence
  Description of Artificial Sequence: Synthetic oligonucleotide
gguaucgcucaggagucag

SEQ ID NO: 1108622 - RNA, 19 nt, Artificial Sequence
  Description of Artificial Sequence: Synthetic oligonucleotide
cuaagaaucugggacacuu

SEQ ID NO: 1108623 - RNA, 19 nt, Artificial Sequence
  Description of Artificial Sequence: Synthetic oligonucleotide
cuaaaggccucugccguca

SEQ ID NO: 1108624 - RNA, 19 nt, Artificial Sequence
  Description of Artificial Sequence: Synthetic oligonucleotide
gacaccggucagcuucuca

SEQ ID NO: 1108625 - RNA, 19 nt, Artificial Sequence
  Description of Artificial Sequence: Synthetic oligonucleotide
gccaaguuccucugauagc

SEQ ID NO: 1108626 - RNA, 19 nt, Artificial Sequence
  Description of Artificial Sequence: Synthetic oligonucleotide
aucgcucaggagucaguau

SEQ ID NO: 1108627 - RNA, 19 nt, Artificial Sequence
  Description of Artificial Sequence: Synthetic oligonucleotide
ugcccguaucccaccacau

SEQ ID NO: 1108628 - RNA, 19 nt, Artificial Sequence
  Description of Artificial Sequence: Synthetic oligonucleotide
gugcguacgucgaucacga

SEQ ID NO: 1108629 - RNA, 19 nt, Artificial Sequence
  Description of Artificial Sequence: Synthetic oligonucleotide
guacguucuucuucuugaa

SEQ ID NO: 1108630 - RNA, 19 nt, Artificial Sequence
  Description of Artificial Sequence: Synthetic oligonucleotide
cugcucaaccuacagaaau

SEQ ID NO: 1108631 - RNA, 19 nt, Artificial Sequence
  Description of Artificial Sequence: Synthetic oligonucleotide
ggagggauaugucauacuu

SEQ ID NO: 1108632 - RNA, 19 nt, Artificial Sequence
  Description of Artificial Sequence: Synthetic oligonucleotide
cgucacauucaggugaagg

SEQ ID NO: 1108633 - RNA, 19 nt, Artificial Sequence
  Description of Artificial Sequence: Synthetic oligonucleotide
cugaggucucaaccaggac

SEQ ID NO: 1108634 - RNA, 19 nt, Artificial Sequence
  Description of Artificial Sequence: Synthetic oligonucleotide
cgagccugcacguagcgac

SEQ ID NO: 1108635 - RNA, 19 nt, Artificial Sequence
  Description of Artificial Sequence: Synthetic oligonucleotide
cacccacuuagucugccca

SEQ ID NO: 1108636 - RNA, 19 nt, Artificial Sequence
  Description of Artificial Sequence: Synthetic oligonucleotide
ccaacccuuaaugaccaag

SEQ ID NO: 1108637 - RNA, 19 nt, Artificial Sequence
  Description of Artificial Sequence: Synthetic oligonucleotide
gccagaguucagcaccugc

SEQ ID NO: 1108638 - RNA, 19 nt, Artificial Sequence
  Description of Artificial Sequence: Synthetic oligonucleotide
cgaucacgaggucauagag

SEQ ID NO: 1108639 - RNA, 19 nt, Artificial Sequence
  Description of Artificial Sequence: Synthetic oligonucleotide
ccuggugucucauggcaac

SEQ ID NO: 1108640 - RNA, 19 nt, Artificial Sequence
  Description of Artificial Sequence: Synthetic oligonucleotide
acuuuacugcagccccgga

SEQ ID NO: 1108641 - RNA, 19 nt, Artificial Sequence
  Description of Artificial Sequence: Synthetic oligonucleotide
gugcccguaucccaccaca

SEQ ID NO: 1108642 - RNA, 19 nt, Artificial Sequence
  Description of Artificial Sequence: Synthetic oligonucleotide
ccagcgugcccaaugaaca

SEQ ID NO: 1108643 - RNA, 19 nt, Artificial Sequence
  Description of Artificial Sequence: Synthetic oligonucleotide
gacgcuccucagccagucc

SEQ ID NO: 1108644 - RNA, 19 nt, Artificial Sequence
  Description of Artificial Sequence: Synthetic oligonucleotide
cacggccucagguggcuug

SEQ ID NO: 1108645 - RNA, 19 nt, Artificial Sequence
  Description of Artificial Sequence: Synthetic oligonucleotide
cuacggggagggauauguc

SEQ ID NO: 1108646 - RNA, 19 nt, Artificial Sequence
  Description of Artificial Sequence: Synthetic oligonucleotide
cccagcgugcccaaugaac

SEQ ID NO: 1108647 - RNA, 19 nt, Artificial Sequence
  Description of Artificial Sequence: Synthetic oligonucleotide
ccauaaacucaaacgcuga

SEQ ID NO: 1108648 - RNA, 19 nt, Artificial Sequence
  Description of Artificial Sequence: Synthetic oligonucleotide
ggucauagagccgcucuac

SEQ ID NO: 1108649 - RNA, 19 nt, Artificial Sequence
  Description of Artificial Sequence: Synthetic oligonucleotide
gcagguguugucagacggg

SEQ ID NO: 1108650 - RNA, 19 nt, Artificial Sequence
  Description of Artificial Sequence: Synthetic oligonucleotide
cagguguugucagacggga

SEQ ID NO: 1108651 - RNA, 19 nt, Artificial Sequence
  Description of Artificial Sequence: Synthetic oligonucleotide
gccucaaggccuaccaacc

SEQ ID NO: 1108652 - RNA, 19 nt, Artificial Sequence
  Description of Artificial Sequence: Synthetic oligonucleotide
agccgcugcacaggguauc

SEQ ID NO: 1108653 - RNA, 19 nt, Artificial Sequence
  Description of Artificial Sequence: Synthetic oligonucleotide
ggcccaggacaguuccucg

SEQ ID NO: 1108654 - RNA, 19 nt, Artificial Sequence
  Description of Artificial Sequence: Synthetic oligonucleotide
ugcguacgucgaucacgag

SEQ ID NO: 1108655 - RNA, 19 nt, Artificial Sequence
  Description of Artificial Sequence: Synthetic oligonucleotide
ccucagcaacacuuuacug

SEQ ID NO: 1108656 - RNA, 19 nt, Artificial Sequence
  Description of Artificial Sequence: Synthetic oligonucleotide
gccuaccaacccuuaauga

SEQ ID NO: 1108657 - RNA, 19 nt, Artificial Sequence
  Description of Artificial Sequence: Synthetic oligonucleotide
cagguggcuugcuauagcu

SEQ ID NO: 1108658 - RNA, 19 nt, Artificial Sequence
  Description of Artificial Sequence: Synthetic oligonucleotide
uuccucuggucgguagcca

SEQ ID NO: 1108659 - RNA, 19 nt, Artificial Sequence
  Description of Artificial Sequence: Synthetic oligonucleotide
gucagguggaggugcuguc

SEQ ID NO: 1108660 - RNA, 19 nt, Artificial Sequence
  Description of Artificial Sequence: Synthetic oligonucleotide
auaccgcagaaagcgcaga

SEQ ID NO: 1108661 - RNA, 19 nt, Artificial Sequence
  Description of Artificial Sequence: Synthetic oligonucleotide
agcgccucugugauucucu

SEQ ID NO: 1108662 - RNA, 19 nt, Artificial Sequence
  Description of Artificial Sequence: Synthetic oligonucleotide
acacugccccgcugcuccg

SEQ ID NO: 1108663 - RNA, 19 nt, Artificial Sequence
  Description of Artificial Sequence: Synthetic oligonucleotide
cacauugcaugucuccagu

SEQ ID NO: 1108664 - RNA, 19 nt, Artificial Sequence
  Description of Artificial Sequence: Synthetic oligonucleotide
accgagcaacuccuggcua

SEQ ID NO: 1108665 - RNA, 19 nt, Artificial Sequence
  Description of Artificial Sequence: Synthetic oligonucleotide
ccauaccgcagaaagcgca

SEQ ID NO: 1108666 - RNA, 19 nt, Artificial Sequence
  Description of Artificial Sequence: Synthetic oligonucleotide
ggggagggauaugucauac

SEQ ID NO: 1108667 - RNA, 19 nt, Artificial Sequence
  Description of Artificial Sequence: Synthetic oligonucleotide
ggaguucuaucugcccugc

SEQ ID NO: 1108668 - RNA, 19 nt, Artificial Sequence
  Description of Artificial Sequence: Synthetic oligonucleotide
guugucagacgggaggccu

SEQ ID NO: 1108669 - RNA, 19 nt, Artificial Sequence
  Description of Artificial Sequence: Synthetic oligonucleotide
gccauagugccgucgcuca

SEQ ID NO: 1108670 - RNA, 19 nt, Artificial Sequence
  Description of Artificial Sequence: Synthetic oligonucleotide
acucaaacgcugacaggau

SEQ ID NO: 1108671 - RNA, 19 nt, Artificial Sequence
  Description of Artificial Sequence: Synthetic oligonucleotide
ggacaguuccucgaagcga

SEQ ID NO: 1108672 - RNA, 19 nt, Artificial Sequence
  Description of Artificial Sequence: Synthetic oligonucleotide
gccuaagaaucugggacac

SEQ ID NO: 1108673 - RNA, 19 nt, Artificial Sequence
  Description of Artificial Sequence: Synthetic oligonucleotide
gacauagaauggacuuucu

SEQ ID NO: 1108674 - RNA, 19 nt, Artificial Sequence
  Description of Artificial Sequence: Synthetic oligonucleotide
cugcccacccacuuagucu

SEQ ID NO: 1108675 - RNA, 19 nt, Artificial Sequence
  Description of Artificial Sequence: Synthetic oligonucleotide
caaguuccucugauagcaa

SEQ ID NO: 1108676 - RNA, 19 nt, Artificial Sequence
  Description of Artificial Sequence: Synthetic oligonucleotide
aggauuccggacacgucau

SEQ ID NO: 1108677 - RNA, 19 nt, Artificial Sequence
  Description of Artificial Sequence: Synthetic oligonucleotide
agcgcagaccaccggcauu

SEQ ID NO: 1108678 - RNA, 19 nt, Artificial Sequence
  Description of Artificial Sequence: Synthetic oligonucleotide
cguacgucgaucacgaggu

SEQ ID NO: 1108679 - RNA, 19 nt, Artificial Sequence
  Description of Artificial Sequence: Synthetic oligonucleotide
gugacaacucugccaggua

SEQ ID NO: 1108680 - RNA, 19 nt, Artificial Sequence
  Description of Artificial Sequence: Synthetic oligonucleotide
gcagaccaggauuccggac

SEQ ID NO: 1108681 - RNA, 19 nt, Artificial Sequence
  Description of Artificial Sequence: Synthetic oligonucleotide
ggauuccggacacgucaug

SEQ ID NO: 1108682 - RNA, 19 nt, Artificial Sequence
  Description of Artificial Sequence: Synthetic oligonucleotide
ggcaaccgaggaaagccac

SEQ ID NO: 1108683 - RNA, 19 nt, Artificial Sequence
  Description of Artificial Sequence: Synthetic oligonucleotide
ggcagaccaggauuccgga

SEQ ID NO: 1108684 - RNA, 19 nt, Artificial Sequence
  Description of Artificial Sequence: Synthetic oligonucleotide
ccccggacgcuccucagcc

SEQ ID NO: 1108685 - RNA, 19 nt, Artificial Sequence
  Description of Artificial Sequence: Synthetic oligonucleotide
gguggaggugcuguccaac

SEQ ID NO: 1108686 - RNA, 19 nt, Artificial Sequence
  Description of Artificial Sequence: Synthetic oligonucleotide
gcaacaagaugaagagcuc

SEQ ID NO: 1108687 - RNA, 19 nt, Artificial Sequence
  Description of Artificial Sequence: Synthetic oligonucleotide
ccaggacaguuccucgaag

SEQ ID NO: 1108688 - RNA, 19 nt, Artificial Sequence
  Description of Artificial Sequence: Synthetic oligonucleotide
cauagccuguguuauccuu

SEQ ID NO: 1108689 - RNA, 19 nt, Artificial Sequence
  Description of Artificial Sequence: Synthetic oligonucleotide
uagugccgucgcucaccag

SEQ ID NO: 1108690 - RNA, 19 nt, Artificial Sequence
  Description of Artificial Sequence: Synthetic oligonucleotide
gcccguaucccaccacaug

SEQ ID NO: 1108691 - RNA, 19 nt, Artificial Sequence
  Description of Artificial Sequence: Synthetic oligonucleotide
ccgaggaaagccacauuca

SEQ ID NO: 1108692 - RNA, 19 nt, Artificial Sequence
  Description of Artificial Sequence: Synthetic oligonucleotide
cucgcccagcaucccuuug

SEQ ID NO: 1108693 - RNA, 19 nt, Artificial Sequence
  Description of Artificial Sequence: Synthetic oligonucleotide
ggcuugcuauagcugagua

SEQ ID NO: 1108694 - RNA, 19 nt, Artificial Sequence
  Description of Artificial Sequence: Synthetic oligonucleotide
ccucgaagcgagccauacc

SEQ ID NO: 1108695 - RNA, 19 nt, Artificial Sequence
  Description of Artificial Sequence: Synthetic oligonucleotide
guggaaaacggcagccgcu

SEQ ID NO: 1108696 - RNA, 19 nt, Artificial Sequence
  Description of Artificial Sequence: Synthetic oligonucleotide
cacugacacugccccgcug

SEQ ID NO: 1108697 - RNA, 19 nt, Artificial Sequence
  Description of Artificial Sequence: Synthetic oligonucleotide
accaacccuuaaugaccaa

SEQ ID NO: 1108698 - RNA, 19 nt, Artificial Sequence
  Description of Artificial Sequence: Synthetic oligonucleotide
gcaugucuccaguugcucu

SEQ ID NO: 1108699 - RNA, 19 nt, Artificial Sequence
  Description of Artificial Sequence: Synthetic oligonucleotide
ccgucgcucaccaggccag

SEQ ID NO: 1108700 - RNA, 19 nt, Artificial Sequence
  Description of Artificial Sequence: Synthetic oligonucleotide
guacgucgaucacgagguc

SEQ ID NO: 1108701 - RNA, 19 nt, Artificial Sequence
  Description of Artificial Sequence: Synthetic oligonucleotide
guuccucgaagcgagccau

SEQ ID NO: 1108702 - RNA, 19 nt, Artificial Sequence
  Description of Artificial Sequence: Synthetic oligonucleotide
gccauaccgcagaaagcgc

SEQ ID NO: 1108703 - RNA, 19 nt, Artificial Sequence
  Description of Artificial Sequence: Synthetic oligonucleotide
uccgcuguccaggcauaua

SEQ ID NO: 1108704 - RNA, 19 nt, Artificial Sequence
  Description of Artificial Sequence: Synthetic oligonucleotide
ccagguaugaugcguucaa

SEQ ID NO: 1108705 - RNA, 19 nt, Artificial Sequence
  Description of Artificial Sequence: Synthetic oligonucleotide
gccgucgcucaccaggcca

SEQ ID NO: 1108706 - RNA, 19 nt, Artificial Sequence
  Description of Artificial Sequence: Synthetic oligonucleotide
ccugcacguagcgacucag

SEQ ID NO: 1108707 - RNA, 19 nt, Artificial Sequence
  Description of Artificial Sequence: Synthetic oligonucleotide
cauauacauagggcuccaa

SEQ ID NO: 1108708 - RNA, 19 nt, Artificial Sequence
  Description of Artificial Sequence: Synthetic oligonucleotide
aucucgcccagcaucccuu

SEQ ID NO: 1108709 - RNA, 19 nt, Artificial Sequence
  Description of Artificial Sequence: Synthetic oligonucleotide
ccucagacacaguggaaaa

SEQ ID NO: 1108710 - RNA, 19 nt, Artificial Sequence
  Description of Artificial Sequence: Synthetic oligonucleotide
caccgagcaacuccuggcu

SEQ ID NO: 1108711 - RNA, 19 nt, Artificial Sequence
  Description of Artificial Sequence: Synthetic oligonucleotide
gagcgccucugugauucuc

SEQ ID NO: 1108712 - RNA, 19 nt, Artificial Sequence
  Description of Artificial Sequence: Synthetic oligonucleotide
gccgaggcgggugcguacg

SEQ ID NO: 1108713 - RNA, 19 nt, Artificial Sequence
  Description of Artificial Sequence: Synthetic oligonucleotide
cccggguagccaagggaag

SEQ ID NO: 1108714 - RNA, 19 nt, Artificial Sequence
  Description of Artificial Sequence: Synthetic oligonucleotide
cagguaugaugcguucaaa

SEQ ID NO: 1108715 - RNA, 19 nt, Artificial Sequence
  Description of Artificial Sequence: Synthetic oligonucleotide
guaccacuuccaggcccag

SEQ ID NO: 1108716 - RNA, 19 nt, Artificial Sequence
  Description of Artificial Sequence: Synthetic oligonucleotide
gcauauacauagggcucca

SEQ ID NO: 1108717 - RNA, 19 nt, Artificial Sequence
  Description of Artificial Sequence: Synthetic oligonucleotide
cgaagcgagccauaccgca

SEQ ID NO: 1108718 - RNA, 19 nt, Artificial Sequence
  Description of Artificial Sequence: Synthetic oligonucleotide
caugcucagcacugacacu

SEQ ID NO: 1108719 - RNA, 19 nt, Artificial Sequence
  Description of Artificial Sequence: Synthetic oligonucleotide
ggaaacugcccacccacuu

SEQ ID NO: 1108720 - RNA, 19 nt, Artificial Sequence
  Description of Artificial Sequence: Synthetic oligonucleotide
cuuugcucccaaguccagu

SEQ ID NO: 1108721 - RNA, 19 nt, Artificial Sequence
  Description of Artificial Sequence: Synthetic oligonucleotide
cccgagccugcacguagcg

SEQ ID NO: 1108722 - RNA, 19 nt, Artificial Sequence
  Description of Artificial Sequence: Synthetic oligonucleotide
ggaggccucaaggccuacc

SEQ ID NO: 1108723 - RNA, 19 nt, Artificial Sequence
  Description of Artificial Sequence: Synthetic oligonucleotide
gcccaggacaguuccucga

SEQ ID NO: 1108724 - RNA, 19 nt, Artificial Sequence
  Description of Artificial Sequence: Synthetic oligonucleotide
gccaugcucagcacugaca

SEQ ID NO: 1108725 - RNA, 19 nt, Artificial Sequence
  Description of Artificial Sequence: Synthetic oligonucleotide
ccaccaugccaguguuccc

SEQ ID NO: 1108726 - RNA, 19 nt, Artificial Sequence
  Description of Artificial Sequence: Synthetic oligonucleotide
acgaggucauagagccgcu

SEQ ID NO: 1108727 - RNA, 19 nt, Artificial Sequence
  Description of Artificial Sequence: Synthetic oligonucleotide
gcaaccgaggaaagccaca

SEQ ID NO: 1108728 - RNA, 19 nt, Artificial Sequence
  Description of Artificial Sequence: Synthetic oligonucleotide
gggcaaccgaggaaagcca

SEQ ID NO: 1108729 - RNA, 19 nt, Artificial Sequence
  Description of Artificial Sequence: Synthetic oligonucleotide
ccgagcaacuccuggcuaa

SEQ ID NO: 1108730 - RNA, 19 nt, Artificial Sequence
  Description of Artificial Sequence: Synthetic oligonucleotide
ccggcugagcgccucugug

SEQ ID NO: 1108731 - RNA, 19 nt, Artificial Sequence
  Description of Artificial Sequence: Synthetic oligonucleotide
cugccagguaugaugcguu

SEQ ID NO: 1108732 - RNA, 19 nt, Artificial Sequence
  Description of Artificial Sequence: Synthetic oligonucleotide
cacugccccgcugcuccgc

SEQ ID NO: 1108733 - RNA, 19 nt, Artificial Sequence
  Description of Artificial Sequence: Synthetic oligonucleotide
ggacacuuccucggagguc

SEQ ID NO: 1108734 - RNA, 19 nt, Artificial Sequence
  Description of Artificial Sequence: Synthetic oligonucleotide
cgcucaggagucaguauca

SEQ ID NO: 1108735 - RNA, 19 nt, Artificial Sequence
  Description of Artificial Sequence: Synthetic oligonucleotide
ccuuaaugaccaagguccu

SEQ ID NO: 1108736 - RNA, 19 nt, Artificial Sequence
  Description of Artificial Sequence: Synthetic oligonucleotide
gggugcguacgucgaucac

SEQ ID NO: 1108737 - RNA, 19 nt, Artificial Sequence
  Description of Artificial Sequence: Synthetic oligonucleotide
gggauaugucauacuugaa

SEQ ID NO: 1108738 - RNA, 19 nt, Artificial Sequence
  Description of Artificial Sequence: Synthetic oligonucleotide
aggcgggugcguacgucga

SEQ ID NO: 1108739 - RNA, 19 nt, Artificial Sequence
  Description of Artificial Sequence: Synthetic oligonucleotide
guuugggaguggggaaacu

SEQ ID NO: 1108740 - RNA, 19 nt, Artificial Sequence
  Description of Artificial Sequence: Synthetic oligonucleotide
guaucgcucaggagucagu

SEQ ID NO: 1108741 - RNA, 19 nt, Artificial Sequence
  Description of Artificial Sequence: Synthetic oligonucleotide
gcgccucugugauucucuc

SEQ ID NO: 1108742 - RNA, 19 nt, Artificial Sequence
  Description of Artificial Sequence: Synthetic oligonucleotide
gggaagacagcaaccugau

SEQ ID NO: 1108743 - RNA, 19 nt, Artificial Sequence
  Description of Artificial Sequence: Synthetic oligonucleotide
acacgucauggaagcugau

SEQ ID NO: 1108744 - RNA, 19 nt, Artificial Sequence
  Description of Artificial Sequence: Synthetic oligonucleotide
gcgugcccaaugaacagcu

SEQ ID NO: 1108745 - RNA, 19 nt, Artificial Sequence
  Description of Artificial Sequence: Synthetic oligonucleotide
gcgggugcguacgucgauc

SEQ ID NO: 1108746 - RNA, 19 nt, Artificial Sequence
  Description of Artificial Sequence: Synthetic oligonucleotide
ggccgaggcgggugcguac

SEQ ID NO: 1108747 - RNA, 19 nt, Artificial Sequence
  Description of Artificial Sequence: Synthetic oligonucleotide
cccacuuagucugcccaca

SEQ ID NO: 1108748 - RNA, 19 nt, Artificial Sequence
  Description of Artificial Sequence: Synthetic oligonucleotide
ccacuuagucugcccacaa

SEQ ID NO: 1108749 - RNA, 19 nt, Artificial Sequence
  Description of Artificial Sequence: Synthetic oligonucleotide
ccggguagccaagggaaga

SEQ ID NO: 1108750 - RNA, 19 nt, Artificial Sequence
  Description of Artificial Sequence: Synthetic oligonucleotide
caccggcauugguggccac

SEQ ID NO: 1108751 - RNA, 19 nt, Artificial Sequence
  Description of Artificial Sequence: Synthetic oligonucleotide
acguagcgacucagcuccu

SEQ ID NO: 1108752 - RNA, 19 nt, Artificial Sequence
  Description of Artificial Sequence: Synthetic oligonucleotide
ggguaucgcucaggaguca

SEQ ID NO: 1108753 - RNA, 19 nt, Artificial Sequence
  Description of Artificial Sequence: Synthetic oligonucleotide
ccguaucccaccacaugcu

SEQ ID NO: 1108754 - RNA, 19 nt, Artificial Sequence
  Description of Artificial Sequence: Synthetic oligonucleotide
cgggugcguacgucgauca

SEQ ID NO: 1108755 - RNA, 19 nt, Artificial Sequence
  Description of Artificial Sequence: Synthetic oligonucleotide
cugcuccgcuguccaggca

SEQ ID NO: 1108756 - RNA, 19 nt, Artificial Sequence
  Description of Artificial Sequence: Synthetic oligonucleotide
ccagaggguccucacaguu

SEQ ID NO: 1108757 - RNA, 19 nt, Artificial Sequence
  Description of Artificial Sequence: Synthetic oligonucleotide
ccaaggcaccgagcaacuc

SEQ ID NO: 1108758 - RNA, 19 nt, Artificial Sequence
  Description of Artificial Sequence: Synthetic oligonucleotide
ccucuggucgguagccaua

SEQ ID NO: 1108759 - RNA, 19 nt, Artificial Sequence
  Description of Artificial Sequence: Synthetic oligonucleotide
cacagccuugggccugggu

SEQ ID NO: 1108760 - RNA, 19 nt, Artificial Sequence
  Description of Artificial Sequence: Synthetic oligonucleotide
cgcucuacggggagggaua

SEQ ID NO: 1108761 - RNA, 19 nt, Artificial Sequence
  Description of Artificial Sequence: Synthetic oligonucleotide
gccugggugggcacaagau

SEQ ID NO: 1108762 - RNA, 19 nt, Artificial Sequence
  Description of Artificial Sequence: Synthetic oligonucleotide
cccggacgcuccucagcca

SEQ ID NO: 1108763 - RNA, 19 nt, Artificial Sequence
  Description of Artificial Sequence: Synthetic oligonucleotide
ggacaccggucagcuucuc

SEQ ID NO: 1108764 - RNA, 19 nt, Artificial Sequence
  Description of Artificial Sequence: Synthetic oligonucleotide
ccgagccugcacguagcga

SEQ ID NO: 1108765 - RNA, 19 nt, Artificial Sequence
  Description of Artificial Sequence: Synthetic oligonucleotide
ccggucagcuucucagcau

SEQ ID NO: 1108766 - RNA, 19 nt, Artificial Sequence
  Description of Artificial Sequence: Synthetic oligonucleotide
ggcgggugcguacgucgau

SEQ ID NO: 1108767 - RNA, 19 nt, Artificial Sequence
  Description of Artificial Sequence: Synthetic oligonucleotide
cuccgcuguccaggcauau

SEQ ID NO: 1108768 - RNA, 19 nt, Artificial Sequence
  Description of Artificial Sequence: Synthetic oligonucleotide
cgagcaacuccuggcuaaa

SEQ ID NO: 1108769 - RNA, 19 nt, Artificial Sequence
  Description of Artificial Sequence: Synthetic oligonucleotide
cgaggcgggugcguacguc

SEQ ID NO: 1108770 - RNA, 19 nt, Artificial Sequence
  Description of Artificial Sequence: Synthetic oligonucleotide
cguaucccaccacaugcuu

SEQ ID NO: 1108771 - RNA, 19 nt, Artificial Sequence
  Description of Artificial Sequence: Synthetic oligonucleotide
gcuguccaaccaacugcau

SEQ ID NO: 1108772 - RNA, 19 nt, Artificial Sequence
  Description of Artificial Sequence: Synthetic oligonucleotide
ccccagcgugcccaaugaa

SEQ ID NO: 1108773 - RNA, 19 nt, Artificial Sequence
  Description of Artificial Sequence: Synthetic oligonucleotide
gcugagcgccucugugauu

SEQ ID NO: 1108774 - RNA, 19 nt, Artificial Sequence
  Description of Artificial Sequence: Synthetic oligonucleotide
ccggcauugguggccacau

SEQ ID NO: 1108775 - RNA, 19 nt, Artificial Sequence
  Description of Artificial Sequence: Synthetic oligonucleotide
gggccgaggcgggugcgua

SEQ ID NO: 1108776 - RNA, 19 nt, Artificial Sequence
  Description of Artificial Sequence: Synthetic oligonucleotide
gccgcucuacggggaggga

SEQ ID NO: 1108777 - RNA, 19 nt, Artificial Sequence
  Description of Artificial Sequence: Synthetic oligonucleotide
cacgagggccgaggcgggu

SEQ ID NO: 1108778 - RNA, 19 nt, Artificial Sequence
  Description of Artificial Sequence: Synthetic oligonucleotide
ccgcucuacggggagggau

SEQ ID NO: 1108779 - RNA, 19 nt, Artificial Sequence
  Description of Artificial Sequence: Synthetic oligonucleotide
ccgaggcgggugcguacgu

SEQ ID NO: 1108780 - RNA, 19 nt, Artificial Sequence
  Description of Artificial Sequence: Synthetic oligonucleotide
cgucgaucacgaggucaua

SEQ ID NO: 1108781 - RNA, 19 nt, Artificial Sequence
  Description of Artificial Sequence: Synthetic oligonucleotide
ccaucccggcugagcgccu

SEQ ID NO: 1108782 - RNA, 19 nt, Artificial Sequence
  Description of Artificial Sequence: Synthetic oligonucleotide
cggacacgucauggaagcu

SEQ ID NO: 1108783 - RNA, 19 nt, Artificial Sequence
  Description of Artificial Sequence: Synthetic oligonucleotide
uuaggauucguucacagcg

SEQ ID NO: 1108784 - RNA, 19 nt, Artificial Sequence
  Description of Artificial Sequence: Synthetic oligonucleotide
uauuuauuuggccacgugg

SEQ ID NO: 1108785 - RNA, 19 nt, Artificial Sequence
  Description of Artificial Sequence: Synthetic oligonucleotide
augcuaaggacccagugcc

SEQ ID NO: 1108786 - RNA, 19 nt, Artificial Sequence
  Description of Artificial Sequence: Synthetic oligonucleotide
aauaaggugaagucgucug

SEQ ID NO: 1108787 - RNA, 19 nt, Artificial Sequence
  Description of Artificial Sequence: Synthetic oligonucleotide
augucuaugauuuucucug

SEQ ID NO: 1108788 - RNA, 19 nt, Artificial Sequence
  Description of Artificial Sequence: Synthetic oligonucleotide
auuuauuuggccacguggc

SEQ ID NO: 1108789 - RNA, 19 nt, Artificial Sequence
  Description of Artificial Sequence: Synthetic oligonucleotide
uuucccguagggcugaagg

SEQ ID NO: 1108790 - RNA, 19 nt, Artificial Sequence
  Description of Artificial Sequence: Synthetic oligonucleotide
uaugcuaaggacccagugc

SEQ ID NO: 1108791 - RNA, 19 nt, Artificial Sequence
  Description of Artificial Sequence: Synthetic oligonucleotide
uuguaacuuccuaugacag

SEQ ID NO: 1108792 - RNA, 19 nt, Artificial Sequence
  Description of Artificial Sequence: Synthetic oligonucleotide
acagaaaugacugcuucgc

SEQ ID NO: 1108793 - RNA, 19 nt, Artificial Sequence
  Description of Artificial Sequence: Synthetic oligonucleotide
uuuauuuggccacguggcg

SEQ ID NO: 1108794 - RNA, 19 nt, Artificial Sequence
  Description of Artificial Sequence: Synthetic oligonucleotide
aggugaagucgucugagcc

SEQ ID NO: 1108795 - RNA, 19 nt, Artificial Sequence
  Description of Artificial Sequence: Synthetic oligonucleotide
gguuguagcgucuugaugc

SEQ ID NO: 1108796 - RNA, 19 nt, Artificial Sequence
  Description of Artificial Sequence: Synthetic oligonucleotide
accaggauaugcuaaggac

SEQ ID NO: 1108797 - RNA, 19 nt, Artificial Sequence
  Description of Artificial Sequence: Synthetic oligonucleotide
agcuguggaauucuucacc

SEQ ID NO: 1108798 - RNA, 19 nt, Artificial Sequence
  Description of Artificial Sequence: Synthetic oligonucleotide
ugcaccgugucacagcacg

SEQ ID NO: 1108799 - RNA, 19 nt, Artificial Sequence
  Description of Artificial Sequence: Synthetic oligonucleotide
auagucugugcuaagugcc

SEQ ID NO: 1108800 - RNA, 19 nt, Artificial Sequence
  Description of Artificial Sequence: Synthetic oligonucleotide
gaagccaaguauuugccug

SEQ ID NO: 1108801 - RNA, 19 nt, Artificial Sequence
  Description of Artificial Sequence: Synthetic oligonucleotide
uguuguaacuuccuaugac

SEQ ID NO: 1108802 - RNA, 19 nt, Artificial Sequence
  Description of Artificial Sequence: Synthetic oligonucleotide
aguauagaaggccgucccc

SEQ ID NO: 1108803 - RNA, 19 nt, Artificial Sequence
  Description of Artificial Sequence: Synthetic oligonucleotide
aguauuugccuguccugcc

SEQ ID NO: 1108804 - RNA, 19 nt, Artificial Sequence
  Description of Artificial Sequence: Synthetic oligonucleotide
ugucuuucccaccacuugc

SEQ ID NO: 1108805 - RNA, 19 nt, Artificial Sequence
  Description of Artificial Sequence: Synthetic oligonucleotide
uguggaauucuucaccuuc

SEQ ID NO: 1108806 - RNA, 19 nt, Artificial Sequence
  Description of Artificial Sequence: Synthetic oligonucleotide
aaaauggacauggggacca

SEQ ID NO: 1108807 - RNA, 19 nt, Artificial Sequence
  Description of Artificial Sequence: Synthetic oligonucleotide
ucccauaggagaaucuggc

SEQ ID NO: 1108808 - RNA, 19 nt, Artificial Sequence
  Description of Artificial Sequence: Synthetic oligonucleotide
aguuaggauucguucacag

SEQ ID NO: 1108809 - RNA, 19 nt, Artificial Sequence
  Description of Artificial Sequence: Synthetic oligonucleotide
agaguauagaaggccgucc

SEQ ID NO: 1108810 - RNA, 19 nt, Artificial Sequence
  Description of Artificial Sequence: Synthetic oligonucleotide
uaggauucguucacagcgg

SEQ ID NO: 1108811 - RNA, 19 nt, Artificial Sequence
  Description of Artificial Sequence: Synthetic oligonucleotide
gacugcuucgcugugaccc

SEQ ID NO: 1108812 - RNA, 19 nt, Artificial Sequence
  Description of Artificial Sequence: Synthetic oligonucleotide
gauucguucacagcggccc

SEQ ID NO: 1108813 - RNA, 19 nt, Artificial Sequence
  Description of Artificial Sequence: Synthetic oligonucleotide
uggcuuaacuccauguugu

SEQ ID NO: 1108814 - RNA, 19 nt, Artificial Sequence
  Description of Artificial Sequence: Synthetic oligonucleotide
auauaccucaucagcaugg

SEQ ID NO: 1108815 - RNA, 19 nt, Artificial Sequence
  Description of Artificial Sequence: Synthetic oligonucleotide
auggcuuaacuccauguug

SEQ ID NO: 1108816 - RNA, 19 nt, Artificial Sequence
  Description of Artificial Sequence: Synthetic oligonucleotide
ucgggguucaugugaaggg

SEQ ID NO: 1108817 - RNA, 19 nt, Artificial Sequence
  Description of Artificial Sequence: Synthetic oligonucleotide
ucugugcuaagugccaugg

SEQ ID NO: 1108818 - RNA, 19 nt, Artificial Sequence
  Description of Artificial Sequence: Synthetic oligonucleotide
ucguacacugccaucuuug

SEQ ID NO: 1108819 - RNA, 19 nt, Artificial Sequence
  Description of Artificial Sequence: Synthetic oligonucleotide
gaguauagaaggccguccc

SEQ ID NO: 1108820 - RNA, 19 nt, Artificial Sequence
  Description of Artificial Sequence: Synthetic oligonucleotide
caggaauaaggugaagucg

SEQ ID NO: 1108821 - RNA, 19 nt, Artificial Sequence
  Description of Artificial Sequence: Synthetic oligonucleotide
aggauucguucacagcggc

SEQ ID NO: 1108822 - RNA, 19 nt, Artificial Sequence
  Description of Artificial Sequence: Synthetic oligonucleotide
uagaaagcaagggguaagg

SEQ ID NO: 1108823 - RNA, 19 nt, Artificial Sequence
  Description of Artificial Sequence: Synthetic oligonucleotide
ugucucggugcugagaucc

SEQ ID NO: 1108824 - RNA, 19 nt, Artificial Sequence
  Description of Artificial Sequence: Synthetic oligonucleotide
guaacuuccuaugacaguc

SEQ ID NO: 1108825 - RNA, 19 nt, Artificial Sequence
  Description of Artificial Sequence: Synthetic oligonucleotide
gaaauguggugucucggug

SEQ ID NO: 1108826 - RNA, 19 nt, Artificial Sequence
  Description of Artificial Sequence: Synthetic oligonucleotide
ugcaugugaaauguggugu

SEQ ID NO: 1108827 - RNA, 19 nt, Artificial Sequence
  Description of Artificial Sequence: Synthetic oligonucleotide
aguuauuuauuuggccacg

SEQ ID NO: 1108828 - RNA, 19 nt, Artificial Sequence
  Description of Artificial Sequence: Synthetic oligonucleotide
agugcccauggcuuaacuc

SEQ ID NO: 1108829 - RNA, 19 nt, Artificial Sequence
  Description of Artificial Sequence: Synthetic oligonucleotide
agucagaagugcccauggc

SEQ ID NO: 1108830 - RNA, 19 nt, Artificial Sequence
  Description of Artificial Sequence: Synthetic oligonucleotide
ugaugguucgguccuguga

SEQ ID NO: 1108831 - RNA, 19 nt, Artificial Sequence
  Description of Artificial Sequence: Synthetic oligonucleotide
agcgucuugaugcucucuc

SEQ ID NO: 1108832 - RNA, 19 nt, Artificial Sequence
  Description of Artificial Sequence: Synthetic oligonucleotide
ugcugagaucccagaagcg

SEQ ID NO: 1108833 - RNA, 19 nt, Artificial Sequence
  Description of Artificial Sequence: Synthetic oligonucleotide
auaccucaucagcauggcc

SEQ ID NO: 1108834 - RNA, 19 nt, Artificial Sequence
  Description of Artificial Sequence: Synthetic oligonucleotide
aagccaaguauuugccugu

SEQ ID NO: 1108835 - RNA, 19 nt, Artificial Sequence
  Description of Artificial Sequence: Synthetic oligonucleotide
aguugugucccacacucgu

SEQ ID NO: 1108836 - RNA, 19 nt, Artificial Sequence
  Description of Artificial Sequence: Synthetic oligonucleotide
agaguguaggcccgcacag

SEQ ID NO: 1108837 - RNA, 19 nt, Artificial Sequence
  Description of Artificial Sequence: Synthetic oligonucleotide
gaugguucgguccugugaa

SEQ ID NO: 1108838 - RNA, 19 nt, Artificial Sequence
  Description of Artificial Sequence: Synthetic oligonucleotide
uguaacuuccuaugacagu

SEQ ID NO: 1108839 - RNA, 19 nt, Artificial Sequence
  Description of Artificial Sequence: Synthetic oligonucleotide
cugucauccgugcaagggg

SEQ ID NO: 1108840 - RNA, 19 nt, Artificial Sequence
  Description of Artificial Sequence: Synthetic oligonucleotide
ggaaaauggacauggggac

SEQ ID NO: 1108841 - RNA, 19 nt, Artificial Sequence
  Description of Artificial Sequence: Synthetic oligonucleotide
aggaauaaggugaagucgu

SEQ ID NO: 1108842 - RNA, 19 nt, Artificial Sequence
  Description of Artificial Sequence: Synthetic oligonucleotide
aucguggacauagaaagca

SEQ ID NO: 1108843 - RNA, 19 nt, Artificial Sequence
  Description of Artificial Sequence: Synthetic oligonucleotide
agacuuugaugguucgguc

SEQ ID NO: 1108844 - RNA, 19 nt, Artificial Sequence
  Description of Artificial Sequence: Synthetic oligonucleotide
aguccggcacagcacaccg

SEQ ID NO: 1108845 - RNA, 19 nt, Artificial Sequence
  Description of Artificial Sequence: Synthetic oligonucleotide
guuaggauucguucacagc

SEQ ID NO: 1108846 - RNA, 19 nt, Artificial Sequence
  Description of Artificial Sequence: Synthetic oligonucleotide
cuaugacagucacauguag

SEQ ID NO: 1108847 - RNA, 19 nt, Artificial Sequence
  Description of Artificial Sequence: Synthetic oligonucleotide
ccaggauaugcuaaggacc

SEQ ID NO: 1108848 - RNA, 19 nt, Artificial Sequence
  Description of Artificial Sequence: Synthetic oligonucleotide
uuauuuggccacguggcga

SEQ ID NO: 1108849 - RNA, 19 nt, Artificial Sequence
  Description of Artificial Sequence: Synthetic oligonucleotide
auaaggugaagucgucuga

SEQ ID NO: 1108850 - RNA, 19 nt, Artificial Sequence
  Description of Artificial Sequence: Synthetic oligonucleotide
cauauaccucaucagcaug

SEQ ID NO: 1108851 - RNA, 19 nt, Artificial Sequence
  Description of Artificial Sequence: Synthetic oligonucleotide
uccggcgugauguccacag

SEQ ID NO: 1108852 - RNA, 19 nt, Artificial Sequence
  Description of Artificial Sequence: Synthetic oligonucleotide
aagguuguagcgucuugau

SEQ ID NO: 1108853 - RNA, 19 nt, Artificial Sequence
  Description of Artificial Sequence: Synthetic oligonucleotide
cacguggcgaggcugagag

SEQ ID NO: 1108854 - RNA, 19 nt, Artificial Sequence
  Description of Artificial Sequence: Synthetic oligonucleotide
uccacgaagggaagccaag

SEQ ID NO: 1108855 - RNA, 19 nt, Artificial Sequence
  Description of Artificial Sequence: Synthetic oligonucleotide
acgaagggaagccaaguau

SEQ ID NO: 1108856 - RNA, 19 nt, Artificial Sequence
  Description of Artificial Sequence: Synthetic oligonucleotide
cuucaaggaccccuucagg

SEQ ID NO: 1108857 - RNA, 19 nt, Artificial Sequence
  Description of Artificial Sequence: Synthetic oligonucleotide
acggacucugaagauugcc

SEQ ID NO: 1108858 - RNA, 19 nt, Artificial Sequence
  Description of Artificial Sequence: Synthetic oligonucleotide
cugugcuugggucccauag

SEQ ID NO: 1108859 - RNA, 19 nt, Artificial Sequence
  Description of Artificial Sequence: Synthetic oligonucleotide
aaaugacugcuucgcugug

SEQ ID NO: 1108860 - RNA, 19 nt, Artificial Sequence
  Description of Artificial Sequence: Synthetic oligonucleotide
agucgcugcacgucgcccg

SEQ ID NO: 1108861 - RNA, 19 nt, Artificial Sequence
  Description of Artificial Sequence: Synthetic oligonucleotide
agcagugcguugcacacga

SEQ ID NO: 1108862 - RNA, 19 nt, Artificial Sequence
  Description of Artificial Sequence: Synthetic oligonucleotide
cagucagaagugcccaugg

SEQ ID NO: 1108863 - RNA, 19 nt, Artificial Sequence
  Description of Artificial Sequence: Synthetic oligonucleotide
ugcguugcacacgagcugc

SEQ ID NO: 1108864 - RNA, 19 nt, Artificial Sequence
  Description of Artificial Sequence: Synthetic oligonucleotide
ucgucugagccagauacca

SEQ ID NO: 1108865 - RNA, 19 nt, Artificial Sequence
  Description of Artificial Sequence: Synthetic oligonucleotide
cugaguccagguaagguca

SEQ ID NO: 1108866 - RNA, 19 nt, Artificial Sequence
  Description of Artificial Sequence: Synthetic oligonucleotide
uuuguucucuggcggggca

SEQ ID NO: 1108867 - RNA, 19 nt, Artificial Sequence
  Description of Artificial Sequence: Synthetic oligonucleotide
accgugucacagcacggac

SEQ ID NO: 1108868 - RNA, 19 nt, Artificial Sequence
  Description of Artificial Sequence: Synthetic oligonucleotide
caucguggacauagaaagc

SEQ ID NO: 1108869 - RNA, 19 nt, Artificial Sequence
  Description of Artificial Sequence: Synthetic oligonucleotide
aggcaggugaccgacugcg

SEQ ID NO: 1108870 - RNA, 19 nt, Artificial Sequence
  Description of Artificial Sequence: Synthetic oligonucleotide
guccuuugcaugugaaaug

SEQ ID NO: 1108871 - RNA, 19 nt, Artificial Sequence
  Description of Artificial Sequence: Synthetic oligonucleotide
caugugaaggggcucccag

SEQ ID NO: 1108872 - RNA, 19 nt, Artificial Sequence
  Description of Artificial Sequence: Synthetic oligonucleotide
auucguucacagcggcccg

SEQ ID NO: 1108873 - RNA, 19 nt, Artificial Sequence
  Description of Artificial Sequence: Synthetic oligonucleotide
uccauguuguaacuuccua

SEQ ID NO: 1108874 - RNA, 19 nt, Artificial Sequence
  Description of Artificial Sequence: Synthetic oligonucleotide
uauaccucaucagcauggc

SEQ ID NO: 1108875 - RNA, 19 nt, Artificial Sequence
  Description of Artificial Sequence: Synthetic oligonucleotide
gugaaauguggugucucgg

SEQ ID NO: 1108876 - RNA, 19 nt, Artificial Sequence
  Description of Artificial Sequence: Synthetic oligonucleotide
gagaguguaggcccgcaca

SEQ ID NO: 1108877 - RNA, 19 nt, Artificial Sequence
  Description of Artificial Sequence: Synthetic oligonucleotide
uucccguagggcugaaggc

SEQ ID NO: 1108878 - RNA, 19 nt, Artificial Sequence
  Description of Artificial Sequence: Synthetic oligonucleotide
aaugacugcuucgcuguga

SEQ ID NO: 1108879 - RNA, 19 nt, Artificial Sequence
  Description of Artificial Sequence: Synthetic oligonucleotide
ugcuugggucccauaggag

SEQ ID NO: 1108880 - RNA, 19 nt, Artificial Sequence
  Description of Artificial Sequence: Synthetic oligonucleotide
ggcaaucugguacacagca

SEQ ID NO: 1108881 - RNA, 19 nt, Artificial Sequence
  Description of Artificial Sequence: Synthetic oligonucleotide
gucccauaggagaaucugg

SEQ ID NO: 1108882 - RNA, 19 nt, Artificial Sequence
  Description of Artificial Sequence: Synthetic oligonucleotide
ucccguagggcugaaggcc

SEQ ID NO: 1108883 - RNA, 19 nt, Artificial Sequence
  Description of Artificial Sequence: Synthetic oligonucleotide
gucacauguagaccgccug

SEQ ID NO: 1108884 - RNA, 19 nt, Artificial Sequence
  Description of Artificial Sequence: Synthetic oligonucleotide
uuguccggcgugaugucca

SEQ ID NO: 1108885 - RNA, 19 nt, Artificial Sequence
  Description of Artificial Sequence: Synthetic oligonucleotide
gguacuuucccguagggcu

SEQ ID NO: 1108886 - RNA, 19 nt, Artificial Sequence
  Description of Artificial Sequence: Synthetic oligonucleotide
agugcguugcacacgagcu

SEQ ID NO: 1108887 - RNA, 19 nt, Artificial Sequence
  Description of Artificial Sequence: Synthetic oligonucleotide
uccggcacagcacaccguc

SEQ ID NO: 1108888 - RNA, 19 nt, Artificial Sequence
  Description of Artificial Sequence: Synthetic oligonucleotide
ggaauucuucaccuucucc

SEQ ID NO: 1108889 - RNA, 19 nt, Artificial Sequence
  Description of Artificial Sequence: Synthetic oligonucleotide
ugcccauggcuuaacucca

SEQ ID NO: 1108890 - RNA, 19 nt, Artificial Sequence
  Description of Artificial Sequence: Synthetic oligonucleotide
cagugcguugcacacgagc

SEQ ID NO: 1108891 - RNA, 19 nt, Artificial Sequence
  Description of Artificial Sequence: Synthetic oligonucleotide
ucguggacauagaaagcaa

SEQ ID NO: 1108892 - RNA, 19 nt, Artificial Sequence
  Description of Artificial Sequence: Synthetic oligonucleotide
gcaguugugucccacacuc

SEQ ID NO: 1108893 - RNA, 19 nt, Artificial Sequence
  Description of Artificial Sequence: Synthetic oligonucleotide
augaccuugaagaguccgg

SEQ ID NO: 1108894 - RNA, 19 nt, Artificial Sequence
  Description of Artificial Sequence: Synthetic oligonucleotide
cuagcagccggcugucagc

SEQ ID NO: 1108895 - RNA, 19 nt, Artificial Sequence
  Description of Artificial Sequence: Synthetic oligonucleotide
cacguguccacgaagggaa

SEQ ID NO: 1108896 - RNA, 19 nt, Artificial Sequence
  Description of Artificial Sequence: Synthetic oligonucleotide
accgucaugggcccuccag

SEQ ID NO: 1108897 - RNA, 19 nt, Artificial Sequence
  Description of Artificial Sequence: Synthetic oligonucleotide
acaagguuguagcgucuug

SEQ ID NO: 1108898 - RNA, 19 nt, Artificial Sequence
  Description of Artificial Sequence: Synthetic oligonucleotide
uggccagguacuuucccgu

SEQ ID NO: 1108899 - RNA, 19 nt, Artificial Sequence
  Description of Artificial Sequence: Synthetic oligonucleotide
aacugcacgagcagucgcu

SEQ ID NO: 1108900 - RNA, 19 nt, Artificial Sequence
  Description of Artificial Sequence: Synthetic oligonucleotide
acacucguacacugccauc

SEQ ID NO: 1108901 - RNA, 19 nt, Artificial Sequence
  Description of Artificial Sequence: Synthetic oligonucleotide
ggauaugcuaaggacccag

SEQ ID NO: 1108902 - RNA, 19 nt, Artificial Sequence
  Description of Artificial Sequence: Synthetic oligonucleotide
ugguguccugucauccgug

SEQ ID NO: 1108903 - RNA, 19 nt, Artificial Sequence
  Description of Artificial Sequence: Synthetic oligonucleotide
aaggacccagugccggugu

SEQ ID NO: 1108904 - RNA, 19 nt, Artificial Sequence
  Description of Artificial Sequence: Synthetic oligonucleotide
ucgguccugugaagcagag

SEQ ID NO: 1108905 - RNA, 19 nt, Artificial Sequence
  Description of Artificial Sequence: Synthetic oligonucleotide
ugaccgacugcgugugccc

SEQ ID NO: 1108906 - RNA, 19 nt, Artificial Sequence
  Description of Artificial Sequence: Synthetic oligonucleotide
cagguacuuucccguaggg

SEQ ID NO: 1108907 - RNA, 19 nt, Artificial Sequence
  Description of Artificial Sequence: Synthetic oligonucleotide
ucccacacucguacacugc

SEQ ID NO: 1108908 - RNA, 19 nt, Artificial Sequence
  Description of Artificial Sequence: Synthetic oligonucleotide
aaauggacauggggaccag

SEQ ID NO: 1108909 - RNA, 19 nt, Artificial Sequence
  Description of Artificial Sequence: Synthetic oligonucleotide
aguccagguaaggucagga

SEQ ID NO: 1108910 - RNA, 19 nt, Artificial Sequence
  Description of Artificial Sequence: Synthetic oligonucleotide
guauuugccuguccugcca

SEQ ID NO: 1108911 - RNA, 19 nt, Artificial Sequence
  Description of Artificial Sequence: Synthetic oligonucleotide
ugcgugugcccaguuagga

SEQ ID NO: 1108912 - RNA, 19 nt, Artificial Sequence
  Description of Artificial Sequence: Synthetic oligonucleotide
acagucagaagugcccaug

SEQ ID NO: 1108913 - RNA, 19 nt, Artificial Sequence
  Description of Artificial Sequence: Synthetic oligonucleotide
uuuggccacguggcgaggc

SEQ ID NO: 1108914 - RNA, 19 nt, Artificial Sequence
  Description of Artificial Sequence: Synthetic oligonucleotide
cuugggucccauaggagaa

SEQ ID NO: 1108915 - RNA, 19 nt, Artificial Sequence
  Description of Artificial Sequence: Synthetic oligonucleotide
caguugugucccacacucg

SEQ ID NO: 1108916 - RNA, 19 nt, Artificial Sequence
  Description of Artificial Sequence: Synthetic oligonucleotide
ucgcugugacccuccaaug

SEQ ID NO: 1108917 - RNA, 19 nt, Artificial Sequence
  Description of Artificial Sequence: Synthetic oligonucleotide
uugaugguucgguccugug

SEQ ID NO: 1108918 - RNA, 19 nt, Artificial Sequence
  Description of Artificial Sequence: Synthetic oligonucleotide
uaaggacccagugccggug

SEQ ID NO: 1108919 - RNA, 19 nt, Artificial Sequence
  Description of Artificial Sequence: Synthetic oligonucleotide
agagcaccugguugaucag

SEQ ID NO: 1108920 - RNA, 19 nt, Artificial Sequence
  Description of Artificial Sequence: Synthetic oligonucleotide
gcuugggucccauaggaga

SEQ ID NO: 1108921 - RNA, 19 nt, Artificial Sequence
  Description of Artificial Sequence: Synthetic oligonucleotide
cugugcgcagggcauaguc

SEQ ID NO: 1108922 - RNA, 19 nt, Artificial Sequence
  Description of Artificial Sequence: Synthetic oligonucleotide
ugcuucgcugugacccucc

SEQ ID NO: 1108923 - RNA, 19 nt, Artificial Sequence
  Description of Artificial Sequence: Synthetic oligonucleotide
cacgauucgggagucagga

SEQ ID NO: 1108924 - RNA, 19 nt, Artificial Sequence
  Description of Artificial Sequence: Synthetic oligonucleotide
acgauucgggagucaggag

SEQ ID NO: 1108925 - RNA, 19 nt, Artificial Sequence
  Description of Artificial Sequence: Synthetic oligonucleotide
guacuuucccguagggcug

SEQ ID NO: 1108926 - RNA, 19 nt, Artificial Sequence
  Description of Artificial Sequence: Synthetic oligonucleotide
cugcgugugcccaguuagg

SEQ ID NO: 1108927 - RNA, 19 nt, Artificial Sequence
  Description of Artificial Sequence: Synthetic oligonucleotide
gaccuugaagaguccggca

SEQ ID NO: 1108928 - RNA, 19 nt, Artificial Sequence
  Description of Artificial Sequence: Synthetic oligonucleotide
cacuugcuacucucuggcc

SEQ ID NO: 1108929 - RNA, 19 nt, Artificial Sequence
  Description of Artificial Sequence: Synthetic oligonucleotide
ucuggcggggcaggcagag

SEQ ID NO: 1108930 - RNA, 19 nt, Artificial Sequence
  Description of Artificial Sequence: Synthetic oligonucleotide
gacuccagucaacagcaua

SEQ ID NO: 1108931 - RNA, 19 nt, Artificial Sequence
  Description of Artificial Sequence: Synthetic oligonucleotide
ucccacagcuugauggauu

SEQ ID NO: 1108932 - RNA, 19 nt, Artificial Sequence
  Description of Artificial Sequence: Synthetic oligonucleotide
ggaacugcacgagcagucg

SEQ ID NO: 1108933 - RNA, 19 nt, Artificial Sequence
  Description of Artificial Sequence: Synthetic oligonucleotide
uuccuaugacagucacaug

SEQ ID NO: 1108934 - RNA, 19 nt, Artificial Sequence
  Description of Artificial Sequence: Synthetic oligonucleotide
acugcuucgcugugacccu

SEQ ID NO: 1108935 - RNA, 19 nt, Artificial Sequence
  Description of Artificial Sequence: Synthetic oligonucleotide
augguucgguccugugaag

SEQ ID NO: 1108936 - RNA, 19 nt, Artificial Sequence
  Description of Artificial Sequence: Synthetic oligonucleotide
caagguuguagcgucuuga

SEQ ID NO: 1108937 - RNA, 19 nt, Artificial Sequence
  Description of Artificial Sequence: Synthetic oligonucleotide
uguccacgaagggaagcca

SEQ ID NO: 1108938 - RNA, 19 nt, Artificial Sequence
  Description of Artificial Sequence: Synthetic oligonucleotide
gucugugcuaagugccaug

SEQ ID NO: 1108939 - RNA, 19 nt, Artificial Sequence
  Description of Artificial Sequence: Synthetic oligonucleotide
agggcauagucugugcuaa

SEQ ID NO: 1108940 - RNA, 19 nt, Artificial Sequence
  Description of Artificial Sequence: Synthetic oligonucleotide
cagaguauagaaggccguc

SEQ ID NO: 1108941 - RNA, 19 nt, Artificial Sequence
  Description of Artificial Sequence: Synthetic oligonucleotide
guaaggucaggaagcugug

SEQ ID NO: 1108942 - RNA, 19 nt, Artificial Sequence
  Description of Artificial Sequence: Synthetic oligonucleotide
ggucccauaggagaaucug

SEQ ID NO: 1108943 - RNA, 19 nt, Artificial Sequence
  Description of Artificial Sequence: Synthetic oligonucleotide
ucggugcugagaucccaga

SEQ ID NO: 1108944 - RNA, 19 nt, Artificial Sequence
  Description of Artificial Sequence: Synthetic oligonucleotide
ccaccuguauucuuuguuc

SEQ ID NO: 1108945 - RNA, 19 nt, Artificial Sequence
  Description of Artificial Sequence: Synthetic oligonucleotide
caccacuugcuacucucug

SEQ ID NO: 1108946 - RNA, 19 nt, Artificial Sequence
  Description of Artificial Sequence: Synthetic oligonucleotide
cacgagcagucgcugcacg

SEQ ID NO: 1108947 - RNA, 19 nt, Artificial Sequence
  Description of Artificial Sequence: Synthetic oligonucleotide
ugcacgucgcccgccgccg

SEQ ID NO: 1108948 - RNA, 19 nt, Artificial Sequence
  Description of Artificial Sequence: Synthetic oligonucleotide
cgugauguccacaggcacg

SEQ ID NO: 1108949 - RNA, 19 nt, Artificial Sequence
  Description of Artificial Sequence: Synthetic oligonucleotide
ugugcccaguuaggauucg

SEQ ID NO: 1108950 - RNA, 19 nt, Artificial Sequence
  Description of Artificial Sequence: Synthetic oligonucleotide
cacaggaauaaggugaagu

SEQ ID NO: 1108951 - RNA, 19 nt, Artificial Sequence
  Description of Artificial Sequence: Synthetic oligonucleotide
ccagguacuuucccguagg

SEQ ID NO: 1108952 - RNA, 19 nt, Artificial Sequence
  Description of Artificial Sequence: Synthetic oligonucleotide
cauaggagaaucuggccau

SEQ ID NO: 1108953 - RNA, 19 nt, Artificial Sequence
  Description of Artificial Sequence: Synthetic oligonucleotide
aggcacgucgaauggggaa

SEQ ID NO: 1108954 - RNA, 19 nt, Artificial Sequence
  Description of Artificial Sequence: Synthetic oligonucleotide
acgagcagucgcugcacgu

SEQ ID NO: 1108955 - RNA, 19 nt, Artificial Sequence
  Description of Artificial Sequence: Synthetic oligonucleotide
uacuuucccguagggcuga

SEQ ID NO: 1108956 - RNA, 19 nt, Artificial Sequence
  Description of Artificial Sequence: Synthetic oligonucleotide
agcagucgcugcacgucgc

SEQ ID NO: 1108957 - RNA, 19 nt, Artificial Sequence
  Description of Artificial Sequence: Synthetic oligonucleotide
cccuccaaugagcuggugc

SEQ ID NO: 1108958 - RNA, 19 nt, Artificial Sequence
  Description of Artificial Sequence: Synthetic oligonucleotide
gaguccggcacagcacacc

SEQ ID NO: 1108959 - RNA, 19 nt, Artificial Sequence
  Description of Artificial Sequence: Synthetic oligonucleotide
uucguucacagcggcccgc

SEQ ID NO: 1108960 - RNA, 19 nt, Artificial Sequence
  Description of Artificial Sequence: Synthetic oligonucleotide
cacggacucugaagauugc

SEQ ID NO: 1108961 - RNA, 19 nt, Artificial Sequence
  Description of Artificial Sequence: Synthetic oligonucleotide
ggcacuggccacgauucgg

SEQ ID NO: 1108962 - RNA, 19 nt, Artificial Sequence
  Description of Artificial Sequence: Synthetic oligonucleotide
gaguguaggcccgcacagc

SEQ ID NO: 1108963 - RNA, 19 nt, Artificial Sequence
  Description of Artificial Sequence: Synthetic oligonucleotide
uugaagaguccggcacagc

SEQ ID NO: 1108964 - RNA, 19 nt, Artificial Sequence
  Description of Artificial Sequence: Synthetic oligonucleotide
agcggcccgcaguuguguc

SEQ ID NO: 1108965 - RNA, 19 nt, Artificial Sequence
  Description of Artificial Sequence: Synthetic oligonucleotide
agccagauaccagccucuc

SEQ ID NO: 1108966 - RNA, 19 nt, Artificial Sequence
  Description of Artificial Sequence: Synthetic oligonucleotide
acugcacgagcagucgcug

SEQ ID NO: 1108967 - RNA, 19 nt, Artificial Sequence
  Description of Artificial Sequence: Synthetic oligonucleotide
ggaccaggauaugcuaagg

SEQ ID NO: 1108968 - RNA, 19 nt, Artificial Sequence
  Description of Artificial Sequence: Synthetic oligonucleotide
cgaccaggcaaucugguac

SEQ ID NO: 1108969 - RNA, 19 nt, Artificial Sequence
  Description of Artificial Sequence: Synthetic oligonucleotide
gucgaauggggaacccagc

SEQ ID NO: 1108970 - RNA, 19 nt, Artificial Sequence
  Description of Artificial Sequence: Synthetic oligonucleotide
acucgggguucaugugaag

SEQ ID NO: 1108971 - RNA, 19 nt, Artificial Sequence
  Description of Artificial Sequence: Synthetic oligonucleotide
cauauccggagacacuugu

SEQ ID NO: 1108972 - RNA, 19 nt, Artificial Sequence
  Description of Artificial Sequence: Synthetic oligonucleotide
guuauuuauuuggccacgu

SEQ ID NO: 1108973 - RNA, 19 nt, Artificial Sequence
  Description of Artificial Sequence: Synthetic oligonucleotide
ugggucccauaggagaauc

SEQ ID NO: 1108974 - RNA, 19 nt, Artificial Sequence
  Description of Artificial Sequence: Synthetic oligonucleotide
cauguagaccgccuguccu

SEQ ID NO: 1108975 - RNA, 19 nt, Artificial Sequence
  Description of Artificial Sequence: Synthetic oligonucleotide
guuguagcgucuugaugcu

SEQ ID NO: 1108976 - RNA, 19 nt, Artificial Sequence
  Description of Artificial Sequence: Synthetic oligonucleotide
cccaguuaggauucguuca

SEQ ID NO: 1108977 - RNA, 19 nt, Artificial Sequence
  Description of Artificial Sequence: Synthetic oligonucleotide
caucuggggaccaggauau

SEQ ID NO: 1108978 - RNA, 19 nt, Artificial Sequence
  Description of Artificial Sequence: Synthetic oligonucleotide
ccccgcacaagguuguagc

SEQ ID NO: 1108979 - RNA, 19 nt, Artificial Sequence
  Description of Artificial Sequence: Synthetic oligonucleotide
agaguccggcacagcacac

SEQ ID NO: 1108980 - RNA, 19 nt, Artificial Sequence
  Description of Artificial Sequence: Synthetic oligonucleotide
gcccaguuaggauucguuc

SEQ ID NO: 1108981 - RNA, 19 nt, Artificial Sequence
  Description of Artificial Sequence: Synthetic oligonucleotide
gucgucugagccagauacc

SEQ ID NO: 1108982 - RNA, 19 nt, Artificial Sequence
  Description of Artificial Sequence: Synthetic oligonucleotide
gccagguacuuucccguag

SEQ ID NO: 1108983 - RNA, 19 nt, Artificial Sequence
  Description of Artificial Sequence: Synthetic oligonucleotide
cugcacgucgcccgccgcc

SEQ ID NO: 1108984 - RNA, 19 nt, Artificial Sequence
  Description of Artificial Sequence: Synthetic oligonucleotide
cgucgaauggggaacccag

SEQ ID NO: 1108985 - RNA, 19 nt, Artificial Sequence
  Description of Artificial Sequence: Synthetic oligonucleotide
gcuguggaauucuucaccu

SEQ ID NO: 1108986 - RNA, 19 nt, Artificial Sequence
  Description of Artificial Sequence: Synthetic oligonucleotide
agguaaggucaggaagcug

SEQ ID NO: 1108987 - RNA, 19 nt, Artificial Sequence
  Description of Artificial Sequence: Synthetic oligonucleotide
ucccaccacuugcuacucu

SEQ ID NO: 1108988 - RNA, 19 nt, Artificial Sequence
  Description of Artificial Sequence: Synthetic oligonucleotide
aggugaccgacugcgugug

SEQ ID NO: 1108989 - RNA, 19 nt, Artificial Sequence
  Description of Artificial Sequence: Synthetic oligonucleotide
cccgcacaagguuguagcg

SEQ ID NO: 1108990 - RNA, 19 nt, Artificial Sequence
  Description of Artificial Sequence: Synthetic oligonucleotide
gcacacgagcugcagcuug

SEQ ID NO: 1108991 - RNA, 19 nt, Artificial Sequence
  Description of Artificial Sequence: Synthetic oligonucleotide
ucguucacagcggcccgca

SEQ ID NO: 1108992 - RNA, 19 nt, Artificial Sequence
  Description of Artificial Sequence: Synthetic oligonucleotide
ggugucucggugcugagau

SEQ ID NO: 1108993 - RNA, 19 nt, Artificial Sequence
  Description of Artificial Sequence: Synthetic oligonucleotide
gccagugaggguccugccc

SEQ ID NO: 1108994 - RNA, 19 nt, Artificial Sequence
  Description of Artificial Sequence: Synthetic oligonucleotide
gaagugcccauggcuuaac

SEQ ID NO: 1108995 - RNA, 19 nt, Artificial Sequence
  Description of Artificial Sequence: Synthetic oligonucleotide
gauaugcuaaggacccagu

SEQ ID NO: 1108996 - RNA, 19 nt, Artificial Sequence
  Description of Artificial Sequence: Synthetic oligonucleotide
acgucgaauggggaaccca

SEQ ID NO: 1108997 - RNA, 19 nt, Artificial Sequence
  Description of Artificial Sequence: Synthetic oligonucleotide
uguccggcgugauguccac

SEQ ID NO: 1108998 - RNA, 19 nt, Artificial Sequence
  Description of Artificial Sequence: Synthetic oligonucleotide
ggcacgucgaauggggaac

SEQ ID NO: 1108999 - RNA, 19 nt, Artificial Sequence
  Description of Artificial Sequence: Synthetic oligonucleotide
uucaggucuugggcauuca

SEQ ID NO: 1109000 - RNA, 19 nt, Artificial Sequence
  Description of Artificial Sequence: Synthetic oligonucleotide
agcggaggcaggugaccga

SEQ ID NO: 1109001 - RNA, 19 nt, Artificial Sequence
  Description of Artificial Sequence: Synthetic oligonucleotide
gccacgauucgggagucag

SEQ ID NO: 1109002 - RNA, 19 nt, Artificial Sequence
  Description of Artificial Sequence: Synthetic oligonucleotide
cguggcgaggcugagagug

SEQ ID NO: 1109003 - RNA, 19 nt, Artificial Sequence
  Description of Artificial Sequence: Synthetic oligonucleotide
cuugcuacucucuggccau

SEQ ID NO: 1109004 - RNA, 19 nt, Artificial Sequence
  Description of Artificial Sequence: Synthetic oligonucleotide
ugacuagcagccggcuguc

SEQ ID NO: 1109005 - RNA, 19 nt, Artificial Sequence
  Description of Artificial Sequence: Synthetic oligonucleotide
gcaucccugugcuuggguc

SEQ ID NO: 1109006 - RNA, 19 nt, Artificial Sequence
  Description of Artificial Sequence: Synthetic oligonucleotide
aggauaugcuaaggaccca

SEQ ID NO: 1109007 - RNA, 19 nt, Artificial Sequence
  Description of Artificial Sequence: Synthetic oligonucleotide
gggccuucacaucccacac

SEQ ID NO: 1109008 - RNA, 19 nt, Artificial Sequence
  Description of Artificial Sequence: Synthetic oligonucleotide
cauggcuuaacuccauguu

SEQ ID NO: 1109009 - RNA, 19 nt, Artificial Sequence
  Description of Artificial Sequence: Synthetic oligonucleotide
guggaauucuucaccuucu

SEQ ID NO: 1109010 - RNA, 19 nt, Artificial Sequence
  Description of Artificial Sequence: Synthetic oligonucleotide
cacucgggguucaugugaa

SEQ ID NO: 1109011 - RNA, 19 nt, Artificial Sequence
  Description of Artificial Sequence: Synthetic oligonucleotide
ggaauaaggugaagucguc

SEQ ID NO: 1109012 - RNA, 19 nt, Artificial Sequence
  Description of Artificial Sequence: Synthetic oligonucleotide
uuguagcgucuugaugcuc

SEQ ID NO: 1109013 - RNA, 19 nt, Artificial Sequence
  Description of Artificial Sequence: Synthetic oligonucleotide
cgcacaagguuguagcguc

SEQ ID NO: 1109014 - RNA, 19 nt, Artificial Sequence
  Description of Artificial Sequence: Synthetic oligonucleotide
uugggucccauaggagaau

SEQ ID NO: 1109015 - RNA, 19 nt, Artificial Sequence
  Description of Artificial Sequence: Synthetic oligonucleotide
cagcaucguggacauagaa

SEQ ID NO: 1109016 - RNA, 19 nt, Artificial Sequence
  Description of Artificial Sequence: Synthetic oligonucleotide
gacugcgugugcccaguua

SEQ ID NO: 1109017 - RNA, 19 nt, Artificial Sequence
  Description of Artificial Sequence: Synthetic oligonucleotide
uggccacguggcgaggcug

SEQ ID NO: 1109018 - RNA, 19 nt, Artificial Sequence
  Description of Artificial Sequence: Synthetic oligonucleotide
cauccgugcaaggggcuuc

SEQ ID NO: 1109019 - RNA, 19 nt, Artificial Sequence
  Description of Artificial Sequence: Synthetic oligonucleotide
uagcgucuugaugcucucu

SEQ ID NO: 1109020 - RNA, 19 nt, Artificial Sequence
  Description of Artificial Sequence: Synthetic oligonucleotide
cacgucgaauggggaaccc

SEQ ID NO: 1109021 - RNA, 19 nt, Artificial Sequence
  Description of Artificial Sequence: Synthetic oligonucleotide
ccacgauucgggagucagg

SEQ ID NO: 1109022 - RNA, 19 nt, Artificial Sequence
  Description of Artificial Sequence: Synthetic oligonucleotide
ccuuugcaugugaaaugug

SEQ ID NO: 1109023 - RNA, 19 nt, Artificial Sequence
  Description of Artificial Sequence: Synthetic oligonucleotide
cagucgcugcacgucgccc

SEQ ID NO: 1109024 - RNA, 19 nt, Artificial Sequence
  Description of Artificial Sequence: Synthetic oligonucleotide
gaaggccguccccucccca

SEQ ID NO: 1109025 - RNA, 19 nt, Artificial Sequence
  Description of Artificial Sequence: Synthetic oligonucleotide
cggcgugauguccacaggc

SEQ ID NO: 1109026 - RNA, 19 nt, Artificial Sequence
  Description of Artificial Sequence: Synthetic oligonucleotide
cagaaaugacugcuucgcu

SEQ ID NO: 1109027 - RNA, 19 nt, Artificial Sequence
  Description of Artificial Sequence: Synthetic oligonucleotide
ggcacagcacaccgucaug

SEQ ID NO: 1109028 - RNA, 19 nt, Artificial Sequence
  Description of Artificial Sequence: Synthetic oligonucleotide
ugccaucccacagcuugau

SEQ ID NO: 1109029 - RNA, 19 nt, Artificial Sequence
  Description of Artificial Sequence: Synthetic oligonucleotide
auaggagaaucuggccauu

SEQ ID NO: 1109030 - RNA, 19 nt, Artificial Sequence
  Description of Artificial Sequence: Synthetic oligonucleotide
caggugaccgacugcgugu

SEQ ID NO: 1109031 - RNA, 19 nt, Artificial Sequence
  Description of Artificial Sequence: Synthetic oligonucleotide
gcuuaacuccauguuguaa

SEQ ID NO: 1109032 - RNA, 19 nt, Artificial Sequence
  Description of Artificial Sequence: Synthetic oligonucleotide
cacaccgucaugggcccuc

SEQ ID NO: 1109033 - RNA, 19 nt, Artificial Sequence
  Description of Artificial Sequence: Synthetic oligonucleotide
guccacgaagggaagccaa

SEQ ID NO: 1109034 - RNA, 19 nt, Artificial Sequence
  Description of Artificial Sequence: Synthetic oligonucleotide
ccuaugacagucacaugua

SEQ ID NO: 1109035 - RNA, 19 nt, Artificial Sequence
  Description of Artificial Sequence: Synthetic oligonucleotide
ccauauccggagacacuug

SEQ ID NO: 1109036 - RNA, 19 nt, Artificial Sequence
  Description of Artificial Sequence: Synthetic oligonucleotide
auccgugcaaggggcuucu

SEQ ID NO: 1109037 - RNA, 19 nt, Artificial Sequence
  Description of Artificial Sequence: Synthetic oligonucleotide
cugcaucccugugcuuggg

SEQ ID NO: 1109038 - RNA, 19 nt, Artificial Sequence
  Description of Artificial Sequence: Synthetic oligonucleotide
cagaggccuggcuuuccca

SEQ ID NO: 1109039 - RNA, 19 nt, Artificial Sequence
  Description of Artificial Sequence: Synthetic oligonucleotide
gggcauagucugugcuaag

SEQ ID NO: 1109040 - RNA, 19 nt, Artificial Sequence
  Description of Artificial Sequence: Synthetic oligonucleotide
caggcacgucgaaugggga

SEQ ID NO: 1109041 - RNA, 19 nt, Artificial Sequence
  Description of Artificial Sequence: Synthetic oligonucleotide
cugcagcuuguccggcgug

SEQ ID NO: 1109042 - RNA, 19 nt, Artificial Sequence
  Description of Artificial Sequence: Synthetic oligonucleotide
ggcgugauguccacaggca

SEQ ID NO: 1109043 - RNA, 19 nt, Artificial Sequence
  Description of Artificial Sequence: Synthetic oligonucleotide
cacacucguacacugccau

SEQ ID NO: 1109044 - RNA, 19 nt, Artificial Sequence
  Description of Artificial Sequence: Synthetic oligonucleotide
uggcgaggcugagagugua

SEQ ID NO: 1109045 - RNA, 19 nt, Artificial Sequence
  Description of Artificial Sequence: Synthetic oligonucleotide
auucgggagucaggagaga

SEQ ID NO: 1109046 - RNA, 19 nt, Artificial Sequence
  Description of Artificial Sequence: Synthetic oligonucleotide
gaccgacugcgugugccca

SEQ ID NO: 1109047 - RNA, 19 nt, Artificial Sequence
  Description of Artificial Sequence: Synthetic oligonucleotide
cgucaugggcccuccagac

SEQ ID NO: 1109048 - RNA, 19 nt, Artificial Sequence
  Description of Artificial Sequence: Synthetic oligonucleotide
cugguguccugucauccgu

SEQ ID NO: 1109049 - RNA, 19 nt, Artificial Sequence
  Description of Artificial Sequence: Synthetic oligonucleotide
uccccagcggaggcaggug

SEQ ID NO: 1109050 - RNA, 19 nt, Artificial Sequence
  Description of Artificial Sequence: Synthetic oligonucleotide
gcagucgcugcacgucgcc

SEQ ID NO: 1109051 - RNA, 19 nt, Artificial Sequence
  Description of Artificial Sequence: Synthetic oligonucleotide
cuaaggacccagugccggu

SEQ ID NO: 1109052 - RNA, 19 nt, Artificial Sequence
  Description of Artificial Sequence: Synthetic oligonucleotide
gucacagcacggacucuga

SEQ ID NO: 1109053 - RNA, 19 nt, Artificial Sequence
  Description of Artificial Sequence: Synthetic oligonucleotide
guugugucccacacucgua

SEQ ID NO: 1109054 - RNA, 19 nt, Artificial Sequence
  Description of Artificial Sequence: Synthetic oligonucleotide
ccauguuguaacuuccuau

SEQ ID NO: 1109055 - RNA, 19 nt, Artificial Sequence
  Description of Artificial Sequence: Synthetic oligonucleotide
ucacagcggcccgcaguug

SEQ ID NO: 1109056 - RNA, 19 nt, Artificial Sequence
  Description of Artificial Sequence: Synthetic oligonucleotide
ugcacacgagcugcagcuu

SEQ ID NO: 1109057 - RNA, 19 nt, Artificial Sequence
  Description of Artificial Sequence: Synthetic oligonucleotide
gugucucggugcugagauc

SEQ ID NO: 1109058 - RNA, 19 nt, Artificial Sequence
  Description of Artificial Sequence: Synthetic oligonucleotide
ccaugaccuugaagagucc

SEQ ID NO: 1109059 - RNA, 19 nt, Artificial Sequence
  Description of Artificial Sequence: Synthetic oligonucleotide
gcuaagugccaugguguuc

SEQ ID NO: 1109060 - RNA, 19 nt, Artificial Sequence
  Description of Artificial Sequence: Synthetic oligonucleotide
cacuggccacgauucggga

SEQ ID NO: 1109061 - RNA, 19 nt, Artificial Sequence
  Description of Artificial Sequence: Synthetic oligonucleotide
gucaugggcccuccagacu

SEQ ID NO: 1109062 - RNA, 19 nt, Artificial Sequence
  Description of Artificial Sequence: Synthetic oligonucleotide
cccagaagcgcacaguggu

SEQ ID NO: 1109063 - RNA, 19 nt, Artificial Sequence
  Description of Artificial Sequence: Synthetic oligonucleotide
acagcggcccgcaguugug

SEQ ID NO: 1109064 - RNA, 19 nt, Artificial Sequence
  Description of Artificial Sequence: Synthetic oligonucleotide
ccgugcaaggggcuucuug

SEQ ID NO: 1109065 - RNA, 19 nt, Artificial Sequence
  Description of Artificial Sequence: Synthetic oligonucleotide
ggcauagucugugcuaagu

SEQ ID NO: 1109066 - RNA, 19 nt, Artificial Sequence
  Description of Artificial Sequence: Synthetic oligonucleotide
gcuuucccacugcuguaca

SEQ ID NO: 1109067 - RNA, 19 nt, Artificial Sequence
  Description of Artificial Sequence: Synthetic oligonucleotide
cagccggcugucagccgac

SEQ ID NO: 1109068 - RNA, 19 nt, Artificial Sequence
  Description of Artificial Sequence: Synthetic oligonucleotide
acguggcgaggcugagagu

SEQ ID NO: 1109069 - RNA, 19 nt, Artificial Sequence
  Description of Artificial Sequence: Synthetic oligonucleotide
ccgcaguugugucccacac

SEQ ID NO: 1109070 - RNA, 19 nt, Artificial Sequence
  Description of Artificial Sequence: Synthetic oligonucleotide
cgucugagccagauaccag

SEQ ID NO: 1109071 - RNA, 19 nt, Artificial Sequence
  Description of Artificial Sequence: Synthetic oligonucleotide
uggccacgauucgggaguc

SEQ ID NO: 1109072 - RNA, 19 nt, Artificial Sequence
  Description of Artificial Sequence: Synthetic oligonucleotide
cacagcggcccgcaguugu

SEQ ID NO: 1109073 - RNA, 19 nt, Artificial Sequence
  Description of Artificial Sequence: Synthetic oligonucleotide
cuugcagcccgaagccagu

SEQ ID NO: 1109074 - RNA, 19 nt, Artificial Sequence
  Description of Artificial Sequence: Synthetic oligonucleotide
cagguaaggucaggaagcu

SEQ ID NO: 1109075 - RNA, 19 nt, Artificial Sequence
  Description of Artificial Sequence: Synthetic oligonucleotide
ggcgaggcugagaguguag

SEQ ID NO: 1109076 - RNA, 19 nt, Artificial Sequence
  Description of Artificial Sequence: Synthetic oligonucleotide
ggugaccgacugcgugugc

SEQ ID NO: 1109077 - RNA, 19 nt, Artificial Sequence
  Description of Artificial Sequence: Synthetic oligonucleotide
uggccaguuucugggccuu

SEQ ID NO: 1109078 - RNA, 19 nt, Artificial Sequence
  Description of Artificial Sequence: Synthetic oligonucleotide
ccggagacacuugucuuuc

SEQ ID NO: 1109079 - RNA, 19 nt, Artificial Sequence
  Description of Artificial Sequence: Synthetic oligonucleotide
cugcuucgcugugacccuc

SEQ ID NO: 1109080 - RNA, 19 nt, Artificial Sequence
  Description of Artificial Sequence: Synthetic oligonucleotide
cccguagggcugaaggcca

SEQ ID NO: 1109081 - RNA, 19 nt, Artificial Sequence
  Description of Artificial Sequence: Synthetic oligonucleotide
cuuggccccgcacaagguu

SEQ ID NO: 1109082 - RNA, 19 nt, Artificial Sequence
  Description of Artificial Sequence: Synthetic oligonucleotide
cugucuccacggacugcga

SEQ ID NO: 1109083 - RNA, 19 nt, Artificial Sequence
  Description of Artificial Sequence: Synthetic oligonucleotide
cuggcggggcaggcagagg

SEQ ID NO: 1109084 - RNA, 19 nt, Artificial Sequence
  Description of Artificial Sequence: Synthetic oligonucleotide
gcggaggcaggugaccgac

SEQ ID NO: 1109085 - RNA, 19 nt, Artificial Sequence
  Description of Artificial Sequence: Synthetic oligonucleotide
gcagaguauagaaggccgu

SEQ ID NO: 1109086 - RNA, 19 nt, Artificial Sequence
  Description of Artificial Sequence: Synthetic oligonucleotide
ccagcggaggcaggugacc

SEQ ID NO: 1109087 - RNA, 19 nt, Artificial Sequence
  Description of Artificial Sequence: Synthetic oligonucleotide
gcuuguccggcgugauguc

SEQ ID NO: 1109088 - RNA, 19 nt, Artificial Sequence
  Description of Artificial Sequence: Synthetic oligonucleotide
gccccgcacaagguuguag

SEQ ID NO: 1109089 - RNA, 19 nt, Artificial Sequence
  Description of Artificial Sequence: Synthetic oligonucleotide
ccggcgugauguccacagg

SEQ ID NO: 1109090 - RNA, 19 nt, Artificial Sequence
  Description of Artificial Sequence: Synthetic oligonucleotide
guaggcccgcacagcugac

SEQ ID NO: 1109091 - RNA, 19 nt, Artificial Sequence
  Description of Artificial Sequence: Synthetic oligonucleotide
gcagcccgaagccaguuuu

SEQ ID NO: 1109092 - RNA, 19 nt, Artificial Sequence
  Description of Artificial Sequence: Synthetic oligonucleotide
ccagugccgguguccuuug

SEQ ID NO: 1109093 - RNA, 19 nt, Artificial Sequence
  Description of Artificial Sequence: Synthetic oligonucleotide
cucuggcggggcaggcaga

SEQ ID NO: 1109094 - RNA, 19 nt, Artificial Sequence
  Description of Artificial Sequence: Synthetic oligonucleotide
gcacgagcagucgcugcac

SEQ ID NO: 1109095 - RNA, 19 nt, Artificial Sequence
  Description of Artificial Sequence: Synthetic oligonucleotide
gucauccgugcaaggggcu

SEQ ID NO: 1109096 - RNA, 19 nt, Artificial Sequence
  Description of Artificial Sequence: Synthetic oligonucleotide
ggccagguacuuucccgua

SEQ ID NO: 1109097 - RNA, 19 nt, Artificial Sequence
  Description of Artificial Sequence: Synthetic oligonucleotide
cgagcagucgcugcacguc

SEQ ID NO: 1109098 - RNA, 19 nt, Artificial Sequence
  Description of Artificial Sequence: Synthetic oligonucleotide
gugcaccgugucacagcac

SEQ ID NO: 1109099 - RNA, 19 nt, Artificial Sequence
  Description of Artificial Sequence: Synthetic oligonucleotide
cacaagguuguagcgucuu

SEQ ID NO: 1109100 - RNA, 19 nt, Artificial Sequence
  Description of Artificial Sequence: Synthetic oligonucleotide
cagcacggacucugaagau

SEQ ID NO: 1109101 - RNA, 19 nt, Artificial Sequence
  Description of Artificial Sequence: Synthetic oligonucleotide
cccgcaguugugucccaca

SEQ ID NO: 1109102 - RNA, 19 nt, Artificial Sequence
  Description of Artificial Sequence: Synthetic oligonucleotide
cgugugcccaguuaggauu

SEQ ID NO: 1109103 - RNA, 19 nt, Artificial Sequence
  Description of Artificial Sequence: Synthetic oligonucleotide
agauugccuggggcuggua

SEQ ID NO: 1109104 - RNA, 19 nt, Artificial Sequence
  Description of Artificial Sequence: Synthetic oligonucleotide
cacugacuagcagccggcu

SEQ ID NO: 1109105 - RNA, 19 nt, Artificial Sequence
  Description of Artificial Sequence: Synthetic oligonucleotide
cggcccgcaguuguguccc

SEQ ID NO: 1109106 - RNA, 19 nt, Artificial Sequence
  Description of Artificial Sequence: Synthetic oligonucleotide
gcgugugcccaguuaggau

SEQ ID NO: 1109107 - RNA, 19 nt, Artificial Sequence
  Description of Artificial Sequence: Synthetic oligonucleotide
gcagugcguugcacacgag

SEQ ID NO: 1109108 - RNA, 19 nt, Artificial Sequence
  Description of Artificial Sequence: Synthetic oligonucleotide
ccgaccaggcaaucuggua

SEQ ID NO: 1109109 - RNA, 19 nt, Artificial Sequence
  Description of Artificial Sequence: Synthetic oligonucleotide
guccggcgugauguccaca

SEQ ID NO: 1109110 - RNA, 19 nt, Artificial Sequence
  Description of Artificial Sequence: Synthetic oligonucleotide
uccgugcaaggggcuucuu

SEQ ID NO: 1109111 - RNA, 19 nt, Artificial Sequence
  Description of Artificial Sequence: Synthetic oligonucleotide
gccauucuugcagcccgaa

SEQ ID NO: 1109112 - RNA, 19 nt, Artificial Sequence
  Description of Artificial Sequence: Synthetic oligonucleotide
caccgucaugggcccucca

SEQ ID NO: 1109113 - RNA, 19 nt, Artificial Sequence
  Description of Artificial Sequence: Synthetic oligonucleotide
ccggcacagcacaccguca

SEQ ID NO: 1109114 - RNA, 19 nt, Artificial Sequence
  Description of Artificial Sequence: Synthetic oligonucleotide
gccaugguguucacccagu

SEQ ID NO: 1109115 - RNA, 19 nt, Artificial Sequence
  Description of Artificial Sequence: Synthetic oligonucleotide
cggugcugagaucccagaa

SEQ ID NO: 1109116 - RNA, 19 nt, Artificial Sequence
  Description of Artificial Sequence: Synthetic oligonucleotide
gcccgcaguugugucccac

SEQ ID NO: 1109117 - RNA, 19 nt, Artificial Sequence
  Description of Artificial Sequence: Synthetic oligonucleotide
gcguugcacacgagcugca

SEQ ID NO: 1109118 - RNA, 19 nt, Artificial Sequence
  Description of Artificial Sequence: Synthetic oligonucleotide
gcacaagguuguagcgucu

SEQ ID NO: 1109119 - RNA, 19 nt, Artificial Sequence
  Description of Artificial Sequence: Synthetic oligonucleotide
gccgaccaggcaaucuggu

SEQ ID NO: 1109120 - RNA, 19 nt, Artificial Sequence
  Description of Artificial Sequence: Synthetic oligonucleotide
guccggcacagcacaccgu

SEQ ID NO: 1109121 - RNA, 19 nt, Artificial Sequence
  Description of Artificial Sequence: Synthetic oligonucleotide
cacgucgcccgccgccgcu

SEQ ID NO: 1109122 - RNA, 19 nt, Artificial Sequence
  Description of Artificial Sequence: Synthetic oligonucleotide
cagcggcccgcaguugugu

SEQ ID NO: 1109123 - RNA, 19 nt, Artificial Sequence
  Description of Artificial Sequence: Synthetic oligonucleotide
ggcaggugaccgacugcgu

SEQ ID NO: 1109124 - RNA, 19 nt, Artificial Sequence
  Description of Artificial Sequence: Synthetic oligonucleotide
ggcccgcaguuguguccca

SEQ ID NO: 1109125 - RNA, 19 nt, Artificial Sequence
  Description of Artificial Sequence: Synthetic oligonucleotide
cgcaguugugucccacacu

SEQ ID NO: 1109126 - RNA, 19 nt, Artificial Sequence
  Description of Artificial Sequence: Synthetic oligonucleotide
ccgccgcuucguccgccac

SEQ ID NO: 1109127 - RNA, 19 nt, Artificial Sequence
  Description of Artificial Sequence: Synthetic oligonucleotide
cccagugccgguguccuuu

SEQ ID NO: 1109128 - RNA, 19 nt, Artificial Sequence
  Description of Artificial Sequence: Synthetic oligonucleotide
gccccugugcgcagggcau

SEQ ID NO: 1109129 - RNA, 19 nt, Artificial Sequence
  Description of Artificial Sequence: Synthetic oligonucleotide
caccugcaucccugugcuu

SEQ ID NO: 1109130 - RNA, 19 nt, Artificial Sequence
  Description of Artificial Sequence: Synthetic oligonucleotide
ccgacugcgugugcccagu

SEQ ID NO: 1109131 - RNA, 19 nt, Artificial Sequence
  Description of Artificial Sequence: Synthetic oligonucleotide
ggccccgcacaagguugua

SEQ ID NO: 1109132 - RNA, 19 nt, Artificial Sequence
  Description of Artificial Sequence: Synthetic oligonucleotide
gcacaccgucaugggcccu

SEQ ID NO: 1109133 - RNA, 19 nt, Artificial Sequence
  Description of Artificial Sequence: Synthetic oligonucleotide
ccggaaccacuggccaggu

SEQ ID NO: 1109134 - RNA, 19 nt, Artificial Sequence
  Description of Artificial Sequence: Synthetic oligonucleotide
cgguccugugaagcagagu

SEQ ID NO: 1109135 - RNA, 19 nt, Artificial Sequence
  Description of Artificial Sequence: Synthetic oligonucleotide
aguugaauagcauuggugg

SEQ ID NO: 1109136 - RNA, 19 nt, Artificial Sequence
  Description of Artificial Sequence: Synthetic oligonucleotide
ucuaagaggaauuaaaugu

SEQ ID NO: 1109137 - RNA, 19 nt, Artificial Sequence
  Description of Artificial Sequence: Synthetic oligonucleotide
uaccuaguaaaacagaaag

SEQ ID NO: 1109138 - RNA, 19 nt, Artificial Sequence
  Description of Artificial Sequence: Synthetic oligonucleotide
gaagauaacgcacagguac

SEQ ID NO: 1109139 - RNA, 19 nt, Artificial Sequence
  Description of Artificial Sequence: Synthetic oligonucleotide
aacuauuugcucuucaucu

SEQ ID NO: 1109140 - RNA, 19 nt, Artificial Sequence
  Description of Artificial Sequence: Synthetic oligonucleotide
ucauagaauaaucucauac

SEQ ID NO: 1109141 - RNA, 19 nt, Artificial Sequence
  Description of Artificial Sequence: Synthetic oligonucleotide
uguuuaagugacuugcugg

SEQ ID NO: 1109142 - RNA, 19 nt, Artificial Sequence
  Description of Artificial Sequence: Synthetic oligonucleotide
ugcauuaugaucuaggcau

SEQ ID NO: 1109143 - RNA, 19 nt, Artificial Sequence
  Description of Artificial Sequence: Synthetic oligonucleotide
aaauguaugcuaaacauca

SEQ ID NO: 1109144 - RNA, 19 nt, Artificial Sequence
  Description of Artificial Sequence: Synthetic oligonucleotide
aauagugccacacccaacu

SEQ ID NO: 1109145 - RNA, 19 nt, Artificial Sequence
  Description of Artificial Sequence: Synthetic oligonucleotide
uuaauuucccuucaacuca

SEQ ID NO: 1109146 - RNA, 19 nt, Artificial Sequence
  Description of Artificial Sequence: Synthetic oligonucleotide
aaagaugcaagcggaauac

SEQ ID NO: 1109147 - RNA, 19 nt, Artificial Sequence
  Description of Artificial Sequence: Synthetic oligonucleotide
aaaugcauacaguaaugag

SEQ ID NO: 1109148 - RNA, 19 nt, Artificial Sequence
  Description of Artificial Sequence: Synthetic oligonucleotide
agauaagucauacucaacu

SEQ ID NO: 1109149 - RNA, 19 nt, Artificial Sequence
  Description of Artificial Sequence: Synthetic oligonucleotide
agaggaauuaaauguguac

SEQ ID NO: 1109150 - RNA, 19 nt, Artificial Sequence
  Description of Artificial Sequence: Synthetic oligonucleotide
ucauacucaacuuuuagaa

SEQ ID NO: 1109151 - RNA, 19 nt, Artificial Sequence
  Description of Artificial Sequence: Synthetic oligonucleotide
aagcuauuggaauaguucu

SEQ ID NO: 1109152 - RNA, 19 nt, Artificial Sequence
  Description of Artificial Sequence: Synthetic oligonucleotide
uguaugcuaaacaucaacu

SEQ ID NO: 1109153 - RNA, 19 nt, Artificial Sequence
  Description of Artificial Sequence: Synthetic oligonucleotide
aaccauuugaaaugaaaca

SEQ ID NO: 1109154 - RNA, 19 nt, Artificial Sequence
  Description of Artificial Sequence: Synthetic oligonucleotide
uucccuucaacucauaacu

SEQ ID NO: 1109155 - RNA, 19 nt, Artificial Sequence
  Description of Artificial Sequence: Synthetic oligonucleotide
uguaaaagaacgucuuugc

SEQ ID NO: 1109156 - RNA, 19 nt, Artificial Sequence
  Description of Artificial Sequence: Synthetic oligonucleotide
aaagcgaguagaaauggac

SEQ ID NO: 1109157 - RNA, 19 nt, Artificial Sequence
  Description of Artificial Sequence: Synthetic oligonucleotide
uguuaaucacauuuguggc

SEQ ID NO: 1109158 - RNA, 19 nt, Artificial Sequence
  Description of Artificial Sequence: Synthetic oligonucleotide
guuaauuuaccauguuugg

SEQ ID NO: 1109159 - RNA, 19 nt, Artificial Sequence
  Description of Artificial Sequence: Synthetic oligonucleotide
aaugcauacaguaaugaga

SEQ ID NO: 1109160 - RNA, 19 nt, Artificial Sequence
  Description of Artificial Sequence: Synthetic oligonucleotide
gaaccuauggcuaaaauuc

SEQ ID NO: 1109161 - RNA, 19 nt, Artificial Sequence
  Description of Artificial Sequence: Synthetic oligonucleotide
ugagcugaaauuauuuugu

SEQ ID NO: 1109162 - RNA, 19 nt, Artificial Sequence
  Description of Artificial Sequence: Synthetic oligonucleotide
uucuaagaggaauuaaaug

SEQ ID NO: 1109163 - RNA, 19 nt, Artificial Sequence
  Description of Artificial Sequence: Synthetic oligonucleotide
ucucacaucauccaauagu

SEQ ID NO: 1109164 - RNA, 19 nt, Artificial Sequence
  Description of Artificial Sequence: Synthetic oligonucleotide
agaguuaucuuaauuuccc

SEQ ID NO: 1109165 - RNA, 19 nt, Artificial Sequence
  Description of Artificial Sequence: Synthetic oligonucleotide
ggagcuaccauucuaagag

SEQ ID NO: 1109166 - RNA, 19 nt, Artificial Sequence
  Description of Artificial Sequence: Synthetic oligonucleotide
cacaucauccaauagugcc

SEQ ID NO: 1109167 - RNA, 19 nt, Artificial Sequence
  Description of Artificial Sequence: Synthetic oligonucleotide
auuuagaagaagggaaccc

SEQ ID NO: 1109168 - RNA, 19 nt, Artificial Sequence
  Description of Artificial Sequence: Synthetic oligonucleotide
augcauacaguaaugagac

SEQ ID NO: 1109169 - RNA, 19 nt, Artificial Sequence
  Description of Artificial Sequence: Synthetic oligonucleotide
agaaguaugaacauuauuu

SEQ ID NO: 1109170 - RNA, 19 nt, Artificial Sequence
  Description of Artificial Sequence: Synthetic oligonucleotide
ugcuuaacaaacaaaugaa

SEQ ID NO: 1109171 - RNA, 19 nt, Artificial Sequence
  Description of Artificial Sequence: Synthetic oligonucleotide
aucuuaauuucccuucaac

SEQ ID NO: 1109172 - RNA, 19 nt, Artificial Sequence
  Description of Artificial Sequence: Synthetic oligonucleotide
gcgauuacaacauagauga

SEQ ID NO: 1109173 - RNA, 19 nt, Artificial Sequence
  Description of Artificial Sequence: Synthetic oligonucleotide
uggcauuacaaagaaaugc

SEQ ID NO: 1109174 - RNA, 19 nt, Artificial Sequence
  Description of Artificial Sequence: Synthetic oligonucleotide
auagagguaguugaauagc

SEQ ID NO: 1109175 - RNA, 19 nt, Artificial Sequence
  Description of Artificial Sequence: Synthetic oligonucleotide
uguggcugcaaacagauuu

SEQ ID NO: 1109176 - RNA, 19 nt, Artificial Sequence
  Description of Artificial Sequence: Synthetic oligonucleotide
aacauagaugagcugaaau

SEQ ID NO: 1109177 - RNA, 19 nt, Artificial Sequence
  Description of Artificial Sequence: Synthetic oligonucleotide
aggaacggcaguuccaggc

SEQ ID NO: 1109178 - RNA, 19 nt, Artificial Sequence
  Description of Artificial Sequence: Synthetic oligonucleotide
uucaucuuagcucacuggu

SEQ ID NO: 1109179 - RNA, 19 nt, Artificial Sequence
  Description of Artificial Sequence: Synthetic oligonucleotide
uggaauaguucucugcccc

SEQ ID NO: 1109180 - RNA, 19 nt, Artificial Sequence
  Description of Artificial Sequence: Synthetic oligonucleotide
uccacugaaaaguaguuuc

SEQ ID NO: 1109181 - RNA, 19 nt, Artificial Sequence
  Description of Artificial Sequence: Synthetic oligonucleotide
acacagugagcauucaagg

SEQ ID NO: 1109182 - RNA, 19 nt, Artificial Sequence
  Description of Artificial Sequence: Synthetic oligonucleotide
aaauggcugcuuaacaaac

SEQ ID NO: 1109183 - RNA, 19 nt, Artificial Sequence
  Description of Artificial Sequence: Synthetic oligonucleotide
uauuggaauaguucucugc

SEQ ID NO: 1109184 - RNA, 19 nt, Artificial Sequence
  Description of Artificial Sequence: Synthetic oligonucleotide
uuaaucacauuuguggcug

SEQ ID NO: 1109185 - RNA, 19 nt, Artificial Sequence
  Description of Artificial Sequence: Synthetic oligonucleotide
aaggaacgaaccuauggcu

SEQ ID NO: 1109186 - RNA, 19 nt, Artificial Sequence
  Description of Artificial Sequence: Synthetic oligonucleotide
aaaggcaagcuauuggaau

SEQ ID NO: 1109187 - RNA, 19 nt, Artificial Sequence
  Description of Artificial Sequence: Synthetic oligonucleotide
aaaagaugcaagcggaaua

SEQ ID NO: 1109188 - RNA, 19 nt, Artificial Sequence
  Description of Artificial Sequence: Synthetic oligonucleotide
gaugcaagcggaauacugg

SEQ ID NO: 1109189 - RNA, 19 nt, Artificial Sequence
  Description of Artificial Sequence: Synthetic oligonucleotide
auaacgcacagguacagug

SEQ ID NO: 1109190 - RNA, 19 nt, Artificial Sequence
  Description of Artificial Sequence: Synthetic oligonucleotide
acaggggauuaucugaacg

SEQ ID NO: 1109191 - RNA, 19 nt, Artificial Sequence
  Description of Artificial Sequence: Synthetic oligonucleotide
uaagaggaauuaaaugugu

SEQ ID NO: 1109192 - RNA, 19 nt, Artificial Sequence
  Description of Artificial Sequence: Synthetic oligonucleotide
cauagagguaguugaauag

SEQ ID NO: 1109193 - RNA, 19 nt, Artificial Sequence
  Description of Artificial Sequence: Synthetic oligonucleotide
caaggaacgaaccuauggc

SEQ ID NO: 1109194 - RNA, 19 nt, Artificial Sequence
  Description of Artificial Sequence: Synthetic oligonucleotide
caagcuauuggaauaguuc

SEQ ID NO: 1109195 - RNA, 19 nt, Artificial Sequence
  Description of Artificial Sequence: Synthetic oligonucleotide
uuagcuagcagcaguagua

SEQ ID NO: 1109196 - RNA, 19 nt, Artificial Sequence
  Description of Artificial Sequence: Synthetic oligonucleotide
uucaacucauaacugugca

SEQ ID NO: 1109197 - RNA, 19 nt, Artificial Sequence
  Description of Artificial Sequence: Synthetic oligonucleotide
uugcuaccuaguaaaacag

SEQ ID NO: 1109198 - RNA, 19 nt, Artificial Sequence
  Description of Artificial Sequence: Synthetic oligonucleotide
guugaauagcauugguggg

SEQ ID NO: 1109199 - RNA, 19 nt, Artificial Sequence
  Description of Artificial Sequence: Synthetic oligonucleotide
cauagaauaaucucauaca

SEQ ID NO: 1109200 - RNA, 19 nt, Artificial Sequence
  Description of Artificial Sequence: Synthetic oligonucleotide
acaguucaaccacacaguc

SEQ ID NO: 1109201 - RNA, 19 nt, Artificial Sequence
  Description of Artificial Sequence: Synthetic oligonucleotide
ugagcauucaaggucagac

SEQ ID NO: 1109202 - RNA, 19 nt, Artificial Sequence
  Description of Artificial Sequence: Synthetic oligonucleotide
cugcuuaacaaacaaauga

SEQ ID NO: 1109203 - RNA, 19 nt, Artificial Sequence
  Description of Artificial Sequence: Synthetic oligonucleotide
agcacuguaaaagaacguc

SEQ ID NO: 1109204 - RNA, 19 nt, Artificial Sequence
  Description of Artificial Sequence: Synthetic oligonucleotide
ugcguaguuaagcagugga

SEQ ID NO: 1109205 - RNA, 19 nt, Artificial Sequence
  Description of Artificial Sequence: Synthetic oligonucleotide
accugaaccauuugaaaug

SEQ ID NO: 1109206 - RNA, 19 nt, Artificial Sequence
  Description of Artificial Sequence: Synthetic oligonucleotide
agacuuugaagauaacgca

SEQ ID NO: 1109207 - RNA, 19 nt, Artificial Sequence
  Description of Artificial Sequence: Synthetic oligonucleotide
gguuaauuuaccauguuug

SEQ ID NO: 1109208 - RNA, 19 nt, Artificial Sequence
  Description of Artificial Sequence: Synthetic oligonucleotide
uuaauuuaccauguuugga

SEQ ID NO: 1109209 - RNA, 19 nt, Artificial Sequence
  Description of Artificial Sequence: Synthetic oligonucleotide
uuuagcuagcagcaguagu

SEQ ID NO: 1109210 - RNA, 19 nt, Artificial Sequence
  Description of Artificial Sequence: Synthetic oligonucleotide
guaguuaagcaguggagug

SEQ ID NO: 1109211 - RNA, 19 nt, Artificial Sequence
  Description of Artificial Sequence: Synthetic oligonucleotide
ucaucacuugaacaguaga

SEQ ID NO: 1109212 - RNA, 19 nt, Artificial Sequence
  Description of Artificial Sequence: Synthetic oligonucleotide
aagccaaagcuugaaagug

SEQ ID NO: 1109213 - RNA, 19 nt, Artificial Sequence
  Description of Artificial Sequence: Synthetic oligonucleotide
uuuagaagaagggaacccu

SEQ ID NO: 1109214 - RNA, 19 nt, Artificial Sequence
  Description of Artificial Sequence: Synthetic oligonucleotide
uguggauguguaaaaucca

SEQ ID NO: 1109215 - RNA, 19 nt, Artificial Sequence
  Description of Artificial Sequence: Synthetic oligonucleotide
gacauuucaagcaaaaggu

SEQ ID NO: 1109216 - RNA, 19 nt, Artificial Sequence
  Description of Artificial Sequence: Synthetic oligonucleotide
caagucaguggaaggaugc

SEQ ID NO: 1109217 - RNA, 19 nt, Artificial Sequence
  Description of Artificial Sequence: Synthetic oligonucleotide
gagaguuaucuuaauuucc

SEQ ID NO: 1109218 - RNA, 19 nt, Artificial Sequence
  Description of Artificial Sequence: Synthetic oligonucleotide
uuuuaguccuggcauuaca

SEQ ID NO: 1109219 - RNA, 19 nt, Artificial Sequence
  Description of Artificial Sequence: Synthetic oligonucleotide
cucaacucugcuacggagg

SEQ ID NO: 1109220 - RNA, 19 nt, Artificial Sequence
  Description of Artificial Sequence: Synthetic oligonucleotide
aguuaagcaguggaguggg

SEQ ID NO: 1109221 - RNA, 19 nt, Artificial Sequence
  Description of Artificial Sequence: Synthetic oligonucleotide
augcaagcggaauacuggg

SEQ ID NO: 1109222 - RNA, 19 nt, Artificial Sequence
  Description of Artificial Sequence: Synthetic oligonucleotide
aaagaacgucuuugcacag

SEQ ID NO: 1109223 - RNA, 19 nt, Artificial Sequence
  Description of Artificial Sequence: Synthetic oligonucleotide
caccuguuggcaauaaccc

SEQ ID NO: 1109224 - RNA, 19 nt, Artificial Sequence
  Description of Artificial Sequence: Synthetic oligonucleotide
caucuuagcucacugguug

SEQ ID NO: 1109225 - RNA, 19 nt, Artificial Sequence
  Description of Artificial Sequence: Synthetic oligonucleotide
uuaucucacaucauccaau

SEQ ID NO: 1109226 - RNA, 19 nt, Artificial Sequence
  Description of Artificial Sequence: Synthetic oligonucleotide
uuucccuucaacucauaac

SEQ ID NO: 1109227 - RNA, 19 nt, Artificial Sequence
  Description of Artificial Sequence: Synthetic oligonucleotide
uaguuaagcaguggagugg

SEQ ID NO: 1109228 - RNA, 19 nt, Artificial Sequence
  Description of Artificial Sequence: Synthetic oligonucleotide
uaacucaacucugcuacgg

SEQ ID NO: 1109229 - RNA, 19 nt, Artificial Sequence
  Description of Artificial Sequence: Synthetic oligonucleotide
ucuggagguuaauuuacca

SEQ ID NO: 1109230 - RNA, 19 nt, Artificial Sequence
  Description of Artificial Sequence: Synthetic oligonucleotide
aaaggcauaaggucugcuu

SEQ ID NO: 1109231 - RNA, 19 nt, Artificial Sequence
  Description of Artificial Sequence: Synthetic oligonucleotide
gaucuaggcaucucucaag

SEQ ID NO: 1109232 - RNA, 19 nt, Artificial Sequence
  Description of Artificial Sequence: Synthetic oligonucleotide
uaugaucuaggcaucucuc

SEQ ID NO: 1109233 - RNA, 19 nt, Artificial Sequence
  Description of Artificial Sequence: Synthetic oligonucleotide
agcaccacgugccauaacu

SEQ ID NO: 1109234 - RNA, 19 nt, Artificial Sequence
  Description of Artificial Sequence: Synthetic oligonucleotide
aggaugccgagacaucggc

SEQ ID NO: 1109235 - RNA, 19 nt, Artificial Sequence
  Description of Artificial Sequence: Synthetic oligonucleotide
ucugcuugcuaccuaguaa

SEQ ID NO: 1109236 - RNA, 19 nt, Artificial Sequence
  Description of Artificial Sequence: Synthetic oligonucleotide
ugagacucauuuaucucac

SEQ ID NO: 1109237 - RNA, 19 nt, Artificial Sequence
  Description of Artificial Sequence: Synthetic oligonucleotide
cugaacgcaggccagcucc

SEQ ID NO: 1109238 - RNA, 19 nt, Artificial Sequence
  Description of Artificial Sequence: Synthetic oligonucleotide
agcauugcguaguuaagca

SEQ ID NO: 1109239 - RNA, 19 nt, Artificial Sequence
  Description of Artificial Sequence: Synthetic oligonucleotide
acacccaacuauuugcucu

SEQ ID NO: 1109240 - RNA, 19 nt, Artificial Sequence
  Description of Artificial Sequence: Synthetic oligonucleotide
auaagucauacucaacuuu

SEQ ID NO: 1109241 - RNA, 19 nt, Artificial Sequence
  Description of Artificial Sequence: Synthetic oligonucleotide
guuuaagugacuugcugga

SEQ ID NO: 1109242 - RNA, 19 nt, Artificial Sequence
  Description of Artificial Sequence: Synthetic oligonucleotide
uuggagacuuuauuaggca

SEQ ID NO: 1109243 - RNA, 19 nt, Artificial Sequence
  Description of Artificial Sequence: Synthetic oligonucleotide
auaacucaacucugcuacg

SEQ ID NO: 1109244 - RNA, 19 nt, Artificial Sequence
  Description of Artificial Sequence: Synthetic oligonucleotide
ugaauggcagcagacuuug

SEQ ID NO: 1109245 - RNA, 19 nt, Artificial Sequence
  Description of Artificial Sequence: Synthetic oligonucleotide
uauuaggcacgucuguguc

SEQ ID NO: 1109246 - RNA, 19 nt, Artificial Sequence
  Description of Artificial Sequence: Synthetic oligonucleotide
uuggaauaguucucugccc

SEQ ID NO: 1109247 - RNA, 19 nt, Artificial Sequence
  Description of Artificial Sequence: Synthetic oligonucleotide
ugaucuaggcaucucucaa

SEQ ID NO: 1109248 - RNA, 19 nt, Artificial Sequence
  Description of Artificial Sequence: Synthetic oligonucleotide
aguuaucuuaauuucccuu

SEQ ID NO: 1109249 - RNA, 19 nt, Artificial Sequence
  Description of Artificial Sequence: Synthetic oligonucleotide
acucaacucugcuacggag

SEQ ID NO: 1109250 - RNA, 19 nt, Artificial Sequence
  Description of Artificial Sequence: Synthetic oligonucleotide
ugccauaacucaacucugc

SEQ ID NO: 1109251 - RNA, 19 nt, Artificial Sequence
  Description of Artificial Sequence: Synthetic oligonucleotide
agacucauuuaucucacau

SEQ ID NO: 1109252 - RNA, 19 nt, Artificial Sequence
  Description of Artificial Sequence: Synthetic oligonucleotide
acauagagguaguugaaua

SEQ ID NO: 1109253 - RNA, 19 nt, Artificial Sequence
  Description of Artificial Sequence: Synthetic oligonucleotide
aagcggaauacugggaucu

SEQ ID NO: 1109254 - RNA, 19 nt, Artificial Sequence
  Description of Artificial Sequence: Synthetic oligonucleotide
gacucauuuaucucacauc

SEQ ID NO: 1109255 - RNA, 19 nt, Artificial Sequence
  Description of Artificial Sequence: Synthetic oligonucleotide
aucuaggcaucucucaaga

SEQ ID NO: 1109256 - RNA, 19 nt, Artificial Sequence
  Description of Artificial Sequence: Synthetic oligonucleotide
cauuuguggcugcaaacag

SEQ ID NO: 1109257 - RNA, 19 nt, Artificial Sequence
  Description of Artificial Sequence: Synthetic oligonucleotide
acucauaacugugcaaaag

SEQ ID NO: 1109258 - RNA, 19 nt, Artificial Sequence
  Description of Artificial Sequence: Synthetic oligonucleotide
gagcuaccauucuaagagg

SEQ ID NO: 1109259 - RNA, 19 nt, Artificial Sequence
  Description of Artificial Sequence: Synthetic oligonucleotide
agucacaggggauuaucug

SEQ ID NO: 1109260 - RNA, 19 nt, Artificial Sequence
  Description of Artificial Sequence: Synthetic oligonucleotide
gagcugaaauuauuuugug

SEQ ID NO: 1109261 - RNA, 19 nt, Artificial Sequence
  Description of Artificial Sequence: Synthetic oligonucleotide
uagucacaggggauuaucu

SEQ ID NO: 1109262 - RNA, 19 nt, Artificial Sequence
  Description of Artificial Sequence: Synthetic oligonucleotide
agugacaccaggaacggca

SEQ ID NO: 1109263 - RNA, 19 nt, Artificial Sequence
  Description of Artificial Sequence: Synthetic oligonucleotide
ggagaguuaucuuaauuuc

SEQ ID NO: 1109264 - RNA, 19 nt, Artificial Sequence
  Description of Artificial Sequence: Synthetic oligonucleotide
agucaguggaaggaugccg

SEQ ID NO: 1109265 - RNA, 19 nt, Artificial Sequence
  Description of Artificial Sequence: Synthetic oligonucleotide
uaauuucccuucaacucau

SEQ ID NO: 1109266 - RNA, 19 nt, Artificial Sequence
  Description of Artificial Sequence: Synthetic oligonucleotide
cauacaguaaugagacuca

SEQ ID NO: 1109267 - RNA, 19 nt, Artificial Sequence
  Description of Artificial Sequence: Synthetic oligonucleotide
uuuuagcuagcagcaguag

SEQ ID NO: 1109268 - RNA, 19 nt, Artificial Sequence
  Description of Artificial Sequence: Synthetic oligonucleotide
uaucucacaucauccaaua

SEQ ID NO: 1109269 - RNA, 19 nt, Artificial Sequence
  Description of Artificial Sequence: Synthetic oligonucleotide
aagauaacgcacagguaca

SEQ ID NO: 1109270 - RNA, 19 nt, Artificial Sequence
  Description of Artificial Sequence: Synthetic oligonucleotide
aacaccccuuucuucaaau

SEQ ID NO: 1109271 - RNA, 19 nt, Artificial Sequence
  Description of Artificial Sequence: Synthetic oligonucleotide
augaucuaggcaucucuca

SEQ ID NO: 1109272 - RNA, 19 nt, Artificial Sequence
  Description of Artificial Sequence: Synthetic oligonucleotide
aacccagccaugggaauuc

SEQ ID NO: 1109273 - RNA, 19 nt, Artificial Sequence
  Description of Artificial Sequence: Synthetic oligonucleotide
ucacaggggauuaucugaa

SEQ ID NO: 1109274 - RNA, 19 nt, Artificial Sequence
  Description of Artificial Sequence: Synthetic oligonucleotide
gcaguaguacgguacagag

SEQ ID NO: 1109275 - RNA, 19 nt, Artificial Sequence
  Description of Artificial Sequence: Synthetic oligonucleotide
acaagguguugugacuggc

SEQ ID NO: 1109276 - RNA, 19 nt, Artificial Sequence
  Description of Artificial Sequence: Synthetic oligonucleotide
agcaaagcgaguagaaaug

SEQ ID NO: 1109277 - RNA, 19 nt, Artificial Sequence
  Description of Artificial Sequence: Synthetic oligonucleotide
uaucuuaauuucccuucaa

SEQ ID NO: 1109278 - RNA, 19 nt, Artificial Sequence
  Description of Artificial Sequence: Synthetic oligonucleotide
ucccuucaacucauaacug

SEQ ID NO: 1109279 - RNA, 19 nt, Artificial Sequence
  Description of Artificial Sequence: Synthetic oligonucleotide
caccccuuucuucaaauug

SEQ ID NO: 1109280 - RNA, 19 nt, Artificial Sequence
  Description of Artificial Sequence: Synthetic oligonucleotide
ccaaggaacgaaccuaugg

SEQ ID NO: 1109281 - RNA, 19 nt, Artificial Sequence
  Description of Artificial Sequence: Synthetic oligonucleotide
aauggcugcuuaacaaaca

SEQ ID NO: 1109282 - RNA, 19 nt, Artificial Sequence
  Description of Artificial Sequence: Synthetic oligonucleotide
uagaugagcugaaauuauu

SEQ ID NO: 1109283 - RNA, 19 nt, Artificial Sequence
  Description of Artificial Sequence: Synthetic oligonucleotide
accuauggcuaaaauucac

SEQ ID NO: 1109284 - RNA, 19 nt, Artificial Sequence
  Description of Artificial Sequence: Synthetic oligonucleotide
gagaugguagcaccacgug

SEQ ID NO: 1109285 - RNA, 19 nt, Artificial Sequence
  Description of Artificial Sequence: Synthetic oligonucleotide
uaguacgguacagagcaga

SEQ ID NO: 1109286 - RNA, 19 nt, Artificial Sequence
  Description of Artificial Sequence: Synthetic oligonucleotide
caguaguacgguacagagc

SEQ ID NO: 1109287 - RNA, 19 nt, Artificial Sequence
  Description of Artificial Sequence: Synthetic oligonucleotide
aucucacaucauccaauag

SEQ ID NO: 1109288 - RNA, 19 nt, Artificial Sequence
  Description of Artificial Sequence: Synthetic oligonucleotide
caccugaucagcaggaaga

SEQ ID NO: 1109289 - RNA, 19 nt, Artificial Sequence
  Description of Artificial Sequence: Synthetic oligonucleotide
agaugcaagcggaauacug

SEQ ID NO: 1109290 - RNA, 19 nt, Artificial Sequence
  Description of Artificial Sequence: Synthetic oligonucleotide
agcuauuggaauaguucuc

SEQ ID NO: 1109291 - RNA, 19 nt, Artificial Sequence
  Description of Artificial Sequence: Synthetic oligonucleotide
ucaguggaaggaugccgag

SEQ ID NO: 1109292 - RNA, 19 nt, Artificial Sequence
  Description of Artificial Sequence: Synthetic oligonucleotide
cagagcauugcguaguuaa

SEQ ID NO: 1109293 - RNA, 19 nt, Artificial Sequence
  Description of Artificial Sequence: Synthetic oligonucleotide
gggauuaucugaacgcagg

SEQ ID NO: 1109294 - RNA, 19 nt, Artificial Sequence
  Description of Artificial Sequence: Synthetic oligonucleotide
caauaacccagccauggga

SEQ ID NO: 1109295 - RNA, 19 nt, Artificial Sequence
  Description of Artificial Sequence: Synthetic oligonucleotide
guuaaucacauuuguggcu

SEQ ID NO: 1109296 - RNA, 19 nt, Artificial Sequence
  Description of Artificial Sequence: Synthetic oligonucleotide
ugcaagcggaauacuggga

SEQ ID NO: 1109297 - RNA, 19 nt, Artificial Sequence
  Description of Artificial Sequence: Synthetic oligonucleotide
auuaggcacgucugugucu

SEQ ID NO: 1109298 - RNA, 19 nt, Artificial Sequence
  Description of Artificial Sequence: Synthetic oligonucleotide
ggcauuacaaagaaaugca

SEQ ID NO: 1109299 - RNA, 19 nt, Artificial Sequence
  Description of Artificial Sequence: Synthetic oligonucleotide
acgugccauaacucaacuc

SEQ ID NO: 1109300 - RNA, 19 nt, Artificial Sequence
  Description of Artificial Sequence: Synthetic oligonucleotide
agauaacgcacagguacag

SEQ ID NO: 1109301 - RNA, 19 nt, Artificial Sequence
  Description of Artificial Sequence: Synthetic oligonucleotide
ucaucuuagcucacugguu

SEQ ID NO: 1109302 - RNA, 19 nt, Artificial Sequence
  Description of Artificial Sequence: Synthetic oligonucleotide
ugggagcuaccauucuaag

SEQ ID NO: 1109303 - RNA, 19 nt, Artificial Sequence
  Description of Artificial Sequence: Synthetic oligonucleotide
aagaggaauuaaaugugua

SEQ ID NO: 1109304 - RNA, 19 nt, Artificial Sequence
  Description of Artificial Sequence: Synthetic oligonucleotide
cucaagacauuucaagcaa

SEQ ID NO: 1109305 - RNA, 19 nt, Artificial Sequence
  Description of Artificial Sequence: Synthetic oligonucleotide
uggaaacacccacuucuaa

SEQ ID NO: 1109306 - RNA, 19 nt, Artificial Sequence
  Description of Artificial Sequence: Synthetic oligonucleotide
accuguuggcaauaaccca

SEQ ID NO: 1109307 - RNA, 19 nt, Artificial Sequence
  Description of Artificial Sequence: Synthetic oligonucleotide
uaaucacauuuguggcugc

SEQ ID NO: 1109308 - RNA, 19 nt, Artificial Sequence
  Description of Artificial Sequence: Synthetic oligonucleotide
caagcaaaaggugugccca

SEQ ID NO: 1109309 - RNA, 19 nt, Artificial Sequence
  Description of Artificial Sequence: Synthetic oligonucleotide
acugcgauuacaacauaga

SEQ ID NO: 1109310 - RNA, 19 nt, Artificial Sequence
  Description of Artificial Sequence: Synthetic oligonucleotide
gcaaagcgaguagaaaugg

SEQ ID NO: 1109311 - RNA, 19 nt, Artificial Sequence
  Description of Artificial Sequence: Synthetic oligonucleotide
guaaugagacucauuuauc

SEQ ID NO: 1109312 - RNA, 19 nt, Artificial Sequence
  Description of Artificial Sequence: Synthetic oligonucleotide
cugugcacggcuccuuucc

SEQ ID NO: 1109313 - RNA, 19 nt, Artificial Sequence
  Description of Artificial Sequence: Synthetic oligonucleotide
cauugcguaguuaagcagu

SEQ ID NO: 1109314 - RNA, 19 nt, Artificial Sequence
  Description of Artificial Sequence: Synthetic oligonucleotide
agaaauggacacacaguca

SEQ ID NO: 1109315 - RNA, 19 nt, Artificial Sequence
  Description of Artificial Sequence: Synthetic oligonucleotide
ccacaccucugcuugaugg

SEQ ID NO: 1109316 - RNA, 19 nt, Artificial Sequence
  Description of Artificial Sequence: Synthetic oligonucleotide
ggcucauagaauaaucuca

SEQ ID NO: 1109317 - RNA, 19 nt, Artificial Sequence
  Description of Artificial Sequence: Synthetic oligonucleotide
auugcguaguuaagcagug

SEQ ID NO: 1109318 - RNA, 19 nt, Artificial Sequence
  Description of Artificial Sequence: Synthetic oligonucleotide
ggauguuuuaguccuggca

SEQ ID NO: 1109319 - RNA, 19 nt, Artificial Sequence
  Description of Artificial Sequence: Synthetic oligonucleotide
aucuuagcucacugguugu

SEQ ID NO: 1109320 - RNA, 19 nt, Artificial Sequence
  Description of Artificial Sequence: Synthetic oligonucleotide
aagaugcaagcggaauacu

SEQ ID NO: 1109321 - RNA, 19 nt, Artificial Sequence
  Description of Artificial Sequence: Synthetic oligonucleotide
uugcguaguuaagcagugg

SEQ ID NO: 1109322 - RNA, 19 nt, Artificial Sequence
  Description of Artificial Sequence: Synthetic oligonucleotide
gaacgucuuugcacagugg

SEQ ID NO: 1109323 - RNA, 19 nt, Artificial Sequence
  Description of Artificial Sequence: Synthetic oligonucleotide
aggggauuaucugaacgca

SEQ ID NO: 1109324 - RNA, 19 nt, Artificial Sequence
  Description of Artificial Sequence: Synthetic oligonucleotide
uaucugaacgcaggccagc

SEQ ID NO: 1109325 - RNA, 19 nt, Artificial Sequence
  Description of Artificial Sequence: Synthetic oligonucleotide
uagcuagcagcaguaguac

SEQ ID NO: 1109326 - RNA, 19 nt, Artificial Sequence
  Description of Artificial Sequence: Synthetic oligonucleotide
agaucuuguuuggagacuu

SEQ ID NO: 1109327 - RNA, 19 nt, Artificial Sequence
  Description of Artificial Sequence: Synthetic oligonucleotide
agcuaccauucuaagagga

SEQ ID NO: 1109328 - RNA, 19 nt, Artificial Sequence
  Description of Artificial Sequence: Synthetic oligonucleotide
gcaauaacccagccauggg

SEQ ID NO: 1109329 - RNA, 19 nt, Artificial Sequence
  Description of Artificial Sequence: Synthetic oligonucleotide
guugugacuggcucauaga

SEQ ID NO: 1109330 - RNA, 19 nt, Artificial Sequence
  Description of Artificial Sequence: Synthetic oligonucleotide
gaugccgagacaucggcau

SEQ ID NO: 1109331 - RNA, 19 nt, Artificial Sequence
  Description of Artificial Sequence: Synthetic oligonucleotide
guacacugugcacggcucc

SEQ ID NO: 1109332 - RNA, 19 nt, Artificial Sequence
  Description of Artificial Sequence: Synthetic oligonucleotide
ucugcuacggaggcagcac

SEQ ID NO: 1109333 - RNA, 19 nt, Artificial Sequence
  Description of Artificial Sequence: Synthetic oligonucleotide
caagcggaauacugggauc

SEQ ID NO: 1109334 - RNA, 19 nt, Artificial Sequence
  Description of Artificial Sequence: Synthetic oligonucleotide
uuagcucacugguugucuu

SEQ ID NO: 1109335 - RNA, 19 nt, Artificial Sequence
  Description of Artificial Sequence: Synthetic oligonucleotide
aggugugcccacaaggugu

SEQ ID NO: 1109336 - RNA, 19 nt, Artificial Sequence
  Description of Artificial Sequence: Synthetic oligonucleotide
cuagucacaggggauuauc

SEQ ID NO: 1109337 - RNA, 19 nt, Artificial Sequence
  Description of Artificial Sequence: Synthetic oligonucleotide
caaagcgaguagaaaugga

SEQ ID NO: 1109338 - RNA, 19 nt, Artificial Sequence
  Description of Artificial Sequence: Synthetic oligonucleotide
caauagugccacacccaac

SEQ ID NO: 1109339 - RNA, 19 nt, Artificial Sequence
  Description of Artificial Sequence: Synthetic oligonucleotide
ugcuugcuaccuaguaaaa

SEQ ID NO: 1109340 - RNA, 19 nt, Artificial Sequence
  Description of Artificial Sequence: Synthetic oligonucleotide
gcauugcguaguuaagcag

SEQ ID NO: 1109341 - RNA, 19 nt, Artificial Sequence
  Description of Artificial Sequence: Synthetic oligonucleotide
guaugcuaaacaucaacuu

SEQ ID NO: 1109342 - RNA, 19 nt, Artificial Sequence
  Description of Artificial Sequence: Synthetic oligonucleotide
ucggcaucucugcuucaca

SEQ ID NO: 1109343 - RNA, 19 nt, Artificial Sequence
  Description of Artificial Sequence: Synthetic oligonucleotide
acuguuuaagugacuugcu

SEQ ID NO: 1109344 - RNA, 19 nt, Artificial Sequence
  Description of Artificial Sequence: Synthetic oligonucleotide
gaguuaucuuaauuucccu

SEQ ID NO: 1109345 - RNA, 19 nt, Artificial Sequence
  Description of Artificial Sequence: Synthetic oligonucleotide
uccacaccucugcuugaug

SEQ ID NO: 1109346 - RNA, 19 nt, Artificial Sequence
  Description of Artificial Sequence: Synthetic oligonucleotide
augccgagacaucggcauc

SEQ ID NO: 1109347 - RNA, 19 nt, Artificial Sequence
  Description of Artificial Sequence: Synthetic oligonucleotide
ugccgagacaucggcaucu

SEQ ID NO: 1109348 - RNA, 19 nt, Artificial Sequence
  Description of Artificial Sequence: Synthetic oligonucleotide
cuggcucauagaauaaucu

SEQ ID NO: 1109349 - RNA, 19 nt, Artificial Sequence
  Description of Artificial Sequence: Synthetic oligonucleotide
acgaaccuauggcuaaaau

SEQ ID NO: 1109350 - RNA, 19 nt, Artificial Sequence
  Description of Artificial Sequence: Synthetic oligonucleotide
auaacccagccaugggaau

SEQ ID NO: 1109351 - RNA, 19 nt, Artificial Sequence
  Description of Artificial Sequence: Synthetic oligonucleotide
aacgaaccuauggcuaaaa

SEQ ID NO: 1109352 - RNA, 19 nt, Artificial Sequence
  Description of Artificial Sequence: Synthetic oligonucleotide
ucuuagcucacugguuguc

SEQ ID NO: 1109353 - RNA, 19 nt, Artificial Sequence
  Description of Artificial Sequence: Synthetic oligonucleotide
aagucauacucaacuuuua

SEQ ID NO: 1109354 - RNA, 19 nt, Artificial Sequence
  Description of Artificial Sequence: Synthetic oligonucleotide
ucugaacgcaggccagcuc

SEQ ID NO: 1109355 - RNA, 19 nt, Artificial Sequence
  Description of Artificial Sequence: Synthetic oligonucleotide
caguucaaccacacaguca

SEQ ID NO: 1109356 - RNA, 19 nt, Artificial Sequence
  Description of Artificial Sequence: Synthetic oligonucleotide
agccaaagcuugaaaguga

SEQ ID NO: 1109357 - RNA, 19 nt, Artificial Sequence
  Description of Artificial Sequence: Synthetic oligonucleotide
caccacgugccauaacuca

SEQ ID NO: 1109358 - RNA, 19 nt, Artificial Sequence
  Description of Artificial Sequence: Synthetic oligonucleotide
cuuuauuaggcacgucugu

SEQ ID NO: 1109359 - RNA, 19 nt, Artificial Sequence
  Description of Artificial Sequence: Synthetic oligonucleotide
agugccacacccaacuauu

SEQ ID NO: 1109360 - RNA, 19 nt, Artificial Sequence
  Description of Artificial Sequence: Synthetic oligonucleotide
cacacccaacuauuugcuc

SEQ ID NO: 1109361 - RNA, 19 nt, Artificial Sequence
  Description of Artificial Sequence: Synthetic oligonucleotide
uacacugugcacggcuccu

SEQ ID NO: 1109362 - RNA, 19 nt, Artificial Sequence
  Description of Artificial Sequence: Synthetic oligonucleotide
auacaguaaugagacucau

SEQ ID NO: 1109363 - RNA, 19 nt, Artificial Sequence
  Description of Artificial Sequence: Synthetic oligonucleotide
cacaggggauuaucugaac

SEQ ID NO: 1109364 - RNA, 19 nt, Artificial Sequence
  Description of Artificial Sequence: Synthetic oligonucleotide
agcuugaaagugacaccag

SEQ ID NO: 1109365 - RNA, 19 nt, Artificial Sequence
  Description of Artificial Sequence: Synthetic oligonucleotide
ggaacgaaccuauggcuaa

SEQ ID NO: 1109366 - RNA, 19 nt, Artificial Sequence
  Description of Artificial Sequence: Synthetic oligonucleotide
aggaacgaaccuauggcua

SEQ ID NO: 1109367 - RNA, 19 nt, Artificial Sequence
  Description of Artificial Sequence: Synthetic oligonucleotide
gguacagagcagaaaggca

SEQ ID NO: 1109368 - RNA, 19 nt, Artificial Sequence
  Description of Artificial Sequence: Synthetic oligonucleotide
caggaacggcaguuccagg

SEQ ID NO: 1109369 - RNA, 19 nt, Artificial Sequence
  Description of Artificial Sequence: Synthetic oligonucleotide
agacuuuauuaggcacguc

SEQ ID NO: 1109370 - RNA, 19 nt, Artificial Sequence
  Description of Artificial Sequence: Synthetic oligonucleotide
aucugaacgcaggccagcu

SEQ ID NO: 1109371 - RNA, 19 nt, Artificial Sequence
  Description of Artificial Sequence: Synthetic oligonucleotide
aguacgguacagagcagaa

SEQ ID NO: 1109372 - RNA, 19 nt, Artificial Sequence
  Description of Artificial Sequence: Synthetic oligonucleotide
cacagugagcauucaaggu

SEQ ID NO: 1109373 - RNA, 19 nt, Artificial Sequence
  Description of Artificial Sequence: Synthetic oligonucleotide
gggagcuaccauucuaaga

SEQ ID NO: 1109374 - RNA, 19 nt, Artificial Sequence
  Description of Artificial Sequence: Synthetic oligonucleotide
gaauaaucucauacacagu

SEQ ID NO: 1109375 - RNA, 19 nt, Artificial Sequence
  Description of Artificial Sequence: Synthetic oligonucleotide
caguaaaugcaggccccag

SEQ ID NO: 1109376 - RNA, 19 nt, Artificial Sequence
  Description of Artificial Sequence: Synthetic oligonucleotide
ugcccacaagguguuguga

SEQ ID NO: 1109377 - RNA, 19 nt, Artificial Sequence
  Description of Artificial Sequence: Synthetic oligonucleotide
cuggagguuaauuuaccau

SEQ ID NO: 1109378 - RNA, 19 nt, Artificial Sequence
  Description of Artificial Sequence: Synthetic oligonucleotide
guguacacugugcacggcu

SEQ ID NO: 1109379 - RNA, 19 nt, Artificial Sequence
  Description of Artificial Sequence: Synthetic oligonucleotide
uggcuagucacaggggauu

SEQ ID NO: 1109380 - RNA, 19 nt, Artificial Sequence
  Description of Artificial Sequence: Synthetic oligonucleotide
gugggagcuaccauucuaa

SEQ ID NO: 1109381 - RNA, 19 nt, Artificial Sequence
  Description of Artificial Sequence: Synthetic oligonucleotide
cucauagaauaaucucaua

SEQ ID NO: 1109382 - RNA, 19 nt, Artificial Sequence
  Description of Artificial Sequence: Synthetic oligonucleotide
caaaaguaaaauggcugcu

SEQ ID NO: 1109383 - RNA, 19 nt, Artificial Sequence
  Description of Artificial Sequence: Synthetic oligonucleotide
gcuugcuaccuaguaaaac

SEQ ID NO: 1109384 - RNA, 19 nt, Artificial Sequence
  Description of Artificial Sequence: Synthetic oligonucleotide
cacuguaaaagaacgucuu

SEQ ID NO: 1109385 - RNA, 19 nt, Artificial Sequence
  Description of Artificial Sequence: Synthetic oligonucleotide
agguacaguguugcuuugu

SEQ ID NO: 1109386 - RNA, 19 nt, Artificial Sequence
  Description of Artificial Sequence: Synthetic oligonucleotide
gguacaguguugcuuugua

SEQ ID NO: 1109387 - RNA, 19 nt, Artificial Sequence
  Description of Artificial Sequence: Synthetic oligonucleotide
cuaccauucuaagaggaau

SEQ ID NO: 1109388 - RNA, 19 nt, Artificial Sequence
  Description of Artificial Sequence: Synthetic oligonucleotide
gacaucggcaucucugcuu

SEQ ID NO: 1109389 - RNA, 19 nt, Artificial Sequence
  Description of Artificial Sequence: Synthetic oligonucleotide
guaguacgguacagagcag

SEQ ID NO: 1109390 - RNA, 19 nt, Artificial Sequence
  Description of Artificial Sequence: Synthetic oligonucleotide
gucugcuugcuaccuagua

SEQ ID NO: 1109391 - RNA, 19 nt, Artificial Sequence
  Description of Artificial Sequence: Synthetic oligonucleotide
ccaccugaucagcaggaag

SEQ ID NO: 1109392 - RNA, 19 nt, Artificial Sequence
  Description of Artificial Sequence: Synthetic oligonucleotide
acccaacuauuugcucuuc

SEQ ID NO: 1109393 - RNA, 19 nt, Artificial Sequence
  Description of Artificial Sequence: Synthetic oligonucleotide
gaauagcauugguggggaa

SEQ ID NO: 1109394 - RNA, 19 nt, Artificial Sequence
  Description of Artificial Sequence: Synthetic oligonucleotide
cgugccauaacucaacucu

SEQ ID NO: 1109395 - RNA, 19 nt, Artificial Sequence
  Description of Artificial Sequence: Synthetic oligonucleotide
ccacuguuuaagugacuug

SEQ ID NO: 1109396 - RNA, 19 nt, Artificial Sequence
  Description of Artificial Sequence: Synthetic oligonucleotide
gaacgaaccuauggcuaaa

SEQ ID NO: 1109397 - RNA, 19 nt, Artificial Sequence
  Description of Artificial Sequence: Synthetic oligonucleotide
gagguuaauuuaccauguu

SEQ ID NO: 1109398 - RNA, 19 nt, Artificial Sequence
  Description of Artificial Sequence: Synthetic oligonucleotide
gggaacccaaggaacgaac

SEQ ID NO: 1109399 - RNA, 19 nt, Artificial Sequence
  Description of Artificial Sequence: Synthetic oligonucleotide
aggaaaccaggcacauaga

SEQ ID NO: 1109400 - RNA, 19 nt, Artificial Sequence
  Description of Artificial Sequence: Synthetic oligonucleotide
gcaagcggaauacugggau

SEQ ID NO: 1109401 - RNA, 19 nt, Artificial Sequence
  Description of Artificial Sequence: Synthetic oligonucleotide
ggugggagcuaccauucua

SEQ ID NO: 1109402 - RNA, 19 nt, Artificial Sequence
  Description of Artificial Sequence: Synthetic oligonucleotide
cuuagcucacugguugucu

SEQ ID NO: 1109403 - RNA, 19 nt, Artificial Sequence
  Description of Artificial Sequence: Synthetic oligonucleotide
gcacuguaaaagaacgucu

SEQ ID NO: 1109404 - RNA, 19 nt, Artificial Sequence
  Description of Artificial Sequence: Synthetic oligonucleotide
acacugcgauuacaacaua

SEQ ID NO: 1109405 - RNA, 19 nt, Artificial Sequence
  Description of Artificial Sequence: Synthetic oligonucleotide
gcauuaugaucuaggcauc

SEQ ID NO: 1109406 - RNA, 19 nt, Artificial Sequence
  Description of Artificial Sequence: Synthetic oligonucleotide
gcucauagaauaaucucau

SEQ ID NO: 1109407 - RNA, 19 nt, Artificial Sequence
  Description of Artificial Sequence: Synthetic oligonucleotide
guacgguacagagcagaaa

SEQ ID NO: 1109408 - RNA, 19 nt, Artificial Sequence
  Description of Artificial Sequence: Synthetic oligonucleotide
cuagcagcaguaguacggu

SEQ ID NO: 1109409 - RNA, 19 nt, Artificial Sequence
  Description of Artificial Sequence: Synthetic oligonucleotide
gcggaauacugggaucuug

SEQ ID NO: 1109410 - RNA, 19 nt, Artificial Sequence
  Description of Artificial Sequence: Synthetic oligonucleotide
gaacgcaggccagcuccac

SEQ ID NO: 1109411 - RNA, 19 nt, Artificial Sequence
  Description of Artificial Sequence: Synthetic oligonucleotide
aguggacacuuugcauuau

SEQ ID NO: 1109412 - RNA, 19 nt, Artificial Sequence
  Description of Artificial Sequence: Synthetic oligonucleotide
gcauucaaggucagacgca

SEQ ID NO: 1109413 - RNA, 19 nt, Artificial Sequence
  Description of Artificial Sequence: Synthetic oligonucleotide
gccauaacucaacucugcu

SEQ ID NO: 1109414 - RNA, 19 nt, Artificial Sequence
  Description of Artificial Sequence: Synthetic oligonucleotide
cccuucaacucauaacugu

SEQ ID NO: 1109415 - RNA, 19 nt, Artificial Sequence
  Description of Artificial Sequence: Synthetic oligonucleotide
cacuugccacuguuuaagu

SEQ ID NO: 1109416 - RNA, 19 nt, Artificial Sequence
  Description of Artificial Sequence: Synthetic oligonucleotide
cacgugccauaacucaacu

SEQ ID NO: 1109417 - RNA, 19 nt, Artificial Sequence
  Description of Artificial Sequence: Synthetic oligonucleotide
acggcaguuccaggcacuu

SEQ ID NO: 1109418 - RNA, 19 nt, Artificial Sequence
  Description of Artificial Sequence: Synthetic oligonucleotide
cccaacuauuugcucuuca

SEQ ID NO: 1109419 - RNA, 19 nt, Artificial Sequence
  Description of Artificial Sequence: Synthetic oligonucleotide
cacccaacuauuugcucuu

SEQ ID NO: 1109420 - RNA, 19 nt, Artificial Sequence
  Description of Artificial Sequence: Synthetic oligonucleotide
gcaccacgugccauaacuc

SEQ ID NO: 1109421 - RNA, 19 nt, Artificial Sequence
  Description of Artificial Sequence: Synthetic oligonucleotide
ccauucuaagaggaauuaa

SEQ ID NO: 1109422 - RNA, 19 nt, Artificial Sequence
  Description of Artificial Sequence: Synthetic oligonucleotide
ggaauacugggaucuuguu

SEQ ID NO: 1109423 - RNA, 19 nt, Artificial Sequence
  Description of Artificial Sequence: Synthetic oligonucleotide
agcggaauacugggaucuu

SEQ ID NO: 1109424 - RNA, 19 nt, Artificial Sequence
  Description of Artificial Sequence: Synthetic oligonucleotide
cugcuacggaggcagcacu

SEQ ID NO: 1109425 - RNA, 19 nt, Artificial Sequence
  Description of Artificial Sequence: Synthetic oligonucleotide
ggcaucucucaagacauuu

SEQ ID NO: 1109426 - RNA, 19 nt, Artificial Sequence
  Description of Artificial Sequence: Synthetic oligonucleotide
gcauaaggucugcuugcua

SEQ ID NO: 1109427 - RNA, 19 nt, Artificial Sequence
  Description of Artificial Sequence: Synthetic oligonucleotide
acccagccaugggaauucu

SEQ ID NO: 1109428 - RNA, 19 nt, Artificial Sequence
  Description of Artificial Sequence: Synthetic oligonucleotide
guggcuagucacaggggau

SEQ ID NO: 1109429 - RNA, 19 nt, Artificial Sequence
  Description of Artificial Sequence: Synthetic oligonucleotide
cggaauacugggaucuugu

SEQ ID NO: 1109430 - RNA, 19 nt, Artificial Sequence
  Description of Artificial Sequence: Synthetic oligonucleotide
aggcaucucucaagacauu

SEQ ID NO: 1109431 - RNA, 19 nt, Artificial Sequence
  Description of Artificial Sequence: Synthetic oligonucleotide
ccccuguggauguguaaaa

SEQ ID NO: 1109432 - RNA, 19 nt, Artificial Sequence
  Description of Artificial Sequence: Synthetic oligonucleotide
gccgagacaucggcaucuc

SEQ ID NO: 1109433 - RNA, 19 nt, Artificial Sequence
  Description of Artificial Sequence: Synthetic oligonucleotide
gggugggagcuaccauucu

SEQ ID NO: 1109434 - RNA, 19 nt, Artificial Sequence
  Description of Artificial Sequence: Synthetic oligonucleotide
gcuagucacaggggauuau

SEQ ID NO: 1109435 - RNA, 19 nt, Artificial Sequence
  Description of Artificial Sequence: Synthetic oligonucleotide
ccgagacaucggcaucucu

SEQ ID NO: 1109436 - RNA, 19 nt, Artificial Sequence
  Description of Artificial Sequence: Synthetic oligonucleotide
aauaaaggaauauagauac

SEQ ID NO: 1109437 - RNA, 19 nt, Artificial Sequence
  Description of Artificial Sequence: Synthetic oligonucleotide
aaaaccuagaaccauacuc

SEQ ID NO: 1109438 - RNA, 19 nt, Artificial Sequence
  Description of Artificial Sequence: Synthetic oligonucleotide
aauucaaccuaacaguccc

SEQ ID NO: 1109439 - RNA, 19 nt, Artificial Sequence
  Description of Artificial Sequence: Synthetic oligonucleotide
uguuaauucaaccuaacag

SEQ ID NO: 1109440 - RNA, 19 nt, Artificial Sequence
  Description of Artificial Sequence: Synthetic oligonucleotide
auagcaaauauauuuguac

SEQ ID NO: 1109441 - RNA, 19 nt, Artificial Sequence
  Description of Artificial Sequence: Synthetic oligonucleotide
aacuagguaggacagaguc

SEQ ID NO: 1109442 - RNA, 19 nt, Artificial Sequence
  Description of Artificial Sequence: Synthetic oligonucleotide
auaaauaacuccuaggggu

SEQ ID NO: 1109443 - RNA, 19 nt, Artificial Sequence
  Description of Artificial Sequence: Synthetic oligonucleotide
agguauacaacauguagcc

SEQ ID NO: 1109444 - RNA, 19 nt, Artificial Sequence
  Description of Artificial Sequence: Synthetic oligonucleotide
acuaguagacaucaaagac

SEQ ID NO: 1109445 - RNA, 19 nt, Artificial Sequence
  Description of Artificial Sequence: Synthetic oligonucleotide
aauacaauagccuccauuu

SEQ ID NO: 1109446 - RNA, 19 nt, Artificial Sequence
  Description of Artificial Sequence: Synthetic oligonucleotide
uuagcagacaaauaaagga

SEQ ID NO: 1109447 - RNA, 19 nt, Artificial Sequence
  Description of Artificial Sequence: Synthetic oligonucleotide
cuuacaagcaaauucauuc

SEQ ID NO: 1109448 - RNA, 19 nt, Artificial Sequence
  Description of Artificial Sequence: Synthetic oligonucleotide
aacuguacaagcuccugcc

SEQ ID NO: 1109449 - RNA, 19 nt, Artificial Sequence
  Description of Artificial Sequence: Synthetic oligonucleotide
uucguuuuagucaaaaugu

SEQ ID NO: 1109450 - RNA, 19 nt, Artificial Sequence
  Description of Artificial Sequence: Synthetic oligonucleotide
auauaugugagaccaauuc

SEQ ID NO: 1109451 - RNA, 19 nt, Artificial Sequence
  Description of Artificial Sequence: Synthetic oligonucleotide
aagguauacaacauguagc

SEQ ID NO: 1109452 - RNA, 19 nt, Artificial Sequence
  Description of Artificial Sequence: Synthetic oligonucleotide
uaauaugcaaaacugagau

SEQ ID NO: 1109453 - RNA, 19 nt, Artificial Sequence
  Description of Artificial Sequence: Synthetic oligonucleotide
uuuauggccaguuuuagca

SEQ ID NO: 1109454 - RNA, 19 nt, Artificial Sequence
  Description of Artificial Sequence: Synthetic oligonucleotide
caaguuaauauucaagggg

SEQ ID NO: 1109455 - RNA, 19 nt, Artificial Sequence
  Description of Artificial Sequence: Synthetic oligonucleotide
uguaauguuaauucaaccu

SEQ ID NO: 1109456 - RNA, 19 nt, Artificial Sequence
  Description of Artificial Sequence: Synthetic oligonucleotide
aaacagucaucacauuacc

SEQ ID NO: 1109457 - RNA, 19 nt, Artificial Sequence
  Description of Artificial Sequence: Synthetic oligonucleotide
uggucacaaaccaagaggg

SEQ ID NO: 1109458 - RNA, 19 nt, Artificial Sequence
  Description of Artificial Sequence: Synthetic oligonucleotide
ucaaguuaauauucaaggg

SEQ ID NO: 1109459 - RNA, 19 nt, Artificial Sequence
  Description of Artificial Sequence: Synthetic oligonucleotide
uauucagcuaaccaaacca

SEQ ID NO: 1109460 - RNA, 19 nt, Artificial Sequence
  Description of Artificial Sequence: Synthetic oligonucleotide
uuucuuaccaucuggaaca

SEQ ID NO: 1109461 - RNA, 19 nt, Artificial Sequence
  Description of Artificial Sequence: Synthetic oligonucleotide
uuaaccaagauguucaggu

SEQ ID NO: 1109462 - RNA, 19 nt, Artificial Sequence
  Description of Artificial Sequence: Synthetic oligonucleotide
uaacuaguagacaucaaag

SEQ ID NO: 1109463 - RNA, 19 nt, Artificial Sequence
  Description of Artificial Sequence: Synthetic oligonucleotide
aaaagcagcugcugaaugg

SEQ ID NO: 1109464 - RNA, 19 nt, Artificial Sequence
  Description of Artificial Sequence: Synthetic oligonucleotide
acaacauguagccagguuc

SEQ ID NO: 1109465 - RNA, 19 nt, Artificial Sequence
  Description of Artificial Sequence: Synthetic oligonucleotide
gaaauuaccaaaagggucc

SEQ ID NO: 1109466 - RNA, 19 nt, Artificial Sequence
  Description of Artificial Sequence: Synthetic oligonucleotide
aauucauucaaguucguuu

SEQ ID NO: 1109467 - RNA, 19 nt, Artificial Sequence
  Description of Artificial Sequence: Synthetic oligonucleotide
aaaacugagaucuggcacu

SEQ ID NO: 1109468 - RNA, 19 nt, Artificial Sequence
  Description of Artificial Sequence: Synthetic oligonucleotide
ucuaguggaacuagguagg

SEQ ID NO: 1109469 - RNA, 19 nt, Artificial Sequence
  Description of Artificial Sequence: Synthetic oligonucleotide
acagaucaaaggcagcucc

SEQ ID NO: 1109470 - RNA, 19 nt, Artificial Sequence
  Description of Artificial Sequence: Synthetic oligonucleotide
aauagccuccauuuaugac

SEQ ID NO: 1109471 - RNA, 19 nt, Artificial Sequence
  Description of Artificial Sequence: Synthetic oligonucleotide
ugugagaccaauucaacca

SEQ ID NO: 1109472 - RNA, 19 nt, Artificial Sequence
  Description of Artificial Sequence: Synthetic oligonucleotide
agauauguaauagaaguag

SEQ ID NO: 1109473 - RNA, 19 nt, Artificial Sequence
  Description of Artificial Sequence: Synthetic oligonucleotide
uauauaucaaguuaauauu

SEQ ID NO: 1109474 - RNA, 19 nt, Artificial Sequence
  Description of Artificial Sequence: Synthetic oligonucleotide
agcauuagagggaagauac

SEQ ID NO: 1109475 - RNA, 19 nt, Artificial Sequence
  Description of Artificial Sequence: Synthetic oligonucleotide
aacuaguagacaucaaaga

SEQ ID NO: 1109476 - RNA, 19 nt, Artificial Sequence
  Description of Artificial Sequence: Synthetic oligonucleotide
uauaugugagaccaauuca

SEQ ID NO: 1109477 - RNA, 19 nt, Artificial Sequence
  Description of Artificial Sequence: Synthetic oligonucleotide
agagugaacauguggaguc

SEQ ID NO: 1109478 - RNA, 19 nt, Artificial Sequence
  Description of Artificial Sequence: Synthetic oligonucleotide
aaccuaaacagucaucaca

SEQ ID NO: 1109479 - RNA, 19 nt, Artificial Sequence
  Description of Artificial Sequence: Synthetic oligonucleotide
guucguuuuagucaaaaug

SEQ ID NO: 1109480 - RNA, 19 nt, Artificial Sequence
  Description of Artificial Sequence: Synthetic oligonucleotide
acaaguaagcugaugauac

SEQ ID NO: 1109481 - RNA, 19 nt, Artificial Sequence
  Description of Artificial Sequence: Synthetic oligonucleotide
uguaauagaaguagguauc

SEQ ID NO: 1109482 - RNA, 19 nt, Artificial Sequence
  Description of Artificial Sequence: Synthetic oligonucleotide
uuaauucaaccuaacaguc

SEQ ID NO: 1109483 - RNA, 19 nt, Artificial Sequence
  Description of Artificial Sequence: Synthetic oligonucleotide
augugagaccaauucaacc

SEQ ID NO: 1109484 - RNA, 19 nt, Artificial Sequence
  Description of Artificial Sequence: Synthetic oligonucleotide
auauaucaaguuaauauuc

SEQ ID NO: 1109485 - RNA, 19 nt, Artificial Sequence
  Description of Artificial Sequence: Synthetic oligonucleotide
gaccaauucaaccaagccc

SEQ ID NO: 1109486 - RNA, 19 nt, Artificial Sequence
  Description of Artificial Sequence: Synthetic oligonucleotide
agaaacauaugcuggucac

SEQ ID NO: 1109487 - RNA, 19 nt, Artificial Sequence
  Description of Artificial Sequence: Synthetic oligonucleotide
aaaauaacuaguagacauc

SEQ ID NO: 1109488 - RNA, 19 nt, Artificial Sequence
  Description of Artificial Sequence: Synthetic oligonucleotide
uaucugaaggcuuacaaaa

SEQ ID NO: 1109489 - RNA, 19 nt, Artificial Sequence
  Description of Artificial Sequence: Synthetic oligonucleotide
uauucaaggggcuauuuga

SEQ ID NO: 1109490 - RNA, 19 nt, Artificial Sequence
  Description of Artificial Sequence: Synthetic oligonucleotide
aaguagguaucuaugagag

SEQ ID NO: 1109491 - RNA, 19 nt, Artificial Sequence
  Description of Artificial Sequence: Synthetic oligonucleotide
uuuaaugggaaauuaccaa

SEQ ID NO: 1109492 - RNA, 19 nt, Artificial Sequence
  Description of Artificial Sequence: Synthetic oligonucleotide
uaaccaaaccaucucagca

SEQ ID NO: 1109493 - RNA, 19 nt, Artificial Sequence
  Description of Artificial Sequence: Synthetic oligonucleotide
aguuuguacaaccucaaga

SEQ ID NO: 1109494 - RNA, 19 nt, Artificial Sequence
  Description of Artificial Sequence: Synthetic oligonucleotide
auagccuccauuuaugaca

SEQ ID NO: 1109495 - RNA, 19 nt, Artificial Sequence
  Description of Artificial Sequence: Synthetic oligonucleotide
agauacuucuuccauagca

SEQ ID NO: 1109496 - RNA, 19 nt, Artificial Sequence
  Description of Artificial Sequence: Synthetic oligonucleotide
aaguaagcugaugauacuc

SEQ ID NO: 1109497 - RNA, 19 nt, Artificial Sequence
  Description of Artificial Sequence: Synthetic oligonucleotide
aaccaagauguucagguca

SEQ ID NO: 1109498 - RNA, 19 nt, Artificial Sequence
  Description of Artificial Sequence: Synthetic oligonucleotide
uauuugaagagugcaacag

SEQ ID NO: 1109499 - RNA, 19 nt, Artificial Sequence
  Description of Artificial Sequence: Synthetic oligonucleotide
aaguauuaacuuuugucaa

SEQ ID NO: 1109500 - RNA, 19 nt, Artificial Sequence
  Description of Artificial Sequence: Synthetic oligonucleotide
aagaaacauaugcugguca

SEQ ID NO: 1109501 - RNA, 19 nt, Artificial Sequence
  Description of Artificial Sequence: Synthetic oligonucleotide
auguaauagaaguagguau

SEQ ID NO: 1109502 - RNA, 19 nt, Artificial Sequence
  Description of Artificial Sequence: Synthetic oligonucleotide
agauucugaggacugcagc

SEQ ID NO: 1109503 - RNA, 19 nt, Artificial Sequence
  Description of Artificial Sequence: Synthetic oligonucleotide
guauauaucaaguuaauau

SEQ ID NO: 1109504 - RNA, 19 nt, Artificial Sequence
  Description of Artificial Sequence: Synthetic oligonucleotide
ugccagacaaguaagcuga

SEQ ID NO: 1109505 - RNA, 19 nt, Artificial Sequence
  Description of Artificial Sequence: Synthetic oligonucleotide
uauacuuggauaauuuguu

SEQ ID NO: 1109506 - RNA, 19 nt, Artificial Sequence
  Description of Artificial Sequence: Synthetic oligonucleotide
uuguaauguuaauucaacc

SEQ ID NO: 1109507 - RNA, 19 nt, Artificial Sequence
  Description of Artificial Sequence: Synthetic oligonucleotide
uuauucagcuaaccaaacc

SEQ ID NO: 1109508 - RNA, 19 nt, Artificial Sequence
  Description of Artificial Sequence: Synthetic oligonucleotide
agugcaacagugcagagaa

SEQ ID NO: 1109509 - RNA, 19 nt, Artificial Sequence
  Description of Artificial Sequence: Synthetic oligonucleotide
aaaccuagaaccauacuca

SEQ ID NO: 1109510 - RNA, 19 nt, Artificial Sequence
  Description of Artificial Sequence: Synthetic oligonucleotide
aaauaaaggaauauagaua

SEQ ID NO: 1109511 - RNA, 19 nt, Artificial Sequence
  Description of Artificial Sequence: Synthetic oligonucleotide
cuggucacaaaccaagagg

SEQ ID NO: 1109512 - RNA, 19 nt, Artificial Sequence
  Description of Artificial Sequence: Synthetic oligonucleotide
uuagagggaagauacuucu

SEQ ID NO: 1109513 - RNA, 19 nt, Artificial Sequence
  Description of Artificial Sequence: Synthetic oligonucleotide
agguucaaauauuuugggg

SEQ ID NO: 1109514 - RNA, 19 nt, Artificial Sequence
  Description of Artificial Sequence: Synthetic oligonucleotide
uaauguuaauucaaccuaa

SEQ ID NO: 1109515 - RNA, 19 nt, Artificial Sequence
  Description of Artificial Sequence: Synthetic oligonucleotide
agaaguagguaucuaugag

SEQ ID NO: 1109516 - RNA, 19 nt, Artificial Sequence
  Description of Artificial Sequence: Synthetic oligonucleotide
aacuccuagggguuaagug

SEQ ID NO: 1109517 - RNA, 19 nt, Artificial Sequence
  Description of Artificial Sequence: Synthetic oligonucleotide
uaauucaaccuaacagucc

SEQ ID NO: 1109518 - RNA, 19 nt, Artificial Sequence
  Description of Artificial Sequence: Synthetic oligonucleotide
ggcuuauucuaucugaagg

SEQ ID NO: 1109519 - RNA, 19 nt, Artificial Sequence
  Description of Artificial Sequence: Synthetic oligonucleotide
ucuaucugaaggcuuacaa

SEQ ID NO: 1109520 - RNA, 19 nt, Artificial Sequence
  Description of Artificial Sequence: Synthetic oligonucleotide
aacuacagaucaaaggcag

SEQ ID NO: 1109521 - RNA, 19 nt, Artificial Sequence
  Description of Artificial Sequence: Synthetic oligonucleotide
uacauaucuggggauaagg

SEQ ID NO: 1109522 - RNA, 19 nt, Artificial Sequence
  Description of Artificial Sequence: Synthetic oligonucleotide
uugucaaguuuguacaacc

SEQ ID NO: 1109523 - RNA, 19 nt, Artificial Sequence
  Description of Artificial Sequence: Synthetic oligonucleotide
guuaauucaaccuaacagu

SEQ ID NO: 1109524 - RNA, 19 nt, Artificial Sequence
  Description of Artificial Sequence: Synthetic oligonucleotide
ucaaggggcuauuugaaga

SEQ ID NO: 1109525 - RNA, 19 nt, Artificial Sequence
  Description of Artificial Sequence: Synthetic oligonucleotide
uaucuaugagagcaggcug

SEQ ID NO: 1109526 - RNA, 19 nt, Artificial Sequence
  Description of Artificial Sequence: Synthetic oligonucleotide
ugauucaauauacuuggau

SEQ ID NO: 1109527 - RNA, 19 nt, Artificial Sequence
  Description of Artificial Sequence: Synthetic oligonucleotide
acaggauauaugugagacc

SEQ ID NO: 1109528 - RNA, 19 nt, Artificial Sequence
  Description of Artificial Sequence: Synthetic oligonucleotide
guagguaucuaugagagca

SEQ ID NO: 1109529 - RNA, 19 nt, Artificial Sequence
  Description of Artificial Sequence: Synthetic oligonucleotide
uagaaccauacucagugca

SEQ ID NO: 1109530 - RNA, 19 nt, Artificial Sequence
  Description of Artificial Sequence: Synthetic oligonucleotide
acauguggagucuagagaa

SEQ ID NO: 1109531 - RNA, 19 nt, Artificial Sequence
  Description of Artificial Sequence: Synthetic oligonucleotide
gaaguagguaucuaugaga

SEQ ID NO: 1109532 - RNA, 19 nt, Artificial Sequence
  Description of Artificial Sequence: Synthetic oligonucleotide
caguuaaccagauucugag

SEQ ID NO: 1109533 - RNA, 19 nt, Artificial Sequence
  Description of Artificial Sequence: Synthetic oligonucleotide
uuuaccuauugcuucaaau

SEQ ID NO: 1109534 - RNA, 19 nt, Artificial Sequence
  Description of Artificial Sequence: Synthetic oligonucleotide
cuuaagacaggauauaugu

SEQ ID NO: 1109535 - RNA, 19 nt, Artificial Sequence
  Description of Artificial Sequence: Synthetic oligonucleotide
uguuccgaaguguuggcag

SEQ ID NO: 1109536 - RNA, 19 nt, Artificial Sequence
  Description of Artificial Sequence: Synthetic oligonucleotide
agaagagggucauguaaac

SEQ ID NO: 1109537 - RNA, 19 nt, Artificial Sequence
  Description of Artificial Sequence: Synthetic oligonucleotide
uguccaaauucauaauaca

SEQ ID NO: 1109538 - RNA, 19 nt, Artificial Sequence
  Description of Artificial Sequence: Synthetic oligonucleotide
cuuuugucaaguuuguaca

SEQ ID NO: 1109539 - RNA, 19 nt, Artificial Sequence
  Description of Artificial Sequence: Synthetic oligonucleotide
caaaacugagaucuggcac

SEQ ID NO: 1109540 - RNA, 19 nt, Artificial Sequence
  Description of Artificial Sequence: Synthetic oligonucleotide
uuaccuauugcuucaaauu

SEQ ID NO: 1109541 - RNA, 19 nt, Artificial Sequence
  Description of Artificial Sequence: Synthetic oligonucleotide
aggucaguuaaccaagaug

SEQ ID NO: 1109542 - RNA, 19 nt, Artificial Sequence
  Description of Artificial Sequence: Synthetic oligonucleotide
uagggguuaagugacaaca

SEQ ID NO: 1109543 - RNA, 19 nt, Artificial Sequence
  Description of Artificial Sequence: Synthetic oligonucleotide
auaguauauaucaaguuaa

SEQ ID NO: 1109544 - RNA, 19 nt, Artificial Sequence
  Description of Artificial Sequence: Synthetic oligonucleotide
acuccuagggguuaaguga

SEQ ID NO: 1109545 - RNA, 19 nt, Artificial Sequence
  Description of Artificial Sequence: Synthetic oligonucleotide
agcucccucuuuuauggcc

SEQ ID NO: 1109546 - RNA, 19 nt, Artificial Sequence
  Description of Artificial Sequence: Synthetic oligonucleotide
uauucuaucugaaggcuua

SEQ ID NO: 1109547 - RNA, 19 nt, Artificial Sequence
  Description of Artificial Sequence: Synthetic oligonucleotide
acuguaucauuuuguaaug

SEQ ID NO: 1109548 - RNA, 19 nt, Artificial Sequence
  Description of Artificial Sequence: Synthetic oligonucleotide
accaauucaaccaagcccu

SEQ ID NO: 1109549 - RNA, 19 nt, Artificial Sequence
  Description of Artificial Sequence: Synthetic oligonucleotide
gacucaucaccucagcggc

SEQ ID NO: 1109550 - RNA, 19 nt, Artificial Sequence
  Description of Artificial Sequence: Synthetic oligonucleotide
accuauugcuucaaauucc

SEQ ID NO: 1109551 - RNA, 19 nt, Artificial Sequence
  Description of Artificial Sequence: Synthetic oligonucleotide
gaggacugcagcauuagag

SEQ ID NO: 1109552 - RNA, 19 nt, Artificial Sequence
  Description of Artificial Sequence: Synthetic oligonucleotide
cuuaaggucaguuaaccaa

SEQ ID NO: 1109553 - RNA, 19 nt, Artificial Sequence
  Description of Artificial Sequence: Synthetic oligonucleotide
aggucaucacuagucaucc

SEQ ID NO: 1109554 - RNA, 19 nt, Artificial Sequence
  Description of Artificial Sequence: Synthetic oligonucleotide
aguagguaucuaugagagc

SEQ ID NO: 1109555 - RNA, 19 nt, Artificial Sequence
  Description of Artificial Sequence: Synthetic oligonucleotide
aaguuuguacaaccucaag

SEQ ID NO: 1109556 - RNA, 19 nt, Artificial Sequence
  Description of Artificial Sequence: Synthetic oligonucleotide
aguuccaugccauagcuuu

SEQ ID NO: 1109557 - RNA, 19 nt, Artificial Sequence
  Description of Artificial Sequence: Synthetic oligonucleotide
caucucagcaucugcaccc

SEQ ID NO: 1109558 - RNA, 19 nt, Artificial Sequence
  Description of Artificial Sequence: Synthetic oligonucleotide
uauguaauagaaguaggua

SEQ ID NO: 1109559 - RNA, 19 nt, Artificial Sequence
  Description of Artificial Sequence: Synthetic oligonucleotide
ccuuuauuaaaacauuccc

SEQ ID NO: 1109560 - RNA, 19 nt, Artificial Sequence
  Description of Artificial Sequence: Synthetic oligonucleotide
uaugugagaccaauucaac

SEQ ID NO: 1109561 - RNA, 19 nt, Artificial Sequence
  Description of Artificial Sequence: Synthetic oligonucleotide
guaauguuaauucaaccua

SEQ ID NO: 1109562 - RNA, 19 nt, Artificial Sequence
  Description of Artificial Sequence: Synthetic oligonucleotide
cauaacaccccaacacuag

SEQ ID NO: 1109563 - RNA, 19 nt, Artificial Sequence
  Description of Artificial Sequence: Synthetic oligonucleotide
auaugcuggucacaaacca

SEQ ID NO: 1109564 - RNA, 19 nt, Artificial Sequence
  Description of Artificial Sequence: Synthetic oligonucleotide
gauuauucagcuaaccaaa

SEQ ID NO: 1109565 - RNA, 19 nt, Artificial Sequence
  Description of Artificial Sequence: Synthetic oligonucleotide
ggucauguaaaccuaaaca

SEQ ID NO: 1109566 - RNA, 19 nt, Artificial Sequence
  Description of Artificial Sequence: Synthetic oligonucleotide
ugagaucuggcacuguauc

SEQ ID NO: 1109567 - RNA, 19 nt, Artificial Sequence
  Description of Artificial Sequence: Synthetic oligonucleotide
auuaccccaaaugagcuug

SEQ ID NO: 1109568 - RNA, 19 nt, Artificial Sequence
  Description of Artificial Sequence: Synthetic oligonucleotide
auuagagggaagauacuuc

SEQ ID NO: 1109569 - RNA, 19 nt, Artificial Sequence
  Description of Artificial Sequence: Synthetic oligonucleotide
uucaaaaccuagaaccaua

SEQ ID NO: 1109570 - RNA, 19 nt, Artificial Sequence
  Description of Artificial Sequence: Synthetic oligonucleotide
aaacuacagaucaaaggca

SEQ ID NO: 1109571 - RNA, 19 nt, Artificial Sequence
  Description of Artificial Sequence: Synthetic oligonucleotide
agcccuguuuaccuauugc

SEQ ID NO: 1109572 - RNA, 19 nt, Artificial Sequence
  Description of Artificial Sequence: Synthetic oligonucleotide
uacaagcaaauucauucaa

SEQ ID NO: 1109573 - RNA, 19 nt, Artificial Sequence
  Description of Artificial Sequence: Synthetic oligonucleotide
guucaggccagccucaggc

SEQ ID NO: 1109574 - RNA, 19 nt, Artificial Sequence
  Description of Artificial Sequence: Synthetic oligonucleotide
cuuaccaucuggaacagaa

SEQ ID NO: 1109575 - RNA, 19 nt, Artificial Sequence
  Description of Artificial Sequence: Synthetic oligonucleotide
aaccaagcccuguuuaccu

SEQ ID NO: 1109576 - RNA, 19 nt, Artificial Sequence
  Description of Artificial Sequence: Synthetic oligonucleotide
cagacaaguaagcugauga

SEQ ID NO: 1109577 - RNA, 19 nt, Artificial Sequence
  Description of Artificial Sequence: Synthetic oligonucleotide
ugcuuaaggucaguuaacc

SEQ ID NO: 1109578 - RNA, 19 nt, Artificial Sequence
  Description of Artificial Sequence: Synthetic oligonucleotide
ccuagaaccauacucagug

SEQ ID NO: 1109579 - RNA, 19 nt, Artificial Sequence
  Description of Artificial Sequence: Synthetic oligonucleotide
cuggguuucuaagagaaac

SEQ ID NO: 1109580 - RNA, 19 nt, Artificial Sequence
  Description of Artificial Sequence: Synthetic oligonucleotide
cuugauuauucagcuaacc

SEQ ID NO: 1109581 - RNA, 19 nt, Artificial Sequence
  Description of Artificial Sequence: Synthetic oligonucleotide
ucguuuuagucaaaauguc

SEQ ID NO: 1109582 - RNA, 19 nt, Artificial Sequence
  Description of Artificial Sequence: Synthetic oligonucleotide
ugagaccaauucaaccaag

SEQ ID NO: 1109583 - RNA, 19 nt, Artificial Sequence
  Description of Artificial Sequence: Synthetic oligonucleotide
uaucuggggauaagguaag

SEQ ID NO: 1109584 - RNA, 19 nt, Artificial Sequence
  Description of Artificial Sequence: Synthetic oligonucleotide
augagcaguggacucauca

SEQ ID NO: 1109585 - RNA, 19 nt, Artificial Sequence
  Description of Artificial Sequence: Synthetic oligonucleotide
augggcgcagcaaagaggg

SEQ ID NO: 1109586 - RNA, 19 nt, Artificial Sequence
  Description of Artificial Sequence: Synthetic oligonucleotide
auagaaguagguaucuaug

SEQ ID NO: 1109587 - RNA, 19 nt, Artificial Sequence
  Description of Artificial Sequence: Synthetic oligonucleotide
ggguuaagugacaacaugg

SEQ ID NO: 1109588 - RNA, 19 nt, Artificial Sequence
  Description of Artificial Sequence: Synthetic oligonucleotide
agaguuccaugccauagcu

SEQ ID NO: 1109589 - RNA, 19 nt, Artificial Sequence
  Description of Artificial Sequence: Synthetic oligonucleotide
uuaaccagauucugaggac

SEQ ID NO: 1109590 - RNA, 19 nt, Artificial Sequence
  Description of Artificial Sequence: Synthetic oligonucleotide
ucacuagucauccuuuauu

SEQ ID NO: 1109591 - RNA, 19 nt, Artificial Sequence
  Description of Artificial Sequence: Synthetic oligonucleotide
uguggagucuagagaacug

SEQ ID NO: 1109592 - RNA, 19 nt, Artificial Sequence
  Description of Artificial Sequence: Synthetic oligonucleotide
uaugcaaaacugagaucug

SEQ ID NO: 1109593 - RNA, 19 nt, Artificial Sequence
  Description of Artificial Sequence: Synthetic oligonucleotide
uagguaucuaugagagcag

SEQ ID NO: 1109594 - RNA, 19 nt, Artificial Sequence
  Description of Artificial Sequence: Synthetic oligonucleotide
gagcuugacauuaacaaaa

SEQ ID NO: 1109595 - RNA, 19 nt, Artificial Sequence
  Description of Artificial Sequence: Synthetic oligonucleotide
ucaauauacuuggauaauu

SEQ ID NO: 1109596 - RNA, 19 nt, Artificial Sequence
  Description of Artificial Sequence: Synthetic oligonucleotide
uccucuaguggaacuaggu

SEQ ID NO: 1109597 - RNA, 19 nt, Artificial Sequence
  Description of Artificial Sequence: Synthetic oligonucleotide
uuauucuaucugaaggcuu

SEQ ID NO: 1109598 - RNA, 19 nt, Artificial Sequence
  Description of Artificial Sequence: Synthetic oligonucleotide
cacccaaugcuuaagguca

SEQ ID NO: 1109599 - RNA, 19 nt, Artificial Sequence
  Description of Artificial Sequence: Synthetic oligonucleotide
uuugucaaguuuguacaac

SEQ ID NO: 1109600 - RNA, 19 nt, Artificial Sequence
  Description of Artificial Sequence: Synthetic oligonucleotide
ucaaccaagcccuguuuac

SEQ ID NO: 1109601 - RNA, 19 nt, Artificial Sequence
  Description of Artificial Sequence: Synthetic oligonucleotide
guucaagauauguaauaga

SEQ ID NO: 1109602 - RNA, 19 nt, Artificial Sequence
  Description of Artificial Sequence: Synthetic oligonucleotide
uagccuccauuuaugacac

SEQ ID NO: 1109603 - RNA, 19 nt, Artificial Sequence
  Description of Artificial Sequence: Synthetic oligonucleotide
uacaaccucaagaaacaua

SEQ ID NO: 1109604 - RNA, 19 nt, Artificial Sequence
  Description of Artificial Sequence: Synthetic oligonucleotide
aaauggcaggcuuauucua

SEQ ID NO: 1109605 - RNA, 19 nt, Artificial Sequence
  Description of Artificial Sequence: Synthetic oligonucleotide
acaagcaaauucauucaag

SEQ ID NO: 1109606 - RNA, 19 nt, Artificial Sequence
  Description of Artificial Sequence: Synthetic oligonucleotide
auaugugagaccaauucaa

SEQ ID NO: 1109607 - RNA, 19 nt, Artificial Sequence
  Description of Artificial Sequence: Synthetic oligonucleotide
ugcaagaaauggcaggcuu

SEQ ID NO: 1109608 - RNA, 19 nt, Artificial Sequence
  Description of Artificial Sequence: Synthetic oligonucleotide
ugagcaguggacucaucac

SEQ ID NO: 1109609 - RNA, 19 nt, Artificial Sequence
  Description of Artificial Sequence: Synthetic oligonucleotide
uucaaccaagcccuguuua

SEQ ID NO: 1109610 - RNA, 19 nt, Artificial Sequence
  Description of Artificial Sequence: Synthetic oligonucleotide
uagucaaaauguccaaauu

SEQ ID NO: 1109611 - RNA, 19 nt, Artificial Sequence
  Description of Artificial Sequence: Synthetic oligonucleotide
agcggcuuaagacaggaua

SEQ ID NO: 1109612 - RNA, 19 nt, Artificial Sequence
  Description of Artificial Sequence: Synthetic oligonucleotide
acuugccagacaaguaagc

SEQ ID NO: 1109613 - RNA, 19 nt, Artificial Sequence
  Description of Artificial Sequence: Synthetic oligonucleotide
acuacagaucaaaggcagc

SEQ ID NO: 1109614 - RNA, 19 nt, Artificial Sequence
  Description of Artificial Sequence: Synthetic oligonucleotide
uuaugacacucccuggcau

SEQ ID NO: 1109615 - RNA, 19 nt, Artificial Sequence
  Description of Artificial Sequence: Synthetic oligonucleotide
cuagaaccauacucagugc

SEQ ID NO: 1109616 - RNA, 19 nt, Artificial Sequence
  Description of Artificial Sequence: Synthetic oligonucleotide
aaauuaccaaaaggguccu

SEQ ID NO: 1109617 - RNA, 19 nt, Artificial Sequence
  Description of Artificial Sequence: Synthetic oligonucleotide
uaaccagauucugaggacu

SEQ ID NO: 1109618 - RNA, 19 nt, Artificial Sequence
  Description of Artificial Sequence: Synthetic oligonucleotide
aaaggaauauagauacaua

SEQ ID NO: 1109619 - RNA, 19 nt, Artificial Sequence
  Description of Artificial Sequence: Synthetic oligonucleotide
guggagucuagagaacugg

SEQ ID NO: 1109620 - RNA, 19 nt, Artificial Sequence
  Description of Artificial Sequence: Synthetic oligonucleotide
ggaacuagguaggacagag

SEQ ID NO: 1109621 - RNA, 19 nt, Artificial Sequence
  Description of Artificial Sequence: Synthetic oligonucleotide
gaaauggcaggcuuauucu

SEQ ID NO: 1109622 - RNA, 19 nt, Artificial Sequence
  Description of Artificial Sequence: Synthetic oligonucleotide
uggagucuagagaacuggu

SEQ ID NO: 1109623 - RNA, 19 nt, Artificial Sequence
  Description of Artificial Sequence: Synthetic oligonucleotide
auaacaccccaacacuaga

SEQ ID NO: 1109624 - RNA, 19 nt, Artificial Sequence
  Description of Artificial Sequence: Synthetic oligonucleotide
cuccuagggguuaagugac

SEQ ID NO: 1109625 - RNA, 19 nt, Artificial Sequence
  Description of Artificial Sequence: Synthetic oligonucleotide
ggauccacaaagguguagg

SEQ ID NO: 1109626 - RNA, 19 nt, Artificial Sequence
  Description of Artificial Sequence: Synthetic oligonucleotide
ggucaguuaaccaagaugu

SEQ ID NO: 1109627 - RNA, 19 nt, Artificial Sequence
  Description of Artificial Sequence: Synthetic oligonucleotide
caccucagcggcuuaagac

SEQ ID NO: 1109628 - RNA, 19 nt, Artificial Sequence
  Description of Artificial Sequence: Synthetic oligonucleotide
aaacugagaucuggcacug

SEQ ID NO: 1109629 - RNA, 19 nt, Artificial Sequence
  Description of Artificial Sequence: Synthetic oligonucleotide
aaggucaguuaaccaagau

SEQ ID NO: 1109630 - RNA, 19 nt, Artificial Sequence
  Description of Artificial Sequence: Synthetic oligonucleotide
ccucaagaaacauaugcug

SEQ ID NO: 1109631 - RNA, 19 nt, Artificial Sequence
  Description of Artificial Sequence: Synthetic oligonucleotide
agguaucuaugagagcagg

SEQ ID NO: 1109632 - RNA, 19 nt, Artificial Sequence
  Description of Artificial Sequence: Synthetic oligonucleotide
acuugauuauucagcuaac

SEQ ID NO: 1109633 - RNA, 19 nt, Artificial Sequence
  Description of Artificial Sequence: Synthetic oligonucleotide
aggcacacuuuucuuacca

SEQ ID NO: 1109634 - RNA, 19 nt, Artificial Sequence
  Description of Artificial Sequence: Synthetic oligonucleotide
cacuugccagacaaguaag

SEQ ID NO: 1109635 - RNA, 19 nt, Artificial Sequence
  Description of Artificial Sequence: Synthetic oligonucleotide
agacaaguaagcugaugau

SEQ ID NO: 1109636 - RNA, 19 nt, Artificial Sequence
  Description of Artificial Sequence: Synthetic oligonucleotide
acaauagccuccauuuaug

SEQ ID NO: 1109637 - RNA, 19 nt, Artificial Sequence
  Description of Artificial Sequence: Synthetic oligonucleotide
caacauguagccagguuca

SEQ ID NO: 1109638 - RNA, 19 nt, Artificial Sequence
  Description of Artificial Sequence: Synthetic oligonucleotide
agaaccauacucagugcag

SEQ ID NO: 1109639 - RNA, 19 nt, Artificial Sequence
  Description of Artificial Sequence: Synthetic oligonucleotide
cuguacaagcuccugccac

SEQ ID NO: 1109640 - RNA, 19 nt, Artificial Sequence
  Description of Artificial Sequence: Synthetic oligonucleotide
aagcccuguuuaccuauug

SEQ ID NO: 1109641 - RNA, 19 nt, Artificial Sequence
  Description of Artificial Sequence: Synthetic oligonucleotide
accucaagaaacauaugcu

SEQ ID NO: 1109642 - RNA, 19 nt, Artificial Sequence
  Description of Artificial Sequence: Synthetic oligonucleotide
ugcacccaaugcuuaaggu

SEQ ID NO: 1109643 - RNA, 19 nt, Artificial Sequence
  Description of Artificial Sequence: Synthetic oligonucleotide
aguaagcugaugauacuca

SEQ ID NO: 1109644 - RNA, 19 nt, Artificial Sequence
  Description of Artificial Sequence: Synthetic oligonucleotide
auacuuggauaauuuguuu

SEQ ID NO: 1109645 - RNA, 19 nt, Artificial Sequence
  Description of Artificial Sequence: Synthetic oligonucleotide
ugaacauguggagucuaga

SEQ ID NO: 1109646 - RNA, 19 nt, Artificial Sequence
  Description of Artificial Sequence: Synthetic oligonucleotide
uaaccaagauguucagguc

SEQ ID NO: 1109647 - RNA, 19 nt, Artificial Sequence
  Description of Artificial Sequence: Synthetic oligonucleotide
caccccaacacuagaauca

SEQ ID NO: 1109648 - RNA, 19 nt, Artificial Sequence
  Description of Artificial Sequence: Synthetic oligonucleotide
cugcacccaaugcuuaagg

SEQ ID NO: 1109649 - RNA, 19 nt, Artificial Sequence
  Description of Artificial Sequence: Synthetic oligonucleotide
uccuuacaagcaaauucau

SEQ ID NO: 1109650 - RNA, 19 nt, Artificial Sequence
  Description of Artificial Sequence: Synthetic oligonucleotide
ggguuucuaagagaaacag

SEQ ID NO: 1109651 - RNA, 19 nt, Artificial Sequence
  Description of Artificial Sequence: Synthetic oligonucleotide
uugaccaaagcuggccuug

SEQ ID NO: 1109652 - RNA, 19 nt, Artificial Sequence
  Description of Artificial Sequence: Synthetic oligonucleotide
aacaugggcgcagcaaaga

SEQ ID NO: 1109653 - RNA, 19 nt, Artificial Sequence
  Description of Artificial Sequence: Synthetic oligonucleotide
auucuaucugaaggcuuac

SEQ ID NO: 1109654 - RNA, 19 nt, Artificial Sequence
  Description of Artificial Sequence: Synthetic oligonucleotide
uuuaggucagcuggccggc

SEQ ID NO: 1109655 - RNA, 19 nt, Artificial Sequence
  Description of Artificial Sequence: Synthetic oligonucleotide
agugacaacaugggcgcag

SEQ ID NO: 1109656 - RNA, 19 nt, Artificial Sequence
  Description of Artificial Sequence: Synthetic oligonucleotide
acauuaccccaaaugagcu

SEQ ID NO: 1109657 - RNA, 19 nt, Artificial Sequence
  Description of Artificial Sequence: Synthetic oligonucleotide
augcuuaaggucaguuaac

SEQ ID NO: 1109658 - RNA, 19 nt, Artificial Sequence
  Description of Artificial Sequence: Synthetic oligonucleotide
guuccgaaguguuggcagc

SEQ ID NO: 1109659 - RNA, 19 nt, Artificial Sequence
  Description of Artificial Sequence: Synthetic oligonucleotide
guggaacuagguaggacag

SEQ ID NO: 1109660 - RNA, 19 nt, Artificial Sequence
  Description of Artificial Sequence: Synthetic oligonucleotide
gcuauuugaagagugcaac

SEQ ID NO: 1109661 - RNA, 19 nt, Artificial Sequence
  Description of Artificial Sequence: Synthetic oligonucleotide
aucacuagucauccuuuau

SEQ ID NO: 1109662 - RNA, 19 nt, Artificial Sequence
  Description of Artificial Sequence: Synthetic oligonucleotide
ggauaagguaaggagaaga

SEQ ID NO: 1109663 - RNA, 19 nt, Artificial Sequence
  Description of Artificial Sequence: Synthetic oligonucleotide
auguaaaccuaaacaguca

SEQ ID NO: 1109664 - RNA, 19 nt, Artificial Sequence
  Description of Artificial Sequence: Synthetic oligonucleotide
cacuagucauccuuuauua

SEQ ID NO: 1109665 - RNA, 19 nt, Artificial Sequence
  Description of Artificial Sequence: Synthetic oligonucleotide
aggaauauagauacauaua

SEQ ID NO: 1109666 - RNA, 19 nt, Artificial Sequence
  Description of Artificial Sequence: Synthetic oligonucleotide
ugcacuugccagacaagua

SEQ ID NO: 1109667 - RNA, 19 nt, Artificial Sequence
  Description of Artificial Sequence: Synthetic oligonucleotide
ccuguuuaccuauugcuuc

SEQ ID NO: 1109668 - RNA, 19 nt, Artificial Sequence
  Description of Artificial Sequence: Synthetic oligonucleotide
caaccaagcccuguuuacc

SEQ ID NO: 1109669 - RNA, 19 nt, Artificial Sequence
  Description of Artificial Sequence: Synthetic oligonucleotide
acuguacaagcuccugcca

SEQ ID NO: 1109670 - RNA, 19 nt, Artificial Sequence
  Description of Artificial Sequence: Synthetic oligonucleotide
caauagccuccauuuauga

SEQ ID NO: 1109671 - RNA, 19 nt, Artificial Sequence
  Description of Artificial Sequence: Synthetic oligonucleotide
uucaaccuaacagucccau

SEQ ID NO: 1109672 - RNA, 19 nt, Artificial Sequence
  Description of Artificial Sequence: Synthetic oligonucleotide
gcuggucacaaaccaagag

SEQ ID NO: 1109673 - RNA, 19 nt, Artificial Sequence
  Description of Artificial Sequence: Synthetic oligonucleotide
uuuggcuccaaggcaaaua

SEQ ID NO: 1109674 - RNA, 19 nt, Artificial Sequence
  Description of Artificial Sequence: Synthetic oligonucleotide
cuagggguuaagugacaac

SEQ ID NO: 1109675 - RNA, 19 nt, Artificial Sequence
  Description of Artificial Sequence: Synthetic oligonucleotide
caaaccaucucagcaucug

SEQ ID NO: 1109676 - RNA, 19 nt, Artificial Sequence
  Description of Artificial Sequence: Synthetic oligonucleotide
accccaaaugagcuugaca

SEQ ID NO: 1109677 - RNA, 19 nt, Artificial Sequence
  Description of Artificial Sequence: Synthetic oligonucleotide
guaagcugaugauacucaa

SEQ ID NO: 1109678 - RNA, 19 nt, Artificial Sequence
  Description of Artificial Sequence: Synthetic oligonucleotide
accauacucagugcagcag

SEQ ID NO: 1109679 - RNA, 19 nt, Artificial Sequence
  Description of Artificial Sequence: Synthetic oligonucleotide
uaauagaaguagguaucua

SEQ ID NO: 1109680 - RNA, 19 nt, Artificial Sequence
  Description of Artificial Sequence: Synthetic oligonucleotide
caucuucuuaaacuacaga

SEQ ID NO: 1109681 - RNA, 19 nt, Artificial Sequence
  Description of Artificial Sequence: Synthetic oligonucleotide
uucuaucugaaggcuuaca

SEQ ID NO: 1109682 - RNA, 19 nt, Artificial Sequence
  Description of Artificial Sequence: Synthetic oligonucleotide
aggggcuauuugaagagug

SEQ ID NO: 1109683 - RNA, 19 nt, Artificial Sequence
  Description of Artificial Sequence: Synthetic oligonucleotide
gcuaaccaaaccaucucag

SEQ ID NO: 1109684 - RNA, 19 nt, Artificial Sequence
  Description of Artificial Sequence: Synthetic oligonucleotide
guaucuaugagagcaggcu

SEQ ID NO: 1109685 - RNA, 19 nt, Artificial Sequence
  Description of Artificial Sequence: Synthetic oligonucleotide
uuaccccaaaugagcuuga

SEQ ID NO: 1109686 - RNA, 19 nt, Artificial Sequence
  Description of Artificial Sequence: Synthetic oligonucleotide
aaggggcuauuugaagagu

SEQ ID NO: 1109687 - RNA, 19 nt, Artificial Sequence
  Description of Artificial Sequence: Synthetic oligonucleotide
cagcuaaccaaaccaucuc

SEQ ID NO: 1109688 - RNA, 19 nt, Artificial Sequence
  Description of Artificial Sequence: Synthetic oligonucleotide
gugaacauguggagucuag

SEQ ID NO: 1109689 - RNA, 19 nt, Artificial Sequence
  Description of Artificial Sequence: Synthetic oligonucleotide
uaacuccuagggguuaagu

SEQ ID NO: 1109690 - RNA, 19 nt, Artificial Sequence
  Description of Artificial Sequence: Synthetic oligonucleotide
gggucauguaaaccuaaac

SEQ ID NO: 1109691 - RNA, 19 nt, Artificial Sequence
  Description of Artificial Sequence: Synthetic oligonucleotide
gcaggcuuauucuaucuga

SEQ ID NO: 1109692 - RNA, 19 nt, Artificial Sequence
  Description of Artificial Sequence: Synthetic oligonucleotide
uagagggaagauacuucuu

SEQ ID NO: 1109693 - RNA, 19 nt, Artificial Sequence
  Description of Artificial Sequence: Synthetic oligonucleotide
gcacccaaugcuuaagguc

SEQ ID NO: 1109694 - RNA, 19 nt, Artificial Sequence
  Description of Artificial Sequence: Synthetic oligonucleotide
gguaucuaugagagcaggc

SEQ ID NO: 1109695 - RNA, 19 nt, Artificial Sequence
  Description of Artificial Sequence: Synthetic oligonucleotide
ccuccauuuaugacacucc

SEQ ID NO: 1109696 - RNA, 19 nt, Artificial Sequence
  Description of Artificial Sequence: Synthetic oligonucleotide
uaguggaacuagguaggac

SEQ ID NO: 1109697 - RNA, 19 nt, Artificial Sequence
  Description of Artificial Sequence: Synthetic oligonucleotide
uccuagggguuaagugaca

SEQ ID NO: 1109698 - RNA, 19 nt, Artificial Sequence
  Description of Artificial Sequence: Synthetic oligonucleotide
caaccuaacagucccauuu

SEQ ID NO: 1109699 - RNA, 19 nt, Artificial Sequence
  Description of Artificial Sequence: Synthetic oligonucleotide
uuccgaaguguuggcagcu

SEQ ID NO: 1109700 - RNA, 19 nt, Artificial Sequence
  Description of Artificial Sequence: Synthetic oligonucleotide
caggcacacuuuucuuacc

SEQ ID NO: 1109701 - RNA, 19 nt, Artificial Sequence
  Description of Artificial Sequence: Synthetic oligonucleotide
auaacuccuagggguuaag

SEQ ID NO: 1109702 - RNA, 19 nt, Artificial Sequence
  Description of Artificial Sequence: Synthetic oligonucleotide
uguuuaccuauugcuucaa

SEQ ID NO: 1109703 - RNA, 19 nt, Artificial Sequence
  Description of Artificial Sequence: Synthetic oligonucleotide
gcacuugccagacaaguaa

SEQ ID NO: 1109704 - RNA, 19 nt, Artificial Sequence
  Description of Artificial Sequence: Synthetic oligonucleotide
ucaaccuaacagucccauu

SEQ ID NO: 1109705 - RNA, 19 nt, Artificial Sequence
  Description of Artificial Sequence: Synthetic oligonucleotide
gcuuaaggucaguuaacca

SEQ ID NO: 1109706 - RNA, 19 nt, Artificial Sequence
  Description of Artificial Sequence: Synthetic oligonucleotide
caggcuuauucuaucugaa

SEQ ID NO: 1109707 - RNA, 19 nt, Artificial Sequence
  Description of Artificial Sequence: Synthetic oligonucleotide
gucacaaaccaagagggau

SEQ ID NO: 1109708 - RNA, 19 nt, Artificial Sequence
  Description of Artificial Sequence: Synthetic oligonucleotide
gugacaacaugggcgcagc

SEQ ID NO: 1109709 - RNA, 19 nt, Artificial Sequence
  Description of Artificial Sequence: Synthetic oligonucleotide
aacauguagccagguucaa

SEQ ID NO: 1109710 - RNA, 19 nt, Artificial Sequence
  Description of Artificial Sequence: Synthetic oligonucleotide
ccaucucagcaucugcacc

SEQ ID NO: 1109711 - RNA, 19 nt, Artificial Sequence
  Description of Artificial Sequence: Synthetic oligonucleotide
uccgaaguguuggcagcug

SEQ ID NO: 1109712 - RNA, 19 nt, Artificial Sequence
  Description of Artificial Sequence: Synthetic oligonucleotide
augauucaauauacuugga

SEQ ID NO: 1109713 - RNA, 19 nt, Artificial Sequence
  Description of Artificial Sequence: Synthetic oligonucleotide
guuuaccuauugcuucaaa

SEQ ID NO: 1109714 - RNA, 19 nt, Artificial Sequence
  Description of Artificial Sequence: Synthetic oligonucleotide
gucaucacauuaccccaaa

SEQ ID NO: 1109715 - RNA, 19 nt, Artificial Sequence
  Description of Artificial Sequence: Synthetic oligonucleotide
cauuagagggaagauacuu

SEQ ID NO: 1109716 - RNA, 19 nt, Artificial Sequence
  Description of Artificial Sequence: Synthetic oligonucleotide
gguccucuaguggaacuag

SEQ ID NO: 1109717 - RNA, 19 nt, Artificial Sequence
  Description of Artificial Sequence: Synthetic oligonucleotide
acaugagcaguggacucau

SEQ ID NO: 1109718 - RNA, 19 nt, Artificial Sequence
  Description of Artificial Sequence: Synthetic oligonucleotide
cuugccagacaaguaagcu

SEQ ID NO: 1109719 - RNA, 19 nt, Artificial Sequence
  Description of Artificial Sequence: Synthetic oligonucleotide
agggguuaagugacaacau

SEQ ID NO: 1109720 - RNA, 19 nt, Artificial Sequence
  Description of Artificial Sequence: Synthetic oligonucleotide
agucaucacauuaccccaa

SEQ ID NO: 1109721 - RNA, 19 nt, Artificial Sequence
  Description of Artificial Sequence: Synthetic oligonucleotide
auucaaccuaacaguccca

SEQ ID NO: 1109722 - RNA, 19 nt, Artificial Sequence
  Description of Artificial Sequence: Synthetic oligonucleotide
gguggcagcuugaccaaag

SEQ ID NO: 1109723 - RNA, 19 nt, Artificial Sequence
  Description of Artificial Sequence: Synthetic oligonucleotide
aagaaauggcaggcuuauu

SEQ ID NO: 1109724 - RNA, 19 nt, Artificial Sequence
  Description of Artificial Sequence: Synthetic oligonucleotide
aacugagaucuggcacugu

SEQ ID NO: 1109725 - RNA, 19 nt, Artificial Sequence
  Description of Artificial Sequence: Synthetic oligonucleotide
agcagaguuccaugccaua

SEQ ID NO: 1109726 - RNA, 19 nt, Artificial Sequence
  Description of Artificial Sequence: Synthetic oligonucleotide
gggcuauuugaagagugca

SEQ ID NO: 1109727 - RNA, 19 nt, Artificial Sequence
  Description of Artificial Sequence: Synthetic oligonucleotide
acccaaugcuuaaggucag

SEQ ID NO: 1109728 - RNA, 19 nt, Artificial Sequence
  Description of Artificial Sequence: Synthetic oligonucleotide
accaagcccuguuuaccua

SEQ ID NO: 1109729 - RNA, 19 nt, Artificial Sequence
  Description of Artificial Sequence: Synthetic oligonucleotide
cauuuccccaccugggccu

SEQ ID NO: 1109730 - RNA, 19 nt, Artificial Sequence
  Description of Artificial Sequence: Synthetic oligonucleotide
accccaacacuagaaucaa

SEQ ID NO: 1109731 - RNA, 19 nt, Artificial Sequence
  Description of Artificial Sequence: Synthetic oligonucleotide
acagaacauaacaccccaa

SEQ ID NO: 1109732 - RNA, 19 nt, Artificial Sequence
  Description of Artificial Sequence: Synthetic oligonucleotide
cuaguggaacuagguagga

SEQ ID NO: 1109733 - RNA, 19 nt, Artificial Sequence
  Description of Artificial Sequence: Synthetic oligonucleotide
uaccccaaaugagcuugac

SEQ ID NO: 1109734 - RNA, 19 nt, Artificial Sequence
  Description of Artificial Sequence: Synthetic oligonucleotide
gcccuguuuaccuauugcu

SEQ ID NO: 1109735 - RNA, 19 nt, Artificial Sequence
  Description of Artificial Sequence: Synthetic oligonucleotide
cagcauuagagggaagaua

SEQ ID NO: 1109736 - RNA, 19 nt, Artificial Sequence
  Description of Artificial Sequence: Synthetic oligonucleotide
ggcuauuugaagagugcaa

SEQ ID NO: 1109737 - RNA, 19 nt, Artificial Sequence
  Description of Artificial Sequence: Synthetic oligonucleotide
ugggcgcagcaaagaggga

SEQ ID NO: 1109738 - RNA, 19 nt, Artificial Sequence
  Description of Artificial Sequence: Synthetic oligonucleotide
gggauccacaaagguguag

SEQ ID NO: 1109739 - RNA, 19 nt, Artificial Sequence
  Description of Artificial Sequence: Synthetic oligonucleotide
guguuggcagcugaacugu

SEQ ID NO: 1109740 - RNA, 19 nt, Artificial Sequence
  Description of Artificial Sequence: Synthetic oligonucleotide
cuguuccgaaguguuggca

SEQ ID NO: 1109741 - RNA, 19 nt, Artificial Sequence
  Description of Artificial Sequence: Synthetic oligonucleotide
cugcacuugccagacaagu

SEQ ID NO: 1109742 - RNA, 19 nt, Artificial Sequence
  Description of Artificial Sequence: Synthetic oligonucleotide
aggauauaugugagaccaa

SEQ ID NO: 1109743 - RNA, 19 nt, Artificial Sequence
  Description of Artificial Sequence: Synthetic oligonucleotide
gaacuagguaggacagagu

SEQ ID NO: 1109744 - RNA, 19 nt, Artificial Sequence
  Description of Artificial Sequence: Synthetic oligonucleotide
ggggcacacauuuaaugau

SEQ ID NO: 1109745 - RNA, 19 nt, Artificial Sequence
  Description of Artificial Sequence: Synthetic oligonucleotide
ccaauucaaccaagcccug

SEQ ID NO: 1109746 - RNA, 19 nt, Artificial Sequence
  Description of Artificial Sequence: Synthetic oligonucleotide
ggucacaaaccaagaggga

SEQ ID NO: 1109747 - RNA, 19 nt, Artificial Sequence
  Description of Artificial Sequence: Synthetic oligonucleotide
uggccggcaggcacacuuu

SEQ ID NO: 1109748 - RNA, 19 nt, Artificial Sequence
  Description of Artificial Sequence: Synthetic oligonucleotide
ccagacaaguaagcugaug

SEQ ID NO: 1109749 - RNA, 19 nt, Artificial Sequence
  Description of Artificial Sequence: Synthetic oligonucleotide
cuugaccaaagcuggccuu

SEQ ID NO: 1109750 - RNA, 19 nt, Artificial Sequence
  Description of Artificial Sequence: Synthetic oligonucleotide
cauuaccccaaaugagcuu

SEQ ID NO: 1109751 - RNA, 19 nt, Artificial Sequence
  Description of Artificial Sequence: Synthetic oligonucleotide
ccagauucugaggacugca

SEQ ID NO: 1109752 - RNA, 19 nt, Artificial Sequence
  Description of Artificial Sequence: Synthetic oligonucleotide
ccucuaguggaacuaggua

SEQ ID NO: 1109753 - RNA, 19 nt, Artificial Sequence
  Description of Artificial Sequence: Synthetic oligonucleotide
cacuagaaucaaacuugau

SEQ ID NO: 1109754 - RNA, 19 nt, Artificial Sequence
  Description of Artificial Sequence: Synthetic oligonucleotide
agccuccauuuaugacacu

SEQ ID NO: 1109755 - RNA, 19 nt, Artificial Sequence
  Description of Artificial Sequence: Synthetic oligonucleotide
gcggcuuaagacaggauau

SEQ ID NO: 1109756 - RNA, 19 nt, Artificial Sequence
  Description of Artificial Sequence: Synthetic oligonucleotide
cuggccggcaggcacacuu

SEQ ID NO: 1109757 - RNA, 19 nt, Artificial Sequence
  Description of Artificial Sequence: Synthetic oligonucleotide
gugcaagaaauggcaggcu

SEQ ID NO: 1109758 - RNA, 19 nt, Artificial Sequence
  Description of Artificial Sequence: Synthetic oligonucleotide
auuuccccaccugggccua

SEQ ID NO: 1109759 - RNA, 19 nt, Artificial Sequence
  Description of Artificial Sequence: Synthetic oligonucleotide
ccuagggguuaagugacaa

SEQ ID NO: 1109760 - RNA, 19 nt, Artificial Sequence
  Description of Artificial Sequence: Synthetic oligonucleotide
gaguuccaugccauagcuu

SEQ ID NO: 1109761 - RNA, 19 nt, Artificial Sequence
  Description of Artificial Sequence: Synthetic oligonucleotide
ggagucuagagaacugguu

SEQ ID NO: 1109762 - RNA, 19 nt, Artificial Sequence
  Description of Artificial Sequence: Synthetic oligonucleotide
cucaucaccucagcggcuu

SEQ ID NO: 1109763 - RNA, 19 nt, Artificial Sequence
  Description of Artificial Sequence: Synthetic oligonucleotide
cacccaccuugcaguacaa

SEQ ID NO: 1109764 - RNA, 19 nt, Artificial Sequence
  Description of Artificial Sequence: Synthetic oligonucleotide
cccuguuuaccuauugcuu

SEQ ID NO: 1109765 - RNA, 19 nt, Artificial Sequence
  Description of Artificial Sequence: Synthetic oligonucleotide
gcauuagagggaagauacu

SEQ ID NO: 1109766 - RNA, 19 nt, Artificial Sequence
  Description of Artificial Sequence: Synthetic oligonucleotide
ggccuugcagagugaacau

SEQ ID NO: 1109767 - RNA, 19 nt, Artificial Sequence
  Description of Artificial Sequence: Synthetic oligonucleotide
ggucaucacuagucauccu

SEQ ID NO: 1109768 - RNA, 19 nt, Artificial Sequence
  Description of Artificial Sequence: Synthetic oligonucleotide
gcuggguuucuaagagaaa

SEQ ID NO: 1109769 - RNA, 19 nt, Artificial Sequence
  Description of Artificial Sequence: Synthetic oligonucleotide
ccaagcccuguuuaccuau

SEQ ID NO: 1109770 - RNA, 19 nt, Artificial Sequence
  Description of Artificial Sequence: Synthetic oligonucleotide
ccccaacacuagaaucaaa

SEQ ID NO: 1109771 - RNA, 19 nt, Artificial Sequence
  Description of Artificial Sequence: Synthetic oligonucleotide
ggcccugguggcagcuuga

SEQ ID NO: 1109772 - RNA, 19 nt, Artificial Sequence
  Description of Artificial Sequence: Synthetic oligonucleotide
cagcggcuuaagacaggau

SEQ ID NO: 1109773 - RNA, 19 nt, Artificial Sequence
  Description of Artificial Sequence: Synthetic oligonucleotide
gugcaacagugcagagaau

SEQ ID NO: 1109774 - RNA, 19 nt, Artificial Sequence
  Description of Artificial Sequence: Synthetic oligonucleotide
ggccggcaggcacacuuuu

SEQ ID NO: 1109775 - RNA, 19 nt, Artificial Sequence
  Description of Artificial Sequence: Synthetic oligonucleotide
cggcuuaagacaggauaua

SEQ ID NO: 1109776 - RNA, 19 nt, Artificial Sequence
  Description of Artificial Sequence: Synthetic oligonucleotide
gccagacaaguaagcugau

SEQ ID NO: 1109777 - RNA, 19 nt, Artificial Sequence
  Description of Artificial Sequence: Synthetic oligonucleotide
cccaaugcuuaaggucagu

SEQ ID NO: 1109778 - RNA, 19 nt, Artificial Sequence
  Description of Artificial Sequence: Synthetic oligonucleotide
gcuggccggcaggcacacu

SEQ ID NO: 1109779 - RNA, 19 nt, Artificial Sequence
  Description of Artificial Sequence: Synthetic oligonucleotide
aaaaucguagcauauuacc

SEQ ID NO: 1109780 - RNA, 19 nt, Artificial Sequence
  Description of Artificial Sequence: Synthetic oligonucleotide
aaaucuaucguguugaaug

SEQ ID NO: 1109781 - RNA, 19 nt, Artificial Sequence
  Description of Artificial Sequence: Synthetic oligonucleotide
aauauaggccuguaaagcc

SEQ ID NO: 1109782 - RNA, 19 nt, Artificial Sequence
  Description of Artificial Sequence: Synthetic oligonucleotide
aauggauaaagaugauucc

SEQ ID NO: 1109783 - RNA, 19 nt, Artificial Sequence
  Description of Artificial Sequence: Synthetic oligonucleotide
gauuauuugcaucagguag

SEQ ID NO: 1109784 - RNA, 19 nt, Artificial Sequence
  Description of Artificial Sequence: Synthetic oligonucleotide
aaaucaucaguuguuaggc

SEQ ID NO: 1109785 - RNA, 19 nt, Artificial Sequence
  Description of Artificial Sequence: Synthetic oligonucleotide
uugaauggcaaacuuaggg

SEQ ID NO: 1109786 - RNA, 19 nt, Artificial Sequence
  Description of Artificial Sequence: Synthetic oligonucleotide
gauaauucauuucaggacc

SEQ ID NO: 1109787 - RNA, 19 nt, Artificial Sequence
  Description of Artificial Sequence: Synthetic oligonucleotide
auuauuucuauucacaggu

SEQ ID NO: 1109788 - RNA, 19 nt, Artificial Sequence
  Description of Artificial Sequence: Synthetic oligonucleotide
aaaguuuacagguugaaaa

SEQ ID NO: 1109789 - RNA, 19 nt, Artificial Sequence
  Description of Artificial Sequence: Synthetic oligonucleotide
uugaauauacaucacaagu

SEQ ID NO: 1109790 - RNA, 19 nt, Artificial Sequence
  Description of Artificial Sequence: Synthetic oligonucleotide
ucaguuguuaggcuaaugg

SEQ ID NO: 1109791 - RNA, 19 nt, Artificial Sequence
  Description of Artificial Sequence: Synthetic oligonucleotide
ugauaaauguuguagggcc

SEQ ID NO: 1109792 - RNA, 19 nt, Artificial Sequence
  Description of Artificial Sequence: Synthetic oligonucleotide
acguuuauuauuucuauuc

SEQ ID NO: 1109793 - RNA, 19 nt, Artificial Sequence
  Description of Artificial Sequence: Synthetic oligonucleotide
aaucguagcauauuaccag

SEQ ID NO: 1109794 - RNA, 19 nt, Artificial Sequence
  Description of Artificial Sequence: Synthetic oligonucleotide
aguagauucucacaaugac

SEQ ID NO: 1109795 - RNA, 19 nt, Artificial Sequence
  Description of Artificial Sequence: Synthetic oligonucleotide
uuugaagagaccuaguaau

SEQ ID NO: 1109796 - RNA, 19 nt, Artificial Sequence
  Description of Artificial Sequence: Synthetic oligonucleotide
uugauuauuugcaucaggu

SEQ ID NO: 1109797 - RNA, 19 nt, Artificial Sequence
  Description of Artificial Sequence: Synthetic oligonucleotide
auaggaaucauauuuuccu

SEQ ID NO: 1109798 - RNA, 19 nt, Artificial Sequence
  Description of Artificial Sequence: Synthetic oligonucleotide
uacaucacaaguaacuaca

SEQ ID NO: 1109799 - RNA, 19 nt, Artificial Sequence
  Description of Artificial Sequence: Synthetic oligonucleotide
uuuuaauguccgaugauga

SEQ ID NO: 1109800 - RNA, 19 nt, Artificial Sequence
  Description of Artificial Sequence: Synthetic oligonucleotide
uacaauuuguccuuauacc

SEQ ID NO: 1109801 - RNA, 19 nt, Artificial Sequence
  Description of Artificial Sequence: Synthetic oligonucleotide
cuuuauucucggaugaagg

SEQ ID NO: 1109802 - RNA, 19 nt, Artificial Sequence
  Description of Artificial Sequence: Synthetic oligonucleotide
uccuuuaauuguaauguag

SEQ ID NO: 1109803 - RNA, 19 nt, Artificial Sequence
  Description of Artificial Sequence: Synthetic oligonucleotide
aagguuaaauaacauuugu

SEQ ID NO: 1109804 - RNA, 19 nt, Artificial Sequence
  Description of Artificial Sequence: Synthetic oligonucleotide
gauugugaagccaaauugg

SEQ ID NO: 1109805 - RNA, 19 nt, Artificial Sequence
  Description of Artificial Sequence: Synthetic oligonucleotide
ucaggcgugauaaauguug

SEQ ID NO: 1109806 - RNA, 19 nt, Artificial Sequence
  Description of Artificial Sequence: Synthetic oligonucleotide
cauuguuugguuuaugcac

SEQ ID NO: 1109807 - RNA, 19 nt, Artificial Sequence
  Description of Artificial Sequence: Synthetic oligonucleotide
uaacauuuguuucaaggcu

SEQ ID NO: 1109808 - RNA, 19 nt, Artificial Sequence
  Description of Artificial Sequence: Synthetic oligonucleotide
acaauuuguccuuauacca

SEQ ID NO: 1109809 - RNA, 19 nt, Artificial Sequence
  Description of Artificial Sequence: Synthetic oligonucleotide
agauuugaaaguaacgggg

SEQ ID NO: 1109810 - RNA, 19 nt, Artificial Sequence
  Description of Artificial Sequence: Synthetic oligonucleotide
gguauaacagaagugaggg

SEQ ID NO: 1109811 - RNA, 19 nt, Artificial Sequence
  Description of Artificial Sequence: Synthetic oligonucleotide
aaaaugaaaucuaucgugu

SEQ ID NO: 1109812 - RNA, 19 nt, Artificial Sequence
  Description of Artificial Sequence: Synthetic oligonucleotide
cugguaacuaugcacaggg

SEQ ID NO: 1109813 - RNA, 19 nt, Artificial Sequence
  Description of Artificial Sequence: Synthetic oligonucleotide
aaagaugauucuuuaggaa

SEQ ID NO: 1109814 - RNA, 19 nt, Artificial Sequence
  Description of Artificial Sequence: Synthetic oligonucleotide
ugaucguucugcuucaagc

SEQ ID NO: 1109815 - RNA, 19 nt, Artificial Sequence
  Description of Artificial Sequence: Synthetic oligonucleotide
uguauaaacucuucuucug

SEQ ID NO: 1109816 - RNA, 19 nt, Artificial Sequence
  Description of Artificial Sequence: Synthetic oligonucleotide
ucugacacuuguauaaacu

SEQ ID NO: 1109817 - RNA, 19 nt, Artificial Sequence
  Description of Artificial Sequence: Synthetic oligonucleotide
ggagauuugaaaguaacgg

SEQ ID NO: 1109818 - RNA, 19 nt, Artificial Sequence
  Description of Artificial Sequence: Synthetic oligonucleotide
aauacauccccuuccgcca

SEQ ID NO: 1109819 - RNA, 19 nt, Artificial Sequence
  Description of Artificial Sequence: Synthetic oligonucleotide
ucaucaauacauugcgucc

SEQ ID NO: 1109820 - RNA, 19 nt, Artificial Sequence
  Description of Artificial Sequence: Synthetic oligonucleotide
guuaccuaauccuuuauuc

SEQ ID NO: 1109821 - RNA, 19 nt, Artificial Sequence
  Description of Artificial Sequence: Synthetic oligonucleotide
uuuaauuguaauguagaaa

SEQ ID NO: 1109822 - RNA, 19 nt, Artificial Sequence
  Description of Artificial Sequence: Synthetic oligonucleotide
uuguccuuauaccacuuag

SEQ ID NO: 1109823 - RNA, 19 nt, Artificial Sequence
  Description of Artificial Sequence: Synthetic oligonucleotide
cuugucuaaggaacaaggg

SEQ ID NO: 1109824 - RNA, 19 nt, Artificial Sequence
  Description of Artificial Sequence: Synthetic oligonucleotide
aguucuuuguuucugguaa

SEQ ID NO: 1109825 - RNA, 19 nt, Artificial Sequence
  Description of Artificial Sequence: Synthetic oligonucleotide
uaauccuuuauucucggau

SEQ ID NO: 1109826 - RNA, 19 nt, Artificial Sequence
  Description of Artificial Sequence: Synthetic oligonucleotide
cuuaacaaaucaucaguug

SEQ ID NO: 1109827 - RNA, 19 nt, Artificial Sequence
  Description of Artificial Sequence: Synthetic oligonucleotide
cagguugaaaagaauauuc

SEQ ID NO: 1109828 - RNA, 19 nt, Artificial Sequence
  Description of Artificial Sequence: Synthetic oligonucleotide
uaauguccgaugaugaauc

SEQ ID NO: 1109829 - RNA, 19 nt, Artificial Sequence
  Description of Artificial Sequence: Synthetic oligonucleotide
uauacuaguuaccccugag

SEQ ID NO: 1109830 - RNA, 19 nt, Artificial Sequence
  Description of Artificial Sequence: Synthetic oligonucleotide
uuauccuuuucucuuggga

SEQ ID NO: 1109831 - RNA, 19 nt, Artificial Sequence
  Description of Artificial Sequence: Synthetic oligonucleotide
ucuaucguguugaauggca

SEQ ID NO: 1109832 - RNA, 19 nt, Artificial Sequence
  Description of Artificial Sequence: Synthetic oligonucleotide
uacuaguuaccccugagau

SEQ ID NO: 1109833 - RNA, 19 nt, Artificial Sequence
  Description of Artificial Sequence: Synthetic oligonucleotide
ugaagagaccuaguaauag

SEQ ID NO: 1109834 - RNA, 19 nt, Artificial Sequence
  Description of Artificial Sequence: Synthetic oligonucleotide
auacauugcgucccggaac

SEQ ID NO: 1109835 - RNA, 19 nt, Artificial Sequence
  Description of Artificial Sequence: Synthetic oligonucleotide
acauugguuaccuaauccu

SEQ ID NO: 1109836 - RNA, 19 nt, Artificial Sequence
  Description of Artificial Sequence: Synthetic oligonucleotide
agauauuaagaucggauuu

SEQ ID NO: 1109837 - RNA, 19 nt, Artificial Sequence
  Description of Artificial Sequence: Synthetic oligonucleotide
agguuuuaggguuccgggc

SEQ ID NO: 1109838 - RNA, 19 nt, Artificial Sequence
  Description of Artificial Sequence: Synthetic oligonucleotide
uuugguuuaugcacauagc

SEQ ID NO: 1109839 - RNA, 19 nt, Artificial Sequence
  Description of Artificial Sequence: Synthetic oligonucleotide
uuucccaugaucguucugc

SEQ ID NO: 1109840 - RNA, 19 nt, Artificial Sequence
  Description of Artificial Sequence: Synthetic oligonucleotide
guuucugguaacuaugcac

SEQ ID NO: 1109841 - RNA, 19 nt, Artificial Sequence
  Description of Artificial Sequence: Synthetic oligonucleotide
aguaacggggacauuuucc

SEQ ID NO: 1109842 - RNA, 19 nt, Artificial Sequence
  Description of Artificial Sequence: Synthetic oligonucleotide
caauauaggccuguaaagc

SEQ ID NO: 1109843 - RNA, 19 nt, Artificial Sequence
  Description of Artificial Sequence: Synthetic oligonucleotide
aguuguuaggcuaauggag

SEQ ID NO: 1109844 - RNA, 19 nt, Artificial Sequence
  Description of Artificial Sequence: Synthetic oligonucleotide
gaugauucuuuaggaaugg

SEQ ID NO: 1109845 - RNA, 19 nt, Artificial Sequence
  Description of Artificial Sequence: Synthetic oligonucleotide
uguagggccguuugaagag

SEQ ID NO: 1109846 - RNA, 19 nt, Artificial Sequence
  Description of Artificial Sequence: Synthetic oligonucleotide
ugcuugaagguuaaauaac

SEQ ID NO: 1109847 - RNA, 19 nt, Artificial Sequence
  Description of Artificial Sequence: Synthetic oligonucleotide
gauaaauguuguagggccg

SEQ ID NO: 1109848 - RNA, 19 nt, Artificial Sequence
  Description of Artificial Sequence: Synthetic oligonucleotide
aggaccauaguuugaacug

SEQ ID NO: 1109849 - RNA, 19 nt, Artificial Sequence
  Description of Artificial Sequence: Synthetic oligonucleotide
ugauucuuuaggaauggau

SEQ ID NO: 1109850 - RNA, 19 nt, Artificial Sequence
  Description of Artificial Sequence: Synthetic oligonucleotide
aaguaacggggacauuuuc

SEQ ID NO: 1109851 - RNA, 19 nt, Artificial Sequence
  Description of Artificial Sequence: Synthetic oligonucleotide
ucgaccaggucucucaggc

SEQ ID NO: 1109852 - RNA, 19 nt, Artificial Sequence
  Description of Artificial Sequence: Synthetic oligonucleotide
guagcauauuaccagacuc

SEQ ID NO: 1109853 - RNA, 19 nt, Artificial Sequence
  Description of Artificial Sequence: Synthetic oligonucleotide
uagcauauuaccagacucu

SEQ ID NO: 1109854 - RNA, 19 nt, Artificial Sequence
  Description of Artificial Sequence: Synthetic oligonucleotide
uuaccccugagauauuaag

SEQ ID NO: 1109855 - RNA, 19 nt, Artificial Sequence
  Description of Artificial Sequence: Synthetic oligonucleotide
gauauuaagaucggauuuc

SEQ ID NO: 1109856 - RNA, 19 nt, Artificial Sequence
  Description of Artificial Sequence: Synthetic oligonucleotide
agcgcgucgguuugaaacc

SEQ ID NO: 1109857 - RNA, 19 nt, Artificial Sequence
  Description of Artificial Sequence: Synthetic oligonucleotide
guaacggggacauuuuccc

SEQ ID NO: 1109858 - RNA, 19 nt, Artificial Sequence
  Description of Artificial Sequence: Synthetic oligonucleotide
uuauugugguuuaaguuuu

SEQ ID NO: 1109859 - RNA, 19 nt, Artificial Sequence
  Description of Artificial Sequence: Synthetic oligonucleotide
ugggaguagagucuauaug

SEQ ID NO: 1109860 - RNA, 19 nt, Artificial Sequence
  Description of Artificial Sequence: Synthetic oligonucleotide
uauucucggaugaaggaau

SEQ ID NO: 1109861 - RNA, 19 nt, Artificial Sequence
  Description of Artificial Sequence: Synthetic oligonucleotide
agguagcaagucuugauug

SEQ ID NO: 1109862 - RNA, 19 nt, Artificial Sequence
  Description of Artificial Sequence: Synthetic oligonucleotide
caauuuguccuuauaccac

SEQ ID NO: 1109863 - RNA, 19 nt, Artificial Sequence
  Description of Artificial Sequence: Synthetic oligonucleotide
ucaaggcuucaacaggacc

SEQ ID NO: 1109864 - RNA, 19 nt, Artificial Sequence
  Description of Artificial Sequence: Synthetic oligonucleotide
aagagaccuaguaauagga

SEQ ID NO: 1109865 - RNA, 19 nt, Artificial Sequence
  Description of Artificial Sequence: Synthetic oligonucleotide
cuguaaaguuuacagguug

SEQ ID NO: 1109866 - RNA, 19 nt, Artificial Sequence
  Description of Artificial Sequence: Synthetic oligonucleotide
cucggaugaaggaauacug

SEQ ID NO: 1109867 - RNA, 19 nt, Artificial Sequence
  Description of Artificial Sequence: Synthetic oligonucleotide
ucucaggcgugauaaaugu

SEQ ID NO: 1109868 - RNA, 19 nt, Artificial Sequence
  Description of Artificial Sequence: Synthetic oligonucleotide
cugaguaguucuuuguuuc

SEQ ID NO: 1109869 - RNA, 19 nt, Artificial Sequence
  Description of Artificial Sequence: Synthetic oligonucleotide
uuaugcacauagcuggaaa

SEQ ID NO: 1109870 - RNA, 19 nt, Artificial Sequence
  Description of Artificial Sequence: Synthetic oligonucleotide
uaccuaauccuuuauucuc

SEQ ID NO: 1109871 - RNA, 19 nt, Artificial Sequence
  Description of Artificial Sequence: Synthetic oligonucleotide
aucaauacauugcgucccg

SEQ ID NO: 1109872 - RNA, 19 nt, Artificial Sequence
  Description of Artificial Sequence: Synthetic oligonucleotide
uuuaauguccgaugaugaa

SEQ ID NO: 1109873 - RNA, 19 nt, Artificial Sequence
  Description of Artificial Sequence: Synthetic oligonucleotide
agaaguuacugaagauucc

SEQ ID NO: 1109874 - RNA, 19 nt, Artificial Sequence
  Description of Artificial Sequence: Synthetic oligonucleotide
uucucaaaacaaguuauuc

SEQ ID NO: 1109875 - RNA, 19 nt, Artificial Sequence
  Description of Artificial Sequence: Synthetic oligonucleotide
cagguuuuaggguuccggg

SEQ ID NO: 1109876 - RNA, 19 nt, Artificial Sequence
  Description of Artificial Sequence: Synthetic oligonucleotide
cauuugaauauacaucaca

SEQ ID NO: 1109877 - RNA, 19 nt, Artificial Sequence
  Description of Artificial Sequence: Synthetic oligonucleotide
ggaacaagggcugucaucc

SEQ ID NO: 1109878 - RNA, 19 nt, Artificial Sequence
  Description of Artificial Sequence: Synthetic oligonucleotide
agaugauuccaaaacacgu

SEQ ID NO: 1109879 - RNA, 19 nt, Artificial Sequence
  Description of Artificial Sequence: Synthetic oligonucleotide
agguauaacagaagugagg

SEQ ID NO: 1109880 - RNA, 19 nt, Artificial Sequence
  Description of Artificial Sequence: Synthetic oligonucleotide
gaaaaucguagcauauuac

SEQ ID NO: 1109881 - RNA, 19 nt, Artificial Sequence
  Description of Artificial Sequence: Synthetic oligonucleotide
gcuaauggaguccauauca

SEQ ID NO: 1109882 - RNA, 19 nt, Artificial Sequence
  Description of Artificial Sequence: Synthetic oligonucleotide
ucggauuucuggcuaguga

SEQ ID NO: 1109883 - RNA, 19 nt, Artificial Sequence
  Description of Artificial Sequence: Synthetic oligonucleotide
uccuuauaccacuuaggcu

SEQ ID NO: 1109884 - RNA, 19 nt, Artificial Sequence
  Description of Artificial Sequence: Synthetic oligonucleotide
ucggaugaaggaauacugu

SEQ ID NO: 1109885 - RNA, 19 nt, Artificial Sequence
  Description of Artificial Sequence: Synthetic oligonucleotide
cagguauaacagaagugag

SEQ ID NO: 1109886 - RNA, 19 nt, Artificial Sequence
  Description of Artificial Sequence: Synthetic oligonucleotide
aggagauuugaaaguaacg

SEQ ID NO: 1109887 - RNA, 19 nt, Artificial Sequence
  Description of Artificial Sequence: Synthetic oligonucleotide
uccauaucauuaauaguuu

SEQ ID NO: 1109888 - RNA, 19 nt, Artificial Sequence
  Description of Artificial Sequence: Synthetic oligonucleotide
uguacaauuuguccuuaua

SEQ ID NO: 1109889 - RNA, 19 nt, Artificial Sequence
  Description of Artificial Sequence: Synthetic oligonucleotide
caucaauacauugcguccc

SEQ ID NO: 1109890 - RNA, 19 nt, Artificial Sequence
  Description of Artificial Sequence: Synthetic oligonucleotide
gugauaaauguuguagggc

SEQ ID NO: 1109891 - RNA, 19 nt, Artificial Sequence
  Description of Artificial Sequence: Synthetic oligonucleotide
ugauuauuugcaucaggua

SEQ ID NO: 1109892 - RNA, 19 nt, Artificial Sequence
  Description of Artificial Sequence: Synthetic oligonucleotide
uuauucucggaugaaggaa

SEQ ID NO: 1109893 - RNA, 19 nt, Artificial Sequence
  Description of Artificial Sequence: Synthetic oligonucleotide
aaguaacuacauuauccuu

SEQ ID NO: 1109894 - RNA, 19 nt, Artificial Sequence
  Description of Artificial Sequence: Synthetic oligonucleotide
accuaauccuuuauucucg

SEQ ID NO: 1109895 - RNA, 19 nt, Artificial Sequence
  Description of Artificial Sequence: Synthetic oligonucleotide
auacuaguuaccccugaga

SEQ ID NO: 1109896 - RNA, 19 nt, Artificial Sequence
  Description of Artificial Sequence: Synthetic oligonucleotide
gguaucaucgaccaggucu

SEQ ID NO: 1109897 - RNA, 19 nt, Artificial Sequence
  Description of Artificial Sequence: Synthetic oligonucleotide
aacacguuuauuauuucua

SEQ ID NO: 1109898 - RNA, 19 nt, Artificial Sequence
  Description of Artificial Sequence: Synthetic oligonucleotide
aguaacuacauuauccuuu

SEQ ID NO: 1109899 - RNA, 19 nt, Artificial Sequence
  Description of Artificial Sequence: Synthetic oligonucleotide
aggaacaagggcugucauc

SEQ ID NO: 1109900 - RNA, 19 nt, Artificial Sequence
  Description of Artificial Sequence: Synthetic oligonucleotide
cauaaagaguuuaagugcu

SEQ ID NO: 1109901 - RNA, 19 nt, Artificial Sequence
  Description of Artificial Sequence: Synthetic oligonucleotide
aacauuuguuucaaggcuu

SEQ ID NO: 1109902 - RNA, 19 nt, Artificial Sequence
  Description of Artificial Sequence: Synthetic oligonucleotide
uucuauucacagguuuuag

SEQ ID NO: 1109903 - RNA, 19 nt, Artificial Sequence
  Description of Artificial Sequence: Synthetic oligonucleotide
uauaggccuguaaagccuc

SEQ ID NO: 1109904 - RNA, 19 nt, Artificial Sequence
  Description of Artificial Sequence: Synthetic oligonucleotide
ugguaacuaugcacagggg

SEQ ID NO: 1109905 - RNA, 19 nt, Artificial Sequence
  Description of Artificial Sequence: Synthetic oligonucleotide
agguacaggagauuugaaa

SEQ ID NO: 1109906 - RNA, 19 nt, Artificial Sequence
  Description of Artificial Sequence: Synthetic oligonucleotide
aucaucaguuguuaggcua

SEQ ID NO: 1109907 - RNA, 19 nt, Artificial Sequence
  Description of Artificial Sequence: Synthetic oligonucleotide
auauuaagaucggauuucu

SEQ ID NO: 1109908 - RNA, 19 nt, Artificial Sequence
  Description of Artificial Sequence: Synthetic oligonucleotide
gcgugauaaauguuguagg

SEQ ID NO: 1109909 - RNA, 19 nt, Artificial Sequence
  Description of Artificial Sequence: Synthetic oligonucleotide
uguuaggcuaauggagucc

SEQ ID NO: 1109910 - RNA, 19 nt, Artificial Sequence
  Description of Artificial Sequence: Synthetic oligonucleotide
ugaguaguucuuuguuucu

SEQ ID NO: 1109911 - RNA, 19 nt, Artificial Sequence
  Description of Artificial Sequence: Synthetic oligonucleotide
agugcuguuugugaucaag

SEQ ID NO: 1109912 - RNA, 19 nt, Artificial Sequence
  Description of Artificial Sequence: Synthetic oligonucleotide
ucucggaugaaggaauacu

SEQ ID NO: 1109913 - RNA, 19 nt, Artificial Sequence
  Description of Artificial Sequence: Synthetic oligonucleotide
uucaggaccauaguuugaa

SEQ ID NO: 1109914 - RNA, 19 nt, Artificial Sequence
  Description of Artificial Sequence: Synthetic oligonucleotide
cagcgcgucgguuugaaac

SEQ ID NO: 1109915 - RNA, 19 nt, Artificial Sequence
  Description of Artificial Sequence: Synthetic oligonucleotide
cugcuugaagguuaaauaa

SEQ ID NO: 1109916 - RNA, 19 nt, Artificial Sequence
  Description of Artificial Sequence: Synthetic oligonucleotide
auugugaagccaaauugga

SEQ ID NO: 1109917 - RNA, 19 nt, Artificial Sequence
  Description of Artificial Sequence: Synthetic oligonucleotide
uugggaguagagucuauau

SEQ ID NO: 1109918 - RNA, 19 nt, Artificial Sequence
  Description of Artificial Sequence: Synthetic oligonucleotide
gauucccgggaacaaacuc

SEQ ID NO: 1109919 - RNA, 19 nt, Artificial Sequence
  Description of Artificial Sequence: Synthetic oligonucleotide
ugcuguuugugaucaagau

SEQ ID NO: 1109920 - RNA, 19 nt, Artificial Sequence
  Description of Artificial Sequence: Synthetic oligonucleotide
ucguagcauauuaccagac

SEQ ID NO: 1109921 - RNA, 19 nt, Artificial Sequence
  Description of Artificial Sequence: Synthetic oligonucleotide
uuggucggugaccagguau

SEQ ID NO: 1109922 - RNA, 19 nt, Artificial Sequence
  Description of Artificial Sequence: Synthetic oligonucleotide
agaaguagauucucacaau

SEQ ID NO: 1109923 - RNA, 19 nt, Artificial Sequence
  Description of Artificial Sequence: Synthetic oligonucleotide
caucaauguucacucugcc

SEQ ID NO: 1109924 - RNA, 19 nt, Artificial Sequence
  Description of Artificial Sequence: Synthetic oligonucleotide
gagauauuaagaucggauu

SEQ ID NO: 1109925 - RNA, 19 nt, Artificial Sequence
  Description of Artificial Sequence: Synthetic oligonucleotide
guagauucucacaaugaca

SEQ ID NO: 1109926 - RNA, 19 nt, Artificial Sequence
  Description of Artificial Sequence: Synthetic oligonucleotide
guccauaucauuaauaguu

SEQ ID NO: 1109927 - RNA, 19 nt, Artificial Sequence
  Description of Artificial Sequence: Synthetic oligonucleotide
uuucaggaccauaguuuga

SEQ ID NO: 1109928 - RNA, 19 nt, Artificial Sequence
  Description of Artificial Sequence: Synthetic oligonucleotide
uaucguguugaauggcaaa

SEQ ID NO: 1109929 - RNA, 19 nt, Artificial Sequence
  Description of Artificial Sequence: Synthetic oligonucleotide
aggcuaauggaguccauau

SEQ ID NO: 1109930 - RNA, 19 nt, Artificial Sequence
  Description of Artificial Sequence: Synthetic oligonucleotide
uuucuauucacagguuuua

SEQ ID NO: 1109931 - RNA, 19 nt, Artificial Sequence
  Description of Artificial Sequence: Synthetic oligonucleotide
uggggauuguccugggaga

SEQ ID NO: 1109932 - RNA, 19 nt, Artificial Sequence
  Description of Artificial Sequence: Synthetic oligonucleotide
acaggaccaugauguuugc

SEQ ID NO: 1109933 - RNA, 19 nt, Artificial Sequence
  Description of Artificial Sequence: Synthetic oligonucleotide
gaccagguauaacagaagu

SEQ ID NO: 1109934 - RNA, 19 nt, Artificial Sequence
  Description of Artificial Sequence: Synthetic oligonucleotide
augaucguucugcuucaag

SEQ ID NO: 1109935 - RNA, 19 nt, Artificial Sequence
  Description of Artificial Sequence: Synthetic oligonucleotide
gaucguucugcuucaagcu

SEQ ID NO: 1109936 - RNA, 19 nt, Artificial Sequence
  Description of Artificial Sequence: Synthetic oligonucleotide
ucaauacauugcgucccgg

SEQ ID NO: 1109937 - RNA, 19 nt, Artificial Sequence
  Description of Artificial Sequence: Synthetic oligonucleotide
uuccuuuaauuguaaugua

SEQ ID NO: 1109938 - RNA, 19 nt, Artificial Sequence
  Description of Artificial Sequence: Synthetic oligonucleotide
ggaaaaucguagcauauua

SEQ ID NO: 1109939 - RNA, 19 nt, Artificial Sequence
  Description of Artificial Sequence: Synthetic oligonucleotide
uugugguuuaaguuuuauu

SEQ ID NO: 1109940 - RNA, 19 nt, Artificial Sequence
  Description of Artificial Sequence: Synthetic oligonucleotide
ucuugauugugaagccaaa

SEQ ID NO: 1109941 - RNA, 19 nt, Artificial Sequence
  Description of Artificial Sequence: Synthetic oligonucleotide
guaacuaugcacaggggaa

SEQ ID NO: 1109942 - RNA, 19 nt, Artificial Sequence
  Description of Artificial Sequence: Synthetic oligonucleotide
auauaggccuguaaagccu

SEQ ID NO: 1109943 - RNA, 19 nt, Artificial Sequence
  Description of Artificial Sequence: Synthetic oligonucleotide
cuccagauaggguagagcu

SEQ ID NO: 1109944 - RNA, 19 nt, Artificial Sequence
  Description of Artificial Sequence: Synthetic oligonucleotide
guagcaagucuugauugug

SEQ ID NO: 1109945 - RNA, 19 nt, Artificial Sequence
  Description of Artificial Sequence: Synthetic oligonucleotide
uccagauaggguagagcuc

SEQ ID NO: 1109946 - RNA, 19 nt, Artificial Sequence
  Description of Artificial Sequence: Synthetic oligonucleotide
caucagguagcaagucuug

SEQ ID NO: 1109947 - RNA, 19 nt, Artificial Sequence
  Description of Artificial Sequence: Synthetic oligonucleotide
gagaccuaguaauaggaau

SEQ ID NO: 1109948 - RNA, 19 nt, Artificial Sequence
  Description of Artificial Sequence: Synthetic oligonucleotide
acuaguuaccccugagaua

SEQ ID NO: 1109949 - RNA, 19 nt, Artificial Sequence
  Description of Artificial Sequence: Synthetic oligonucleotide
caagcuugucuaaggaaca

SEQ ID NO: 1109950 - RNA, 19 nt, Artificial Sequence
  Description of Artificial Sequence: Synthetic oligonucleotide
auucccgggaacaaacucu

SEQ ID NO: 1109951 - RNA, 19 nt, Artificial Sequence
  Description of Artificial Sequence: Synthetic oligonucleotide
guaucaucgaccaggucuc

SEQ ID NO: 1109952 - RNA, 19 nt, Artificial Sequence
  Description of Artificial Sequence: Synthetic oligonucleotide
uuuaugcacauagcuggaa

SEQ ID NO: 1109953 - RNA, 19 nt, Artificial Sequence
  Description of Artificial Sequence: Synthetic oligonucleotide
ugguugacugcuucccacu

SEQ ID NO: 1109954 - RNA, 19 nt, Artificial Sequence
  Description of Artificial Sequence: Synthetic oligonucleotide
aggguuccgggccuaccac

SEQ ID NO: 1109955 - RNA, 19 nt, Artificial Sequence
  Description of Artificial Sequence: Synthetic oligonucleotide
uaacuaugcacaggggaau

SEQ ID NO: 1109956 - RNA, 19 nt, Artificial Sequence
  Description of Artificial Sequence: Synthetic oligonucleotide
agcuugucuaaggaacaag

SEQ ID NO: 1109957 - RNA, 19 nt, Artificial Sequence
  Description of Artificial Sequence: Synthetic oligonucleotide
ucccacugguaucaucgac

SEQ ID NO: 1109958 - RNA, 19 nt, Artificial Sequence
  Description of Artificial Sequence: Synthetic oligonucleotide
guuaggcuaauggagucca

SEQ ID NO: 1109959 - RNA, 19 nt, Artificial Sequence
  Description of Artificial Sequence: Synthetic oligonucleotide
acagguugaaaagaauauu

SEQ ID NO: 1109960 - RNA, 19 nt, Artificial Sequence
  Description of Artificial Sequence: Synthetic oligonucleotide
ucuaaggaacaagggcugu

SEQ ID NO: 1109961 - RNA, 19 nt, Artificial Sequence
  Description of Artificial Sequence: Synthetic oligonucleotide
ucguguugaauggcaaacu

SEQ ID NO: 1109962 - RNA, 19 nt, Artificial Sequence
  Description of Artificial Sequence: Synthetic oligonucleotide
uggaaaaucguagcauauu

SEQ ID NO: 1109963 - RNA, 19 nt, Artificial Sequence
  Description of Artificial Sequence: Synthetic oligonucleotide
gccuguaaagccucagaag

SEQ ID NO: 1109964 - RNA, 19 nt, Artificial Sequence
  Description of Artificial Sequence: Synthetic oligonucleotide
uccuugaaagaugauucuu

SEQ ID NO: 1109965 - RNA, 19 nt, Artificial Sequence
  Description of Artificial Sequence: Synthetic oligonucleotide
cccacugguaucaucgacc

SEQ ID NO: 1109966 - RNA, 19 nt, Artificial Sequence
  Description of Artificial Sequence: Synthetic oligonucleotide
auauuaccagacucuucau

SEQ ID NO: 1109967 - RNA, 19 nt, Artificial Sequence
  Description of Artificial Sequence: Synthetic oligonucleotide
ggauacuuaaaaucuggua

SEQ ID NO: 1109968 - RNA, 19 nt, Artificial Sequence
  Description of Artificial Sequence: Synthetic oligonucleotide
caauacauugcgucccgga

SEQ ID NO: 1109969 - RNA, 19 nt, Artificial Sequence
  Description of Artificial Sequence: Synthetic oligonucleotide
agucuugauugugaagcca

SEQ ID NO: 1109970 - RNA, 19 nt, Artificial Sequence
  Description of Artificial Sequence: Synthetic oligonucleotide
uagggccguuugaagagac

SEQ ID NO: 1109971 - RNA, 19 nt, Artificial Sequence
  Description of Artificial Sequence: Synthetic oligonucleotide
uauugugguuuaaguuuua

SEQ ID NO: 1109972 - RNA, 19 nt, Artificial Sequence
  Description of Artificial Sequence: Synthetic oligonucleotide
cuacauuauccuuuucucu

SEQ ID NO: 1109973 - RNA, 19 nt, Artificial Sequence
  Description of Artificial Sequence: Synthetic oligonucleotide
ucauccucugacacuugua

SEQ ID NO: 1109974 - RNA, 19 nt, Artificial Sequence
  Description of Artificial Sequence: Synthetic oligonucleotide
guauacuaguuaccccuga

SEQ ID NO: 1109975 - RNA, 19 nt, Artificial Sequence
  Description of Artificial Sequence: Synthetic oligonucleotide
auugguuaccuaauccuuu

SEQ ID NO: 1109976 - RNA, 19 nt, Artificial Sequence
  Description of Artificial Sequence: Synthetic oligonucleotide
ggcuagugagccaucuugg

SEQ ID NO: 1109977 - RNA, 19 nt, Artificial Sequence
  Description of Artificial Sequence: Synthetic oligonucleotide
aagcuugucuaaggaacaa

SEQ ID NO: 1109978 - RNA, 19 nt, Artificial Sequence
  Description of Artificial Sequence: Synthetic oligonucleotide
ugguuaccuaauccuuuau

SEQ ID NO: 1109979 - RNA, 19 nt, Artificial Sequence
  Description of Artificial Sequence: Synthetic oligonucleotide
agcauauuaccagacucuu

SEQ ID NO: 1109980 - RNA, 19 nt, Artificial Sequence
  Description of Artificial Sequence: Synthetic oligonucleotide
aacuaugcacaggggaaua

SEQ ID NO: 1109981 - RNA, 19 nt, Artificial Sequence
  Description of Artificial Sequence: Synthetic oligonucleotide
uucucggaugaaggaauac

SEQ ID NO: 1109982 - RNA, 19 nt, Artificial Sequence
  Description of Artificial Sequence: Synthetic oligonucleotide
caggcuuugcuaagucuuc

SEQ ID NO: 1109983 - RNA, 19 nt, Artificial Sequence
  Description of Artificial Sequence: Synthetic oligonucleotide
gucgguuugaaaccuccaa

SEQ ID NO: 1109984 - RNA, 19 nt, Artificial Sequence
  Description of Artificial Sequence: Synthetic oligonucleotide
uaacuacauuauccuuuuc

SEQ ID NO: 1109985 - RNA, 19 nt, Artificial Sequence
  Description of Artificial Sequence: Synthetic oligonucleotide
guaacuacauuauccuuuu

SEQ ID NO: 1109986 - RNA, 19 nt, Artificial Sequence
  Description of Artificial Sequence: Synthetic oligonucleotide
guaauaggaaucauauuuu

SEQ ID NO: 1109987 - RNA, 19 nt, Artificial Sequence
  Description of Artificial Sequence: Synthetic oligonucleotide
auuuguaagcugaguaguu

SEQ ID NO: 1109988 - RNA, 19 nt, Artificial Sequence
  Description of Artificial Sequence: Synthetic oligonucleotide
uaggcuaauggaguccaua

SEQ ID NO: 1109989 - RNA, 19 nt, Artificial Sequence
  Description of Artificial Sequence: Synthetic oligonucleotide
gaugauuccaaaacacguu

SEQ ID NO: 1109990 - RNA, 19 nt, Artificial Sequence
  Description of Artificial Sequence: Synthetic oligonucleotide
gaccauaguuugaacuguc

SEQ ID NO: 1109991 - RNA, 19 nt, Artificial Sequence
  Description of Artificial Sequence: Synthetic oligonucleotide
cuaucguguugaauggcaa

SEQ ID NO: 1109992 - RNA, 19 nt, Artificial Sequence
  Description of Artificial Sequence: Synthetic oligonucleotide
gccguuugaagagaccuag

SEQ ID NO: 1109993 - RNA, 19 nt, Artificial Sequence
  Description of Artificial Sequence: Synthetic oligonucleotide
caggauaagcaauucaauu

SEQ ID NO: 1109994 - RNA, 19 nt, Artificial Sequence
  Description of Artificial Sequence: Synthetic oligonucleotide
ucccggaacuuugcugagg

SEQ ID NO: 1109995 - RNA, 19 nt, Artificial Sequence
  Description of Artificial Sequence: Synthetic oligonucleotide
aucaguuguuaggcuaaug

SEQ ID NO: 1109996 - RNA, 19 nt, Artificial Sequence
  Description of Artificial Sequence: Synthetic oligonucleotide
ugcgucccggaacuuugcu

SEQ ID NO: 1109997 - RNA, 19 nt, Artificial Sequence
  Description of Artificial Sequence: Synthetic oligonucleotide
uccccuuccgccagcgcgu

SEQ ID NO: 1109998 - RNA, 19 nt, Artificial Sequence
  Description of Artificial Sequence: Synthetic oligonucleotide
uugcgucccggaacuuugc

SEQ ID NO: 1109999 - RNA, 19 nt, Artificial Sequence
  Description of Artificial Sequence: Synthetic oligonucleotide
agagaccuaguaauaggaa

SEQ ID NO: 1110000 - RNA, 19 nt, Artificial Sequence
  Description of Artificial Sequence: Synthetic oligonucleotide
cagaagcagaacuguacaa

SEQ ID NO: 1110001 - RNA, 19 nt, Artificial Sequence
  Description of Artificial Sequence: Synthetic oligonucleotide
caucaauauaggccuguaa

SEQ ID NO: 1110002 - RNA, 19 nt, Artificial Sequence
  Description of Artificial Sequence: Synthetic oligonucleotide
aucggauuucuggcuagug

SEQ ID NO: 1110003 - RNA, 19 nt, Artificial Sequence
  Description of Artificial Sequence: Synthetic oligonucleotide
uuguuuggucggugaccag

SEQ ID NO: 1110004 - RNA, 19 nt, Artificial Sequence
  Description of Artificial Sequence: Synthetic oligonucleotide
gguauacuaguuaccccug

SEQ ID NO: 1110005 - RNA, 19 nt, Artificial Sequence
  Description of Artificial Sequence: Synthetic oligonucleotide
ccuaguaauaggaaucaua

SEQ ID NO: 1110006 - RNA, 19 nt, Artificial Sequence
  Description of Artificial Sequence: Synthetic oligonucleotide
uuaggcuaauggaguccau

SEQ ID NO: 1110007 - RNA, 19 nt, Artificial Sequence
  Description of Artificial Sequence: Synthetic oligonucleotide
agggccguuugaagagacc

SEQ ID NO: 1110008 - RNA, 19 nt, Artificial Sequence
  Description of Artificial Sequence: Synthetic oligonucleotide
gugcuguuugugaucaaga

SEQ ID NO: 1110009 - RNA, 19 nt, Artificial Sequence
  Description of Artificial Sequence: Synthetic oligonucleotide
ggccuguaaagccucagaa

SEQ ID NO: 1110010 - RNA, 19 nt, Artificial Sequence
  Description of Artificial Sequence: Synthetic oligonucleotide
gccuaccacauuucuuucc

SEQ ID NO: 1110011 - RNA, 19 nt, Artificial Sequence
  Description of Artificial Sequence: Synthetic oligonucleotide
cacauagcuggaaaaucgu

SEQ ID NO: 1110012 - RNA, 19 nt, Artificial Sequence
  Description of Artificial Sequence: Synthetic oligonucleotide
acauagcuggaaaaucgua

SEQ ID NO: 1110013 - RNA, 19 nt, Artificial Sequence
  Description of Artificial Sequence: Synthetic oligonucleotide
uugcaucagguagcaaguc

SEQ ID NO: 1110014 - RNA, 19 nt, Artificial Sequence
  Description of Artificial Sequence: Synthetic oligonucleotide
uuuggucggugaccaggua

SEQ ID NO: 1110015 - RNA, 19 nt, Artificial Sequence
  Description of Artificial Sequence: Synthetic oligonucleotide
uuauaccacuuaggcugca

SEQ ID NO: 1110016 - RNA, 19 nt, Artificial Sequence
  Description of Artificial Sequence: Synthetic oligonucleotide
agauucccgggaacaaacu

SEQ ID NO: 1110017 - RNA, 19 nt, Artificial Sequence
  Description of Artificial Sequence: Synthetic oligonucleotide
ggcuaauggaguccauauc

SEQ ID NO: 1110018 - RNA, 19 nt, Artificial Sequence
  Description of Artificial Sequence: Synthetic oligonucleotide
cauugguuaccuaauccuu

SEQ ID NO: 1110019 - RNA, 19 nt, Artificial Sequence
  Description of Artificial Sequence: Synthetic oligonucleotide
cccgggaacaaacucugug

SEQ ID NO: 1110020 - RNA, 19 nt, Artificial Sequence
  Description of Artificial Sequence: Synthetic oligonucleotide
uaaauguuguagggccguu

SEQ ID NO: 1110021 - RNA, 19 nt, Artificial Sequence
  Description of Artificial Sequence: Synthetic oligonucleotide
aggcgugauaaauguugua

SEQ ID NO: 1110022 - RNA, 19 nt, Artificial Sequence
  Description of Artificial Sequence: Synthetic oligonucleotide
gcuagugagccaucuugga

SEQ ID NO: 1110023 - RNA, 19 nt, Artificial Sequence
  Description of Artificial Sequence: Synthetic oligonucleotide
gucccggaacuuugcugag

SEQ ID NO: 1110024 - RNA, 19 nt, Artificial Sequence
  Description of Artificial Sequence: Synthetic oligonucleotide
guuuuaggguuccgggccu

SEQ ID NO: 1110025 - RNA, 19 nt, Artificial Sequence
  Description of Artificial Sequence: Synthetic oligonucleotide
ggaauacuguaaaguuuac

SEQ ID NO: 1110026 - RNA, 19 nt, Artificial Sequence
  Description of Artificial Sequence: Synthetic oligonucleotide
ggugacuguuuauuguggu

SEQ ID NO: 1110027 - RNA, 19 nt, Artificial Sequence
  Description of Artificial Sequence: Synthetic oligonucleotide
cuagugagccaucuuggau

SEQ ID NO: 1110028 - RNA, 19 nt, Artificial Sequence
  Description of Artificial Sequence: Synthetic oligonucleotide
accuaguaauaggaaucau

SEQ ID NO: 1110029 - RNA, 19 nt, Artificial Sequence
  Description of Artificial Sequence: Synthetic oligonucleotide
uaucaucgaccaggucucu

SEQ ID NO: 1110030 - RNA, 19 nt, Artificial Sequence
  Description of Artificial Sequence: Synthetic oligonucleotide
ggaguccauaucauuaaua

SEQ ID NO: 1110031 - RNA, 19 nt, Artificial Sequence
  Description of Artificial Sequence: Synthetic oligonucleotide
caggcgugauaaauguugu

SEQ ID NO: 1110032 - RNA, 19 nt, Artificial Sequence
  Description of Artificial Sequence: Synthetic oligonucleotide
cuugggaguagagucuaua

SEQ ID NO: 1110033 - RNA, 19 nt, Artificial Sequence
  Description of Artificial Sequence: Synthetic oligonucleotide
cugguaucaucgaccaggu

SEQ ID NO: 1110034 - RNA, 19 nt, Artificial Sequence
  Description of Artificial Sequence: Synthetic oligonucleotide
ggaagucuuaacaaaucau

SEQ ID NO: 1110035 - RNA, 19 nt, Artificial Sequence
  Description of Artificial Sequence: Synthetic oligonucleotide
guuaccccugagauauuaa

SEQ ID NO: 1110036 - RNA, 19 nt, Artificial Sequence
  Description of Artificial Sequence: Synthetic oligonucleotide
auucucggaugaaggaaua

SEQ ID NO: 1110037 - RNA, 19 nt, Artificial Sequence
  Description of Artificial Sequence: Synthetic oligonucleotide
gccaaauuggauacuuaaa

SEQ ID NO: 1110038 - RNA, 19 nt, Artificial Sequence
  Description of Artificial Sequence: Synthetic oligonucleotide
gggccuaccacauuucuuu

SEQ ID NO: 1110039 - RNA, 19 nt, Artificial Sequence
  Description of Artificial Sequence: Synthetic oligonucleotide
cagguagcaagucuugauu

SEQ ID NO: 1110040 - RNA, 19 nt, Artificial Sequence
  Description of Artificial Sequence: Synthetic oligonucleotide
gguuuucucaaaacaaguu

SEQ ID NO: 1110041 - RNA, 19 nt, Artificial Sequence
  Description of Artificial Sequence: Synthetic oligonucleotide
gugacuguuuauugugguu

SEQ ID NO: 1110042 - RNA, 19 nt, Artificial Sequence
  Description of Artificial Sequence: Synthetic oligonucleotide
guagggccguuugaagaga

SEQ ID NO: 1110043 - RNA, 19 nt, Artificial Sequence
  Description of Artificial Sequence: Synthetic oligonucleotide
gcgucccggaacuuugcug

SEQ ID NO: 1110044 - RNA, 19 nt, Artificial Sequence
  Description of Artificial Sequence: Synthetic oligonucleotide
gguuaccuaauccuuuauu

SEQ ID NO: 1110045 - RNA, 19 nt, Artificial Sequence
  Description of Artificial Sequence: Synthetic oligonucleotide
gcgucgguuugaaaccucc

SEQ ID NO: 1110046 - RNA, 19 nt, Artificial Sequence
  Description of Artificial Sequence: Synthetic oligonucleotide
gaacaagggcugucauccu

SEQ ID NO: 1110047 - RNA, 19 nt, Artificial Sequence
  Description of Artificial Sequence: Synthetic oligonucleotide
ccuuccgccagcgcgucgg

SEQ ID NO: 1110048 - RNA, 19 nt, Artificial Sequence
  Description of Artificial Sequence: Synthetic oligonucleotide
gcauauuaccagacucuuc

SEQ ID NO: 1110049 - RNA, 19 nt, Artificial Sequence
  Description of Artificial Sequence: Synthetic oligonucleotide
ccgaugaugaauccugucu

SEQ ID NO: 1110050 - RNA, 19 nt, Artificial Sequence
  Description of Artificial Sequence: Synthetic oligonucleotide
cgucccggaacuuugcuga

SEQ ID NO: 1110051 - RNA, 19 nt, Artificial Sequence
  Description of Artificial Sequence: Synthetic oligonucleotide
ccagauaggguagagcucu

SEQ ID NO: 1110052 - RNA, 19 nt, Artificial Sequence
  Description of Artificial Sequence: Synthetic oligonucleotide
cccggaacuuugcugagga

SEQ ID NO: 1110053 - RNA, 19 nt, Artificial Sequence
  Description of Artificial Sequence: Synthetic oligonucleotide
cauccccuuccgccagcgc

SEQ ID NO: 1110054 - RNA, 19 nt, Artificial Sequence
  Description of Artificial Sequence: Synthetic oligonucleotide
ggccuaccacauuucuuuc

SEQ ID NO: 1110055 - RNA, 19 nt, Artificial Sequence
  Description of Artificial Sequence: Synthetic oligonucleotide
gggccguuugaagagaccu

SEQ ID NO: 1110056 - RNA, 19 nt, Artificial Sequence
  Description of Artificial Sequence: Synthetic oligonucleotide
ggaccauaguuugaacugu

SEQ ID NO: 1110057 - RNA, 19 nt, Artificial Sequence
  Description of Artificial Sequence: Synthetic oligonucleotide
guagagcucugguucucau

SEQ ID NO: 1110058 - RNA, 19 nt, Artificial Sequence
  Description of Artificial Sequence: Synthetic oligonucleotide
ccaaaacacguuuauuauu

SEQ ID NO: 1110059 - RNA, 19 nt, Artificial Sequence
  Description of Artificial Sequence: Synthetic oligonucleotide
ccgggaacaaacucugugu

SEQ ID NO: 1110060 - RNA, 19 nt, Artificial Sequence
  Description of Artificial Sequence: Synthetic oligonucleotide
ggggauuguccugggagaa

SEQ ID NO: 1110061 - RNA, 19 nt, Artificial Sequence
  Description of Artificial Sequence: Synthetic oligonucleotide
caguagacugccugagauu

SEQ ID NO: 1110062 - RNA, 19 nt, Artificial Sequence
  Description of Artificial Sequence: Synthetic oligonucleotide
guagacugccugagauucu

SEQ ID NO: 1110063 - RNA, 19 nt, Artificial Sequence
  Description of Artificial Sequence: Synthetic oligonucleotide
guucacucugccaguguuu

SEQ ID NO: 1110064 - RNA, 19 nt, Artificial Sequence
  Description of Artificial Sequence: Synthetic oligonucleotide
cucaggcgugauaaauguu

SEQ ID NO: 1110065 - RNA, 19 nt, Artificial Sequence
  Description of Artificial Sequence: Synthetic oligonucleotide
ccggaacuuugcugaggac

SEQ ID NO: 1110066 - RNA, 19 nt, Artificial Sequence
  Description of Artificial Sequence: Synthetic oligonucleotide
cggaacuuugcugaggacu

SEQ ID NO: 1110067 - RNA, 19 nt, Artificial Sequence
  Description of Artificial Sequence: Synthetic oligonucleotide
cguagcauauuaccagacu

SEQ ID NO: 1110068 - RNA, 19 nt, Artificial Sequence
  Description of Artificial Sequence: Synthetic oligonucleotide
guacugcuugaagguuaaa

SEQ ID NO: 1110069 - RNA, 19 nt, Artificial Sequence
  Description of Artificial Sequence: Synthetic oligonucleotide
ggucggugaccagguauaa

SEQ ID NO: 1110070 - RNA, 19 nt, Artificial Sequence
  Description of Artificial Sequence: Synthetic oligonucleotide
ggccguuugaagagaccua

SEQ ID NO: 1110071 - RNA, 19 nt, Artificial Sequence
  Description of Artificial Sequence: Synthetic oligonucleotide
cgucgguuugaaaccucca

SEQ ID NO: 1110072 - RNA, 19 nt, Artificial Sequence
  Description of Artificial Sequence: Synthetic oligonucleotide
caucaguuguuaggcuaau

SEQ ID NO: 1110073 - RNA, 19 nt, Artificial Sequence
  Description of Artificial Sequence: Synthetic oligonucleotide
cguguugaauggcaaacuu

SEQ ID NO: 1110074 - RNA, 19 nt, Artificial Sequence
  Description of Artificial Sequence: Synthetic oligonucleotide
ccgccagcgcgucgguuug

SEQ ID NO: 1110075 - RNA, 19 nt, Artificial Sequence
  Description of Artificial Sequence: Synthetic oligonucleotide
cgcgucgguuugaaaccuc

SEQ ID NO: 1110076 - RNA, 19 nt, Artificial Sequence
  Description of Artificial Sequence: Synthetic oligonucleotide
ccguuugaagagaccuagu

SEQ ID NO: 1110077 - RNA, 19 nt, Artificial Sequence
  Description of Artificial Sequence: Synthetic oligonucleotide
guuccgggccuaccacauu

SEQ ID NO: 1110078 - RNA, 19 nt, Artificial Sequence
  Description of Artificial Sequence: Synthetic oligonucleotide
cccuuccgccagcgcgucg

SEQ ID NO: 1110079 - RNA, 19 nt, Artificial Sequence
  Description of Artificial Sequence: Synthetic oligonucleotide
gccagcgcgucgguuugaa

SEQ ID NO: 1110080 - RNA, 19 nt, Artificial Sequence
  Description of Artificial Sequence: Synthetic oligonucleotide
gcgcgucgguuugaaaccu

SEQ ID NO: 1110081 - RNA, 19 nt, Artificial Sequence
  Description of Artificial Sequence: Synthetic oligonucleotide
cuuccgccagcgcgucggu

SEQ ID NO: 1110082 - RNA, 19 nt, Artificial Sequence
  Description of Artificial Sequence: Synthetic oligonucleotide
ccgggccuaccacauuucu

SEQ ID NO: 1110083 - RNA, 19 nt, Artificial Sequence
  Description of Artificial Sequence: Synthetic oligonucleotide
ccagcgcgucgguuugaaa

SEQ ID NO: 1110084 - RNA, 19 nt, Artificial Sequence
  Description of Artificial Sequence: Synthetic oligonucleotide
ccccuuccgccagcgcguc

SEQ ID NO: 1110085 - RNA, 19 nt, Artificial Sequence
  Description of Artificial Sequence: Synthetic oligonucleotide
cgggccuaccacauuucuu

SEQ ID NO: 1110086 - RNA, 19 nt, Artificial Sequence
  Description of Artificial Sequence: Synthetic oligonucleotide
cgccagcgcgucgguuuga

SEQ ID NO: 1110087 - RNA, 19 nt, Artificial Sequence
  Description of Artificial Sequence: Synthetic oligonucleotide
aauacaacuauuuagaguu

SEQ ID NO: 1110088 - RNA, 19 nt, Artificial Sequence
  Description of Artificial Sequence: Synthetic oligonucleotide
gauuaauacaacuauuuag

SEQ ID NO: 1110089 - RNA, 19 nt, Artificial Sequence
  Description of Artificial Sequence: Synthetic oligonucleotide
aacuucacaucacagcucc

SEQ ID NO: 1110090 - RNA, 19 nt, Artificial Sequence
  Description of Artificial Sequence: Synthetic oligonucleotide
aauaaaugggcagugcugc

SEQ ID NO: 1110091 - RNA, 19 nt, Artificial Sequence
  Description of Artificial Sequence: Synthetic oligonucleotide
aaguuuacauccaagauuc

SEQ ID NO: 1110092 - RNA, 19 nt, Artificial Sequence
  Description of Artificial Sequence: Synthetic oligonucleotide
uguagauuaauccaggaaa

SEQ ID NO: 1110093 - RNA, 19 nt, Artificial Sequence
  Description of Artificial Sequence: Synthetic oligonucleotide
aaaaucagcgcaguugucc

SEQ ID NO: 1110094 - RNA, 19 nt, Artificial Sequence
  Description of Artificial Sequence: Synthetic oligonucleotide
uuauauucagcauuucggg

SEQ ID NO: 1110095 - RNA, 19 nt, Artificial Sequence
  Description of Artificial Sequence: Synthetic oligonucleotide
ugcaauacugggaaggugg

SEQ ID NO: 1110096 - RNA, 19 nt, Artificial Sequence
  Description of Artificial Sequence: Synthetic oligonucleotide
aaauagacagacuauuggu

SEQ ID NO: 1110097 - RNA, 19 nt, Artificial Sequence
  Description of Artificial Sequence: Synthetic oligonucleotide
aguccaauuguacaggugg

SEQ ID NO: 1110098 - RNA, 19 nt, Artificial Sequence
  Description of Artificial Sequence: Synthetic oligonucleotide
aguugcuacagacugcugc

SEQ ID NO: 1110099 - RNA, 19 nt, Artificial Sequence
  Description of Artificial Sequence: Synthetic oligonucleotide
cacaacuguaccaugagcg

SEQ ID NO: 1110100 - RNA, 19 nt, Artificial Sequence
  Description of Artificial Sequence: Synthetic oligonucleotide
ucuaacaauuuacaggcug

SEQ ID NO: 1110101 - RNA, 19 nt, Artificial Sequence
  Description of Artificial Sequence: Synthetic oligonucleotide
aagaacuuagcuggaaagc

SEQ ID NO: 1110102 - RNA, 19 nt, Artificial Sequence
  Description of Artificial Sequence: Synthetic oligonucleotide
uagauugcuguacugaggc

SEQ ID NO: 1110103 - RNA, 19 nt, Artificial Sequence
  Description of Artificial Sequence: Synthetic oligonucleotide
ugaaaaucagcgcaguugu

SEQ ID NO: 1110104 - RNA, 19 nt, Artificial Sequence
  Description of Artificial Sequence: Synthetic oligonucleotide
uguugcucuuccaaaauag

SEQ ID NO: 1110105 - RNA, 19 nt, Artificial Sequence
  Description of Artificial Sequence: Synthetic oligonucleotide
auuaauacaacuauuuaga

SEQ ID NO: 1110106 - RNA, 19 nt, Artificial Sequence
  Description of Artificial Sequence: Synthetic oligonucleotide
aauaaggagaacaauccug

SEQ ID NO: 1110107 - RNA, 19 nt, Artificial Sequence
  Description of Artificial Sequence: Synthetic oligonucleotide
aacuauuuagaguucugca

SEQ ID NO: 1110108 - RNA, 19 nt, Artificial Sequence
  Description of Artificial Sequence: Synthetic oligonucleotide
uaagaacuuagcuggaaag

SEQ ID NO: 1110109 - RNA, 19 nt, Artificial Sequence
  Description of Artificial Sequence: Synthetic oligonucleotide
agaacuuagcuggaaagcc

SEQ ID NO: 1110110 - RNA, 19 nt, Artificial Sequence
  Description of Artificial Sequence: Synthetic oligonucleotide
aaauaaggagaacaauccu

SEQ ID NO: 1110111 - RNA, 19 nt, Artificial Sequence
  Description of Artificial Sequence: Synthetic oligonucleotide
cagaguacuccaaagaaag

SEQ ID NO: 1110112 - RNA, 19 nt, Artificial Sequence
  Description of Artificial Sequence: Synthetic oligonucleotide
uaaauuucugcucuaacuu

SEQ ID NO: 1110113 - RNA, 19 nt, Artificial Sequence
  Description of Artificial Sequence: Synthetic oligonucleotide
aaacugacggguuuuaaaa

SEQ ID NO: 1110114 - RNA, 19 nt, Artificial Sequence
  Description of Artificial Sequence: Synthetic oligonucleotide
uuuagcaccuguuaauaca

SEQ ID NO: 1110115 - RNA, 19 nt, Artificial Sequence
  Description of Artificial Sequence: Synthetic oligonucleotide
aguaugaucacaugacucu

SEQ ID NO: 1110116 - RNA, 19 nt, Artificial Sequence
  Description of Artificial Sequence: Synthetic oligonucleotide
uguagauugcuguacugag

SEQ ID NO: 1110117 - RNA, 19 nt, Artificial Sequence
  Description of Artificial Sequence: Synthetic oligonucleotide
uauggggaacuucacauca

SEQ ID NO: 1110118 - RNA, 19 nt, Artificial Sequence
  Description of Artificial Sequence: Synthetic oligonucleotide
acaacucuagcguauuuuc

SEQ ID NO: 1110119 - RNA, 19 nt, Artificial Sequence
  Description of Artificial Sequence: Synthetic oligonucleotide
uucuguagauuaauccagg

SEQ ID NO: 1110120 - RNA, 19 nt, Artificial Sequence
  Description of Artificial Sequence: Synthetic oligonucleotide
caggaaauaauucuggcuc

SEQ ID NO: 1110121 - RNA, 19 nt, Artificial Sequence
  Description of Artificial Sequence: Synthetic oligonucleotide
auauucagcauuucgggca

SEQ ID NO: 1110122 - RNA, 19 nt, Artificial Sequence
  Description of Artificial Sequence: Synthetic oligonucleotide
uauaaauaaaugggcagug

SEQ ID NO: 1110123 - RNA, 19 nt, Artificial Sequence
  Description of Artificial Sequence: Synthetic oligonucleotide
uugaucauucuguagauua

SEQ ID NO: 1110124 - RNA, 19 nt, Artificial Sequence
  Description of Artificial Sequence: Synthetic oligonucleotide
uguggaguaaguccagugc

SEQ ID NO: 1110125 - RNA, 19 nt, Artificial Sequence
  Description of Artificial Sequence: Synthetic oligonucleotide
uaagaguuagaaacuagaa

SEQ ID NO: 1110126 - RNA, 19 nt, Artificial Sequence
  Description of Artificial Sequence: Synthetic oligonucleotide
uuuaggucaaguuuacauc

SEQ ID NO: 1110127 - RNA, 19 nt, Artificial Sequence
  Description of Artificial Sequence: Synthetic oligonucleotide
agggcaaucgaucucacug

SEQ ID NO: 1110128 - RNA, 19 nt, Artificial Sequence
  Description of Artificial Sequence: Synthetic oligonucleotide
agguauuauaucuaaaaua

SEQ ID NO: 1110129 - RNA, 19 nt, Artificial Sequence
  Description of Artificial Sequence: Synthetic oligonucleotide
uauauucagcauuucgggc

SEQ ID NO: 1110130 - RNA, 19 nt, Artificial Sequence
  Description of Artificial Sequence: Synthetic oligonucleotide
uuaauccaggaaauaauuc

SEQ ID NO: 1110131 - RNA, 19 nt, Artificial Sequence
  Description of Artificial Sequence: Synthetic oligonucleotide
aaaacugacggguuuuaaa

SEQ ID NO: 1110132 - RNA, 19 nt, Artificial Sequence
  Description of Artificial Sequence: Synthetic oligonucleotide
auagacagacuauuggugu

SEQ ID NO: 1110133 - RNA, 19 nt, Artificial Sequence
  Description of Artificial Sequence: Synthetic oligonucleotide
ugcaaauucucuuuugaaa

SEQ ID NO: 1110134 - RNA, 19 nt, Artificial Sequence
  Description of Artificial Sequence: Synthetic oligonucleotide
uugagaauggaagagcugu

SEQ ID NO: 1110135 - RNA, 19 nt, Artificial Sequence
  Description of Artificial Sequence: Synthetic oligonucleotide
ugauuaauacaacuauuua

SEQ ID NO: 1110136 - RNA, 19 nt, Artificial Sequence
  Description of Artificial Sequence: Synthetic oligonucleotide
aaaccaacaaacucaucaa

SEQ ID NO: 1110137 - RNA, 19 nt, Artificial Sequence
  Description of Artificial Sequence: Synthetic oligonucleotide
aaauaaaugggcagugcug

SEQ ID NO: 1110138 - RNA, 19 nt, Artificial Sequence
  Description of Artificial Sequence: Synthetic oligonucleotide
uucugcacaacucuagcgu

SEQ ID NO: 1110139 - RNA, 19 nt, Artificial Sequence
  Description of Artificial Sequence: Synthetic oligonucleotide
aguucugcaauacugggaa

SEQ ID NO: 1110140 - RNA, 19 nt, Artificial Sequence
  Description of Artificial Sequence: Synthetic oligonucleotide
cuguuaauacaacuuuucc

SEQ ID NO: 1110141 - RNA, 19 nt, Artificial Sequence
  Description of Artificial Sequence: Synthetic oligonucleotide
aaucgaucucacugcagag

SEQ ID NO: 1110142 - RNA, 19 nt, Artificial Sequence
  Description of Artificial Sequence: Synthetic oligonucleotide
auauaaauaaaugggcagu

SEQ ID NO: 1110143 - RNA, 19 nt, Artificial Sequence
  Description of Artificial Sequence: Synthetic oligonucleotide
uagcguauuuucuugcugc

SEQ ID NO: 1110144 - RNA, 19 nt, Artificial Sequence
  Description of Artificial Sequence: Synthetic oligonucleotide
ugcagaguacuccaaagaa

SEQ ID NO: 1110145 - RNA, 19 nt, Artificial Sequence
  Description of Artificial Sequence: Synthetic oligonucleotide
acuauuuagaguucugcaa

SEQ ID NO: 1110146 - RNA, 19 nt, Artificial Sequence
  Description of Artificial Sequence: Synthetic oligonucleotide
acaacuguaccaugagcgg

SEQ ID NO: 1110147 - RNA, 19 nt, Artificial Sequence
  Description of Artificial Sequence: Synthetic oligonucleotide
aaaucagcgcaguuguccu

SEQ ID NO: 1110148 - RNA, 19 nt, Artificial Sequence
  Description of Artificial Sequence: Synthetic oligonucleotide
ugaagucuaagaacuuagc

SEQ ID NO: 1110149 - RNA, 19 nt, Artificial Sequence
  Description of Artificial Sequence: Synthetic oligonucleotide
guggauacaauauuuugca

SEQ ID NO: 1110150 - RNA, 19 nt, Artificial Sequence
  Description of Artificial Sequence: Synthetic oligonucleotide
acuauugguguucugaaua

SEQ ID NO: 1110151 - RNA, 19 nt, Artificial Sequence
  Description of Artificial Sequence: Synthetic oligonucleotide
uuuagaguucugcaauacu

SEQ ID NO: 1110152 - RNA, 19 nt, Artificial Sequence
  Description of Artificial Sequence: Synthetic oligonucleotide
uuagcaccuguuaauacaa

SEQ ID NO: 1110153 - RNA, 19 nt, Artificial Sequence
  Description of Artificial Sequence: Synthetic oligonucleotide
ucgaucucacugcagagga

SEQ ID NO: 1110154 - RNA, 19 nt, Artificial Sequence
  Description of Artificial Sequence: Synthetic oligonucleotide
acacggugucacuucaugc

SEQ ID NO: 1110155 - RNA, 19 nt, Artificial Sequence
  Description of Artificial Sequence: Synthetic oligonucleotide
cauucuguagauuaaucca

SEQ ID NO: 1110156 - RNA, 19 nt, Artificial Sequence
  Description of Artificial Sequence: Synthetic oligonucleotide
aaaacuggcuuauguggga

SEQ ID NO: 1110157 - RNA, 19 nt, Artificial Sequence
  Description of Artificial Sequence: Synthetic oligonucleotide
caagauucaccguggauac

SEQ ID NO: 1110158 - RNA, 19 nt, Artificial Sequence
  Description of Artificial Sequence: Synthetic oligonucleotide
aaucccuuuaagauggggu

SEQ ID NO: 1110159 - RNA, 19 nt, Artificial Sequence
  Description of Artificial Sequence: Synthetic oligonucleotide
agauguuuucaaaugcuuc

SEQ ID NO: 1110160 - RNA, 19 nt, Artificial Sequence
  Description of Artificial Sequence: Synthetic oligonucleotide
aggagguaaccuuucagug

SEQ ID NO: 1110161 - RNA, 19 nt, Artificial Sequence
  Description of Artificial Sequence: Synthetic oligonucleotide
aaacaaguggguaggggag

SEQ ID NO: 1110162 - RNA, 19 nt, Artificial Sequence
  Description of Artificial Sequence: Synthetic oligonucleotide
ugcucuaacuuuagcaccu

SEQ ID NO: 1110163 - RNA, 19 nt, Artificial Sequence
  Description of Artificial Sequence: Synthetic oligonucleotide
ucuuauucucaugaugaca

SEQ ID NO: 1110164 - RNA, 19 nt, Artificial Sequence
  Description of Artificial Sequence: Synthetic oligonucleotide
auucuguagauuaauccag

SEQ ID NO: 1110165 - RNA, 19 nt, Artificial Sequence
  Description of Artificial Sequence: Synthetic oligonucleotide
ugauaggggucauaggggu

SEQ ID NO: 1110166 - RNA, 19 nt, Artificial Sequence
  Description of Artificial Sequence: Synthetic oligonucleotide
cugucuucaguacucagac

SEQ ID NO: 1110167 - RNA, 19 nt, Artificial Sequence
  Description of Artificial Sequence: Synthetic oligonucleotide
uggauacaauauuuugcag

SEQ ID NO: 1110168 - RNA, 19 nt, Artificial Sequence
  Description of Artificial Sequence: Synthetic oligonucleotide
uaaugcugcagggcaaucg

SEQ ID NO: 1110169 - RNA, 19 nt, Artificial Sequence
  Description of Artificial Sequence: Synthetic oligonucleotide
ucuguagauuaauccagga

SEQ ID NO: 1110170 - RNA, 19 nt, Artificial Sequence
  Description of Artificial Sequence: Synthetic oligonucleotide
agauuaauccaggaaauaa

SEQ ID NO: 1110171 - RNA, 19 nt, Artificial Sequence
  Description of Artificial Sequence: Synthetic oligonucleotide
gaauagguuguggaguaag

SEQ ID NO: 1110172 - RNA, 19 nt, Artificial Sequence
  Description of Artificial Sequence: Synthetic oligonucleotide
gauguagauugcuguacug

SEQ ID NO: 1110173 - RNA, 19 nt, Artificial Sequence
  Description of Artificial Sequence: Synthetic oligonucleotide
uuucugguagaaauauaaa

SEQ ID NO: 1110174 - RNA, 19 nt, Artificial Sequence
  Description of Artificial Sequence: Synthetic oligonucleotide
uuuccuagagcauccucug

SEQ ID NO: 1110175 - RNA, 19 nt, Artificial Sequence
  Description of Artificial Sequence: Synthetic oligonucleotide
uggugggucagcacaaggc

SEQ ID NO: 1110176 - RNA, 19 nt, Artificial Sequence
  Description of Artificial Sequence: Synthetic oligonucleotide
auagguuguggaguaaguc

SEQ ID NO: 1110177 - RNA, 19 nt, Artificial Sequence
  Description of Artificial Sequence: Synthetic oligonucleotide
uuguuuugauuaauacaac

SEQ ID NO: 1110178 - RNA, 19 nt, Artificial Sequence
  Description of Artificial Sequence: Synthetic oligonucleotide
cugaaaaucagcgcaguug

SEQ ID NO: 1110179 - RNA, 19 nt, Artificial Sequence
  Description of Artificial Sequence: Synthetic oligonucleotide
uggauugcugagauguaga

SEQ ID NO: 1110180 - RNA, 19 nt, Artificial Sequence
  Description of Artificial Sequence: Synthetic oligonucleotide
uaucuaaaauaaauuucuu

SEQ ID NO: 1110181 - RNA, 19 nt, Artificial Sequence
  Description of Artificial Sequence: Synthetic oligonucleotide
caguaugaucacaugacuc

SEQ ID NO: 1110182 - RNA, 19 nt, Artificial Sequence
  Description of Artificial Sequence: Synthetic oligonucleotide
ucuaacuuuagcaccuguu

SEQ ID NO: 1110183 - RNA, 19 nt, Artificial Sequence
  Description of Artificial Sequence: Synthetic oligonucleotide
uccuucucacaacuguacc

SEQ ID NO: 1110184 - RNA, 19 nt, Artificial Sequence
  Description of Artificial Sequence: Synthetic oligonucleotide
aguccagugccauaaggca

SEQ ID NO: 1110185 - RNA, 19 nt, Artificial Sequence
  Description of Artificial Sequence: Synthetic oligonucleotide
ucauuggacuaaagauggg

SEQ ID NO: 1110186 - RNA, 19 nt, Artificial Sequence
  Description of Artificial Sequence: Synthetic oligonucleotide
agauguagauugcuguacu

SEQ ID NO: 1110187 - RNA, 19 nt, Artificial Sequence
  Description of Artificial Sequence: Synthetic oligonucleotide
caacuauuuagaguucugc

SEQ ID NO: 1110188 - RNA, 19 nt, Artificial Sequence
  Description of Artificial Sequence: Synthetic oligonucleotide
ugcuagucuggauuguucu

SEQ ID NO: 1110189 - RNA, 19 nt, Artificial Sequence
  Description of Artificial Sequence: Synthetic oligonucleotide
uuucuuugacaguaugauc

SEQ ID NO: 1110190 - RNA, 19 nt, Artificial Sequence
  Description of Artificial Sequence: Synthetic oligonucleotide
cauccaagauucaccgugg

SEQ ID NO: 1110191 - RNA, 19 nt, Artificial Sequence
  Description of Artificial Sequence: Synthetic oligonucleotide
agaauggaagagcugugga

SEQ ID NO: 1110192 - RNA, 19 nt, Artificial Sequence
  Description of Artificial Sequence: Synthetic oligonucleotide
cugcucuaacuuuagcacc

SEQ ID NO: 1110193 - RNA, 19 nt, Artificial Sequence
  Description of Artificial Sequence: Synthetic oligonucleotide
ugcccaaguagcagcacag

SEQ ID NO: 1110194 - RNA, 19 nt, Artificial Sequence
  Description of Artificial Sequence: Synthetic oligonucleotide
guuagaaacuagaaaacaa

SEQ ID NO: 1110195 - RNA, 19 nt, Artificial Sequence
  Description of Artificial Sequence: Synthetic oligonucleotide
uuguggaguaaguccagug

SEQ ID NO: 1110196 - RNA, 19 nt, Artificial Sequence
  Description of Artificial Sequence: Synthetic oligonucleotide
ugagcauaagguggaaggc

SEQ ID NO: 1110197 - RNA, 19 nt, Artificial Sequence
  Description of Artificial Sequence: Synthetic oligonucleotide
acucuagcguauuuucuug

SEQ ID NO: 1110198 - RNA, 19 nt, Artificial Sequence
  Description of Artificial Sequence: Synthetic oligonucleotide
agcgguaccaaaacugacg

SEQ ID NO: 1110199 - RNA, 19 nt, Artificial Sequence
  Description of Artificial Sequence: Synthetic oligonucleotide
gaacuuagcuggaaagccc

SEQ ID NO: 1110200 - RNA, 19 nt, Artificial Sequence
  Description of Artificial Sequence: Synthetic oligonucleotide
gguggaauguaucuggcac

SEQ ID NO: 1110201 - RNA, 19 nt, Artificial Sequence
  Description of Artificial Sequence: Synthetic oligonucleotide
cuggguuaucuucacacac

SEQ ID NO: 1110202 - RNA, 19 nt, Artificial Sequence
  Description of Artificial Sequence: Synthetic oligonucleotide
ucuagcguauuuucuugcu

SEQ ID NO: 1110203 - RNA, 19 nt, Artificial Sequence
  Description of Artificial Sequence: Synthetic oligonucleotide
caauuguacagguggcuug

SEQ ID NO: 1110204 - RNA, 19 nt, Artificial Sequence
  Description of Artificial Sequence: Synthetic oligonucleotide
aacuuagcuggaaagccca

SEQ ID NO: 1110205 - RNA, 19 nt, Artificial Sequence
  Description of Artificial Sequence: Synthetic oligonucleotide
ccuuaaaccaacaaacuca

SEQ ID NO: 1110206 - RNA, 19 nt, Artificial Sequence
  Description of Artificial Sequence: Synthetic oligonucleotide
auuaauccaggaaauaauu

SEQ ID NO: 1110207 - RNA, 19 nt, Artificial Sequence
  Description of Artificial Sequence: Synthetic oligonucleotide
gagcaagcgacucacagua

SEQ ID NO: 1110208 - RNA, 19 nt, Artificial Sequence
  Description of Artificial Sequence: Synthetic oligonucleotide
uaggggucauuggugaagg

SEQ ID NO: 1110209 - RNA, 19 nt, Artificial Sequence
  Description of Artificial Sequence: Synthetic oligonucleotide
guuuacauccaagauucac

SEQ ID NO: 1110210 - RNA, 19 nt, Artificial Sequence
  Description of Artificial Sequence: Synthetic oligonucleotide
ugagauguagauugcugua

SEQ ID NO: 1110211 - RNA, 19 nt, Artificial Sequence
  Description of Artificial Sequence: Synthetic oligonucleotide
uuauucucaugaugacagc

SEQ ID NO: 1110212 - RNA, 19 nt, Artificial Sequence
  Description of Artificial Sequence: Synthetic oligonucleotide
gacuaaagaugggaauucc

SEQ ID NO: 1110213 - RNA, 19 nt, Artificial Sequence
  Description of Artificial Sequence: Synthetic oligonucleotide
guagauugcuguacugagg

SEQ ID NO: 1110214 - RNA, 19 nt, Artificial Sequence
  Description of Artificial Sequence: Synthetic oligonucleotide
augagcgguaccaaaacug

SEQ ID NO: 1110215 - RNA, 19 nt, Artificial Sequence
  Description of Artificial Sequence: Synthetic oligonucleotide
cagagcaagcgacucacag

SEQ ID NO: 1110216 - RNA, 19 nt, Artificial Sequence
  Description of Artificial Sequence: Synthetic oligonucleotide
uggacuaaagaugggaauu

SEQ ID NO: 1110217 - RNA, 19 nt, Artificial Sequence
  Description of Artificial Sequence: Synthetic oligonucleotide
cucuagcguauuuucuugc

SEQ ID NO: 1110218 - RNA, 19 nt, Artificial Sequence
  Description of Artificial Sequence: Synthetic oligonucleotide
uugcugcuagucuggauug

SEQ ID NO: 1110219 - RNA, 19 nt, Artificial Sequence
  Description of Artificial Sequence: Synthetic oligonucleotide
ggcuugaacacuuaaaagu

SEQ ID NO: 1110220 - RNA, 19 nt, Artificial Sequence
  Description of Artificial Sequence: Synthetic oligonucleotide
uaugaucacaugacucuua

SEQ ID NO: 1110221 - RNA, 19 nt, Artificial Sequence
  Description of Artificial Sequence: Synthetic oligonucleotide
gagauguagauugcuguac

SEQ ID NO: 1110222 - RNA, 19 nt, Artificial Sequence
  Description of Artificial Sequence: Synthetic oligonucleotide
uuguugcucuuccaaaaua

SEQ ID NO: 1110223 - RNA, 19 nt, Artificial Sequence
  Description of Artificial Sequence: Synthetic oligonucleotide
agagcaagcgacucacagu

SEQ ID NO: 1110224 - RNA, 19 nt, Artificial Sequence
  Description of Artificial Sequence: Synthetic oligonucleotide
cacuauguggucuuccuga

SEQ ID NO: 1110225 - RNA, 19 nt, Artificial Sequence
  Description of Artificial Sequence: Synthetic oligonucleotide
uuauggggaacuucacauc

SEQ ID NO: 1110226 - RNA, 19 nt, Artificial Sequence
  Description of Artificial Sequence: Synthetic oligonucleotide
ucgggcacgaagugcaaug

SEQ ID NO: 1110227 - RNA, 19 nt, Artificial Sequence
  Description of Artificial Sequence: Synthetic oligonucleotide
caaucgaucucacugcaga

SEQ ID NO: 1110228 - RNA, 19 nt, Artificial Sequence
  Description of Artificial Sequence: Synthetic oligonucleotide
gcgguaccaaaacugacgg

SEQ ID NO: 1110229 - RNA, 19 nt, Artificial Sequence
  Description of Artificial Sequence: Synthetic oligonucleotide
agacagacuauugguguuc

SEQ ID NO: 1110230 - RNA, 19 nt, Artificial Sequence
  Description of Artificial Sequence: Synthetic oligonucleotide
auuucgggcacgaagugca

SEQ ID NO: 1110231 - RNA, 19 nt, Artificial Sequence
  Description of Artificial Sequence: Synthetic oligonucleotide
cguggauacaauauuuugc

SEQ ID NO: 1110232 - RNA, 19 nt, Artificial Sequence
  Description of Artificial Sequence: Synthetic oligonucleotide
cacaucacagcuccccacc

SEQ ID NO: 1110233 - RNA, 19 nt, Artificial Sequence
  Description of Artificial Sequence: Synthetic oligonucleotide
cuuuaggucaaguuuacau

SEQ ID NO: 1110234 - RNA, 19 nt, Artificial Sequence
  Description of Artificial Sequence: Synthetic oligonucleotide
ucccuuuaagaugggguag

SEQ ID NO: 1110235 - RNA, 19 nt, Artificial Sequence
  Description of Artificial Sequence: Synthetic oligonucleotide
gggaacuucacaucacagc

SEQ ID NO: 1110236 - RNA, 19 nt, Artificial Sequence
  Description of Artificial Sequence: Synthetic oligonucleotide
ggagugauaggggucauag

SEQ ID NO: 1110237 - RNA, 19 nt, Artificial Sequence
  Description of Artificial Sequence: Synthetic oligonucleotide
auguagauugcuguacuga

SEQ ID NO: 1110238 - RNA, 19 nt, Artificial Sequence
  Description of Artificial Sequence: Synthetic oligonucleotide
cucuuauucucaugaugac

SEQ ID NO: 1110239 - RNA, 19 nt, Artificial Sequence
  Description of Artificial Sequence: Synthetic oligonucleotide
cuagcguauuuucuugcug

SEQ ID NO: 1110240 - RNA, 19 nt, Artificial Sequence
  Description of Artificial Sequence: Synthetic oligonucleotide
agcauuucgggcacgaagu

SEQ ID NO: 1110241 - RNA, 19 nt, Artificial Sequence
  Description of Artificial Sequence: Synthetic oligonucleotide
uggcuuaugugggaaaagu

SEQ ID NO: 1110242 - RNA, 19 nt, Artificial Sequence
  Description of Artificial Sequence: Synthetic oligonucleotide
gugccauaaggcaucauug

SEQ ID NO: 1110243 - RNA, 19 nt, Artificial Sequence
  Description of Artificial Sequence: Synthetic oligonucleotide
ugaaucccuuuaagauggg

SEQ ID NO: 1110244 - RNA, 19 nt, Artificial Sequence
  Description of Artificial Sequence: Synthetic oligonucleotide
gaugggguagauguuuuca

SEQ ID NO: 1110245 - RNA, 19 nt, Artificial Sequence
  Description of Artificial Sequence: Synthetic oligonucleotide
agauucaccguggauacaa

SEQ ID NO: 1110246 - RNA, 19 nt, Artificial Sequence
  Description of Artificial Sequence: Synthetic oligonucleotide
ucugcacaacucuagcgua

SEQ ID NO: 1110247 - RNA, 19 nt, Artificial Sequence
  Description of Artificial Sequence: Synthetic oligonucleotide
cugugguacgaucccagag

SEQ ID NO: 1110248 - RNA, 19 nt, Artificial Sequence
  Description of Artificial Sequence: Synthetic oligonucleotide
gaggagguaaccuuucagu

SEQ ID NO: 1110249 - RNA, 19 nt, Artificial Sequence
  Description of Artificial Sequence: Synthetic oligonucleotide
uugggauuauauucagcau

SEQ ID NO: 1110250 - RNA, 19 nt, Artificial Sequence
  Description of Artificial Sequence: Synthetic oligonucleotide
ucuaagaacuuagcuggaa

SEQ ID NO: 1110251 - RNA, 19 nt, Artificial Sequence
  Description of Artificial Sequence: Synthetic oligonucleotide
ggcaucauuggacuaaaga

SEQ ID NO: 1110252 - RNA, 19 nt, Artificial Sequence
  Description of Artificial Sequence: Synthetic oligonucleotide
ucaccguggauacaauauu

SEQ ID NO: 1110253 - RNA, 19 nt, Artificial Sequence
  Description of Artificial Sequence: Synthetic oligonucleotide
uucugucccuuaaaccaac

SEQ ID NO: 1110254 - RNA, 19 nt, Artificial Sequence
  Description of Artificial Sequence: Synthetic oligonucleotide
acuaaagaugggaauucca

SEQ ID NO: 1110255 - RNA, 19 nt, Artificial Sequence
  Description of Artificial Sequence: Synthetic oligonucleotide
cuuauggggaacuucacau

SEQ ID NO: 1110256 - RNA, 19 nt, Artificial Sequence
  Description of Artificial Sequence: Synthetic oligonucleotide
guggauugcugagauguag

SEQ ID NO: 1110257 - RNA, 19 nt, Artificial Sequence
  Description of Artificial Sequence: Synthetic oligonucleotide
auuuugcagcugugguacg

SEQ ID NO: 1110258 - RNA, 19 nt, Artificial Sequence
  Description of Artificial Sequence: Synthetic oligonucleotide
ugcugcagggcaaucgauc

SEQ ID NO: 1110259 - RNA, 19 nt, Artificial Sequence
  Description of Artificial Sequence: Synthetic oligonucleotide
uggaauguaucuggcacaa

SEQ ID NO: 1110260 - RNA, 19 nt, Artificial Sequence
  Description of Artificial Sequence: Synthetic oligonucleotide
acggugucacuucaugcug

SEQ ID NO: 1110261 - RNA, 19 nt, Artificial Sequence
  Description of Artificial Sequence: Synthetic oligonucleotide
aaccgcuugggauuauauu

SEQ ID NO: 1110262 - RNA, 19 nt, Artificial Sequence
  Description of Artificial Sequence: Synthetic oligonucleotide
auuggacuaaagaugggaa

SEQ ID NO: 1110263 - RNA, 19 nt, Artificial Sequence
  Description of Artificial Sequence: Synthetic oligonucleotide
cacaguaaugcugcagggc

SEQ ID NO: 1110264 - RNA, 19 nt, Artificial Sequence
  Description of Artificial Sequence: Synthetic oligonucleotide
cuucacacaccaugaaaca

SEQ ID NO: 1110265 - RNA, 19 nt, Artificial Sequence
  Description of Artificial Sequence: Synthetic oligonucleotide
gauuaauccaggaaauaau

SEQ ID NO: 1110266 - RNA, 19 nt, Artificial Sequence
  Description of Artificial Sequence: Synthetic oligonucleotide
ccauaaggcaucauuggac

SEQ ID NO: 1110267 - RNA, 19 nt, Artificial Sequence
  Description of Artificial Sequence: Synthetic oligonucleotide
ugacucuuacaagguauca

SEQ ID NO: 1110268 - RNA, 19 nt, Artificial Sequence
  Description of Artificial Sequence: Synthetic oligonucleotide
uccuaagaguuagaaacua

SEQ ID NO: 1110269 - RNA, 19 nt, Artificial Sequence
  Description of Artificial Sequence: Synthetic oligonucleotide
cauaaggcaucauuggacu

SEQ ID NO: 1110270 - RNA, 19 nt, Artificial Sequence
  Description of Artificial Sequence: Synthetic oligonucleotide
cuaagaacuuagcuggaaa

SEQ ID NO: 1110271 - RNA, 19 nt, Artificial Sequence
  Description of Artificial Sequence: Synthetic oligonucleotide
uuccuagagcauccucugc

SEQ ID NO: 1110272 - RNA, 19 nt, Artificial Sequence
  Description of Artificial Sequence: Synthetic oligonucleotide
cauuggacuaaagauggga

SEQ ID NO: 1110273 - RNA, 19 nt, Artificial Sequence
  Description of Artificial Sequence: Synthetic oligonucleotide
ucugucccuuaaaccaaca

SEQ ID NO: 1110274 - RNA, 19 nt, Artificial Sequence
  Description of Artificial Sequence: Synthetic oligonucleotide
ccuguuaauacaacuuuuc

SEQ ID NO: 1110275 - RNA, 19 nt, Artificial Sequence
  Description of Artificial Sequence: Synthetic oligonucleotide
uuuugcagcugugguacga

SEQ ID NO: 1110276 - RNA, 19 nt, Artificial Sequence
  Description of Artificial Sequence: Synthetic oligonucleotide
cauuucgggcacgaagugc

SEQ ID NO: 1110277 - RNA, 19 nt, Artificial Sequence
  Description of Artificial Sequence: Synthetic oligonucleotide
cguauuuucuugcugcuag

SEQ ID NO: 1110278 - RNA, 19 nt, Artificial Sequence
  Description of Artificial Sequence: Synthetic oligonucleotide
uagauuaauccaggaaaua

SEQ ID NO: 1110279 - RNA, 19 nt, Artificial Sequence
  Description of Artificial Sequence: Synthetic oligonucleotide
agcguauuuucuugcugcu

SEQ ID NO: 1110280 - RNA, 19 nt, Artificial Sequence
  Description of Artificial Sequence: Synthetic oligonucleotide
uggguuugaucauucugua

SEQ ID NO: 1110281 - RNA, 19 nt, Artificial Sequence
  Description of Artificial Sequence: Synthetic oligonucleotide
uaccaaaacugacggguuu

SEQ ID NO: 1110282 - RNA, 19 nt, Artificial Sequence
  Description of Artificial Sequence: Synthetic oligonucleotide
guguggauugcugagaugu

SEQ ID NO: 1110283 - RNA, 19 nt, Artificial Sequence
  Description of Artificial Sequence: Synthetic oligonucleotide
cuauuuagaguucugcaau

SEQ ID NO: 1110284 - RNA, 19 nt, Artificial Sequence
  Description of Artificial Sequence: Synthetic oligonucleotide
auaagguggaaggcuguug

SEQ ID NO: 1110285 - RNA, 19 nt, Artificial Sequence
  Description of Artificial Sequence: Synthetic oligonucleotide
guggaauguaucuggcaca

SEQ ID NO: 1110286 - RNA, 19 nt, Artificial Sequence
  Description of Artificial Sequence: Synthetic oligonucleotide
auacaacuauuuagaguuc

SEQ ID NO: 1110287 - RNA, 19 nt, Artificial Sequence
  Description of Artificial Sequence: Synthetic oligonucleotide
aaacuggcuuaugugggaa

SEQ ID NO: 1110288 - RNA, 19 nt, Artificial Sequence
  Description of Artificial Sequence: Synthetic oligonucleotide
cagacuauugguguucuga

SEQ ID NO: 1110289 - RNA, 19 nt, Artificial Sequence
  Description of Artificial Sequence: Synthetic oligonucleotide
gaauuccaggagucauggc

SEQ ID NO: 1110290 - RNA, 19 nt, Artificial Sequence
  Description of Artificial Sequence: Synthetic oligonucleotide
agccacuauguggucuucc

SEQ ID NO: 1110291 - RNA, 19 nt, Artificial Sequence
  Description of Artificial Sequence: Synthetic oligonucleotide
ucuuuaggucaaguuuaca

SEQ ID NO: 1110292 - RNA, 19 nt, Artificial Sequence
  Description of Artificial Sequence: Synthetic oligonucleotide
acaacuauuuagaguucug

SEQ ID NO: 1110293 - RNA, 19 nt, Artificial Sequence
  Description of Artificial Sequence: Synthetic oligonucleotide
acugaaaaucagcgcaguu

SEQ ID NO: 1110294 - RNA, 19 nt, Artificial Sequence
  Description of Artificial Sequence: Synthetic oligonucleotide
cuguagauuaauccaggaa

SEQ ID NO: 1110295 - RNA, 19 nt, Artificial Sequence
  Description of Artificial Sequence: Synthetic oligonucleotide
cuggaaagcccaacuucug

SEQ ID NO: 1110296 - RNA, 19 nt, Artificial Sequence
  Description of Artificial Sequence: Synthetic oligonucleotide
acuguaccaugagcgguac

SEQ ID NO: 1110297 - RNA, 19 nt, Artificial Sequence
  Description of Artificial Sequence: Synthetic oligonucleotide
acaugacucuuacaaggua

SEQ ID NO: 1110298 - RNA, 19 nt, Artificial Sequence
  Description of Artificial Sequence: Synthetic oligonucleotide
cugagauguagauugcugu

SEQ ID NO: 1110299 - RNA, 19 nt, Artificial Sequence
  Description of Artificial Sequence: Synthetic oligonucleotide
guaaccuuucaguguccug

SEQ ID NO: 1110300 - RNA, 19 nt, Artificial Sequence
  Description of Artificial Sequence: Synthetic oligonucleotide
cugaauagguuguggagua

SEQ ID NO: 1110301 - RNA, 19 nt, Artificial Sequence
  Description of Artificial Sequence: Synthetic oligonucleotide
guaaguccagugccauaag

SEQ ID NO: 1110302 - RNA, 19 nt, Artificial Sequence
  Description of Artificial Sequence: Synthetic oligonucleotide
gacacacggugucacuuca

SEQ ID NO: 1110303 - RNA, 19 nt, Artificial Sequence
  Description of Artificial Sequence: Synthetic oligonucleotide
auucaccguggauacaaua

SEQ ID NO: 1110304 - RNA, 19 nt, Artificial Sequence
  Description of Artificial Sequence: Synthetic oligonucleotide
cauuggugaaggguacaag

SEQ ID NO: 1110305 - RNA, 19 nt, Artificial Sequence
  Description of Artificial Sequence: Synthetic oligonucleotide
aucagcgcaguuguccuug

SEQ ID NO: 1110306 - RNA, 19 nt, Artificial Sequence
  Description of Artificial Sequence: Synthetic oligonucleotide
gguaccaaaacugacgggu

SEQ ID NO: 1110307 - RNA, 19 nt, Artificial Sequence
  Description of Artificial Sequence: Synthetic oligonucleotide
caugacucuuacaagguau

SEQ ID NO: 1110308 - RNA, 19 nt, Artificial Sequence
  Description of Artificial Sequence: Synthetic oligonucleotide
aaaccgcuugggauuauau

SEQ ID NO: 1110309 - RNA, 19 nt, Artificial Sequence
  Description of Artificial Sequence: Synthetic oligonucleotide
cuuagcuggaaagcccaac

SEQ ID NO: 1110310 - RNA, 19 nt, Artificial Sequence
  Description of Artificial Sequence: Synthetic oligonucleotide
uaccaugagcgguaccaaa

SEQ ID NO: 1110311 - RNA, 19 nt, Artificial Sequence
  Description of Artificial Sequence: Synthetic oligonucleotide
auaaggcaucauuggacua

SEQ ID NO: 1110312 - RNA, 19 nt, Artificial Sequence
  Description of Artificial Sequence: Synthetic oligonucleotide
uacagguggcuugaacacu

SEQ ID NO: 1110313 - RNA, 19 nt, Artificial Sequence
  Description of Artificial Sequence: Synthetic oligonucleotide
gggcaaucgaucucacugc

SEQ ID NO: 1110314 - RNA, 19 nt, Artificial Sequence
  Description of Artificial Sequence: Synthetic oligonucleotide
uguggauugcugagaugua

SEQ ID NO: 1110315 - RNA, 19 nt, Artificial Sequence
  Description of Artificial Sequence: Synthetic oligonucleotide
caagcccugagcauaaggu

SEQ ID NO: 1110316 - RNA, 19 nt, Artificial Sequence
  Description of Artificial Sequence: Synthetic oligonucleotide
acaccaugaaacagugaug

SEQ ID NO: 1110317 - RNA, 19 nt, Artificial Sequence
  Description of Artificial Sequence: Synthetic oligonucleotide
guagauuaauccaggaaau

SEQ ID NO: 1110318 - RNA, 19 nt, Artificial Sequence
  Description of Artificial Sequence: Synthetic oligonucleotide
auggggaacuucacaucac

SEQ ID NO: 1110319 - RNA, 19 nt, Artificial Sequence
  Description of Artificial Sequence: Synthetic oligonucleotide
cuugaagucuaagaacuua

SEQ ID NO: 1110320 - RNA, 19 nt, Artificial Sequence
  Description of Artificial Sequence: Synthetic oligonucleotide
cuccccaccauguuuugga

SEQ ID NO: 1110321 - RNA, 19 nt, Artificial Sequence
  Description of Artificial Sequence: Synthetic oligonucleotide
cgacucacaguaaugcugc

SEQ ID NO: 1110322 - RNA, 19 nt, Artificial Sequence
  Description of Artificial Sequence: Synthetic oligonucleotide
aaucagcgcaguuguccuu

SEQ ID NO: 1110323 - RNA, 19 nt, Artificial Sequence
  Description of Artificial Sequence: Synthetic oligonucleotide
auccaagauucaccgugga

SEQ ID NO: 1110324 - RNA, 19 nt, Artificial Sequence
  Description of Artificial Sequence: Synthetic oligonucleotide
gggucauaggggucauugg

SEQ ID NO: 1110325 - RNA, 19 nt, Artificial Sequence
  Description of Artificial Sequence: Synthetic oligonucleotide
acuggcuuaugugggaaaa

SEQ ID NO: 1110326 - RNA, 19 nt, Artificial Sequence
  Description of Artificial Sequence: Synthetic oligonucleotide
uggcucauagcugcugaac

SEQ ID NO: 1110327 - RNA, 19 nt, Artificial Sequence
  Description of Artificial Sequence: Synthetic oligonucleotide
cagguauuauaucuaaaau

SEQ ID NO: 1110328 - RNA, 19 nt, Artificial Sequence
  Description of Artificial Sequence: Synthetic oligonucleotide
ccguggauacaauauuuug

SEQ ID NO: 1110329 - RNA, 19 nt, Artificial Sequence
  Description of Artificial Sequence: Synthetic oligonucleotide
agguaaccuuucagugucc

SEQ ID NO: 1110330 - RNA, 19 nt, Artificial Sequence
  Description of Artificial Sequence: Synthetic oligonucleotide
gaagagcuguggagucugg

SEQ ID NO: 1110331 - RNA, 19 nt, Artificial Sequence
  Description of Artificial Sequence: Synthetic oligonucleotide
acagacuauugguguucug

SEQ ID NO: 1110332 - RNA, 19 nt, Artificial Sequence
  Description of Artificial Sequence: Synthetic oligonucleotide
guugcugcugcugcugcug

SEQ ID NO: 1110333 - RNA, 19 nt, Artificial Sequence
  Description of Artificial Sequence: Synthetic oligonucleotide
uuugcagcugugguacgau

SEQ ID NO: 1110334 - RNA, 19 nt, Artificial Sequence
  Description of Artificial Sequence: Synthetic oligonucleotide
gcugagauguagauugcug

SEQ ID NO: 1110335 - RNA, 19 nt, Artificial Sequence
  Description of Artificial Sequence: Synthetic oligonucleotide
ggccuuccagccuuauggg

SEQ ID NO: 1110336 - RNA, 19 nt, Artificial Sequence
  Description of Artificial Sequence: Synthetic oligonucleotide
acugcugcugcugcugcug

SEQ ID NO: 1110337 - RNA, 19 nt, Artificial Sequence
  Description of Artificial Sequence: Synthetic oligonucleotide
gcuuaugugggaaaaguua

SEQ ID NO: 1110338 - RNA, 19 nt, Artificial Sequence
  Description of Artificial Sequence: Synthetic oligonucleotide
ugaauagguuguggaguaa

SEQ ID NO: 1110339 - RNA, 19 nt, Artificial Sequence
  Description of Artificial Sequence: Synthetic oligonucleotide
accuguuaauacaacuuuu

SEQ ID NO: 1110340 - RNA, 19 nt, Artificial Sequence
  Description of Artificial Sequence: Synthetic oligonucleotide
accaugagcgguaccaaaa

SEQ ID NO: 1110341 - RNA, 19 nt, Artificial Sequence
  Description of Artificial Sequence: Synthetic oligonucleotide
gcgacucacaguaaugcug

SEQ ID NO: 1110342 - RNA, 19 nt, Artificial Sequence
  Description of Artificial Sequence: Synthetic oligonucleotide
ugcaguggucagaguuuga

SEQ ID NO: 1110343 - RNA, 19 nt, Artificial Sequence
  Description of Artificial Sequence: Synthetic oligonucleotide
gaaaaucagcgcaguuguc

SEQ ID NO: 1110344 - RNA, 19 nt, Artificial Sequence
  Description of Artificial Sequence: Synthetic oligonucleotide
gaucauucuguagauuaau

SEQ ID NO: 1110345 - RNA, 19 nt, Artificial Sequence
  Description of Artificial Sequence: Synthetic oligonucleotide
uggcucucuuauucucaug

SEQ ID NO: 1110346 - RNA, 19 nt, Artificial Sequence
  Description of Artificial Sequence: Synthetic oligonucleotide
ggacuaaagaugggaauuc

SEQ ID NO: 1110347 - RNA, 19 nt, Artificial Sequence
  Description of Artificial Sequence: Synthetic oligonucleotide
gccuuccagccuuaugggg

SEQ ID NO: 1110348 - RNA, 19 nt, Artificial Sequence
  Description of Artificial Sequence: Synthetic oligonucleotide
uugcugcugcugcugcugu

SEQ ID NO: 1110349 - RNA, 19 nt, Artificial Sequence
  Description of Artificial Sequence: Synthetic oligonucleotide
ggauuguucuucacucuug

SEQ ID NO: 1110350 - RNA, 19 nt, Artificial Sequence
  Description of Artificial Sequence: Synthetic oligonucleotide
ccaagcccugagcauaagg

SEQ ID NO: 1110351 - RNA, 19 nt, Artificial Sequence
  Description of Artificial Sequence: Synthetic oligonucleotide
auaacuccuaagaguuaga

SEQ ID NO: 1110352 - RNA, 19 nt, Artificial Sequence
  Description of Artificial Sequence: Synthetic oligonucleotide
gugguacgaucccagagcu

SEQ ID NO: 1110353 - RNA, 19 nt, Artificial Sequence
  Description of Artificial Sequence: Synthetic oligonucleotide
cacggugucacuucaugcu

SEQ ID NO: 1110354 - RNA, 19 nt, Artificial Sequence
  Description of Artificial Sequence: Synthetic oligonucleotide
uguccuuggcucucuuauu

SEQ ID NO: 1110355 - RNA, 19 nt, Artificial Sequence
  Description of Artificial Sequence: Synthetic oligonucleotide
aguguccuucucacaacug

SEQ ID NO: 1110356 - RNA, 19 nt, Artificial Sequence
  Description of Artificial Sequence: Synthetic oligonucleotide
cuccuaagaguuagaaacu

SEQ ID NO: 1110357 - RNA, 19 nt, Artificial Sequence
  Description of Artificial Sequence: Synthetic oligonucleotide
cagugggacacacgguguc

SEQ ID NO: 1110358 - RNA, 19 nt, Artificial Sequence
  Description of Artificial Sequence: Synthetic oligonucleotide
agugggacacacgguguca

SEQ ID NO: 1110359 - RNA, 19 nt, Artificial Sequence
  Description of Artificial Sequence: Synthetic oligonucleotide
ugggacacacggugucacu

SEQ ID NO: 1110360 - RNA, 19 nt, Artificial Sequence
  Description of Artificial Sequence: Synthetic oligonucleotide
uuucgggcacgaagugcaa

SEQ ID NO: 1110361 - RNA, 19 nt, Artificial Sequence
  Description of Artificial Sequence: Synthetic oligonucleotide
ggcacgaagugcaaugguc

SEQ ID NO: 1110362 - RNA, 19 nt, Artificial Sequence
  Description of Artificial Sequence: Synthetic oligonucleotide
ugcacaacucuagcguauu

SEQ ID NO: 1110363 - RNA, 19 nt, Artificial Sequence
  Description of Artificial Sequence: Synthetic oligonucleotide
gacucuuacaagguaucau

SEQ ID NO: 1110364 - RNA, 19 nt, Artificial Sequence
  Description of Artificial Sequence: Synthetic oligonucleotide
auucagcauuucgggcacg

SEQ ID NO: 1110365 - RNA, 19 nt, Artificial Sequence
  Description of Artificial Sequence: Synthetic oligonucleotide
cuuccagccuuauggggaa

SEQ ID NO: 1110366 - RNA, 19 nt, Artificial Sequence
  Description of Artificial Sequence: Synthetic oligonucleotide
gacucacaguaaugcugca

SEQ ID NO: 1110367 - RNA, 19 nt, Artificial Sequence
  Description of Artificial Sequence: Synthetic oligonucleotide
uccccaccauguuuuggau

SEQ ID NO: 1110368 - RNA, 19 nt, Artificial Sequence
  Description of Artificial Sequence: Synthetic oligonucleotide
ccaugagcgguaccaaaac

SEQ ID NO: 1110369 - RNA, 19 nt, Artificial Sequence
  Description of Artificial Sequence: Synthetic oligonucleotide
caacucuagcguauuuucu

SEQ ID NO: 1110370 - RNA, 19 nt, Artificial Sequence
  Description of Artificial Sequence: Synthetic oligonucleotide
caugagcgguaccaaaacu

SEQ ID NO: 1110371 - RNA, 19 nt, Artificial Sequence
  Description of Artificial Sequence: Synthetic oligonucleotide
cuguaccaugagcgguacc

SEQ ID NO: 1110372 - RNA, 19 nt, Artificial Sequence
  Description of Artificial Sequence: Synthetic oligonucleotide
gcgcaguuguccuuggcuc

SEQ ID NO: 1110373 - RNA, 19 nt, Artificial Sequence
  Description of Artificial Sequence: Synthetic oligonucleotide
cugucccuuaaaccaacaa

SEQ ID NO: 1110374 - RNA, 19 nt, Artificial Sequence
  Description of Artificial Sequence: Synthetic oligonucleotide
gugggacacacggugucac

SEQ ID NO: 1110375 - RNA, 19 nt, Artificial Sequence
  Description of Artificial Sequence: Synthetic oligonucleotide
agcaaaccgcuugggauua

SEQ ID NO: 1110376 - RNA, 19 nt, Artificial Sequence
  Description of Artificial Sequence: Synthetic oligonucleotide
caccuguuaauacaacuuu

SEQ ID NO: 1110377 - RNA, 19 nt, Artificial Sequence
  Description of Artificial Sequence: Synthetic oligonucleotide
gacagacuauugguguucu

SEQ ID NO: 1110378 - RNA, 19 nt, Artificial Sequence
  Description of Artificial Sequence: Synthetic oligonucleotide
ugcugcuagucuggauugu

SEQ ID NO: 1110379 - RNA, 19 nt, Artificial Sequence
  Description of Artificial Sequence: Synthetic oligonucleotide
gcuugggauuauauucagc

SEQ ID NO: 1110380 - RNA, 19 nt, Artificial Sequence
  Description of Artificial Sequence: Synthetic oligonucleotide
gggucauuggugaagggua

SEQ ID NO: 1110381 - RNA, 19 nt, Artificial Sequence
  Description of Artificial Sequence: Synthetic oligonucleotide
gucuaagaacuuagcugga

SEQ ID NO: 1110382 - RNA, 19 nt, Artificial Sequence
  Description of Artificial Sequence: Synthetic oligonucleotide
uucgggcacgaagugcaau

SEQ ID NO: 1110383 - RNA, 19 nt, Artificial Sequence
  Description of Artificial Sequence: Synthetic oligonucleotide
gguggcuugaacacuuaaa

SEQ ID NO: 1110384 - RNA, 19 nt, Artificial Sequence
  Description of Artificial Sequence: Synthetic oligonucleotide
cugcagggcaaucgaucuc

SEQ ID NO: 1110385 - RNA, 19 nt, Artificial Sequence
  Description of Artificial Sequence: Synthetic oligonucleotide
ggauuauauucagcauuuc

SEQ ID NO: 1110386 - RNA, 19 nt, Artificial Sequence
  Description of Artificial Sequence: Synthetic oligonucleotide
gcuggaaagcccaacuucu

SEQ ID NO: 1110387 - RNA, 19 nt, Artificial Sequence
  Description of Artificial Sequence: Synthetic oligonucleotide
caccguggauacaauauuu

SEQ ID NO: 1110388 - RNA, 19 nt, Artificial Sequence
  Description of Artificial Sequence: Synthetic oligonucleotide
ccgcuugggauuauauuca

SEQ ID NO: 1110389 - RNA, 19 nt, Artificial Sequence
  Description of Artificial Sequence: Synthetic oligonucleotide
ugcugcugcugcugcuguc

SEQ ID NO: 1110390 - RNA, 19 nt, Artificial Sequence
  Description of Artificial Sequence: Synthetic oligonucleotide
cagcgcaguuguccuuggc

SEQ ID NO: 1110391 - RNA, 19 nt, Artificial Sequence
  Description of Artificial Sequence: Synthetic oligonucleotide
auggugcaguggucagagu

SEQ ID NO: 1110392 - RNA, 19 nt, Artificial Sequence
  Description of Artificial Sequence: Synthetic oligonucleotide
cagcaaaccgcuugggauu

SEQ ID NO: 1110393 - RNA, 19 nt, Artificial Sequence
  Description of Artificial Sequence: Synthetic oligonucleotide
gcaagcgacucacaguaau

SEQ ID NO: 1110394 - RNA, 19 nt, Artificial Sequence
  Description of Artificial Sequence: Synthetic oligonucleotide
cucuaacuuuagcaccugu

SEQ ID NO: 1110395 - RNA, 19 nt, Artificial Sequence
  Description of Artificial Sequence: Synthetic oligonucleotide
cgcuugggauuauauucag

SEQ ID NO: 1110396 - RNA, 19 nt, Artificial Sequence
  Description of Artificial Sequence: Synthetic oligonucleotide
gcacgaagugcaauggucu

SEQ ID NO: 1110397 - RNA, 19 nt, Artificial Sequence
  Description of Artificial Sequence: Synthetic oligonucleotide
gaacaauccuggguuugau

SEQ ID NO: 1110398 - RNA, 19 nt, Artificial Sequence
  Description of Artificial Sequence: Synthetic oligonucleotide
guuguggaguaaguccagu

SEQ ID NO: 1110399 - RNA, 19 nt, Artificial Sequence
  Description of Artificial Sequence: Synthetic oligonucleotide
gugggucagcacaaggccu

SEQ ID NO: 1110400 - RNA, 19 nt, Artificial Sequence
  Description of Artificial Sequence: Synthetic oligonucleotide
ugcugcugcugcugcuguu

SEQ ID NO: 1110401 - RNA, 19 nt, Artificial Sequence
  Description of Artificial Sequence: Synthetic oligonucleotide
ccaaaauagacagacuauu

SEQ ID NO: 1110402 - RNA, 19 nt, Artificial Sequence
  Description of Artificial Sequence: Synthetic oligonucleotide
cgguaccaaaacugacggg

SEQ ID NO: 1110403 - RNA, 19 nt, Artificial Sequence
  Description of Artificial Sequence: Synthetic oligonucleotide
cugcagaggagguaaccuu

SEQ ID NO: 1110404 - RNA, 19 nt, Artificial Sequence
  Description of Artificial Sequence: Synthetic oligonucleotide
ggggucauuggugaagggu

SEQ ID NO: 1110405 - RNA, 19 nt, Artificial Sequence
  Description of Artificial Sequence: Synthetic oligonucleotide
cugcacaacucuagcguau

SEQ ID NO: 1110406 - RNA, 19 nt, Artificial Sequence
  Description of Artificial Sequence: Synthetic oligonucleotide
gacugcugcugcugcugcu

SEQ ID NO: 1110407 - RNA, 19 nt, Artificial Sequence
  Description of Artificial Sequence: Synthetic oligonucleotide
aggagugauaggggucaua

SEQ ID NO: 1110408 - RNA, 19 nt, Artificial Sequence
  Description of Artificial Sequence: Synthetic oligonucleotide
gauucaccguggauacaau

SEQ ID NO: 1110409 - RNA, 19 nt, Artificial Sequence
  Description of Artificial Sequence: Synthetic oligonucleotide
guaccaaaacugacggguu

SEQ ID NO: 1110410 - RNA, 19 nt, Artificial Sequence
  Description of Artificial Sequence: Synthetic oligonucleotide
cacgaagugcaauggucuu

SEQ ID NO: 1110411 - RNA, 19 nt, Artificial Sequence
  Description of Artificial Sequence: Synthetic oligonucleotide
agcaagcgacucacaguaa

SEQ ID NO: 1110412 - RNA, 19 nt, Artificial Sequence
  Description of Artificial Sequence: Synthetic oligonucleotide
caaaccgcuugggauuaua

SEQ ID NO: 1110413 - RNA, 19 nt, Artificial Sequence
  Description of Artificial Sequence: Synthetic oligonucleotide
guacgaucccagagcucuc

SEQ ID NO: 1110414 - RNA, 19 nt, Artificial Sequence
  Description of Artificial Sequence: Synthetic oligonucleotide
gugucacuucaugcugcca

SEQ ID NO: 1110415 - RNA, 19 nt, Artificial Sequence
  Description of Artificial Sequence: Synthetic oligonucleotide
ggagaacaauccuggguuu

SEQ ID NO: 1110416 - RNA, 19 nt, Artificial Sequence
  Description of Artificial Sequence: Synthetic oligonucleotide
cagcugugguacgauccca

SEQ ID NO: 1110417 - RNA, 19 nt, Artificial Sequence
  Description of Artificial Sequence: Synthetic oligonucleotide
cgggcacgaagugcaaugg

SEQ ID NO: 1110418 - RNA, 19 nt, Artificial Sequence
  Description of Artificial Sequence: Synthetic oligonucleotide
gcccugagcauaaggugga

SEQ ID NO: 1110419 - RNA, 19 nt, Artificial Sequence
  Description of Artificial Sequence: Synthetic oligonucleotide
cauaagguggaaggcuguu

SEQ ID NO: 1110420 - RNA, 19 nt, Artificial Sequence
  Description of Artificial Sequence: Synthetic oligonucleotide
ggugcaguggucagaguuu

SEQ ID NO: 1110421 - RNA, 19 nt, Artificial Sequence
  Description of Artificial Sequence: Synthetic oligonucleotide
cagccacuauguggucuuc

SEQ ID NO: 1110422 - RNA, 19 nt, Artificial Sequence
  Description of Artificial Sequence: Synthetic oligonucleotide
gcagccacuauguggucuu

SEQ ID NO: 1110423 - RNA, 19 nt, Artificial Sequence
  Description of Artificial Sequence: Synthetic oligonucleotide
gggcacgaagugcaauggu

SEQ ID NO: 1110424 - RNA, 19 nt, Artificial Sequence
  Description of Artificial Sequence: Synthetic oligonucleotide
cgaagugcaauggucuuua

SEQ ID NO: 1110425 - RNA, 19 nt, Artificial Sequence
  Description of Artificial Sequence: Synthetic oligonucleotide
gcguauuuucuugcugcua

SEQ ID NO: 1110426 - RNA, 19 nt, Artificial Sequence
  Description of Artificial Sequence: Synthetic oligonucleotide
gcuguggagucuggccuga

SEQ ID NO: 1110427 - RNA, 19 nt, Artificial Sequence
  Description of Artificial Sequence: Synthetic oligonucleotide
gcagggcaaucgaucucac

SEQ ID NO: 1110428 - RNA, 19 nt, Artificial Sequence
  Description of Artificial Sequence: Synthetic oligonucleotide
ggccaagcccugagcauaa

SEQ ID NO: 1110429 - RNA, 19 nt, Artificial Sequence
  Description of Artificial Sequence: Synthetic oligonucleotide
cugcugcugcugcugcugu

SEQ ID NO: 1110430 - RNA, 19 nt, Artificial Sequence
  Description of Artificial Sequence: Synthetic oligonucleotide
cagugccauaaggcaucau

SEQ ID NO: 1110431 - RNA, 19 nt, Artificial Sequence
  Description of Artificial Sequence: Synthetic oligonucleotide
gcaaaccgcuugggauuau

SEQ ID NO: 1110432 - RNA, 19 nt, Artificial Sequence
  Description of Artificial Sequence: Synthetic oligonucleotide
aaaccuuacauuuucuagc

SEQ ID NO: 1110433 - RNA, 19 nt, Artificial Sequence
  Description of Artificial Sequence: Synthetic oligonucleotide
aaucaggagacuuucaugg

SEQ ID NO: 1110434 - RNA, 19 nt, Artificial Sequence
  Description of Artificial Sequence: Synthetic oligonucleotide
aaccaagggagucagaccc

SEQ ID NO: 1110435 - RNA, 19 nt, Artificial Sequence
  Description of Artificial Sequence: Synthetic oligonucleotide
aaccuuacauuuucuagcc

SEQ ID NO: 1110436 - RNA, 19 nt, Artificial Sequence
  Description of Artificial Sequence: Synthetic oligonucleotide
uaaguaagcacuuuaggag

SEQ ID NO: 1110437 - RNA, 19 nt, Artificial Sequence
  Description of Artificial Sequence: Synthetic oligonucleotide
aauaccaaaagacagcaau

SEQ ID NO: 1110438 - RNA, 19 nt, Artificial Sequence
  Description of Artificial Sequence: Synthetic oligonucleotide
uuucuagccaaagagaacg

SEQ ID NO: 1110439 - RNA, 19 nt, Artificial Sequence
  Description of Artificial Sequence: Synthetic oligonucleotide
aaaaggauacauucccaac

SEQ ID NO: 1110440 - RNA, 19 nt, Artificial Sequence
  Description of Artificial Sequence: Synthetic oligonucleotide
ucuaaguaagcacuuuagg

SEQ ID NO: 1110441 - RNA, 19 nt, Artificial Sequence
  Description of Artificial Sequence: Synthetic oligonucleotide
aaaggauacauucccaacu

SEQ ID NO: 1110442 - RNA, 19 nt, Artificial Sequence
  Description of Artificial Sequence: Synthetic oligonucleotide
cacucaaccaaucacaugc

SEQ ID NO: 1110443 - RNA, 19 nt, Artificial Sequence
  Description of Artificial Sequence: Synthetic oligonucleotide
gaagguaggaccaaagagg

SEQ ID NO: 1110444 - RNA, 19 nt, Artificial Sequence
  Description of Artificial Sequence: Synthetic oligonucleotide
uuuauugcacuuaacagau

SEQ ID NO: 1110445 - RNA, 19 nt, Artificial Sequence
  Description of Artificial Sequence: Synthetic oligonucleotide
uaucacaucacuccggccc

SEQ ID NO: 1110446 - RNA, 19 nt, Artificial Sequence
  Description of Artificial Sequence: Synthetic oligonucleotide
uggagagccaaauagaagu

SEQ ID NO: 1110447 - RNA, 19 nt, Artificial Sequence
  Description of Artificial Sequence: Synthetic oligonucleotide
agagguugcgugcaggucc

SEQ ID NO: 1110448 - RNA, 19 nt, Artificial Sequence
  Description of Artificial Sequence: Synthetic oligonucleotide
aagggguuuucuccuagcc

SEQ ID NO: 1110449 - RNA, 19 nt, Artificial Sequence
  Description of Artificial Sequence: Synthetic oligonucleotide
uguagaugggacuuggccc

SEQ ID NO: 1110450 - RNA, 19 nt, Artificial Sequence
  Description of Artificial Sequence: Synthetic oligonucleotide
gagacauuaagccccaacc

SEQ ID NO: 1110451 - RNA, 19 nt, Artificial Sequence
  Description of Artificial Sequence: Synthetic oligonucleotide
ucccaauaccaaaagacag

SEQ ID NO: 1110452 - RNA, 19 nt, Artificial Sequence
  Description of Artificial Sequence: Synthetic oligonucleotide
aacgaagagccuuucagcu

SEQ ID NO: 1110453 - RNA, 19 nt, Artificial Sequence
  Description of Artificial Sequence: Synthetic oligonucleotide
caucccaauaccaaaagac

SEQ ID NO: 1110454 - RNA, 19 nt, Artificial Sequence
  Description of Artificial Sequence: Synthetic oligonucleotide
uucuaaguaagcacuuuag

SEQ ID NO: 1110455 - RNA, 19 nt, Artificial Sequence
  Description of Artificial Sequence: Synthetic oligonucleotide
cuucuagaaggaaaggagg

SEQ ID NO: 1110456 - RNA, 19 nt, Artificial Sequence
  Description of Artificial Sequence: Synthetic oligonucleotide
gacacauucgcacaggcac

SEQ ID NO: 1110457 - RNA, 19 nt, Artificial Sequence
  Description of Artificial Sequence: Synthetic oligonucleotide
agaacgaagagccuuucag

SEQ ID NO: 1110458 - RNA, 19 nt, Artificial Sequence
  Description of Artificial Sequence: Synthetic oligonucleotide
uuucauggcaagacgaaca

SEQ ID NO: 1110459 - RNA, 19 nt, Artificial Sequence
  Description of Artificial Sequence: Synthetic oligonucleotide
auguuuaggaaguggcagc

SEQ ID NO: 1110460 - RNA, 19 nt, Artificial Sequence
  Description of Artificial Sequence: Synthetic oligonucleotide
cacacacacacacauaagg

SEQ ID NO: 1110461 - RNA, 19 nt, Artificial Sequence
  Description of Artificial Sequence: Synthetic oligonucleotide
uguuaaggauaguaaagca

SEQ ID NO: 1110462 - RNA, 19 nt, Artificial Sequence
  Description of Artificial Sequence: Synthetic oligonucleotide
ugugguuacaauagaguga

SEQ ID NO: 1110463 - RNA, 19 nt, Artificial Sequence
  Description of Artificial Sequence: Synthetic oligonucleotide
ucucaaaauauuuaauuuu

SEQ ID NO: 1110464 - RNA, 19 nt, Artificial Sequence
  Description of Artificial Sequence: Synthetic oligonucleotide
acuuuaggaggaucuagac

SEQ ID NO: 1110465 - RNA, 19 nt, Artificial Sequence
  Description of Artificial Sequence: Synthetic oligonucleotide
cuaaguaagcacuuuagga

SEQ ID NO: 1110466 - RNA, 19 nt, Artificial Sequence
  Description of Artificial Sequence: Synthetic oligonucleotide
agauaguuugcccuggucu

SEQ ID NO: 1110467 - RNA, 19 nt, Artificial Sequence
  Description of Artificial Sequence: Synthetic oligonucleotide
aaauagaaguuggauucuc

SEQ ID NO: 1110468 - RNA, 19 nt, Artificial Sequence
  Description of Artificial Sequence: Synthetic oligonucleotide
uuuaggaaguggcagcacu

SEQ ID NO: 1110469 - RNA, 19 nt, Artificial Sequence
  Description of Artificial Sequence: Synthetic oligonucleotide
aggauguuuaggaaguggc

SEQ ID NO: 1110470 - RNA, 19 nt, Artificial Sequence
  Description of Artificial Sequence: Synthetic oligonucleotide
gauguuaaagaagcuguag

SEQ ID NO: 1110471 - RNA, 19 nt, Artificial Sequence
  Description of Artificial Sequence: Synthetic oligonucleotide
uuauagggagcauacuucu

SEQ ID NO: 1110472 - RNA, 19 nt, Artificial Sequence
  Description of Artificial Sequence: Synthetic oligonucleotide
cacacacacacauaaggcc

SEQ ID NO: 1110473 - RNA, 19 nt, Artificial Sequence
  Description of Artificial Sequence: Synthetic oligonucleotide
auaguacccuuucagcagg

SEQ ID NO: 1110474 - RNA, 19 nt, Artificial Sequence
  Description of Artificial Sequence: Synthetic oligonucleotide
cauccagagauaaguaucc

SEQ ID NO: 1110475 - RNA, 19 nt, Artificial Sequence
  Description of Artificial Sequence: Synthetic oligonucleotide
auguuaaagaagcuguaga

SEQ ID NO: 1110476 - RNA, 19 nt, Artificial Sequence
  Description of Artificial Sequence: Synthetic oligonucleotide
cuuauagggagcauacuuc

SEQ ID NO: 1110477 - RNA, 19 nt, Artificial Sequence
  Description of Artificial Sequence: Synthetic oligonucleotide
aaacuaagccaccauuuaa

SEQ ID NO: 1110478 - RNA, 19 nt, Artificial Sequence
  Description of Artificial Sequence: Synthetic oligonucleotide
cucccuaucacaucacucc

SEQ ID NO: 1110479 - RNA, 19 nt, Artificial Sequence
  Description of Artificial Sequence: Synthetic oligonucleotide
uagaaguuggauucucaag

SEQ ID NO: 1110480 - RNA, 19 nt, Artificial Sequence
  Description of Artificial Sequence: Synthetic oligonucleotide
auuaagccccaacccaccc

SEQ ID NO: 1110481 - RNA, 19 nt, Artificial Sequence
  Description of Artificial Sequence: Synthetic oligonucleotide
ugaagugagaauugccucu

SEQ ID NO: 1110482 - RNA, 19 nt, Artificial Sequence
  Description of Artificial Sequence: Synthetic oligonucleotide
acacacacacacauaaggc

SEQ ID NO: 1110483 - RNA, 19 nt, Artificial Sequence
  Description of Artificial Sequence: Synthetic oligonucleotide
ugucaagagagguugcgug

SEQ ID NO: 1110484 - RNA, 19 nt, Artificial Sequence
  Description of Artificial Sequence: Synthetic oligonucleotide
ugagcaaauaacacacccu

SEQ ID NO: 1110485 - RNA, 19 nt, Artificial Sequence
  Description of Artificial Sequence: Synthetic oligonucleotide
auaaguauccauuccuuaa

SEQ ID NO: 1110486 - RNA, 19 nt, Artificial Sequence
  Description of Artificial Sequence: Synthetic oligonucleotide
ucuugaaagauuggggccc

SEQ ID NO: 1110487 - RNA, 19 nt, Artificial Sequence
  Description of Artificial Sequence: Synthetic oligonucleotide
gaacgaagagccuuucagc

SEQ ID NO: 1110488 - RNA, 19 nt, Artificial Sequence
  Description of Artificial Sequence: Synthetic oligonucleotide
agugagaauugccucuggg

SEQ ID NO: 1110489 - RNA, 19 nt, Artificial Sequence
  Description of Artificial Sequence: Synthetic oligonucleotide
cauggcaagacgaacagca

SEQ ID NO: 1110490 - RNA, 19 nt, Artificial Sequence
  Description of Artificial Sequence: Synthetic oligonucleotide
ucaggagacuuucauggca

SEQ ID NO: 1110491 - RNA, 19 nt, Artificial Sequence
  Description of Artificial Sequence: Synthetic oligonucleotide
uaaguauccauuccuuaaa

SEQ ID NO: 1110492 - RNA, 19 nt, Artificial Sequence
  Description of Artificial Sequence: Synthetic oligonucleotide
uggaaagcaggccauagua

SEQ ID NO: 1110493 - RNA, 19 nt, Artificial Sequence
  Description of Artificial Sequence: Synthetic oligonucleotide
agacuuucauggcaagacg

SEQ ID NO: 1110494 - RNA, 19 nt, Artificial Sequence
  Description of Artificial Sequence: Synthetic oligonucleotide
aagacgaacagcagagauc

SEQ ID NO: 1110495 - RNA, 19 nt, Artificial Sequence
  Description of Artificial Sequence: Synthetic oligonucleotide
cacuuaacagauguuaaag

SEQ ID NO: 1110496 - RNA, 19 nt, Artificial Sequence
  Description of Artificial Sequence: Synthetic oligonucleotide
gacauuaagccccaaccca

SEQ ID NO: 1110497 - RNA, 19 nt, Artificial Sequence
  Description of Artificial Sequence: Synthetic oligonucleotide
gaggacaggauguuuagga

SEQ ID NO: 1110498 - RNA, 19 nt, Artificial Sequence
  Description of Artificial Sequence: Synthetic oligonucleotide
agcacuucucaucccaagg

SEQ ID NO: 1110499 - RNA, 19 nt, Artificial Sequence
  Description of Artificial Sequence: Synthetic oligonucleotide
ugagcuuaugugaacacuu

SEQ ID NO: 1110500 - RNA, 19 nt, Artificial Sequence
  Description of Artificial Sequence: Synthetic oligonucleotide
ucccuaucacaucacuccg

SEQ ID NO: 1110501 - RNA, 19 nt, Artificial Sequence
  Description of Artificial Sequence: Synthetic oligonucleotide
auaguaaagcacccucguc

SEQ ID NO: 1110502 - RNA, 19 nt, Artificial Sequence
  Description of Artificial Sequence: Synthetic oligonucleotide
guuaaggauaguaaagcac

SEQ ID NO: 1110503 - RNA, 19 nt, Artificial Sequence
  Description of Artificial Sequence: Synthetic oligonucleotide
aaagagaacgaagagccuu

SEQ ID NO: 1110504 - RNA, 19 nt, Artificial Sequence
  Description of Artificial Sequence: Synthetic oligonucleotide
ugccugaguggaaagcagg

SEQ ID NO: 1110505 - RNA, 19 nt, Artificial Sequence
  Description of Artificial Sequence: Synthetic oligonucleotide
aaucucuaccuggaaauca

SEQ ID NO: 1110506 - RNA, 19 nt, Artificial Sequence
  Description of Artificial Sequence: Synthetic oligonucleotide
uguuugaaaaggauacauu

SEQ ID NO: 1110507 - RNA, 19 nt, Artificial Sequence
  Description of Artificial Sequence: Synthetic oligonucleotide
uuacauuuucuagccaaag

SEQ ID NO: 1110508 - RNA, 19 nt, Artificial Sequence
  Description of Artificial Sequence: Synthetic oligonucleotide
gugguuacaauagagugac

SEQ ID NO: 1110509 - RNA, 19 nt, Artificial Sequence
  Description of Artificial Sequence: Synthetic oligonucleotide
gggagcauacuucucaggg

SEQ ID NO: 1110510 - RNA, 19 nt, Artificial Sequence
  Description of Artificial Sequence: Synthetic oligonucleotide
gguccuaaggccaacagag

SEQ ID NO: 1110511 - RNA, 19 nt, Artificial Sequence
  Description of Artificial Sequence: Synthetic oligonucleotide
acaagugcgcacaugguuc

SEQ ID NO: 1110512 - RNA, 19 nt, Artificial Sequence
  Description of Artificial Sequence: Synthetic oligonucleotide
gucuugaaagauuggggcc

SEQ ID NO: 1110513 - RNA, 19 nt, Artificial Sequence
  Description of Artificial Sequence: Synthetic oligonucleotide
ccaccauuuaaaauaaagc

SEQ ID NO: 1110514 - RNA, 19 nt, Artificial Sequence
  Description of Artificial Sequence: Synthetic oligonucleotide
gagacuuucauggcaagac

SEQ ID NO: 1110515 - RNA, 19 nt, Artificial Sequence
  Description of Artificial Sequence: Synthetic oligonucleotide
acauuaagccccaacccac

SEQ ID NO: 1110516 - RNA, 19 nt, Artificial Sequence
  Description of Artificial Sequence: Synthetic oligonucleotide
ucagcucaaggcuugucca

SEQ ID NO: 1110517 - RNA, 19 nt, Artificial Sequence
  Description of Artificial Sequence: Synthetic oligonucleotide
aauagaaguuggauucuca

SEQ ID NO: 1110518 - RNA, 19 nt, Artificial Sequence
  Description of Artificial Sequence: Synthetic oligonucleotide
ccuaguacuguccucaacc

SEQ ID NO: 1110519 - RNA, 19 nt, Artificial Sequence
  Description of Artificial Sequence: Synthetic oligonucleotide
cauuuucuagccaaagaga

SEQ ID NO: 1110520 - RNA, 19 nt, Artificial Sequence
  Description of Artificial Sequence: Synthetic oligonucleotide
aacuaagccaccauuuaaa

SEQ ID NO: 1110521 - RNA, 19 nt, Artificial Sequence
  Description of Artificial Sequence: Synthetic oligonucleotide
agugccaagagggugggag

SEQ ID NO: 1110522 - RNA, 19 nt, Artificial Sequence
  Description of Artificial Sequence: Synthetic oligonucleotide
aaguuagggagaggggccg

SEQ ID NO: 1110523 - RNA, 19 nt, Artificial Sequence
  Description of Artificial Sequence: Synthetic oligonucleotide
gagauaaguauccauuccu

SEQ ID NO: 1110524 - RNA, 19 nt, Artificial Sequence
  Description of Artificial Sequence: Synthetic oligonucleotide
uucucgucucaaaauauuu

SEQ ID NO: 1110525 - RNA, 19 nt, Artificial Sequence
  Description of Artificial Sequence: Synthetic oligonucleotide
cuacagaaccacaaaguca

SEQ ID NO: 1110526 - RNA, 19 nt, Artificial Sequence
  Description of Artificial Sequence: Synthetic oligonucleotide
ucucgucucaaaauauuua

SEQ ID NO: 1110527 - RNA, 19 nt, Artificial Sequence
  Description of Artificial Sequence: Synthetic oligonucleotide
cauaaggccaaugggcugc

SEQ ID NO: 1110528 - RNA, 19 nt, Artificial Sequence
  Description of Artificial Sequence: Synthetic oligonucleotide
cuggaaaucaccuuugccu

SEQ ID NO: 1110529 - RNA, 19 nt, Artificial Sequence
  Description of Artificial Sequence: Synthetic oligonucleotide
cuccuuauagggagcauac

SEQ ID NO: 1110530 - RNA, 19 nt, Artificial Sequence
  Description of Artificial Sequence: Synthetic oligonucleotide
aggauacauucccaacuuc

SEQ ID NO: 1110531 - RNA, 19 nt, Artificial Sequence
  Description of Artificial Sequence: Synthetic oligonucleotide
uggggccccaaacuaagcc

SEQ ID NO: 1110532 - RNA, 19 nt, Artificial Sequence
  Description of Artificial Sequence: Synthetic oligonucleotide
gauaaguauccauuccuua

SEQ ID NO: 1110533 - RNA, 19 nt, Artificial Sequence
  Description of Artificial Sequence: Synthetic oligonucleotide
cagagaucucugcacagcc

SEQ ID NO: 1110534 - RNA, 19 nt, Artificial Sequence
  Description of Artificial Sequence: Synthetic oligonucleotide
ggucuuaacaucauuauaa

SEQ ID NO: 1110535 - RNA, 19 nt, Artificial Sequence
  Description of Artificial Sequence: Synthetic oligonucleotide
auugccucugggugaagag

SEQ ID NO: 1110536 - RNA, 19 nt, Artificial Sequence
  Description of Artificial Sequence: Synthetic oligonucleotide
cuuuuaccucugcagcugg

SEQ ID NO: 1110537 - RNA, 19 nt, Artificial Sequence
  Description of Artificial Sequence: Synthetic oligonucleotide
aucucuaccuggaaaucac

SEQ ID NO: 1110538 - RNA, 19 nt, Artificial Sequence
  Description of Artificial Sequence: Synthetic oligonucleotide
aguagauaguuugcccugg

SEQ ID NO: 1110539 - RNA, 19 nt, Artificial Sequence
  Description of Artificial Sequence: Synthetic oligonucleotide
gagaauugccucuggguga

SEQ ID NO: 1110540 - RNA, 19 nt, Artificial Sequence
  Description of Artificial Sequence: Synthetic oligonucleotide
cuucacauaggcugcccgc

SEQ ID NO: 1110541 - RNA, 19 nt, Artificial Sequence
  Description of Artificial Sequence: Synthetic oligonucleotide
aagcacuuuaggaggaucu

SEQ ID NO: 1110542 - RNA, 19 nt, Artificial Sequence
  Description of Artificial Sequence: Synthetic oligonucleotide
ggacaggauguuuaggaag

SEQ ID NO: 1110543 - RNA, 19 nt, Artificial Sequence
  Description of Artificial Sequence: Synthetic oligonucleotide
uuucuccuagccucuuucc

SEQ ID NO: 1110544 - RNA, 19 nt, Artificial Sequence
  Description of Artificial Sequence: Synthetic oligonucleotide
gucaagagagguugcgugc

SEQ ID NO: 1110545 - RNA, 19 nt, Artificial Sequence
  Description of Artificial Sequence: Synthetic oligonucleotide
gaaguggcagcacuucuca

SEQ ID NO: 1110546 - RNA, 19 nt, Artificial Sequence
  Description of Artificial Sequence: Synthetic oligonucleotide
uggucuuaacaucauuaua

SEQ ID NO: 1110547 - RNA, 19 nt, Artificial Sequence
  Description of Artificial Sequence: Synthetic oligonucleotide
cacaggcacacacacacac

SEQ ID NO: 1110548 - RNA, 19 nt, Artificial Sequence
  Description of Artificial Sequence: Synthetic oligonucleotide
acgaagagccuuucagcuc

SEQ ID NO: 1110549 - RNA, 19 nt, Artificial Sequence
  Description of Artificial Sequence: Synthetic oligonucleotide
ucgucucaaaauauuuaau

SEQ ID NO: 1110550 - RNA, 19 nt, Artificial Sequence
  Description of Artificial Sequence: Synthetic oligonucleotide
aacagaggagcugagcuua

SEQ ID NO: 1110551 - RNA, 19 nt, Artificial Sequence
  Description of Artificial Sequence: Synthetic oligonucleotide
uuacugccuaguacugucc

SEQ ID NO: 1110552 - RNA, 19 nt, Artificial Sequence
  Description of Artificial Sequence: Synthetic oligonucleotide
aaggauaguaaagcacccu

SEQ ID NO: 1110553 - RNA, 19 nt, Artificial Sequence
  Description of Artificial Sequence: Synthetic oligonucleotide
ucaaggcuuguccaccacu

SEQ ID NO: 1110554 - RNA, 19 nt, Artificial Sequence
  Description of Artificial Sequence: Synthetic oligonucleotide
agcaaucucuaccuggaaa

SEQ ID NO: 1110555 - RNA, 19 nt, Artificial Sequence
  Description of Artificial Sequence: Synthetic oligonucleotide
acagaacucagccuuugaa

SEQ ID NO: 1110556 - RNA, 19 nt, Artificial Sequence
  Description of Artificial Sequence: Synthetic oligonucleotide
cauuaagccccaacccacc

SEQ ID NO: 1110557 - RNA, 19 nt, Artificial Sequence
  Description of Artificial Sequence: Synthetic oligonucleotide
acaaaccuuacauuuucua

SEQ ID NO: 1110558 - RNA, 19 nt, Artificial Sequence
  Description of Artificial Sequence: Synthetic oligonucleotide
uuaggaggaucuagacccc

SEQ ID NO: 1110559 - RNA, 19 nt, Artificial Sequence
  Description of Artificial Sequence: Synthetic oligonucleotide
agaggggccgcuggaaugc

SEQ ID NO: 1110560 - RNA, 19 nt, Artificial Sequence
  Description of Artificial Sequence: Synthetic oligonucleotide
gacuuucauggcaagacga

SEQ ID NO: 1110561 - RNA, 19 nt, Artificial Sequence
  Description of Artificial Sequence: Synthetic oligonucleotide
ccaaagaggagacauuaag

SEQ ID NO: 1110562 - RNA, 19 nt, Artificial Sequence
  Description of Artificial Sequence: Synthetic oligonucleotide
ugaggacaggauguuuagg

SEQ ID NO: 1110563 - RNA, 19 nt, Artificial Sequence
  Description of Artificial Sequence: Synthetic oligonucleotide
gaagugagaauugccucug

SEQ ID NO: 1110564 - RNA, 19 nt, Artificial Sequence
  Description of Artificial Sequence: Synthetic oligonucleotide
gugcaacugcccuuugugg

SEQ ID NO: 1110565 - RNA, 19 nt, Artificial Sequence
  Description of Artificial Sequence: Synthetic oligonucleotide
acgaacagcagagaucucu

SEQ ID NO: 1110566 - RNA, 19 nt, Artificial Sequence
  Description of Artificial Sequence: Synthetic oligonucleotide
uuaagccccaacccaccca

SEQ ID NO: 1110567 - RNA, 19 nt, Artificial Sequence
  Description of Artificial Sequence: Synthetic oligonucleotide
uugcgugcaggucccauga

SEQ ID NO: 1110568 - RNA, 19 nt, Artificial Sequence
  Description of Artificial Sequence: Synthetic oligonucleotide
ucaagagagguugcgugca

SEQ ID NO: 1110569 - RNA, 19 nt, Artificial Sequence
  Description of Artificial Sequence: Synthetic oligonucleotide
uggccaguagauaguuugc

SEQ ID NO: 1110570 - RNA, 19 nt, Artificial Sequence
  Description of Artificial Sequence: Synthetic oligonucleotide
caagugcgcacaugguucc

SEQ ID NO: 1110571 - RNA, 19 nt, Artificial Sequence
  Description of Artificial Sequence: Synthetic oligonucleotide
aggaccaaagaggagacau

SEQ ID NO: 1110572 - RNA, 19 nt, Artificial Sequence
  Description of Artificial Sequence: Synthetic oligonucleotide
uuauugcacuuaacagaug

SEQ ID NO: 1110573 - RNA, 19 nt, Artificial Sequence
  Description of Artificial Sequence: Synthetic oligonucleotide
acauaaggccaaugggcug

SEQ ID NO: 1110574 - RNA, 19 nt, Artificial Sequence
  Description of Artificial Sequence: Synthetic oligonucleotide
aaugcggcucccagggagg

SEQ ID NO: 1110575 - RNA, 19 nt, Artificial Sequence
  Description of Artificial Sequence: Synthetic oligonucleotide
uucacauaggcugcccgcc

SEQ ID NO: 1110576 - RNA, 19 nt, Artificial Sequence
  Description of Artificial Sequence: Synthetic oligonucleotide
uaagccccaacccacccau

SEQ ID NO: 1110577 - RNA, 19 nt, Artificial Sequence
  Description of Artificial Sequence: Synthetic oligonucleotide
caguagauaguuugcccug

SEQ ID NO: 1110578 - RNA, 19 nt, Artificial Sequence
  Description of Artificial Sequence: Synthetic oligonucleotide
aucccaauaccaaaagaca

SEQ ID NO: 1110579 - RNA, 19 nt, Artificial Sequence
  Description of Artificial Sequence: Synthetic oligonucleotide
uaguacccuuucagcaggg

SEQ ID NO: 1110580 - RNA, 19 nt, Artificial Sequence
  Description of Artificial Sequence: Synthetic oligonucleotide
uacugccuaguacuguccu

SEQ ID NO: 1110581 - RNA, 19 nt, Artificial Sequence
  Description of Artificial Sequence: Synthetic oligonucleotide
ucucaucccaaggggaacc

SEQ ID NO: 1110582 - RNA, 19 nt, Artificial Sequence
  Description of Artificial Sequence: Synthetic oligonucleotide
agagagguugcgugcaggu

SEQ ID NO: 1110583 - RNA, 19 nt, Artificial Sequence
  Description of Artificial Sequence: Synthetic oligonucleotide
uggcaucccaauaccaaaa

SEQ ID NO: 1110584 - RNA, 19 nt, Artificial Sequence
  Description of Artificial Sequence: Synthetic oligonucleotide
ggcaagacgaacagcagag

SEQ ID NO: 1110585 - RNA, 19 nt, Artificial Sequence
  Description of Artificial Sequence: Synthetic oligonucleotide
ggugcaacugcccuuugug

SEQ ID NO: 1110586 - RNA, 19 nt, Artificial Sequence
  Description of Artificial Sequence: Synthetic oligonucleotide
ucuaccuggaaaucaccuu

SEQ ID NO: 1110587 - RNA, 19 nt, Artificial Sequence
  Description of Artificial Sequence: Synthetic oligonucleotide
agagagugccaagagggug

SEQ ID NO: 1110588 - RNA, 19 nt, Artificial Sequence
  Description of Artificial Sequence: Synthetic oligonucleotide
gucuuaacaucauuauaaa

SEQ ID NO: 1110589 - RNA, 19 nt, Artificial Sequence
  Description of Artificial Sequence: Synthetic oligonucleotide
agggagcauacuucucagg

SEQ ID NO: 1110590 - RNA, 19 nt, Artificial Sequence
  Description of Artificial Sequence: Synthetic oligonucleotide
accuaguagaagggagacc

SEQ ID NO: 1110591 - RNA, 19 nt, Artificial Sequence
  Description of Artificial Sequence: Synthetic oligonucleotide
aggccaaugggcugcuguc

SEQ ID NO: 1110592 - RNA, 19 nt, Artificial Sequence
  Description of Artificial Sequence: Synthetic oligonucleotide
ccaagaagcaagcagccac

SEQ ID NO: 1110593 - RNA, 19 nt, Artificial Sequence
  Description of Artificial Sequence: Synthetic oligonucleotide
agggguuuucuccuagccu

SEQ ID NO: 1110594 - RNA, 19 nt, Artificial Sequence
  Description of Artificial Sequence: Synthetic oligonucleotide
ggccauaguacccuuucag

SEQ ID NO: 1110595 - RNA, 19 nt, Artificial Sequence
  Description of Artificial Sequence: Synthetic oligonucleotide
cacuuuaggaggaucuaga

SEQ ID NO: 1110596 - RNA, 19 nt, Artificial Sequence
  Description of Artificial Sequence: Synthetic oligonucleotide
agucagacccacagaacuc

SEQ ID NO: 1110597 - RNA, 19 nt, Artificial Sequence
  Description of Artificial Sequence: Synthetic oligonucleotide
ugaggggcagggcaccuac

SEQ ID NO: 1110598 - RNA, 19 nt, Artificial Sequence
  Description of Artificial Sequence: Synthetic oligonucleotide
ugacaagugcgcacauggu

SEQ ID NO: 1110599 - RNA, 19 nt, Artificial Sequence
  Description of Artificial Sequence: Synthetic oligonucleotide
gaccuaguagaagggagac

SEQ ID NO: 1110600 - RNA, 19 nt, Artificial Sequence
  Description of Artificial Sequence: Synthetic oligonucleotide
agauuggggccccaaacua

SEQ ID NO: 1110601 - RNA, 19 nt, Artificial Sequence
  Description of Artificial Sequence: Synthetic oligonucleotide
cuaguacuguccucaacca

SEQ ID NO: 1110602 - RNA, 19 nt, Artificial Sequence
  Description of Artificial Sequence: Synthetic oligonucleotide
aucacaucacuccggccca

SEQ ID NO: 1110603 - RNA, 19 nt, Artificial Sequence
  Description of Artificial Sequence: Synthetic oligonucleotide
auacuucucagggccauug

SEQ ID NO: 1110604 - RNA, 19 nt, Artificial Sequence
  Description of Artificial Sequence: Synthetic oligonucleotide
acacucaaccaaucacaug

SEQ ID NO: 1110605 - RNA, 19 nt, Artificial Sequence
  Description of Artificial Sequence: Synthetic oligonucleotide
caaggccccuccuuauagg

SEQ ID NO: 1110606 - RNA, 19 nt, Artificial Sequence
  Description of Artificial Sequence: Synthetic oligonucleotide
ugguguucuggcaucccaa

SEQ ID NO: 1110607 - RNA, 19 nt, Artificial Sequence
  Description of Artificial Sequence: Synthetic oligonucleotide
ggcacacacacacacauaa

SEQ ID NO: 1110608 - RNA, 19 nt, Artificial Sequence
  Description of Artificial Sequence: Synthetic oligonucleotide
agcuuaugugaacacuuuu

SEQ ID NO: 1110609 - RNA, 19 nt, Artificial Sequence
  Description of Artificial Sequence: Synthetic oligonucleotide
agagaucucugcacagccg

SEQ ID NO: 1110610 - RNA, 19 nt, Artificial Sequence
  Description of Artificial Sequence: Synthetic oligonucleotide
cuaucacaucacuccggcc

SEQ ID NO: 1110611 - RNA, 19 nt, Artificial Sequence
  Description of Artificial Sequence: Synthetic oligonucleotide
auuggggccccaaacuaag

SEQ ID NO: 1110612 - RNA, 19 nt, Artificial Sequence
  Description of Artificial Sequence: Synthetic oligonucleotide
gccauaguacccuuucagc

SEQ ID NO: 1110613 - RNA, 19 nt, Artificial Sequence
  Description of Artificial Sequence: Synthetic oligonucleotide
cuuacauuuucuagccaaa

SEQ ID NO: 1110614 - RNA, 19 nt, Artificial Sequence
  Description of Artificial Sequence: Synthetic oligonucleotide
gggacccuugucaagagag

SEQ ID NO: 1110615 - RNA, 19 nt, Artificial Sequence
  Description of Artificial Sequence: Synthetic oligonucleotide
agccaaauagaaguuggau

SEQ ID NO: 1110616 - RNA, 19 nt, Artificial Sequence
  Description of Artificial Sequence: Synthetic oligonucleotide
ucaagccugcuauucuuua

SEQ ID NO: 1110617 - RNA, 19 nt, Artificial Sequence
  Description of Artificial Sequence: Synthetic oligonucleotide
ggagcauacuucucagggc

SEQ ID NO: 1110618 - RNA, 19 nt, Artificial Sequence
  Description of Artificial Sequence: Synthetic oligonucleotide
cuugaaagauuggggcccc

SEQ ID NO: 1110619 - RNA, 19 nt, Artificial Sequence
  Description of Artificial Sequence: Synthetic oligonucleotide
gaaagauuggggccccaaa

SEQ ID NO: 1110620 - RNA, 19 nt, Artificial Sequence
  Description of Artificial Sequence: Synthetic oligonucleotide
guagaugggacuuggcccu

SEQ ID NO: 1110621 - RNA, 19 nt, Artificial Sequence
  Description of Artificial Sequence: Synthetic oligonucleotide
aggagacuuucauggcaag

SEQ ID NO: 1110622 - RNA, 19 nt, Artificial Sequence
  Description of Artificial Sequence: Synthetic oligonucleotide
aagagaacgaagagccuuu

SEQ ID NO: 1110623 - RNA, 19 nt, Artificial Sequence
  Description of Artificial Sequence: Synthetic oligonucleotide
agugguguucuggcauccc

SEQ ID NO: 1110624 - RNA, 19 nt, Artificial Sequence
  Description of Artificial Sequence: Synthetic oligonucleotide
ccuaucacaucacuccggc

SEQ ID NO: 1110625 - RNA, 19 nt, Artificial Sequence
  Description of Artificial Sequence: Synthetic oligonucleotide
caagugguguucuggcauc

SEQ ID NO: 1110626 - RNA, 19 nt, Artificial Sequence
  Description of Artificial Sequence: Synthetic oligonucleotide
ucauggcaagacgaacagc

SEQ ID NO: 1110627 - RNA, 19 nt, Artificial Sequence
  Description of Artificial Sequence: Synthetic oligonucleotide
uaagcacuuuaggaggauc

SEQ ID NO: 1110628 - RNA, 19 nt, Artificial Sequence
  Description of Artificial Sequence: Synthetic oligonucleotide
aggggaacccauggagagc

SEQ ID NO: 1110629 - RNA, 19 nt, Artificial Sequence
  Description of Artificial Sequence: Synthetic oligonucleotide
gauaguuugcccuggucuu

SEQ ID NO: 1110630 - RNA, 19 nt, Artificial Sequence
  Description of Artificial Sequence: Synthetic oligonucleotide
caaggggaacccauggaga

SEQ ID NO: 1110631 - RNA, 19 nt, Artificial Sequence
  Description of Artificial Sequence: Synthetic oligonucleotide
aacccauggagagccaaau

SEQ ID NO: 1110632 - RNA, 19 nt, Artificial Sequence
  Description of Artificial Sequence: Synthetic oligonucleotide
gagaacgaagagccuuuca

SEQ ID NO: 1110633 - RNA, 19 nt, Artificial Sequence
  Description of Artificial Sequence: Synthetic oligonucleotide
agaagcaagcagccacacu

SEQ ID NO: 1110634 - RNA, 19 nt, Artificial Sequence
  Description of Artificial Sequence: Synthetic oligonucleotide
guuugcccuggucuuaaca

SEQ ID NO: 1110635 - RNA, 19 nt, Artificial Sequence
  Description of Artificial Sequence: Synthetic oligonucleotide
guugcgugcaggucccaug

SEQ ID NO: 1110636 - RNA, 19 nt, Artificial Sequence
  Description of Artificial Sequence: Synthetic oligonucleotide
cagaagguaggaccaaaga

SEQ ID NO: 1110637 - RNA, 19 nt, Artificial Sequence
  Description of Artificial Sequence: Synthetic oligonucleotide
agauaaguauccauuccuu

SEQ ID NO: 1110638 - RNA, 19 nt, Artificial Sequence
  Description of Artificial Sequence: Synthetic oligonucleotide
gccaguagauaguuugccc

SEQ ID NO: 1110639 - RNA, 19 nt, Artificial Sequence
  Description of Artificial Sequence: Synthetic oligonucleotide
ccaccacuaaugaagugag

SEQ ID NO: 1110640 - RNA, 19 nt, Artificial Sequence
  Description of Artificial Sequence: Synthetic oligonucleotide
aguuugcccuggucuuaac

SEQ ID NO: 1110641 - RNA, 19 nt, Artificial Sequence
  Description of Artificial Sequence: Synthetic oligonucleotide
caaucacaugcacuuagaa

SEQ ID NO: 1110642 - RNA, 19 nt, Artificial Sequence
  Description of Artificial Sequence: Synthetic oligonucleotide
accuacuggcugcagucca

SEQ ID NO: 1110643 - RNA, 19 nt, Artificial Sequence
  Description of Artificial Sequence: Synthetic oligonucleotide
gugagaauugccucugggu

SEQ ID NO: 1110644 - RNA, 19 nt, Artificial Sequence
  Description of Artificial Sequence: Synthetic oligonucleotide
ggagacauuaagccccaac

SEQ ID NO: 1110645 - RNA, 19 nt, Artificial Sequence
  Description of Artificial Sequence: Synthetic oligonucleotide
ggccccuccuuauagggag

SEQ ID NO: 1110646 - RNA, 19 nt, Artificial Sequence
  Description of Artificial Sequence: Synthetic oligonucleotide
uuggggccccaaacuaagc

SEQ ID NO: 1110647 - RNA, 19 nt, Artificial Sequence
  Description of Artificial Sequence: Synthetic oligonucleotide
gggagucagacccacagaa

SEQ ID NO: 1110648 - RNA, 19 nt, Artificial Sequence
  Description of Artificial Sequence: Synthetic oligonucleotide
agccugcuauucuuuagaa

SEQ ID NO: 1110649 - RNA, 19 nt, Artificial Sequence
  Description of Artificial Sequence: Synthetic oligonucleotide
accuuacauuuucuagcca

SEQ ID NO: 1110650 - RNA, 19 nt, Artificial Sequence
  Description of Artificial Sequence: Synthetic oligonucleotide
gugcaggucccaugagggg

SEQ ID NO: 1110651 - RNA, 19 nt, Artificial Sequence
  Description of Artificial Sequence: Synthetic oligonucleotide
ugaaagauuggggccccaa

SEQ ID NO: 1110652 - RNA, 19 nt, Artificial Sequence
  Description of Artificial Sequence: Synthetic oligonucleotide
ccuggaaaucaccuuugcc

SEQ ID NO: 1110653 - RNA, 19 nt, Artificial Sequence
  Description of Artificial Sequence: Synthetic oligonucleotide
ugcccuuugugguuacaau

SEQ ID NO: 1110654 - RNA, 19 nt, Artificial Sequence
  Description of Artificial Sequence: Synthetic oligonucleotide
uucucaucccaaggggaac

SEQ ID NO: 1110655 - RNA, 19 nt, Artificial Sequence
  Description of Artificial Sequence: Synthetic oligonucleotide
gggaccuaguagaagggag

SEQ ID NO: 1110656 - RNA, 19 nt, Artificial Sequence
  Description of Artificial Sequence: Synthetic oligonucleotide
aagcuguagaugggacuug

SEQ ID NO: 1110657 - RNA, 19 nt, Artificial Sequence
  Description of Artificial Sequence: Synthetic oligonucleotide
gucagacccacagaacuca

SEQ ID NO: 1110658 - RNA, 19 nt, Artificial Sequence
  Description of Artificial Sequence: Synthetic oligonucleotide
agugacaagugcgcacaug

SEQ ID NO: 1110659 - RNA, 19 nt, Artificial Sequence
  Description of Artificial Sequence: Synthetic oligonucleotide
cuggaaaccaggagcucca

SEQ ID NO: 1110660 - RNA, 19 nt, Artificial Sequence
  Description of Artificial Sequence: Synthetic oligonucleotide
gggacaaagggguuuucuc

SEQ ID NO: 1110661 - RNA, 19 nt, Artificial Sequence
  Description of Artificial Sequence: Synthetic oligonucleotide
gagguugcgugcagguccc

SEQ ID NO: 1110662 - RNA, 19 nt, Artificial Sequence
  Description of Artificial Sequence: Synthetic oligonucleotide
cacauucgcacaggcacac

SEQ ID NO: 1110663 - RNA, 19 nt, Artificial Sequence
  Description of Artificial Sequence: Synthetic oligonucleotide
ugcgugcaggucccaugag

SEQ ID NO: 1110664 - RNA, 19 nt, Artificial Sequence
  Description of Artificial Sequence: Synthetic oligonucleotide
caaucucuaccuggaaauc

SEQ ID NO: 1110665 - RNA, 19 nt, Artificial Sequence
  Description of Artificial Sequence: Synthetic oligonucleotide
cagcucaaggcuuguccac

SEQ ID NO: 1110666 - RNA, 19 nt, Artificial Sequence
  Description of Artificial Sequence: Synthetic oligonucleotide
gauuggggccccaaacuaa

SEQ ID NO: 1110667 - RNA, 19 nt, Artificial Sequence
  Description of Artificial Sequence: Synthetic oligonucleotide
gcgugcaggucccaugagg

SEQ ID NO: 1110668 - RNA, 19 nt, Artificial Sequence
  Description of Artificial Sequence: Synthetic oligonucleotide
acauaggcugcccgcccug

SEQ ID NO: 1110669 - RNA, 19 nt, Artificial Sequence
  Description of Artificial Sequence: Synthetic oligonucleotide
cuggcaucccaauaccaaa

SEQ ID NO: 1110670 - RNA, 19 nt, Artificial Sequence
  Description of Artificial Sequence: Synthetic oligonucleotide
agauguuaaagaagcugua

SEQ ID NO: 1110671 - RNA, 19 nt, Artificial Sequence
  Description of Artificial Sequence: Synthetic oligonucleotide
ugguuacaauagagugaca

SEQ ID NO: 1110672 - RNA, 19 nt, Artificial Sequence
  Description of Artificial Sequence: Synthetic oligonucleotide
ccaauaccaaaagacagca

SEQ ID NO: 1110673 - RNA, 19 nt, Artificial Sequence
  Description of Artificial Sequence: Synthetic oligonucleotide
caagacgaacagcagagau

SEQ ID NO: 1110674 - RNA, 19 nt, Artificial Sequence
  Description of Artificial Sequence: Synthetic oligonucleotide
ggauucucaagccugcuau

SEQ ID NO: 1110675 - RNA, 19 nt, Artificial Sequence
  Description of Artificial Sequence: Synthetic oligonucleotide
uaguuugcccuggucuuaa

SEQ ID NO: 1110676 - RNA, 19 nt, Artificial Sequence
  Description of Artificial Sequence: Synthetic oligonucleotide
gcuuguccaccacuaauga

SEQ ID NO: 1110677 - RNA, 19 nt, Artificial Sequence
  Description of Artificial Sequence: Synthetic oligonucleotide
cccuugucaagagagguug

SEQ ID NO: 1110678 - RNA, 19 nt, Artificial Sequence
  Description of Artificial Sequence: Synthetic oligonucleotide
acucaaccaaucacaugca

SEQ ID NO: 1110679 - RNA, 19 nt, Artificial Sequence
  Description of Artificial Sequence: Synthetic oligonucleotide
ccuuucagcagggagugug

SEQ ID NO: 1110680 - RNA, 19 nt, Artificial Sequence
  Description of Artificial Sequence: Synthetic oligonucleotide
acacauucgcacaggcaca

SEQ ID NO: 1110681 - RNA, 19 nt, Artificial Sequence
  Description of Artificial Sequence: Synthetic oligonucleotide
cagggacccuugucaagag

SEQ ID NO: 1110682 - RNA, 19 nt, Artificial Sequence
  Description of Artificial Sequence: Synthetic oligonucleotide
ucaucccaaggggaaccca

SEQ ID NO: 1110683 - RNA, 19 nt, Artificial Sequence
  Description of Artificial Sequence: Synthetic oligonucleotide
cuggucuuaacaucauuau

SEQ ID NO: 1110684 - RNA, 19 nt, Artificial Sequence
  Description of Artificial Sequence: Synthetic oligonucleotide
ccuggucuuaacaucauua

SEQ ID NO: 1110685 - RNA, 19 nt, Artificial Sequence
  Description of Artificial Sequence: Synthetic oligonucleotide
ccaguguuaaggauaguaa

SEQ ID NO: 1110686 - RNA, 19 nt, Artificial Sequence
  Description of Artificial Sequence: Synthetic oligonucleotide
ccaacuucccucccuauca

SEQ ID NO: 1110687 - RNA, 19 nt, Artificial Sequence
  Description of Artificial Sequence: Synthetic oligonucleotide
gccuuugaagcugccacag

SEQ ID NO: 1110688 - RNA, 19 nt, Artificial Sequence
  Description of Artificial Sequence: Synthetic oligonucleotide
aggagcuccaaggccccuc

SEQ ID NO: 1110689 - RNA, 19 nt, Artificial Sequence
  Description of Artificial Sequence: Synthetic oligonucleotide
gcaucccaauaccaaaaga

SEQ ID NO: 1110690 - RNA, 19 nt, Artificial Sequence
  Description of Artificial Sequence: Synthetic oligonucleotide
ggauguuuaggaaguggca

SEQ ID NO: 1110691 - RNA, 19 nt, Artificial Sequence
  Description of Artificial Sequence: Synthetic oligonucleotide
gccaaauagaaguuggauu

SEQ ID NO: 1110692 - RNA, 19 nt, Artificial Sequence
  Description of Artificial Sequence: Synthetic oligonucleotide
cuaccuggaaaucaccuuu

SEQ ID NO: 1110693 - RNA, 19 nt, Artificial Sequence
  Description of Artificial Sequence: Synthetic oligonucleotide
ccuaguagaagggagaccu

SEQ ID NO: 1110694 - RNA, 19 nt, Artificial Sequence
  Description of Artificial Sequence: Synthetic oligonucleotide
cucaaggcuuguccaccac

SEQ ID NO: 1110695 - RNA, 19 nt, Artificial Sequence
  Description of Artificial Sequence: Synthetic oligonucleotide
ggaaucaggagacuuucau

SEQ ID NO: 1110696 - RNA, 19 nt, Artificial Sequence
  Description of Artificial Sequence: Synthetic oligonucleotide
gugcgcacaugguuccuac

SEQ ID NO: 1110697 - RNA, 19 nt, Artificial Sequence
  Description of Artificial Sequence: Synthetic oligonucleotide
cuccggcccaccagcagug

SEQ ID NO: 1110698 - RNA, 19 nt, Artificial Sequence
  Description of Artificial Sequence: Synthetic oligonucleotide
ggacccuugucaagagagg

SEQ ID NO: 1110699 - RNA, 19 nt, Artificial Sequence
  Description of Artificial Sequence: Synthetic oligonucleotide
caccuacuggcugcagucc

SEQ ID NO: 1110700 - RNA, 19 nt, Artificial Sequence
  Description of Artificial Sequence: Synthetic oligonucleotide
ugccuaguacuguccucaa

SEQ ID NO: 1110701 - RNA, 19 nt, Artificial Sequence
  Description of Artificial Sequence: Synthetic oligonucleotide
ggagcugagcuuaugugaa

SEQ ID NO: 1110702 - RNA, 19 nt, Artificial Sequence
  Description of Artificial Sequence: Synthetic oligonucleotide
acaggcacacacacacaca

SEQ ID NO: 1110703 - RNA, 19 nt, Artificial Sequence
  Description of Artificial Sequence: Synthetic oligonucleotide
auaguuugcccuggucuua

SEQ ID NO: 1110704 - RNA, 19 nt, Artificial Sequence
  Description of Artificial Sequence: Synthetic oligonucleotide
ucccucccuaucacaucac

SEQ ID NO: 1110705 - RNA, 19 nt, Artificial Sequence
  Description of Artificial Sequence: Synthetic oligonucleotide
gagagguugcgugcagguc

SEQ ID NO: 1110706 - RNA, 19 nt, Artificial Sequence
  Description of Artificial Sequence: Synthetic oligonucleotide
accaaagaggagacauuaa

SEQ ID NO: 1110707 - RNA, 19 nt, Artificial Sequence
  Description of Artificial Sequence: Synthetic oligonucleotide
cccaacuucuagaaggaaa

SEQ ID NO: 1110708 - RNA, 19 nt, Artificial Sequence
  Description of Artificial Sequence: Synthetic oligonucleotide
ggggccccaaacuaagcca

SEQ ID NO: 1110709 - RNA, 19 nt, Artificial Sequence
  Description of Artificial Sequence: Synthetic oligonucleotide
caggcacacacacacacau

SEQ ID NO: 1110710 - RNA, 19 nt, Artificial Sequence
  Description of Artificial Sequence: Synthetic oligonucleotide
agcacuuuaggaggaucua

SEQ ID NO: 1110711 - RNA, 19 nt, Artificial Sequence
  Description of Artificial Sequence: Synthetic oligonucleotide
ggaccuaguagaagggaga

SEQ ID NO: 1110712 - RNA, 19 nt, Artificial Sequence
  Description of Artificial Sequence: Synthetic oligonucleotide
uugaaagauuggggcccca

SEQ ID NO: 1110713 - RNA, 19 nt, Artificial Sequence
  Description of Artificial Sequence: Synthetic oligonucleotide
cacaaaccuuacauuuucu

SEQ ID NO: 1110714 - RNA, 19 nt, Artificial Sequence
  Description of Artificial Sequence: Synthetic oligonucleotide
aguacccuuucagcaggga

SEQ ID NO: 1110715 - RNA, 19 nt, Artificial Sequence
  Description of Artificial Sequence: Synthetic oligonucleotide
cagcagugacacauucgca

SEQ ID NO: 1110716 - RNA, 19 nt, Artificial Sequence
  Description of Artificial Sequence: Synthetic oligonucleotide
aagugcgcacaugguuccu

SEQ ID NO: 1110717 - RNA, 19 nt, Artificial Sequence
  Description of Artificial Sequence: Synthetic oligonucleotide
cacagaacucagccuuuga

SEQ ID NO: 1110718 - RNA, 19 nt, Artificial Sequence
  Description of Artificial Sequence: Synthetic oligonucleotide
ccaguagauaguuugcccu

SEQ ID NO: 1110719 - RNA, 19 nt, Artificial Sequence
  Description of Artificial Sequence: Synthetic oligonucleotide
gcccuuugugguuacaaua

SEQ ID NO: 1110720 - RNA, 19 nt, Artificial Sequence
  Description of Artificial Sequence: Synthetic oligonucleotide
gacccacagaacucagccu

SEQ ID NO: 1110721 - RNA, 19 nt, Artificial Sequence
  Description of Artificial Sequence: Synthetic oligonucleotide
guagauaguuugcccuggu

SEQ ID NO: 1110722 - RNA, 19 nt, Artificial Sequence
  Description of Artificial Sequence: Synthetic oligonucleotide
gccgcuggaaugcggcucc

SEQ ID NO: 1110723 - RNA, 19 nt, Artificial Sequence
  Description of Artificial Sequence: Synthetic oligonucleotide
cacaucacuccggcccacc

SEQ ID NO: 1110724 - RNA, 19 nt, Artificial Sequence
  Description of Artificial Sequence: Synthetic oligonucleotide
auaaggccaaugggcugcu

SEQ ID NO: 1110725 - RNA, 19 nt, Artificial Sequence
  Description of Artificial Sequence: Synthetic oligonucleotide
cccgcccugagcaaauaac

SEQ ID NO: 1110726 - RNA, 19 nt, Artificial Sequence
  Description of Artificial Sequence: Synthetic oligonucleotide
gagaccucccuuggccuca

SEQ ID NO: 1110727 - RNA, 19 nt, Artificial Sequence
  Description of Artificial Sequence: Synthetic oligonucleotide
gaggggccgcuggaaugcg

SEQ ID NO: 1110728 - RNA, 19 nt, Artificial Sequence
  Description of Artificial Sequence: Synthetic oligonucleotide
cacuccggcccaccagcag

SEQ ID NO: 1110729 - RNA, 19 nt, Artificial Sequence
  Description of Artificial Sequence: Synthetic oligonucleotide
gcacacacacacacauaag

SEQ ID NO: 1110730 - RNA, 19 nt, Artificial Sequence
  Description of Artificial Sequence: Synthetic oligonucleotide
ccagagauaaguauccauu

SEQ ID NO: 1110731 - RNA, 19 nt, Artificial Sequence
  Description of Artificial Sequence: Synthetic oligonucleotide
caccacuaaugaagugaga

SEQ ID NO: 1110732 - RNA, 19 nt, Artificial Sequence
  Description of Artificial Sequence: Synthetic oligonucleotide
cagaggagcugagcuuaug

SEQ ID NO: 1110733 - RNA, 19 nt, Artificial Sequence
  Description of Artificial Sequence: Synthetic oligonucleotide
ccgcccugagcaaauaaca

SEQ ID NO: 1110734 - RNA, 19 nt, Artificial Sequence
  Description of Artificial Sequence: Synthetic oligonucleotide
gagggaaucaggagacuuu

SEQ ID NO: 1110735 - RNA, 19 nt, Artificial Sequence
  Description of Artificial Sequence: Synthetic oligonucleotide
ccuuauagggagcauacuu

SEQ ID NO: 1110736 - RNA, 19 nt, Artificial Sequence
  Description of Artificial Sequence: Synthetic oligonucleotide
ucacaucacuccggcccac

SEQ ID NO: 1110737 - RNA, 19 nt, Artificial Sequence
  Description of Artificial Sequence: Synthetic oligonucleotide
caucccaaggggaacccau

SEQ ID NO: 1110738 - RNA, 19 nt, Artificial Sequence
  Description of Artificial Sequence: Synthetic oligonucleotide
caagggagucagacccaca

SEQ ID NO: 1110739 - RNA, 19 nt, Artificial Sequence
  Description of Artificial Sequence: Synthetic oligonucleotide
acccuugucaagagagguu

SEQ ID NO: 1110740 - RNA, 19 nt, Artificial Sequence
  Description of Artificial Sequence: Synthetic oligonucleotide
agugcgcacaugguuccua

SEQ ID NO: 1110741 - RNA, 19 nt, Artificial Sequence
  Description of Artificial Sequence: Synthetic oligonucleotide
uaaggccaaugggcugcug

SEQ ID NO: 1110742 - RNA, 19 nt, Artificial Sequence
  Description of Artificial Sequence: Synthetic oligonucleotide
gccugcuauucuuuagaaa

SEQ ID NO: 1110743 - RNA, 19 nt, Artificial Sequence
  Description of Artificial Sequence: Synthetic oligonucleotide
cagagagugccaagagggu

SEQ ID NO: 1110744 - RNA, 19 nt, Artificial Sequence
  Description of Artificial Sequence: Synthetic oligonucleotide
gagcuuaugugaacacuuu

SEQ ID NO: 1110745 - RNA, 19 nt, Artificial Sequence
  Description of Artificial Sequence: Synthetic oligonucleotide
guggguccuaaggccaaca

SEQ ID NO: 1110746 - RNA, 19 nt, Artificial Sequence
  Description of Artificial Sequence: Synthetic oligonucleotide
gccuaguacuguccucaac

SEQ ID NO: 1110747 - RNA, 19 nt, Artificial Sequence
  Description of Artificial Sequence: Synthetic oligonucleotide
ggggccgcuggaaugcggc

SEQ ID NO: 1110748 - RNA, 19 nt, Artificial Sequence
  Description of Artificial Sequence: Synthetic oligonucleotide
cacagccguggguccuaag

SEQ ID NO: 1110749 - RNA, 19 nt, Artificial Sequence
  Description of Artificial Sequence: Synthetic oligonucleotide
gaccucccuuggccucagg

SEQ ID NO: 1110750 - RNA, 19 nt, Artificial Sequence
  Description of Artificial Sequence: Synthetic oligonucleotide
ccaagggagucagacccac

SEQ ID NO: 1110751 - RNA, 19 nt, Artificial Sequence
  Description of Artificial Sequence: Synthetic oligonucleotide
cucaagccugcuauucuuu

SEQ ID NO: 1110752 - RNA, 19 nt, Artificial Sequence
  Description of Artificial Sequence: Synthetic oligonucleotide
gggucagauuuacugccua

SEQ ID NO: 1110753 - RNA, 19 nt, Artificial Sequence
  Description of Artificial Sequence: Synthetic oligonucleotide
aggggccgcuggaaugcgg

SEQ ID NO: 1110754 - RNA, 19 nt, Artificial Sequence
  Description of Artificial Sequence: Synthetic oligonucleotide
gcuccaaggccccuccuua

SEQ ID NO: 1110755 - RNA, 19 nt, Artificial Sequence
  Description of Artificial Sequence: Synthetic oligonucleotide
aggucccaugaggggcagg

SEQ ID NO: 1110756 - RNA, 19 nt, Artificial Sequence
  Description of Artificial Sequence: Synthetic oligonucleotide
aggcagaagguaggaccaa

SEQ ID NO: 1110757 - RNA, 19 nt, Artificial Sequence
  Description of Artificial Sequence: Synthetic oligonucleotide
cagcaaucucuaccuggaa

SEQ ID NO: 1110758 - RNA, 19 nt, Artificial Sequence
  Description of Artificial Sequence: Synthetic oligonucleotide
augcggcucccagggagga

SEQ ID NO: 1110759 - RNA, 19 nt, Artificial Sequence
  Description of Artificial Sequence: Synthetic oligonucleotide
gagugacaagugcgcacau

SEQ ID NO: 1110760 - RNA, 19 nt, Artificial Sequence
  Description of Artificial Sequence: Synthetic oligonucleotide
agaccucccuuggccucag

SEQ ID NO: 1110761 - RNA, 19 nt, Artificial Sequence
  Description of Artificial Sequence: Synthetic oligonucleotide
gguguucuggcaucccaau

SEQ ID NO: 1110762 - RNA, 19 nt, Artificial Sequence
  Description of Artificial Sequence: Synthetic oligonucleotide
gcaagacgaacagcagaga

SEQ ID NO: 1110763 - RNA, 19 nt, Artificial Sequence
  Description of Artificial Sequence: Synthetic oligonucleotide
agccaccauuuaaaauaaa

SEQ ID NO: 1110764 - RNA, 19 nt, Artificial Sequence
  Description of Artificial Sequence: Synthetic oligonucleotide
gaagagccuuucagcucaa

SEQ ID NO: 1110765 - RNA, 19 nt, Artificial Sequence
  Description of Artificial Sequence: Synthetic oligonucleotide
cauaggcugcccgcccuga

SEQ ID NO: 1110766 - RNA, 19 nt, Artificial Sequence
  Description of Artificial Sequence: Synthetic oligonucleotide
ccaugaggggcagggcacc

SEQ ID NO: 1110767 - RNA, 19 nt, Artificial Sequence
  Description of Artificial Sequence: Synthetic oligonucleotide
gccguggguccuaaggcca

SEQ ID NO: 1110768 - RNA, 19 nt, Artificial Sequence
  Description of Artificial Sequence: Synthetic oligonucleotide
ggagggaaucaggagacuu

SEQ ID NO: 1110769 - RNA, 19 nt, Artificial Sequence
  Description of Artificial Sequence: Synthetic oligonucleotide
caggucccaugaggggcag

SEQ ID NO: 1110770 - RNA, 19 nt, Artificial Sequence
  Description of Artificial Sequence: Synthetic oligonucleotide
aggcacacacacacacaua

SEQ ID NO: 1110771 - RNA, 19 nt, Artificial Sequence
  Description of Artificial Sequence: Synthetic oligonucleotide
ccaagugguguucuggcau

SEQ ID NO: 1110772 - RNA, 19 nt, Artificial Sequence
  Description of Artificial Sequence: Synthetic oligonucleotide
agccaguguuaaggauagu

SEQ ID NO: 1110773 - RNA, 19 nt, Artificial Sequence
  Description of Artificial Sequence: Synthetic oligonucleotide
ggagagccaaauagaaguu

SEQ ID NO: 1110774 - RNA, 19 nt, Artificial Sequence
  Description of Artificial Sequence: Synthetic oligonucleotide
cauggccaguagauaguuu

SEQ ID NO: 1110775 - RNA, 19 nt, Artificial Sequence
  Description of Artificial Sequence: Synthetic oligonucleotide
cuuucagcucaaggcuugu

SEQ ID NO: 1110776 - RNA, 19 nt, Artificial Sequence
  Description of Artificial Sequence: Synthetic oligonucleotide
aggagacauuaagccccaa

SEQ ID NO: 1110777 - RNA, 19 nt, Artificial Sequence
  Description of Artificial Sequence: Synthetic oligonucleotide
gagugccaagaggguggga

SEQ ID NO: 1110778 - RNA, 19 nt, Artificial Sequence
  Description of Artificial Sequence: Synthetic oligonucleotide
cccaaacuaagccaccauu

SEQ ID NO: 1110779 - RNA, 19 nt, Artificial Sequence
  Description of Artificial Sequence: Synthetic oligonucleotide
gggugcaacugcccuuugu

SEQ ID NO: 1110780 - RNA, 19 nt, Artificial Sequence
  Description of Artificial Sequence: Synthetic oligonucleotide
cugggugcaacugcccuuu

SEQ ID NO: 1110781 - RNA, 19 nt, Artificial Sequence
  Description of Artificial Sequence: Synthetic oligonucleotide
ugcccgcccugagcaaaua

SEQ ID NO: 1110782 - RNA, 19 nt, Artificial Sequence
  Description of Artificial Sequence: Synthetic oligonucleotide
gcacaggcacacacacaca

SEQ ID NO: 1110783 - RNA, 19 nt, Artificial Sequence
  Description of Artificial Sequence: Synthetic oligonucleotide
gcccgcccugagcaaauaa

SEQ ID NO: 1110784 - RNA, 19 nt, Artificial Sequence
  Description of Artificial Sequence: Synthetic oligonucleotide
ggaccaaagaggagacauu

SEQ ID NO: 1110785 - RNA, 19 nt, Artificial Sequence
  Description of Artificial Sequence: Synthetic oligonucleotide
ccccuccuuauagggagca

SEQ ID NO: 1110786 - RNA, 19 nt, Artificial Sequence
  Description of Artificial Sequence: Synthetic oligonucleotide
ccuacuggcugcaguccau

SEQ ID NO: 1110787 - RNA, 19 nt, Artificial Sequence
  Description of Artificial Sequence: Synthetic oligonucleotide
cccucccuaucacaucacu

SEQ ID NO: 1110788 - RNA, 19 nt, Artificial Sequence
  Description of Artificial Sequence: Synthetic oligonucleotide
ccguggguccuaaggccaa

SEQ ID NO: 1110789 - RNA, 19 nt, Artificial Sequence
  Description of Artificial Sequence: Synthetic oligonucleotide
gguugcgugcaggucccau

SEQ ID NO: 1110790 - RNA, 19 nt, Artificial Sequence
  Description of Artificial Sequence: Synthetic oligonucleotide
cguggguccuaaggccaac

SEQ ID NO: 1110791 - RNA, 19 nt, Artificial Sequence
  Description of Artificial Sequence: Synthetic oligonucleotide
ccgcuggaaugcggcuccc

SEQ ID NO: 1110792 - RNA, 19 nt, Artificial Sequence
  Description of Artificial Sequence: Synthetic oligonucleotide
ccggcccagagagugccaa

SEQ ID NO: 1110793 - RNA, 19 nt, Artificial Sequence
  Description of Artificial Sequence: Synthetic oligonucleotide
gcaggccauaguacccuuu

SEQ ID NO: 1110794 - RNA, 19 nt, Artificial Sequence
  Description of Artificial Sequence: Synthetic oligonucleotide
aaacaaccgauuuuaauac

SEQ ID NO: 1110795 - RNA, 19 nt, Artificial Sequence
  Description of Artificial Sequence: Synthetic oligonucleotide
aguuaaguauaacaagagc

SEQ ID NO: 1110796 - RNA, 19 nt, Artificial Sequence
  Description of Artificial Sequence: Synthetic oligonucleotide
uuaaguauaacaagagcug

SEQ ID NO: 1110797 - RNA, 19 nt, Artificial Sequence
  Description of Artificial Sequence: Synthetic oligonucleotide
uuuaauacagacugggagc

SEQ ID NO: 1110798 - RNA, 19 nt, Artificial Sequence
  Description of Artificial Sequence: Synthetic oligonucleotide
aaagugauauuugugggac

SEQ ID NO: 1110799 - RNA, 19 nt, Artificial Sequence
  Description of Artificial Sequence: Synthetic oligonucleotide
acugauuguacucaccagg

SEQ ID NO: 1110800 - RNA, 19 nt, Artificial Sequence
  Description of Artificial Sequence: Synthetic oligonucleotide
aggaauucccugcuuaugc

SEQ ID NO: 1110801 - RNA, 19 nt, Artificial Sequence
  Description of Artificial Sequence: Synthetic oligonucleotide
gauuaggucagacaccucc

SEQ ID NO: 1110802 - RNA, 19 nt, Artificial Sequence
  Description of Artificial Sequence: Synthetic oligonucleotide
ugugggacagaccacaccc

SEQ ID NO: 1110803 - RNA, 19 nt, Artificial Sequence
  Description of Artificial Sequence: Synthetic oligonucleotide
uauaacaagagcuggcgca

SEQ ID NO: 1110804 - RNA, 19 nt, Artificial Sequence
  Description of Artificial Sequence: Synthetic oligonucleotide
uaaguauaacaagagcugg

SEQ ID NO: 1110805 - RNA, 19 nt, Artificial Sequence
  Description of Artificial Sequence: Synthetic oligonucleotide
gauuguacucaccaggccc

SEQ ID NO: 1110806 - RNA, 19 nt, Artificial Sequence
  Description of Artificial Sequence: Synthetic oligonucleotide
agugcugcacccuagaacu

SEQ ID NO: 1110807 - RNA, 19 nt, Artificial Sequence
  Description of Artificial Sequence: Synthetic oligonucleotide
cuguaauguacccacagcc

SEQ ID NO: 1110808 - RNA, 19 nt, Artificial Sequence
  Description of Artificial Sequence: Synthetic oligonucleotide
agaggaaaucuuucugugc

SEQ ID NO: 1110809 - RNA, 19 nt, Artificial Sequence
  Description of Artificial Sequence: Synthetic oligonucleotide
cacugcuugaaacacagcc

SEQ ID NO: 1110810 - RNA, 19 nt, Artificial Sequence
  Description of Artificial Sequence: Synthetic oligonucleotide
ucuaaguuccccaguacca

SEQ ID NO: 1110811 - RNA, 19 nt, Artificial Sequence
  Description of Artificial Sequence: Synthetic oligonucleotide
aguacuugguuaccugccc

SEQ ID NO: 1110812 - RNA, 19 nt, Artificial Sequence
  Description of Artificial Sequence: Synthetic oligonucleotide
aagagguagaccagaaggg

SEQ ID NO: 1110813 - RNA, 19 nt, Artificial Sequence
  Description of Artificial Sequence: Synthetic oligonucleotide
aagacugaguacuugguua

SEQ ID NO: 1110814 - RNA, 19 nt, Artificial Sequence
  Description of Artificial Sequence: Synthetic oligonucleotide
cauacgguggucaggaggc

SEQ ID NO: 1110815 - RNA, 19 nt, Artificial Sequence
  Description of Artificial Sequence: Synthetic oligonucleotide
agacugaguacuugguuac

SEQ ID NO: 1110816 - RNA, 19 nt, Artificial Sequence
  Description of Artificial Sequence: Synthetic oligonucleotide
cuuuggacgugucucaggg

SEQ ID NO: 1110817 - RNA, 19 nt, Artificial Sequence
  Description of Artificial Sequence: Synthetic oligonucleotide
uuggacgugucucagggug

SEQ ID NO: 1110818 - RNA, 19 nt, Artificial Sequence
  Description of Artificial Sequence: Synthetic oligonucleotide
caauccugcauccaaguag

SEQ ID NO: 1110819 - RNA, 19 nt, Artificial Sequence
  Description of Artificial Sequence: Synthetic oligonucleotide
aaagcgacggaugcgcugg

SEQ ID NO: 1110820 - RNA, 19 nt, Artificial Sequence
  Description of Artificial Sequence: Synthetic oligonucleotide
uuaauacagacugggagca

SEQ ID NO: 1110821 - RNA, 19 nt, Artificial Sequence
  Description of Artificial Sequence: Synthetic oligonucleotide
guuaaguauaacaagagcu

SEQ ID NO: 1110822 - RNA, 19 nt, Artificial Sequence
  Description of Artificial Sequence: Synthetic oligonucleotide
acaguuaaguauaacaaga

SEQ ID NO: 1110823 - RNA, 19 nt, Artificial Sequence
  Description of Artificial Sequence: Synthetic oligonucleotide
ccgauuuuaauacagacug

SEQ ID NO: 1110824 - RNA, 19 nt, Artificial Sequence
  Description of Artificial Sequence: Synthetic oligonucleotide
caguuaaguauaacaagag

SEQ ID NO: 1110825 - RNA, 19 nt, Artificial Sequence
  Description of Artificial Sequence: Synthetic oligonucleotide
agugucugcaccuggccac

SEQ ID NO: 1110826 - RNA, 19 nt, Artificial Sequence
  Description of Artificial Sequence: Synthetic oligonucleotide
uggagaaagcgacggaugc

SEQ ID NO: 1110827 - RNA, 19 nt, Artificial Sequence
  Description of Artificial Sequence: Synthetic oligonucleotide
aacacagcccgauccaucu

SEQ ID NO: 1110828 - RNA, 19 nt, Artificial Sequence
  Description of Artificial Sequence: Synthetic oligonucleotide
cuuccuguaauguacccac

SEQ ID NO: 1110829 - RNA, 19 nt, Artificial Sequence
  Description of Artificial Sequence: Synthetic oligonucleotide
cugauuguacucaccaggc

SEQ ID NO: 1110830 - RNA, 19 nt, Artificial Sequence
  Description of Artificial Sequence: Synthetic oligonucleotide
gugcgguugagauacacag

SEQ ID NO: 1110831 - RNA, 19 nt, Artificial Sequence
  Description of Artificial Sequence: Synthetic oligonucleotide
gagaggaaaucuuucugug

SEQ ID NO: 1110832 - RNA, 19 nt, Artificial Sequence
  Description of Artificial Sequence: Synthetic oligonucleotide
ucuggcagugguauaugag

SEQ ID NO: 1110833 - RNA, 19 nt, Artificial Sequence
  Description of Artificial Sequence: Synthetic oligonucleotide
gcugaugccacccagggag

SEQ ID NO: 1110834 - RNA, 19 nt, Artificial Sequence
  Description of Artificial Sequence: Synthetic oligonucleotide
ggauacgugggacagaggc

SEQ ID NO: 1110835 - RNA, 19 nt, Artificial Sequence
  Description of Artificial Sequence: Synthetic oligonucleotide
acacugauuguacucacca

SEQ ID NO: 1110836 - RNA, 19 nt, Artificial Sequence
  Description of Artificial Sequence: Synthetic oligonucleotide
agaaagugcugggugacac

SEQ ID NO: 1110837 - RNA, 19 nt, Artificial Sequence
  Description of Artificial Sequence: Synthetic oligonucleotide
uaauguacccacagccacc

SEQ ID NO: 1110838 - RNA, 19 nt, Artificial Sequence
  Description of Artificial Sequence: Synthetic oligonucleotide
aggaacaucuuuaguuucc

SEQ ID NO: 1110839 - RNA, 19 nt, Artificial Sequence
  Description of Artificial Sequence: Synthetic oligonucleotide
aacaaccgauuuuaauaca

SEQ ID NO: 1110840 - RNA, 19 nt, Artificial Sequence
  Description of Artificial Sequence: Synthetic oligonucleotide
guaauguacccacagccac

SEQ ID NO: 1110841 - RNA, 19 nt, Artificial Sequence
  Description of Artificial Sequence: Synthetic oligonucleotide
cuaacuuuggacgugucuc

SEQ ID NO: 1110842 - RNA, 19 nt, Artificial Sequence
  Description of Artificial Sequence: Synthetic oligonucleotide
aaagcauacgguggucagg

SEQ ID NO: 1110843 - RNA, 19 nt, Artificial Sequence
  Description of Artificial Sequence: Synthetic oligonucleotide
uagguugaguuucccuugg

SEQ ID NO: 1110844 - RNA, 19 nt, Artificial Sequence
  Description of Artificial Sequence: Synthetic oligonucleotide
agacagaaagugcugggug

SEQ ID NO: 1110845 - RNA, 19 nt, Artificial Sequence
  Description of Artificial Sequence: Synthetic oligonucleotide
gcgguugagauacacaggg

SEQ ID NO: 1110846 - RNA, 19 nt, Artificial Sequence
  Description of Artificial Sequence: Synthetic oligonucleotide
uuagacgacgucgcaaucc

SEQ ID NO: 1110847 - RNA, 19 nt, Artificial Sequence
  Description of Artificial Sequence: Synthetic oligonucleotide
acaccaucuggagaaagcg

SEQ ID NO: 1110848 - RNA, 19 nt, Artificial Sequence
  Description of Artificial Sequence: Synthetic oligonucleotide
cucucuuagacgacgucgc

SEQ ID NO: 1110849 - RNA, 19 nt, Artificial Sequence
  Description of Artificial Sequence: Synthetic oligonucleotide
ugauuguacucaccaggcc

SEQ ID NO: 1110850 - RNA, 19 nt, Artificial Sequence
  Description of Artificial Sequence: Synthetic oligonucleotide
ugcgguugagauacacagg

SEQ ID NO: 1110851 - RNA, 19 nt, Artificial Sequence
  Description of Artificial Sequence: Synthetic oligonucleotide
ucuuagacgacgucgcaau

SEQ ID NO: 1110852 - RNA, 19 nt, Artificial Sequence
  Description of Artificial Sequence: Synthetic oligonucleotide
gagaaagcgacggaugcgc

SEQ ID NO: 1110853 - RNA, 19 nt, Artificial Sequence
  Description of Artificial Sequence: Synthetic oligonucleotide
auaugaggucucugucugc

SEQ ID NO: 1110854 - RNA, 19 nt, Artificial Sequence
  Description of Artificial Sequence: Synthetic oligonucleotide
gauacugauuaggucagac

SEQ ID NO: 1110855 - RNA, 19 nt, Artificial Sequence
  Description of Artificial Sequence: Synthetic oligonucleotide
aacacgugccacaccgugc

SEQ ID NO: 1110856 - RNA, 19 nt, Artificial Sequence
  Description of Artificial Sequence: Synthetic oligonucleotide
cacaggcuaacucucagug

SEQ ID NO: 1110857 - RNA, 19 nt, Artificial Sequence
  Description of Artificial Sequence: Synthetic oligonucleotide
aucagagcacacaggauac

SEQ ID NO: 1110858 - RNA, 19 nt, Artificial Sequence
  Description of Artificial Sequence: Synthetic oligonucleotide
agagaggcacuacaguugu

SEQ ID NO: 1110859 - RNA, 19 nt, Artificial Sequence
  Description of Artificial Sequence: Synthetic oligonucleotide
aagcauacgguggucagga

SEQ ID NO: 1110860 - RNA, 19 nt, Artificial Sequence
  Description of Artificial Sequence: Synthetic oligonucleotide
caggcuaacucucaguguc

SEQ ID NO: 1110861 - RNA, 19 nt, Artificial Sequence
  Description of Artificial Sequence: Synthetic oligonucleotide
aaccuaagcuggcagcagu

SEQ ID NO: 1110862 - RNA, 19 nt, Artificial Sequence
  Description of Artificial Sequence: Synthetic oligonucleotide
aaguuccccaguaccauuc

SEQ ID NO: 1110863 - RNA, 19 nt, Artificial Sequence
  Description of Artificial Sequence: Synthetic oligonucleotide
uaacuuuggacgugucuca

SEQ ID NO: 1110864 - RNA, 19 nt, Artificial Sequence
  Description of Artificial Sequence: Synthetic oligonucleotide
auacugauuaggucagaca

SEQ ID NO: 1110865 - RNA, 19 nt, Artificial Sequence
  Description of Artificial Sequence: Synthetic oligonucleotide
gacagaaagugcuggguga

SEQ ID NO: 1110866 - RNA, 19 nt, Artificial Sequence
  Description of Artificial Sequence: Synthetic oligonucleotide
gagcuggcgcauuugugcg

SEQ ID NO: 1110867 - RNA, 19 nt, Artificial Sequence
  Description of Artificial Sequence: Synthetic oligonucleotide
ugcccaaagugauauuugu

SEQ ID NO: 1110868 - RNA, 19 nt, Artificial Sequence
  Description of Artificial Sequence: Synthetic oligonucleotide
ugugcgguugagauacaca

SEQ ID NO: 1110869 - RNA, 19 nt, Artificial Sequence
  Description of Artificial Sequence: Synthetic oligonucleotide
caucuggagaaagcgacgg

SEQ ID NO: 1110870 - RNA, 19 nt, Artificial Sequence
  Description of Artificial Sequence: Synthetic oligonucleotide
caaggugaggaauucccug

SEQ ID NO: 1110871 - RNA, 19 nt, Artificial Sequence
  Description of Artificial Sequence: Synthetic oligonucleotide
gauauuugugggacagacc

SEQ ID NO: 1110872 - RNA, 19 nt, Artificial Sequence
  Description of Artificial Sequence: Synthetic oligonucleotide
cuagguugaguuucccuug

SEQ ID NO: 1110873 - RNA, 19 nt, Artificial Sequence
  Description of Artificial Sequence: Synthetic oligonucleotide
acagaaagugcugggugac

SEQ ID NO: 1110874 - RNA, 19 nt, Artificial Sequence
  Description of Artificial Sequence: Synthetic oligonucleotide
uagacgacgucgcaauccu

SEQ ID NO: 1110875 - RNA, 19 nt, Artificial Sequence
  Description of Artificial Sequence: Synthetic oligonucleotide
gaggcacuacaguuguucc

SEQ ID NO: 1110876 - RNA, 19 nt, Artificial Sequence
  Description of Artificial Sequence: Synthetic oligonucleotide
gaacacgugccacaccgug

SEQ ID NO: 1110877 - RNA, 19 nt, Artificial Sequence
  Description of Artificial Sequence: Synthetic oligonucleotide
cagaucagagcacacagga

SEQ ID NO: 1110878 - RNA, 19 nt, Artificial Sequence
  Description of Artificial Sequence: Synthetic oligonucleotide
ucuggcuaccuggagacca

SEQ ID NO: 1110879 - RNA, 19 nt, Artificial Sequence
  Description of Artificial Sequence: Synthetic oligonucleotide
ugcacccuagaacucugcc

SEQ ID NO: 1110880 - RNA, 19 nt, Artificial Sequence
  Description of Artificial Sequence: Synthetic oligonucleotide
gacgucgcaauccugcauc

SEQ ID NO: 1110881 - RNA, 19 nt, Artificial Sequence
  Description of Artificial Sequence: Synthetic oligonucleotide
caaagugauauuuguggga

SEQ ID NO: 1110882 - RNA, 19 nt, Artificial Sequence
  Description of Artificial Sequence: Synthetic oligonucleotide
acuuuggacgugucucagg

SEQ ID NO: 1110883 - RNA, 19 nt, Artificial Sequence
  Description of Artificial Sequence: Synthetic oligonucleotide
gguugagauacacagggga

SEQ ID NO: 1110884 - RNA, 19 nt, Artificial Sequence
  Description of Artificial Sequence: Synthetic oligonucleotide
ucgcaauccugcauccaag

SEQ ID NO: 1110885 - RNA, 19 nt, Artificial Sequence
  Description of Artificial Sequence: Synthetic oligonucleotide
acgucgcaauccugcaucc

SEQ ID NO: 1110886 - RNA, 19 nt, Artificial Sequence
  Description of Artificial Sequence: Synthetic oligonucleotide
agagcccucaucuaacuuu

SEQ ID NO: 1110887 - RNA, 19 nt, Artificial Sequence
  Description of Artificial Sequence: Synthetic oligonucleotide
cucagggugagagaauccc

SEQ ID NO: 1110888 - RNA, 19 nt, Artificial Sequence
  Description of Artificial Sequence: Synthetic oligonucleotide
ugccugacacuaacacugg

SEQ ID NO: 1110889 - RNA, 19 nt, Artificial Sequence
  Description of Artificial Sequence: Synthetic oligonucleotide
aacuuuggacgugucucag

SEQ ID NO: 1110890 - RNA, 19 nt, Artificial Sequence
  Description of Artificial Sequence: Synthetic oligonucleotide
gaaagcgacggaugcgcug

SEQ ID NO: 1110891 - RNA, 19 nt, Artificial Sequence
  Description of Artificial Sequence: Synthetic oligonucleotide
uucuggaugccugacacua

SEQ ID NO: 1110892 - RNA, 19 nt, Artificial Sequence
  Description of Artificial Sequence: Synthetic oligonucleotide
uauuugugggacagaccac

SEQ ID NO: 1110893 - RNA, 19 nt, Artificial Sequence
  Description of Artificial Sequence: Synthetic oligonucleotide
caggauacgugggacagag

SEQ ID NO: 1110894 - RNA, 19 nt, Artificial Sequence
  Description of Artificial Sequence: Synthetic oligonucleotide
aaagcuccagggguccggg

SEQ ID NO: 1110895 - RNA, 19 nt, Artificial Sequence
  Description of Artificial Sequence: Synthetic oligonucleotide
ucaucuaacuuuggacgug

SEQ ID NO: 1110896 - RNA, 19 nt, Artificial Sequence
  Description of Artificial Sequence: Synthetic oligonucleotide
acuugguuaccugcccacc

SEQ ID NO: 1110897 - RNA, 19 nt, Artificial Sequence
  Description of Artificial Sequence: Synthetic oligonucleotide
aacaagagcuggcgcauuu

SEQ ID NO: 1110898 - RNA, 19 nt, Artificial Sequence
  Description of Artificial Sequence: Synthetic oligonucleotide
ugcaccuggccaccaagug

SEQ ID NO: 1110899 - RNA, 19 nt, Artificial Sequence
  Description of Artificial Sequence: Synthetic oligonucleotide
ucuuuccagaucagagcac

SEQ ID NO: 1110900 - RNA, 19 nt, Artificial Sequence
  Description of Artificial Sequence: Synthetic oligonucleotide
acgugucucagggugagag

SEQ ID NO: 1110901 - RNA, 19 nt, Artificial Sequence
  Description of Artificial Sequence: Synthetic oligonucleotide
uuugugggacagaccacac

SEQ ID NO: 1110902 - RNA, 19 nt, Artificial Sequence
  Description of Artificial Sequence: Synthetic oligonucleotide
gagaccagagucccucccc

SEQ ID NO: 1110903 - RNA, 19 nt, Artificial Sequence
  Description of Artificial Sequence: Synthetic oligonucleotide
gguucgguggagcaggagc

SEQ ID NO: 1110904 - RNA, 19 nt, Artificial Sequence
  Description of Artificial Sequence: Synthetic oligonucleotide
gcauacgguggucaggagg

SEQ ID NO: 1110905 - RNA, 19 nt, Artificial Sequence
  Description of Artificial Sequence: Synthetic oligonucleotide
uacuugguuaccugcccac

SEQ ID NO: 1110906 - RNA, 19 nt, Artificial Sequence
  Description of Artificial Sequence: Synthetic oligonucleotide
acuccucucuuagacgacg

SEQ ID NO: 1110907 - RNA, 19 nt, Artificial Sequence
  Description of Artificial Sequence: Synthetic oligonucleotide
acacgugccacaccgugcu

SEQ ID NO: 1110908 - RNA, 19 nt, Artificial Sequence
  Description of Artificial Sequence: Synthetic oligonucleotide
aggcagaguaaggccaacc

SEQ ID NO: 1110909 - RNA, 19 nt, Artificial Sequence
  Description of Artificial Sequence: Synthetic oligonucleotide
cacugauuguacucaccag

SEQ ID NO: 1110910 - RNA, 19 nt, Artificial Sequence
  Description of Artificial Sequence: Synthetic oligonucleotide
uccccuauuuggcuuccug

SEQ ID NO: 1110911 - RNA, 19 nt, Artificial Sequence
  Description of Artificial Sequence: Synthetic oligonucleotide
accagagucccuccccauc

SEQ ID NO: 1110912 - RNA, 19 nt, Artificial Sequence
  Description of Artificial Sequence: Synthetic oligonucleotide
aggauacugauuaggucag

SEQ ID NO: 1110913 - RNA, 19 nt, Artificial Sequence
  Description of Artificial Sequence: Synthetic oligonucleotide
cacaggauacgugggacag

SEQ ID NO: 1110914 - RNA, 19 nt, Artificial Sequence
  Description of Artificial Sequence: Synthetic oligonucleotide
ucucuuagacgacgucgca

SEQ ID NO: 1110915 - RNA, 19 nt, Artificial Sequence
  Description of Artificial Sequence: Synthetic oligonucleotide
guauaugaggucucugucu

SEQ ID NO: 1110916 - RNA, 19 nt, Artificial Sequence
  Description of Artificial Sequence: Synthetic oligonucleotide
cuugcagcagaguccagca

SEQ ID NO: 1110917 - RNA, 19 nt, Artificial Sequence
  Description of Artificial Sequence: Synthetic oligonucleotide
acugaguacuugguuaccu

SEQ ID NO: 1110918 - RNA, 19 nt, Artificial Sequence
  Description of Artificial Sequence: Synthetic oligonucleotide
auuguacucaccaggcccu

SEQ ID NO: 1110919 - RNA, 19 nt, Artificial Sequence
  Description of Artificial Sequence: Synthetic oligonucleotide
accaggauacugauuaggu

SEQ ID NO: 1110920 - RNA, 19 nt, Artificial Sequence
  Description of Artificial Sequence: Synthetic oligonucleotide
ggaauucccugcuuaugcc

SEQ ID NO: 1110921 - RNA, 19 nt, Artificial Sequence
  Description of Artificial Sequence: Synthetic oligonucleotide
acaggcuaacucucagugu

SEQ ID NO: 1110922 - RNA, 19 nt, Artificial Sequence
  Description of Artificial Sequence: Synthetic oligonucleotide
aguugggcugagcaagggu

SEQ ID NO: 1110923 - RNA, 19 nt, Artificial Sequence
  Description of Artificial Sequence: Synthetic oligonucleotide
ggugacacugauuguacuc

SEQ ID NO: 1110924 - RNA, 19 nt, Artificial Sequence
  Description of Artificial Sequence: Synthetic oligonucleotide
acacccucuaaguucccca

SEQ ID NO: 1110925 - RNA, 19 nt, Artificial Sequence
  Description of Artificial Sequence: Synthetic oligonucleotide
caggguucgguggagcagg

SEQ ID NO: 1110926 - RNA, 19 nt, Artificial Sequence
  Description of Artificial Sequence: Synthetic oligonucleotide
caggcugaugccacccagg

SEQ ID NO: 1110927 - RNA, 19 nt, Artificial Sequence
  Description of Artificial Sequence: Synthetic oligonucleotide
uggacgugucucaggguga

SEQ ID NO: 1110928 - RNA, 19 nt, Artificial Sequence
  Description of Artificial Sequence: Synthetic oligonucleotide
gcagucaccaaacaaccga

SEQ ID NO: 1110929 - RNA, 19 nt, Artificial Sequence
  Description of Artificial Sequence: Synthetic oligonucleotide
cuuuccagaucagagcaca

SEQ ID NO: 1110930 - RNA, 19 nt, Artificial Sequence
  Description of Artificial Sequence: Synthetic oligonucleotide
cacgcuagguugaguuucc

SEQ ID NO: 1110931 - RNA, 19 nt, Artificial Sequence
  Description of Artificial Sequence: Synthetic oligonucleotide
uuccuguaauguacccaca

SEQ ID NO: 1110932 - RNA, 19 nt, Artificial Sequence
  Description of Artificial Sequence: Synthetic oligonucleotide
gauacgugggacagaggca

SEQ ID NO: 1110933 - RNA, 19 nt, Artificial Sequence
  Description of Artificial Sequence: Synthetic oligonucleotide
acgugccacaccgugcugg

SEQ ID NO: 1110934 - RNA, 19 nt, Artificial Sequence
  Description of Artificial Sequence: Synthetic oligonucleotide
aggugaggaauucccugcu

SEQ ID NO: 1110935 - RNA, 19 nt, Artificial Sequence
  Description of Artificial Sequence: Synthetic oligonucleotide
guugagauacacaggggaa

SEQ ID NO: 1110936 - RNA, 19 nt, Artificial Sequence
  Description of Artificial Sequence: Synthetic oligonucleotide
uuuggacgugucucagggu

SEQ ID NO: 1110937 - RNA, 19 nt, Artificial Sequence
  Description of Artificial Sequence: Synthetic oligonucleotide
ugcugcacccuagaacucu

SEQ ID NO: 1110938 - RNA, 19 nt, Artificial Sequence
  Description of Artificial Sequence: Synthetic oligonucleotide
ccucucuuagacgacgucg

SEQ ID NO: 1110939 - RNA, 19 nt, Artificial Sequence
  Description of Artificial Sequence: Synthetic oligonucleotide
cacccucuaaguuccccag

SEQ ID NO: 1110940 - RNA, 19 nt, Artificial Sequence
  Description of Artificial Sequence: Synthetic oligonucleotide
agcuggcgcauuugugcgg

SEQ ID NO: 1110941 - RNA, 19 nt, Artificial Sequence
  Description of Artificial Sequence: Synthetic oligonucleotide
aguuucccuuggugggcac

SEQ ID NO: 1110942 - RNA, 19 nt, Artificial Sequence
  Description of Artificial Sequence: Synthetic oligonucleotide
accuaagcuggcagcaguc

SEQ ID NO: 1110943 - RNA, 19 nt, Artificial Sequence
  Description of Artificial Sequence: Synthetic oligonucleotide
cuugguuaccugcccacca

SEQ ID NO: 1110944 - RNA, 19 nt, Artificial Sequence
  Description of Artificial Sequence: Synthetic oligonucleotide
agaccacacccucuaaguu

SEQ ID NO: 1110945 - RNA, 19 nt, Artificial Sequence
  Description of Artificial Sequence: Synthetic oligonucleotide
cggaacacgugccacaccg

SEQ ID NO: 1110946 - RNA, 19 nt, Artificial Sequence
  Description of Artificial Sequence: Synthetic oligonucleotide
ggagaaagcgacggaugcg

SEQ ID NO: 1110947 - RNA, 19 nt, Artificial Sequence
  Description of Artificial Sequence: Synthetic oligonucleotide
ccaggauccccuauuuggc

SEQ ID NO: 1110948 - RNA, 19 nt, Artificial Sequence
  Description of Artificial Sequence: Synthetic oligonucleotide
ccuguaauguacccacagc

SEQ ID NO: 1110949 - RNA, 19 nt, Artificial Sequence
  Description of Artificial Sequence: Synthetic oligonucleotide
acgugggacagaggcaggg

SEQ ID NO: 1110950 - RNA, 19 nt, Artificial Sequence
  Description of Artificial Sequence: Synthetic oligonucleotide
cagaaagcuccaggggucc

SEQ ID NO: 1110951 - RNA, 19 nt, Artificial Sequence
  Description of Artificial Sequence: Synthetic oligonucleotide
cuuaugcccaaagugauau

SEQ ID NO: 1110952 - RNA, 19 nt, Artificial Sequence
  Description of Artificial Sequence: Synthetic oligonucleotide
cucaucuaacuuuggacgu

SEQ ID NO: 1110953 - RNA, 19 nt, Artificial Sequence
  Description of Artificial Sequence: Synthetic oligonucleotide
acacaccaucuggagaaag

SEQ ID NO: 1110954 - RNA, 19 nt, Artificial Sequence
  Description of Artificial Sequence: Synthetic oligonucleotide
cuaacucucagugucuucu

SEQ ID NO: 1110955 - RNA, 19 nt, Artificial Sequence
  Description of Artificial Sequence: Synthetic oligonucleotide
gacugaguacuugguuacc

SEQ ID NO: 1110956 - RNA, 19 nt, Artificial Sequence
  Description of Artificial Sequence: Synthetic oligonucleotide
aggauccccuauuuggcuu

SEQ ID NO: 1110957 - RNA, 19 nt, Artificial Sequence
  Description of Artificial Sequence: Synthetic oligonucleotide
cuuagacgacgucgcaauc

SEQ ID NO: 1110958 - RNA, 19 nt, Artificial Sequence
  Description of Artificial Sequence: Synthetic oligonucleotide
ccaucuggagaaagcgacg

SEQ ID NO: 1110959 - RNA, 19 nt, Artificial Sequence
  Description of Artificial Sequence: Synthetic oligonucleotide
acaagagcuggcgcauuug

SEQ ID NO: 1110960 - RNA, 19 nt, Artificial Sequence
  Description of Artificial Sequence: Synthetic oligonucleotide
ggggauuuguaaucuccac

SEQ ID NO: 1110961 - RNA, 19 nt, Artificial Sequence
  Description of Artificial Sequence: Synthetic oligonucleotide
acaguacucugggagugga

SEQ ID NO: 1110962 - RNA, 19 nt, Artificial Sequence
  Description of Artificial Sequence: Synthetic oligonucleotide
acgacgucgcaauccugca

SEQ ID NO: 1110963 - RNA, 19 nt, Artificial Sequence
  Description of Artificial Sequence: Synthetic oligonucleotide
uguacucaccaggcccugc

SEQ ID NO: 1110964 - RNA, 19 nt, Artificial Sequence
  Description of Artificial Sequence: Synthetic oligonucleotide
guacucaccaggcccugca

SEQ ID NO: 1110965 - RNA, 19 nt, Artificial Sequence
  Description of Artificial Sequence: Synthetic oligonucleotide
cagugguauaugaggucuc

SEQ ID NO: 1110966 - RNA, 19 nt, Artificial Sequence
  Description of Artificial Sequence: Synthetic oligonucleotide
ugauuaggucagacaccuc

SEQ ID NO: 1110967 - RNA, 19 nt, Artificial Sequence
  Description of Artificial Sequence: Synthetic oligonucleotide
uggcgcauuugugcgguug

SEQ ID NO: 1110968 - RNA, 19 nt, Artificial Sequence
  Description of Artificial Sequence: Synthetic oligonucleotide
cucagcgugcaccaggaua

SEQ ID NO: 1110969 - RNA, 19 nt, Artificial Sequence
  Description of Artificial Sequence: Synthetic oligonucleotide
ccagagucccuccccaucc

SEQ ID NO: 1110970 - RNA, 19 nt, Artificial Sequence
  Description of Artificial Sequence: Synthetic oligonucleotide
caucuuuaguuuccagaaa

SEQ ID NO: 1110971 - RNA, 19 nt, Artificial Sequence
  Description of Artificial Sequence: Synthetic oligonucleotide
gccaaccuaagcuggcagc

SEQ ID NO: 1110972 - RNA, 19 nt, Artificial Sequence
  Description of Artificial Sequence: Synthetic oligonucleotide
agcauacgguggucaggag

SEQ ID NO: 1110973 - RNA, 19 nt, Artificial Sequence
  Description of Artificial Sequence: Synthetic oligonucleotide
acgcuagguugaguuuccc

SEQ ID NO: 1110974 - RNA, 19 nt, Artificial Sequence
  Description of Artificial Sequence: Synthetic oligonucleotide
ccaggauacugauuagguc

SEQ ID NO: 1110975 - RNA, 19 nt, Artificial Sequence
  Description of Artificial Sequence: Synthetic oligonucleotide
caagagcuuccauucccca

SEQ ID NO: 1110976 - RNA, 19 nt, Artificial Sequence
  Description of Artificial Sequence: Synthetic oligonucleotide
uccacgcuagguugaguuu

SEQ ID NO: 1110977 - RNA, 19 nt, Artificial Sequence
  Description of Artificial Sequence: Synthetic oligonucleotide
aucuaacuuuggacguguc

SEQ ID NO: 1110978 - RNA, 19 nt, Artificial Sequence
  Description of Artificial Sequence: Synthetic oligonucleotide
ucgguggagcaggagcaca

SEQ ID NO: 1110979 - RNA, 19 nt, Artificial Sequence
  Description of Artificial Sequence: Synthetic oligonucleotide
cugcacccuagaacucugc

SEQ ID NO: 1110980 - RNA, 19 nt, Artificial Sequence
  Description of Artificial Sequence: Synthetic oligonucleotide
uuaugcccaaagugauauu

SEQ ID NO: 1110981 - RNA, 19 nt, Artificial Sequence
  Description of Artificial Sequence: Synthetic oligonucleotide
agcgacggaugcgcugggc

SEQ ID NO: 1110982 - RNA, 19 nt, Artificial Sequence
  Description of Artificial Sequence: Synthetic oligonucleotide
cugggugacacugauugua

SEQ ID NO: 1110983 - RNA, 19 nt, Artificial Sequence
  Description of Artificial Sequence: Synthetic oligonucleotide
gauccccuauuuggcuucc

SEQ ID NO: 1110984 - RNA, 19 nt, Artificial Sequence
  Description of Artificial Sequence: Synthetic oligonucleotide
ggcuuccuguaauguaccc

SEQ ID NO: 1110985 - RNA, 19 nt, Artificial Sequence
  Description of Artificial Sequence: Synthetic oligonucleotide
gccuuuucugcugucaguc

SEQ ID NO: 1110986 - RNA, 19 nt, Artificial Sequence
  Description of Artificial Sequence: Synthetic oligonucleotide
gguuaccugcccaccaccc

SEQ ID NO: 1110987 - RNA, 19 nt, Artificial Sequence
  Description of Artificial Sequence: Synthetic oligonucleotide
ggcagugguauaugagguc

SEQ ID NO: 1110988 - RNA, 19 nt, Artificial Sequence
  Description of Artificial Sequence: Synthetic oligonucleotide
gaguuucccuuggugggca

SEQ ID NO: 1110989 - RNA, 19 nt, Artificial Sequence
  Description of Artificial Sequence: Synthetic oligonucleotide
cacuccucucuuagacgac

SEQ ID NO: 1110990 - RNA, 19 nt, Artificial Sequence
  Description of Artificial Sequence: Synthetic oligonucleotide
cauuugugcgguugagaua

SEQ ID NO: 1110991 - RNA, 19 nt, Artificial Sequence
  Description of Artificial Sequence: Synthetic oligonucleotide
uguucccuuuagggcuagg

SEQ ID NO: 1110992 - RNA, 19 nt, Artificial Sequence
  Description of Artificial Sequence: Synthetic oligonucleotide
caggcuugugggcugggga

SEQ ID NO: 1110993 - RNA, 19 nt, Artificial Sequence
  Description of Artificial Sequence: Synthetic oligonucleotide
ggauccccuauuuggcuuc

SEQ ID NO: 1110994 - RNA, 19 nt, Artificial Sequence
  Description of Artificial Sequence: Synthetic oligonucleotide
caggaacaguuaaguauaa

SEQ ID NO: 1110995 - RNA, 19 nt, Artificial Sequence
  Description of Artificial Sequence: Synthetic oligonucleotide
agaaagcgacggaugcgcu

SEQ ID NO: 1110996 - RNA, 19 nt, Artificial Sequence
  Description of Artificial Sequence: Synthetic oligonucleotide
gacggaugcgcugggcauc

SEQ ID NO: 1110997 - RNA, 19 nt, Artificial Sequence
  Description of Artificial Sequence: Synthetic oligonucleotide
cucacaccccacuccucuc

SEQ ID NO: 1110998 - RNA, 19 nt, Artificial Sequence
  Description of Artificial Sequence: Synthetic oligonucleotide
cucuuagacgacgucgcaa

SEQ ID NO: 1110999 - RNA, 19 nt, Artificial Sequence
  Description of Artificial Sequence: Synthetic oligonucleotide
cacccuagaacucugccuu

SEQ ID NO: 1111000 - RNA, 19 nt, Artificial Sequence
  Description of Artificial Sequence: Synthetic oligonucleotide
ggcagaguaaggccaaccu

SEQ ID NO: 1111001 - RNA, 19 nt, Artificial Sequence
  Description of Artificial Sequence: Synthetic oligonucleotide
cagucagugucugcaccug

SEQ ID NO: 1111002 - RNA, 19 nt, Artificial Sequence
  Description of Artificial Sequence: Synthetic oligonucleotide
accaaacaaccgauuuuaa

SEQ ID NO: 1111003 - RNA, 19 nt, Artificial Sequence
  Description of Artificial Sequence: Synthetic oligonucleotide
gacagaccacacccucuaa

SEQ ID NO: 1111004 - RNA, 19 nt, Artificial Sequence
  Description of Artificial Sequence: Synthetic oligonucleotide
aggcuaacucucagugucu

SEQ ID NO: 1111005 - RNA, 19 nt, Artificial Sequence
  Description of Artificial Sequence: Synthetic oligonucleotide
gcagugguauaugaggucu

SEQ ID NO: 1111006 - RNA, 19 nt, Artificial Sequence
  Description of Artificial Sequence: Synthetic oligonucleotide
cuggacaccaagagcaguu

SEQ ID NO: 1111007 - RNA, 19 nt, Artificial Sequence
  Description of Artificial Sequence: Synthetic oligonucleotide
ggacgugucucagggugag

SEQ ID NO: 1111008 - RNA, 19 nt, Artificial Sequence
  Description of Artificial Sequence: Synthetic oligonucleotide
gucccuccccauccaggcc

SEQ ID NO: 1111009 - RNA, 19 nt, Artificial Sequence
  Description of Artificial Sequence: Synthetic oligonucleotide
ggcacuacaguuguucccu

SEQ ID NO: 1111010 - RNA, 19 nt, Artificial Sequence
  Description of Artificial Sequence: Synthetic oligonucleotide
aggccugagaggaaaucuu

SEQ ID NO: 1111011 - RNA, 19 nt, Artificial Sequence
  Description of Artificial Sequence: Synthetic oligonucleotide
cuccacgcuagguugaguu

SEQ ID NO: 1111012 - RNA, 19 nt, Artificial Sequence
  Description of Artificial Sequence: Synthetic oligonucleotide
uaacaagagcuggcgcauu

SEQ ID NO: 1111013 - RNA, 19 nt, Artificial Sequence
  Description of Artificial Sequence: Synthetic oligonucleotide
gcccucaucuaacuuugga

SEQ ID NO: 1111014 - RNA, 19 nt, Artificial Sequence
  Description of Artificial Sequence: Synthetic oligonucleotide
caucuaacuuuggacgugu

SEQ ID NO: 1111015 - RNA, 19 nt, Artificial Sequence
  Description of Artificial Sequence: Synthetic oligonucleotide
guaaucuccacaggcugau

SEQ ID NO: 1111016 - RNA, 19 nt, Artificial Sequence
  Description of Artificial Sequence: Synthetic oligonucleotide
gugcucggugccaggcagg

SEQ ID NO: 1111017 - RNA, 19 nt, Artificial Sequence
  Description of Artificial Sequence: Synthetic oligonucleotide
ggacagaccacacccucua

SEQ ID NO: 1111018 - RNA, 19 nt, Artificial Sequence
  Description of Artificial Sequence: Synthetic oligonucleotide
gcuaacucucagugucuuc

SEQ ID NO: 1111019 - RNA, 19 nt, Artificial Sequence
  Description of Artificial Sequence: Synthetic oligonucleotide
ccacgcuagguugaguuuc

SEQ ID NO: 1111020 - RNA, 19 nt, Artificial Sequence
  Description of Artificial Sequence: Synthetic oligonucleotide
acccuagaacucugccuuu

SEQ ID NO: 1111021 - RNA, 19 nt, Artificial Sequence
  Description of Artificial Sequence: Synthetic oligonucleotide
cagagcacacaggauacgu

SEQ ID NO: 1111022 - RNA, 19 nt, Artificial Sequence
  Description of Artificial Sequence: Synthetic oligonucleotide
caggauccccuauuuggcu

SEQ ID NO: 1111023 - RNA, 19 nt, Artificial Sequence
  Description of Artificial Sequence: Synthetic oligonucleotide
cgguugagauacacagggg

SEQ ID NO: 1111024 - RNA, 19 nt, Artificial Sequence
  Description of Artificial Sequence: Synthetic oligonucleotide
auacgguggucaggaggca

SEQ ID NO: 1111025 - RNA, 19 nt, Artificial Sequence
  Description of Artificial Sequence: Synthetic oligonucleotide
cagaaagugcugggugaca

SEQ ID NO: 1111026 - RNA, 19 nt, Artificial Sequence
  Description of Artificial Sequence: Synthetic oligonucleotide
gcaauccugcauccaagua

SEQ ID NO: 1111027 - RNA, 19 nt, Artificial Sequence
  Description of Artificial Sequence: Synthetic oligonucleotide
gcuaccuggagaccagagu

SEQ ID NO: 1111028 - RNA, 19 nt, Artificial Sequence
  Description of Artificial Sequence: Synthetic oligonucleotide
aggcuccaaggucccugcu

SEQ ID NO: 1111029 - RNA, 19 nt, Artificial Sequence
  Description of Artificial Sequence: Synthetic oligonucleotide
agacgacgucgcaauccug

SEQ ID NO: 1111030 - RNA, 19 nt, Artificial Sequence
  Description of Artificial Sequence: Synthetic oligonucleotide
gcgugcaccaggauacuga

SEQ ID NO: 1111031 - RNA, 19 nt, Artificial Sequence
  Description of Artificial Sequence: Synthetic oligonucleotide
ggaaccaggauccccuauu

SEQ ID NO: 1111032 - RNA, 19 nt, Artificial Sequence
  Description of Artificial Sequence: Synthetic oligonucleotide
gcacccuagaacucugccu

SEQ ID NO: 1111033 - RNA, 19 nt, Artificial Sequence
  Description of Artificial Sequence: Synthetic oligonucleotide
ggcugucucagugcugcac

SEQ ID NO: 1111034 - RNA, 19 nt, Artificial Sequence
  Description of Artificial Sequence: Synthetic oligonucleotide
gcugcacccuagaacucug

SEQ ID NO: 1111035 - RNA, 19 nt, Artificial Sequence
  Description of Artificial Sequence: Synthetic oligonucleotide
caguacucugggaguggaa

SEQ ID NO: 1111036 - RNA, 19 nt, Artificial Sequence
  Description of Artificial Sequence: Synthetic oligonucleotide
cuccucucuuagacgacgu

SEQ ID NO: 1111037 - RNA, 19 nt, Artificial Sequence
  Description of Artificial Sequence: Synthetic oligonucleotide
cugcaccuggccaccaagu

SEQ ID NO: 1111038 - RNA, 19 nt, Artificial Sequence
  Description of Artificial Sequence: Synthetic oligonucleotide
cuccaaggucccugcucca

SEQ ID NO: 1111039 - RNA, 19 nt, Artificial Sequence
  Description of Artificial Sequence: Synthetic oligonucleotide
ccugcaccugauggggugc

SEQ ID NO: 1111040 - RNA, 19 nt, Artificial Sequence
  Description of Artificial Sequence: Synthetic oligonucleotide
ggucagacaccuccacgcu

SEQ ID NO: 1111041 - RNA, 19 nt, Artificial Sequence
  Description of Artificial Sequence: Synthetic oligonucleotide
ugcaccugauggggugcuc

SEQ ID NO: 1111042 - RNA, 19 nt, Artificial Sequence
  Description of Artificial Sequence: Synthetic oligonucleotide
ccaggguucgguggagcag

SEQ ID NO: 1111043 - RNA, 19 nt, Artificial Sequence
  Description of Artificial Sequence: Synthetic oligonucleotide
gcgcauuugugcgguugag

SEQ ID NO: 1111044 - RNA, 19 nt, Artificial Sequence
  Description of Artificial Sequence: Synthetic oligonucleotide
ccaagagcaguugggcuga

SEQ ID NO: 1111045 - RNA, 19 nt, Artificial Sequence
  Description of Artificial Sequence: Synthetic oligonucleotide
gucccugcuccagcuggac

SEQ ID NO: 1111046 - RNA, 19 nt, Artificial Sequence
  Description of Artificial Sequence: Synthetic oligonucleotide
gcuugaaacacagcccgau

SEQ ID NO: 1111047 - RNA, 19 nt, Artificial Sequence
  Description of Artificial Sequence: Synthetic oligonucleotide
uccagggguccgggccucc

SEQ ID NO: 1111048 - RNA, 19 nt, Artificial Sequence
  Description of Artificial Sequence: Synthetic oligonucleotide
ggauacugauuaggucaga

SEQ ID NO: 1111049 - RNA, 19 nt, Artificial Sequence
  Description of Artificial Sequence: Synthetic oligonucleotide
ccaaggugaggaauucccu

SEQ ID NO: 1111050 - RNA, 19 nt, Artificial Sequence
  Description of Artificial Sequence: Synthetic oligonucleotide
cugcaaagacugaguacuu

SEQ ID NO: 1111051 - RNA, 19 nt, Artificial Sequence
  Description of Artificial Sequence: Synthetic oligonucleotide
aggguucgguggagcagga

SEQ ID NO: 1111052 - RNA, 19 nt, Artificial Sequence
  Description of Artificial Sequence: Synthetic oligonucleotide
cacuacaguuguucccuuu

SEQ ID NO: 1111053 - RNA, 19 nt, Artificial Sequence
  Description of Artificial Sequence: Synthetic oligonucleotide
gccucagcgugcaccagga

SEQ ID NO: 1111054 - RNA, 19 nt, Artificial Sequence
  Description of Artificial Sequence: Synthetic oligonucleotide
cccaggguucgguggagca

SEQ ID NO: 1111055 - RNA, 19 nt, Artificial Sequence
  Description of Artificial Sequence: Synthetic oligonucleotide
ccccuauuuggcuuccugu

SEQ ID NO: 1111056 - RNA, 19 nt, Artificial Sequence
  Description of Artificial Sequence: Synthetic oligonucleotide
ggguucgguggagcaggag

SEQ ID NO: 1111057 - RNA, 19 nt, Artificial Sequence
  Description of Artificial Sequence: Synthetic oligonucleotide
gcccgauccaucugggcau

SEQ ID NO: 1111058 - RNA, 19 nt, Artificial Sequence
  Description of Artificial Sequence: Synthetic oligonucleotide
ccauuccccacaggcuaac

SEQ ID NO: 1111059 - RNA, 19 nt, Artificial Sequence
  Description of Artificial Sequence: Synthetic oligonucleotide
gugucccaagagcuuccau

SEQ ID NO: 1111060 - RNA, 19 nt, Artificial Sequence
  Description of Artificial Sequence: Synthetic oligonucleotide
guccgggccuccccaagau

SEQ ID NO: 1111061 - RNA, 19 nt, Artificial Sequence
  Description of Artificial Sequence: Synthetic oligonucleotide
ccacacccucuaaguuccc

SEQ ID NO: 1111062 - RNA, 19 nt, Artificial Sequence
  Description of Artificial Sequence: Synthetic oligonucleotide
gcuggcgcauuugugcggu

SEQ ID NO: 1111063 - RNA, 19 nt, Artificial Sequence
  Description of Artificial Sequence: Synthetic oligonucleotide
gugccacaccgugcugguc

SEQ ID NO: 1111064 - RNA, 19 nt, Artificial Sequence
  Description of Artificial Sequence: Synthetic oligonucleotide
ggaggcccgagggcaguca

SEQ ID NO: 1111065 - RNA, 19 nt, Artificial Sequence
  Description of Artificial Sequence: Synthetic oligonucleotide
ggcuaacucucagugucuu

SEQ ID NO: 1111066 - RNA, 19 nt, Artificial Sequence
  Description of Artificial Sequence: Synthetic oligonucleotide
cgcaauccugcauccaagu

SEQ ID NO: 1111067 - RNA, 19 nt, Artificial Sequence
  Description of Artificial Sequence: Synthetic oligonucleotide
ggaacacgugccacaccgu

SEQ ID NO: 1111068 - RNA, 19 nt, Artificial Sequence
  Description of Artificial Sequence: Synthetic oligonucleotide
gagaggcacuacaguuguu

SEQ ID NO: 1111069 - RNA, 19 nt, Artificial Sequence
  Description of Artificial Sequence: Synthetic oligonucleotide
cacaccccacuccucucuu

SEQ ID NO: 1111070 - RNA, 19 nt, Artificial Sequence
  Description of Artificial Sequence: Synthetic oligonucleotide
cgcuagguugaguuucccu

SEQ ID NO: 1111071 - RNA, 19 nt, Artificial Sequence
  Description of Artificial Sequence: Synthetic oligonucleotide
gggguccgggccuccccaa

SEQ ID NO: 1111072 - RNA, 19 nt, Artificial Sequence
  Description of Artificial Sequence: Synthetic oligonucleotide
ccuuuagggcuagggccaa

SEQ ID NO: 1111073 - RNA, 19 nt, Artificial Sequence
  Description of Artificial Sequence: Synthetic oligonucleotide
gcacuacaguuguucccuu

SEQ ID NO: 1111074 - RNA, 19 nt, Artificial Sequence
  Description of Artificial Sequence: Synthetic oligonucleotide
gcccgagggcagucagugu

SEQ ID NO: 1111075 - RNA, 19 nt, Artificial Sequence
  Description of Artificial Sequence: Synthetic oligonucleotide
cgugccacaccgugcuggu

SEQ ID NO: 1111076 - RNA, 19 nt, Artificial Sequence
  Description of Artificial Sequence: Synthetic oligonucleotide
cgacggaugcgcugggcau

SEQ ID NO: 1111077 - RNA, 19 nt, Artificial Sequence
  Description of Artificial Sequence: Synthetic oligonucleotide
cuggcgcauuugugcgguu

SEQ ID NO: 1111078 - RNA, 19 nt, Artificial Sequence
  Description of Artificial Sequence: Synthetic oligonucleotide
cgacgucgcaauccugcau

SEQ ID NO: 1111079 - RNA, 19 nt, Artificial Sequence
  Description of Artificial Sequence: Synthetic oligonucleotide
ccuccacgcuagguugagu

SEQ ID NO: 1111080 - RNA, 19 nt, Artificial Sequence
  Description of Artificial Sequence: Synthetic oligonucleotide
uauaguacaaacuugaaag

SEQ ID NO: 1111081 - RNA, 19 nt, Artificial Sequence
  Description of Artificial Sequence: Synthetic oligonucleotide
auuguuacaguuauuaucc

SEQ ID NO: 1111082 - RNA, 19 nt, Artificial Sequence
  Description of Artificial Sequence: Synthetic oligonucleotide
  modified_base (11)..(11): a, c, u, g, unknown or other
auaaggaagancuugaugu

SEQ ID NO: 1111083 - RNA, 19 nt, Artificial Sequence
  Description of Artificial Sequence: Synthetic oligonucleotide
ucgaauaagagacacagcc

SEQ ID NO: 1111084 - RNA, 19 nt, Artificial Sequence
  Description of Artificial Sequence: Synthetic oligonucleotide
uucuaaucugcccagaagg

SEQ ID NO: 1111085 - RNA, 19 nt, Artificial Sequence
  Description of Artificial Sequence: Synthetic oligonucleotide
caagguauuaguaaguacg

SEQ ID NO: 1111086 - RNA, 19 nt, Artificial Sequence
  Description of Artificial Sequence: Synthetic oligonucleotide
uauucuuagaugcugaaug

SEQ ID NO: 1111087 - RNA, 19 nt, Artificial Sequence
  Description of Artificial Sequence: Synthetic oligonucleotide
uauaagugaaaucuggucu

SEQ ID NO: 1111088 - RNA, 19 nt, Artificial Sequence
  Description of Artificial Sequence: Synthetic oligonucleotide
aagucuagcugucaccucc

SEQ ID NO: 1111089 - RNA, 19 nt, Artificial Sequence
  Description of Artificial Sequence: Synthetic oligonucleotide
aaguuaacugcucaggcag

SEQ ID NO: 1111090 - RNA, 19 nt, Artificial Sequence
  Description of Artificial Sequence: Synthetic oligonucleotide
uguacuaggcacuaagagg

SEQ ID NO: 1111091 - RNA, 19 nt, Artificial Sequence
  Description of Artificial Sequence: Synthetic oligonucleotide
acaguuauuaucccugccc

SEQ ID NO: 1111092 - RNA, 19 nt, Artificial Sequence
  Description of Artificial Sequence: Synthetic oligonucleotide
aauaacauccccguugcac

SEQ ID NO: 1111093 - RNA, 19 nt, Artificial Sequence
  Description of Artificial Sequence: Synthetic oligonucleotide
augcauuauguauuuaacc

SEQ ID NO: 1111094 - RNA, 19 nt, Artificial Sequence
  Description of Artificial Sequence: Synthetic oligonucleotide
  modified_base (12)..(12): a, c, u, g, unknown or other
aauaaggaagancuugaug

SEQ ID NO: 1111095 - RNA, 19 nt, Artificial Sequence
  Description of Artificial Sequence: Synthetic oligonucleotide
uucuccaugugcaagaccc

SEQ ID NO: 1111096 - RNA, 19 nt, Artificial Sequence
  Description of Artificial Sequence: Synthetic oligonucleotide
acaauaacauccccguugc

SEQ ID NO: 1111097 - RNA, 19 nt, Artificial Sequence
  Description of Artificial Sequence: Synthetic oligonucleotide
ugugaaacuacuauacaga

SEQ ID NO: 1111098 - RNA, 19 nt, Artificial Sequence
  Description of Artificial Sequence: Synthetic oligonucleotide
ugaauaaugcucaaaugac

SEQ ID NO: 1111099 - RNA, 19 nt, Artificial Sequence
  Description of Artificial Sequence: Synthetic oligonucleotide
cauuauguauuuaaccagg

SEQ ID NO: 1111100 - RNA, 19 nt, Artificial Sequence
  Description of Artificial Sequence: Synthetic oligonucleotide
ucuggugcaaaauaaggcc

SEQ ID NO: 1111101 - RNA, 19 nt, Artificial Sequence
  Description of Artificial Sequence: Synthetic oligonucleotide
gguauuaguaaguacgugg

SEQ ID NO: 1111102 - RNA, 19 nt, Artificial Sequence
  Description of Artificial Sequence: Synthetic oligonucleotide
aauaagaugugagcugcgc

SEQ ID NO: 1111103 - RNA, 19 nt, Artificial Sequence
  Description of Artificial Sequence: Synthetic oligonucleotide
ugugaacuaugacugaaag

SEQ ID NO: 1111104 - RNA, 19 nt, Artificial Sequence
  Description of Artificial Sequence: Synthetic oligonucleotide
auaagugaaaucuggucuc

SEQ ID NO: 1111105 - RNA, 19 nt, Artificial Sequence
  Description of Artificial Sequence: Synthetic oligonucleotide
uggauuauaguacaaacuu

SEQ ID NO: 1111106 - RNA, 19 nt, Artificial Sequence
  Description of Artificial Sequence: Synthetic oligonucleotide
guacuaggcacuaagaggg

SEQ ID NO: 1111107 - RNA, 19 nt, Artificial Sequence
  Description of Artificial Sequence: Synthetic oligonucleotide
ugagaaguagacauggccu

SEQ ID NO: 1111108 - RNA, 19 nt, Artificial Sequence
  Description of Artificial Sequence: Synthetic oligonucleotide
uaaugcucaaaugacaacc

SEQ ID NO: 1111109 - RNA, 19 nt, Artificial Sequence
  Description of Artificial Sequence: Synthetic oligonucleotide
aaccaggucauaauuacac

SEQ ID NO: 1111110 - RNA, 19 nt, Artificial Sequence
  Description of Artificial Sequence: Synthetic oligonucleotide
ugauggaucaagaagccac

SEQ ID NO: 1111111 - RNA, 19 nt, Artificial Sequence
  Description of Artificial Sequence: Synthetic oligonucleotide
auaagaugugagcugcgcc

SEQ ID NO: 1111112 - RNA, 19 nt, Artificial Sequence
  Description of Artificial Sequence: Synthetic oligonucleotide
uacuacacacauuacacug

SEQ ID NO: 1111113 - RNA, 19 nt, Artificial Sequence
  Description of Artificial Sequence: Synthetic oligonucleotide
uuauaguacaaacuugaaa

SEQ ID NO: 1111114 - RNA, 19 nt, Artificial Sequence
  Description of Artificial Sequence: Synthetic oligonucleotide
aaucaucccaugcacuauc

SEQ ID NO: 1111115 - RNA, 19 nt, Artificial Sequence
  Description of Artificial Sequence: Synthetic oligonucleotide
cuuagaugcugaaugagac

SEQ ID NO: 1111116 - RNA, 19 nt, Artificial Sequence
  Description of Artificial Sequence: Synthetic oligonucleotide
guagacauggccuuauaag

SEQ ID NO: 1111117 - RNA, 19 nt, Artificial Sequence
  Description of Artificial Sequence: Synthetic oligonucleotide
ugaaaguuaacugcucagg

SEQ ID NO: 1111118 - RNA, 19 nt, Artificial Sequence
  Description of Artificial Sequence: Synthetic oligonucleotide
gauuauaguacaaacuuga

SEQ ID NO: 1111119 - RNA, 19 nt, Artificial Sequence
  Description of Artificial Sequence: Synthetic oligonucleotide
aauaaggccugauuucuga

SEQ ID NO: 1111120 - RNA, 19 nt, Artificial Sequence
  Description of Artificial Sequence: Synthetic oligonucleotide
  modified_base (5)..(5): a, c, u, g, unknown or other
aagancuugaugugaggug

SEQ ID NO: 1111121 - RNA, 19 nt, Artificial Sequence
  Description of Artificial Sequence: Synthetic oligonucleotide
aaugugaaacuacuauaca

SEQ ID NO: 1111122 - RNA, 19 nt, Artificial Sequence
  Description of Artificial Sequence: Synthetic oligonucleotide
cugaauaaugcucaaauga

SEQ ID NO: 1111123 - RNA, 19 nt, Artificial Sequence
  Description of Artificial Sequence: Synthetic oligonucleotide
uuaaccaggucauaauuac

SEQ ID NO: 1111124 - RNA, 19 nt, Artificial Sequence
  Description of Artificial Sequence: Synthetic oligonucleotide
aauaaugcucaaaugacaa

SEQ ID NO: 1111125 - RNA, 19 nt, Artificial Sequence
  Description of Artificial Sequence: Synthetic oligonucleotide
aguacguggauuauaguac

SEQ ID NO: 1111126 - RNA, 19 nt, Artificial Sequence
  Description of Artificial Sequence: Synthetic oligonucleotide
uguaggaucagaccugugu

SEQ ID NO: 1111127 - RNA, 19 nt, Artificial Sequence
  Description of Artificial Sequence: Synthetic oligonucleotide
uuauaagugaaaucugguc

SEQ ID NO: 1111128 - RNA, 19 nt, Artificial Sequence
  Description of Artificial Sequence: Synthetic oligonucleotide
ucuuagaugcugaaugaga

SEQ ID NO: 1111129 - RNA, 19 nt, Artificial Sequence
  Description of Artificial Sequence: Synthetic oligonucleotide
agcuuuacuacacacauua

SEQ ID NO: 1111130 - RNA, 19 nt, Artificial Sequence
  Description of Artificial Sequence: Synthetic oligonucleotide
ugcugaauaaugcucaaau

SEQ ID NO: 1111131 - RNA, 19 nt, Artificial Sequence
  Description of Artificial Sequence: Synthetic oligonucleotide
uagacauggccuuauaagu

SEQ ID NO: 1111132 - RNA, 19 nt, Artificial Sequence
  Description of Artificial Sequence: Synthetic oligonucleotide
gagauuuaugcuugguugc

SEQ ID NO: 1111133 - RNA, 19 nt, Artificial Sequence
  Description of Artificial Sequence: Synthetic oligonucleotide
aaggccugauuucugacug

SEQ ID NO: 1111134 - RNA, 19 nt, Artificial Sequence
  Description of Artificial Sequence: Synthetic oligonucleotide
  modified_base (10)..(10): a, c, u, g, unknown or other
uaaggaagancuugaugug

SEQ ID NO: 1111135 - RNA, 19 nt, Artificial Sequence
  Description of Artificial Sequence: Synthetic oligonucleotide
uuaguaaguacguggauua

SEQ ID NO: 1111136 - RNA, 19 nt, Artificial Sequence
  Description of Artificial Sequence: Synthetic oligonucleotide
uuucuaaucugcccagaag

SEQ ID NO: 1111137 - RNA, 19 nt, Artificial Sequence
  Description of Artificial Sequence: Synthetic oligonucleotide
auaaugcucaaaugacaac

SEQ ID NO: 1111138 - RNA, 19 nt, Artificial Sequence
  Description of Artificial Sequence: Synthetic oligonucleotide
uguggaaguucccugcugc

SEQ ID NO: 1111139 - RNA, 19 nt, Artificial Sequence
  Description of Artificial Sequence: Synthetic oligonucleotide
guaaguacguggauuauag

SEQ ID NO: 1111140 - RNA, 19 nt, Artificial Sequence
  Description of Artificial Sequence: Synthetic oligonucleotide
uacugcugaauaaugcuca

SEQ ID NO: 1111141 - RNA, 19 nt, Artificial Sequence
  Description of Artificial Sequence: Synthetic oligonucleotide
ggugucaccauccagggag

SEQ ID NO: 1111142 - RNA, 19 nt, Artificial Sequence
  Description of Artificial Sequence: Synthetic oligonucleotide
aaauuacagagcaagguau

SEQ ID NO: 1111143 - RNA, 19 nt, Artificial Sequence
  Description of Artificial Sequence: Synthetic oligonucleotide
cugagaaguagacauggcc

SEQ ID NO: 1111144 - RNA, 19 nt, Artificial Sequence
  Description of Artificial Sequence: Synthetic oligonucleotide
ugcaaaauaaggccugcac

SEQ ID NO: 1111145 - RNA, 19 nt, Artificial Sequence
  Description of Artificial Sequence: Synthetic oligonucleotide
ggagauuuaugcuugguug

SEQ ID NO: 1111146 - RNA, 19 nt, Artificial Sequence
  Description of Artificial Sequence: Synthetic oligonucleotide
auacaauuguuacaguuau

SEQ ID NO: 1111147 - RNA, 19 nt, Artificial Sequence
  Description of Artificial Sequence: Synthetic oligonucleotide
ugucuaaugaggcucgauc

SEQ ID NO: 1111148 - RNA, 19 nt, Artificial Sequence
  Description of Artificial Sequence: Synthetic oligonucleotide
gaaggaguaggacucugag

SEQ ID NO: 1111149 - RNA, 19 nt, Artificial Sequence
  Description of Artificial Sequence: Synthetic oligonucleotide
uauuucucaggccuguuau

SEQ ID NO: 1111150 - RNA, 19 nt, Artificial Sequence
  Description of Artificial Sequence: Synthetic oligonucleotide
aacuacuauacagacuucu

SEQ ID NO: 1111151 - RNA, 19 nt, Artificial Sequence
  Description of Artificial Sequence: Synthetic oligonucleotide
auaguacaaacuugaaagu

SEQ ID NO: 1111152 - RNA, 19 nt, Artificial Sequence
  Description of Artificial Sequence: Synthetic oligonucleotide
auuuaugccgucucucuug

SEQ ID NO: 1111153 - RNA, 19 nt, Artificial Sequence
  Description of Artificial Sequence: Synthetic oligonucleotide
aaauaaggccugcacucug

SEQ ID NO: 1111154 - RNA, 19 nt, Artificial Sequence
  Description of Artificial Sequence: Synthetic oligonucleotide
uguuacaguuauuaucccu

SEQ ID NO: 1111155 - RNA, 19 nt, Artificial Sequence
  Description of Artificial Sequence: Synthetic oligonucleotide
auaacauccccguugcacu

SEQ ID NO: 1111156 - RNA, 19 nt, Artificial Sequence
  Description of Artificial Sequence: Synthetic oligonucleotide
ugccuuucuaaucugccca

SEQ ID NO: 1111157 - RNA, 19 nt, Artificial Sequence
  Description of Artificial Sequence: Synthetic oligonucleotide
ugugcaagacccacaauaa

SEQ ID NO: 1111158 - RNA, 19 nt, Artificial Sequence
  Description of Artificial Sequence: Synthetic oligonucleotide
ugaaugagaccaguguucc

SEQ ID NO: 1111159 - RNA, 19 nt, Artificial Sequence
  Description of Artificial Sequence: Synthetic oligonucleotide
ucggguuucuccaugugca

SEQ ID NO: 1111160 - RNA, 19 nt, Artificial Sequence
  Description of Artificial Sequence: Synthetic oligonucleotide
cuuuacuacacacauuaca

SEQ ID NO: 1111161 - RNA, 19 nt, Artificial Sequence
  Description of Artificial Sequence: Synthetic oligonucleotide
ugcagugauacaauuguua

SEQ ID NO: 1111162 - RNA, 19 nt, Artificial Sequence
  Description of Artificial Sequence: Synthetic oligonucleotide
ugcucaguacuguacuagg

SEQ ID NO: 1111163 - RNA, 19 nt, Artificial Sequence
  Description of Artificial Sequence: Synthetic oligonucleotide
uacuauacagacuucuaua

SEQ ID NO: 1111164 - RNA, 19 nt, Artificial Sequence
  Description of Artificial Sequence: Synthetic oligonucleotide
ucuaaucugcccagaaggu

SEQ ID NO: 1111165 - RNA, 19 nt, Artificial Sequence
  Description of Artificial Sequence: Synthetic oligonucleotide
aaccuaaagcuuuuccuaa

SEQ ID NO: 1111166 - RNA, 19 nt, Artificial Sequence
  Description of Artificial Sequence: Synthetic oligonucleotide
ccuuauaagugaaaucugg

SEQ ID NO: 1111167 - RNA, 19 nt, Artificial Sequence
  Description of Artificial Sequence: Synthetic oligonucleotide
auaaggccugauuucugac

SEQ ID NO: 1111168 - RNA, 19 nt, Artificial Sequence
  Description of Artificial Sequence: Synthetic oligonucleotide
uuaugcuugguugccacag

SEQ ID NO: 1111169 - RNA, 19 nt, Artificial Sequence
  Description of Artificial Sequence: Synthetic oligonucleotide
  modified_base (4)..(4): a, c, u, g, unknown or other
agancuugaugugagguga

SEQ ID NO: 1111170 - RNA, 19 nt, Artificial Sequence
  Description of Artificial Sequence: Synthetic oligonucleotide
ucucuacugcugaauaaug

SEQ ID NO: 1111171 - RNA, 19 nt, Artificial Sequence
  Description of Artificial Sequence: Synthetic oligonucleotide
uuacuacacacauuacacu

SEQ ID NO: 1111172 - RNA, 19 nt, Artificial Sequence
  Description of Artificial Sequence: Synthetic oligonucleotide
guuauuaucccugcccucc

SEQ ID NO: 1111173 - RNA, 19 nt, Artificial Sequence
  Description of Artificial Sequence: Synthetic oligonucleotide
auaagagacacagccaugu

SEQ ID NO: 1111174 - RNA, 19 nt, Artificial Sequence
  Description of Artificial Sequence: Synthetic oligonucleotide
uuacaguuauuaucccugc

SEQ ID NO: 1111175 - RNA, 19 nt, Artificial Sequence
  Description of Artificial Sequence: Synthetic oligonucleotide
  modified_base (9)..(9): a, c, u, g, unknown or other
aaggaagancuugauguga

SEQ ID NO: 1111176 - RNA, 19 nt, Artificial Sequence
  Description of Artificial Sequence: Synthetic oligonucleotide
auaauguaaucaucccaug

SEQ ID NO: 1111177 - RNA, 19 nt, Artificial Sequence
  Description of Artificial Sequence: Synthetic oligonucleotide
gaauaaugcucaaaugaca

SEQ ID NO: 1111178 - RNA, 19 nt, Artificial Sequence
  Description of Artificial Sequence: Synthetic oligonucleotide
aaggucucggguuucucca

SEQ ID NO: 1111179 - RNA, 19 nt, Artificial Sequence
  Description of Artificial Sequence: Synthetic oligonucleotide
uaagagggugcagugauac

SEQ ID NO: 1111180 - RNA, 19 nt, Artificial Sequence
  Description of Artificial Sequence: Synthetic oligonucleotide
cuauucagauccuucugug

SEQ ID NO: 1111181 - RNA, 19 nt, Artificial Sequence
  Description of Artificial Sequence: Synthetic oligonucleotide
gagaccaguguucccauug

SEQ ID NO: 1111182 - RNA, 19 nt, Artificial Sequence
  Description of Artificial Sequence: Synthetic oligonucleotide
aguuauuaucccugcccuc

SEQ ID NO: 1111183 - RNA, 19 nt, Artificial Sequence
  Description of Artificial Sequence: Synthetic oligonucleotide
uucuuagaugcugaaugag

SEQ ID NO: 1111184 - RNA, 19 nt, Artificial Sequence
  Description of Artificial Sequence: Synthetic oligonucleotide
acuaagagggugcagugau

SEQ ID NO: 1111185 - RNA, 19 nt, Artificial Sequence
  Description of Artificial Sequence: Synthetic oligonucleotide
uaaacaccuacugugugcu

SEQ ID NO: 1111186 - RNA, 19 nt, Artificial Sequence
  Description of Artificial Sequence: Synthetic oligonucleotide
ucuaaugaggcucgaucuc

SEQ ID NO: 1111187 - RNA, 19 nt, Artificial Sequence
  Description of Artificial Sequence: Synthetic oligonucleotide
aaacuccugugguuucagg

SEQ ID NO: 1111188 - RNA, 19 nt, Artificial Sequence
  Description of Artificial Sequence: Synthetic oligonucleotide
  modified_base (2)..(2): a, c, u, g, unknown or other
ancuugaugugaggugaac

SEQ ID NO: 1111189 - RNA, 19 nt, Artificial Sequence
  Description of Artificial Sequence: Synthetic oligonucleotide
uguccaaugaggugugaac

SEQ ID NO: 1111190 - RNA, 19 nt, Artificial Sequence
  Description of Artificial Sequence: Synthetic oligonucleotide
uacaaaugugaaacuacua

SEQ ID NO: 1111191 - RNA, 19 nt, Artificial Sequence
  Description of Artificial Sequence: Synthetic oligonucleotide
aacaccuacugugugcuca

SEQ ID NO: 1111192 - RNA, 19 nt, Artificial Sequence
  Description of Artificial Sequence: Synthetic oligonucleotide
gacauggccuuauaaguga

SEQ ID NO: 1111193 - RNA, 19 nt, Artificial Sequence
  Description of Artificial Sequence: Synthetic oligonucleotide
uuuaugccgucucucuugu

SEQ ID NO: 1111194 - RNA, 19 nt, Artificial Sequence
  Description of Artificial Sequence: Synthetic oligonucleotide
uuguguggaaguucccugc

SEQ ID NO: 1111195 - RNA, 19 nt, Artificial Sequence
  Description of Artificial Sequence: Synthetic oligonucleotide
ucugagaaguagacauggc

SEQ ID NO: 1111196 - RNA, 19 nt, Artificial Sequence
  Description of Artificial Sequence: Synthetic oligonucleotide
agaagauauuaccuguuuu

SEQ ID NO: 1111197 - RNA, 19 nt, Artificial Sequence
  Description of Artificial Sequence: Synthetic oligonucleotide
uauucuccaauggcgaaca

SEQ ID NO: 1111198 - RNA, 19 nt, Artificial Sequence
  Description of Artificial Sequence: Synthetic oligonucleotide
agaagucuagcugucaccu

SEQ ID NO: 1111199 - RNA, 19 nt, Artificial Sequence
  Description of Artificial Sequence: Synthetic oligonucleotide
auuaguaaguacguggauu

SEQ ID NO: 1111200 - RNA, 19 nt, Artificial Sequence
  Description of Artificial Sequence: Synthetic oligonucleotide
ugaugugaggugaacucaa

SEQ ID NO: 1111201 - RNA, 19 nt, Artificial Sequence
  Description of Artificial Sequence: Synthetic oligonucleotide
uaaccaggucauaauuaca

SEQ ID NO: 1111202 - RNA, 19 nt, Artificial Sequence
  Description of Artificial Sequence: Synthetic oligonucleotide
auacaaaugugaaacuacu

SEQ ID NO: 1111203 - RNA, 19 nt, Artificial Sequence
  Description of Artificial Sequence: Synthetic oligonucleotide
aguagacauggccuuauaa

SEQ ID NO: 1111204 - RNA, 19 nt, Artificial Sequence
  Description of Artificial Sequence: Synthetic oligonucleotide
uauuaguaaguacguggau

SEQ ID NO: 1111205 - RNA, 19 nt, Artificial Sequence
  Description of Artificial Sequence: Synthetic oligonucleotide
agugauagcgcuucacuuu

SEQ ID NO: 1111206 - RNA, 19 nt, Artificial Sequence
  Description of Artificial Sequence: Synthetic oligonucleotide
uggagauuuaugcuugguu

SEQ ID NO: 1111207 - RNA, 19 nt, Artificial Sequence
  Description of Artificial Sequence: Synthetic oligonucleotide
agcuguuuguccacguggc

SEQ ID NO: 1111208 - RNA, 19 nt, Artificial Sequence
  Description of Artificial Sequence: Synthetic oligonucleotide
aacuuccuuucugggaagg

SEQ ID NO: 1111209 - RNA, 19 nt, Artificial Sequence
  Description of Artificial Sequence: Synthetic oligonucleotide
cauaauguaaucaucccau

SEQ ID NO: 1111210 - RNA, 19 nt, Artificial Sequence
  Description of Artificial Sequence: Synthetic oligonucleotide
uguuaucucuauucagauc

SEQ ID NO: 1111211 - RNA, 19 nt, Artificial Sequence
  Description of Artificial Sequence: Synthetic oligonucleotide
gugauagcgcuucacuuug

SEQ ID NO: 1111212 - RNA, 19 nt, Artificial Sequence
  Description of Artificial Sequence: Synthetic oligonucleotide
uaaugaggcucgaucucug

SEQ ID NO: 1111213 - RNA, 19 nt, Artificial Sequence
  Description of Artificial Sequence: Synthetic oligonucleotide
uuguuacaguuauuauccc

SEQ ID NO: 1111214 - RNA, 19 nt, Artificial Sequence
  Description of Artificial Sequence: Synthetic oligonucleotide
aaugaggcucgaucucuga

SEQ ID NO: 1111215 - RNA, 19 nt, Artificial Sequence
  Description of Artificial Sequence: Synthetic oligonucleotide
auggccaauaagaugugag

SEQ ID NO: 1111216 - RNA, 19 nt, Artificial Sequence
  Description of Artificial Sequence: Synthetic oligonucleotide
  modified_base (8)..(8): a, c, u, g, unknown or other
aggaagancuugaugugag

SEQ ID NO: 1111217 - RNA, 19 nt, Artificial Sequence
  Description of Artificial Sequence: Synthetic oligonucleotide
gcagugauacaauuguuac

SEQ ID NO: 1111218 - RNA, 19 nt, Artificial Sequence
  Description of Artificial Sequence: Synthetic oligonucleotide
uucucuacugcugaauaau

SEQ ID NO: 1111219 - RNA, 19 nt, Artificial Sequence
  Description of Artificial Sequence: Synthetic oligonucleotide
  modified_base (7)..(7): a, c, u, g, unknown or other
ggaagancuugaugugagg

SEQ ID NO: 1111220 - RNA, 19 nt, Artificial Sequence
  Description of Artificial Sequence: Synthetic oligonucleotide
uuauuaucccugcccucca

SEQ ID NO: 1111221 - RNA, 19 nt, Artificial Sequence
  Description of Artificial Sequence: Synthetic oligonucleotide
agaacauguuucuguauuu

SEQ ID NO: 1111222 - RNA, 19 nt, Artificial Sequence
  Description of Artificial Sequence: Synthetic oligonucleotide
aagugaaaucuggucucuc

SEQ ID NO: 1111223 - RNA, 19 nt, Artificial Sequence
  Description of Artificial Sequence: Synthetic oligonucleotide
uuuaugcuugguugccaca

SEQ ID NO: 1111224 - RNA, 19 nt, Artificial Sequence
  Description of Artificial Sequence: Synthetic oligonucleotide
cucgaauaagagacacagc

SEQ ID NO: 1111225 - RNA, 19 nt, Artificial Sequence
  Description of Artificial Sequence: Synthetic oligonucleotide
aaacaccuacugugugcuc

SEQ ID NO: 1111226 - RNA, 19 nt, Artificial Sequence
  Description of Artificial Sequence: Synthetic oligonucleotide
acccacaauaacauccccg

SEQ ID NO: 1111227 - RNA, 19 nt, Artificial Sequence
  Description of Artificial Sequence: Synthetic oligonucleotide
aguuaacugcucaggcagc

SEQ ID NO: 1111228 - RNA, 19 nt, Artificial Sequence
  Description of Artificial Sequence: Synthetic oligonucleotide
uccccguugcacuuagcag

SEQ ID NO: 1111229 - RNA, 19 nt, Artificial Sequence
  Description of Artificial Sequence: Synthetic oligonucleotide
auccccguugcacuuagca

SEQ ID NO: 1111230 - RNA, 19 nt, Artificial Sequence
  Description of Artificial Sequence: Synthetic oligonucleotide
acuugaaaguuaacugcuc

SEQ ID NO: 1111231 - RNA, 19 nt, Artificial Sequence
  Description of Artificial Sequence: Synthetic oligonucleotide
agacauggccuuauaagug

SEQ ID NO: 1111232 - RNA, 19 nt, Artificial Sequence
  Description of Artificial Sequence: Synthetic oligonucleotide
cuugcagugauagcgcuuc

SEQ ID NO: 1111233 - RNA, 19 nt, Artificial Sequence
  Description of Artificial Sequence: Synthetic oligonucleotide
aagggcugaccuguaacug

SEQ ID NO: 1111234 - RNA, 19 nt, Artificial Sequence
  Description of Artificial Sequence: Synthetic oligonucleotide
caggagccuaaacauaaug

SEQ ID NO: 1111235 - RNA, 19 nt, Artificial Sequence
  Description of Artificial Sequence: Synthetic oligonucleotide
  modified_base (6)..(6): a, c, u, g, unknown or other
gaagancuugaugugaggu

SEQ ID NO: 1111236 - RNA, 19 nt, Artificial Sequence
  Description of Artificial Sequence: Synthetic oligonucleotide
cucuauucagauccuucug

SEQ ID NO: 1111237 - RNA, 19 nt, Artificial Sequence
  Description of Artificial Sequence: Synthetic oligonucleotide
aaacuacuauacagacuuc

SEQ ID NO: 1111238 - RNA, 19 nt, Artificial Sequence
  Description of Artificial Sequence: Synthetic oligonucleotide
gaacauguuucuguauuuc

SEQ ID NO: 1111239 - RNA, 19 nt, Artificial Sequence
  Description of Artificial Sequence: Synthetic oligonucleotide
guacguggauuauaguaca

SEQ ID NO: 1111240 - RNA, 19 nt, Artificial Sequence
  Description of Artificial Sequence: Synthetic oligonucleotide
ggauuauaguacaaacuug

SEQ ID NO: 1111241 - RNA, 19 nt, Artificial Sequence
  Description of Artificial Sequence: Synthetic oligonucleotide
caucccaugcacuaucaca

SEQ ID NO: 1111242 - RNA, 19 nt, Artificial Sequence
  Description of Artificial Sequence: Synthetic oligonucleotide
cuuauaagugaaaucuggu

SEQ ID NO: 1111243 - RNA, 19 nt, Artificial Sequence
  Description of Artificial Sequence: Synthetic oligonucleotide
uccaugugcaagacccaca

SEQ ID NO: 1111244 - RNA, 19 nt, Artificial Sequence
  Description of Artificial Sequence: Synthetic oligonucleotide
agagggugcagugauacaa

SEQ ID NO: 1111245 - RNA, 19 nt, Artificial Sequence
  Description of Artificial Sequence: Synthetic oligonucleotide
aacccugcagugagaaguc

SEQ ID NO: 1111246 - RNA, 19 nt, Artificial Sequence
  Description of Artificial Sequence: Synthetic oligonucleotide
gagccuaaacauaauguaa

SEQ ID NO: 1111247 - RNA, 19 nt, Artificial Sequence
  Description of Artificial Sequence: Synthetic oligonucleotide
caaugaggugugaacuaug

SEQ ID NO: 1111248 - RNA, 19 nt, Artificial Sequence
  Description of Artificial Sequence: Synthetic oligonucleotide
aucaggagccuaaacauaa

SEQ ID NO: 1111249 - RNA, 19 nt, Artificial Sequence
  Description of Artificial Sequence: Synthetic oligonucleotide
agugagaagucuagcuguc

SEQ ID NO: 1111250 - RNA, 19 nt, Artificial Sequence
  Description of Artificial Sequence: Synthetic oligonucleotide
caauaaggccugauuucug

SEQ ID NO: 1111251 - RNA, 19 nt, Artificial Sequence
  Description of Artificial Sequence: Synthetic oligonucleotide
uucccugcugccuuucuaa

SEQ ID NO: 1111252 - RNA, 19 nt, Artificial Sequence
  Description of Artificial Sequence: Synthetic oligonucleotide
gucuaaugaggcucgaucu

SEQ ID NO: 1111253 - RNA, 19 nt, Artificial Sequence
  Description of Artificial Sequence: Synthetic oligonucleotide
cagagcaagguauuaguaa

SEQ ID NO: 1111254 - RNA, 19 nt, Artificial Sequence
  Description of Artificial Sequence: Synthetic oligonucleotide
gccaauaagaugugagcug

SEQ ID NO: 1111255 - RNA, 19 nt, Artificial Sequence
  Description of Artificial Sequence: Synthetic oligonucleotide
uccuaaacuccugugguuu

SEQ ID NO: 1111256 - RNA, 19 nt, Artificial Sequence
  Description of Artificial Sequence: Synthetic oligonucleotide
aggaucagaccuguguucu

SEQ ID NO: 1111257 - RNA, 19 nt, Artificial Sequence
  Description of Artificial Sequence: Synthetic oligonucleotide
agggcugaccuguaacuga

SEQ ID NO: 1111258 - RNA, 19 nt, Artificial Sequence
  Description of Artificial Sequence: Synthetic oligonucleotide
aagaagggcugaccuguaa

SEQ ID NO: 1111259 - RNA, 19 nt, Artificial Sequence
  Description of Artificial Sequence: Synthetic oligonucleotide
aagagggugcagugauaca

SEQ ID NO: 1111260 - RNA, 19 nt, Artificial Sequence
  Description of Artificial Sequence: Synthetic oligonucleotide
uacguggauuauaguacaa

SEQ ID NO: 1111261 - RNA, 19 nt, Artificial Sequence
  Description of Artificial Sequence: Synthetic oligonucleotide
agguauuaguaaguacgug

SEQ ID NO: 1111262 - RNA, 19 nt, Artificial Sequence
  Description of Artificial Sequence: Synthetic oligonucleotide
gauauccugaugggaaaga

SEQ ID NO: 1111263 - RNA, 19 nt, Artificial Sequence
  Description of Artificial Sequence: Synthetic oligonucleotide
uguucccauugaaagcuuu

SEQ ID NO: 1111264 - RNA, 19 nt, Artificial Sequence
  Description of Artificial Sequence: Synthetic oligonucleotide
cugguguaggaucagaccu

SEQ ID NO: 1111265 - RNA, 19 nt, Artificial Sequence
  Description of Artificial Sequence: Synthetic oligonucleotide
auuauaguacaaacuugaa

SEQ ID NO: 1111266 - RNA, 19 nt, Artificial Sequence
  Description of Artificial Sequence: Synthetic oligonucleotide
auguauucuuagaugcuga

SEQ ID NO: 1111267 - RNA, 19 nt, Artificial Sequence
  Description of Artificial Sequence: Synthetic oligonucleotide
ggugcagugauacaauugu

SEQ ID NO: 1111268 - RNA, 19 nt, Artificial Sequence
  Description of Artificial Sequence: Synthetic oligonucleotide
ggccuuauaagugaaaucu

SEQ ID NO: 1111269 - RNA, 19 nt, Artificial Sequence
  Description of Artificial Sequence: Synthetic oligonucleotide
gacccacaauaacaucccc

SEQ ID NO: 1111270 - RNA, 19 nt, Artificial Sequence
  Description of Artificial Sequence: Synthetic oligonucleotide
ggagccuaaacauaaugua

SEQ ID NO: 1111271 - RNA, 19 nt, Artificial Sequence
  Description of Artificial Sequence: Synthetic oligonucleotide
acuaggcacuaagagggug

SEQ ID NO: 1111272 - RNA, 19 nt, Artificial Sequence
  Description of Artificial Sequence: Synthetic oligonucleotide
ccuguuaucucuauucaga

SEQ ID NO: 1111273 - RNA, 19 nt, Artificial Sequence
  Description of Artificial Sequence: Synthetic oligonucleotide
ugugcucaguacuguacua

SEQ ID NO: 1111274 - RNA, 19 nt, Artificial Sequence
  Description of Artificial Sequence: Synthetic oligonucleotide
aguaaguacguggauuaua

SEQ ID NO: 1111275 - RNA, 19 nt, Artificial Sequence
  Description of Artificial Sequence: Synthetic oligonucleotide
caagacccacaauaacauc

SEQ ID NO: 1111276 - RNA, 19 nt, Artificial Sequence
  Description of Artificial Sequence: Synthetic oligonucleotide
accuaaagcuuuuccuaaa

SEQ ID NO: 1111277 - RNA, 19 nt, Artificial Sequence
  Description of Artificial Sequence: Synthetic oligonucleotide
agcaagguauuaguaagua

SEQ ID NO: 1111278 - RNA, 19 nt, Artificial Sequence
  Description of Artificial Sequence: Synthetic oligonucleotide
gcaagguauuaguaaguac

SEQ ID NO: 1111279 - RNA, 19 nt, Artificial Sequence
  Description of Artificial Sequence: Synthetic oligonucleotide
uacuaggcacuaagagggu

SEQ ID NO: 1111280 - RNA, 19 nt, Artificial Sequence
  Description of Artificial Sequence: Synthetic oligonucleotide
gaucaagaagccacuccuc

SEQ ID NO: 1111281 - RNA, 19 nt, Artificial Sequence
  Description of Artificial Sequence: Synthetic oligonucleotide
uuccuaaacuccugugguu

SEQ ID NO: 1111282 - RNA, 19 nt, Artificial Sequence
  Description of Artificial Sequence: Synthetic oligonucleotide
gaggcucgaucucugaaua

SEQ ID NO: 1111283 - RNA, 19 nt, Artificial Sequence
  Description of Artificial Sequence: Synthetic oligonucleotide
auauccugaugggaaagaa

SEQ ID NO: 1111284 - RNA, 19 nt, Artificial Sequence
  Description of Artificial Sequence: Synthetic oligonucleotide
guggauuauaguacaaacu

SEQ ID NO: 1111285 - RNA, 19 nt, Artificial Sequence
  Description of Artificial Sequence: Synthetic oligonucleotide
cuucugugauggaucaaga

SEQ ID NO: 1111286 - RNA, 19 nt, Artificial Sequence
  Description of Artificial Sequence: Synthetic oligonucleotide
acugcugaauaaugcucaa

SEQ ID NO: 1111287 - RNA, 19 nt, Artificial Sequence
  Description of Artificial Sequence: Synthetic oligonucleotide
uaaucaucccaugcacuau

SEQ ID NO: 1111288 - RNA, 19 nt, Artificial Sequence
  Description of Artificial Sequence: Synthetic oligonucleotide
uggaaguucccugcugccu

SEQ ID NO: 1111289 - RNA, 19 nt, Artificial Sequence
  Description of Artificial Sequence: Synthetic oligonucleotide
ccuacugugugcucaguac

SEQ ID NO: 1111290 - RNA, 19 nt, Artificial Sequence
  Description of Artificial Sequence: Synthetic oligonucleotide
ggcagcacagaauaaggaa

SEQ ID NO: 1111291 - RNA, 19 nt, Artificial Sequence
  Description of Artificial Sequence: Synthetic oligonucleotide
ggaucaagaagccacuccu

SEQ ID NO: 1111292 - RNA, 19 nt, Artificial Sequence
  Description of Artificial Sequence: Synthetic oligonucleotide
aguacuguacuaggcacua

SEQ ID NO: 1111293 - RNA, 19 nt, Artificial Sequence
  Description of Artificial Sequence: Synthetic oligonucleotide
gcaaaauaaggccugcacu

SEQ ID NO: 1111294 - RNA, 19 nt, Artificial Sequence
  Description of Artificial Sequence: Synthetic oligonucleotide
ugauagcgcuucacuuugu

SEQ ID NO: 1111295 - RNA, 19 nt, Artificial Sequence
  Description of Artificial Sequence: Synthetic oligonucleotide
guuaacugcucaggcagca

SEQ ID NO: 1111296 - RNA, 19 nt, Artificial Sequence
  Description of Artificial Sequence: Synthetic oligonucleotide
ccagaacuuccuuucuggg

SEQ ID NO: 1111297 - RNA, 19 nt, Artificial Sequence
  Description of Artificial Sequence: Synthetic oligonucleotide
ccuucugugauggaucaag

SEQ ID NO: 1111298 - RNA, 19 nt, Artificial Sequence
  Description of Artificial Sequence: Synthetic oligonucleotide
ugcagugauagcgcuucac

SEQ ID NO: 1111299 - RNA, 19 nt, Artificial Sequence
  Description of Artificial Sequence: Synthetic oligonucleotide
acuuuguuguggauauccu

SEQ ID NO: 1111300 - RNA, 19 nt, Artificial Sequence
  Description of Artificial Sequence: Synthetic oligonucleotide
uaggcacuaagagggugca

SEQ ID NO: 1111301 - RNA, 19 nt, Artificial Sequence
  Description of Artificial Sequence: Synthetic oligonucleotide
caggucauaauuacaccua

SEQ ID NO: 1111302 - RNA, 19 nt, Artificial Sequence
  Description of Artificial Sequence: Synthetic oligonucleotide
cuggugcaaaauaaggccu

SEQ ID NO: 1111303 - RNA, 19 nt, Artificial Sequence
  Description of Artificial Sequence: Synthetic oligonucleotide
ggauauccugaugggaaag

SEQ ID NO: 1111304 - RNA, 19 nt, Artificial Sequence
  Description of Artificial Sequence: Synthetic oligonucleotide
uuaacugcucaggcagcac

SEQ ID NO: 1111305 - RNA, 19 nt, Artificial Sequence
  Description of Artificial Sequence: Synthetic oligonucleotide
caauggcgaacaaggccug

SEQ ID NO: 1111306 - RNA, 19 nt, Artificial Sequence
  Description of Artificial Sequence: Synthetic oligonucleotide
cacuuagcagcuguuuguc

SEQ ID NO: 1111307 - RNA, 19 nt, Artificial Sequence
  Description of Artificial Sequence: Synthetic oligonucleotide
acguggauuauaguacaaa

SEQ ID NO: 1111308 - RNA, 19 nt, Artificial Sequence
  Description of Artificial Sequence: Synthetic oligonucleotide
ugcuugguugccacagguu

SEQ ID NO: 1111309 - RNA, 19 nt, Artificial Sequence
  Description of Artificial Sequence: Synthetic oligonucleotide
augcucaaaugacaaccua

SEQ ID NO: 1111310 - RNA, 19 nt, Artificial Sequence
  Description of Artificial Sequence: Synthetic oligonucleotide
acuacuauacagacuucua

SEQ ID NO: 1111311 - RNA, 19 nt, Artificial Sequence
  Description of Artificial Sequence: Synthetic oligonucleotide
cuacuauacagacuucuau

SEQ ID NO: 1111312 - RNA, 19 nt, Artificial Sequence
  Description of Artificial Sequence: Synthetic oligonucleotide
uacacacauuacacugaua

SEQ ID NO: 1111313 - RNA, 19 nt, Artificial Sequence
  Description of Artificial Sequence: Synthetic oligonucleotide
uccugaucuccagaacuuc

SEQ ID NO: 1111314 - RNA, 19 nt, Artificial Sequence
  Description of Artificial Sequence: Synthetic oligonucleotide
cuccaugugcaagacccac

SEQ ID NO: 1111315 - RNA, 19 nt, Artificial Sequence
  Description of Artificial Sequence: Synthetic oligonucleotide
uaacauccccguugcacuu

SEQ ID NO: 1111316 - RNA, 19 nt, Artificial Sequence
  Description of Artificial Sequence: Synthetic oligonucleotide
caguuauuaucccugcccu

SEQ ID NO: 1111317 - RNA, 19 nt, Artificial Sequence
  Description of Artificial Sequence: Synthetic oligonucleotide
uggugucaccauccaggga

SEQ ID NO: 1111318 - RNA, 19 nt, Artificial Sequence
  Description of Artificial Sequence: Synthetic oligonucleotide
acagagcaagguauuagua

SEQ ID NO: 1111319 - RNA, 19 nt, Artificial Sequence
  Description of Artificial Sequence: Synthetic oligonucleotide
uaucucuauucagauccuu

SEQ ID NO: 1111320 - RNA, 19 nt, Artificial Sequence
  Description of Artificial Sequence: Synthetic oligonucleotide
auguccaaugaggugugaa

SEQ ID NO: 1111321 - RNA, 19 nt, Artificial Sequence
  Description of Artificial Sequence: Synthetic oligonucleotide
gcacuaagagggugcagug

SEQ ID NO: 1111322 - RNA, 19 nt, Artificial Sequence
  Description of Artificial Sequence: Synthetic oligonucleotide
uuaugccgucucucuugug

SEQ ID NO: 1111323 - RNA, 19 nt, Artificial Sequence
  Description of Artificial Sequence: Synthetic oligonucleotide
gcgaacaaggccugaguuc

SEQ ID NO: 1111324 - RNA, 19 nt, Artificial Sequence
  Description of Artificial Sequence: Synthetic oligonucleotide
cuacugugugcucaguacu

SEQ ID NO: 1111325 - RNA, 19 nt, Artificial Sequence
  Description of Artificial Sequence: Synthetic oligonucleotide
ccaauggcgaacaaggccu

SEQ ID NO: 1111326 - RNA, 19 nt, Artificial Sequence
  Description of Artificial Sequence: Synthetic oligonucleotide
cuaaugaggcucgaucucu

SEQ ID NO: 1111327 - RNA, 19 nt, Artificial Sequence
  Description of Artificial Sequence: Synthetic oligonucleotide
gugugcucaguacuguacu

SEQ ID NO: 1111328 - RNA, 19 nt, Artificial Sequence
  Description of Artificial Sequence: Synthetic oligonucleotide
ggucauaauuacaccuaac

SEQ ID NO: 1111329 - RNA, 19 nt, Artificial Sequence
  Description of Artificial Sequence: Synthetic oligonucleotide
gcucaguacuguacuaggc

SEQ ID NO: 1111330 - RNA, 19 nt, Artificial Sequence
  Description of Artificial Sequence: Synthetic oligonucleotide
gggugcagugauacaauug

SEQ ID NO: 1111331 - RNA, 19 nt, Artificial Sequence
  Description of Artificial Sequence: Synthetic oligonucleotide
ccucucgaauaagagacac

SEQ ID NO: 1111332 - RNA, 19 nt, Artificial Sequence
  Description of Artificial Sequence: Synthetic oligonucleotide
  modified_base (3)..(3): a, c, u, g, unknown or other
gancuugaugugaggugaa

SEQ ID NO: 1111333 - RNA, 19 nt, Artificial Sequence
  Description of Artificial Sequence: Synthetic oligonucleotide
augacaaccuaaagcuuuu

SEQ ID NO: 1111334 - RNA, 19 nt, Artificial Sequence
  Description of Artificial Sequence: Synthetic oligonucleotide
uguauuucucaggccuguu

SEQ ID NO: 1111335 - RNA, 19 nt, Artificial Sequence
  Description of Artificial Sequence: Synthetic oligonucleotide
aggccugauuucugacuga

SEQ ID NO: 1111336 - RNA, 19 nt, Artificial Sequence
  Description of Artificial Sequence: Synthetic oligonucleotide
gaugucuaaugaggcucga

SEQ ID NO: 1111337 - RNA, 19 nt, Artificial Sequence
  Description of Artificial Sequence: Synthetic oligonucleotide
ggccaauaagaugugagcu

SEQ ID NO: 1111338 - RNA, 19 nt, Artificial Sequence
  Description of Artificial Sequence: Synthetic oligonucleotide
aggcucgaucucugaauaa

SEQ ID NO: 1111339 - RNA, 19 nt, Artificial Sequence
  Description of Artificial Sequence: Synthetic oligonucleotide
gauagcgcuucacuuuguu

SEQ ID NO: 1111340 - RNA, 19 nt, Artificial Sequence
  Description of Artificial Sequence: Synthetic oligonucleotide
cuacacacauuacacugau

SEQ ID NO: 1111341 - RNA, 19 nt, Artificial Sequence
  Description of Artificial Sequence: Synthetic oligonucleotide
ucccugcugccuuucuaau

SEQ ID NO: 1111342 - RNA, 19 nt, Artificial Sequence
  Description of Artificial Sequence: Synthetic oligonucleotide
aacauccccguugcacuua

SEQ ID NO: 1111343 - RNA, 19 nt, Artificial Sequence
  Description of Artificial Sequence: Synthetic oligonucleotide
gucuagcugucaccuccug

SEQ ID NO: 1111344 - RNA, 19 nt, Artificial Sequence
  Description of Artificial Sequence: Synthetic oligonucleotide
gaaguagacauggccuuau

SEQ ID NO: 1111345 - RNA, 19 nt, Artificial Sequence
  Description of Artificial Sequence: Synthetic oligonucleotide
ggaacccugcagugagaag

SEQ ID NO: 1111346 - RNA, 19 nt, Artificial Sequence
  Description of Artificial Sequence: Synthetic oligonucleotide
ggaucagaccuguguucug

SEQ ID NO: 1111347 - RNA, 19 nt, Artificial Sequence
  Description of Artificial Sequence: Synthetic oligonucleotide
caguacuguacuaggcacu

SEQ ID NO: 1111348 - RNA, 19 nt, Artificial Sequence
  Description of Artificial Sequence: Synthetic oligonucleotide
cacuaagagggugcaguga

SEQ ID NO: 1111349 - RNA, 19 nt, Artificial Sequence
  Description of Artificial Sequence: Synthetic oligonucleotide
ggcucgaucucugaauaaa

SEQ ID NO: 1111350 - RNA, 19 nt, Artificial Sequence
  Description of Artificial Sequence: Synthetic oligonucleotide
cagaagauauuaccuguuu

SEQ ID NO: 1111351 - RNA, 19 nt, Artificial Sequence
  Description of Artificial Sequence: Synthetic oligonucleotide
gauguccaaugagguguga

SEQ ID NO: 1111352 - RNA, 19 nt, Artificial Sequence
  Description of Artificial Sequence: Synthetic oligonucleotide
cagugauagcgcuucacuu

SEQ ID NO: 1111353 - RNA, 19 nt, Artificial Sequence
  Description of Artificial Sequence: Synthetic oligonucleotide
cccacaauaacauccccgu

SEQ ID NO: 1111354 - RNA, 19 nt, Artificial Sequence
  Description of Artificial Sequence: Synthetic oligonucleotide
ggaaggaguaggacucuga

SEQ ID NO: 1111355 - RNA, 19 nt, Artificial Sequence
  Description of Artificial Sequence: Synthetic oligonucleotide
aggcacuaagagggugcag

SEQ ID NO: 1111356 - RNA, 19 nt, Artificial Sequence
  Description of Artificial Sequence: Synthetic oligonucleotide
gcuuuacuacacacauuac

SEQ ID NO: 1111357 - RNA, 19 nt, Artificial Sequence
  Description of Artificial Sequence: Synthetic oligonucleotide
cauccccguugcacuuagc

SEQ ID NO: 1111358 - RNA, 19 nt, Artificial Sequence
  Description of Artificial Sequence: Synthetic oligonucleotide
gaugugaggugaacucaau

SEQ ID NO: 1111359 - RNA, 19 nt, Artificial Sequence
  Description of Artificial Sequence: Synthetic oligonucleotide
cucaggccuguuaucucua

SEQ ID NO: 1111360 - RNA, 19 nt, Artificial Sequence
  Description of Artificial Sequence: Synthetic oligonucleotide
ggggcacuggagauuuaug

SEQ ID NO: 1111361 - RNA, 19 nt, Artificial Sequence
  Description of Artificial Sequence: Synthetic oligonucleotide
guguaggaucagaccugug

SEQ ID NO: 1111362 - RNA, 19 nt, Artificial Sequence
  Description of Artificial Sequence: Synthetic oligonucleotide
gccugcacucugacuaaag

SEQ ID NO: 1111363 - RNA, 19 nt, Artificial Sequence
  Description of Artificial Sequence: Synthetic oligonucleotide
gguguaggaucagaccugu

SEQ ID NO: 1111364 - RNA, 19 nt, Artificial Sequence
  Description of Artificial Sequence: Synthetic oligonucleotide
ccacguggcuggauuccag

SEQ ID NO: 1111365 - RNA, 19 nt, Artificial Sequence
  Description of Artificial Sequence: Synthetic oligonucleotide
gguuucucuacugcugaau

SEQ ID NO: 1111366 - RNA, 19 nt, Artificial Sequence
  Description of Artificial Sequence: Synthetic oligonucleotide
gcuguuuguccacguggcu

SEQ ID NO: 1111367 - RNA, 19 nt, Artificial Sequence
  Description of Artificial Sequence: Synthetic oligonucleotide
gcccagaaggucucggguu

SEQ ID NO: 1111368 - RNA, 19 nt, Artificial Sequence
  Description of Artificial Sequence: Synthetic oligonucleotide
ccaaugaggugugaacuau

SEQ ID NO: 1111369 - RNA, 19 nt, Artificial Sequence
  Description of Artificial Sequence: Synthetic oligonucleotide
gcccuccaggagcuuacaa

SEQ ID NO: 1111370 - RNA, 19 nt, Artificial Sequence
  Description of Artificial Sequence: Synthetic oligonucleotide
gcugcgccugaagguuuuc

SEQ ID NO: 1111371 - RNA, 19 nt, Artificial Sequence
  Description of Artificial Sequence: Synthetic oligonucleotide
ccacaauaacauccccguu

SEQ ID NO: 1111372 - RNA, 19 nt, Artificial Sequence
  Description of Artificial Sequence: Synthetic oligonucleotide
caccuacugugugcucagu

SEQ ID NO: 1111373 - RNA, 19 nt, Artificial Sequence
  Description of Artificial Sequence: Synthetic oligonucleotide
aauauauugaguuaaacuc

SEQ ID NO: 1111374 - RNA, 19 nt, Artificial Sequence
  Description of Artificial Sequence: Synthetic oligonucleotide
aaaguaaacuuguagaugc

SEQ ID NO: 1111375 - RNA, 19 nt, Artificial Sequence
  Description of Artificial Sequence: Synthetic oligonucleotide
ugaaaugccgccuacaugg

SEQ ID NO: 1111376 - RNA, 19 nt, Artificial Sequence
  Description of Artificial Sequence: Synthetic oligonucleotide
ugcacauacugacagagcg

SEQ ID NO: 1111377 - RNA, 19 nt, Artificial Sequence
  Description of Artificial Sequence: Synthetic oligonucleotide
aaaauagugggccucaagu

SEQ ID NO: 1111378 - RNA, 19 nt, Artificial Sequence
  Description of Artificial Sequence: Synthetic oligonucleotide
uguaauaaagccgacugcg

SEQ ID NO: 1111379 - RNA, 19 nt, Artificial Sequence
  Description of Artificial Sequence: Synthetic oligonucleotide
aauagugggccucaaguuc

SEQ ID NO: 1111380 - RNA, 19 nt, Artificial Sequence
  Description of Artificial Sequence: Synthetic oligonucleotide
uuuaguugaaaacaccuga

SEQ ID NO: 1111381 - RNA, 19 nt, Artificial Sequence
  Description of Artificial Sequence: Synthetic oligonucleotide
aaauacaucccaugauugg

SEQ ID NO: 1111382 - RNA, 19 nt, Artificial Sequence
  Description of Artificial Sequence: Synthetic oligonucleotide
uuugggauagaccugguug

SEQ ID NO: 1111383 - RNA, 19 nt, Artificial Sequence
  Description of Artificial Sequence: Synthetic oligonucleotide
aagagaaugguguuccggg

SEQ ID NO: 1111384 - RNA, 19 nt, Artificial Sequence
  Description of Artificial Sequence: Synthetic oligonucleotide
gagucuaugguuuacauuc

SEQ ID NO: 1111385 - RNA, 19 nt, Artificial Sequence
  Description of Artificial Sequence: Synthetic oligonucleotide
aauaaagccgacugcguag

SEQ ID NO: 1111386 - RNA, 19 nt, Artificial Sequence
  Description of Artificial Sequence: Synthetic oligonucleotide
ugaaugucauucuaaaggc

SEQ ID NO: 1111387 - RNA, 19 nt, Artificial Sequence
  Description of Artificial Sequence: Synthetic oligonucleotide
uauauugaguuaaacucag

SEQ ID NO: 1111388 - RNA, 19 nt, Artificial Sequence
  Description of Artificial Sequence: Synthetic oligonucleotide
uacauuugcaacaucuugc

SEQ ID NO: 1111389 - RNA, 19 nt, Artificial Sequence
  Description of Artificial Sequence: Synthetic oligonucleotide
aaacuaaccauacaggauu

SEQ ID NO: 1111390 - RNA, 19 nt, Artificial Sequence
  Description of Artificial Sequence: Synthetic oligonucleotide
acuacaguagagucuaugg

SEQ ID NO: 1111391 - RNA, 19 nt, Artificial Sequence
  Description of Artificial Sequence: Synthetic oligonucleotide
cauucuaaaggcuacaauc

SEQ ID NO: 1111392 - RNA, 19 nt, Artificial Sequence
  Description of Artificial Sequence: Synthetic oligonucleotide
aaaagcgagccugaggagc

SEQ ID NO: 1111393 - RNA, 19 nt, Artificial Sequence
  Description of Artificial Sequence: Synthetic oligonucleotide
ucauguguucccaagaaga

SEQ ID NO: 1111394 - RNA, 19 nt, Artificial Sequence
  Description of Artificial Sequence: Synthetic oligonucleotide
auugcugccgcacauuuac

SEQ ID NO: 1111395 - RNA, 19 nt, Artificial Sequence
  Description of Artificial Sequence: Synthetic oligonucleotide
auaaacaugcuuaaaauca

SEQ ID NO: 1111396 - RNA, 19 nt, Artificial Sequence
  Description of Artificial Sequence: Synthetic oligonucleotide
aagccgacugcguagcugc

SEQ ID NO: 1111397 - RNA, 19 nt, Artificial Sequence
  Description of Artificial Sequence: Synthetic oligonucleotide
auugaguuaaacucagcag

SEQ ID NO: 1111398 - RNA, 19 nt, Artificial Sequence
  Description of Artificial Sequence: Synthetic oligonucleotide
acaggauuauucaauauac

SEQ ID NO: 1111399 - RNA, 19 nt, Artificial Sequence
  Description of Artificial Sequence: Synthetic oligonucleotide
augauuggaaacaugugcc

SEQ ID NO: 1111400 - RNA, 19 nt, Artificial Sequence
  Description of Artificial Sequence: Synthetic oligonucleotide
uauuccacggcccagugca

SEQ ID NO: 1111401 - RNA, 19 nt, Artificial Sequence
  Description of Artificial Sequence: Synthetic oligonucleotide
aaaauuauccuaagccuuc

SEQ ID NO: 1111402 - RNA, 19 nt, Artificial Sequence
  Description of Artificial Sequence: Synthetic oligonucleotide
aguacuguauuccagcuga

SEQ ID NO: 1111403 - RNA, 19 nt, Artificial Sequence
  Description of Artificial Sequence: Synthetic oligonucleotide
uuaaaaucaugccauccac

SEQ ID NO: 1111404 - RNA, 19 nt, Artificial Sequence
  Description of Artificial Sequence: Synthetic oligonucleotide
ucacuuauacaucuguaga

SEQ ID NO: 1111405 - RNA, 19 nt, Artificial Sequence
  Description of Artificial Sequence: Synthetic oligonucleotide
aaacagagcuacccgcagc

SEQ ID NO: 1111406 - RNA, 19 nt, Artificial Sequence
  Description of Artificial Sequence: Synthetic oligonucleotide
auuuacuucagacgaaugu

SEQ ID NO: 1111407 - RNA, 19 nt, Artificial Sequence
  Description of Artificial Sequence: Synthetic oligonucleotide
ucuaaaggcuacaaucagc

SEQ ID NO: 1111408 - RNA, 19 nt, Artificial Sequence
  Description of Artificial Sequence: Synthetic oligonucleotide
ucagacgaauguuugagca

SEQ ID NO: 1111409 - RNA, 19 nt, Artificial Sequence
  Description of Artificial Sequence: Synthetic oligonucleotide
aaauuauccuaagccuucc

SEQ ID NO: 1111410 - RNA, 19 nt, Artificial Sequence
  Description of Artificial Sequence: Synthetic oligonucleotide
ucuaugguuuacauucucc

SEQ ID NO: 1111411 - RNA, 19 nt, Artificial Sequence
  Description of Artificial Sequence: Synthetic oligonucleotide
uuugcaacaucuugcagga

SEQ ID NO: 1111412 - RNA, 19 nt, Artificial Sequence
  Description of Artificial Sequence: Synthetic oligonucleotide
cuaugguuuacauucuccc

SEQ ID NO: 1111413 - RNA, 19 nt, Artificial Sequence
  Description of Artificial Sequence: Synthetic oligonucleotide
caaggaguaauaguggugg

SEQ ID NO: 1111414 - RNA, 19 nt, Artificial Sequence
  Description of Artificial Sequence: Synthetic oligonucleotide
cuuauacaucuguagaaag

SEQ ID NO: 1111415 - RNA, 19 nt, Artificial Sequence
  Description of Artificial Sequence: Synthetic oligonucleotide
gaaguuggaacugaaggcc

SEQ ID NO: 1111416 - RNA, 19 nt, Artificial Sequence
  Description of Artificial Sequence: Synthetic oligonucleotide
uuauccuaagccuuccuca

SEQ ID NO: 1111417 - RNA, 19 nt, Artificial Sequence
  Description of Artificial Sequence: Synthetic oligonucleotide
auacauuugcaacaucuug

SEQ ID NO: 1111418 - RNA, 19 nt, Artificial Sequence
  Description of Artificial Sequence: Synthetic oligonucleotide
aaggaguaauagugguggc

SEQ ID NO: 1111419 - RNA, 19 nt, Artificial Sequence
  Description of Artificial Sequence: Synthetic oligonucleotide
uaccuuuuaauguugcaga

SEQ ID NO: 1111420 - RNA, 19 nt, Artificial Sequence
  Description of Artificial Sequence: Synthetic oligonucleotide
guaacaggagcaaugggcg

SEQ ID NO: 1111421 - RNA, 19 nt, Artificial Sequence
  Description of Artificial Sequence: Synthetic oligonucleotide
agaaauacaucccaugauu

SEQ ID NO: 1111422 - RNA, 19 nt, Artificial Sequence
  Description of Artificial Sequence: Synthetic oligonucleotide
gaaauacaucccaugauug

SEQ ID NO: 1111423 - RNA, 19 nt, Artificial Sequence
  Description of Artificial Sequence: Synthetic oligonucleotide
aauacaucccaugauugga

SEQ ID NO: 1111424 - RNA, 19 nt, Artificial Sequence
  Description of Artificial Sequence: Synthetic oligonucleotide
uauguaggguuauuaauaa

SEQ ID NO: 1111425 - RNA, 19 nt, Artificial Sequence
  Description of Artificial Sequence: Synthetic oligonucleotide
acaggucuguagcacauac

SEQ ID NO: 1111426 - RNA, 19 nt, Artificial Sequence
  Description of Artificial Sequence: Synthetic oligonucleotide
cuaaaggcuacaaucagca

SEQ ID NO: 1111427 - RNA, 19 nt, Artificial Sequence
  Description of Artificial Sequence: Synthetic oligonucleotide
acuuuugaucauaacgggc

SEQ ID NO: 1111428 - RNA, 19 nt, Artificial Sequence
  Description of Artificial Sequence: Synthetic oligonucleotide
ucauaacgggcacaguugc

SEQ ID NO: 1111429 - RNA, 19 nt, Artificial Sequence
  Description of Artificial Sequence: Synthetic oligonucleotide
ucacacuuggccaccacag

SEQ ID NO: 1111430 - RNA, 19 nt, Artificial Sequence
  Description of Artificial Sequence: Synthetic oligonucleotide
cuuuugaucauaacgggca

SEQ ID NO: 1111431 - RNA, 19 nt, Artificial Sequence
  Description of Artificial Sequence: Synthetic oligonucleotide
agaagaauaaacaugcuua

SEQ ID NO: 1111432 - RNA, 19 nt, Artificial Sequence
  Description of Artificial Sequence: Synthetic oligonucleotide
aaagcgagccugaggagcc

SEQ ID NO: 1111433 - RNA, 19 nt, Artificial Sequence
  Description of Artificial Sequence: Synthetic oligonucleotide
accuuuuaauguugcagac

SEQ ID NO: 1111434 - RNA, 19 nt, Artificial Sequence
  Description of Artificial Sequence: Synthetic oligonucleotide
aagccgggguaacaggagc

SEQ ID NO: 1111435 - RNA, 19 nt, Artificial Sequence
  Description of Artificial Sequence: Synthetic oligonucleotide
ugcaaaagcgagccugagg

SEQ ID NO: 1111436 - RNA, 19 nt, Artificial Sequence
  Description of Artificial Sequence: Synthetic oligonucleotide
cacuuuugaucauaacggg

SEQ ID NO: 1111437 - RNA, 19 nt, Artificial Sequence
  Description of Artificial Sequence: Synthetic oligonucleotide
uggaguacuguauuccagc

SEQ ID NO: 1111438 - RNA, 19 nt, Artificial Sequence
  Description of Artificial Sequence: Synthetic oligonucleotide
aaauagugggccucaaguu

SEQ ID NO: 1111439 - RNA, 19 nt, Artificial Sequence
  Description of Artificial Sequence: Synthetic oligonucleotide
auauauugaguuaaacuca

SEQ ID NO: 1111440 - RNA, 19 nt, Artificial Sequence
  Description of Artificial Sequence: Synthetic oligonucleotide
aguauguaggguuauuaau

SEQ ID NO: 1111441 - RNA, 19 nt, Artificial Sequence
  Description of Artificial Sequence: Synthetic oligonucleotide
ugaaggauguuuugcaaaa

SEQ ID NO: 1111442 - RNA, 19 nt, Artificial Sequence
  Description of Artificial Sequence: Synthetic oligonucleotide
auagugggccucaaguucc

SEQ ID NO: 1111443 - RNA, 19 nt, Artificial Sequence
  Description of Artificial Sequence: Synthetic oligonucleotide
agcgagucuucucuauugc

SEQ ID NO: 1111444 - RNA, 19 nt, Artificial Sequence
  Description of Artificial Sequence: Synthetic oligonucleotide
uacuucagacgaauguuug

SEQ ID NO: 1111445 - RNA, 19 nt, Artificial Sequence
  Description of Artificial Sequence: Synthetic oligonucleotide
uaauguugcagacacuguu

SEQ ID NO: 1111446 - RNA, 19 nt, Artificial Sequence
  Description of Artificial Sequence: Synthetic oligonucleotide
gaagaauaaacaugcuuaa

SEQ ID NO: 1111447 - RNA, 19 nt, Artificial Sequence
  Description of Artificial Sequence: Synthetic oligonucleotide
aaaugccgccuacaugggg

SEQ ID NO: 1111448 - RNA, 19 nt, Artificial Sequence
  Description of Artificial Sequence: Synthetic oligonucleotide
aggaguaauagugguggcc

SEQ ID NO: 1111449 - RNA, 19 nt, Artificial Sequence
  Description of Artificial Sequence: Synthetic oligonucleotide
auaaagccgacugcguagc

SEQ ID NO: 1111450 - RNA, 19 nt, Artificial Sequence
  Description of Artificial Sequence: Synthetic oligonucleotide
gaagggguagccaacggag

SEQ ID NO: 1111451 - RNA, 19 nt, Artificial Sequence
  Description of Artificial Sequence: Synthetic oligonucleotide
aaaacuaaccauacaggau

SEQ ID NO: 1111452 - RNA, 19 nt, Artificial Sequence
  Description of Artificial Sequence: Synthetic oligonucleotide
ugaguuaaacucagcagua

SEQ ID NO: 1111453 - RNA, 19 nt, Artificial Sequence
  Description of Artificial Sequence: Synthetic oligonucleotide
ggaaacaugugccaagagc

SEQ ID NO: 1111454 - RNA, 19 nt, Artificial Sequence
  Description of Artificial Sequence: Synthetic oligonucleotide
uaugguuuacauucucccu

SEQ ID NO: 1111455 - RNA, 19 nt, Artificial Sequence
  Description of Artificial Sequence: Synthetic oligonucleotide
auguaggguuauuaauaac

SEQ ID NO: 1111456 - RNA, 19 nt, Artificial Sequence
  Description of Artificial Sequence: Synthetic oligonucleotide
aagggacauagaaccagcc

SEQ ID NO: 1111457 - RNA, 19 nt, Artificial Sequence
  Description of Artificial Sequence: Synthetic oligonucleotide
auucuaaaggcuacaauca

SEQ ID NO: 1111458 - RNA, 19 nt, Artificial Sequence
  Description of Artificial Sequence: Synthetic oligonucleotide
aaguuggaacugaaggccg

SEQ ID NO: 1111459 - RNA, 19 nt, Artificial Sequence
  Description of Artificial Sequence: Synthetic oligonucleotide
ugauuggaaacaugugcca

SEQ ID NO: 1111460 - RNA, 19 nt, Artificial Sequence
  Description of Artificial Sequence: Synthetic oligonucleotide
gcggaagggacauagaacc

SEQ ID NO: 1111461 - RNA, 19 nt, Artificial Sequence
  Description of Artificial Sequence: Synthetic oligonucleotide
guugcagacacuguugagc

SEQ ID NO: 1111462 - RNA, 19 nt, Artificial Sequence
  Description of Artificial Sequence: Synthetic oligonucleotide
uggaaggguagcuagggaa

SEQ ID NO: 1111463 - RNA, 19 nt, Artificial Sequence
  Description of Artificial Sequence: Synthetic oligonucleotide
gaaggagucugggaaaacc

SEQ ID NO: 1111464 - RNA, 19 nt, Artificial Sequence
  Description of Artificial Sequence: Synthetic oligonucleotide
ucuggaguacuguauucca

SEQ ID NO: 1111465 - RNA, 19 nt, Artificial Sequence
  Description of Artificial Sequence: Synthetic oligonucleotide
uguuccccaugucaaagga

SEQ ID NO: 1111466 - RNA, 19 nt, Artificial Sequence
  Description of Artificial Sequence: Synthetic oligonucleotide
aguggugugacugcuacug

SEQ ID NO: 1111467 - RNA, 19 nt, Artificial Sequence
  Description of Artificial Sequence: Synthetic oligonucleotide
aauuauccuaagccuuccu

SEQ ID NO: 1111468 - RNA, 19 nt, Artificial Sequence
  Description of Artificial Sequence: Synthetic oligonucleotide
gaccaugcaaaagcgagcc

SEQ ID NO: 1111469 - RNA, 19 nt, Artificial Sequence
  Description of Artificial Sequence: Synthetic oligonucleotide
gagcauccgggguacaagg

SEQ ID NO: 1111470 - RNA, 19 nt, Artificial Sequence
  Description of Artificial Sequence: Synthetic oligonucleotide
uuaauguugcagacacugu

SEQ ID NO: 1111471 - RNA, 19 nt, Artificial Sequence
  Description of Artificial Sequence: Synthetic oligonucleotide
cuucagacgaauguuugag

SEQ ID NO: 1111472 - RNA, 19 nt, Artificial Sequence
  Description of Artificial Sequence: Synthetic oligonucleotide
uucagacgaauguuugagc

SEQ ID NO: 1111473 - RNA, 19 nt, Artificial Sequence
  Description of Artificial Sequence: Synthetic oligonucleotide
ggaguaauagugguggccg

SEQ ID NO: 1111474 - RNA, 19 nt, Artificial Sequence
  Description of Artificial Sequence: Synthetic oligonucleotide
guagucuccaaaguggaug

SEQ ID NO: 1111475 - RNA, 19 nt, Artificial Sequence
  Description of Artificial Sequence: Synthetic oligonucleotide
guagaagaccucugugagg

SEQ ID NO: 1111476 - RNA, 19 nt, Artificial Sequence
  Description of Artificial Sequence: Synthetic oligonucleotide
ugcguagcugcgcugagcu

SEQ ID NO: 1111477 - RNA, 19 nt, Artificial Sequence
  Description of Artificial Sequence: Synthetic oligonucleotide
gcaaaagcgagccugagga

SEQ ID NO: 1111478 - RNA, 19 nt, Artificial Sequence
  Description of Artificial Sequence: Synthetic oligonucleotide
ucccggaauauauugaguu

SEQ ID NO: 1111479 - RNA, 19 nt, Artificial Sequence
  Description of Artificial Sequence: Synthetic oligonucleotide
cuguugagcaugacggcgg

SEQ ID NO: 1111480 - RNA, 19 nt, Artificial Sequence
  Description of Artificial Sequence: Synthetic oligonucleotide
gacauagaaccagccaggg

SEQ ID NO: 1111481 - RNA, 19 nt, Artificial Sequence
  Description of Artificial Sequence: Synthetic oligonucleotide
ugaguugaaguuggaacug

SEQ ID NO: 1111482 - RNA, 19 nt, Artificial Sequence
  Description of Artificial Sequence: Synthetic oligonucleotide
uugcuuucccggaauauau

SEQ ID NO: 1111483 - RNA, 19 nt, Artificial Sequence
  Description of Artificial Sequence: Synthetic oligonucleotide
aguagagucuaugguuuac

SEQ ID NO: 1111484 - RNA, 19 nt, Artificial Sequence
  Description of Artificial Sequence: Synthetic oligonucleotide
ggagcaaugggcguggagg

SEQ ID NO: 1111485 - RNA, 19 nt, Artificial Sequence
  Description of Artificial Sequence: Synthetic oligonucleotide
aaauuucauguguucccaa

SEQ ID NO: 1111486 - RNA, 19 nt, Artificial Sequence
  Description of Artificial Sequence: Synthetic oligonucleotide
ugagcaugacggcggauca

SEQ ID NO: 1111487 - RNA, 19 nt, Artificial Sequence
  Description of Artificial Sequence: Synthetic oligonucleotide
ugcacuacaguagagucua

SEQ ID NO: 1111488 - RNA, 19 nt, Artificial Sequence
  Description of Artificial Sequence: Synthetic oligonucleotide
aaugccgccuacaugggga

SEQ ID NO: 1111489 - RNA, 19 nt, Artificial Sequence
  Description of Artificial Sequence: Synthetic oligonucleotide
augguuuacauucucccua

SEQ ID NO: 1111490 - RNA, 19 nt, Artificial Sequence
  Description of Artificial Sequence: Synthetic oligonucleotide
acgacugugaaggagucug

SEQ ID NO: 1111491 - RNA, 19 nt, Artificial Sequence
  Description of Artificial Sequence: Synthetic oligonucleotide
aauggaccugcuguaauaa

SEQ ID NO: 1111492 - RNA, 19 nt, Artificial Sequence
  Description of Artificial Sequence: Synthetic oligonucleotide
gagcgagucuucucuauug

SEQ ID NO: 1111493 - RNA, 19 nt, Artificial Sequence
  Description of Artificial Sequence: Synthetic oligonucleotide
accaucuuuacaaaaguaa

SEQ ID NO: 1111494 - RNA, 19 nt, Artificial Sequence
  Description of Artificial Sequence: Synthetic oligonucleotide
acuccccuaccuuuuaaug

SEQ ID NO: 1111495 - RNA, 19 nt, Artificial Sequence
  Description of Artificial Sequence: Synthetic oligonucleotide
augucauucuaaaggcuac

SEQ ID NO: 1111496 - RNA, 19 nt, Artificial Sequence
  Description of Artificial Sequence: Synthetic oligonucleotide
augaaaugccgccuacaug

SEQ ID NO: 1111497 - RNA, 19 nt, Artificial Sequence
  Description of Artificial Sequence: Synthetic oligonucleotide
uggugugacugcuacugug

SEQ ID NO: 1111498 - RNA, 19 nt, Artificial Sequence
  Description of Artificial Sequence: Synthetic oligonucleotide
auaacgggcacaguugcug

SEQ ID NO: 1111499 - RNA, 19 nt, Artificial Sequence
  Description of Artificial Sequence: Synthetic oligonucleotide
uaggguuauuaauaacaaa

SEQ ID NO: 1111500 - RNA, 19 nt, Artificial Sequence
  Description of Artificial Sequence: Synthetic oligonucleotide
ugacaacccugcuugugcc

SEQ ID NO: 1111501 - RNA, 19 nt, Artificial Sequence
  Description of Artificial Sequence: Synthetic oligonucleotide
accugcuguaauaaagccg

SEQ ID NO: 1111502 - RNA, 19 nt, Artificial Sequence
  Description of Artificial Sequence: Synthetic oligonucleotide
gagguugugggguauucca

SEQ ID NO: 1111503 - RNA, 19 nt, Artificial Sequence
  Description of Artificial Sequence: Synthetic oligonucleotide
gacggcggaucacacuugg

SEQ ID NO: 1111504 - RNA, 19 nt, Artificial Sequence
  Description of Artificial Sequence: Synthetic oligonucleotide
auauugaguuaaacucagc

SEQ ID NO: 1111505 - RNA, 19 nt, Artificial Sequence
  Description of Artificial Sequence: Synthetic oligonucleotide
gguaccacgagcaggagug

SEQ ID NO: 1111506 - RNA, 19 nt, Artificial Sequence
  Description of Artificial Sequence: Synthetic oligonucleotide
gaaaacccagggauacccg

SEQ ID NO: 1111507 - RNA, 19 nt, Artificial Sequence
  Description of Artificial Sequence: Synthetic oligonucleotide
agacgaauguuugagcaga

SEQ ID NO: 1111508 - RNA, 19 nt, Artificial Sequence
  Description of Artificial Sequence: Synthetic oligonucleotide
uguggagggcgccugcagc

SEQ ID NO: 1111509 - RNA, 19 nt, Artificial Sequence
  Description of Artificial Sequence: Synthetic oligonucleotide
ucuugcagggacgacugug

SEQ ID NO: 1111510 - RNA, 19 nt, Artificial Sequence
  Description of Artificial Sequence: Synthetic oligonucleotide
auucucccuacuccccuac

SEQ ID NO: 1111511 - RNA, 19 nt, Artificial Sequence
  Description of Artificial Sequence: Synthetic oligonucleotide
cagacgaauguuugagcag

SEQ ID NO: 1111512 - RNA, 19 nt, Artificial Sequence
  Description of Artificial Sequence: Synthetic oligonucleotide
agcuagggaacccgucugg

SEQ ID NO: 1111513 - RNA, 19 nt, Artificial Sequence
  Description of Artificial Sequence: Synthetic oligonucleotide
guauguaggguuauuaaua

SEQ ID NO: 1111514 - RNA, 19 nt, Artificial Sequence
  Description of Artificial Sequence: Synthetic oligonucleotide
augacggcggaucacacuu

SEQ ID NO: 1111515 - RNA, 19 nt, Artificial Sequence
  Description of Artificial Sequence: Synthetic oligonucleotide
caaguuccccuuugaauac

SEQ ID NO: 1111516 - RNA, 19 nt, Artificial Sequence
  Description of Artificial Sequence: Synthetic oligonucleotide
ugaugcuaacaaauuucau

SEQ ID NO: 1111517 - RNA, 19 nt, Artificial Sequence
  Description of Artificial Sequence: Synthetic oligonucleotide
aggguuaaggcaaguggac

SEQ ID NO: 1111518 - RNA, 19 nt, Artificial Sequence
  Description of Artificial Sequence: Synthetic oligonucleotide
cuggaguacuguauuccag

SEQ ID NO: 1111519 - RNA, 19 nt, Artificial Sequence
  Description of Artificial Sequence: Synthetic oligonucleotide
guaauagugguggccgggg

SEQ ID NO: 1111520 - RNA, 19 nt, Artificial Sequence
  Description of Artificial Sequence: Synthetic oligonucleotide
ucucuauugcugccgcaca

SEQ ID NO: 1111521 - RNA, 19 nt, Artificial Sequence
  Description of Artificial Sequence: Synthetic oligonucleotide
cacuuauacaucuguagaa

SEQ ID NO: 1111522 - RNA, 19 nt, Artificial Sequence
  Description of Artificial Sequence: Synthetic oligonucleotide
uccuaagccuuccucacuu

SEQ ID NO: 1111523 - RNA, 19 nt, Artificial Sequence
  Description of Artificial Sequence: Synthetic oligonucleotide
uucucuauugcugccgcac

SEQ ID NO: 1111524 - RNA, 19 nt, Artificial Sequence
  Description of Artificial Sequence: Synthetic oligonucleotide
uagagucuaugguuuacau

SEQ ID NO: 1111525 - RNA, 19 nt, Artificial Sequence
  Description of Artificial Sequence: Synthetic oligonucleotide
agggacauagaaccagcca

SEQ ID NO: 1111526 - RNA, 19 nt, Artificial Sequence
  Description of Artificial Sequence: Synthetic oligonucleotide
aaagccgacugcguagcug

SEQ ID NO: 1111527 - RNA, 19 nt, Artificial Sequence
  Description of Artificial Sequence: Synthetic oligonucleotide
caacggagacugcacaggc

SEQ ID NO: 1111528 - RNA, 19 nt, Artificial Sequence
  Description of Artificial Sequence: Synthetic oligonucleotide
gaaggguagcuagggaacc

SEQ ID NO: 1111529 - RNA, 19 nt, Artificial Sequence
  Description of Artificial Sequence: Synthetic oligonucleotide
accauacaggauuauucaa

SEQ ID NO: 1111530 - RNA, 19 nt, Artificial Sequence
  Description of Artificial Sequence: Synthetic oligonucleotide
gcuuucccggaauauauug

SEQ ID NO: 1111531 - RNA, 19 nt, Artificial Sequence
  Description of Artificial Sequence: Synthetic oligonucleotide
ggaacgagggcaguguggg

SEQ ID NO: 1111532 - RNA, 19 nt, Artificial Sequence
  Description of Artificial Sequence: Synthetic oligonucleotide
uuguagaugcugagcugca

SEQ ID NO: 1111533 - RNA, 19 nt, Artificial Sequence
  Description of Artificial Sequence: Synthetic oligonucleotide
uccccuaccuuuuaauguu

SEQ ID NO: 1111534 - RNA, 19 nt, Artificial Sequence
  Description of Artificial Sequence: Synthetic oligonucleotide
ugggguauuccacggccca

SEQ ID NO: 1111535 - RNA, 19 nt, Artificial Sequence
  Description of Artificial Sequence: Synthetic oligonucleotide
acaacccugcuugugccac

SEQ ID NO: 1111536 - RNA, 19 nt, Artificial Sequence
  Description of Artificial Sequence: Synthetic oligonucleotide
cugaguugaaguuggaacu

SEQ ID NO: 1111537 - RNA, 19 nt, Artificial Sequence
  Description of Artificial Sequence: Synthetic oligonucleotide
ggaacauggccaucccugg

SEQ ID NO: 1111538 - RNA, 19 nt, Artificial Sequence
  Description of Artificial Sequence: Synthetic oligonucleotide
uauuccagcugaugcuaac

SEQ ID NO: 1111539 - RNA, 19 nt, Artificial Sequence
  Description of Artificial Sequence: Synthetic oligonucleotide
ugucauucuaaaggcuaca

SEQ ID NO: 1111540 - RNA, 19 nt, Artificial Sequence
  Description of Artificial Sequence: Synthetic oligonucleotide
agagucuaugguuuacauu

SEQ ID NO: 1111541 - RNA, 19 nt, Artificial Sequence
  Description of Artificial Sequence: Synthetic oligonucleotide
uggccggggaaucacuugu

SEQ ID NO: 1111542 - RNA, 19 nt, Artificial Sequence
  Description of Artificial Sequence: Synthetic oligonucleotide
gaugaaaugccgccuacau

SEQ ID NO: 1111543 - RNA, 19 nt, Artificial Sequence
  Description of Artificial Sequence: Synthetic oligonucleotide
gggaccaugcaaaagcgag

SEQ ID NO: 1111544 - RNA, 19 nt, Artificial Sequence
  Description of Artificial Sequence: Synthetic oligonucleotide
ggccuuugaaggccgaagg

SEQ ID NO: 1111545 - RNA, 19 nt, Artificial Sequence
  Description of Artificial Sequence: Synthetic oligonucleotide
ggaauauauugaguuaaac

SEQ ID NO: 1111546 - RNA, 19 nt, Artificial Sequence
  Description of Artificial Sequence: Synthetic oligonucleotide
cgcacauuuacuucagacg

SEQ ID NO: 1111547 - RNA, 19 nt, Artificial Sequence
  Description of Artificial Sequence: Synthetic oligonucleotide
aagcccggacagugcaggg

SEQ ID NO: 1111548 - RNA, 19 nt, Artificial Sequence
  Description of Artificial Sequence: Synthetic oligonucleotide
aacccgucuggcugggcug

SEQ ID NO: 1111549 - RNA, 19 nt, Artificial Sequence
  Description of Artificial Sequence: Synthetic oligonucleotide
ggugugacugcuacugugg

SEQ ID NO: 1111550 - RNA, 19 nt, Artificial Sequence
  Description of Artificial Sequence: Synthetic oligonucleotide
ugcaggguuaaggcaagug

SEQ ID NO: 1111551 - RNA, 19 nt, Artificial Sequence
  Description of Artificial Sequence: Synthetic oligonucleotide
cuuucccggaauauauuga

SEQ ID NO: 1111552 - RNA, 19 nt, Artificial Sequence
  Description of Artificial Sequence: Synthetic oligonucleotide
ugagguugugggguauucc

SEQ ID NO: 1111553 - RNA, 19 nt, Artificial Sequence
  Description of Artificial Sequence: Synthetic oligonucleotide
caaaauuauccuaagccuu

SEQ ID NO: 1111554 - RNA, 19 nt, Artificial Sequence
  Description of Artificial Sequence: Synthetic oligonucleotide
aggauguuuugcaaaauua

SEQ ID NO: 1111555 - RNA, 19 nt, Artificial Sequence
  Description of Artificial Sequence: Synthetic oligonucleotide
gauuggaaacaugugccaa

SEQ ID NO: 1111556 - RNA, 19 nt, Artificial Sequence
  Description of Artificial Sequence: Synthetic oligonucleotide
uguuccggguguggaaggg

SEQ ID NO: 1111557 - RNA, 19 nt, Artificial Sequence
  Description of Artificial Sequence: Synthetic oligonucleotide
uccagcugaugcuaacaaa

SEQ ID NO: 1111558 - RNA, 19 nt, Artificial Sequence
  Description of Artificial Sequence: Synthetic oligonucleotide
caaaagcgagccugaggag

SEQ ID NO: 1111559 - RNA, 19 nt, Artificial Sequence
  Description of Artificial Sequence: Synthetic oligonucleotide
cuggaaagcccggacagug

SEQ ID NO: 1111560 - RNA, 19 nt, Artificial Sequence
  Description of Artificial Sequence: Synthetic oligonucleotide
uugcucaggcuggaaagcc

SEQ ID NO: 1111561 - RNA, 19 nt, Artificial Sequence
  Description of Artificial Sequence: Synthetic oligonucleotide
gaaaugccgccuacauggg

SEQ ID NO: 1111562 - RNA, 19 nt, Artificial Sequence
  Description of Artificial Sequence: Synthetic oligonucleotide
agaaccagccaggggauug

SEQ ID NO: 1111563 - RNA, 19 nt, Artificial Sequence
  Description of Artificial Sequence: Synthetic oligonucleotide
ugaauacaucuggaguacu

SEQ ID NO: 1111564 - RNA, 19 nt, Artificial Sequence
  Description of Artificial Sequence: Synthetic oligonucleotide
uaacaggagcaaugggcgu

SEQ ID NO: 1111565 - RNA, 19 nt, Artificial Sequence
  Description of Artificial Sequence: Synthetic oligonucleotide
acugaaggccgaggcaaac

SEQ ID NO: 1111566 - RNA, 19 nt, Artificial Sequence
  Description of Artificial Sequence: Synthetic oligonucleotide
acaguagagucuaugguuu

SEQ ID NO: 1111567 - RNA, 19 nt, Artificial Sequence
  Description of Artificial Sequence: Synthetic oligonucleotide
ugccgcacauuuacuucag

SEQ ID NO: 1111568 - RNA, 19 nt, Artificial Sequence
  Description of Artificial Sequence: Synthetic oligonucleotide
augugccaagagcauccgg

SEQ ID NO: 1111569 - RNA, 19 nt, Artificial Sequence
  Description of Artificial Sequence: Synthetic oligonucleotide
aacgggcacaguugcugca

SEQ ID NO: 1111570 - RNA, 19 nt, Artificial Sequence
  Description of Artificial Sequence: Synthetic oligonucleotide
caaauuucauguguuccca

SEQ ID NO: 1111571 - RNA, 19 nt, Artificial Sequence
  Description of Artificial Sequence: Synthetic oligonucleotide
uugcaaagagaaugguguu

SEQ ID NO: 1111572 - RNA, 19 nt, Artificial Sequence
  Description of Artificial Sequence: Synthetic oligonucleotide
aaacaugugccaagagcau

SEQ ID NO: 1111573 - RNA, 19 nt, Artificial Sequence
  Description of Artificial Sequence: Synthetic oligonucleotide
uagccaacggagacugcac

SEQ ID NO: 1111574 - RNA, 19 nt, Artificial Sequence
  Description of Artificial Sequence: Synthetic oligonucleotide
caguauguaggguuauuaa

SEQ ID NO: 1111575 - RNA, 19 nt, Artificial Sequence
  Description of Artificial Sequence: Synthetic oligonucleotide
gagugccgggaugagcugg

SEQ ID NO: 1111576 - RNA, 19 nt, Artificial Sequence
  Description of Artificial Sequence: Synthetic oligonucleotide
aacuaaccauacaggauua

SEQ ID NO: 1111577 - RNA, 19 nt, Artificial Sequence
  Description of Artificial Sequence: Synthetic oligonucleotide
aaagguaguucuggguaua

SEQ ID NO: 1111578 - RNA, 19 nt, Artificial Sequence
  Description of Artificial Sequence: Synthetic oligonucleotide
gagaucaugaaggauguuu

SEQ ID NO: 1111579 - RNA, 19 nt, Artificial Sequence
  Description of Artificial Sequence: Synthetic oligonucleotide
auuccagcugaugcuaaca

SEQ ID NO: 1111580 - RNA, 19 nt, Artificial Sequence
  Description of Artificial Sequence: Synthetic oligonucleotide
gaagccgggguaacaggag

SEQ ID NO: 1111581 - RNA, 19 nt, Artificial Sequence
  Description of Artificial Sequence: Synthetic oligonucleotide
guagccaacggagacugca

SEQ ID NO: 1111582 - RNA, 19 nt, Artificial Sequence
  Description of Artificial Sequence: Synthetic oligonucleotide
ggcuggguagucuccaaag

SEQ ID NO: 1111583 - RNA, 19 nt, Artificial Sequence
  Description of Artificial Sequence: Synthetic oligonucleotide
uacuccccuaccuuuuaau

SEQ ID NO: 1111584 - RNA, 19 nt, Artificial Sequence
  Description of Artificial Sequence: Synthetic oligonucleotide
guaacucuugcagggacga

SEQ ID NO: 1111585 - RNA, 19 nt, Artificial Sequence
  Description of Artificial Sequence: Synthetic oligonucleotide
gaaagguaguucuggguau

SEQ ID NO: 1111586 - RNA, 19 nt, Artificial Sequence
  Description of Artificial Sequence: Synthetic oligonucleotide
gaacgagggcagugugggg

SEQ ID NO: 1111587 - RNA, 19 nt, Artificial Sequence
  Description of Artificial Sequence: Synthetic oligonucleotide
ugggcguggaggacgcaug

SEQ ID NO: 1111588 - RNA, 19 nt, Artificial Sequence
  Description of Artificial Sequence: Synthetic oligonucleotide
ugaggcagccaccggcagu

SEQ ID NO: 1111589 - RNA, 19 nt, Artificial Sequence
  Description of Artificial Sequence: Synthetic oligonucleotide
acucuugcagggacgacug

SEQ ID NO: 1111590 - RNA, 19 nt, Artificial Sequence
  Description of Artificial Sequence: Synthetic oligonucleotide
agcaugacggcggaucaca

SEQ ID NO: 1111591 - RNA, 19 nt, Artificial Sequence
  Description of Artificial Sequence: Synthetic oligonucleotide
guauuccacggcccagugc

SEQ ID NO: 1111592 - RNA, 19 nt, Artificial Sequence
  Description of Artificial Sequence: Synthetic oligonucleotide
aaguuccccuuugaauaca

SEQ ID NO: 1111593 - RNA, 19 nt, Artificial Sequence
  Description of Artificial Sequence: Synthetic oligonucleotide
agggaacgagggcagugug

SEQ ID NO: 1111594 - RNA, 19 nt, Artificial Sequence
  Description of Artificial Sequence: Synthetic oligonucleotide
uauugcugccgcacauuua

SEQ ID NO: 1111595 - RNA, 19 nt, Artificial Sequence
  Description of Artificial Sequence: Synthetic oligonucleotide
cuacauggggaccaugcaa

SEQ ID NO: 1111596 - RNA, 19 nt, Artificial Sequence
  Description of Artificial Sequence: Synthetic oligonucleotide
agccaacggagacugcaca

SEQ ID NO: 1111597 - RNA, 19 nt, Artificial Sequence
  Description of Artificial Sequence: Synthetic oligonucleotide
uguucccaagaagaauaaa

SEQ ID NO: 1111598 - RNA, 19 nt, Artificial Sequence
  Description of Artificial Sequence: Synthetic oligonucleotide
cauggggaccaugcaaaag

SEQ ID NO: 1111599 - RNA, 19 nt, Artificial Sequence
  Description of Artificial Sequence: Synthetic oligonucleotide
accacgagcaggagugccg

SEQ ID NO: 1111600 - RNA, 19 nt, Artificial Sequence
  Description of Artificial Sequence: Synthetic oligonucleotide
auguuugagcagaaauaca

SEQ ID NO: 1111601 - RNA, 19 nt, Artificial Sequence
  Description of Artificial Sequence: Synthetic oligonucleotide
aagagcauccgggguacaa

SEQ ID NO: 1111602 - RNA, 19 nt, Artificial Sequence
  Description of Artificial Sequence: Synthetic oligonucleotide
uuccggguguggaagggua

SEQ ID NO: 1111603 - RNA, 19 nt, Artificial Sequence
  Description of Artificial Sequence: Synthetic oligonucleotide
uaaagccgacugcguagcu

SEQ ID NO: 1111604 - RNA, 19 nt, Artificial Sequence
  Description of Artificial Sequence: Synthetic oligonucleotide
ugcuuucccggaauauauu

SEQ ID NO: 1111605 - RNA, 19 nt, Artificial Sequence
  Description of Artificial Sequence: Synthetic oligonucleotide
ugacagagcgagucuucuc

SEQ ID NO: 1111606 - RNA, 19 nt, Artificial Sequence
  Description of Artificial Sequence: Synthetic oligonucleotide
accacuuggggcacuggag

SEQ ID NO: 1111607 - RNA, 19 nt, Artificial Sequence
  Description of Artificial Sequence: Synthetic oligonucleotide
agcaaugggcguggaggac

SEQ ID NO: 1111608 - RNA, 19 nt, Artificial Sequence
  Description of Artificial Sequence: Synthetic oligonucleotide
aggcccaagguaccacgag

SEQ ID NO: 1111609 - RNA, 19 nt, Artificial Sequence
  Description of Artificial Sequence: Synthetic oligonucleotide
ugacggcggaucacacuug

SEQ ID NO: 1111610 - RNA, 19 nt, Artificial Sequence
  Description of Artificial Sequence: Synthetic oligonucleotide
gaaagcccggacagugcag

SEQ ID NO: 1111611 - RNA, 19 nt, Artificial Sequence
  Description of Artificial Sequence: Synthetic oligonucleotide
gcauccgggguacaaggag

SEQ ID NO: 1111612 - RNA, 19 nt, Artificial Sequence
  Description of Artificial Sequence: Synthetic oligonucleotide
cugccgcacauuuacuuca

SEQ ID NO: 1111613 - RNA, 19 nt, Artificial Sequence
  Description of Artificial Sequence: Synthetic oligonucleotide
ugggauagaccugguugca

SEQ ID NO: 1111614 - RNA, 19 nt, Artificial Sequence
  Description of Artificial Sequence: Synthetic oligonucleotide
cugagaucaugaaggaugu

SEQ ID NO: 1111615 - RNA, 19 nt, Artificial Sequence
  Description of Artificial Sequence: Synthetic oligonucleotide
aacggagacugcacaggca

SEQ ID NO: 1111616 - RNA, 19 nt, Artificial Sequence
  Description of Artificial Sequence: Synthetic oligonucleotide
agagcgagucuucucuauu

SEQ ID NO: 1111617 - RNA, 19 nt, Artificial Sequence
  Description of Artificial Sequence: Synthetic oligonucleotide
uugcagggacgacugugaa

SEQ ID NO: 1111618 - RNA, 19 nt, Artificial Sequence
  Description of Artificial Sequence: Synthetic oligonucleotide
ccgcacauuuacuucagac

SEQ ID NO: 1111619 - RNA, 19 nt, Artificial Sequence
  Description of Artificial Sequence: Synthetic oligonucleotide
ggaaagcccggacagugca

SEQ ID NO: 1111620 - RNA, 19 nt, Artificial Sequence
  Description of Artificial Sequence: Synthetic oligonucleotide
ugaaggagucugggaaaac

SEQ ID NO: 1111621 - RNA, 19 nt, Artificial Sequence
  Description of Artificial Sequence: Synthetic oligonucleotide
aucaugccauccacuuugg

SEQ ID NO: 1111622 - RNA, 19 nt, Artificial Sequence
  Description of Artificial Sequence: Synthetic oligonucleotide
ggaaggguagcuagggaac

SEQ ID NO: 1111623 - RNA, 19 nt, Artificial Sequence
  Description of Artificial Sequence: Synthetic oligonucleotide
gacaacccugcuugugcca

SEQ ID NO: 1111624 - RNA, 19 nt, Artificial Sequence
  Description of Artificial Sequence: Synthetic oligonucleotide
caccaucuuuacaaaagua

SEQ ID NO: 1111625 - RNA, 19 nt, Artificial Sequence
  Description of Artificial Sequence: Synthetic oligonucleotide
auacccgggagggacagaa

SEQ ID NO: 1111626 - RNA, 19 nt, Artificial Sequence
  Description of Artificial Sequence: Synthetic oligonucleotide
acugcguagcugcgcugag

SEQ ID NO: 1111627 - RNA, 19 nt, Artificial Sequence
  Description of Artificial Sequence: Synthetic oligonucleotide
gucauucuaaaggcuacaa

SEQ ID NO: 1111628 - RNA, 19 nt, Artificial Sequence
  Description of Artificial Sequence: Synthetic oligonucleotide
ggcggaucacacuuggcca

SEQ ID NO: 1111629 - RNA, 19 nt, Artificial Sequence
  Description of Artificial Sequence: Synthetic oligonucleotide
ugguguuccggguguggaa

SEQ ID NO: 1111630 - RNA, 19 nt, Artificial Sequence
  Description of Artificial Sequence: Synthetic oligonucleotide
ucccuacuccccuaccuuu

SEQ ID NO: 1111631 - RNA, 19 nt, Artificial Sequence
  Description of Artificial Sequence: Synthetic oligonucleotide
gggguacaaggaguaauag

SEQ ID NO: 1111632 - RNA, 19 nt, Artificial Sequence
  Description of Artificial Sequence: Synthetic oligonucleotide
gacugcguagcugcgcuga

SEQ ID NO: 1111633 - RNA, 19 nt, Artificial Sequence
  Description of Artificial Sequence: Synthetic oligonucleotide
auggaccugcuguaauaaa

SEQ ID NO: 1111634 - RNA, 19 nt, Artificial Sequence
  Description of Artificial Sequence: Synthetic oligonucleotide
gguaguucuggguauacuu

SEQ ID NO: 1111635 - RNA, 19 nt, Artificial Sequence
  Description of Artificial Sequence: Synthetic oligonucleotide
cucagcaguauguaggguu

SEQ ID NO: 1111636 - RNA, 19 nt, Artificial Sequence
  Description of Artificial Sequence: Synthetic oligonucleotide
ccggggaaucacuuguggg

SEQ ID NO: 1111637 - RNA, 19 nt, Artificial Sequence
  Description of Artificial Sequence: Synthetic oligonucleotide
caggauuauucaauauacu

SEQ ID NO: 1111638 - RNA, 19 nt, Artificial Sequence
  Description of Artificial Sequence: Synthetic oligonucleotide
aagguaccacgagcaggag

SEQ ID NO: 1111639 - RNA, 19 nt, Artificial Sequence
  Description of Artificial Sequence: Synthetic oligonucleotide
gccggggaaucacuugugg

SEQ ID NO: 1111640 - RNA, 19 nt, Artificial Sequence
  Description of Artificial Sequence: Synthetic oligonucleotide
aucuugcaggacaccaucu

SEQ ID NO: 1111641 - RNA, 19 nt, Artificial Sequence
  Description of Artificial Sequence: Synthetic oligonucleotide
accaugcaaaagcgagccu

SEQ ID NO: 1111642 - RNA, 19 nt, Artificial Sequence
  Description of Artificial Sequence: Synthetic oligonucleotide
ggguagccaacggagacug

SEQ ID NO: 1111643 - RNA, 19 nt, Artificial Sequence
  Description of Artificial Sequence: Synthetic oligonucleotide
auagaaccagccaggggau

SEQ ID NO: 1111644 - RNA, 19 nt, Artificial Sequence
  Description of Artificial Sequence: Synthetic oligonucleotide
cccagugcaccugacaggc

SEQ ID NO: 1111645 - RNA, 19 nt, Artificial Sequence
  Description of Artificial Sequence: Synthetic oligonucleotide
uugcugccgcacauuuacu

SEQ ID NO: 1111646 - RNA, 19 nt, Artificial Sequence
  Description of Artificial Sequence: Synthetic oligonucleotide
gccuacauggggaccaugc

SEQ ID NO: 1111647 - RNA, 19 nt, Artificial Sequence
  Description of Artificial Sequence: Synthetic oligonucleotide
agcuuggaguccagaugac

SEQ ID NO: 1111648 - RNA, 19 nt, Artificial Sequence
  Description of Artificial Sequence: Synthetic oligonucleotide
aucccaugauuggaaacau

SEQ ID NO: 1111649 - RNA, 19 nt, Artificial Sequence
  Description of Artificial Sequence: Synthetic oligonucleotide
acgggcacaguugcugcag

SEQ ID NO: 1111650 - RNA, 19 nt, Artificial Sequence
  Description of Artificial Sequence: Synthetic oligonucleotide
gaacccgucuggcugggcu

SEQ ID NO: 1111651 - RNA, 19 nt, Artificial Sequence
  Description of Artificial Sequence: Synthetic oligonucleotide
cagacacuguugagcauga

SEQ ID NO: 1111652 - RNA, 19 nt, Artificial Sequence
  Description of Artificial Sequence: Synthetic oligonucleotide
gggaacgagggcagugugg

SEQ ID NO: 1111653 - RNA, 19 nt, Artificial Sequence
  Description of Artificial Sequence: Synthetic oligonucleotide
guaauaaagccgacugcgu

SEQ ID NO: 1111654 - RNA, 19 nt, Artificial Sequence
  Description of Artificial Sequence: Synthetic oligonucleotide
acuaaccauacaggauuau

SEQ ID NO: 1111655 - RNA, 19 nt, Artificial Sequence
  Description of Artificial Sequence: Synthetic oligonucleotide
ggaccaugcaaaagcgagc

SEQ ID NO: 1111656 - RNA, 19 nt, Artificial Sequence
  Description of Artificial Sequence: Synthetic oligonucleotide
ugcuacuguggagggcgcc

SEQ ID NO: 1111657 - RNA, 19 nt, Artificial Sequence
  Description of Artificial Sequence: Synthetic oligonucleotide
cccuaccuuuuaauguugc

SEQ ID NO: 1111658 - RNA, 19 nt, Artificial Sequence
  Description of Artificial Sequence: Synthetic oligonucleotide
aggcaaacccagggaggac

SEQ ID NO: 1111659 - RNA, 19 nt, Artificial Sequence
  Description of Artificial Sequence: Synthetic oligonucleotide
ucgugggcucacuuuugau

SEQ ID NO: 1111660 - RNA, 19 nt, Artificial Sequence
  Description of Artificial Sequence: Synthetic oligonucleotide
gacuggcauugcuguggag

SEQ ID NO: 1111661 - RNA, 19 nt, Artificial Sequence
  Description of Artificial Sequence: Synthetic oligonucleotide
ggcggaagggacauagaac

SEQ ID NO: 1111662 - RNA, 19 nt, Artificial Sequence
  Description of Artificial Sequence: Synthetic oligonucleotide
gugggguauuccacggccc

SEQ ID NO: 1111663 - RNA, 19 nt, Artificial Sequence
  Description of Artificial Sequence: Synthetic oligonucleotide
cugggaaaacccagggaua

SEQ ID NO: 1111664 - RNA, 19 nt, Artificial Sequence
  Description of Artificial Sequence: Synthetic oligonucleotide
caacccugcuugugccacc

SEQ ID NO: 1111665 - RNA, 19 nt, Artificial Sequence
  Description of Artificial Sequence: Synthetic oligonucleotide
cugagguugugggguauuc

SEQ ID NO: 1111666 - RNA, 19 nt, Artificial Sequence
  Description of Artificial Sequence: Synthetic oligonucleotide
acggcggaucacacuuggc

SEQ ID NO: 1111667 - RNA, 19 nt, Artificial Sequence
  Description of Artificial Sequence: Synthetic oligonucleotide
aguuccccuuugaauacau

SEQ ID NO: 1111668 - RNA, 19 nt, Artificial Sequence
  Description of Artificial Sequence: Synthetic oligonucleotide
acgaauguuugagcagaaa

SEQ ID NO: 1111669 - RNA, 19 nt, Artificial Sequence
  Description of Artificial Sequence: Synthetic oligonucleotide
cggcggaucacacuuggcc

SEQ ID NO: 1111670 - RNA, 19 nt, Artificial Sequence
  Description of Artificial Sequence: Synthetic oligonucleotide
ggguacaaggaguaauagu

SEQ ID NO: 1111671 - RNA, 19 nt, Artificial Sequence
  Description of Artificial Sequence: Synthetic oligonucleotide
cucgugggcucacuuuuga

SEQ ID NO: 1111672 - RNA, 19 nt, Artificial Sequence
  Description of Artificial Sequence: Synthetic oligonucleotide
cugcuacuguggagggcgc

SEQ ID NO: 1111673 - RNA, 19 nt, Artificial Sequence
  Description of Artificial Sequence: Synthetic oligonucleotide
gacgaauguuugagcagaa

SEQ ID NO: 1111674 - RNA, 19 nt, Artificial Sequence
  Description of Artificial Sequence: Synthetic oligonucleotide
cacgagcaggagugccggg

SEQ ID NO: 1111675 - RNA, 19 nt, Artificial Sequence
  Description of Artificial Sequence: Synthetic oligonucleotide
auuccacggcccagugcac

SEQ ID NO: 1111676 - RNA, 19 nt, Artificial Sequence
  Description of Artificial Sequence: Synthetic oligonucleotide
ugcaccugacaggcccaag

SEQ ID NO: 1111677 - RNA, 19 nt, Artificial Sequence
  Description of Artificial Sequence: Synthetic oligonucleotide
cuacuguggagggcgccug

SEQ ID NO: 1111678 - RNA, 19 nt, Artificial Sequence
  Description of Artificial Sequence: Synthetic oligonucleotide
gcucacuuuugaucauaac

SEQ ID NO: 1111679 - RNA, 19 nt, Artificial Sequence
  Description of Artificial Sequence: Synthetic oligonucleotide
ccggaauauauugaguuaa

SEQ ID NO: 1111680 - RNA, 19 nt, Artificial Sequence
  Description of Artificial Sequence: Synthetic oligonucleotide
gagcaugacggcggaucac

SEQ ID NO: 1111681 - RNA, 19 nt, Artificial Sequence
  Description of Artificial Sequence: Synthetic oligonucleotide
agcauccgggguacaagga

SEQ ID NO: 1111682 - RNA, 19 nt, Artificial Sequence
  Description of Artificial Sequence: Synthetic oligonucleotide
cugcguagcugcgcugagc

SEQ ID NO: 1111683 - RNA, 19 nt, Artificial Sequence
  Description of Artificial Sequence: Synthetic oligonucleotide
augggcguggaggacgcau

SEQ ID NO: 1111684 - RNA, 19 nt, Artificial Sequence
  Description of Artificial Sequence: Synthetic oligonucleotide
guaguucuggguauacuuu

SEQ ID NO: 1111685 - RNA, 19 nt, Artificial Sequence
  Description of Artificial Sequence: Synthetic oligonucleotide
gcuagggaacccgucuggc

SEQ ID NO: 1111686 - RNA, 19 nt, Artificial Sequence
  Description of Artificial Sequence: Synthetic oligonucleotide
gcuacccgcagcuuggagu

SEQ ID NO: 1111687 - RNA, 19 nt, Artificial Sequence
  Description of Artificial Sequence: Synthetic oligonucleotide
gccaagagcauccggggua

SEQ ID NO: 1111688 - RNA, 19 nt, Artificial Sequence
  Description of Artificial Sequence: Synthetic oligonucleotide
cugaauggaccugcuguaa

SEQ ID NO: 1111689 - RNA, 19 nt, Artificial Sequence
  Description of Artificial Sequence: Synthetic oligonucleotide
caguagagucuaugguuua

SEQ ID NO: 1111690 - RNA, 19 nt, Artificial Sequence
  Description of Artificial Sequence: Synthetic oligonucleotide
cuaagccuuccucacuuau

SEQ ID NO: 1111691 - RNA, 19 nt, Artificial Sequence
  Description of Artificial Sequence: Synthetic oligonucleotide
guaccacgagcaggagugc

SEQ ID NO: 1111692 - RNA, 19 nt, Artificial Sequence
  Description of Artificial Sequence: Synthetic oligonucleotide
aagcgagccugaggagcca

SEQ ID NO: 1111693 - RNA, 19 nt, Artificial Sequence
  Description of Artificial Sequence: Synthetic oligonucleotide
gcccaagguaccacgagca

SEQ ID NO: 1111694 - RNA, 19 nt, Artificial Sequence
  Description of Artificial Sequence: Synthetic oligonucleotide
cauaacgggcacaguugcu

SEQ ID NO: 1111695 - RNA, 19 nt, Artificial Sequence
  Description of Artificial Sequence: Synthetic oligonucleotide
uccgggguacaaggaguaa

SEQ ID NO: 1111696 - RNA, 19 nt, Artificial Sequence
  Description of Artificial Sequence: Synthetic oligonucleotide
gguagcuagggaacccguc

SEQ ID NO: 1111697 - RNA, 19 nt, Artificial Sequence
  Description of Artificial Sequence: Synthetic oligonucleotide
cuacuccccuaccuuuuaa

SEQ ID NO: 1111698 - RNA, 19 nt, Artificial Sequence
  Description of Artificial Sequence: Synthetic oligonucleotide
agcccggacagugcagggu

SEQ ID NO: 1111699 - RNA, 19 nt, Artificial Sequence
  Description of Artificial Sequence: Synthetic oligonucleotide
aaugggcguggaggacgca

SEQ ID NO: 1111700 - RNA, 19 nt, Artificial Sequence
  Description of Artificial Sequence: Synthetic oligonucleotide
gugguggccggggaaucac

SEQ ID NO: 1111701 - RNA, 19 nt, Artificial Sequence
  Description of Artificial Sequence: Synthetic oligonucleotide
cccaagguaccacgagcag

SEQ ID NO: 1111702 - RNA, 19 nt, Artificial Sequence
  Description of Artificial Sequence: Synthetic oligonucleotide
gcgccugcagcccagggaa

SEQ ID NO: 1111703 - RNA, 19 nt, Artificial Sequence
  Description of Artificial Sequence: Synthetic oligonucleotide
ccaagagcauccgggguac

SEQ ID NO: 1111704 - RNA, 19 nt, Artificial Sequence
  Description of Artificial Sequence: Synthetic oligonucleotide
ccacgagcaggagugccgg

SEQ ID NO: 1111705 - RNA, 19 nt, Artificial Sequence
  Description of Artificial Sequence: Synthetic oligonucleotide
ccccuaccuuuuaauguug

SEQ ID NO: 1111706 - RNA, 19 nt, Artificial Sequence
  Description of Artificial Sequence: Synthetic oligonucleotide
ugccgccuacauggggacc

SEQ ID NO: 1111707 - RNA, 19 nt, Artificial Sequence
  Description of Artificial Sequence: Synthetic oligonucleotide
ccggcaguggugugacugc

SEQ ID NO: 1111708 - RNA, 19 nt, Artificial Sequence
  Description of Artificial Sequence: Synthetic oligonucleotide
ggagugccgggaugagcug

SEQ ID NO: 1111709 - RNA, 19 nt, Artificial Sequence
  Description of Artificial Sequence: Synthetic oligonucleotide
gcuggguagucuccaaagu

SEQ ID NO: 1111710 - RNA, 19 nt, Artificial Sequence
  Description of Artificial Sequence: Synthetic oligonucleotide
uacccgcagcuuggagucc

SEQ ID NO: 1111711 - RNA, 19 nt, Artificial Sequence
  Description of Artificial Sequence: Synthetic oligonucleotide
ccucacuuauacaucugua

SEQ ID NO: 1111712 - RNA, 19 nt, Artificial Sequence
  Description of Artificial Sequence: Synthetic oligonucleotide
ccuacauggggaccaugca

SEQ ID NO: 1111713 - RNA, 19 nt, Artificial Sequence
  Description of Artificial Sequence: Synthetic oligonucleotide
gggguauuccacggcccag

SEQ ID NO: 1111714 - RNA, 19 nt, Artificial Sequence
  Description of Artificial Sequence: Synthetic oligonucleotide
ggacgacugugaaggaguc

SEQ ID NO: 1111715 - RNA, 19 nt, Artificial Sequence
  Description of Artificial Sequence: Synthetic oligonucleotide
cccggaauauauugaguua

SEQ ID NO: 1111716 - RNA, 19 nt, Artificial Sequence
  Description of Artificial Sequence: Synthetic oligonucleotide
cacggcccagugcaccuga

SEQ ID NO: 1111717 - RNA, 19 nt, Artificial Sequence
  Description of Artificial Sequence: Synthetic oligonucleotide
gccgccuacauggggacca

SEQ ID NO: 1111718 - RNA, 19 nt, Artificial Sequence
  Description of Artificial Sequence: Synthetic oligonucleotide
gauacccgggagggacaga

SEQ ID NO: 1111719 - RNA, 19 nt, Artificial Sequence
  Description of Artificial Sequence: Synthetic oligonucleotide
acggcccagugcaccugac

SEQ ID NO: 1111720 - RNA, 19 nt, Artificial Sequence
  Description of Artificial Sequence: Synthetic oligonucleotide
cagagcgagucuucucuau

SEQ ID NO: 1111721 - RNA, 19 nt, Artificial Sequence
  Description of Artificial Sequence: Synthetic oligonucleotide
agccaccggcaguggugug

SEQ ID NO: 1111722 - RNA, 19 nt, Artificial Sequence
  Description of Artificial Sequence: Synthetic oligonucleotide
gaggacgcauguggcggaa

SEQ ID NO: 1111723 - RNA, 19 nt, Artificial Sequence
  Description of Artificial Sequence: Synthetic oligonucleotide
cagggacgacugugaagga

SEQ ID NO: 1111724 - RNA, 19 nt, Artificial Sequence
  Description of Artificial Sequence: Synthetic oligonucleotide
ccggguguggaaggguagc

SEQ ID NO: 1111725 - RNA, 19 nt, Artificial Sequence
  Description of Artificial Sequence: Synthetic oligonucleotide
cauggccaucccuggggua

SEQ ID NO: 1111726 - RNA, 19 nt, Artificial Sequence
  Description of Artificial Sequence: Synthetic oligonucleotide
gcucgugggcucacuuuug

SEQ ID NO: 1111727 - RNA, 19 nt, Artificial Sequence
  Description of Artificial Sequence: Synthetic oligonucleotide
gggauagaccugguugcaa

SEQ ID NO: 1111728 - RNA, 19 nt, Artificial Sequence
  Description of Artificial Sequence: Synthetic oligonucleotide
cagggaacgagggcagugu

SEQ ID NO: 1111729 - RNA, 19 nt, Artificial Sequence
  Description of Artificial Sequence: Synthetic oligonucleotide
gcaugacggcggaucacac

SEQ ID NO: 1111730 - RNA, 19 nt, Artificial Sequence
  Description of Artificial Sequence: Synthetic oligonucleotide
ggcucgugggcucacuuuu

SEQ ID NO: 1111731 - RNA, 19 nt, Artificial Sequence
  Description of Artificial Sequence: Synthetic oligonucleotide
ggccggggaaucacuugug

SEQ ID NO: 1111732 - RNA, 19 nt, Artificial Sequence
  Description of Artificial Sequence: Synthetic oligonucleotide
gguagccaacggagacugc

SEQ ID NO: 1111733 - RNA, 19 nt, Artificial Sequence
  Description of Artificial Sequence: Synthetic oligonucleotide
guagcugcgcugagcugua

SEQ ID NO: 1111734 - RNA, 19 nt, Artificial Sequence
  Description of Artificial Sequence: Synthetic oligonucleotide
guuccggguguggaagggu

SEQ ID NO: 1111735 - RNA, 19 nt, Artificial Sequence
  Description of Artificial Sequence: Synthetic oligonucleotide
gcguagcugcgcugagcug

SEQ ID NO: 1111736 - RNA, 19 nt, Artificial Sequence
  Description of Artificial Sequence: Synthetic oligonucleotide
gccgcacauuuacuucaga

SEQ ID NO: 1111737 - RNA, 19 nt, Artificial Sequence
  Description of Artificial Sequence: Synthetic oligonucleotide
ccaccggcaguggugugac

SEQ ID NO: 1111738 - RNA, 19 nt, Artificial Sequence
  Description of Artificial Sequence: Synthetic oligonucleotide
cgggguacaaggaguaaua

SEQ ID NO: 1111739 - RNA, 19 nt, Artificial Sequence
  Description of Artificial Sequence: Synthetic oligonucleotide
gccaccggcagugguguga

SEQ ID NO: 1111740 - RNA, 19 nt, Artificial Sequence
  Description of Artificial Sequence: Synthetic oligonucleotide
gggaaucacuugugggcau

SEQ ID NO: 1111741 - RNA, 19 nt, Artificial Sequence
  Description of Artificial Sequence: Synthetic oligonucleotide
gguagucuccaaaguggau

SEQ ID NO: 1111742 - RNA, 19 nt, Artificial Sequence
  Description of Artificial Sequence: Synthetic oligonucleotide
caagagcauccgggguaca

SEQ ID NO: 1111743 - RNA, 19 nt, Artificial Sequence
  Description of Artificial Sequence: Synthetic oligonucleotide
cguagcugcgcugagcugu

SEQ ID NO: 1111744 - RNA, 19 nt, Artificial Sequence
  Description of Artificial Sequence: Synthetic oligonucleotide
cagccaccggcaguggugu

SEQ ID NO: 1111745 - RNA, 19 nt, Artificial Sequence
  Description of Artificial Sequence: Synthetic oligonucleotide
ccuaagccuuccucacuua

SEQ ID NO: 1111746 - RNA, 19 nt, Artificial Sequence
  Description of Artificial Sequence: Synthetic oligonucleotide
gccgggguaacaggagcaa

SEQ ID NO: 1111747 - RNA, 19 nt, Artificial Sequence
  Description of Artificial Sequence: Synthetic oligonucleotide
ccgacugcguagcugcgcu

SEQ ID NO: 1111748 - RNA, 19 nt, Artificial Sequence
  Description of Artificial Sequence: Synthetic oligonucleotide
ggggcaccacuuggggcac

SEQ ID NO: 1111749 - RNA, 19 nt, Artificial Sequence
  Description of Artificial Sequence: Synthetic oligonucleotide
ggguagcuagggaacccgu

SEQ ID NO: 1111750 - RNA, 19 nt, Artificial Sequence
  Description of Artificial Sequence: Synthetic oligonucleotide
caggagcaaugggcgugga

SEQ ID NO: 1111751 - RNA, 19 nt, Artificial Sequence
  Description of Artificial Sequence: Synthetic oligonucleotide
gugcaggguuaaggcaagu

SEQ ID NO: 1111752 - RNA, 19 nt, Artificial Sequence
  Description of Artificial Sequence: Synthetic oligonucleotide
cgacugcguagcugcgcug

SEQ ID NO: 1111753 - RNA, 19 nt, Artificial Sequence
  Description of Artificial Sequence: Synthetic oligonucleotide
ccgggguacaaggaguaau

SEQ ID NO: 1111754 - RNA, 19 nt, Artificial Sequence
  Description of Artificial Sequence: Synthetic oligonucleotide
ccggacagugcaggguuaa

SEQ ID NO: 1111755 - RNA, 19 nt, Artificial Sequence
  Description of Artificial Sequence: Synthetic oligonucleotide
cccggacagugcaggguua

SEQ ID NO: 1111756 - RNA, 19 nt, Artificial Sequence
  Description of Artificial Sequence: Synthetic oligonucleotide
ggccaucccugggguagaa

SEQ ID NO: 1111757 - RNA, 19 nt, Artificial Sequence
  Description of Artificial Sequence: Synthetic oligonucleotide
ccaccagggcugaguugaa

SEQ ID NO: 1111758 - RNA, 19 nt, Artificial Sequence
  Description of Artificial Sequence: Synthetic oligonucleotide
caccggcaguggugugacu

SEQ ID NO: 1111759 - RNA, 19 nt, Artificial Sequence
  Description of Artificial Sequence: Synthetic oligonucleotide
cgccuacauggggaccaug

SEQ ID NO: 1111760 - RNA, 19 nt, Artificial Sequence
  Description of Artificial Sequence: Synthetic oligonucleotide
ccgggguaacaggagcaau

SEQ ID NO: 1111761 - RNA, 19 nt, Artificial Sequence
  Description of Artificial Sequence: Synthetic oligonucleotide
gcacuacaguagagucuau

SEQ ID NO: 1111762 - RNA, 19 nt, Artificial Sequence
  Description of Artificial Sequence: Synthetic oligonucleotide
ccgccuacauggggaccau

SEQ ID NO: 1111763 - RNA, 19 nt, Artificial Sequence
  Description of Artificial Sequence: Synthetic oligonucleotide
aacauaauaccucuuauuc

SEQ ID NO: 1111764 - RNA, 19 nt, Artificial Sequence
  Description of Artificial Sequence: Synthetic oligonucleotide
uauccauugaaccugaugc

SEQ ID NO: 1111765 - RNA, 19 nt, Artificial Sequence
  Description of Artificial Sequence: Synthetic oligonucleotide
aaaugcauaguuuccacac

SEQ ID NO: 1111766 - RNA, 19 nt, Artificial Sequence
  Description of Artificial Sequence: Synthetic oligonucleotide
aacaguagcuuccaaaagg

SEQ ID NO: 1111767 - RNA, 19 nt, Artificial Sequence
  Description of Artificial Sequence: Synthetic oligonucleotide
uaagacuaagaucugaugc

SEQ ID NO: 1111768 - RNA, 19 nt, Artificial Sequence
  Description of Artificial Sequence: Synthetic oligonucleotide
aauaccgcugguuuauugc

SEQ ID NO: 1111769 - RNA, 19 nt, Artificial Sequence
  Description of Artificial Sequence: Synthetic oligonucleotide
uccaauaucccaaagaagu

SEQ ID NO: 1111770 - RNA, 19 nt, Artificial Sequence
  Description of Artificial Sequence: Synthetic oligonucleotide
uacgcaauuaccauugagg

SEQ ID NO: 1111771 - RNA, 19 nt, Artificial Sequence
  Description of Artificial Sequence: Synthetic oligonucleotide
uuauaucccaccaagcaag

SEQ ID NO: 1111772 - RNA, 19 nt, Artificial Sequence
  Description of Artificial Sequence: Synthetic oligonucleotide
acggaaauuaguuaaaugu

SEQ ID NO: 1111773 - RNA, 19 nt, Artificial Sequence
  Description of Artificial Sequence: Synthetic oligonucleotide
uguacuagggcguauguag

SEQ ID NO: 1111774 - RNA, 19 nt, Artificial Sequence
  Description of Artificial Sequence: Synthetic oligonucleotide
uuguuugacacuacgaagc

SEQ ID NO: 1111775 - RNA, 19 nt, Artificial Sequence
  Description of Artificial Sequence: Synthetic oligonucleotide
aaauaauauccguacggag

SEQ ID NO: 1111776 - RNA, 19 nt, Artificial Sequence
  Description of Artificial Sequence: Synthetic oligonucleotide
uuaaaugugguugcuauag

SEQ ID NO: 1111777 - RNA, 19 nt, Artificial Sequence
  Description of Artificial Sequence: Synthetic oligonucleotide
uguauuauccauugaaccu

SEQ ID NO: 1111778 - RNA, 19 nt, Artificial Sequence
  Description of Artificial Sequence: Synthetic oligonucleotide
ucaacuaacggaaauuagu

SEQ ID NO: 1111779 - RNA, 19 nt, Artificial Sequence
  Description of Artificial Sequence: Synthetic oligonucleotide
uaagcauuaaggaauguaa

SEQ ID NO: 1111780 - RNA, 19 nt, Artificial Sequence
  Description of Artificial Sequence: Synthetic oligonucleotide
uacuaaaucuaagagaaca

SEQ ID NO: 1111781 - RNA, 19 nt, Artificial Sequence
  Description of Artificial Sequence: Synthetic oligonucleotide
uuuauugcggacuguaagc

SEQ ID NO: 1111782 - RNA, 19 nt, Artificial Sequence
  Description of Artificial Sequence: Synthetic oligonucleotide
aagauccuuacgcaauuac

SEQ ID NO: 1111783 - RNA, 19 nt, Artificial Sequence
  Description of Artificial Sequence: Synthetic oligonucleotide
cuuauagauucuuagggac

SEQ ID NO: 1111784 - RNA, 19 nt, Artificial Sequence
  Description of Artificial Sequence: Synthetic oligonucleotide
uguugauuuggucauauau

SEQ ID NO: 1111785 - RNA, 19 nt, Artificial Sequence
  Description of Artificial Sequence: Synthetic oligonucleotide
aaacagucuggcccaaggc

SEQ ID NO: 1111786 - RNA, 19 nt, Artificial Sequence
  Description of Artificial Sequence: Synthetic oligonucleotide
cuguauuauccauugaacc

SEQ ID NO: 1111787 - RNA, 19 nt, Artificial Sequence
  Description of Artificial Sequence: Synthetic oligonucleotide
aauaauauccguacggaga

SEQ ID NO: 1111788 - RNA, 19 nt, Artificial Sequence
  Description of Artificial Sequence: Synthetic oligonucleotide
uaagcaacugaaaugucug

SEQ ID NO: 1111789 - RNA, 19 nt, Artificial Sequence
  Description of Artificial Sequence: Synthetic oligonucleotide
uccuuuauaucccaccaag

SEQ ID NO: 1111790 - RNA, 19 nt, Artificial Sequence
  Description of Artificial Sequence: Synthetic oligonucleotide
aaugaauuggucccuugug

SEQ ID NO: 1111791 - RNA, 19 nt, Artificial Sequence
  Description of Artificial Sequence: Synthetic oligonucleotide
agauuuauaugccccgugg

SEQ ID NO: 1111792 - RNA, 19 nt, Artificial Sequence
  Description of Artificial Sequence: Synthetic oligonucleotide
aacggaaauuaguuaaaug

SEQ ID NO: 1111793 - RNA, 19 nt, Artificial Sequence
  Description of Artificial Sequence: Synthetic oligonucleotide
acuaacggaaauuaguuaa

SEQ ID NO: 1111794 - RNA, 19 nt, Artificial Sequence
  Description of Artificial Sequence: Synthetic oligonucleotide
ugagguauuugcuuuaagu

SEQ ID NO: 1111795 - RNA, 19 nt, Artificial Sequence
  Description of Artificial Sequence: Synthetic oligonucleotide
gagucugacaguuccaucc

SEQ ID NO: 1111796 - RNA, 19 nt, Artificial Sequence
  Description of Artificial Sequence: Synthetic oligonucleotide
guacuuauagauucuuagg

SEQ ID NO: 1111797 - RNA, 19 nt, Artificial Sequence
  Description of Artificial Sequence: Synthetic oligonucleotide
uuuauaucccaccaagcaa

SEQ ID NO: 1111798 - RNA, 19 nt, Artificial Sequence
  Description of Artificial Sequence: Synthetic oligonucleotide
ucuaagagaacacacugua

SEQ ID NO: 1111799 - RNA, 19 nt, Artificial Sequence
  Description of Artificial Sequence: Synthetic oligonucleotide
ucugaugcuuguuugacac

SEQ ID NO: 1111800 - RNA, 19 nt, Artificial Sequence
  Description of Artificial Sequence: Synthetic oligonucleotide
caaguaaacgucugaaggc

SEQ ID NO: 1111801 - RNA, 19 nt, Artificial Sequence
  Description of Artificial Sequence: Synthetic oligonucleotide
aaucuagugcaauucacau

SEQ ID NO: 1111802 - RNA, 19 nt, Artificial Sequence
  Description of Artificial Sequence: Synthetic oligonucleotide
uguagucccaauaaauuaa

SEQ ID NO: 1111803 - RNA, 19 nt, Artificial Sequence
  Description of Artificial Sequence: Synthetic oligonucleotide
uugauggcgucccauaacc

SEQ ID NO: 1111804 - RNA, 19 nt, Artificial Sequence
  Description of Artificial Sequence: Synthetic oligonucleotide
gucuauaagacuaagaucu

SEQ ID NO: 1111805 - RNA, 19 nt, Artificial Sequence
  Description of Artificial Sequence: Synthetic oligonucleotide
ucccauugggagaaaauag

SEQ ID NO: 1111806 - RNA, 19 nt, Artificial Sequence
  Description of Artificial Sequence: Synthetic oligonucleotide
gagguauuugcuuuaaguc

SEQ ID NO: 1111807 - RNA, 19 nt, Artificial Sequence
  Description of Artificial Sequence: Synthetic oligonucleotide
aaaugugguugcuauagaa

SEQ ID NO: 1111808 - RNA, 19 nt, Artificial Sequence
  Description of Artificial Sequence: Synthetic oligonucleotide
uuugucuauaagacuaaga

SEQ ID NO: 1111809 - RNA, 19 nt, Artificial Sequence
  Description of Artificial Sequence: Synthetic oligonucleotide
uauaagacuaagaucugau

SEQ ID NO: 1111810 - RNA, 19 nt, Artificial Sequence
  Description of Artificial Sequence: Synthetic oligonucleotide
aaaugcuuugauggcgucc

SEQ ID NO: 1111811 - RNA, 19 nt, Artificial Sequence
  Description of Artificial Sequence: Synthetic oligonucleotide
aguggucgcacucagaacu

SEQ ID NO: 1111812 - RNA, 19 nt, Artificial Sequence
  Description of Artificial Sequence: Synthetic oligonucleotide
aguagaaucugcaaaaccu

SEQ ID NO: 1111813 - RNA, 19 nt, Artificial Sequence
  Description of Artificial Sequence: Synthetic oligonucleotide
cuuguuugacacuacgaag

SEQ ID NO: 1111814 - RNA, 19 nt, Artificial Sequence
  Description of Artificial Sequence: Synthetic oligonucleotide
uucaacuaacggaaauuag

SEQ ID NO: 1111815 - RNA, 19 nt, Artificial Sequence
  Description of Artificial Sequence: Synthetic oligonucleotide
uaaccggacuguauuaucc

SEQ ID NO: 1111816 - RNA, 19 nt, Artificial Sequence
  Description of Artificial Sequence: Synthetic oligonucleotide
acuuauagauucuuaggga

SEQ ID NO: 1111817 - RNA, 19 nt, Artificial Sequence
  Description of Artificial Sequence: Synthetic oligonucleotide
uucuucgaguaaaauguag

SEQ ID NO: 1111818 - RNA, 19 nt, Artificial Sequence
  Description of Artificial Sequence: Synthetic oligonucleotide
acaagguaggaauugagau

SEQ ID NO: 1111819 - RNA, 19 nt, Artificial Sequence
  Description of Artificial Sequence: Synthetic oligonucleotide
auuuggucauauauguacc

SEQ ID NO: 1111820 - RNA, 19 nt, Artificial Sequence
  Description of Artificial Sequence: Synthetic oligonucleotide
uuauagauucuuagggacu

SEQ ID NO: 1111821 - RNA, 19 nt, Artificial Sequence
  Description of Artificial Sequence: Synthetic oligonucleotide
aaaaggucucuaauaccgc

SEQ ID NO: 1111822 - RNA, 19 nt, Artificial Sequence
  Description of Artificial Sequence: Synthetic oligonucleotide
gauggcgucccauaaccgg

SEQ ID NO: 1111823 - RNA, 19 nt, Artificial Sequence
  Description of Artificial Sequence: Synthetic oligonucleotide
augguugguacuuauagau

SEQ ID NO: 1111824 - RNA, 19 nt, Artificial Sequence
  Description of Artificial Sequence: Synthetic oligonucleotide
uguaagcuccugcagcuag

SEQ ID NO: 1111825 - RNA, 19 nt, Artificial Sequence
  Description of Artificial Sequence: Synthetic oligonucleotide
cuuggucuaaaucucuuag

SEQ ID NO: 1111826 - RNA, 19 nt, Artificial Sequence
  Description of Artificial Sequence: Synthetic oligonucleotide
uuauccauugaaccugaug

SEQ ID NO: 1111827 - RNA, 19 nt, Artificial Sequence
  Description of Artificial Sequence: Synthetic oligonucleotide
acuaaaucuaagagaacac

SEQ ID NO: 1111828 - RNA, 19 nt, Artificial Sequence
  Description of Artificial Sequence: Synthetic oligonucleotide
gauuuauaugccccguggc

SEQ ID NO: 1111829 - RNA, 19 nt, Artificial Sequence
  Description of Artificial Sequence: Synthetic oligonucleotide
auaauauccguacggagaa

SEQ ID NO: 1111830 - RNA, 19 nt, Artificial Sequence
  Description of Artificial Sequence: Synthetic oligonucleotide
uauagauucuuagggacug

SEQ ID NO: 1111831 - RNA, 19 nt, Artificial Sequence
  Description of Artificial Sequence: Synthetic oligonucleotide
agaaacguggaacuguccu

SEQ ID NO: 1111832 - RNA, 19 nt, Artificial Sequence
  Description of Artificial Sequence: Synthetic oligonucleotide
agcagauaguuccugucgg

SEQ ID NO: 1111833 - RNA, 19 nt, Artificial Sequence
  Description of Artificial Sequence: Synthetic oligonucleotide
agauaguuccugucgggac

SEQ ID NO: 1111834 - RNA, 19 nt, Artificial Sequence
  Description of Artificial Sequence: Synthetic oligonucleotide
agucaucagucucuaaauc

SEQ ID NO: 1111835 - RNA, 19 nt, Artificial Sequence
  Description of Artificial Sequence: Synthetic oligonucleotide
cauaauaccucuuauucaa

SEQ ID NO: 1111836 - RNA, 19 nt, Artificial Sequence
  Description of Artificial Sequence: Synthetic oligonucleotide
uuacgcaauuaccauugag

SEQ ID NO: 1111837 - RNA, 19 nt, Artificial Sequence
  Description of Artificial Sequence: Synthetic oligonucleotide
aaguaaacgucugaaggcu

SEQ ID NO: 1111838 - RNA, 19 nt, Artificial Sequence
  Description of Artificial Sequence: Synthetic oligonucleotide
auuuauaugccccguggcu

SEQ ID NO: 1111839 - RNA, 19 nt, Artificial Sequence
  Description of Artificial Sequence: Synthetic oligonucleotide
uauagaaacguggaacugu

SEQ ID NO: 1111840 - RNA, 19 nt, Artificial Sequence
  Description of Artificial Sequence: Synthetic oligonucleotide
aaaucuagugcaauucaca

SEQ ID NO: 1111841 - RNA, 19 nt, Artificial Sequence
  Description of Artificial Sequence: Synthetic oligonucleotide
agauccuuacgcaauuacc

SEQ ID NO: 1111842 - RNA, 19 nt, Artificial Sequence
  Description of Artificial Sequence: Synthetic oligonucleotide
guaggaauugagaugucgg

SEQ ID NO: 1111843 - RNA, 19 nt, Artificial Sequence
  Description of Artificial Sequence: Synthetic oligonucleotide
aguaaaauguagauguaca

SEQ ID NO: 1111844 - RNA, 19 nt, Artificial Sequence
  Description of Artificial Sequence: Synthetic oligonucleotide
auaagacuaagaucugaug

SEQ ID NO: 1111845 - RNA, 19 nt, Artificial Sequence
  Description of Artificial Sequence: Synthetic oligonucleotide
acgcaauuaccauugagga

SEQ ID NO: 1111846 - RNA, 19 nt, Artificial Sequence
  Description of Artificial Sequence: Synthetic oligonucleotide
uggucuaaaucucuuaguu

SEQ ID NO: 1111847 - RNA, 19 nt, Artificial Sequence
  Description of Artificial Sequence: Synthetic oligonucleotide
uccguacggagaaaacugg

SEQ ID NO: 1111848 - RNA, 19 nt, Artificial Sequence
  Description of Artificial Sequence: Synthetic oligonucleotide
cuuuauaucccaccaagca

SEQ ID NO: 1111849 - RNA, 19 nt, Artificial Sequence
  Description of Artificial Sequence: Synthetic oligonucleotide
auaccgcugguuuauugcg

SEQ ID NO: 1111850 - RNA, 19 nt, Artificial Sequence
  Description of Artificial Sequence: Synthetic oligonucleotide
gacuguaagcuccugcagc

SEQ ID NO: 1111851 - RNA, 19 nt, Artificial Sequence
  Description of Artificial Sequence: Synthetic oligonucleotide
uguucagauuuuccaagca

SEQ ID NO: 1111852 - RNA, 19 nt, Artificial Sequence
  Description of Artificial Sequence: Synthetic oligonucleotide
agauuuuccaagcagcaua

SEQ ID NO: 1111853 - RNA, 19 nt, Artificial Sequence
  Description of Artificial Sequence: Synthetic oligonucleotide
aauagucaaggaaugaauu

SEQ ID NO: 1111854 - RNA, 19 nt, Artificial Sequence
  Description of Artificial Sequence: Synthetic oligonucleotide
uucgaguaaaauguagaug

SEQ ID NO: 1111855 - RNA, 19 nt, Artificial Sequence
  Description of Artificial Sequence: Synthetic oligonucleotide
aaaccuccagcgaucagac

SEQ ID NO: 1111856 - RNA, 19 nt, Artificial Sequence
  Description of Artificial Sequence: Synthetic oligonucleotide
gauccuuacgcaauuacca

SEQ ID NO: 1111857 - RNA, 19 nt, Artificial Sequence
  Description of Artificial Sequence: Synthetic oligonucleotide
gaauuggucccuugugucc

SEQ ID NO: 1111858 - RNA, 19 nt, Artificial Sequence
  Description of Artificial Sequence: Synthetic oligonucleotide
ggaugguugguacuuauag

SEQ ID NO: 1111859 - RNA, 19 nt, Artificial Sequence
  Description of Artificial Sequence: Synthetic oligonucleotide
uaguaaagucaucagucuc

SEQ ID NO: 1111860 - RNA, 19 nt, Artificial Sequence
  Description of Artificial Sequence: Synthetic oligonucleotide
gguagauuuauaugccccg

SEQ ID NO: 1111861 - RNA, 19 nt, Artificial Sequence
  Description of Artificial Sequence: Synthetic oligonucleotide
ugacuucaaguguacuagg

SEQ ID NO: 1111862 - RNA, 19 nt, Artificial Sequence
  Description of Artificial Sequence: Synthetic oligonucleotide
gauagugaucuguagccca

SEQ ID NO: 1111863 - RNA, 19 nt, Artificial Sequence
  Description of Artificial Sequence: Synthetic oligonucleotide
aguuuucucauccaugauu

SEQ ID NO: 1111864 - RNA, 19 nt, Artificial Sequence
  Description of Artificial Sequence: Synthetic oligonucleotide
aauauccguacggagaaaa

SEQ ID NO: 1111865 - RNA, 19 nt, Artificial Sequence
  Description of Artificial Sequence: Synthetic oligonucleotide
aggucucuaauaccgcugg

SEQ ID NO: 1111866 - RNA, 19 nt, Artificial Sequence
  Description of Artificial Sequence: Synthetic oligonucleotide
augaauuggucccuugugu

SEQ ID NO: 1111867 - RNA, 19 nt, Artificial Sequence
  Description of Artificial Sequence: Synthetic oligonucleotide
auaaccggacuguauuauc

SEQ ID NO: 1111868 - RNA, 19 nt, Artificial Sequence
  Description of Artificial Sequence: Synthetic oligonucleotide
uguuugacacuacgaagcu

SEQ ID NO: 1111869 - RNA, 19 nt, Artificial Sequence
  Description of Artificial Sequence: Synthetic oligonucleotide
cucuacuaaaucuaagaga

SEQ ID NO: 1111870 - RNA, 19 nt, Artificial Sequence
  Description of Artificial Sequence: Synthetic oligonucleotide
gacuucaaguguacuaggg

SEQ ID NO: 1111871 - RNA, 19 nt, Artificial Sequence
  Description of Artificial Sequence: Synthetic oligonucleotide
aacuaacggaaauuaguua

SEQ ID NO: 1111872 - RNA, 19 nt, Artificial Sequence
  Description of Artificial Sequence: Synthetic oligonucleotide
uagauuuauaugccccgug

SEQ ID NO: 1111873 - RNA, 19 nt, Artificial Sequence
  Description of Artificial Sequence: Synthetic oligonucleotide
uccugacacaaaauaauau

SEQ ID NO: 1111874 - RNA, 19 nt, Artificial Sequence
  Description of Artificial Sequence: Synthetic oligonucleotide
auauauguacccaauaaua

SEQ ID NO: 1111875 - RNA, 19 nt, Artificial Sequence
  Description of Artificial Sequence: Synthetic oligonucleotide
ucucuaauaccgcugguuu

SEQ ID NO: 1111876 - RNA, 19 nt, Artificial Sequence
  Description of Artificial Sequence: Synthetic oligonucleotide
guacggagaaaacugggug

SEQ ID NO: 1111877 - RNA, 19 nt, Artificial Sequence
  Description of Artificial Sequence: Synthetic oligonucleotide
aggcgaacucguuuggugg

SEQ ID NO: 1111878 - RNA, 19 nt, Artificial Sequence
  Description of Artificial Sequence: Synthetic oligonucleotide
ucuuagggacuguaguccc

SEQ ID NO: 1111879 - RNA, 19 nt, Artificial Sequence
  Description of Artificial Sequence: Synthetic oligonucleotide
ugaauuggucccuuguguc

SEQ ID NO: 1111880 - RNA, 19 nt, Artificial Sequence
  Description of Artificial Sequence: Synthetic oligonucleotide
gaaacguggaacuguccug

SEQ ID NO: 1111881 - RNA, 19 nt, Artificial Sequence
  Description of Artificial Sequence: Synthetic oligonucleotide
uacggagaaaacugggugu

SEQ ID NO: 1111882 - RNA, 19 nt, Artificial Sequence
  Description of Artificial Sequence: Synthetic oligonucleotide
aaacuaguacaaaauccca

SEQ ID NO: 1111883 - RNA, 19 nt, Artificial Sequence
  Description of Artificial Sequence: Synthetic oligonucleotide
gcaauuaccauugaggaca

SEQ ID NO: 1111884 - RNA, 19 nt, Artificial Sequence
  Description of Artificial Sequence: Synthetic oligonucleotide
aguaaagucaucagucucu

SEQ ID NO: 1111885 - RNA, 19 nt, Artificial Sequence
  Description of Artificial Sequence: Synthetic oligonucleotide
gaugucgguggaugguugg

SEQ ID NO: 1111886 - RNA, 19 nt, Artificial Sequence
  Description of Artificial Sequence: Synthetic oligonucleotide
auagaaacguggaacuguc

SEQ ID NO: 1111887 - RNA, 19 nt, Artificial Sequence
  Description of Artificial Sequence: Synthetic oligonucleotide
gaaaucuagugcaauucac

SEQ ID NO: 1111888 - RNA, 19 nt, Artificial Sequence
  Description of Artificial Sequence: Synthetic oligonucleotide
agauguacaacugguguug

SEQ ID NO: 1111889 - RNA, 19 nt, Artificial Sequence
  Description of Artificial Sequence: Synthetic oligonucleotide
augaacauaauaccucuua

SEQ ID NO: 1111890 - RNA, 19 nt, Artificial Sequence
  Description of Artificial Sequence: Synthetic oligonucleotide
caauaucccaaagaaguac

SEQ ID NO: 1111891 - RNA, 19 nt, Artificial Sequence
  Description of Artificial Sequence: Synthetic oligonucleotide
aaacguggaacuguccugu

SEQ ID NO: 1111892 - RNA, 19 nt, Artificial Sequence
  Description of Artificial Sequence: Synthetic oligonucleotide
ugauggcgucccauaaccg

SEQ ID NO: 1111893 - RNA, 19 nt, Artificial Sequence
  Description of Artificial Sequence: Synthetic oligonucleotide
uaaaugugguugcuauaga

SEQ ID NO: 1111894 - RNA, 19 nt, Artificial Sequence
  Description of Artificial Sequence: Synthetic oligonucleotide
uauccguacggagaaaacu

SEQ ID NO: 1111895 - RNA, 19 nt, Artificial Sequence
  Description of Artificial Sequence: Synthetic oligonucleotide
agcaacugaaaugucuguc

SEQ ID NO: 1111896 - RNA, 19 nt, Artificial Sequence
  Description of Artificial Sequence: Synthetic oligonucleotide
cccguagcaacauaguugg

SEQ ID NO: 1111897 - RNA, 19 nt, Artificial Sequence
  Description of Artificial Sequence: Synthetic oligonucleotide
uucuuuccaagacaucauc

SEQ ID NO: 1111898 - RNA, 19 nt, Artificial Sequence
  Description of Artificial Sequence: Synthetic oligonucleotide
cagguagauuuauaugccc

SEQ ID NO: 1111899 - RNA, 19 nt, Artificial Sequence
  Description of Artificial Sequence: Synthetic oligonucleotide
ggcuccauuagacaggccc

SEQ ID NO: 1111900 - RNA, 19 nt, Artificial Sequence
  Description of Artificial Sequence: Synthetic oligonucleotide
gaugguugguacuuauaga

SEQ ID NO: 1111901 - RNA, 19 nt, Artificial Sequence
  Description of Artificial Sequence: Synthetic oligonucleotide
uaccucuuauucaacuaac

SEQ ID NO: 1111902 - RNA, 19 nt, Artificial Sequence
  Description of Artificial Sequence: Synthetic oligonucleotide
uaauaccgcugguuuauug

SEQ ID NO: 1111903 - RNA, 19 nt, Artificial Sequence
  Description of Artificial Sequence: Synthetic oligonucleotide
uuauugcggacuguaagcu

SEQ ID NO: 1111904 - RNA, 19 nt, Artificial Sequence
  Description of Artificial Sequence: Synthetic oligonucleotide
aaucccaacaaaggcaaaa

SEQ ID NO: 1111905 - RNA, 19 nt, Artificial Sequence
  Description of Artificial Sequence: Synthetic oligonucleotide
aauuggucccuugugucca

SEQ ID NO: 1111906 - RNA, 19 nt, Artificial Sequence
  Description of Artificial Sequence: Synthetic oligonucleotide
ucuaauaccgcugguuuau

SEQ ID NO: 1111907 - RNA, 19 nt, Artificial Sequence
  Description of Artificial Sequence: Synthetic oligonucleotide
uuggucuaaaucucuuagu

SEQ ID NO: 1111908 - RNA, 19 nt, Artificial Sequence
  Description of Artificial Sequence: Synthetic oligonucleotide
uccauugaaccugaugcca

SEQ ID NO: 1111909 - RNA, 19 nt, Artificial Sequence
  Description of Artificial Sequence: Synthetic oligonucleotide
agugaucuguagcccaaag

SEQ ID NO: 1111910 - RNA, 19 nt, Artificial Sequence
  Description of Artificial Sequence: Synthetic oligonucleotide
guugcuauagaaacgugga

SEQ ID NO: 1111911 - RNA, 19 nt, Artificial Sequence
  Description of Artificial Sequence: Synthetic oligonucleotide
agagccguacaguucuguc

SEQ ID NO: 1111912 - RNA, 19 nt, Artificial Sequence
  Description of Artificial Sequence: Synthetic oligonucleotide
ccucuuauucaacuaacgg

SEQ ID NO: 1111913 - RNA, 19 nt, Artificial Sequence
  Description of Artificial Sequence: Synthetic oligonucleotide
cccaauaauaacuccuggg

SEQ ID NO: 1111914 - RNA, 19 nt, Artificial Sequence
  Description of Artificial Sequence: Synthetic oligonucleotide
augcauaguuuccacacaa

SEQ ID NO: 1111915 - RNA, 19 nt, Artificial Sequence
  Description of Artificial Sequence: Synthetic oligonucleotide
uaccgcugguuuauugcgg

SEQ ID NO: 1111916 - RNA, 19 nt, Artificial Sequence
  Description of Artificial Sequence: Synthetic oligonucleotide
uaucccaaagaaguacucu

SEQ ID NO: 1111917 - RNA, 19 nt, Artificial Sequence
  Description of Artificial Sequence: Synthetic oligonucleotide
aagccgagcuacucgguca

SEQ ID NO: 1111918 - RNA, 19 nt, Artificial Sequence
  Description of Artificial Sequence: Synthetic oligonucleotide
acacacuguaucaguaugg

SEQ ID NO: 1111919 - RNA, 19 nt, Artificial Sequence
  Description of Artificial Sequence: Synthetic oligonucleotide
aagcaaguaaacgucugaa

SEQ ID NO: 1111920 - RNA, 19 nt, Artificial Sequence
  Description of Artificial Sequence: Synthetic oligonucleotide
ucaacucacucgcaguuuu

SEQ ID NO: 1111921 - RNA, 19 nt, Artificial Sequence
  Description of Artificial Sequence: Synthetic oligonucleotide
gucuaaaucucuuaguuuu

SEQ ID NO: 1111922 - RNA, 19 nt, Artificial Sequence
  Description of Artificial Sequence: Synthetic oligonucleotide
gcuagaaccaaguuucuuc

SEQ ID NO: 1111923 - RNA, 19 nt, Artificial Sequence
  Description of Artificial Sequence: Synthetic oligonucleotide
ccugacacaaaauaauauc

SEQ ID NO: 1111924 - RNA, 19 nt, Artificial Sequence
  Description of Artificial Sequence: Synthetic oligonucleotide
ucgcacucagaacuuacaa

SEQ ID NO: 1111925 - RNA, 19 nt, Artificial Sequence
  Description of Artificial Sequence: Synthetic oligonucleotide
gguaggaauugagaugucg

SEQ ID NO: 1111926 - RNA, 19 nt, Artificial Sequence
  Description of Artificial Sequence: Synthetic oligonucleotide
auucaacuaacggaaauua

SEQ ID NO: 1111927 - RNA, 19 nt, Artificial Sequence
  Description of Artificial Sequence: Synthetic oligonucleotide
ugaagauccuuacgcaauu

SEQ ID NO: 1111928 - RNA, 19 nt, Artificial Sequence
  Description of Artificial Sequence: Synthetic oligonucleotide
aaguguacuagggcguaug

SEQ ID NO: 1111929 - RNA, 19 nt, Artificial Sequence
  Description of Artificial Sequence: Synthetic oligonucleotide
accucuuauucaacuaacg

SEQ ID NO: 1111930 - RNA, 19 nt, Artificial Sequence
  Description of Artificial Sequence: Synthetic oligonucleotide
ggugucuaagucuugucac

SEQ ID NO: 1111931 - RNA, 19 nt, Artificial Sequence
  Description of Artificial Sequence: Synthetic oligonucleotide
gcagcuagaaccaaguuuc

SEQ ID NO: 1111932 - RNA, 19 nt, Artificial Sequence
  Description of Artificial Sequence: Synthetic oligonucleotide
guguccuuuauaucccacc

SEQ ID NO: 1111933 - RNA, 19 nt, Artificial Sequence
  Description of Artificial Sequence: Synthetic oligonucleotide
acggagaaaacuggguguc

SEQ ID NO: 1111934 - RNA, 19 nt, Artificial Sequence
  Description of Artificial Sequence: Synthetic oligonucleotide
uagaaacguggaacugucc

SEQ ID NO: 1111935 - RNA, 19 nt, Artificial Sequence
  Description of Artificial Sequence: Synthetic oligonucleotide
aauuugggugaaaucuagu

SEQ ID NO: 1111936 - RNA, 19 nt, Artificial Sequence
  Description of Artificial Sequence: Synthetic oligonucleotide
aacucacucgcaguuuucu

SEQ ID NO: 1111937 - RNA, 19 nt, Artificial Sequence
  Description of Artificial Sequence: Synthetic oligonucleotide
guaaacgucugaaggcucc

SEQ ID NO: 1111938 - RNA, 19 nt, Artificial Sequence
  Description of Artificial Sequence: Synthetic oligonucleotide
auccguacggagaaaacug

SEQ ID NO: 1111939 - RNA, 19 nt, Artificial Sequence
  Description of Artificial Sequence: Synthetic oligonucleotide
auaauaacuccugggaauu

SEQ ID NO: 1111940 - RNA, 19 nt, Artificial Sequence
  Description of Artificial Sequence: Synthetic oligonucleotide
agagcccguagcaacauag

SEQ ID NO: 1111941 - RNA, 19 nt, Artificial Sequence
  Description of Artificial Sequence: Synthetic oligonucleotide
aaggucucuaauaccgcug

SEQ ID NO: 1111942 - RNA, 19 nt, Artificial Sequence
  Description of Artificial Sequence: Synthetic oligonucleotide
ucccuuguguccagugaag

SEQ ID NO: 1111943 - RNA, 19 nt, Artificial Sequence
  Description of Artificial Sequence: Synthetic oligonucleotide
gugaccauacaaaaucuuc

SEQ ID NO: 1111944 - RNA, 19 nt, Artificial Sequence
  Description of Artificial Sequence: Synthetic oligonucleotide
ccuuacgcaauuaccauug

SEQ ID NO: 1111945 - RNA, 19 nt, Artificial Sequence
  Description of Artificial Sequence: Synthetic oligonucleotide
ugucugacuucaaguguac

SEQ ID NO: 1111946 - RNA, 19 nt, Artificial Sequence
  Description of Artificial Sequence: Synthetic oligonucleotide
auaucccaaagaaguacuc

SEQ ID NO: 1111947 - RNA, 19 nt, Artificial Sequence
  Description of Artificial Sequence: Synthetic oligonucleotide
cuacuaaaucuaagagaac

SEQ ID NO: 1111948 - RNA, 19 nt, Artificial Sequence
  Description of Artificial Sequence: Synthetic oligonucleotide
gacuaagaucugaugcuug

SEQ ID NO: 1111949 - RNA, 19 nt, Artificial Sequence
  Description of Artificial Sequence: Synthetic oligonucleotide
uuguagaguggucgcacuc

SEQ ID NO: 1111950 - RNA, 19 nt, Artificial Sequence
  Description of Artificial Sequence: Synthetic oligonucleotide
ugguacuuauagauucuua

SEQ ID NO: 1111951 - RNA, 19 nt, Artificial Sequence
  Description of Artificial Sequence: Synthetic oligonucleotide
aguaaacgucugaaggcuc

SEQ ID NO: 1111952 - RNA, 19 nt, Artificial Sequence
  Description of Artificial Sequence: Synthetic oligonucleotide
gaucagacuggaaucaucu

SEQ ID NO: 1111953 - RNA, 19 nt, Artificial Sequence
  Description of Artificial Sequence: Synthetic oligonucleotide
aguguacuagggcguaugu

SEQ ID NO: 1111954 - RNA, 19 nt, Artificial Sequence
  Description of Artificial Sequence: Synthetic oligonucleotide
ggaauucucagguagauuu

SEQ ID NO: 1111955 - RNA, 19 nt, Artificial Sequence
  Description of Artificial Sequence: Synthetic oligonucleotide
auauccguacggagaaaac

SEQ ID NO: 1111956 - RNA, 19 nt, Artificial Sequence
  Description of Artificial Sequence: Synthetic oligonucleotide
aucugaugcuuguuugaca

SEQ ID NO: 1111957 - RNA, 19 nt, Artificial Sequence
  Description of Artificial Sequence: Synthetic oligonucleotide
acguggaacuguccuguuc

SEQ ID NO: 1111958 - RNA, 19 nt, Artificial Sequence
  Description of Artificial Sequence: Synthetic oligonucleotide
cuguagucccaauaaauua

SEQ ID NO: 1111959 - RNA, 19 nt, Artificial Sequence
  Description of Artificial Sequence: Synthetic oligonucleotide
gaaugaauuggucccuugu

SEQ ID NO: 1111960 - RNA, 19 nt, Artificial Sequence
  Description of Artificial Sequence: Synthetic oligonucleotide
aucagacuggaaucaucug

SEQ ID NO: 1111961 - RNA, 19 nt, Artificial Sequence
  Description of Artificial Sequence: Synthetic oligonucleotide
ucguuugguggucucuuuc

SEQ ID NO: 1111962 - RNA, 19 nt, Artificial Sequence
  Description of Artificial Sequence: Synthetic oligonucleotide
gccuuuuaauucuccaacc

SEQ ID NO: 1111963 - RNA, 19 nt, Artificial Sequence
  Description of Artificial Sequence: Synthetic oligonucleotide
uauugcggacuguaagcuc

SEQ ID NO: 1111964 - RNA, 19 nt, Artificial Sequence
  Description of Artificial Sequence: Synthetic oligonucleotide
cuggagguaagcaacugaa

SEQ ID NO: 1111965 - RNA, 19 nt, Artificial Sequence
  Description of Artificial Sequence: Synthetic oligonucleotide
aucuguagcccaaagccga

SEQ ID NO: 1111966 - RNA, 19 nt, Artificial Sequence
  Description of Artificial Sequence: Synthetic oligonucleotide
uggcuuguagaguggucgc

SEQ ID NO: 1111967 - RNA, 19 nt, Artificial Sequence
  Description of Artificial Sequence: Synthetic oligonucleotide
agucaaggaaugaauuggu

SEQ ID NO: 1111968 - RNA, 19 nt, Artificial Sequence
  Description of Artificial Sequence: Synthetic oligonucleotide
cggaaauuaguuaaaugug

SEQ ID NO: 1111969 - RNA, 19 nt, Artificial Sequence
  Description of Artificial Sequence: Synthetic oligonucleotide
uccuuacgcaauuaccauu

SEQ ID NO: 1111970 - RNA, 19 nt, Artificial Sequence
  Description of Artificial Sequence: Synthetic oligonucleotide
cuauaagacuaagaucuga

SEQ ID NO: 1111971 - RNA, 19 nt, Artificial Sequence
  Description of Artificial Sequence: Synthetic oligonucleotide
aauauccuuaaaggcugau

SEQ ID NO: 1111972 - RNA, 19 nt, Artificial Sequence
  Description of Artificial Sequence: Synthetic oligonucleotide
ccaaagccgagcuacucgg

SEQ ID NO: 1111973 - RNA, 19 nt, Artificial Sequence
  Description of Artificial Sequence: Synthetic oligonucleotide
aaacgucugaaggcuccag

SEQ ID NO: 1111974 - RNA, 19 nt, Artificial Sequence
  Description of Artificial Sequence: Synthetic oligonucleotide
ugagaugucgguggauggu

SEQ ID NO: 1111975 - RNA, 19 nt, Artificial Sequence
  Description of Artificial Sequence: Synthetic oligonucleotide
ugguuuauugcggacugua

SEQ ID NO: 1111976 - RNA, 19 nt, Artificial Sequence
  Description of Artificial Sequence: Synthetic oligonucleotide
guaagcauuaaggaaugua

SEQ ID NO: 1111977 - RNA, 19 nt, Artificial Sequence
  Description of Artificial Sequence: Synthetic oligonucleotide
ccacacaauccaaagcacc

SEQ ID NO: 1111978 - RNA, 19 nt, Artificial Sequence
  Description of Artificial Sequence: Synthetic oligonucleotide
uaguuguguccuuuauauc

SEQ ID NO: 1111979 - RNA, 19 nt, Artificial Sequence
  Description of Artificial Sequence: Synthetic oligonucleotide
gcuuguuugacacuacgaa

SEQ ID NO: 1111980 - RNA, 19 nt, Artificial Sequence
  Description of Artificial Sequence: Synthetic oligonucleotide
agcgaucagacuggaauca

SEQ ID NO: 1111981 - RNA, 19 nt, Artificial Sequence
  Description of Artificial Sequence: Synthetic oligonucleotide
guagcaacauaguuggaau

SEQ ID NO: 1111982 - RNA, 19 nt, Artificial Sequence
  Description of Artificial Sequence: Synthetic oligonucleotide
accgcugguuuauugcgga

SEQ ID NO: 1111983 - RNA, 19 nt, Artificial Sequence
  Description of Artificial Sequence: Synthetic oligonucleotide
gucgguggaugguugguac

SEQ ID NO: 1111984 - RNA, 19 nt, Artificial Sequence
  Description of Artificial Sequence: Synthetic oligonucleotide
ggcuguaguaaagucauca

SEQ ID NO: 1111985 - RNA, 19 nt, Artificial Sequence
  Description of Artificial Sequence: Synthetic oligonucleotide
guacuagggcguauguagc

SEQ ID NO: 1111986 - RNA, 19 nt, Artificial Sequence
  Description of Artificial Sequence: Synthetic oligonucleotide
ggcguauguagccauguca

SEQ ID NO: 1111987 - RNA, 19 nt, Artificial Sequence
  Description of Artificial Sequence: Synthetic oligonucleotide
aacucguuugguggucucu

SEQ ID NO: 1111988 - RNA, 19 nt, Artificial Sequence
  Description of Artificial Sequence: Synthetic oligonucleotide
ugggaauucucagguagau

SEQ ID NO: 1111989 - RNA, 19 nt, Artificial Sequence
  Description of Artificial Sequence: Synthetic oligonucleotide
ggagaaaacuggguguccc

SEQ ID NO: 1111990 - RNA, 19 nt, Artificial Sequence
  Description of Artificial Sequence: Synthetic oligonucleotide
caacuaacggaaauuaguu

SEQ ID NO: 1111991 - RNA, 19 nt, Artificial Sequence
  Description of Artificial Sequence: Synthetic oligonucleotide
accaagcaaguaaacgucu

SEQ ID NO: 1111992 - RNA, 19 nt, Artificial Sequence
  Description of Artificial Sequence: Synthetic oligonucleotide
uaaacgucugaaggcucca

SEQ ID NO: 1111993 - RNA, 19 nt, Artificial Sequence
  Description of Artificial Sequence: Synthetic oligonucleotide
uaguuaaaugugguugcua

SEQ ID NO: 1111994 - RNA, 19 nt, Artificial Sequence
  Description of Artificial Sequence: Synthetic oligonucleotide
guauguagccaugucagcu

SEQ ID NO: 1111995 - RNA, 19 nt, Artificial Sequence
  Description of Artificial Sequence: Synthetic oligonucleotide
cugucugcagagcccguag

SEQ ID NO: 1111996 - RNA, 19 nt, Artificial Sequence
  Description of Artificial Sequence: Synthetic oligonucleotide
aauuaccauugaggacauc

SEQ ID NO: 1111997 - RNA, 19 nt, Artificial Sequence
  Description of Artificial Sequence: Synthetic oligonucleotide
guuccugucgggacugaag

SEQ ID NO: 1111998 - RNA, 19 nt, Artificial Sequence
  Description of Artificial Sequence: Synthetic oligonucleotide
caucaagccauguccaaua

SEQ ID NO: 1111999 - RNA, 19 nt, Artificial Sequence
  Description of Artificial Sequence: Synthetic oligonucleotide
cuucgaguaaaauguagau

SEQ ID NO: 1112000 - RNA, 19 nt, Artificial Sequence
  Description of Artificial Sequence: Synthetic oligonucleotide
uaugccccguggcuguagu

SEQ ID NO: 1112001 - RNA, 19 nt, Artificial Sequence
  Description of Artificial Sequence: Synthetic oligonucleotide
cuguaguaaagucaucagu

SEQ ID NO: 1112002 - RNA, 19 nt, Artificial Sequence
  Description of Artificial Sequence: Synthetic oligonucleotide
gggacuguagucccaauaa

SEQ ID NO: 1112003 - RNA, 19 nt, Artificial Sequence
  Description of Artificial Sequence: Synthetic oligonucleotide
uagggcguauguagccaug

SEQ ID NO: 1112004 - RNA, 19 nt, Artificial Sequence
  Description of Artificial Sequence: Synthetic oligonucleotide
agacuaagaucugaugcuu

SEQ ID NO: 1112005 - RNA, 19 nt, Artificial Sequence
  Description of Artificial Sequence: Synthetic oligonucleotide
uugguacuuauagauucuu

SEQ ID NO: 1112006 - RNA, 19 nt, Artificial Sequence
  Description of Artificial Sequence: Synthetic oligonucleotide
uuugggugucacagaccac

SEQ ID NO: 1112007 - RNA, 19 nt, Artificial Sequence
  Description of Artificial Sequence: Synthetic oligonucleotide
gacuguagucccaauaaau

SEQ ID NO: 1112008 - RNA, 19 nt, Artificial Sequence
  Description of Artificial Sequence: Synthetic oligonucleotide
ucccaccaagcaaguaaac

SEQ ID NO: 1112009 - RNA, 19 nt, Artificial Sequence
  Description of Artificial Sequence: Synthetic oligonucleotide
agggacuguagucccaaua

SEQ ID NO: 1112010 - RNA, 19 nt, Artificial Sequence
  Description of Artificial Sequence: Synthetic oligonucleotide
guacaacugguguugauuu

SEQ ID NO: 1112011 - RNA, 19 nt, Artificial Sequence
  Description of Artificial Sequence: Synthetic oligonucleotide
augucagcugacauagagu

SEQ ID NO: 1112012 - RNA, 19 nt, Artificial Sequence
  Description of Artificial Sequence: Synthetic oligonucleotide
cucccagauccauguagac

SEQ ID NO: 1112013 - RNA, 19 nt, Artificial Sequence
  Description of Artificial Sequence: Synthetic oligonucleotide
ucgguggaugguugguacu

SEQ ID NO: 1112014 - RNA, 19 nt, Artificial Sequence
  Description of Artificial Sequence: Synthetic oligonucleotide
ggaaugaauuggucccuug

SEQ ID NO: 1112015 - RNA, 19 nt, Artificial Sequence
  Description of Artificial Sequence: Synthetic oligonucleotide
cuuugauggcgucccauaa

SEQ ID NO: 1112016 - RNA, 19 nt, Artificial Sequence
  Description of Artificial Sequence: Synthetic oligonucleotide
auugaaccugaugccaaaa

SEQ ID NO: 1112017 - RNA, 19 nt, Artificial Sequence
  Description of Artificial Sequence: Synthetic oligonucleotide
cccaaggcgaacucguuug

SEQ ID NO: 1112018 - RNA, 19 nt, Artificial Sequence
  Description of Artificial Sequence: Synthetic oligonucleotide
aacuaggcagugacuuggu

SEQ ID NO: 1112019 - RNA, 19 nt, Artificial Sequence
  Description of Artificial Sequence: Synthetic oligonucleotide
gcccguagcaacauaguug

SEQ ID NO: 1112020 - RNA, 19 nt, Artificial Sequence
  Description of Artificial Sequence: Synthetic oligonucleotide
ccaagcaaguaaacgucug

SEQ ID NO: 1112021 - RNA, 19 nt, Artificial Sequence
  Description of Artificial Sequence: Synthetic oligonucleotide
cugugaccauacaaaaucu

SEQ ID NO: 1112022 - RNA, 19 nt, Artificial Sequence
  Description of Artificial Sequence: Synthetic oligonucleotide
ccguacggagaaaacuggg

SEQ ID NO: 1112023 - RNA, 19 nt, Artificial Sequence
  Description of Artificial Sequence: Synthetic oligonucleotide
ggugucccauacuggguag

SEQ ID NO: 1112024 - RNA, 19 nt, Artificial Sequence
  Description of Artificial Sequence: Synthetic oligonucleotide
uugcggacuguaagcuccu

SEQ ID NO: 1112025 - RNA, 19 nt, Artificial Sequence
  Description of Artificial Sequence: Synthetic oligonucleotide
cuccauuagacaggcccac

SEQ ID NO: 1112026 - RNA, 19 nt, Artificial Sequence
  Description of Artificial Sequence: Synthetic oligonucleotide
ggcccugguaagcauuaag

SEQ ID NO: 1112027 - RNA, 19 nt, Artificial Sequence
  Description of Artificial Sequence: Synthetic oligonucleotide
gcaauucacaucagcaaga

SEQ ID NO: 1112028 - RNA, 19 nt, Artificial Sequence
  Description of Artificial Sequence: Synthetic oligonucleotide
auagugaucuguagcccaa

SEQ ID NO: 1112029 - RNA, 19 nt, Artificial Sequence
  Description of Artificial Sequence: Synthetic oligonucleotide
uucaacucacucgcaguuu

SEQ ID NO: 1112030 - RNA, 19 nt, Artificial Sequence
  Description of Artificial Sequence: Synthetic oligonucleotide
uccauuagacaggcccacu

SEQ ID NO: 1112031 - RNA, 19 nt, Artificial Sequence
  Description of Artificial Sequence: Synthetic oligonucleotide
agaugucgguggaugguug

SEQ ID NO: 1112032 - RNA, 19 nt, Artificial Sequence
  Description of Artificial Sequence: Synthetic oligonucleotide
guaaacagucuggcccaag

SEQ ID NO: 1112033 - RNA, 19 nt, Artificial Sequence
  Description of Artificial Sequence: Synthetic oligonucleotide
uccuguagccaggaaucuc

SEQ ID NO: 1112034 - RNA, 19 nt, Artificial Sequence
  Description of Artificial Sequence: Synthetic oligonucleotide
aacguggaacuguccuguu

SEQ ID NO: 1112035 - RNA, 19 nt, Artificial Sequence
  Description of Artificial Sequence: Synthetic oligonucleotide
cauugaaccugaugccaaa

SEQ ID NO: 1112036 - RNA, 19 nt, Artificial Sequence
  Description of Artificial Sequence: Synthetic oligonucleotide
aucccaccaagcaaguaaa

SEQ ID NO: 1112037 - RNA, 19 nt, Artificial Sequence
  Description of Artificial Sequence: Synthetic oligonucleotide
gguaguuguguccuuuaua

SEQ ID NO: 1112038 - RNA, 19 nt, Artificial Sequence
  Description of Artificial Sequence: Synthetic oligonucleotide
gaacucguuugguggucuc

SEQ ID NO: 1112039 - RNA, 19 nt, Artificial Sequence
  Description of Artificial Sequence: Synthetic oligonucleotide
auggcgucccauaaccgga

SEQ ID NO: 1112040 - RNA, 19 nt, Artificial Sequence
  Description of Artificial Sequence: Synthetic oligonucleotide
cucuaauaccgcugguuua

SEQ ID NO: 1112041 - RNA, 19 nt, Artificial Sequence
  Description of Artificial Sequence: Synthetic oligonucleotide
guaaagucaucagucucua

SEQ ID NO: 1112042 - RNA, 19 nt, Artificial Sequence
  Description of Artificial Sequence: Synthetic oligonucleotide
uaauauccguacggagaaa

SEQ ID NO: 1112043 - RNA, 19 nt, Artificial Sequence
  Description of Artificial Sequence: Synthetic oligonucleotide
cagauaguuccugucggga

SEQ ID NO: 1112044 - RNA, 19 nt, Artificial Sequence
  Description of Artificial Sequence: Synthetic oligonucleotide
cucgcaguuuucucaucca

SEQ ID NO: 1112045 - RNA, 19 nt, Artificial Sequence
  Description of Artificial Sequence: Synthetic oligonucleotide
acauagaguguggugucua

SEQ ID NO: 1112046 - RNA, 19 nt, Artificial Sequence
  Description of Artificial Sequence: Synthetic oligonucleotide
gaagauccuuacgcaauua

SEQ ID NO: 1112047 - RNA, 19 nt, Artificial Sequence
  Description of Artificial Sequence: Synthetic oligonucleotide
ugucgguggaugguuggua

SEQ ID NO: 1112048 - RNA, 19 nt, Artificial Sequence
  Description of Artificial Sequence: Synthetic oligonucleotide
cuuacgcaauuaccauuga

SEQ ID NO: 1112049 - RNA, 19 nt, Artificial Sequence
  Description of Artificial Sequence: Synthetic oligonucleotide
uccugggaauucucaggua

SEQ ID NO: 1112050 - RNA, 19 nt, Artificial Sequence
  Description of Artificial Sequence: Synthetic oligonucleotide
agccgagcuacucggucau

SEQ ID NO: 1112051 - RNA, 19 nt, Artificial Sequence
  Description of Artificial Sequence: Synthetic oligonucleotide
guagauuuauaugccccgu

SEQ ID NO: 1112052 - RNA, 19 nt, Artificial Sequence
  Description of Artificial Sequence: Synthetic oligonucleotide
aggagagcagauaguuccu

SEQ ID NO: 1112053 - RNA, 19 nt, Artificial Sequence
  Description of Artificial Sequence: Synthetic oligonucleotide
cuguccuguucagauuuuc

SEQ ID NO: 1112054 - RNA, 19 nt, Artificial Sequence
  Description of Artificial Sequence: Synthetic oligonucleotide
ccaaguuucuucgaguaaa

SEQ ID NO: 1112055 - RNA, 19 nt, Artificial Sequence
  Description of Artificial Sequence: Synthetic oligonucleotide
uagugaucuguagcccaaa

SEQ ID NO: 1112056 - RNA, 19 nt, Artificial Sequence
  Description of Artificial Sequence: Synthetic oligonucleotide
ccgagcuacucggucaugg

SEQ ID NO: 1112057 - RNA, 19 nt, Artificial Sequence
  Description of Artificial Sequence: Synthetic oligonucleotide
gucgcacucagaacuuaca

SEQ ID NO: 1112058 - RNA, 19 nt, Artificial Sequence
  Description of Artificial Sequence: Synthetic oligonucleotide
acucguuugguggucucuu

SEQ ID NO: 1112059 - RNA, 19 nt, Artificial Sequence
  Description of Artificial Sequence: Synthetic oligonucleotide
cgcaauuaccauugaggac

SEQ ID NO: 1112060 - RNA, 19 nt, Artificial Sequence
  Description of Artificial Sequence: Synthetic oligonucleotide
ccaaggcgaacucguuugg

SEQ ID NO: 1112061 - RNA, 19 nt, Artificial Sequence
  Description of Artificial Sequence: Synthetic oligonucleotide
auaugccccguggcuguag

SEQ ID NO: 1112062 - RNA, 19 nt, Artificial Sequence
  Description of Artificial Sequence: Synthetic oligonucleotide
cuucaacucacucgcaguu

SEQ ID NO: 1112063 - RNA, 19 nt, Artificial Sequence
  Description of Artificial Sequence: Synthetic oligonucleotide
augucgguggaugguuggu

SEQ ID NO: 1112064 - RNA, 19 nt, Artificial Sequence
  Description of Artificial Sequence: Synthetic oligonucleotide
guaagcuccugcagcuaga

SEQ ID NO: 1112065 - RNA, 19 nt, Artificial Sequence
  Description of Artificial Sequence: Synthetic oligonucleotide
gacauagaguguggugucu

SEQ ID NO: 1112066 - RNA, 19 nt, Artificial Sequence
  Description of Artificial Sequence: Synthetic oligonucleotide
cacugcagugaggcccugg

SEQ ID NO: 1112067 - RNA, 19 nt, Artificial Sequence
  Description of Artificial Sequence: Synthetic oligonucleotide
cucggucauggccuccuga

SEQ ID NO: 1112068 - RNA, 19 nt, Artificial Sequence
  Description of Artificial Sequence: Synthetic oligonucleotide
ggucgcacucagaacuuac

SEQ ID NO: 1112069 - RNA, 19 nt, Artificial Sequence
  Description of Artificial Sequence: Synthetic oligonucleotide
cauaaccggacuguauuau

SEQ ID NO: 1112070 - RNA, 19 nt, Artificial Sequence
  Description of Artificial Sequence: Synthetic oligonucleotide
auaucccaccaagcaagua

SEQ ID NO: 1112071 - RNA, 19 nt, Artificial Sequence
  Description of Artificial Sequence: Synthetic oligonucleotide
uggucgcacucagaacuua

SEQ ID NO: 1112072 - RNA, 19 nt, Artificial Sequence
  Description of Artificial Sequence: Synthetic oligonucleotide
guguacuagggcguaugua

SEQ ID NO: 1112073 - RNA, 19 nt, Artificial Sequence
  Description of Artificial Sequence: Synthetic oligonucleotide
ugcggacuguaagcuccug

SEQ ID NO: 1112074 - RNA, 19 nt, Artificial Sequence
  Description of Artificial Sequence: Synthetic oligonucleotide
gucucuaauaccgcugguu

SEQ ID NO: 1112075 - RNA, 19 nt, Artificial Sequence
  Description of Artificial Sequence: Synthetic oligonucleotide
guggaugguugguacuuau

SEQ ID NO: 1112076 - RNA, 19 nt, Artificial Sequence
  Description of Artificial Sequence: Synthetic oligonucleotide
gcccacugugaccauacaa

SEQ ID NO: 1112077 - RNA, 19 nt, Artificial Sequence
  Description of Artificial Sequence: Synthetic oligonucleotide
gagaugucgguggaugguu

SEQ ID NO: 1112078 - RNA, 19 nt, Artificial Sequence
  Description of Artificial Sequence: Synthetic oligonucleotide
guagcccaaagccgagcua

SEQ ID NO: 1112079 - RNA, 19 nt, Artificial Sequence
  Description of Artificial Sequence: Synthetic oligonucleotide
caauuaccauugaggacau

SEQ ID NO: 1112080 - RNA, 19 nt, Artificial Sequence
  Description of Artificial Sequence: Synthetic oligonucleotide
cgaucagacuggaaucauc

SEQ ID NO: 1112081 - RNA, 19 nt, Artificial Sequence
  Description of Artificial Sequence: Synthetic oligonucleotide
uauaugccccguggcugua

SEQ ID NO: 1112082 - RNA, 19 nt, Artificial Sequence
  Description of Artificial Sequence: Synthetic oligonucleotide
gaaccuggaaaagcugguu

SEQ ID NO: 1112083 - RNA, 19 nt, Artificial Sequence
  Description of Artificial Sequence: Synthetic oligonucleotide
ccauccucugaagaggaga

SEQ ID NO: 1112084 - RNA, 19 nt, Artificial Sequence
  Description of Artificial Sequence: Synthetic oligonucleotide
gcuacucggucauggccuc

SEQ ID NO: 1112085 - RNA, 19 nt, Artificial Sequence
  Description of Artificial Sequence: Synthetic oligonucleotide
cagucuggcccaaggcgaa

SEQ ID NO: 1112086 - RNA, 19 nt, Artificial Sequence
  Description of Artificial Sequence: Synthetic oligonucleotide
cuagggcguauguagccau

SEQ ID NO: 1112087 - RNA, 19 nt, Artificial Sequence
  Description of Artificial Sequence: Synthetic oligonucleotide
cgagcuacucggucauggc

SEQ ID NO: 1112088 - RNA, 19 nt, Artificial Sequence
  Description of Artificial Sequence: Synthetic oligonucleotide
uaguuccugucgggacuga

SEQ ID NO: 1112089 - RNA, 19 nt, Artificial Sequence
  Description of Artificial Sequence: Synthetic oligonucleotide
aaucucccauugggagaaa

SEQ ID NO: 1112090 - RNA, 19 nt, Artificial Sequence
  Description of Artificial Sequence: Synthetic oligonucleotide
gccguacaguucugucugc

SEQ ID NO: 1112091 - RNA, 19 nt, Artificial Sequence
  Description of Artificial Sequence: Synthetic oligonucleotide
ccauaaccggacuguauua

SEQ ID NO: 1112092 - RNA, 19 nt, Artificial Sequence
  Description of Artificial Sequence: Synthetic oligonucleotide
ggcgaacucguuugguggu

SEQ ID NO: 1112093 - RNA, 19 nt, Artificial Sequence
  Description of Artificial Sequence: Synthetic oligonucleotide
augccccguggcuguagua

SEQ ID NO: 1112094 - RNA, 19 nt, Artificial Sequence
  Description of Artificial Sequence: Synthetic oligonucleotide
caaggcgaacucguuuggu

SEQ ID NO: 1112095 - RNA, 19 nt, Artificial Sequence
  Description of Artificial Sequence: Synthetic oligonucleotide
cguacggagaaaacugggu

SEQ ID NO: 1112096 - RNA, 19 nt, Artificial Sequence
  Description of Artificial Sequence: Synthetic oligonucleotide
cggagaaaacugggugucc

SEQ ID NO: 1112097 - RNA, 19 nt, Artificial Sequence
  Description of Artificial Sequence: Synthetic oligonucleotide
gguaaacagucuggcccaa

SEQ ID NO: 1112098 - RNA, 19 nt, Artificial Sequence
  Description of Artificial Sequence: Synthetic oligonucleotide
gguggaugguugguacuua

SEQ ID NO: 1112099 - RNA, 19 nt, Artificial Sequence
  Description of Artificial Sequence: Synthetic oligonucleotide
ccgcugguuuauugcggac

SEQ ID NO: 1112100 - RNA, 19 nt, Artificial Sequence
  Description of Artificial Sequence: Synthetic oligonucleotide
ggucucuaauaccgcuggu

SEQ ID NO: 1112101 - RNA, 19 nt, Artificial Sequence
  Description of Artificial Sequence: Synthetic oligonucleotide
gcgaacucguuuggugguc

SEQ ID NO: 1112102 - RNA, 19 nt, Artificial Sequence
  Description of Artificial Sequence: Synthetic oligonucleotide
cagagcccguagcaacaua

SEQ ID NO: 1112103 - RNA, 19 nt, Artificial Sequence
  Description of Artificial Sequence: Synthetic oligonucleotide
gggugaaaucuagugcaau

SEQ ID NO: 1112104 - RNA, 19 nt, Artificial Sequence
  Description of Artificial Sequence: Synthetic oligonucleotide
cuaauaccgcugguuuauu

SEQ ID NO: 1112105 - RNA, 19 nt, Artificial Sequence
  Description of Artificial Sequence: Synthetic oligonucleotide
caaguguacuagggcguau

SEQ ID NO: 1112106 - RNA, 19 nt, Artificial Sequence
  Description of Artificial Sequence: Synthetic oligonucleotide
guggucgcacucagaacuu

SEQ ID NO: 1112107 - RNA, 19 nt, Artificial Sequence
  Description of Artificial Sequence: Synthetic oligonucleotide
ccaucaagccauguccaau

SEQ ID NO: 1112108 - RNA, 19 nt, Artificial Sequence
  Description of Artificial Sequence: Synthetic oligonucleotide
ccguagcaacauaguugga

SEQ ID NO: 1112109 - RNA, 19 nt, Artificial Sequence
  Description of Artificial Sequence: Synthetic oligonucleotide
gccgagcuacucggucaug

SEQ ID NO: 1112110 - RNA, 19 nt, Artificial Sequence
  Description of Artificial Sequence: Synthetic oligonucleotide
gcgaucagacuggaaucau

SEQ ID NO: 1112111 - RNA, 19 nt, Artificial Sequence
  Description of Artificial Sequence: Synthetic oligonucleotide
cccguggcuguaguaaagu

SEQ ID NO: 1112112 - RNA, 19 nt, Artificial Sequence
  Description of Artificial Sequence: Synthetic oligonucleotide
cgucccauaaccggacugu

SEQ ID NO: 1112113 - RNA, 19 nt, Artificial Sequence
  Description of Artificial Sequence: Synthetic oligonucleotide
cgaacucguuugguggucu

SEQ ID NO: 1112114 - RNA, 19 nt, Artificial Sequence
  Description of Artificial Sequence: Synthetic oligonucleotide
cgguggaugguugguacuu

SEQ ID NO: 1112115 - RNA, 19 nt, Artificial Sequence
  Description of Artificial Sequence: Synthetic oligonucleotide
ccccucccaugaacauaau

SEQ ID NO: 1112116 - RNA, 19 nt, Artificial Sequence
  Description of Artificial Sequence: Synthetic oligonucleotide
aucuuuauaaacaauaugc

SEQ ID NO: 1112117 - RNA, 19 nt, Artificial Sequence
  Description of Artificial Sequence: Synthetic oligonucleotide
uuuaugcuaauauagaucc

SEQ ID NO: 1112118 - RNA, 19 nt, Artificial Sequence
  Description of Artificial Sequence: Synthetic oligonucleotide
aauaauaagguggggaugc

SEQ ID NO: 1112119 - RNA, 19 nt, Artificial Sequence
  Description of Artificial Sequence: Synthetic oligonucleotide
acaccuaucauaaauaagc

SEQ ID NO: 1112120 - RNA, 19 nt, Artificial Sequence
  Description of Artificial Sequence: Synthetic oligonucleotide
uuaauugucagauuuuccc

SEQ ID NO: 1112121 - RNA, 19 nt, Artificial Sequence
  Description of Artificial Sequence: Synthetic oligonucleotide
aauugaaagagggagcacg

SEQ ID NO: 1112122 - RNA, 19 nt, Artificial Sequence
  Description of Artificial Sequence: Synthetic oligonucleotide
uguaaauguaucuuuauaa

SEQ ID NO: 1112123 - RNA, 19 nt, Artificial Sequence
  Description of Artificial Sequence: Synthetic oligonucleotide
uagaucauguucuaaaacc

SEQ ID NO: 1112124 - RNA, 19 nt, Artificial Sequence
  Description of Artificial Sequence: Synthetic oligonucleotide
uuuauaaucagcaaccauu

SEQ ID NO: 1112125 - RNA, 19 nt, Artificial Sequence
  Description of Artificial Sequence: Synthetic oligonucleotide
guaauagugcaauugaaag

SEQ ID NO: 1112126 - RNA, 19 nt, Artificial Sequence
  Description of Artificial Sequence: Synthetic oligonucleotide
guaugagucauacaaaugc

SEQ ID NO: 1112127 - RNA, 19 nt, Artificial Sequence
  Description of Artificial Sequence: Synthetic oligonucleotide
uauagauccuuguagaucu

SEQ ID NO: 1112128 - RNA, 19 nt, Artificial Sequence
  Description of Artificial Sequence: Synthetic oligonucleotide
aucauuaaggaauucaugu

SEQ ID NO: 1112129 - RNA, 19 nt, Artificial Sequence
  Description of Artificial Sequence: Synthetic oligonucleotide
cauuaaggaauucaugucg

SEQ ID NO: 1112130 - RNA, 19 nt, Artificial Sequence
  Description of Artificial Sequence: Synthetic oligonucleotide
ucaacugugguaaagggcu

SEQ ID NO: 1112131 - RNA, 19 nt, Artificial Sequence
  Description of Artificial Sequence: Synthetic oligonucleotide
uagugcaauugaaagaggg

SEQ ID NO: 1112132 - RNA, 19 nt, Artificial Sequence
  Description of Artificial Sequence: Synthetic oligonucleotide
ucaaccaugguaauuucag

SEQ ID NO: 1112133 - RNA, 19 nt, Artificial Sequence
  Description of Artificial Sequence: Synthetic oligonucleotide
uuuuaugcuaauauagauc

SEQ ID NO: 1112134 - RNA, 19 nt, Artificial Sequence
  Description of Artificial Sequence: Synthetic oligonucleotide
auagaucauguucuaaaac

SEQ ID NO: 1112135 - RNA, 19 nt, Artificial Sequence
  Description of Artificial Sequence: Synthetic oligonucleotide
uaaauaagcuucaaucgga

SEQ ID NO: 1112136 - RNA, 19 nt, Artificial Sequence
  Description of Artificial Sequence: Synthetic oligonucleotide
uauuaaaaguaaauuguaa

SEQ ID NO: 1112137 - RNA, 19 nt, Artificial Sequence
  Description of Artificial Sequence: Synthetic oligonucleotide
uaaucagcaaccauugggu

SEQ ID NO: 1112138 - RNA, 19 nt, Artificial Sequence
  Description of Artificial Sequence: Synthetic oligonucleotide
gaugauuucauggacacca

SEQ ID NO: 1112139 - RNA, 19 nt, Artificial Sequence
  Description of Artificial Sequence: Synthetic oligonucleotide
aauagaucauguucuaaaa

SEQ ID NO: 1112140 - RNA, 19 nt, Artificial Sequence
  Description of Artificial Sequence: Synthetic oligonucleotide
aauugucagauuuuccccu

SEQ ID NO: 1112141 - RNA, 19 nt, Artificial Sequence
  Description of Artificial Sequence: Synthetic oligonucleotide
uauagaugauuucauggac

SEQ ID NO: 1112142 - RNA, 19 nt, Artificial Sequence
  Description of Artificial Sequence: Synthetic oligonucleotide
cuugaugucaaaggaaugg

SEQ ID NO: 1112143 - RNA, 19 nt, Artificial Sequence
  Description of Artificial Sequence: Synthetic oligonucleotide
aguaaauuguaaauguauc

SEQ ID NO: 1112144 - RNA, 19 nt, Artificial Sequence
  Description of Artificial Sequence: Synthetic oligonucleotide
cauagagagguccacagag

SEQ ID NO: 1112145 - RNA, 19 nt, Artificial Sequence
  Description of Artificial Sequence: Synthetic oligonucleotide
aaaccgacaguacugacau

SEQ ID NO: 1112146 - RNA, 19 nt, Artificial Sequence
  Description of Artificial Sequence: Synthetic oligonucleotide
aaaugcuucgccagggccc

SEQ ID NO: 1112147 - RNA, 19 nt, Artificial Sequence
  Description of Artificial Sequence: Synthetic oligonucleotide
uuauucaucagggaggcca

SEQ ID NO: 1112148 - RNA, 19 nt, Artificial Sequence
  Description of Artificial Sequence: Synthetic oligonucleotide
uaauagugcaauugaaaga

SEQ ID NO: 1112149 - RNA, 19 nt, Artificial Sequence
  Description of Artificial Sequence: Synthetic oligonucleotide
aaggaauucaugucguaga

SEQ ID NO: 1112150 - RNA, 19 nt, Artificial Sequence
  Description of Artificial Sequence: Synthetic oligonucleotide
aaaauguccuucuuggaua

SEQ ID NO: 1112151 - RNA, 19 nt, Artificial Sequence
  Description of Artificial Sequence: Synthetic oligonucleotide
uuugaucgcacuuugguau

SEQ ID NO: 1112152 - RNA, 19 nt, Artificial Sequence
  Description of Artificial Sequence: Synthetic oligonucleotide
uaauugucagauuuucccc

SEQ ID NO: 1112153 - RNA, 19 nt, Artificial Sequence
  Description of Artificial Sequence: Synthetic oligonucleotide
gagucauacaaaugcuucg

SEQ ID NO: 1112154 - RNA, 19 nt, Artificial Sequence
  Description of Artificial Sequence: Synthetic oligonucleotide
aauagcugcacauguucug

SEQ ID NO: 1112155 - RNA, 19 nt, Artificial Sequence
  Description of Artificial Sequence: Synthetic oligonucleotide
cacagaucgaaacugacac

SEQ ID NO: 1112156 - RNA, 19 nt, Artificial Sequence
  Description of Artificial Sequence: Synthetic oligonucleotide
aaucggauaguucuucgga

SEQ ID NO: 1112157 - RNA, 19 nt, Artificial Sequence
  Description of Artificial Sequence: Synthetic oligonucleotide
agacucggcacucaauggc

SEQ ID NO: 1112158 - RNA, 19 nt, Artificial Sequence
  Description of Artificial Sequence: Synthetic oligonucleotide
uugaggaacucccugguca

SEQ ID NO: 1112159 - RNA, 19 nt, Artificial Sequence
  Description of Artificial Sequence: Synthetic oligonucleotide
guuaaggucacaccuauca

SEQ ID NO: 1112160 - RNA, 19 nt, Artificial Sequence
  Description of Artificial Sequence: Synthetic oligonucleotide
uccuucgcaagcaugaacu

SEQ ID NO: 1112161 - RNA, 19 nt, Artificial Sequence
  Description of Artificial Sequence: Synthetic oligonucleotide
ccuaucauaaauaagcuuc

SEQ ID NO: 1112162 - RNA, 19 nt, Artificial Sequence
  Description of Artificial Sequence: Synthetic oligonucleotide
aauauggccaagucacugu

SEQ ID NO: 1112163 - RNA, 19 nt, Artificial Sequence
  Description of Artificial Sequence: Synthetic oligonucleotide
uaauuucaguaaagggugg

SEQ ID NO: 1112164 - RNA, 19 nt, Artificial Sequence
  Description of Artificial Sequence: Synthetic oligonucleotide
uuaucuucucccaucauua

SEQ ID NO: 1112165 - RNA, 19 nt, Artificial Sequence
  Description of Artificial Sequence: Synthetic oligonucleotide
uguaugagucauacaaaug

SEQ ID NO: 1112166 - RNA, 19 nt, Artificial Sequence
  Description of Artificial Sequence: Synthetic oligonucleotide
uaugagucauacaaaugcu

SEQ ID NO: 1112167 - RNA, 19 nt, Artificial Sequence
  Description of Artificial Sequence: Synthetic oligonucleotide
aaggugauuugucuguugu

SEQ ID NO: 1112168 - RNA, 19 nt, Artificial Sequence
  Description of Artificial Sequence: Synthetic oligonucleotide
uggaaaaugcggauggcca

SEQ ID NO: 1112169 - RNA, 19 nt, Artificial Sequence
  Description of Artificial Sequence: Synthetic oligonucleotide
uaaggaauucaugucguag

SEQ ID NO: 1112170 - RNA, 19 nt, Artificial Sequence
  Description of Artificial Sequence: Synthetic oligonucleotide
ucgaaacugacacccuugg

SEQ ID NO: 1112171 - RNA, 19 nt, Artificial Sequence
  Description of Artificial Sequence: Synthetic oligonucleotide
auauagauccuuguagauc

SEQ ID NO: 1112172 - RNA, 19 nt, Artificial Sequence
  Description of Artificial Sequence: Synthetic oligonucleotide
uucugaaaccgacaguacu

SEQ ID NO: 1112173 - RNA, 19 nt, Artificial Sequence
  Description of Artificial Sequence: Synthetic oligonucleotide
ugugaauggaaugucuuca

SEQ ID NO: 1112174 - RNA, 19 nt, Artificial Sequence
  Description of Artificial Sequence: Synthetic oligonucleotide
ucuaauuccagugcauuga

SEQ ID NO: 1112175 - RNA, 19 nt, Artificial Sequence
  Description of Artificial Sequence: Synthetic oligonucleotide
acagacucggcacucaaug

SEQ ID NO: 1112176 - RNA, 19 nt, Artificial Sequence
  Description of Artificial Sequence: Synthetic oligonucleotide
uuuuauaaugugguaauuu

SEQ ID NO: 1112177 - RNA, 19 nt, Artificial Sequence
  Description of Artificial Sequence: Synthetic oligonucleotide
uuagcguauucugugaucu

SEQ ID NO: 1112178 - RNA, 19 nt, Artificial Sequence
  Description of Artificial Sequence: Synthetic oligonucleotide
acagaucgaaacugacacc

SEQ ID NO: 1112179 - RNA, 19 nt, Artificial Sequence
  Description of Artificial Sequence: Synthetic oligonucleotide
ucauuaaggaauucauguc

SEQ ID NO: 1112180 - RNA, 19 nt, Artificial Sequence
  Description of Artificial Sequence: Synthetic oligonucleotide
auguaugagucauacaaau

SEQ ID NO: 1112181 - RNA, 19 nt, Artificial Sequence
  Description of Artificial Sequence: Synthetic oligonucleotide
augggcuucacguucagca

SEQ ID NO: 1112182 - RNA, 19 nt, Artificial Sequence
  Description of Artificial Sequence: Synthetic oligonucleotide
cuugaucacaugcaauagc

SEQ ID NO: 1112183 - RNA, 19 nt, Artificial Sequence
  Description of Artificial Sequence: Synthetic oligonucleotide
caagguuaaugaauccagg

SEQ ID NO: 1112184 - RNA, 19 nt, Artificial Sequence
  Description of Artificial Sequence: Synthetic oligonucleotide
uugaauguccucgaugggc

SEQ ID NO: 1112185 - RNA, 19 nt, Artificial Sequence
  Description of Artificial Sequence: Synthetic oligonucleotide
uucaugucguagaugacaa

SEQ ID NO: 1112186 - RNA, 19 nt, Artificial Sequence
  Description of Artificial Sequence: Synthetic oligonucleotide
ugaucucuugaacagcuuc

SEQ ID NO: 1112187 - RNA, 19 nt, Artificial Sequence
  Description of Artificial Sequence: Synthetic oligonucleotide
auccgcccaaaccugaugg

SEQ ID NO: 1112188 - RNA, 19 nt, Artificial Sequence
  Description of Artificial Sequence: Synthetic oligonucleotide
agcgggaaggacuuuaugu

SEQ ID NO: 1112189 - RNA, 19 nt, Artificial Sequence
  Description of Artificial Sequence: Synthetic oligonucleotide
acaaaugcuucgccagggc

SEQ ID NO: 1112190 - RNA, 19 nt, Artificial Sequence
  Description of Artificial Sequence: Synthetic oligonucleotide
ucagcaaccauugggucag

SEQ ID NO: 1112191 - RNA, 19 nt, Artificial Sequence
  Description of Artificial Sequence: Synthetic oligonucleotide
ucuuaauugucagauuuuc

SEQ ID NO: 1112192 - RNA, 19 nt, Artificial Sequence
  Description of Artificial Sequence: Synthetic oligonucleotide
uauuuauaaucagcaacca

SEQ ID NO: 1112193 - RNA, 19 nt, Artificial Sequence
  Description of Artificial Sequence: Synthetic oligonucleotide
auugggucagcucuuguga

SEQ ID NO: 1112194 - RNA, 19 nt, Artificial Sequence
  Description of Artificial Sequence: Synthetic oligonucleotide
acaauaugcauaaaauaga

SEQ ID NO: 1112195 - RNA, 19 nt, Artificial Sequence
  Description of Artificial Sequence: Synthetic oligonucleotide
uaguguggagcagaaaugc

SEQ ID NO: 1112196 - RNA, 19 nt, Artificial Sequence
  Description of Artificial Sequence: Synthetic oligonucleotide
auauggccaagucacuguc

SEQ ID NO: 1112197 - RNA, 19 nt, Artificial Sequence
  Description of Artificial Sequence: Synthetic oligonucleotide
agcaugaacuccauagugg

SEQ ID NO: 1112198 - RNA, 19 nt, Artificial Sequence
  Description of Artificial Sequence: Synthetic oligonucleotide
ucgauaucacuggagaucu

SEQ ID NO: 1112199 - RNA, 19 nt, Artificial Sequence
  Description of Artificial Sequence: Synthetic oligonucleotide
ucguauagaugauuucaug

SEQ ID NO: 1112200 - RNA, 19 nt, Artificial Sequence
  Description of Artificial Sequence: Synthetic oligonucleotide
ucuugaucacaugcaauag

SEQ ID NO: 1112201 - RNA, 19 nt, Artificial Sequence
  Description of Artificial Sequence: Synthetic oligonucleotide
aauggcaucucugugucaa

SEQ ID NO: 1112202 - RNA, 19 nt, Artificial Sequence
  Description of Artificial Sequence: Synthetic oligonucleotide
agaacuccaucuuuauuca

SEQ ID NO: 1112203 - RNA, 19 nt, Artificial Sequence
  Description of Artificial Sequence: Synthetic oligonucleotide
ucacaccuaucauaaauaa

SEQ ID NO: 1112204 - RNA, 19 nt, Artificial Sequence
  Description of Artificial Sequence: Synthetic oligonucleotide
uuggaaaaugcggauggcc

SEQ ID NO: 1112205 - RNA, 19 nt, Artificial Sequence
  Description of Artificial Sequence: Synthetic oligonucleotide
aaagggugguccuuguuua

SEQ ID NO: 1112206 - RNA, 19 nt, Artificial Sequence
  Description of Artificial Sequence: Synthetic oligonucleotide
uacuuugaucgcacuuugg

SEQ ID NO: 1112207 - RNA, 19 nt, Artificial Sequence
  Description of Artificial Sequence: Synthetic oligonucleotide
uaaggucacaccuaucaua

SEQ ID NO: 1112208 - RNA, 19 nt, Artificial Sequence
  Description of Artificial Sequence: Synthetic oligonucleotide
uucaugaggccuguuguag

SEQ ID NO: 1112209 - RNA, 19 nt, Artificial Sequence
  Description of Artificial Sequence: Synthetic oligonucleotide
ugaucacaugcaauagcug

SEQ ID NO: 1112210 - RNA, 19 nt, Artificial Sequence
  Description of Artificial Sequence: Synthetic oligonucleotide
ugauuccgaaguugguggg

SEQ ID NO: 1112211 - RNA, 19 nt, Artificial Sequence
  Description of Artificial Sequence: Synthetic oligonucleotide
uuccgcaggcuuuugagga

SEQ ID NO: 1112212 - RNA, 19 nt, Artificial Sequence
  Description of Artificial Sequence: Synthetic oligonucleotide
uggucguucaagucaaggu

SEQ ID NO: 1112213 - RNA, 19 nt, Artificial Sequence
  Description of Artificial Sequence: Synthetic oligonucleotide
ggcauugugagacaucccc

SEQ ID NO: 1112214 - RNA, 19 nt, Artificial Sequence
  Description of Artificial Sequence: Synthetic oligonucleotide
ugcuaauauagauccuugu

SEQ ID NO: 1112215 - RNA, 19 nt, Artificial Sequence
  Description of Artificial Sequence: Synthetic oligonucleotide
acguucagcaagccugggc

SEQ ID NO: 1112216 - RNA, 19 nt, Artificial Sequence
  Description of Artificial Sequence: Synthetic oligonucleotide
caaucggauaguucuucgg

SEQ ID NO: 1112217 - RNA, 19 nt, Artificial Sequence
  Description of Artificial Sequence: Synthetic oligonucleotide
ucagaauaauaaggugggg

SEQ ID NO: 1112218 - RNA, 19 nt, Artificial Sequence
  Description of Artificial Sequence: Synthetic oligonucleotide
agcuggucgauaucacugg

SEQ ID NO: 1112219 - RNA, 19 nt, Artificial Sequence
  Description of Artificial Sequence: Synthetic oligonucleotide
uuaaugaauccagggauau

SEQ ID NO: 1112220 - RNA, 19 nt, Artificial Sequence
  Description of Artificial Sequence: Synthetic oligonucleotide
cacaccuaucauaaauaag

SEQ ID NO: 1112221 - RNA, 19 nt, Artificial Sequence
  Description of Artificial Sequence: Synthetic oligonucleotide
uuggucguucaagucaagg

SEQ ID NO: 1112222 - RNA, 19 nt, Artificial Sequence
  Description of Artificial Sequence: Synthetic oligonucleotide
auagagagguccacagagc

SEQ ID NO: 1112223 - RNA, 19 nt, Artificial Sequence
  Description of Artificial Sequence: Synthetic oligonucleotide
cauugugagacauccccac

SEQ ID NO: 1112224 - RNA, 19 nt, Artificial Sequence
  Description of Artificial Sequence: Synthetic oligonucleotide
accaugguaauuucaguaa

SEQ ID NO: 1112225 - RNA, 19 nt, Artificial Sequence
  Description of Artificial Sequence: Synthetic oligonucleotide
auccuucgcaagcaugaac

SEQ ID NO: 1112226 - RNA, 19 nt, Artificial Sequence
  Description of Artificial Sequence: Synthetic oligonucleotide
auuucaguaaagggugguc

SEQ ID NO: 1112227 - RNA, 19 nt, Artificial Sequence
  Description of Artificial Sequence: Synthetic oligonucleotide
agaucauguucuaaaaccu

SEQ ID NO: 1112228 - RNA, 19 nt, Artificial Sequence
  Description of Artificial Sequence: Synthetic oligonucleotide
auagaugauuucauggaca

SEQ ID NO: 1112229 - RNA, 19 nt, Artificial Sequence
  Description of Artificial Sequence: Synthetic oligonucleotide
uuguggauccggcaguuaa

SEQ ID NO: 1112230 - RNA, 19 nt, Artificial Sequence
  Description of Artificial Sequence: Synthetic oligonucleotide
ggucaugaauccuuggccc

SEQ ID NO: 1112231 - RNA, 19 nt, Artificial Sequence
  Description of Artificial Sequence: Synthetic oligonucleotide
auuaaggaauucaugucgu

SEQ ID NO: 1112232 - RNA, 19 nt, Artificial Sequence
  Description of Artificial Sequence: Synthetic oligonucleotide
ugcagguucuacuuugauc

SEQ ID NO: 1112233 - RNA, 19 nt, Artificial Sequence
  Description of Artificial Sequence: Synthetic oligonucleotide
auggccaccucuuuacucu

SEQ ID NO: 1112234 - RNA, 19 nt, Artificial Sequence
  Description of Artificial Sequence: Synthetic oligonucleotide
gucuucauaguguggagca

SEQ ID NO: 1112235 - RNA, 19 nt, Artificial Sequence
  Description of Artificial Sequence: Synthetic oligonucleotide
uggcccucugauaugagaa

SEQ ID NO: 1112236 - RNA, 19 nt, Artificial Sequence
  Description of Artificial Sequence: Synthetic oligonucleotide
gauccggcaguuaagguca

SEQ ID NO: 1112237 - RNA, 19 nt, Artificial Sequence
  Description of Artificial Sequence: Synthetic oligonucleotide
aaauaagcuucaaucggau

SEQ ID NO: 1112238 - RNA, 19 nt, Artificial Sequence
  Description of Artificial Sequence: Synthetic oligonucleotide
uucuuaauugucagauuuu

SEQ ID NO: 1112239 - RNA, 19 nt, Artificial Sequence
  Description of Artificial Sequence: Synthetic oligonucleotide
uuuagcguauucugugauc

SEQ ID NO: 1112240 - RNA, 19 nt, Artificial Sequence
  Description of Artificial Sequence: Synthetic oligonucleotide
uccagaguaauagugcaau

SEQ ID NO: 1112241 - RNA, 19 nt, Artificial Sequence
  Description of Artificial Sequence: Synthetic oligonucleotide
augcuggagaaaucaacug

SEQ ID NO: 1112242 - RNA, 19 nt, Artificial Sequence
  Description of Artificial Sequence: Synthetic oligonucleotide
uuaugcuaauauagauccu

SEQ ID NO: 1112243 - RNA, 19 nt, Artificial Sequence
  Description of Artificial Sequence: Synthetic oligonucleotide
gaaaaugcggauggccacc

SEQ ID NO: 1112244 - RNA, 19 nt, Artificial Sequence
  Description of Artificial Sequence: Synthetic oligonucleotide
caugagagaguuggaaggc

SEQ ID NO: 1112245 - RNA, 19 nt, Artificial Sequence
  Description of Artificial Sequence: Synthetic oligonucleotide
caucguauagaugauuuca

SEQ ID NO: 1112246 - RNA, 19 nt, Artificial Sequence
  Description of Artificial Sequence: Synthetic oligonucleotide
cauugggucagcucuugug

SEQ ID NO: 1112247 - RNA, 19 nt, Artificial Sequence
  Description of Artificial Sequence: Synthetic oligonucleotide
aggugauuugucuguuguc

SEQ ID NO: 1112248 - RNA, 19 nt, Artificial Sequence
  Description of Artificial Sequence: Synthetic oligonucleotide
ugcauccuucgcaagcaug

SEQ ID NO: 1112249 - RNA, 19 nt, Artificial Sequence
  Description of Artificial Sequence: Synthetic oligonucleotide
ugaauggaaugucuucaua

SEQ ID NO: 1112250 - RNA, 19 nt, Artificial Sequence
  Description of Artificial Sequence: Synthetic oligonucleotide
ugacacccuuggaaaaugc

SEQ ID NO: 1112251 - RNA, 19 nt, Artificial Sequence
  Description of Artificial Sequence: Synthetic oligonucleotide
aggccuguuguagagcugg

SEQ ID NO: 1112252 - RNA, 19 nt, Artificial Sequence
  Description of Artificial Sequence: Synthetic oligonucleotide
ggggugaaggcucaugucc

SEQ ID NO: 1112253 - RNA, 19 nt, Artificial Sequence
  Description of Artificial Sequence: Synthetic oligonucleotide
ugugacgaucugccugagg

SEQ ID NO: 1112254 - RNA, 19 nt, Artificial Sequence
  Description of Artificial Sequence: Synthetic oligonucleotide
auaugagaacuccaucuuu

SEQ ID NO: 1112255 - RNA, 19 nt, Artificial Sequence
  Description of Artificial Sequence: Synthetic oligonucleotide
uugucagauuuuccccucc

SEQ ID NO: 1112256 - RNA, 19 nt, Artificial Sequence
  Description of Artificial Sequence: Synthetic oligonucleotide
aggaauucaugucguagau

SEQ ID NO: 1112257 - RNA, 19 nt, Artificial Sequence
  Description of Artificial Sequence: Synthetic oligonucleotide
ugggaguggucauccauca

SEQ ID NO: 1112258 - RNA, 19 nt, Artificial Sequence
  Description of Artificial Sequence: Synthetic oligonucleotide
cagacucggcacucaaugg

SEQ ID NO: 1112259 - RNA, 19 nt, Artificial Sequence
  Description of Artificial Sequence: Synthetic oligonucleotide
auaucacuggagaucuccg

SEQ ID NO: 1112260 - RNA, 19 nt, Artificial Sequence
  Description of Artificial Sequence: Synthetic oligonucleotide
uauggccaagucacuguca

SEQ ID NO: 1112261 - RNA, 19 nt, Artificial Sequence
  Description of Artificial Sequence: Synthetic oligonucleotide
auaguguggagcagaaaug

SEQ ID NO: 1112262 - RNA, 19 nt, Artificial Sequence
  Description of Artificial Sequence: Synthetic oligonucleotide
gacauccccacagcgaggc

SEQ ID NO: 1112263 - RNA, 19 nt, Artificial Sequence
  Description of Artificial Sequence: Synthetic oligonucleotide
cuccacugagaauaaugac

SEQ ID NO: 1112264 - RNA, 19 nt, Artificial Sequence
  Description of Artificial Sequence: Synthetic oligonucleotide
auguccuucuuggauauca

SEQ ID NO: 1112265 - RNA, 19 nt, Artificial Sequence
  Description of Artificial Sequence: Synthetic oligonucleotide
accuaucauaaauaagcuu

SEQ ID NO: 1112266 - RNA, 19 nt, Artificial Sequence
  Description of Artificial Sequence: Synthetic oligonucleotide
uacuugagaagagucacuu

SEQ ID NO: 1112267 - RNA, 19 nt, Artificial Sequence
  Description of Artificial Sequence: Synthetic oligonucleotide
guggauccggcaguuaagg

SEQ ID NO: 1112268 - RNA, 19 nt, Artificial Sequence
  Description of Artificial Sequence: Synthetic oligonucleotide
uuccugucaagaucgcccu

SEQ ID NO: 1112269 - RNA, 19 nt, Artificial Sequence
  Description of Artificial Sequence: Synthetic oligonucleotide
gucaagguuaaugaaucca

SEQ ID NO: 1112270 - RNA, 19 nt, Artificial Sequence
  Description of Artificial Sequence: Synthetic oligonucleotide
uucgccagggcccggagau

SEQ ID NO: 1112271 - RNA, 19 nt, Artificial Sequence
  Description of Artificial Sequence: Synthetic oligonucleotide
gugacgaucugccugaggu

SEQ ID NO: 1112272 - RNA, 19 nt, Artificial Sequence
  Description of Artificial Sequence: Synthetic oligonucleotide
augucguagaugacaaaag

SEQ ID NO: 1112273 - RNA, 19 nt, Artificial Sequence
  Description of Artificial Sequence: Synthetic oligonucleotide
ucguucaagucaagguuaa

SEQ ID NO: 1112274 - RNA, 19 nt, Artificial Sequence
  Description of Artificial Sequence: Synthetic oligonucleotide
aucggauaguucuucggaa

SEQ ID NO: 1112275 - RNA, 19 nt, Artificial Sequence
  Description of Artificial Sequence: Synthetic oligonucleotide
accgacaguacugacauuu

SEQ ID NO: 1112276 - RNA, 19 nt, Artificial Sequence
  Description of Artificial Sequence: Synthetic oligonucleotide
ugauuugucuguugucuuu

SEQ ID NO: 1112277 - RNA, 19 nt, Artificial Sequence
  Description of Artificial Sequence: Synthetic oligonucleotide
ugauuucauggacaccaua

SEQ ID NO: 1112278 - RNA, 19 nt, Artificial Sequence
  Description of Artificial Sequence: Synthetic oligonucleotide
guguggagcagaaaugcug

SEQ ID NO: 1112279 - RNA, 19 nt, Artificial Sequence
  Description of Artificial Sequence: Synthetic oligonucleotide
uuaaggaauucaugucgua

SEQ ID NO: 1112280 - RNA, 19 nt, Artificial Sequence
  Description of Artificial Sequence: Synthetic oligonucleotide
auugugagacauccccaca

SEQ ID NO: 1112281 - RNA, 19 nt, Artificial Sequence
  Description of Artificial Sequence: Synthetic oligonucleotide
aaaaugcggauggccaccu

SEQ ID NO: 1112282 - RNA, 19 nt, Artificial Sequence
  Description of Artificial Sequence: Synthetic oligonucleotide
agcguauucugugaucucu

SEQ ID NO: 1112283 - RNA, 19 nt, Artificial Sequence
  Description of Artificial Sequence: Synthetic oligonucleotide
aagaucgcccucgccuugg

SEQ ID NO: 1112284 - RNA, 19 nt, Artificial Sequence
  Description of Artificial Sequence: Synthetic oligonucleotide
gccaugagagaguuggaag

SEQ ID NO: 1112285 - RNA, 19 nt, Artificial Sequence
  Description of Artificial Sequence: Synthetic oligonucleotide
gaaggacuuuauguaugag

SEQ ID NO: 1112286 - RNA, 19 nt, Artificial Sequence
  Description of Artificial Sequence: Synthetic oligonucleotide
agagucacuuggucguuca

SEQ ID NO: 1112287 - RNA, 19 nt, Artificial Sequence
  Description of Artificial Sequence: Synthetic oligonucleotide
cuuggcgaacagcugugag

SEQ ID NO: 1112288 - RNA, 19 nt, Artificial Sequence
  Description of Artificial Sequence: Synthetic oligonucleotide
auagugcaauugaaagagg

SEQ ID NO: 1112289 - RNA, 19 nt, Artificial Sequence
  Description of Artificial Sequence: Synthetic oligonucleotide
gacucggcacucaauggcc

SEQ ID NO: 1112290 - RNA, 19 nt, Artificial Sequence
  Description of Artificial Sequence: Synthetic oligonucleotide
aaaugcggauggccaccuc

SEQ ID NO: 1112291 - RNA, 19 nt, Artificial Sequence
  Description of Artificial Sequence: Synthetic oligonucleotide
ucacaugcaauagcugcac

SEQ ID NO: 1112292 - RNA, 19 nt, Artificial Sequence
  Description of Artificial Sequence: Synthetic oligonucleotide
gguuaaugaauccagggau

SEQ ID NO: 1112293 - RNA, 19 nt, Artificial Sequence
  Description of Artificial Sequence: Synthetic oligonucleotide
caaaccugauggcauugug

SEQ ID NO: 1112294 - RNA, 19 nt, Artificial Sequence
  Description of Artificial Sequence: Synthetic oligonucleotide
auagcugcacauguucugu

SEQ ID NO: 1112295 - RNA, 19 nt, Artificial Sequence
  Description of Artificial Sequence: Synthetic oligonucleotide
aguaaagggugguccuugu

SEQ ID NO: 1112296 - RNA, 19 nt, Artificial Sequence
  Description of Artificial Sequence: Synthetic oligonucleotide
cguucagcaagccugggcg

SEQ ID NO: 1112297 - RNA, 19 nt, Artificial Sequence
  Description of Artificial Sequence: Synthetic oligonucleotide
uggcaucucugugucaacc

SEQ ID NO: 1112298 - RNA, 19 nt, Artificial Sequence
  Description of Artificial Sequence: Synthetic oligonucleotide
agcacgucagccggggugg

SEQ ID NO: 1112299 - RNA, 19 nt, Artificial Sequence
  Description of Artificial Sequence: Synthetic oligonucleotide
uaucuucucccaucauuaa

SEQ ID NO: 1112300 - RNA, 19 nt, Artificial Sequence
  Description of Artificial Sequence: Synthetic oligonucleotide
gacuuuauguaugagucau

SEQ ID NO: 1112301 - RNA, 19 nt, Artificial Sequence
  Description of Artificial Sequence: Synthetic oligonucleotide
ugucaagaucgcccucgcc

SEQ ID NO: 1112302 - RNA, 19 nt, Artificial Sequence
  Description of Artificial Sequence: Synthetic oligonucleotide
ucaagaucgcccucgccuu

SEQ ID NO: 1112303 - RNA, 19 nt, Artificial Sequence
  Description of Artificial Sequence: Synthetic oligonucleotide
cacccuuggaaaaugcgga

SEQ ID NO: 1112304 - RNA, 19 nt, Artificial Sequence
  Description of Artificial Sequence: Synthetic oligonucleotide
gauuccgaaguuggugggc

SEQ ID NO: 1112305 - RNA, 19 nt, Artificial Sequence
  Description of Artificial Sequence: Synthetic oligonucleotide
gauaugagaacuccaucuu

SEQ ID NO: 1112306 - RNA, 19 nt, Artificial Sequence
  Description of Artificial Sequence: Synthetic oligonucleotide
ggauccggcaguuaagguc

SEQ ID NO: 1112307 - RNA, 19 nt, Artificial Sequence
  Description of Artificial Sequence: Synthetic oligonucleotide
guggcauccgcccaaaccu

SEQ ID NO: 1112308 - RNA, 19 nt, Artificial Sequence
  Description of Artificial Sequence: Synthetic oligonucleotide
ugucaaccaugguaauuuc

SEQ ID NO: 1112309 - RNA, 19 nt, Artificial Sequence
  Description of Artificial Sequence: Synthetic oligonucleotide
gcuaauauagauccuugua

SEQ ID NO: 1112310 - RNA, 19 nt, Artificial Sequence
  Description of Artificial Sequence: Synthetic oligonucleotide
aucgaaacugacacccuug

SEQ ID NO: 1112311 - RNA, 19 nt, Artificial Sequence
  Description of Artificial Sequence: Synthetic oligonucleotide
ggaaaaugcggauggccac

SEQ ID NO: 1112312 - RNA, 19 nt, Artificial Sequence
  Description of Artificial Sequence: Synthetic oligonucleotide
caaccauugggucagcucu

SEQ ID NO: 1112313 - RNA, 19 nt, Artificial Sequence
  Description of Artificial Sequence: Synthetic oligonucleotide
auggcaucucugugucaac

SEQ ID NO: 1112314 - RNA, 19 nt, Artificial Sequence
  Description of Artificial Sequence: Synthetic oligonucleotide
caucagggaggccagcauc

SEQ ID NO: 1112315 - RNA, 19 nt, Artificial Sequence
  Description of Artificial Sequence: Synthetic oligonucleotide
guagagcugggccuuuuca

SEQ ID NO: 1112316 - RNA, 19 nt, Artificial Sequence
  Description of Artificial Sequence: Synthetic oligonucleotide
cuuugaucgcacuuuggua

SEQ ID NO: 1112317 - RNA, 19 nt, Artificial Sequence
  Description of Artificial Sequence: Synthetic oligonucleotide
uggagcaccuuggcgaaca

SEQ ID NO: 1112318 - RNA, 19 nt, Artificial Sequence
  Description of Artificial Sequence: Synthetic oligonucleotide
uagcugcacauguucugug

SEQ ID NO: 1112319 - RNA, 19 nt, Artificial Sequence
  Description of Artificial Sequence: Synthetic oligonucleotide
guuaaugaauccagggaua

SEQ ID NO: 1112320 - RNA, 19 nt, Artificial Sequence
  Description of Artificial Sequence: Synthetic oligonucleotide
ggcaguuaaggucacaccu

SEQ ID NO: 1112321 - RNA, 19 nt, Artificial Sequence
  Description of Artificial Sequence: Synthetic oligonucleotide
aucguauagaugauuucau

SEQ ID NO: 1112322 - RNA, 19 nt, Artificial Sequence
  Description of Artificial Sequence: Synthetic oligonucleotide
uggucagcgggaaggacuu

SEQ ID NO: 1112323 - RNA, 19 nt, Artificial Sequence
  Description of Artificial Sequence: Synthetic oligonucleotide
ucgccuuggcuuuggucag

SEQ ID NO: 1112324 - RNA, 19 nt, Artificial Sequence
  Description of Artificial Sequence: Synthetic oligonucleotide
ggaaugggaguggucaucc

SEQ ID NO: 1112325 - RNA, 19 nt, Artificial Sequence
  Description of Artificial Sequence: Synthetic oligonucleotide
ugugucaaccaugguaauu

SEQ ID NO: 1112326 - RNA, 19 nt, Artificial Sequence
  Description of Artificial Sequence: Synthetic oligonucleotide
uggcauccgcccaaaccug

SEQ ID NO: 1112327 - RNA, 19 nt, Artificial Sequence
  Description of Artificial Sequence: Synthetic oligonucleotide
ggagaucuccgccaacagc

SEQ ID NO: 1112328 - RNA, 19 nt, Artificial Sequence
  Description of Artificial Sequence: Synthetic oligonucleotide
ugggcggucuccacugaga

SEQ ID NO: 1112329 - RNA, 19 nt, Artificial Sequence
  Description of Artificial Sequence: Synthetic oligonucleotide
aagggugguccuuguuuaa

SEQ ID NO: 1112330 - RNA, 19 nt, Artificial Sequence
  Description of Artificial Sequence: Synthetic oligonucleotide
ggggugauguguuugaacu

SEQ ID NO: 1112331 - RNA, 19 nt, Artificial Sequence
  Description of Artificial Sequence: Synthetic oligonucleotide
gcugauuccgaaguuggug

SEQ ID NO: 1112332 - RNA, 19 nt, Artificial Sequence
  Description of Artificial Sequence: Synthetic oligonucleotide
uuuauucaucagggaggcc

SEQ ID NO: 1112333 - RNA, 19 nt, Artificial Sequence
  Description of Artificial Sequence: Synthetic oligonucleotide
cuaauuccagugcauugaa

SEQ ID NO: 1112334 - RNA, 19 nt, Artificial Sequence
  Description of Artificial Sequence: Synthetic oligonucleotide
cuuugguauucuuggagcu

SEQ ID NO: 1112335 - RNA, 19 nt, Artificial Sequence
  Description of Artificial Sequence: Synthetic oligonucleotide
ucagcgggaaggacuuuau

SEQ ID NO: 1112336 - RNA, 19 nt, Artificial Sequence
  Description of Artificial Sequence: Synthetic oligonucleotide
uggauccggcaguuaaggu

SEQ ID NO: 1112337 - RNA, 19 nt, Artificial Sequence
  Description of Artificial Sequence: Synthetic oligonucleotide
uccgcccaaaccugauggc

SEQ ID NO: 1112338 - RNA, 19 nt, Artificial Sequence
  Description of Artificial Sequence: Synthetic oligonucleotide
cagguucuacuuugaucgc

SEQ ID NO: 1112339 - RNA, 19 nt, Artificial Sequence
  Description of Artificial Sequence: Synthetic oligonucleotide
cuuggauaucagugguuca

SEQ ID NO: 1112340 - RNA, 19 nt, Artificial Sequence
  Description of Artificial Sequence: Synthetic oligonucleotide
aguuaaggucacaccuauc

SEQ ID NO: 1112341 - RNA, 19 nt, Artificial Sequence
  Description of Artificial Sequence: Synthetic oligonucleotide
gagaauaaugacagcuaua

SEQ ID NO: 1112342 - RNA, 19 nt, Artificial Sequence
  Description of Artificial Sequence: Synthetic oligonucleotide
agaucgcccucgccuuggc

SEQ ID NO: 1112343 - RNA, 19 nt, Artificial Sequence
  Description of Artificial Sequence: Synthetic oligonucleotide
gggugaaggcucauguccg

SEQ ID NO: 1112344 - RNA, 19 nt, Artificial Sequence
  Description of Artificial Sequence: Synthetic oligonucleotide
aucgcccucgccuuggcuu

SEQ ID NO: 1112345 - RNA, 19 nt, Artificial Sequence
  Description of Artificial Sequence: Synthetic oligonucleotide
agguucuacuuugaucgca

SEQ ID NO: 1112346 - RNA, 19 nt, Artificial Sequence
  Description of Artificial Sequence: Synthetic oligonucleotide
uugaucgcacuuugguauu

SEQ ID NO: 1112347 - RNA, 19 nt, Artificial Sequence
  Description of Artificial Sequence: Synthetic oligonucleotide
acuuggucguucaagucaa

SEQ ID NO: 1112348 - RNA, 19 nt, Artificial Sequence
  Description of Artificial Sequence: Synthetic oligonucleotide
ucaugaauccuuggcccuc

SEQ ID NO: 1112349 - RNA, 19 nt, Artificial Sequence
  Description of Artificial Sequence: Synthetic oligonucleotide
augagucauacaaaugcuu

SEQ ID NO: 1112350 - RNA, 19 nt, Artificial Sequence
  Description of Artificial Sequence: Synthetic oligonucleotide
ggaguggucauccaucaua

SEQ ID NO: 1112351 - RNA, 19 nt, Artificial Sequence
  Description of Artificial Sequence: Synthetic oligonucleotide
acugacacccuuggaaaau

SEQ ID NO: 1112352 - RNA, 19 nt, Artificial Sequence
  Description of Artificial Sequence: Synthetic oligonucleotide
cugacacccuuggaaaaug

SEQ ID NO: 1112353 - RNA, 19 nt, Artificial Sequence
  Description of Artificial Sequence: Synthetic oligonucleotide
gacucugggugguucagcu

SEQ ID NO: 1112354 - RNA, 19 nt, Artificial Sequence
  Description of Artificial Sequence: Synthetic oligonucleotide
uuuggucagcgggaaggac

SEQ ID NO: 1112355 - RNA, 19 nt, Artificial Sequence
  Description of Artificial Sequence: Synthetic oligonucleotide
uuuuguggauccggcaguu

SEQ ID NO: 1112356 - RNA, 19 nt, Artificial Sequence
  Description of Artificial Sequence: Synthetic oligonucleotide
caccuaucauaaauaagcu

SEQ ID NO: 1112357 - RNA, 19 nt, Artificial Sequence
  Description of Artificial Sequence: Synthetic oligonucleotide
gucaaccaugguaauuuca

SEQ ID NO: 1112358 - RNA, 19 nt, Artificial Sequence
  Description of Artificial Sequence: Synthetic oligonucleotide
gucguucaagucaagguua

SEQ ID NO: 1112359 - RNA, 19 nt, Artificial Sequence
  Description of Artificial Sequence: Synthetic oligonucleotide
cugucaagaucgcccucgc

SEQ ID NO: 1112360 - RNA, 19 nt, Artificial Sequence
  Description of Artificial Sequence: Synthetic oligonucleotide
ggaauucaugucguagaug

SEQ ID NO: 1112361 - RNA, 19 nt, Artificial Sequence
  Description of Artificial Sequence: Synthetic oligonucleotide
ccugucaagaucgcccucg

SEQ ID NO: 1112362 - RNA, 19 nt, Artificial Sequence
  Description of Artificial Sequence: Synthetic oligonucleotide
aguguggagcagaaaugcu

SEQ ID NO: 1112363 - RNA, 19 nt, Artificial Sequence
  Description of Artificial Sequence: Synthetic oligonucleotide
auguaucuuuauaaacaau

SEQ ID NO: 1112364 - RNA, 19 nt, Artificial Sequence
  Description of Artificial Sequence: Synthetic oligonucleotide
gguucuacuuugaucgcac

SEQ ID NO: 1112365 - RNA, 19 nt, Artificial Sequence
  Description of Artificial Sequence: Synthetic oligonucleotide
cagcuauaaauauggccaa

SEQ ID NO: 1112366 - RNA, 19 nt, Artificial Sequence
  Description of Artificial Sequence: Synthetic oligonucleotide
ugaggacucugggugguuc

SEQ ID NO: 1112367 - RNA, 19 nt, Artificial Sequence
  Description of Artificial Sequence: Synthetic oligonucleotide
guagaugacaaaaggugau

SEQ ID NO: 1112368 - RNA, 19 nt, Artificial Sequence
  Description of Artificial Sequence: Synthetic oligonucleotide
ggucacaccuaucauaaau

SEQ ID NO: 1112369 - RNA, 19 nt, Artificial Sequence
  Description of Artificial Sequence: Synthetic oligonucleotide
cguagaugacaaaagguga

SEQ ID NO: 1112370 - RNA, 19 nt, Artificial Sequence
  Description of Artificial Sequence: Synthetic oligonucleotide
aauggccaugagagaguug

SEQ ID NO: 1112371 - RNA, 19 nt, Artificial Sequence
  Description of Artificial Sequence: Synthetic oligonucleotide
cuuggucguucaagucaag

SEQ ID NO: 1112372 - RNA, 19 nt, Artificial Sequence
  Description of Artificial Sequence: Synthetic oligonucleotide
gaucgaaacugacacccuu

SEQ ID NO: 1112373 - RNA, 19 nt, Artificial Sequence
  Description of Artificial Sequence: Synthetic oligonucleotide
uaaugaauccagggauauu

SEQ ID NO: 1112374 - RNA, 19 nt, Artificial Sequence
  Description of Artificial Sequence: Synthetic oligonucleotide
gugucaaccaugguaauuu

SEQ ID NO: 1112375 - RNA, 19 nt, Artificial Sequence
  Description of Artificial Sequence: Synthetic oligonucleotide
caagcaugaacuccauagu

SEQ ID NO: 1112376 - RNA, 19 nt, Artificial Sequence
  Description of Artificial Sequence: Synthetic oligonucleotide
ucggcacucaauggccaug

SEQ ID NO: 1112377 - RNA, 19 nt, Artificial Sequence
  Description of Artificial Sequence: Synthetic oligonucleotide
ugaucgcacuuugguauuc

SEQ ID NO: 1112378 - RNA, 19 nt, Artificial Sequence
  Description of Artificial Sequence: Synthetic oligonucleotide
uagcguauucugugaucuc

SEQ ID NO: 1112379 - RNA, 19 nt, Artificial Sequence
  Description of Artificial Sequence: Synthetic oligonucleotide
cauccgcccaaaccugaug

SEQ ID NO: 1112380 - RNA, 19 nt, Artificial Sequence
  Description of Artificial Sequence: Synthetic oligonucleotide
gucaugaauccuuggcccu

SEQ ID NO: 1112381 - RNA, 19 nt, Artificial Sequence
  Description of Artificial Sequence: Synthetic oligonucleotide
ccccuccagaguaauagug

SEQ ID NO: 1112382 - RNA, 19 nt, Artificial Sequence
  Description of Artificial Sequence: Synthetic oligonucleotide
gaucauguucuaaaaccuu

SEQ ID NO: 1112383 - RNA, 19 nt, Artificial Sequence
  Description of Artificial Sequence: Synthetic oligonucleotide
gcuugaugucaaaggaaug

SEQ ID NO: 1112384 - RNA, 19 nt, Artificial Sequence
  Description of Artificial Sequence: Synthetic oligonucleotide
gcaaccauugggucagcuc

SEQ ID NO: 1112385 - RNA, 19 nt, Artificial Sequence
  Description of Artificial Sequence: Synthetic oligonucleotide
agacauccccacagcgagg

SEQ ID NO: 1112386 - RNA, 19 nt, Artificial Sequence
  Description of Artificial Sequence: Synthetic oligonucleotide
gguauucuuggagcuucag

SEQ ID NO: 1112387 - RNA, 19 nt, Artificial Sequence
  Description of Artificial Sequence: Synthetic oligonucleotide
aggacucugggugguucag

SEQ ID NO: 1112388 - RNA, 19 nt, Artificial Sequence
  Description of Artificial Sequence: Synthetic oligonucleotide
ccuggucaugaauccuugg

SEQ ID NO: 1112389 - RNA, 19 nt, Artificial Sequence
  Description of Artificial Sequence: Synthetic oligonucleotide
uccugucaagaucgcccuc

SEQ ID NO: 1112390 - RNA, 19 nt, Artificial Sequence
  Description of Artificial Sequence: Synthetic oligonucleotide
cugggcggucuccacugag

SEQ ID NO: 1112391 - RNA, 19 nt, Artificial Sequence
  Description of Artificial Sequence: Synthetic oligonucleotide
ggcuucacguucagcaagc

SEQ ID NO: 1112392 - RNA, 19 nt, Artificial Sequence
  Description of Artificial Sequence: Synthetic oligonucleotide
agaucgaaacugacacccu

SEQ ID NO: 1112393 - RNA, 19 nt, Artificial Sequence
  Description of Artificial Sequence: Synthetic oligonucleotide
aucgcacuuugguauucuu

SEQ ID NO: 1112394 - RNA, 19 nt, Artificial Sequence
  Description of Artificial Sequence: Synthetic oligonucleotide
gagagaguuggaaggcucu

SEQ ID NO: 1112395 - RNA, 19 nt, Artificial Sequence
  Description of Artificial Sequence: Synthetic oligonucleotide
augaauccuuggcccucug

SEQ ID NO: 1112396 - RNA, 19 nt, Artificial Sequence
  Description of Artificial Sequence: Synthetic oligonucleotide
cagcgggaaggacuuuaug

SEQ ID NO: 1112397 - RNA, 19 nt, Artificial Sequence
  Description of Artificial Sequence: Synthetic oligonucleotide
gcgggaaggacuuuaugua

SEQ ID NO: 1112398 - RNA, 19 nt, Artificial Sequence
  Description of Artificial Sequence: Synthetic oligonucleotide
aaccauugggucagcucuu

SEQ ID NO: 1112399 - RNA, 19 nt, Artificial Sequence
  Description of Artificial Sequence: Synthetic oligonucleotide
agcaaccauugggucagcu

SEQ ID NO: 1112400 - RNA, 19 nt, Artificial Sequence
  Description of Artificial Sequence: Synthetic oligonucleotide
ccugcaaaggggugaugug

SEQ ID NO: 1112401 - RNA, 19 nt, Artificial Sequence
  Description of Artificial Sequence: Synthetic oligonucleotide
ccacagaucgaaacugaca

SEQ ID NO: 1112402 - RNA, 19 nt, Artificial Sequence
  Description of Artificial Sequence: Synthetic oligonucleotide
ggagaucagcagacucugg

SEQ ID NO: 1112403 - RNA, 19 nt, Artificial Sequence
  Description of Artificial Sequence: Synthetic oligonucleotide
caccuuggcgaacagcugu

SEQ ID NO: 1112404 - RNA, 19 nt, Artificial Sequence
  Description of Artificial Sequence: Synthetic oligonucleotide
caguuaaggucacaccuau

SEQ ID NO: 1112405 - RNA, 19 nt, Artificial Sequence
  Description of Artificial Sequence: Synthetic oligonucleotide
agagaguuggaaggcucuu

SEQ ID NO: 1112406 - RNA, 19 nt, Artificial Sequence
  Description of Artificial Sequence: Synthetic oligonucleotide
uuuguggauccggcaguua

SEQ ID NO: 1112407 - RNA, 19 nt, Artificial Sequence
  Description of Artificial Sequence: Synthetic oligonucleotide
ggcccucugauaugagaac

SEQ ID NO: 1112408 - RNA, 19 nt, Artificial Sequence
  Description of Artificial Sequence: Synthetic oligonucleotide
gcauaaaauagaucauguu

SEQ ID NO: 1112409 - RNA, 19 nt, Artificial Sequence
  Description of Artificial Sequence: Synthetic oligonucleotide
aaccgacaguacugacauu

SEQ ID NO: 1112410 - RNA, 19 nt, Artificial Sequence
  Description of Artificial Sequence: Synthetic oligonucleotide
aggucacaccuaucauaaa

SEQ ID NO: 1112411 - RNA, 19 nt, Artificial Sequence
  Description of Artificial Sequence: Synthetic oligonucleotide
ccggcaguuaaggucacac

SEQ ID NO: 1112412 - RNA, 19 nt, Artificial Sequence
  Description of Artificial Sequence: Synthetic oligonucleotide
cacguucagcaagccuggg

SEQ ID NO: 1112413 - RNA, 19 nt, Artificial Sequence
  Description of Artificial Sequence: Synthetic oligonucleotide
gcauugugagacaucccca

SEQ ID NO: 1112414 - RNA, 19 nt, Artificial Sequence
  Description of Artificial Sequence: Synthetic oligonucleotide
gggagcacgucagccgggg

SEQ ID NO: 1112415 - RNA, 19 nt, Artificial Sequence
  Description of Artificial Sequence: Synthetic oligonucleotide
gaguuggaaggcucuucau

SEQ ID NO: 1112416 - RNA, 19 nt, Artificial Sequence
  Description of Artificial Sequence: Synthetic oligonucleotide
gcuggucgauaucacugga

SEQ ID NO: 1112417 - RNA, 19 nt, Artificial Sequence
  Description of Artificial Sequence: Synthetic oligonucleotide
gaucgcacuuugguauucu

SEQ ID NO: 1112418 - RNA, 19 nt, Artificial Sequence
  Description of Artificial Sequence: Synthetic oligonucleotide
gaaguuggugggccagaau

SEQ ID NO: 1112419 - RNA, 19 nt, Artificial Sequence
  Description of Artificial Sequence: Synthetic oligonucleotide
ggcuuuggucagcgggaag

SEQ ID NO: 1112420 - RNA, 19 nt, Artificial Sequence
  Description of Artificial Sequence: Synthetic oligonucleotide
agggagcacgucagccggg

SEQ ID NO: 1112421 - RNA, 19 nt, Artificial Sequence
  Description of Artificial Sequence: Synthetic oligonucleotide
cccuuggaaaaugcggaug

SEQ ID NO: 1112422 - RNA, 19 nt, Artificial Sequence
  Description of Artificial Sequence: Synthetic oligonucleotide
caucuaauuccagugcauu

SEQ ID NO: 1112423 - RNA, 19 nt, Artificial Sequence
  Description of Artificial Sequence: Synthetic oligonucleotide
ccaucauagagagguccac

SEQ ID NO: 1112424 - RNA, 19 nt, Artificial Sequence
  Description of Artificial Sequence: Synthetic oligonucleotide
guucugugacgaucugccu

SEQ ID NO: 1112425 - RNA, 19 nt, Artificial Sequence
  Description of Artificial Sequence: Synthetic oligonucleotide
ggcacucaauggccaugag

SEQ ID NO: 1112426 - RNA, 19 nt, Artificial Sequence
  Description of Artificial Sequence: Synthetic oligonucleotide
ggccaugagagaguuggaa

SEQ ID NO: 1112427 - RNA, 19 nt, Artificial Sequence
  Description of Artificial Sequence: Synthetic oligonucleotide
gggcccggagaucagcaga

SEQ ID NO: 1112428 - RNA, 19 nt, Artificial Sequence
  Description of Artificial Sequence: Synthetic oligonucleotide
cucccaucauuaaggaauu

SEQ ID NO: 1112429 - RNA, 19 nt, Artificial Sequence
  Description of Artificial Sequence: Synthetic oligonucleotide
auccggcaguuaaggucac

SEQ ID NO: 1112430 - RNA, 19 nt, Artificial Sequence
  Description of Artificial Sequence: Synthetic oligonucleotide
gcaguuaaggucacaccua

SEQ ID NO: 1112431 - RNA, 19 nt, Artificial Sequence
  Description of Artificial Sequence: Synthetic oligonucleotide
caccauacuugagaagagu

SEQ ID NO: 1112432 - RNA, 19 nt, Artificial Sequence
  Description of Artificial Sequence: Synthetic oligonucleotide
agggcuuccgcaggcuuuu

SEQ ID NO: 1112433 - RNA, 19 nt, Artificial Sequence
  Description of Artificial Sequence: Synthetic oligonucleotide
cacgucagccggggugggg

SEQ ID NO: 1112434 - RNA, 19 nt, Artificial Sequence
  Description of Artificial Sequence: Synthetic oligonucleotide
gaucugccugaggucuguc

SEQ ID NO: 1112435 - RNA, 19 nt, Artificial Sequence
  Description of Artificial Sequence: Synthetic oligonucleotide
ggcccggagaucagcagac

SEQ ID NO: 1112436 - RNA, 19 nt, Artificial Sequence
  Description of Artificial Sequence: Synthetic oligonucleotide
gccuguuguagagcugggc

SEQ ID NO: 1112437 - RNA, 19 nt, Artificial Sequence
  Description of Artificial Sequence: Synthetic oligonucleotide
cuguggcauccgcccaaac

SEQ ID NO: 1112438 - RNA, 19 nt, Artificial Sequence
  Description of Artificial Sequence: Synthetic oligonucleotide
cggcaguuaaggucacacc

SEQ ID NO: 1112439 - RNA, 19 nt, Artificial Sequence
  Description of Artificial Sequence: Synthetic oligonucleotide
guaaagggugguccuuguu

SEQ ID NO: 1112440 - RNA, 19 nt, Artificial Sequence
  Description of Artificial Sequence: Synthetic oligonucleotide
cugugacgaucugccugag

SEQ ID NO: 1112441 - RNA, 19 nt, Artificial Sequence
  Description of Artificial Sequence: Synthetic oligonucleotide
ggguucagcuggucgauau

SEQ ID NO: 1112442 - RNA, 19 nt, Artificial Sequence
  Description of Artificial Sequence: Synthetic oligonucleotide
cauccuucgcaagcaugaa

SEQ ID NO: 1112443 - RNA, 19 nt, Artificial Sequence
  Description of Artificial Sequence: Synthetic oligonucleotide
caugaauccuuggcccucu

SEQ ID NO: 1112444 - RNA, 19 nt, Artificial Sequence
  Description of Artificial Sequence: Synthetic oligonucleotide
gaucgcccucgccuuggcu

SEQ ID NO: 1112445 - RNA, 19 nt, Artificial Sequence
  Description of Artificial Sequence: Synthetic oligonucleotide
gggcuccauaaagucacca

SEQ ID NO: 1112446 - RNA, 19 nt, Artificial Sequence
  Description of Artificial Sequence: Synthetic oligonucleotide
ccucgccuuggcuuugguc

SEQ ID NO: 1112447 - RNA, 19 nt, Artificial Sequence
  Description of Artificial Sequence: Synthetic oligonucleotide
cuggagcaccuuggcgaac

SEQ ID NO: 1112448 - RNA, 19 nt, Artificial Sequence
  Description of Artificial Sequence: Synthetic oligonucleotide
gcaggcuuuugaggaacuc

SEQ ID NO: 1112449 - RNA, 19 nt, Artificial Sequence
  Description of Artificial Sequence: Synthetic oligonucleotide
ggcgaacagcugugaggac

SEQ ID NO: 1112450 - RNA, 19 nt, Artificial Sequence
  Description of Artificial Sequence: Synthetic oligonucleotide
gcggauggccaccucuuua

SEQ ID NO: 1112451 - RNA, 19 nt, Artificial Sequence
  Description of Artificial Sequence: Synthetic oligonucleotide
cacagacucggcacucaau

SEQ ID NO: 1112452 - RNA, 19 nt, Artificial Sequence
  Description of Artificial Sequence: Synthetic oligonucleotide
ccgcaggcuuuugaggaac

SEQ ID NO: 1112453 - RNA, 19 nt, Artificial Sequence
  Description of Artificial Sequence: Synthetic oligonucleotide
cagggaggccagcaucgua

SEQ ID NO: 1112454 - RNA, 19 nt, Artificial Sequence
  Description of Artificial Sequence: Synthetic oligonucleotide
cucggcacucaauggccau

SEQ ID NO: 1112455 - RNA, 19 nt, Artificial Sequence
  Description of Artificial Sequence: Synthetic oligonucleotide
cuuggagcuucaggucaua

SEQ ID NO: 1112456 - RNA, 19 nt, Artificial Sequence
  Description of Artificial Sequence: Synthetic oligonucleotide
ccgcccaaaccugauggca

SEQ ID NO: 1112457 - RNA, 19 nt, Artificial Sequence
  Description of Artificial Sequence: Synthetic oligonucleotide
ccgacaguacugacauuua

SEQ ID NO: 1112458 - RNA, 19 nt, Artificial Sequence
  Description of Artificial Sequence: Synthetic oligonucleotide
cagcaucguauagaugauu

SEQ ID NO: 1112459 - RNA, 19 nt, Artificial Sequence
  Description of Artificial Sequence: Synthetic oligonucleotide
cgauaucacuggagaucuc

SEQ ID NO: 1112460 - RNA, 19 nt, Artificial Sequence
  Description of Artificial Sequence: Synthetic oligonucleotide
gcacgucagccgggguggg

SEQ ID NO: 1112461 - RNA, 19 nt, Artificial Sequence
  Description of Artificial Sequence: Synthetic oligonucleotide
cugugguaaagggcuugau

SEQ ID NO: 1112462 - RNA, 19 nt, Artificial Sequence
  Description of Artificial Sequence: Synthetic oligonucleotide
ccuuggcgaacagcuguga

SEQ ID NO: 1112463 - RNA, 19 nt, Artificial Sequence
  Description of Artificial Sequence: Synthetic oligonucleotide
gcccaaaccugauggcauu

SEQ ID NO: 1112464 - RNA, 19 nt, Artificial Sequence
  Description of Artificial Sequence: Synthetic oligonucleotide
gcacauguucugugacgau

SEQ ID NO: 1112465 - RNA, 19 nt, Artificial Sequence
  Description of Artificial Sequence: Synthetic oligonucleotide
ggcggucuccacugagaau

SEQ ID NO: 1112466 - RNA, 19 nt, Artificial Sequence
  Description of Artificial Sequence: Synthetic oligonucleotide
cggcacucaauggccauga

SEQ ID NO: 1112467 - RNA, 19 nt, Artificial Sequence
  Description of Artificial Sequence: Synthetic oligonucleotide
gggcuuccgcaggcuuuug

SEQ ID NO: 1112468 - RNA, 19 nt, Artificial Sequence
  Description of Artificial Sequence: Synthetic oligonucleotide
ccauugggucagcucuugu

SEQ ID NO: 1112469 - RNA, 19 nt, Artificial Sequence
  Description of Artificial Sequence: Synthetic oligonucleotide
ccucgaugggcuucacguu

SEQ ID NO: 1112470 - RNA, 19 nt, Artificial Sequence
  Description of Artificial Sequence: Synthetic oligonucleotide
gcauccgcccaaaccugau

SEQ ID NO: 1112471 - RNA, 19 nt, Artificial Sequence
  Description of Artificial Sequence: Synthetic oligonucleotide
ccgucuccgucuucuugau

SEQ ID NO: 1112472 - RNA, 19 nt, Artificial Sequence
  Description of Artificial Sequence: Synthetic oligonucleotide
aauacagugacccguggcc

SEQ ID NO: 1112473 - RNA, 19 nt, Artificial Sequence
  Description of Artificial Sequence: Synthetic oligonucleotide
uuugcgaugggcaucacgg

SEQ ID NO: 1112474 - RNA, 19 nt, Artificial Sequence
  Description of Artificial Sequence: Synthetic oligonucleotide
aaaaggaccauauucucca

SEQ ID NO: 1112475 - RNA, 19 nt, Artificial Sequence
  Description of Artificial Sequence: Synthetic oligonucleotide
agcaguaugccuuucuugc

SEQ ID NO: 1112476 - RNA, 19 nt, Artificial Sequence
  Description of Artificial Sequence: Synthetic oligonucleotide
aaagguucuagguucagca

SEQ ID NO: 1112477 - RNA, 19 nt, Artificial Sequence
  Description of Artificial Sequence: Synthetic oligonucleotide
uccacaaugaccauugaga

SEQ ID NO: 1112478 - RNA, 19 nt, Artificial Sequence
  Description of Artificial Sequence: Synthetic oligonucleotide
acuacuuuugguuagcugu

SEQ ID NO: 1112479 - RNA, 19 nt, Artificial Sequence
  Description of Artificial Sequence: Synthetic oligonucleotide
gagaaggccauccagacgc

SEQ ID NO: 1112480 - RNA, 19 nt, Artificial Sequence
  Description of Artificial Sequence: Synthetic oligonucleotide
aaaacaaaacaaaacaaaa

SEQ ID NO: 1112481 - RNA, 19 nt, Artificial Sequence
  Description of Artificial Sequence: Synthetic oligonucleotide
aauguugaucucuuggaga

SEQ ID NO: 1112482 - RNA, 19 nt, Artificial Sequence
  Description of Artificial Sequence: Synthetic oligonucleotide
cuagaaaggccacaggucc

SEQ ID NO: 1112483 - RNA, 19 nt, Artificial Sequence
  Description of Artificial Sequence: Synthetic oligonucleotide
aaagggucugcaugucugc

SEQ ID NO: 1112484 - RNA, 19 nt, Artificial Sequence
  Description of Artificial Sequence: Synthetic oligonucleotide
uuucccuguuaucuuaggg

SEQ ID NO: 1112485 - RNA, 19 nt, Artificial Sequence
  Description of Artificial Sequence: Synthetic oligonucleotide
aaugaccauugagagacac

SEQ ID NO: 1112486 - RNA, 19 nt, Artificial Sequence
  Description of Artificial Sequence: Synthetic oligonucleotide
ucugucucgcuacaugggg

SEQ ID NO: 1112487 - RNA, 19 nt, Artificial Sequence
  Description of Artificial Sequence: Synthetic oligonucleotide
ugucuuguggcuuguacag

SEQ ID NO: 1112488 - RNA, 19 nt, Artificial Sequence
  Description of Artificial Sequence: Synthetic oligonucleotide
aggguggagagcuauagag

SEQ ID NO: 1112489 - RNA, 19 nt, Artificial Sequence
  Description of Artificial Sequence: Synthetic oligonucleotide
ugacaaagguucuagguuc

SEQ ID NO: 1112490 - RNA, 19 nt, Artificial Sequence
  Description of Artificial Sequence: Synthetic oligonucleotide
caaaacaaaacaaaacaaa

SEQ ID NO: 1112491 - RNA, 19 nt, Artificial Sequence
  Description of Artificial Sequence: Synthetic oligonucleotide
agauaaggaggcugguuac

SEQ ID NO: 1112492 - RNA, 19 nt, Artificial Sequence
  Description of Artificial Sequence: Synthetic oligonucleotide
uucguacccagacaucggg

SEQ ID NO: 1112493 - RNA, 19 nt, Artificial Sequence
  Description of Artificial Sequence: Synthetic oligonucleotide
uugguuagcuguuggaucu

SEQ ID NO: 1112494 - RNA, 19 nt, Artificial Sequence
  Description of Artificial Sequence: Synthetic oligonucleotide
agcuagaaaggccacaggu

SEQ ID NO: 1112495 - RNA, 19 nt, Artificial Sequence
  Description of Artificial Sequence: Synthetic oligonucleotide
ucuagguucagcaggcagu

SEQ ID NO: 1112496 - RNA, 19 nt, Artificial Sequence
  Description of Artificial Sequence: Synthetic oligonucleotide
auaagaagugugcugucug

SEQ ID NO: 1112497 - RNA, 19 nt, Artificial Sequence
  Description of Artificial Sequence: Synthetic oligonucleotide
cagucaagcacaugggagg

SEQ ID NO: 1112498 - RNA, 19 nt, Artificial Sequence
  Description of Artificial Sequence: Synthetic oligonucleotide
ugcgaaugggcccugggcc

SEQ ID NO: 1112499 - RNA, 19 nt, Artificial Sequence
  Description of Artificial Sequence: Synthetic oligonucleotide
ucuuggugcgccucgaagc

SEQ ID NO: 1112500 - RNA, 19 nt, Artificial Sequence
  Description of Artificial Sequence: Synthetic oligonucleotide
aagcaguaugccuuucuug

SEQ ID NO: 1112501 - RNA, 19 nt, Artificial Sequence
  Description of Artificial Sequence: Synthetic oligonucleotide
acuuuugguuagcuguugg

SEQ ID NO: 1112502 - RNA, 19 nt, Artificial Sequence
  Description of Artificial Sequence: Synthetic oligonucleotide
uuagcuguuggaucucugc

SEQ ID NO: 1112503 - RNA, 19 nt, Artificial Sequence
  Description of Artificial Sequence: Synthetic oligonucleotide
aguggcagcauccaauaca

SEQ ID NO: 1112504 - RNA, 19 nt, Artificial Sequence
  Description of Artificial Sequence: Synthetic oligonucleotide
agacccuaaaacccucccc

SEQ ID NO: 1112505 - RNA, 19 nt, Artificial Sequence
  Description of Artificial Sequence: Synthetic oligonucleotide
ugacccguggcccacagcu

SEQ ID NO: 1112506 - RNA, 19 nt, Artificial Sequence
  Description of Artificial Sequence: Synthetic oligonucleotide
acugacuacuuuugguuag

SEQ ID NO: 1112507 - RNA, 19 nt, Artificial Sequence
  Description of Artificial Sequence: Synthetic oligonucleotide
aaaagggucugcaugucug

SEQ ID NO: 1112508 - RNA, 19 nt, Artificial Sequence
  Description of Artificial Sequence: Synthetic oligonucleotide
uuugguuagcuguuggauc

SEQ ID NO: 1112509 - RNA, 19 nt, Artificial Sequence
  Description of Artificial Sequence: Synthetic oligonucleotide
gguggagagcuauagagcc

SEQ ID NO: 1112510 - RNA, 19 nt, Artificial Sequence
  Description of Artificial Sequence: Synthetic oligonucleotide
uacaccgucucugucagag

SEQ ID NO: 1112511 - RNA, 19 nt, Artificial Sequence
  Description of Artificial Sequence: Synthetic oligonucleotide
guggcuaucaggugcaggc

SEQ ID NO: 1112512 - RNA, 19 nt, Artificial Sequence
  Description of Artificial Sequence: Synthetic oligonucleotide
guugaucucuuggagaugc

SEQ ID NO: 1112513 - RNA, 19 nt, Artificial Sequence
  Description of Artificial Sequence: Synthetic oligonucleotide
aguaugccuuucuugcggg

SEQ ID NO: 1112514 - RNA, 19 nt, Artificial Sequence
  Description of Artificial Sequence: Synthetic oligonucleotide
ggcaacaagacaaugacac

SEQ ID NO: 1112515 - RNA, 19 nt, Artificial Sequence
  Description of Artificial Sequence: Synthetic oligonucleotide
aaaguggcgguagccuugc

SEQ ID NO: 1112516 - RNA, 19 nt, Artificial Sequence
  Description of Artificial Sequence: Synthetic oligonucleotide
gaucucuuggagaugcucc

SEQ ID NO: 1112517 - RNA, 19 nt, Artificial Sequence
  Description of Artificial Sequence: Synthetic oligonucleotide
uguuaucuuagggaugccc

SEQ ID NO: 1112518 - RNA, 19 nt, Artificial Sequence
  Description of Artificial Sequence: Synthetic oligonucleotide
aagaagugugcugucuguc

SEQ ID NO: 1112519 - RNA, 19 nt, Artificial Sequence
  Description of Artificial Sequence: Synthetic oligonucleotide
uccaauacagugacccgug

SEQ ID NO: 1112520 - RNA, 19 nt, Artificial Sequence
  Description of Artificial Sequence: Synthetic oligonucleotide
uccgaggauaggcagcgag

SEQ ID NO: 1112521 - RNA, 19 nt, Artificial Sequence
  Description of Artificial Sequence: Synthetic oligonucleotide
agcuauagagccaagggca

SEQ ID NO: 1112522 - RNA, 19 nt, Artificial Sequence
  Description of Artificial Sequence: Synthetic oligonucleotide
aacagaucucuuugcgaug

SEQ ID NO: 1112523 - RNA, 19 nt, Artificial Sequence
  Description of Artificial Sequence: Synthetic oligonucleotide
agaacagaucucuuugcga

SEQ ID NO: 1112524 - RNA, 19 nt, Artificial Sequence
  Description of Artificial Sequence: Synthetic oligonucleotide
uguacaggucccugagggg

SEQ ID NO: 1112525 - RNA, 19 nt, Artificial Sequence
  Description of Artificial Sequence: Synthetic oligonucleotide
cauugagagacaccaugcc

SEQ ID NO: 1112526 - RNA, 19 nt, Artificial Sequence
  Description of Artificial Sequence: Synthetic oligonucleotide
auacagugacccguggccc

SEQ ID NO: 1112527 - RNA, 19 nt, Artificial Sequence
  Description of Artificial Sequence: Synthetic oligonucleotide
gagagcuauagagccaagg

SEQ ID NO: 1112528 - RNA, 19 nt, Artificial Sequence
  Description of Artificial Sequence: Synthetic oligonucleotide
caguaugccuuucuugcgg

SEQ ID NO: 1112529 - RNA, 19 nt, Artificial Sequence
  Description of Artificial Sequence: Synthetic oligonucleotide
ucuccauacaccgucucug

SEQ ID NO: 1112530 - RNA, 19 nt, Artificial Sequence
  Description of Artificial Sequence: Synthetic oligonucleotide
acagucaagcacaugggag

SEQ ID NO: 1112531 - RNA, 19 nt, Artificial Sequence
  Description of Artificial Sequence: Synthetic oligonucleotide
ucccuguuaucuuagggau

SEQ ID NO: 1112532 - RNA, 19 nt, Artificial Sequence
  Description of Artificial Sequence: Synthetic oligonucleotide
ucguacccagacaucgggg

SEQ ID NO: 1112533 - RNA, 19 nt, Artificial Sequence
  Description of Artificial Sequence: Synthetic oligonucleotide
uaagaagugugcugucugu

SEQ ID NO: 1112534 - RNA, 19 nt, Artificial Sequence
  Description of Artificial Sequence: Synthetic oligonucleotide
aagacccugcgcuccuugg

SEQ ID NO: 1112535 - RNA, 19 nt, Artificial Sequence
  Description of Artificial Sequence: Synthetic oligonucleotide
uacccagacaucggggucg

SEQ ID NO: 1112536 - RNA, 19 nt, Artificial Sequence
  Description of Artificial Sequence: Synthetic oligonucleotide
ugcgggucaguucucggcc

SEQ ID NO: 1112537 - RNA, 19 nt, Artificial Sequence
  Description of Artificial Sequence: Synthetic oligonucleotide
gacuacuuuugguuagcug

SEQ ID NO: 1112538 - RNA, 19 nt, Artificial Sequence
  Description of Artificial Sequence: Synthetic oligonucleotide
ugaucagugccuacccaga

SEQ ID NO: 1112539 - RNA, 19 nt, Artificial Sequence
  Description of Artificial Sequence: Synthetic oligonucleotide
gagggucccguccuguagg

SEQ ID NO: 1112540 - RNA, 19 nt, Artificial Sequence
  Description of Artificial Sequence: Synthetic oligonucleotide
caauacagugacccguggc

SEQ ID NO: 1112541 - RNA, 19 nt, Artificial Sequence
  Description of Artificial Sequence: Synthetic oligonucleotide
uaucuuagggaugcccucc

SEQ ID NO: 1112542 - RNA, 19 nt, Artificial Sequence
  Description of Artificial Sequence: Synthetic oligonucleotide
uauagagccaagggcaccu

SEQ ID NO: 1112543 - RNA, 19 nt, Artificial Sequence
  Description of Artificial Sequence: Synthetic oligonucleotide
aggcacugguucgugagcc

SEQ ID NO: 1112544 - RNA, 19 nt, Artificial Sequence
  Description of Artificial Sequence: Synthetic oligonucleotide
cauccaauacagugacccg

SEQ ID NO: 1112545 - RNA, 19 nt, Artificial Sequence
  Description of Artificial Sequence: Synthetic oligonucleotide
cuacccagagcaaacccug

SEQ ID NO: 1112546 - RNA, 19 nt, Artificial Sequence
  Description of Artificial Sequence: Synthetic oligonucleotide
caugcggcauccuccaggc

SEQ ID NO: 1112547 - RNA, 19 nt, Artificial Sequence
  Description of Artificial Sequence: Synthetic oligonucleotide
acagggccggcuucguacc

SEQ ID NO: 1112548 - RNA, 19 nt, Artificial Sequence
  Description of Artificial Sequence: Synthetic oligonucleotide
agucaagcacaugggaggg

SEQ ID NO: 1112549 - RNA, 19 nt, Artificial Sequence
  Description of Artificial Sequence: Synthetic oligonucleotide
agauggaaccauccuccuc

SEQ ID NO: 1112550 - RNA, 19 nt, Artificial Sequence
  Description of Artificial Sequence: Synthetic oligonucleotide
cugccagauaagaagugug

SEQ ID NO: 1112551 - RNA, 19 nt, Artificial Sequence
  Description of Artificial Sequence: Synthetic oligonucleotide
aguggugagguuuuauguu

SEQ ID NO: 1112552 - RNA, 19 nt, Artificial Sequence
  Description of Artificial Sequence: Synthetic oligonucleotide
ugugaccuccagauugaca

SEQ ID NO: 1112553 - RNA, 19 nt, Artificial Sequence
  Description of Artificial Sequence: Synthetic oligonucleotide
gucgucggccaucucauag

SEQ ID NO: 1112554 - RNA, 19 nt, Artificial Sequence
  Description of Artificial Sequence: Synthetic oligonucleotide
gaaucccaccacugguccg

SEQ ID NO: 1112555 - RNA, 19 nt, Artificial Sequence
  Description of Artificial Sequence: Synthetic oligonucleotide
ugucucgcuacauggggcu

SEQ ID NO: 1112556 - RNA, 19 nt, Artificial Sequence
  Description of Artificial Sequence: Synthetic oligonucleotide
ggugccaguguccacacug

SEQ ID NO: 1112557 - RNA, 19 nt, Artificial Sequence
  Description of Artificial Sequence: Synthetic oligonucleotide
ugugucacgcucaccgccu

SEQ ID NO: 1112558 - RNA, 19 nt, Artificial Sequence
  Description of Artificial Sequence: Synthetic oligonucleotide
augaccauugagagacacc

SEQ ID NO: 1112559 - RNA, 19 nt, Artificial Sequence
  Description of Artificial Sequence: Synthetic oligonucleotide
aggggaacccaggugggcc

SEQ ID NO: 1112560 - RNA, 19 nt, Artificial Sequence
  Description of Artificial Sequence: Synthetic oligonucleotide
gcuucguacccagacaucg

SEQ ID NO: 1112561 - RNA, 19 nt, Artificial Sequence
  Description of Artificial Sequence: Synthetic oligonucleotide
cagacaucggggucgucgg

SEQ ID NO: 1112562 - RNA, 19 nt, Artificial Sequence
  Description of Artificial Sequence: Synthetic oligonucleotide
gaccauauucuccaagugu

SEQ ID NO: 1112563 - RNA, 19 nt, Artificial Sequence
  Description of Artificial Sequence: Synthetic oligonucleotide
accgccucaucuuggugcg

SEQ ID NO: 1112564 - RNA, 19 nt, Artificial Sequence
  Description of Artificial Sequence: Synthetic oligonucleotide
uccucacugugcuccagag

SEQ ID NO: 1112565 - RNA, 19 nt, Artificial Sequence
  Description of Artificial Sequence: Synthetic oligonucleotide
cuucguacccagacaucgg

SEQ ID NO: 1112566 - RNA, 19 nt, Artificial Sequence
  Description of Artificial Sequence: Synthetic oligonucleotide
ugcgccucgaagcuuugcu

SEQ ID NO: 1112567 - RNA, 19 nt, Artificial Sequence
  Description of Artificial Sequence: Synthetic oligonucleotide
cagggaaucccaccacugg

SEQ ID NO: 1112568 - RNA, 19 nt, Artificial Sequence
  Description of Artificial Sequence: Synthetic oligonucleotide
gcgguauugaagcaguaug

SEQ ID NO: 1112569 - RNA, 19 nt, Artificial Sequence
  Description of Artificial Sequence: Synthetic oligonucleotide
ucuugcgggucaguucucg

SEQ ID NO: 1112570 - RNA, 19 nt, Artificial Sequence
  Description of Artificial Sequence: Synthetic oligonucleotide
aucaggugcaggcacuggu

SEQ ID NO: 1112571 - RNA, 19 nt, Artificial Sequence
  Description of Artificial Sequence: Synthetic oligonucleotide
cuugaucagcugcccacgg

SEQ ID NO: 1112572 - RNA, 19 nt, Artificial Sequence
  Description of Artificial Sequence: Synthetic oligonucleotide
caagacccuaaaacccucc

SEQ ID NO: 1112573 - RNA, 19 nt, Artificial Sequence
  Description of Artificial Sequence: Synthetic oligonucleotide
agggaaucccaccacuggu

SEQ ID NO: 1112574 - RNA, 19 nt, Artificial Sequence
  Description of Artificial Sequence: Synthetic oligonucleotide
uggagagcuauagagccaa

SEQ ID NO: 1112575 - RNA, 19 nt, Artificial Sequence
  Description of Artificial Sequence: Synthetic oligonucleotide
uucgugagccugcccaucu

SEQ ID NO: 1112576 - RNA, 19 nt, Artificial Sequence
  Description of Artificial Sequence: Synthetic oligonucleotide
cugucucgcuacauggggc

SEQ ID NO: 1112577 - RNA, 19 nt, Artificial Sequence
  Description of Artificial Sequence: Synthetic oligonucleotide
ccuguuaucuuagggaugc

SEQ ID NO: 1112578 - RNA, 19 nt, Artificial Sequence
  Description of Artificial Sequence: Synthetic oligonucleotide
aauccaggccugucuugug

SEQ ID NO: 1112579 - RNA, 19 nt, Artificial Sequence
  Description of Artificial Sequence: Synthetic oligonucleotide
augauggccacagaacaga

SEQ ID NO: 1112580 - RNA, 19 nt, Artificial Sequence
  Description of Artificial Sequence: Synthetic oligonucleotide
ccauugagagacaccaugc

SEQ ID NO: 1112581 - RNA, 19 nt, Artificial Sequence
  Description of Artificial Sequence: Synthetic oligonucleotide
ggaaaguaguccugguggc

SEQ ID NO: 1112582 - RNA, 19 nt, Artificial Sequence
  Description of Artificial Sequence: Synthetic oligonucleotide
cacucagcccugacaaagg

SEQ ID NO: 1112583 - RNA, 19 nt, Artificial Sequence
  Description of Artificial Sequence: Synthetic oligonucleotide
cucgaagcuuugcugaguc

SEQ ID NO: 1112584 - RNA, 19 nt, Artificial Sequence
  Description of Artificial Sequence: Synthetic oligonucleotide
caaaguggcgguagccuug

SEQ ID NO: 1112585 - RNA, 19 nt, Artificial Sequence
  Description of Artificial Sequence: Synthetic oligonucleotide
ucucgcuacauggggcugg

SEQ ID NO: 1112586 - RNA, 19 nt, Artificial Sequence
  Description of Artificial Sequence: Synthetic oligonucleotide
uugcgggucaguucucggc

SEQ ID NO: 1112587 - RNA, 19 nt, Artificial Sequence
  Description of Artificial Sequence: Synthetic oligonucleotide
cacagggccggcuucguac

SEQ ID NO: 1112588 - RNA, 19 nt, Artificial Sequence
  Description of Artificial Sequence: Synthetic oligonucleotide
agaauccaggccugucuug

SEQ ID NO: 1112589 - RNA, 19 nt, Artificial Sequence
  Description of Artificial Sequence: Synthetic oligonucleotide
cuagguucagcaggcagug

SEQ ID NO: 1112590 - RNA, 19 nt, Artificial Sequence
  Description of Artificial Sequence: Synthetic oligonucleotide
caaagguucuagguucagc

SEQ ID NO: 1112591 - RNA, 19 nt, Artificial Sequence
  Description of Artificial Sequence: Synthetic oligonucleotide
acugguucgugagccugcc

SEQ ID NO: 1112592 - RNA, 19 nt, Artificial Sequence
  Description of Artificial Sequence: Synthetic oligonucleotide
uugcagguugcuaggcacu

SEQ ID NO: 1112593 - RNA, 19 nt, Artificial Sequence
  Description of Artificial Sequence: Synthetic oligonucleotide
cagauaaggaggcugguua

SEQ ID NO: 1112594 - RNA, 19 nt, Artificial Sequence
  Description of Artificial Sequence: Synthetic oligonucleotide
accuccgagccucacucag

SEQ ID NO: 1112595 - RNA, 19 nt, Artificial Sequence
  Description of Artificial Sequence: Synthetic oligonucleotide
ggucacugacuacuuuugg

SEQ ID NO: 1112596 - RNA, 19 nt, Artificial Sequence
  Description of Artificial Sequence: Synthetic oligonucleotide
uacagugacccguggccca

SEQ ID NO: 1112597 - RNA, 19 nt, Artificial Sequence
  Description of Artificial Sequence: Synthetic oligonucleotide
ucgucggccaucucauaga

SEQ ID NO: 1112598 - RNA, 19 nt, Artificial Sequence
  Description of Artificial Sequence: Synthetic oligonucleotide
agacaucggggucgucggc

SEQ ID NO: 1112599 - RNA, 19 nt, Artificial Sequence
  Description of Artificial Sequence: Synthetic oligonucleotide
cacugguccgaggauaggc

SEQ ID NO: 1112600 - RNA, 19 nt, Artificial Sequence
  Description of Artificial Sequence: Synthetic oligonucleotide
guggcgguagccuugccca

SEQ ID NO: 1112601 - RNA, 19 nt, Artificial Sequence
  Description of Artificial Sequence: Synthetic oligonucleotide
uacuuuugguuagcuguug

SEQ ID NO: 1112602 - RNA, 19 nt, Artificial Sequence
  Description of Artificial Sequence: Synthetic oligonucleotide
ggaaucccaccacuggucc

SEQ ID NO: 1112603 - RNA, 19 nt, Artificial Sequence
  Description of Artificial Sequence: Synthetic oligonucleotide
cuugcgggucaguucucgg

SEQ ID NO: 1112604 - RNA, 19 nt, Artificial Sequence
  Description of Artificial Sequence: Synthetic oligonucleotide
cagagccgagccaucagug

SEQ ID NO: 1112605 - RNA, 19 nt, Artificial Sequence
  Description of Artificial Sequence: Synthetic oligonucleotide
caccaugugugucacgcuc

SEQ ID NO: 1112606 - RNA, 19 nt, Artificial Sequence
  Description of Artificial Sequence: Synthetic oligonucleotide
acagaccagcaugucauug

SEQ ID NO: 1112607 - RNA, 19 nt, Artificial Sequence
  Description of Artificial Sequence: Synthetic oligonucleotide
augccuuucuugcggguca

SEQ ID NO: 1112608 - RNA, 19 nt, Artificial Sequence
  Description of Artificial Sequence: Synthetic oligonucleotide
ccccaagacccuaaaaccc

SEQ ID NO: 1112609 - RNA, 19 nt, Artificial Sequence
  Description of Artificial Sequence: Synthetic oligonucleotide
uaugccuuucuugcggguc

SEQ ID NO: 1112610 - RNA, 19 nt, Artificial Sequence
  Description of Artificial Sequence: Synthetic oligonucleotide
uagccuugcccaccggaga

SEQ ID NO: 1112611 - RNA, 19 nt, Artificial Sequence
  Description of Artificial Sequence: Synthetic oligonucleotide
caucacgggcacagggccg

SEQ ID NO: 1112612 - RNA, 19 nt, Artificial Sequence
  Description of Artificial Sequence: Synthetic oligonucleotide
cuauagagccaagggcacc

SEQ ID NO: 1112613 - RNA, 19 nt, Artificial Sequence
  Description of Artificial Sequence: Synthetic oligonucleotide
gcaguaugccuuucuugcg

SEQ ID NO: 1112614 - RNA, 19 nt, Artificial Sequence
  Description of Artificial Sequence: Synthetic oligonucleotide
gauaagaagugugcugucu

SEQ ID NO: 1112615 - RNA, 19 nt, Artificial Sequence
  Description of Artificial Sequence: Synthetic oligonucleotide
gguucuagguucagcaggc

SEQ ID NO: 1112616 - RNA, 19 nt, Artificial Sequence
  Description of Artificial Sequence: Synthetic oligonucleotide
gaaggccauccagacgccg

SEQ ID NO: 1112617 - RNA, 19 nt, Artificial Sequence
  Description of Artificial Sequence: Synthetic oligonucleotide
guuaucuuagggaugcccu

SEQ ID NO: 1112618 - RNA, 19 nt, Artificial Sequence
  Description of Artificial Sequence: Synthetic oligonucleotide
cugacuacuuuugguuagc

SEQ ID NO: 1112619 - RNA, 19 nt, Artificial Sequence
  Description of Artificial Sequence: Synthetic oligonucleotide
aaguggcgguagccuugcc

SEQ ID NO: 1112620 - RNA, 19 nt, Artificial Sequence
  Description of Artificial Sequence: Synthetic oligonucleotide
agagcaaacccuggcagau

SEQ ID NO: 1112621 - RNA, 19 nt, Artificial Sequence
  Description of Artificial Sequence: Synthetic oligonucleotide
guacaggucccugagggga

SEQ ID NO: 1112622 - RNA, 19 nt, Artificial Sequence
  Description of Artificial Sequence: Synthetic oligonucleotide
gacccugcgcuccuuggac

SEQ ID NO: 1112623 - RNA, 19 nt, Artificial Sequence
  Description of Artificial Sequence: Synthetic oligonucleotide
ccucaguggagaauccagg

SEQ ID NO: 1112624 - RNA, 19 nt, Artificial Sequence
  Description of Artificial Sequence: Synthetic oligonucleotide
ugacuacuuuugguuagcu

SEQ ID NO: 1112625 - RNA, 19 nt, Artificial Sequence
  Description of Artificial Sequence: Synthetic oligonucleotide
agcgcaggcgguauugaag

SEQ ID NO: 1112626 - RNA, 19 nt, Artificial Sequence
  Description of Artificial Sequence: Synthetic oligonucleotide
ccacggucuccauacaccg

SEQ ID NO: 1112627 - RNA, 19 nt, Artificial Sequence
  Description of Artificial Sequence: Synthetic oligonucleotide
gaugcccuccagccggggc

SEQ ID NO: 1112628 - RNA, 19 nt, Artificial Sequence
  Description of Artificial Sequence: Synthetic oligonucleotide
gucacugacuacuuuuggu

SEQ ID NO: 1112629 - RNA, 19 nt, Artificial Sequence
  Description of Artificial Sequence: Synthetic oligonucleotide
cagaccagcaugucauuga

SEQ ID NO: 1112630 - RNA, 19 nt, Artificial Sequence
  Description of Artificial Sequence: Synthetic oligonucleotide
cacugguucgugagccugc

SEQ ID NO: 1112631 - RNA, 19 nt, Artificial Sequence
  Description of Artificial Sequence: Synthetic oligonucleotide
cagcuagaaaggccacagg

SEQ ID NO: 1112632 - RNA, 19 nt, Artificial Sequence
  Description of Artificial Sequence: Synthetic oligonucleotide
cuuguggcuuguacagguc

SEQ ID NO: 1112633 - RNA, 19 nt, Artificial Sequence
  Description of Artificial Sequence: Synthetic oligonucleotide
gcaucacgggcacagggcc

SEQ ID NO: 1112634 - RNA, 19 nt, Artificial Sequence
  Description of Artificial Sequence: Synthetic oligonucleotide
ugccuacccagagcaaacc

SEQ ID NO: 1112635 - RNA, 19 nt, Artificial Sequence
  Description of Artificial Sequence: Synthetic oligonucleotide
ucaccgccucaucuuggug

SEQ ID NO: 1112636 - RNA, 19 nt, Artificial Sequence
  Description of Artificial Sequence: Synthetic oligonucleotide
gucccagggaaucccacca

SEQ ID NO: 1112637 - RNA, 19 nt, Artificial Sequence
  Description of Artificial Sequence: Synthetic oligonucleotide
ucgaagcuuugcugagucu

SEQ ID NO: 1112638 - RNA, 19 nt, Artificial Sequence
  Description of Artificial Sequence: Synthetic oligonucleotide
ucaccaugugugucacgcu

SEQ ID NO: 1112639 - RNA, 19 nt, Artificial Sequence
  Description of Artificial Sequence: Synthetic oligonucleotide
cuaucaggugcaggcacug

SEQ ID NO: 1112640 - RNA, 19 nt, Artificial Sequence
  Description of Artificial Sequence: Synthetic oligonucleotide
ugcaggcacugguucguga

SEQ ID NO: 1112641 - RNA, 19 nt, Artificial Sequence
  Description of Artificial Sequence: Synthetic oligonucleotide
uggugcgccucgaagcuuu

SEQ ID NO: 1112642 - RNA, 19 nt, Artificial Sequence
  Description of Artificial Sequence: Synthetic oligonucleotide
agugacccguggcccacag

SEQ ID NO: 1112643 - RNA, 19 nt, Artificial Sequence
  Description of Artificial Sequence: Synthetic oligonucleotide
ugucacgcucaccgccuca

SEQ ID NO: 1112644 - RNA, 19 nt, Artificial Sequence
  Description of Artificial Sequence: Synthetic oligonucleotide
acagugacccguggcccac

SEQ ID NO: 1112645 - RNA, 19 nt, Artificial Sequence
  Description of Artificial Sequence: Synthetic oligonucleotide
caguggugagguuuuaugu

SEQ ID NO: 1112646 - RNA, 19 nt, Artificial Sequence
  Description of Artificial Sequence: Synthetic oligonucleotide
ucgugagccugcccaucug

SEQ ID NO: 1112647 - RNA, 19 nt, Artificial Sequence
  Description of Artificial Sequence: Synthetic oligonucleotide
cugcaugucugcagugguc

SEQ ID NO: 1112648 - RNA, 19 nt, Artificial Sequence
  Description of Artificial Sequence: Synthetic oligonucleotide
cacugacuacuuuugguua

SEQ ID NO: 1112649 - RNA, 19 nt, Artificial Sequence
  Description of Artificial Sequence: Synthetic oligonucleotide
agccuugcccaccggagau

SEQ ID NO: 1112650 - RNA, 19 nt, Artificial Sequence
  Description of Artificial Sequence: Synthetic oligonucleotide
cacaggugcuucuggccug

SEQ ID NO: 1112651 - RNA, 19 nt, Artificial Sequence
  Description of Artificial Sequence: Synthetic oligonucleotide
agacccugcgcuccuugga

SEQ ID NO: 1112652 - RNA, 19 nt, Artificial Sequence
  Description of Artificial Sequence: Synthetic oligonucleotide
ucuccaggucccagggaau

SEQ ID NO: 1112653 - RNA, 19 nt, Artificial Sequence
  Description of Artificial Sequence: Synthetic oligonucleotide
acaucggggucgucggcca

SEQ ID NO: 1112654 - RNA, 19 nt, Artificial Sequence
  Description of Artificial Sequence: Synthetic oligonucleotide
cagaucucuuugcgauggg

SEQ ID NO: 1112655 - RNA, 19 nt, Artificial Sequence
  Description of Artificial Sequence: Synthetic oligonucleotide
guuagcuguuggaucucug

SEQ ID NO: 1112656 - RNA, 19 nt, Artificial Sequence
  Description of Artificial Sequence: Synthetic oligonucleotide
cugacaaagguucuagguu

SEQ ID NO: 1112657 - RNA, 19 nt, Artificial Sequence
  Description of Artificial Sequence: Synthetic oligonucleotide
cucuuugcgaugggcauca

SEQ ID NO: 1112658 - RNA, 19 nt, Artificial Sequence
  Description of Artificial Sequence: Synthetic oligonucleotide
ggguggagagcuauagagc

SEQ ID NO: 1112659 - RNA, 19 nt, Artificial Sequence
  Description of Artificial Sequence: Synthetic oligonucleotide
gcuagaaaggccacagguc

SEQ ID NO: 1112660 - RNA, 19 nt, Artificial Sequence
  Description of Artificial Sequence: Synthetic oligonucleotide
guacccagacaucgggguc

SEQ ID NO: 1112661 - RNA, 19 nt, Artificial Sequence
  Description of Artificial Sequence: Synthetic oligonucleotide
ccgaggauaggcagcgagg

SEQ ID NO: 1112662 - RNA, 19 nt, Artificial Sequence
  Description of Artificial Sequence: Synthetic oligonucleotide
cuacauggggcuggccgcc

SEQ ID NO: 1112663 - RNA, 19 nt, Artificial Sequence
  Description of Artificial Sequence: Synthetic oligonucleotide
cucauggccacagcuagaa

SEQ ID NO: 1112664 - RNA, 19 nt, Artificial Sequence
  Description of Artificial Sequence: Synthetic oligonucleotide
uaguccugguggcaauguu

SEQ ID NO: 1112665 - RNA, 19 nt, Artificial Sequence
  Description of Artificial Sequence: Synthetic oligonucleotide
gguuacacacaggugcuuc

SEQ ID NO: 1112666 - RNA, 19 nt, Artificial Sequence
  Description of Artificial Sequence: Synthetic oligonucleotide
uggcuuguacaggucccug

SEQ ID NO: 1112667 - RNA, 19 nt, Artificial Sequence
  Description of Artificial Sequence: Synthetic oligonucleotide
ccauacaccgucucuguca

SEQ ID NO: 1112668 - RNA, 19 nt, Artificial Sequence
  Description of Artificial Sequence: Synthetic oligonucleotide
ugcuacggucacugacuac

SEQ ID NO: 1112669 - RNA, 19 nt, Artificial Sequence
  Description of Artificial Sequence: Synthetic oligonucleotide
gccuacccagagcaaaccc

SEQ ID NO: 1112670 - RNA, 19 nt, Artificial Sequence
  Description of Artificial Sequence: Synthetic oligonucleotide
agccugcccaucugacuug

SEQ ID NO: 1112671 - RNA, 19 nt, Artificial Sequence
  Description of Artificial Sequence: Synthetic oligonucleotide
ugccuuucuugcgggucag

SEQ ID NO: 1112672 - RNA, 19 nt, Artificial Sequence
  Description of Artificial Sequence: Synthetic oligonucleotide
cuggcaggaggaaaguagu

SEQ ID NO: 1112673 - RNA, 19 nt, Artificial Sequence
  Description of Artificial Sequence: Synthetic oligonucleotide
aggaugucaggggccaaga

SEQ ID NO: 1112674 - RNA, 19 nt, Artificial Sequence
  Description of Artificial Sequence: Synthetic oligonucleotide
ugccgcuggccagauguca

SEQ ID NO: 1112675 - RNA, 19 nt, Artificial Sequence
  Description of Artificial Sequence: Synthetic oligonucleotide
caccugccagauaagaagu

SEQ ID NO: 1112676 - RNA, 19 nt, Artificial Sequence
  Description of Artificial Sequence: Synthetic oligonucleotide
gccucaguggagaauccag

SEQ ID NO: 1112677 - RNA, 19 nt, Artificial Sequence
  Description of Artificial Sequence: Synthetic oligonucleotide
cugguuacacacaggugcu

SEQ ID NO: 1112678 - RNA, 19 nt, Artificial Sequence
  Description of Artificial Sequence: Synthetic oligonucleotide
ucggccuguguggcuauca

SEQ ID NO: 1112679 - RNA, 19 nt, Artificial Sequence
  Description of Artificial Sequence: Synthetic oligonucleotide
acccugcgcuccuuggacu

SEQ ID NO: 1112680 - RNA, 19 nt, Artificial Sequence
  Description of Artificial Sequence: Synthetic oligonucleotide
gcgaaugggcccugggccc

SEQ ID NO: 1112681 - RNA, 19 nt, Artificial Sequence
  Description of Artificial Sequence: Synthetic oligonucleotide
gcuacggucacugacuacu

SEQ ID NO: 1112682 - RNA, 19 nt, Artificial Sequence
  Description of Artificial Sequence: Synthetic oligonucleotide
cccugacaaagguucuagg

SEQ ID NO: 1112683 - RNA, 19 nt, Artificial Sequence
  Description of Artificial Sequence: Synthetic oligonucleotide
gcuauagagccaagggcac

SEQ ID NO: 1112684 - RNA, 19 nt, Artificial Sequence
  Description of Artificial Sequence: Synthetic oligonucleotide
ccaauacagugacccgugg

SEQ ID NO: 1112685 - RNA, 19 nt, Artificial Sequence
  Description of Artificial Sequence: Synthetic oligonucleotide
ggcaucacgggcacagggc

SEQ ID NO: 1112686 - RNA, 19 nt, Artificial Sequence
  Description of Artificial Sequence: Synthetic oligonucleotide
gcugccgcuggccagaugu

SEQ ID NO: 1112687 - RNA, 19 nt, Artificial Sequence
  Description of Artificial Sequence: Synthetic oligonucleotide
accgacagcaggggcccgg

SEQ ID NO: 1112688 - RNA, 19 nt, Artificial Sequence
  Description of Artificial Sequence: Synthetic oligonucleotide
ggagaauccaggccugucu

SEQ ID NO: 1112689 - RNA, 19 nt, Artificial Sequence
  Description of Artificial Sequence: Synthetic oligonucleotide
uguggagcgcaggcgguau

SEQ ID NO: 1112690 - RNA, 19 nt, Artificial Sequence
  Description of Artificial Sequence: Synthetic oligonucleotide
cuuggugcgccucgaagcu

SEQ ID NO: 1112691 - RNA, 19 nt, Artificial Sequence
  Description of Artificial Sequence: Synthetic oligonucleotide
ugcgggccugggcucuugc

SEQ ID NO: 1112692 - RNA, 19 nt, Artificial Sequence
  Description of Artificial Sequence: Synthetic oligonucleotide
gcgguagccuugcccaccg

SEQ ID NO: 1112693 - RNA, 19 nt, Artificial Sequence
  Description of Artificial Sequence: Synthetic oligonucleotide
cuguuaucuuagggaugcc

SEQ ID NO: 1112694 - RNA, 19 nt, Artificial Sequence
  Description of Artificial Sequence: Synthetic oligonucleotide
ccugacaaagguucuaggu

SEQ ID NO: 1112695 - RNA, 19 nt, Artificial Sequence
  Description of Artificial Sequence: Synthetic oligonucleotide
uucuugcgggucaguucuc

SEQ ID NO: 1112696 - RNA, 19 nt, Artificial Sequence
  Description of Artificial Sequence: Synthetic oligonucleotide
gcccugacaaagguucuag

SEQ ID NO: 1112697 - RNA, 19 nt, Artificial Sequence
  Description of Artificial Sequence: Synthetic oligonucleotide
cucgcuacauggggcuggc

SEQ ID NO: 1112698 - RNA, 19 nt, Artificial Sequence
  Description of Artificial Sequence: Synthetic oligonucleotide
caccggagaugauggccac

SEQ ID NO: 1112699 - RNA, 19 nt, Artificial Sequence
  Description of Artificial Sequence: Synthetic oligonucleotide
acgcucaccgccucaucuu

SEQ ID NO: 1112700 - RNA, 19 nt, Artificial Sequence
  Description of Artificial Sequence: Synthetic oligonucleotide
gucuccauacaccgucucu

SEQ ID NO: 1112701 - RNA, 19 nt, Artificial Sequence
  Description of Artificial Sequence: Synthetic oligonucleotide
cugguucgugagccugccc

SEQ ID NO: 1112702 - RNA, 19 nt, Artificial Sequence
  Description of Artificial Sequence: Synthetic oligonucleotide
guggagagcuauagagcca

SEQ ID NO: 1112703 - RNA, 19 nt, Artificial Sequence
  Description of Artificial Sequence: Synthetic oligonucleotide
ccaagacccuaaaacccuc

SEQ ID NO: 1112704 - RNA, 19 nt, Artificial Sequence
  Description of Artificial Sequence: Synthetic oligonucleotide
uccagacgccgcugccggc

SEQ ID NO: 1112705 - RNA, 19 nt, Artificial Sequence
  Description of Artificial Sequence: Synthetic oligonucleotide
ugguuagcuguuggaucuc

SEQ ID NO: 1112706 - RNA, 19 nt, Artificial Sequence
  Description of Artificial Sequence: Synthetic oligonucleotide
caggcgguauugaagcagu

SEQ ID NO: 1112707 - RNA, 19 nt, Artificial Sequence
  Description of Artificial Sequence: Synthetic oligonucleotide
gaggauaggcagcgagggu

SEQ ID NO: 1112708 - RNA, 19 nt, Artificial Sequence
  Description of Artificial Sequence: Synthetic oligonucleotide
cacugugcuccagagccga

SEQ ID NO: 1112709 - RNA, 19 nt, Artificial Sequence
  Description of Artificial Sequence: Synthetic oligonucleotide
uggcgguagccuugcccac

SEQ ID NO: 1112710 - RNA, 19 nt, Artificial Sequence
  Description of Artificial Sequence: Synthetic oligonucleotide
agccgagccaucagugggu

SEQ ID NO: 1112711 - RNA, 19 nt, Artificial Sequence
  Description of Artificial Sequence: Synthetic oligonucleotide
gcgccucgaagcuuugcug

SEQ ID NO: 1112712 - RNA, 19 nt, Artificial Sequence
  Description of Artificial Sequence: Synthetic oligonucleotide
caaugaccauugagagaca

SEQ ID NO: 1112713 - RNA, 19 nt, Artificial Sequence
  Description of Artificial Sequence: Synthetic oligonucleotide
ccaccggagaugauggcca

SEQ ID NO: 1112714 - RNA, 19 nt, Artificial Sequence
  Description of Artificial Sequence: Synthetic oligonucleotide
cuccauacaccgucucugu

SEQ ID NO: 1112715 - RNA, 19 nt, Artificial Sequence
  Description of Artificial Sequence: Synthetic oligonucleotide
acgggcacagggccggcuu

SEQ ID NO: 1112716 - RNA, 19 nt, Artificial Sequence
  Description of Artificial Sequence: Synthetic oligonucleotide
gucggccaucucauagaug

SEQ ID NO: 1112717 - RNA, 19 nt, Artificial Sequence
  Description of Artificial Sequence: Synthetic oligonucleotide
agccggggcacaggcaaca

SEQ ID NO: 1112718 - RNA, 19 nt, Artificial Sequence
  Description of Artificial Sequence: Synthetic oligonucleotide
caagaugcucauggccaca

SEQ ID NO: 1112719 - RNA, 19 nt, Artificial Sequence
  Description of Artificial Sequence: Synthetic oligonucleotide
cggucacugacuacuuuug

SEQ ID NO: 1112720 - RNA, 19 nt, Artificial Sequence
  Description of Artificial Sequence: Synthetic oligonucleotide
guucuagguucagcaggca

SEQ ID NO: 1112721 - RNA, 19 nt, Artificial Sequence
  Description of Artificial Sequence: Synthetic oligonucleotide
cagggccggcuucguaccc

SEQ ID NO: 1112722 - RNA, 19 nt, Artificial Sequence
  Description of Artificial Sequence: Synthetic oligonucleotide
gcacugguucgugagccug

SEQ ID NO: 1112723 - RNA, 19 nt, Artificial Sequence
  Description of Artificial Sequence: Synthetic oligonucleotide
gucucgcuacauggggcug

SEQ ID NO: 1112724 - RNA, 19 nt, Artificial Sequence
  Description of Artificial Sequence: Synthetic oligonucleotide
gcccacggucuccauacac

SEQ ID NO: 1112725 - RNA, 19 nt, Artificial Sequence
  Description of Artificial Sequence: Synthetic oligonucleotide
ugcuaggcacugggugcca

SEQ ID NO: 1112726 - RNA, 19 nt, Artificial Sequence
  Description of Artificial Sequence: Synthetic oligonucleotide
agcgagggucccguccugu

SEQ ID NO: 1112727 - RNA, 19 nt, Artificial Sequence
  Description of Artificial Sequence: Synthetic oligonucleotide
gugacccguggcccacagc

SEQ ID NO: 1112728 - RNA, 19 nt, Artificial Sequence
  Description of Artificial Sequence: Synthetic oligonucleotide
agggcaccugccagauaag

SEQ ID NO: 1112729 - RNA, 19 nt, Artificial Sequence
  Description of Artificial Sequence: Synthetic oligonucleotide
gcugcuacggucacugacu

SEQ ID NO: 1112730 - RNA, 19 nt, Artificial Sequence
  Description of Artificial Sequence: Synthetic oligonucleotide
accggagaugauggccaca

SEQ ID NO: 1112731 - RNA, 19 nt, Artificial Sequence
  Description of Artificial Sequence: Synthetic oligonucleotide
ggcaccugccagauaagaa

SEQ ID NO: 1112732 - RNA, 19 nt, Artificial Sequence
  Description of Artificial Sequence: Synthetic oligonucleotide
agcccugacaaagguucua

SEQ ID NO: 1112733 - RNA, 19 nt, Artificial Sequence
  Description of Artificial Sequence: Synthetic oligonucleotide
ugcgcuccuuggacuugau

SEQ ID NO: 1112734 - RNA, 19 nt, Artificial Sequence
  Description of Artificial Sequence: Synthetic oligonucleotide
cugccgcuggccagauguc

SEQ ID NO: 1112735 - RNA, 19 nt, Artificial Sequence
  Description of Artificial Sequence: Synthetic oligonucleotide
agggccggcuucguaccca

SEQ ID NO: 1112736 - RNA, 19 nt, Artificial Sequence
  Description of Artificial Sequence: Synthetic oligonucleotide
gggccggcuucguacccag

SEQ ID NO: 1112737 - RNA, 19 nt, Artificial Sequence
  Description of Artificial Sequence: Synthetic oligonucleotide
aggcugcuacggucacuga

SEQ ID NO: 1112738 - RNA, 19 nt, Artificial Sequence
  Description of Artificial Sequence: Synthetic oligonucleotide
ggcucucaccauguguguc

SEQ ID NO: 1112739 - RNA, 19 nt, Artificial Sequence
  Description of Artificial Sequence: Synthetic oligonucleotide
ggagagcuauagagccaag

SEQ ID NO: 1112740 - RNA, 19 nt, Artificial Sequence
  Description of Artificial Sequence: Synthetic oligonucleotide
ccgcaggcagagcacgggc

SEQ ID NO: 1112741 - RNA, 19 nt, Artificial Sequence
  Description of Artificial Sequence: Synthetic oligonucleotide
augcggcauccuccaggcu

SEQ ID NO: 1112742 - RNA, 19 nt, Artificial Sequence
  Description of Artificial Sequence: Synthetic oligonucleotide
aggggccaagaugcucaug

SEQ ID NO: 1112743 - RNA, 19 nt, Artificial Sequence
  Description of Artificial Sequence: Synthetic oligonucleotide
gcuaggcacugggugccag

SEQ ID NO: 1112744 - RNA, 19 nt, Artificial Sequence
  Description of Artificial Sequence: Synthetic oligonucleotide
guggcuuguacaggucccu

SEQ ID NO: 1112745 - RNA, 19 nt, Artificial Sequence
  Description of Artificial Sequence: Synthetic oligonucleotide
cgagggucccguccuguag

SEQ ID NO: 1112746 - RNA, 19 nt, Artificial Sequence
  Description of Artificial Sequence: Synthetic oligonucleotide
cagcgagggucccguccug

SEQ ID NO: 1112747 - RNA, 19 nt, Artificial Sequence
  Description of Artificial Sequence: Synthetic oligonucleotide
gccgagccaucagugggug

SEQ ID NO: 1112748 - RNA, 19 nt, Artificial Sequence
  Description of Artificial Sequence: Synthetic oligonucleotide
ggccucaguggagaaucca

SEQ ID NO: 1112749 - RNA, 19 nt, Artificial Sequence
  Description of Artificial Sequence: Synthetic oligonucleotide
ccggggcacaggcaacaag

SEQ ID NO: 1112750 - RNA, 19 nt, Artificial Sequence
  Description of Artificial Sequence: Synthetic oligonucleotide
gacgccgcugccggcucuc

SEQ ID NO: 1112751 - RNA, 19 nt, Artificial Sequence
  Description of Artificial Sequence: Synthetic oligonucleotide
ucccguccuguaggccagc

SEQ ID NO: 1112752 - RNA, 19 nt, Artificial Sequence
  Description of Artificial Sequence: Synthetic oligonucleotide
gggaugcccuccagccggg

SEQ ID NO: 1112753 - RNA, 19 nt, Artificial Sequence
  Description of Artificial Sequence: Synthetic oligonucleotide
gguuagcuguuggaucucu

SEQ ID NO: 1112754 - RNA, 19 nt, Artificial Sequence
  Description of Artificial Sequence: Synthetic oligonucleotide
gcuaucaggugcaggcacu

SEQ ID NO: 1112755 - RNA, 19 nt, Artificial Sequence
  Description of Artificial Sequence: Synthetic oligonucleotide
cacggucuccauacaccgu

SEQ ID NO: 1112756 - RNA, 19 nt, Artificial Sequence
  Description of Artificial Sequence: Synthetic oligonucleotide
cuacggucacugacuacuu

SEQ ID NO: 1112757 - RNA, 19 nt, Artificial Sequence
  Description of Artificial Sequence: Synthetic oligonucleotide
cagugccuacccagagcaa

SEQ ID NO: 1112758 - RNA, 19 nt, Artificial Sequence
  Description of Artificial Sequence: Synthetic oligonucleotide
ggcgguauugaagcaguau

SEQ ID NO: 1112759 - RNA, 19 nt, Artificial Sequence
  Description of Artificial Sequence: Synthetic oligonucleotide
ccuugcccaccggagauga

SEQ ID NO: 1112760 - RNA, 19 nt, Artificial Sequence
  Description of Artificial Sequence: Synthetic oligonucleotide
ggagcgcaggcgguauuga

SEQ ID NO: 1112761 - RNA, 19 nt, Artificial Sequence
  Description of Artificial Sequence: Synthetic oligonucleotide
gguucgugagccugcccau

SEQ ID NO: 1112762 - RNA, 19 nt, Artificial Sequence
  Description of Artificial Sequence: Synthetic oligonucleotide
agcgugcgaaugggcccug

SEQ ID NO: 1112763 - RNA, 19 nt, Artificial Sequence
  Description of Artificial Sequence: Synthetic oligonucleotide
ccgagccaucagugggugc

SEQ ID NO: 1112764 - RNA, 19 nt, Artificial Sequence
  Description of Artificial Sequence: Synthetic oligonucleotide
aggcgguauugaagcagua

SEQ ID NO: 1112765 - RNA, 19 nt, Artificial Sequence
  Description of Artificial Sequence: Synthetic oligonucleotide
cccacucaggccaccugga

SEQ ID NO: 1112766 - RNA, 19 nt, Artificial Sequence
  Description of Artificial Sequence: Synthetic oligonucleotide
caccgacagcaggggcccg

SEQ ID NO: 1112767 - RNA, 19 nt, Artificial Sequence
  Description of Artificial Sequence: Synthetic oligonucleotide
ccggcuucguacccagaca

SEQ ID NO: 1112768 - RNA, 19 nt, Artificial Sequence
  Description of Artificial Sequence: Synthetic oligonucleotide
cgugagccugcccaucuga

SEQ ID NO: 1112769 - RNA, 19 nt, Artificial Sequence
  Description of Artificial Sequence: Synthetic oligonucleotide
cguacccagacaucggggu

SEQ ID NO: 1112770 - RNA, 19 nt, Artificial Sequence
  Description of Artificial Sequence: Synthetic oligonucleotide
ccacugguccgaggauagg

SEQ ID NO: 1112771 - RNA, 19 nt, Artificial Sequence
  Description of Artificial Sequence: Synthetic oligonucleotide
gcgcuccuuggacuugauc

SEQ ID NO: 1112772 - RNA, 19 nt, Artificial Sequence
  Description of Artificial Sequence: Synthetic oligonucleotide
ccgcaccgacagcaggggc

SEQ ID NO: 1112773 - RNA, 19 nt, Artificial Sequence
  Description of Artificial Sequence: Synthetic oligonucleotide
cagcgugcgaaugggcccu

SEQ ID NO: 1112774 - RNA, 19 nt, Artificial Sequence
  Description of Artificial Sequence: Synthetic oligonucleotide
cagguccacaaugaccauu

SEQ ID NO: 1112775 - RNA, 19 nt, Artificial Sequence
  Description of Artificial Sequence: Synthetic oligonucleotide
ccgacagcaggggcccggg

SEQ ID NO: 1112776 - RNA, 19 nt, Artificial Sequence
  Description of Artificial Sequence: Synthetic oligonucleotide
ggcacugguucgugagccu

SEQ ID NO: 1112777 - RNA, 19 nt, Artificial Sequence
  Description of Artificial Sequence: Synthetic oligonucleotide
ggugcgccucgaagcuuug

SEQ ID NO: 1112778 - RNA, 19 nt, Artificial Sequence
  Description of Artificial Sequence: Synthetic oligonucleotide
gcgugcgaaugggcccugg

SEQ ID NO: 1112779 - RNA, 19 nt, Artificial Sequence
  Description of Artificial Sequence: Synthetic oligonucleotide
guccgaggauaggcagcga

SEQ ID NO: 1112780 - RNA, 19 nt, Artificial Sequence
  Description of Artificial Sequence: Synthetic oligonucleotide
cgggucaguucucggccug

SEQ ID NO: 1112781 - RNA, 19 nt, Artificial Sequence
  Description of Artificial Sequence: Synthetic oligonucleotide
gggucgucggccaucucau

SEQ ID NO: 1112782 - RNA, 19 nt, Artificial Sequence
  Description of Artificial Sequence: Synthetic oligonucleotide
cccaugcggcauccuccag

SEQ ID NO: 1112783 - RNA, 19 nt, Artificial Sequence
  Description of Artificial Sequence: Synthetic oligonucleotide
gcgggccugggcucuugca

SEQ ID NO: 1112784 - RNA, 19 nt, Artificial Sequence
  Description of Artificial Sequence: Synthetic oligonucleotide
caguguggaagaggcggau

SEQ ID NO: 1112785 - RNA, 19 nt, Artificial Sequence
  Description of Artificial Sequence: Synthetic oligonucleotide
cugcgggccugggcucuug

SEQ ID NO: 1112786 - RNA, 19 nt, Artificial Sequence
  Description of Artificial Sequence: Synthetic oligonucleotide
gcgggucaguucucggccu

SEQ ID NO: 1112787 - RNA, 19 nt, Artificial Sequence
  Description of Artificial Sequence: Synthetic oligonucleotide
ggucgucggccaucucaua

SEQ ID NO: 1112788 - RNA, 19 nt, Artificial Sequence
  Description of Artificial Sequence: Synthetic oligonucleotide
gcgagggucccguccugua

SEQ ID NO: 1112789 - RNA, 19 nt, Artificial Sequence
  Description of Artificial Sequence: Synthetic oligonucleotide
gccuggcaggaggaaagua

SEQ ID NO: 1112790 - RNA, 19 nt, Artificial Sequence
  Description of Artificial Sequence: Synthetic oligonucleotide
cagugacccguggcccaca

SEQ ID NO: 1112791 - RNA, 19 nt, Artificial Sequence
  Description of Artificial Sequence: Synthetic oligonucleotide
ccaugccuuucccuguuau

SEQ ID NO: 1112792 - RNA, 19 nt, Artificial Sequence
  Description of Artificial Sequence: Synthetic oligonucleotide
gcuccagagccgagccauc

SEQ ID NO: 1112793 - RNA, 19 nt, Artificial Sequence
  Description of Artificial Sequence: Synthetic oligonucleotide
guggagcgcaggcgguauu

SEQ ID NO: 1112794 - RNA, 19 nt, Artificial Sequence
  Description of Artificial Sequence: Synthetic oligonucleotide
gggucaguucucggccugu

SEQ ID NO: 1112795 - RNA, 19 nt, Artificial Sequence
  Description of Artificial Sequence: Synthetic oligonucleotide
caucggggucgucggccau

SEQ ID NO: 1112796 - RNA, 19 nt, Artificial Sequence
  Description of Artificial Sequence: Synthetic oligonucleotide
ccucgaagcuuugcugagu

SEQ ID NO: 1112797 - RNA, 19 nt, Artificial Sequence
  Description of Artificial Sequence: Synthetic oligonucleotide
cgucggccaucucauagau

SEQ ID NO: 1112798 - RNA, 19 nt, Artificial Sequence
  Description of Artificial Sequence: Synthetic oligonucleotide
gggugccaguguccacacu

SEQ ID NO: 1112799 - RNA, 19 nt, Artificial Sequence
  Description of Artificial Sequence: Synthetic oligonucleotide
gccggggcacaggcaacaa

SEQ ID NO: 1112800 - RNA, 19 nt, Artificial Sequence
  Description of Artificial Sequence: Synthetic oligonucleotide
cacgggcacagggccggcu

SEQ ID NO: 1112801 - RNA, 19 nt, Artificial Sequence
  Description of Artificial Sequence: Synthetic oligonucleotide
cccguccuguaggccagca

SEQ ID NO: 1112802 - RNA, 19 nt, Artificial Sequence
  Description of Artificial Sequence: Synthetic oligonucleotide
ccaccacugguccgaggau

SEQ ID NO: 1112803 - RNA, 19 nt, Artificial Sequence
  Description of Artificial Sequence: Synthetic oligonucleotide
ggccugucuuguggcuugu

SEQ ID NO: 1112804 - RNA, 19 nt, Artificial Sequence
  Description of Artificial Sequence: Synthetic oligonucleotide
ccgcccacucaggccaccu

SEQ ID NO: 1112805 - RNA, 19 nt, Artificial Sequence
  Description of Artificial Sequence: Synthetic oligonucleotide
gcugcgggccugggcucuu

SEQ ID NO: 1112806 - RNA, 19 nt, Artificial Sequence
  Description of Artificial Sequence: Synthetic oligonucleotide
cgcugccggcucucaccau

SEQ ID NO: 1112807 - RNA, 19 nt, Artificial Sequence
  Description of Artificial Sequence: Synthetic oligonucleotide
aaauuagugaagcacaggc

SEQ ID NO: 1112808 - RNA, 19 nt, Artificial Sequence
  Description of Artificial Sequence: Synthetic oligonucleotide
ugaauuuucaaacugaggu

SEQ ID NO: 1112809 - RNA, 19 nt, Artificial Sequence
  Description of Artificial Sequence: Synthetic oligonucleotide
uuauaucuuguauacaucg

SEQ ID NO: 1112810 - RNA, 19 nt, Artificial Sequence
  Description of Artificial Sequence: Synthetic oligonucleotide
aacguuagaaguugcaugg

SEQ ID NO: 1112811 - RNA, 19 nt, Artificial Sequence
  Description of Artificial Sequence: Synthetic oligonucleotide
aagucuaaauaaucuauac

SEQ ID NO: 1112812 - RNA, 19 nt, Artificial Sequence
  Description of Artificial Sequence: Synthetic oligonucleotide
ugaaaauuggcuacaaugc

SEQ ID NO: 1112813 - RNA, 19 nt, Artificial Sequence
  Description of Artificial Sequence: Synthetic oligonucleotide
uugguuauagaaauuagug

SEQ ID NO: 1112814 - RNA, 19 nt, Artificial Sequence
  Description of Artificial Sequence: Synthetic oligonucleotide
uuauaagucagucauacau

SEQ ID NO: 1112815 - RNA, 19 nt, Artificial Sequence
  Description of Artificial Sequence: Synthetic oligonucleotide
aagaacaacuacuagaaau

SEQ ID NO: 1112816 - RNA, 19 nt, Artificial Sequence
  Description of Artificial Sequence: Synthetic oligonucleotide
aaugccucaucuuuucuac

SEQ ID NO: 1112817 - RNA, 19 nt, Artificial Sequence
  Description of Artificial Sequence: Synthetic oligonucleotide
gagcguguaaacuacaccg

SEQ ID NO: 1112818 - RNA, 19 nt, Artificial Sequence
  Description of Artificial Sequence: Synthetic oligonucleotide
ugaaugaaauucaaguccc

SEQ ID NO: 1112819 - RNA, 19 nt, Artificial Sequence
  Description of Artificial Sequence: Synthetic oligonucleotide
cugaaugaaauucaagucc

SEQ ID NO: 1112820 - RNA, 19 nt, Artificial Sequence
  Description of Artificial Sequence: Synthetic oligonucleotide
gauuuguaggagaugaucg

SEQ ID NO: 1112821 - RNA, 19 nt, Artificial Sequence
  Description of Artificial Sequence: Synthetic oligonucleotide
uaaacuacaccgcagacaa

SEQ ID NO: 1112822 - RNA, 19 nt, Artificial Sequence
  Description of Artificial Sequence: Synthetic oligonucleotide
cugaaaauuggcuacaaug

SEQ ID NO: 1112823 - RNA, 19 nt, Artificial Sequence
  Description of Artificial Sequence: Synthetic oligonucleotide
aagcccaaacaacugaaac

SEQ ID NO: 1112824 - RNA, 19 nt, Artificial Sequence
  Description of Artificial Sequence: Synthetic oligonucleotide
uacgugauacacauaaucc

SEQ ID NO: 1112825 - RNA, 19 nt, Artificial Sequence
  Description of Artificial Sequence: Synthetic oligonucleotide
aguccauucacagauagcg

SEQ ID NO: 1112826 - RNA, 19 nt, Artificial Sequence
  Description of Artificial Sequence: Synthetic oligonucleotide
auugaugcuaaacauucuc

SEQ ID NO: 1112827 - RNA, 19 nt, Artificial Sequence
  Description of Artificial Sequence: Synthetic oligonucleotide
uuaccauuaggauauauaa

SEQ ID NO: 1112828 - RNA, 19 nt, Artificial Sequence
  Description of Artificial Sequence: Synthetic oligonucleotide
aagggcaccaccaucaugg

SEQ ID NO: 1112829 - RNA, 19 nt, Artificial Sequence
  Description of Artificial Sequence: Synthetic oligonucleotide
agagaguugucacacaauc

SEQ ID NO: 1112830 - RNA, 19 nt, Artificial Sequence
  Description of Artificial Sequence: Synthetic oligonucleotide
aaagugaauaucccgauuu

SEQ ID NO: 1112831 - RNA, 19 nt, Artificial Sequence
  Description of Artificial Sequence: Synthetic oligonucleotide
uuuuauaagucagucauac

SEQ ID NO: 1112832 - RNA, 19 nt, Artificial Sequence
  Description of Artificial Sequence: Synthetic oligonucleotide
ugauuugggaccuucucgg

SEQ ID NO: 1112833 - RNA, 19 nt, Artificial Sequence
  Description of Artificial Sequence: Synthetic oligonucleotide
uaucuuguauacaucguag

SEQ ID NO: 1112834 - RNA, 19 nt, Artificial Sequence
  Description of Artificial Sequence: Synthetic oligonucleotide
uuguauacaucguagcugc

SEQ ID NO: 1112835 - RNA, 19 nt, Artificial Sequence
  Description of Artificial Sequence: Synthetic oligonucleotide
uuugguuauagaaauuagu

SEQ ID NO: 1112836 - RNA, 19 nt, Artificial Sequence
  Description of Artificial Sequence: Synthetic oligonucleotide
uauauaaaugcuugugaug

SEQ ID NO: 1112837 - RNA, 19 nt, Artificial Sequence
  Description of Artificial Sequence: Synthetic oligonucleotide
aaugaaauucaagucccgg

SEQ ID NO: 1112838 - RNA, 19 nt, Artificial Sequence
  Description of Artificial Sequence: Synthetic oligonucleotide
aauaccacucucuggaggu

SEQ ID NO: 1112839 - RNA, 19 nt, Artificial Sequence
  Description of Artificial Sequence: Synthetic oligonucleotide
ugauguaggggagaaaagg

SEQ ID NO: 1112840 - RNA, 19 nt, Artificial Sequence
  Description of Artificial Sequence: Synthetic oligonucleotide
acaaugcccauuccgauac

SEQ ID NO: 1112841 - RNA, 19 nt, Artificial Sequence
  Description of Artificial Sequence: Synthetic oligonucleotide
uuaaugugcacaguaaaug

SEQ ID NO: 1112842 - RNA, 19 nt, Artificial Sequence
  Description of Artificial Sequence: Synthetic oligonucleotide
gauuauauaaaugcuugug

SEQ ID NO: 1112843 - RNA, 19 nt, Artificial Sequence
  Description of Artificial Sequence: Synthetic oligonucleotide
aucuuguauacaucguagc

SEQ ID NO: 1112844 - RNA, 19 nt, Artificial Sequence
  Description of Artificial Sequence: Synthetic oligonucleotide
uuaggauauauaaucacua

SEQ ID NO: 1112845 - RNA, 19 nt, Artificial Sequence
  Description of Artificial Sequence: Synthetic oligonucleotide
uauugcuaaagugucauug

SEQ ID NO: 1112846 - RNA, 19 nt, Artificial Sequence
  Description of Artificial Sequence: Synthetic oligonucleotide
gcuaaagugucauugaugc

SEQ ID NO: 1112847 - RNA, 19 nt, Artificial Sequence
  Description of Artificial Sequence: Synthetic oligonucleotide
aagaacuaaugacaccaag

SEQ ID NO: 1112848 - RNA, 19 nt, Artificial Sequence
  Description of Artificial Sequence: Synthetic oligonucleotide
ucugaaugaaauucaaguc

SEQ ID NO: 1112849 - RNA, 19 nt, Artificial Sequence
  Description of Artificial Sequence: Synthetic oligonucleotide
uauacaucguagcugcacc

SEQ ID NO: 1112850 - RNA, 19 nt, Artificial Sequence
  Description of Artificial Sequence: Synthetic oligonucleotide
ucuuguauacaucguagcu

SEQ ID NO: 1112851 - RNA, 19 nt, Artificial Sequence
  Description of Artificial Sequence: Synthetic oligonucleotide
acuauuuuauaucuuguau

SEQ ID NO: 1112852 - RNA, 19 nt, Artificial Sequence
  Description of Artificial Sequence: Synthetic oligonucleotide
aacuaacugugacauucac

SEQ ID NO: 1112853 - RNA, 19 nt, Artificial Sequence
  Description of Artificial Sequence: Synthetic oligonucleotide
ucuacauaugaauuuguuc

SEQ ID NO: 1112854 - RNA, 19 nt, Artificial Sequence
  Description of Artificial Sequence: Synthetic oligonucleotide
uguaggagaugaucgauug

SEQ ID NO: 1112855 - RNA, 19 nt, Artificial Sequence
  Description of Artificial Sequence: Synthetic oligonucleotide
auuagugaagcacaggcaa

SEQ ID NO: 1112856 - RNA, 19 nt, Artificial Sequence
  Description of Artificial Sequence: Synthetic oligonucleotide
aggauauauaaucacuaug

SEQ ID NO: 1112857 - RNA, 19 nt, Artificial Sequence
  Description of Artificial Sequence: Synthetic oligonucleotide
uaacguuagaaguugcaug

SEQ ID NO: 1112858 - RNA, 19 nt, Artificial Sequence
  Description of Artificial Sequence: Synthetic oligonucleotide
caugucgugagacuguucc

SEQ ID NO: 1112859 - RNA, 19 nt, Artificial Sequence
  Description of Artificial Sequence: Synthetic oligonucleotide
ugcuuuaguauuaauuuau

SEQ ID NO: 1112860 - RNA, 19 nt, Artificial Sequence
  Description of Artificial Sequence: Synthetic oligonucleotide
uuagaaguugcauggaauc

SEQ ID NO: 1112861 - RNA, 19 nt, Artificial Sequence
  Description of Artificial Sequence: Synthetic oligonucleotide
ugugguaucuguccagaag

SEQ ID NO: 1112862 - RNA, 19 nt, Artificial Sequence
  Description of Artificial Sequence: Synthetic oligonucleotide
uggaaaucuuggaugaaug

SEQ ID NO: 1112863 - RNA, 19 nt, Artificial Sequence
  Description of Artificial Sequence: Synthetic oligonucleotide
aauagcaaaauggggauaa

SEQ ID NO: 1112864 - RNA, 19 nt, Artificial Sequence
  Description of Artificial Sequence: Synthetic oligonucleotide
uccugugucacugauguag

SEQ ID NO: 1112865 - RNA, 19 nt, Artificial Sequence
  Description of Artificial Sequence: Synthetic oligonucleotide
uuuaccauuaggauauaua

SEQ ID NO: 1112866 - RNA, 19 nt, Artificial Sequence
  Description of Artificial Sequence: Synthetic oligonucleotide
aaaauggggauaacguuag

SEQ ID NO: 1112867 - RNA, 19 nt, Artificial Sequence
  Description of Artificial Sequence: Synthetic oligonucleotide
uuaaaguaauauuuauuua

SEQ ID NO: 1112868 - RNA, 19 nt, Artificial Sequence
  Description of Artificial Sequence: Synthetic oligonucleotide
ucuccacuauuuuauaucu

SEQ ID NO: 1112869 - RNA, 19 nt, Artificial Sequence
  Description of Artificial Sequence: Synthetic oligonucleotide
caugucaccaggagaaagg

SEQ ID NO: 1112870 - RNA, 19 nt, Artificial Sequence
  Description of Artificial Sequence: Synthetic oligonucleotide
cauuaggauauauaaucac

SEQ ID NO: 1112871 - RNA, 19 nt, Artificial Sequence
  Description of Artificial Sequence: Synthetic oligonucleotide
gagaaaaggguugacgugc

SEQ ID NO: 1112872 - RNA, 19 nt, Artificial Sequence
  Description of Artificial Sequence: Synthetic oligonucleotide
auaauagcaaaauggggau

SEQ ID NO: 1112873 - RNA, 19 nt, Artificial Sequence
  Description of Artificial Sequence: Synthetic oligonucleotide
auaagucagucauacauaa

SEQ ID NO: 1112874 - RNA, 19 nt, Artificial Sequence
  Description of Artificial Sequence: Synthetic oligonucleotide
uggggauaacguuagaagu

SEQ ID NO: 1112875 - RNA, 19 nt, Artificial Sequence
  Description of Artificial Sequence: Synthetic oligonucleotide
gugauuugggaccuucucg

SEQ ID NO: 1112876 - RNA, 19 nt, Artificial Sequence
  Description of Artificial Sequence: Synthetic oligonucleotide
agacagcuaaaguacggcg

SEQ ID NO: 1112877 - RNA, 19 nt, Artificial Sequence
  Description of Artificial Sequence: Synthetic oligonucleotide
ugcuaaagugucauugaug

SEQ ID NO: 1112878 - RNA, 19 nt, Artificial Sequence
  Description of Artificial Sequence: Synthetic oligonucleotide
agugucauugaugcuaaac

SEQ ID NO: 1112879 - RNA, 19 nt, Artificial Sequence
  Description of Artificial Sequence: Synthetic oligonucleotide
aaaggguugacgugcccag

SEQ ID NO: 1112880 - RNA, 19 nt, Artificial Sequence
  Description of Artificial Sequence: Synthetic oligonucleotide
ucucggcuugccaagacag

SEQ ID NO: 1112881 - RNA, 19 nt, Artificial Sequence
  Description of Artificial Sequence: Synthetic oligonucleotide
ugagagggcgcuacgcucg

SEQ ID NO: 1112882 - RNA, 19 nt, Artificial Sequence
  Description of Artificial Sequence: Synthetic oligonucleotide
acaacuacuagaaauucug

SEQ ID NO: 1112883 - RNA, 19 nt, Artificial Sequence
  Description of Artificial Sequence: Synthetic oligonucleotide
auuagauuauauaaaugcu

SEQ ID NO: 1112884 - RNA, 19 nt, Artificial Sequence
  Description of Artificial Sequence: Synthetic oligonucleotide
uagcaaaauggggauaacg

SEQ ID NO: 1112885 - RNA, 19 nt, Artificial Sequence
  Description of Artificial Sequence: Synthetic oligonucleotide
uuggcuacaaugcccauuc

SEQ ID NO: 1112886 - RNA, 19 nt, Artificial Sequence
  Description of Artificial Sequence: Synthetic oligonucleotide
uauaucuuguauacaucgu

SEQ ID NO: 1112887 - RNA, 19 nt, Artificial Sequence
  Description of Artificial Sequence: Synthetic oligonucleotide
gagaugaucgauugcagga

SEQ ID NO: 1112888 - RNA, 19 nt, Artificial Sequence
  Description of Artificial Sequence: Synthetic oligonucleotide
acaguccauucacagauag

SEQ ID NO: 1112889 - RNA, 19 nt, Artificial Sequence
  Description of Artificial Sequence: Synthetic oligonucleotide
aacuacaccgcagacaaaa

SEQ ID NO: 1112890 - RNA, 19 nt, Artificial Sequence
  Description of Artificial Sequence: Synthetic oligonucleotide
acgugauacacauaauccu

SEQ ID NO: 1112891 - RNA, 19 nt, Artificial Sequence
  Description of Artificial Sequence: Synthetic oligonucleotide
auugcuaaagugucauuga

SEQ ID NO: 1112892 - RNA, 19 nt, Artificial Sequence
  Description of Artificial Sequence: Synthetic oligonucleotide
gauauccuuaaggugacac

SEQ ID NO: 1112893 - RNA, 19 nt, Artificial Sequence
  Description of Artificial Sequence: Synthetic oligonucleotide
augcuaaacauucucuaga

SEQ ID NO: 1112894 - RNA, 19 nt, Artificial Sequence
  Description of Artificial Sequence: Synthetic oligonucleotide
agauuauauaaaugcuugu

SEQ ID NO: 1112895 - RNA, 19 nt, Artificial Sequence
  Description of Artificial Sequence: Synthetic oligonucleotide
aucuuuaccauuaggauau

SEQ ID NO: 1112896 - RNA, 19 nt, Artificial Sequence
  Description of Artificial Sequence: Synthetic oligonucleotide
uauccuuaaggugacacuc

SEQ ID NO: 1112897 - RNA, 19 nt, Artificial Sequence
  Description of Artificial Sequence: Synthetic oligonucleotide
acaggauucucgcucuuuc

SEQ ID NO: 1112898 - RNA, 19 nt, Artificial Sequence
  Description of Artificial Sequence: Synthetic oligonucleotide
aauggggauaacguuagaa

SEQ ID NO: 1112899 - RNA, 19 nt, Artificial Sequence
  Description of Artificial Sequence: Synthetic oligonucleotide
uggaugaauguuaggaaau

SEQ ID NO: 1112900 - RNA, 19 nt, Artificial Sequence
  Description of Artificial Sequence: Synthetic oligonucleotide
aucaugaagcccaaacaac

SEQ ID NO: 1112901 - RNA, 19 nt, Artificial Sequence
  Description of Artificial Sequence: Synthetic oligonucleotide
aauaucccgauuuggcuuu

SEQ ID NO: 1112902 - RNA, 19 nt, Artificial Sequence
  Description of Artificial Sequence: Synthetic oligonucleotide
uguaaacuacaccgcagac

SEQ ID NO: 1112903 - RNA, 19 nt, Artificial Sequence
  Description of Artificial Sequence: Synthetic oligonucleotide
ugacacucuggaaaucuug

SEQ ID NO: 1112904 - RNA, 19 nt, Artificial Sequence
  Description of Artificial Sequence: Synthetic oligonucleotide
uuaaagugaauaucccgau

SEQ ID NO: 1112905 - RNA, 19 nt, Artificial Sequence
  Description of Artificial Sequence: Synthetic oligonucleotide
aaacugaggucuucuacau

SEQ ID NO: 1112906 - RNA, 19 nt, Artificial Sequence
  Description of Artificial Sequence: Synthetic oligonucleotide
caugauuuguaggagauga

SEQ ID NO: 1112907 - RNA, 19 nt, Artificial Sequence
  Description of Artificial Sequence: Synthetic oligonucleotide
gaugaucgauugcaggagc

SEQ ID NO: 1112908 - RNA, 19 nt, Artificial Sequence
  Description of Artificial Sequence: Synthetic oligonucleotide
ugcuaaacauucucuagaa

SEQ ID NO: 1112909 - RNA, 19 nt, Artificial Sequence
  Description of Artificial Sequence: Synthetic oligonucleotide
aaaaggguugacgugccca

SEQ ID NO: 1112910 - RNA, 19 nt, Artificial Sequence
  Description of Artificial Sequence: Synthetic oligonucleotide
ugugacauucacugaguga

SEQ ID NO: 1112911 - RNA, 19 nt, Artificial Sequence
  Description of Artificial Sequence: Synthetic oligonucleotide
aauuagugaagcacaggca

SEQ ID NO: 1112912 - RNA, 19 nt, Artificial Sequence
  Description of Artificial Sequence: Synthetic oligonucleotide
uuuauaagucagucauaca

SEQ ID NO: 1112913 - RNA, 19 nt, Artificial Sequence
  Description of Artificial Sequence: Synthetic oligonucleotide
cuuaaggugacacucugga

SEQ ID NO: 1112914 - RNA, 19 nt, Artificial Sequence
  Description of Artificial Sequence: Synthetic oligonucleotide
agagaaguuuaucaugaau

SEQ ID NO: 1112915 - RNA, 19 nt, Artificial Sequence
  Description of Artificial Sequence: Synthetic oligonucleotide
auaaucacuaugaauuaga

SEQ ID NO: 1112916 - RNA, 19 nt, Artificial Sequence
  Description of Artificial Sequence: Synthetic oligonucleotide
augaugaaggcugcggacg

SEQ ID NO: 1112917 - RNA, 19 nt, Artificial Sequence
  Description of Artificial Sequence: Synthetic oligonucleotide
accgcgaccacguaggaga

SEQ ID NO: 1112918 - RNA, 19 nt, Artificial Sequence
  Description of Artificial Sequence: Synthetic oligonucleotide
gaauggggugauuugggac

SEQ ID NO: 1112919 - RNA, 19 nt, Artificial Sequence
  Description of Artificial Sequence: Synthetic oligonucleotide
aacugaggucuucuacauc

SEQ ID NO: 1112920 - RNA, 19 nt, Artificial Sequence
  Description of Artificial Sequence: Synthetic oligonucleotide
agcaaaauggggauaacgu

SEQ ID NO: 1112921 - RNA, 19 nt, Artificial Sequence
  Description of Artificial Sequence: Synthetic oligonucleotide
gagugagacaggauucucg

SEQ ID NO: 1112922 - RNA, 19 nt, Artificial Sequence
  Description of Artificial Sequence: Synthetic oligonucleotide
aguugucacacaaucauga

SEQ ID NO: 1112923 - RNA, 19 nt, Artificial Sequence
  Description of Artificial Sequence: Synthetic oligonucleotide
ugauuuguaggagaugauc

SEQ ID NO: 1112924 - RNA, 19 nt, Artificial Sequence
  Description of Artificial Sequence: Synthetic oligonucleotide
uauuuaccuucucaggcau

SEQ ID NO: 1112925 - RNA, 19 nt, Artificial Sequence
  Description of Artificial Sequence: Synthetic oligonucleotide
uaggauauauaaucacuau

SEQ ID NO: 1112926 - RNA, 19 nt, Artificial Sequence
  Description of Artificial Sequence: Synthetic oligonucleotide
aaagugucuuagaaaauau

SEQ ID NO: 1112927 - RNA, 19 nt, Artificial Sequence
  Description of Artificial Sequence: Synthetic oligonucleotide
ugaggucuucuacaucugc

SEQ ID NO: 1112928 - RNA, 19 nt, Artificial Sequence
  Description of Artificial Sequence: Synthetic oligonucleotide
auuccgauacaucccacca

SEQ ID NO: 1112929 - RNA, 19 nt, Artificial Sequence
  Description of Artificial Sequence: Synthetic oligonucleotide
gaagagaguugucacacaa

SEQ ID NO: 1112930 - RNA, 19 nt, Artificial Sequence
  Description of Artificial Sequence: Synthetic oligonucleotide
uugacgugcccagagagca

SEQ ID NO: 1112931 - RNA, 19 nt, Artificial Sequence
  Description of Artificial Sequence: Synthetic oligonucleotide
uccuuaaggugacacucug

SEQ ID NO: 1112932 - RNA, 19 nt, Artificial Sequence
  Description of Artificial Sequence: Synthetic oligonucleotide
cagaauggggugauuuggg

SEQ ID NO: 1112933 - RNA, 19 nt, Artificial Sequence
  Description of Artificial Sequence: Synthetic oligonucleotide
gaaugaaauucaagucccg

SEQ ID NO: 1112934 - RNA, 19 nt, Artificial Sequence
  Description of Artificial Sequence: Synthetic oligonucleotide
cuacaccgcagacaaaagc

SEQ ID NO: 1112935 - RNA, 19 nt, Artificial Sequence
  Description of Artificial Sequence: Synthetic oligonucleotide
ugccaagacaggucuagcc

SEQ ID NO: 1112936 - RNA, 19 nt, Artificial Sequence
  Description of Artificial Sequence: Synthetic oligonucleotide
ccauguaacaauuucugug

SEQ ID NO: 1112937 - RNA, 19 nt, Artificial Sequence
  Description of Artificial Sequence: Synthetic oligonucleotide
ugcaguccaaggaaauaca

SEQ ID NO: 1112938 - RNA, 19 nt, Artificial Sequence
  Description of Artificial Sequence: Synthetic oligonucleotide
guuugguuauagaaauuag

SEQ ID NO: 1112939 - RNA, 19 nt, Artificial Sequence
  Description of Artificial Sequence: Synthetic oligonucleotide
cauuccgauacaucccacc

SEQ ID NO: 1112940 - RNA, 19 nt, Artificial Sequence
  Description of Artificial Sequence: Synthetic oligonucleotide
cacuacgugauacacauaa

SEQ ID NO: 1112941 - RNA, 19 nt, Artificial Sequence
  Description of Artificial Sequence: Synthetic oligonucleotide
ugcagaauggggugauuug

SEQ ID NO: 1112942 - RNA, 19 nt, Artificial Sequence
  Description of Artificial Sequence: Synthetic oligonucleotide
auauccuuaaggugacacu

SEQ ID NO: 1112943 - RNA, 19 nt, Artificial Sequence
  Description of Artificial Sequence: Synthetic oligonucleotide
aaguccauccguccucugu

SEQ ID NO: 1112944 - RNA, 19 nt, Artificial Sequence
  Description of Artificial Sequence: Synthetic oligonucleotide
agcgcucacuacgugauac

SEQ ID NO: 1112945 - RNA, 19 nt, Artificial Sequence
  Description of Artificial Sequence: Synthetic oligonucleotide
augaauguuaggaaauaga

SEQ ID NO: 1112946 - RNA, 19 nt, Artificial Sequence
  Description of Artificial Sequence: Synthetic oligonucleotide
gauucucgcucuuucaaaa

SEQ ID NO: 1112947 - RNA, 19 nt, Artificial Sequence
  Description of Artificial Sequence: Synthetic oligonucleotide
ugcaggagcguguaaacua

SEQ ID NO: 1112948 - RNA, 19 nt, Artificial Sequence
  Description of Artificial Sequence: Synthetic oligonucleotide
agaaaaggguugacgugcc

SEQ ID NO: 1112949 - RNA, 19 nt, Artificial Sequence
  Description of Artificial Sequence: Synthetic oligonucleotide
gugaugaaaauuaugcaaa

SEQ ID NO: 1112950 - RNA, 19 nt, Artificial Sequence
  Description of Artificial Sequence: Synthetic oligonucleotide
uagcccauguaacaauuuc

SEQ ID NO: 1112951 - RNA, 19 nt, Artificial Sequence
  Description of Artificial Sequence: Synthetic oligonucleotide
gagggcgcuacgcucgucg

SEQ ID NO: 1112952 - RNA, 19 nt, Artificial Sequence
  Description of Artificial Sequence: Synthetic oligonucleotide
ucacuaugaauuagauuau

SEQ ID NO: 1112953 - RNA, 19 nt, Artificial Sequence
  Description of Artificial Sequence: Synthetic oligonucleotide
ggcuacaaugcccauuccg

SEQ ID NO: 1112954 - RNA, 19 nt, Artificial Sequence
  Description of Artificial Sequence: Synthetic oligonucleotide
uggauauccuuaaggugac

SEQ ID NO: 1112955 - RNA, 19 nt, Artificial Sequence
  Description of Artificial Sequence: Synthetic oligonucleotide
auccggacauggcaugucg

SEQ ID NO: 1112956 - RNA, 19 nt, Artificial Sequence
  Description of Artificial Sequence: Synthetic oligonucleotide
agaugaucgauugcaggag

SEQ ID NO: 1112957 - RNA, 19 nt, Artificial Sequence
  Description of Artificial Sequence: Synthetic oligonucleotide
acaggucuagcccauguaa

SEQ ID NO: 1112958 - RNA, 19 nt, Artificial Sequence
  Description of Artificial Sequence: Synthetic oligonucleotide
cuugcugcgggcugccugg

SEQ ID NO: 1112959 - RNA, 19 nt, Artificial Sequence
  Description of Artificial Sequence: Synthetic oligonucleotide
agcuaaaguacggcgggac

SEQ ID NO: 1112960 - RNA, 19 nt, Artificial Sequence
  Description of Artificial Sequence: Synthetic oligonucleotide
gaacuaaugacaccaaguu

SEQ ID NO: 1112961 - RNA, 19 nt, Artificial Sequence
  Description of Artificial Sequence: Synthetic oligonucleotide
aaagugcuuuaguauuaau

SEQ ID NO: 1112962 - RNA, 19 nt, Artificial Sequence
  Description of Artificial Sequence: Synthetic oligonucleotide
uuagugaagcacaggcaau

SEQ ID NO: 1112963 - RNA, 19 nt, Artificial Sequence
  Description of Artificial Sequence: Synthetic oligonucleotide
gaaguuuaucaugaaucca

SEQ ID NO: 1112964 - RNA, 19 nt, Artificial Sequence
  Description of Artificial Sequence: Synthetic oligonucleotide
uuuguucauuaaagugucu

SEQ ID NO: 1112965 - RNA, 19 nt, Artificial Sequence
  Description of Artificial Sequence: Synthetic oligonucleotide
ucgucgggucacaagccgg

SEQ ID NO: 1112966 - RNA, 19 nt, Artificial Sequence
  Description of Artificial Sequence: Synthetic oligonucleotide
ucuagcccauguaacaauu

SEQ ID NO: 1112967 - RNA, 19 nt, Artificial Sequence
  Description of Artificial Sequence: Synthetic oligonucleotide
auaacguuagaaguugcau

SEQ ID NO: 1112968 - RNA, 19 nt, Artificial Sequence
  Description of Artificial Sequence: Synthetic oligonucleotide
gauaacguuagaaguugca

SEQ ID NO: 1112969 - RNA, 19 nt, Artificial Sequence
  Description of Artificial Sequence: Synthetic oligonucleotide
cugcggacgaccaugucac

SEQ ID NO: 1112970 - RNA, 19 nt, Artificial Sequence
  Description of Artificial Sequence: Synthetic oligonucleotide
uggccauccggacauggca

SEQ ID NO: 1112971 - RNA, 19 nt, Artificial Sequence
  Description of Artificial Sequence: Synthetic oligonucleotide
acauggcaugucgugagac

SEQ ID NO: 1112972 - RNA, 19 nt, Artificial Sequence
  Description of Artificial Sequence: Synthetic oligonucleotide
ugaggaagcacagcaucgc

SEQ ID NO: 1112973 - RNA, 19 nt, Artificial Sequence
  Description of Artificial Sequence: Synthetic oligonucleotide
acagacagcuaaaguacgg

SEQ ID NO: 1112974 - RNA, 19 nt, Artificial Sequence
  Description of Artificial Sequence: Synthetic oligonucleotide
uacaucccaccaauccaag

SEQ ID NO: 1112975 - RNA, 19 nt, Artificial Sequence
  Description of Artificial Sequence: Synthetic oligonucleotide
aggucuagcccauguaaca

SEQ ID NO: 1112976 - RNA, 19 nt, Artificial Sequence
  Description of Artificial Sequence: Synthetic oligonucleotide
gauuugggaccuucucggc

SEQ ID NO: 1112977 - RNA, 19 nt, Artificial Sequence
  Description of Artificial Sequence: Synthetic oligonucleotide
aucuuggaugaauguuagg

SEQ ID NO: 1112978 - RNA, 19 nt, Artificial Sequence
  Description of Artificial Sequence: Synthetic oligonucleotide
cacauuuguagaaauuaaa

SEQ ID NO: 1112979 - RNA, 19 nt, Artificial Sequence
  Description of Artificial Sequence: Synthetic oligonucleotide
auguaacaauuucuguggu

SEQ ID NO: 1112980 - RNA, 19 nt, Artificial Sequence
  Description of Artificial Sequence: Synthetic oligonucleotide
acaucguagcugcaccaag

SEQ ID NO: 1112981 - RNA, 19 nt, Artificial Sequence
  Description of Artificial Sequence: Synthetic oligonucleotide
  modified_base (8)..(8): a, c, u, g, unknown or other
gguggccncgcacagacag

SEQ ID NO: 1112982 - RNA, 19 nt, Artificial Sequence
  Description of Artificial Sequence: Synthetic oligonucleotide
gguugacgugcccagagag

SEQ ID NO: 1112983 - RNA, 19 nt, Artificial Sequence
  Description of Artificial Sequence: Synthetic oligonucleotide
ugcaaugccucaucuuuuc

SEQ ID NO: 1112984 - RNA, 19 nt, Artificial Sequence
  Description of Artificial Sequence: Synthetic oligonucleotide
ugucgugagacuguuccac

SEQ ID NO: 1112985 - RNA, 19 nt, Artificial Sequence
  Description of Artificial Sequence: Synthetic oligonucleotide
uuguaggagaugaucgauu

SEQ ID NO: 1112986 - RNA, 19 nt, Artificial Sequence
  Description of Artificial Sequence: Synthetic oligonucleotide
aggguugacgugcccagag

SEQ ID NO: 1112987 - RNA, 19 nt, Artificial Sequence
  Description of Artificial Sequence: Synthetic oligonucleotide
ucccggaugugccacagau

SEQ ID NO: 1112988 - RNA, 19 nt, Artificial Sequence
  Description of Artificial Sequence: Synthetic oligonucleotide
ucgugagacuguuccacug

SEQ ID NO: 1112989 - RNA, 19 nt, Artificial Sequence
  Description of Artificial Sequence: Synthetic oligonucleotide
uucucggcuugccaagaca

SEQ ID NO: 1112990 - RNA, 19 nt, Artificial Sequence
  Description of Artificial Sequence: Synthetic oligonucleotide
gaucgauugcaggagcgug

SEQ ID NO: 1112991 - RNA, 19 nt, Artificial Sequence
  Description of Artificial Sequence: Synthetic oligonucleotide
aaacuaacugugacauuca

SEQ ID NO: 1112992 - RNA, 19 nt, Artificial Sequence
  Description of Artificial Sequence: Synthetic oligonucleotide
augaucgauugcaggagcg

SEQ ID NO: 1112993 - RNA, 19 nt, Artificial Sequence
  Description of Artificial Sequence: Synthetic oligonucleotide
guaaacuacaccgcagaca

SEQ ID NO: 1112994 - RNA, 19 nt, Artificial Sequence
  Description of Artificial Sequence: Synthetic oligonucleotide
auggcaugucgugagacug

SEQ ID NO: 1112995 - RNA, 19 nt, Artificial Sequence
  Description of Artificial Sequence: Synthetic oligonucleotide
gauggccauccggacaugg

SEQ ID NO: 1112996 - RNA, 19 nt, Artificial Sequence
  Description of Artificial Sequence: Synthetic oligonucleotide
ugcuugugaugaaaauuau

SEQ ID NO: 1112997 - RNA, 19 nt, Artificial Sequence
  Description of Artificial Sequence: Synthetic oligonucleotide
caucauugauuucugugga

SEQ ID NO: 1112998 - RNA, 19 nt, Artificial Sequence
  Description of Artificial Sequence: Synthetic oligonucleotide
caggucuagcccauguaac

SEQ ID NO: 1112999 - RNA, 19 nt, Artificial Sequence
  Description of Artificial Sequence: Synthetic oligonucleotide
auucacagauagcgcucac

SEQ ID NO: 1113000 - RNA, 19 nt, Artificial Sequence
  Description of Artificial Sequence: Synthetic oligonucleotide
aggauucucgcucuuucaa

SEQ ID NO: 1113001 - RNA, 19 nt, Artificial Sequence
  Description of Artificial Sequence: Synthetic oligonucleotide
ugacauucacugagugaga

SEQ ID NO: 1113002 - RNA, 19 nt, Artificial Sequence
  Description of Artificial Sequence: Synthetic oligonucleotide
accaauccaagaacuaaug

SEQ ID NO: 1113003 - RNA, 19 nt, Artificial Sequence
  Description of Artificial Sequence: Synthetic oligonucleotide
agcuaacuccugaaaauug

SEQ ID NO: 1113004 - RNA, 19 nt, Artificial Sequence
  Description of Artificial Sequence: Synthetic oligonucleotide
guaggagaugaucgauugc

SEQ ID NO: 1113005 - RNA, 19 nt, Artificial Sequence
  Description of Artificial Sequence: Synthetic oligonucleotide
guauacaucguagcugcac

SEQ ID NO: 1113006 - RNA, 19 nt, Artificial Sequence
  Description of Artificial Sequence: Synthetic oligonucleotide
guuuaucaugaauccaaaa

SEQ ID NO: 1113007 - RNA, 19 nt, Artificial Sequence
  Description of Artificial Sequence: Synthetic oligonucleotide
aggagcguguaaacuacac

SEQ ID NO: 1113008 - RNA, 19 nt, Artificial Sequence
  Description of Artificial Sequence: Synthetic oligonucleotide
agcaccgcgaccacguagg

SEQ ID NO: 1113009 - RNA, 19 nt, Artificial Sequence
  Description of Artificial Sequence: Synthetic oligonucleotide
cucgucgggucacaagccg

SEQ ID NO: 1113010 - RNA, 19 nt, Artificial Sequence
  Description of Artificial Sequence: Synthetic oligonucleotide
ugccacuuccagaaacuaa

SEQ ID NO: 1113011 - RNA, 19 nt, Artificial Sequence
  Description of Artificial Sequence: Synthetic oligonucleotide
gaaaaggguugacgugccc

SEQ ID NO: 1113012 - RNA, 19 nt, Artificial Sequence
  Description of Artificial Sequence: Synthetic oligonucleotide
uguauacaucguagcugca

SEQ ID NO: 1113013 - RNA, 19 nt, Artificial Sequence
  Description of Artificial Sequence: Synthetic oligonucleotide
uuccgauacaucccaccaa

SEQ ID NO: 1113014 - RNA, 19 nt, Artificial Sequence
  Description of Artificial Sequence: Synthetic oligonucleotide
gaauaucccgauuuggcuu

SEQ ID NO: 1113015 - RNA, 19 nt, Artificial Sequence
  Description of Artificial Sequence: Synthetic oligonucleotide
gcagaauggggugauuugg

SEQ ID NO: 1113016 - RNA, 19 nt, Artificial Sequence
  Description of Artificial Sequence: Synthetic oligonucleotide
aaauggggauaacguuaga

SEQ ID NO: 1113017 - RNA, 19 nt, Artificial Sequence
  Description of Artificial Sequence: Synthetic oligonucleotide
caccgcagacaaaagccag

SEQ ID NO: 1113018 - RNA, 19 nt, Artificial Sequence
  Description of Artificial Sequence: Synthetic oligonucleotide
aggcaugcaguccaaggaa

SEQ ID NO: 1113019 - RNA, 19 nt, Artificial Sequence
  Description of Artificial Sequence: Synthetic oligonucleotide
gguuaaugugcacaguaaa

SEQ ID NO: 1113020 - RNA, 19 nt, Artificial Sequence
  Description of Artificial Sequence: Synthetic oligonucleotide
agacaggucuagcccaugu

SEQ ID NO: 1113021 - RNA, 19 nt, Artificial Sequence
  Description of Artificial Sequence: Synthetic oligonucleotide
aagugucuuagaaaauaua

SEQ ID NO: 1113022 - RNA, 19 nt, Artificial Sequence
  Description of Artificial Sequence: Synthetic oligonucleotide
ggagcguguaaacuacacc

SEQ ID NO: 1113023 - RNA, 19 nt, Artificial Sequence
  Description of Artificial Sequence: Synthetic oligonucleotide
aucguagcugcaccaagaa

SEQ ID NO: 1113024 - RNA, 19 nt, Artificial Sequence
  Description of Artificial Sequence: Synthetic oligonucleotide
ccaagaacuaaugacacca

SEQ ID NO: 1113025 - RNA, 19 nt, Artificial Sequence
  Description of Artificial Sequence: Synthetic oligonucleotide
gggauaacguuagaaguug

SEQ ID NO: 1113026 - RNA, 19 nt, Artificial Sequence
  Description of Artificial Sequence: Synthetic oligonucleotide
gugucuuagaaaauauaaa

SEQ ID NO: 1113027 - RNA, 19 nt, Artificial Sequence
  Description of Artificial Sequence: Synthetic oligonucleotide
cacagauagcgcucacuac

SEQ ID NO: 1113028 - RNA, 19 nt, Artificial Sequence
  Description of Artificial Sequence: Synthetic oligonucleotide
ggacauggcaugucgugag

SEQ ID NO: 1113029 - RNA, 19 nt, Artificial Sequence
  Description of Artificial Sequence: Synthetic oligonucleotide
gacgugcccagagagcacc

SEQ ID NO: 1113030 - RNA, 19 nt, Artificial Sequence
  Description of Artificial Sequence: Synthetic oligonucleotide
cacuauuuuauaucuugua

SEQ ID NO: 1113031 - RNA, 19 nt, Artificial Sequence
  Description of Artificial Sequence: Synthetic oligonucleotide
gugcccagagagcaccgcg

SEQ ID NO: 1113032 - RNA, 19 nt, Artificial Sequence
  Description of Artificial Sequence: Synthetic oligonucleotide
caguccauucacagauagc

SEQ ID NO: 1113033 - RNA, 19 nt, Artificial Sequence
  Description of Artificial Sequence: Synthetic oligonucleotide
ucguagcugcaccaagaaa

SEQ ID NO: 1113034 - RNA, 19 nt, Artificial Sequence
  Description of Artificial Sequence: Synthetic oligonucleotide
agcccauguaacaauuucu

SEQ ID NO: 1113035 - RNA, 19 nt, Artificial Sequence
  Description of Artificial Sequence: Synthetic oligonucleotide
ugaucgauugcaggagcgu

SEQ ID NO: 1113036 - RNA, 19 nt, Artificial Sequence
  Description of Artificial Sequence: Synthetic oligonucleotide
caggagaaaggggacgaag

SEQ ID NO: 1113037 - RNA, 19 nt, Artificial Sequence
  Description of Artificial Sequence: Synthetic oligonucleotide
cgauacaucccaccaaucc

SEQ ID NO: 1113038 - RNA, 19 nt, Artificial Sequence
  Description of Artificial Sequence: Synthetic oligonucleotide
uaauagcaaaauggggaua

SEQ ID NO: 1113039 - RNA, 19 nt, Artificial Sequence
  Description of Artificial Sequence: Synthetic oligonucleotide
ccugaucagggugacaucc

SEQ ID NO: 1113040 - RNA, 19 nt, Artificial Sequence
  Description of Artificial Sequence: Synthetic oligonucleotide
uuguuucaugcaugcacua

SEQ ID NO: 1113041 - RNA, 19 nt, Artificial Sequence
  Description of Artificial Sequence: Synthetic oligonucleotide
aagagaguugucacacaau

SEQ ID NO: 1113042 - RNA, 19 nt, Artificial Sequence
  Description of Artificial Sequence: Synthetic oligonucleotide
caucguagcugcaccaaga

SEQ ID NO: 1113043 - RNA, 19 nt, Artificial Sequence
  Description of Artificial Sequence: Synthetic oligonucleotide
  modified_base (6)..(6): a, c, u, g, unknown or other
uggccncgcacagacagcu

SEQ ID NO: 1113044 - RNA, 19 nt, Artificial Sequence
  Description of Artificial Sequence: Synthetic oligonucleotide
acaugauuuguaggagaug

SEQ ID NO: 1113045 - RNA, 19 nt, Artificial Sequence
  Description of Artificial Sequence: Synthetic oligonucleotide
ucuacaucugcugguuaau

SEQ ID NO: 1113046 - RNA, 19 nt, Artificial Sequence
  Description of Artificial Sequence: Synthetic oligonucleotide
ccauuaggauauauaauca

SEQ ID NO: 1113047 - RNA, 19 nt, Artificial Sequence
  Description of Artificial Sequence: Synthetic oligonucleotide
uccggacauggcaugucgu

SEQ ID NO: 1113048 - RNA, 19 nt, Artificial Sequence
  Description of Artificial Sequence: Synthetic oligonucleotide
  modified_base (2)..(2): a, c, u, g, unknown or other
cncgcacagacagcuaaag

SEQ ID NO: 1113049 - RNA, 19 nt, Artificial Sequence
  Description of Artificial Sequence: Synthetic oligonucleotide
gccacuuccagaaacuaac

SEQ ID NO: 1113050 - RNA, 19 nt, Artificial Sequence
  Description of Artificial Sequence: Synthetic oligonucleotide
cuacaucugcugguuaaug

SEQ ID NO: 1113051 - RNA, 19 nt, Artificial Sequence
  Description of Artificial Sequence: Synthetic oligonucleotide
gaccuucucggcuugccaa

SEQ ID NO: 1113052 - RNA, 19 nt, Artificial Sequence
  Description of Artificial Sequence: Synthetic oligonucleotide
gaagcacagcaucgcggug

SEQ ID NO: 1113053 - RNA, 19 nt, Artificial Sequence
  Description of Artificial Sequence: Synthetic oligonucleotide
guugacgugcccagagagc

SEQ ID NO: 1113054 - RNA, 19 nt, Artificial Sequence
  Description of Artificial Sequence: Synthetic oligonucleotide
gcugcaccaagaaaugcag

SEQ ID NO: 1113055 - RNA, 19 nt, Artificial Sequence
  Description of Artificial Sequence: Synthetic oligonucleotide
uacaucguagcugcaccaa

SEQ ID NO: 1113056 - RNA, 19 nt, Artificial Sequence
  Description of Artificial Sequence: Synthetic oligonucleotide
ccuuaaggugacacucugg

SEQ ID NO: 1113057 - RNA, 19 nt, Artificial Sequence
  Description of Artificial Sequence: Synthetic oligonucleotide
gcuacaaugcccauuccga

SEQ ID NO: 1113058 - RNA, 19 nt, Artificial Sequence
  Description of Artificial Sequence: Synthetic oligonucleotide
augucgugagacuguucca

SEQ ID NO: 1113059 - RNA, 19 nt, Artificial Sequence
  Description of Artificial Sequence: Synthetic oligonucleotide
ugagugagacaggauucuc

SEQ ID NO: 1113060 - RNA, 19 nt, Artificial Sequence
  Description of Artificial Sequence: Synthetic oligonucleotide
acuacaccgcagacaaaag

SEQ ID NO: 1113061 - RNA, 19 nt, Artificial Sequence
  Description of Artificial Sequence: Synthetic oligonucleotide
gggacgaaggccauucccc

SEQ ID NO: 1113062 - RNA, 19 nt, Artificial Sequence
  Description of Artificial Sequence: Synthetic oligonucleotide
gcccauguaacaauuucug

SEQ ID NO: 1113063 - RNA, 19 nt, Artificial Sequence
  Description of Artificial Sequence: Synthetic oligonucleotide
caaugccucaucuuuucua

SEQ ID NO: 1113064 - RNA, 19 nt, Artificial Sequence
  Description of Artificial Sequence: Synthetic oligonucleotide
aucgauugcaggagcgugu

SEQ ID NO: 1113065 - RNA, 19 nt, Artificial Sequence
  Description of Artificial Sequence: Synthetic oligonucleotide
agggcgcuacgcucgucgg

SEQ ID NO: 1113066 - RNA, 19 nt, Artificial Sequence
  Description of Artificial Sequence: Synthetic oligonucleotide
guuagaaguugcauggaau

SEQ ID NO: 1113067 - RNA, 19 nt, Artificial Sequence
  Description of Artificial Sequence: Synthetic oligonucleotide
gacauggcaugucgugaga

SEQ ID NO: 1113068 - RNA, 19 nt, Artificial Sequence
  Description of Artificial Sequence: Synthetic oligonucleotide
ggcugaauuuucaaacuga

SEQ ID NO: 1113069 - RNA, 19 nt, Artificial Sequence
  Description of Artificial Sequence: Synthetic oligonucleotide
caagaacuaaugacaccaa

SEQ ID NO: 1113070 - RNA, 19 nt, Artificial Sequence
  Description of Artificial Sequence: Synthetic oligonucleotide
aagucccggaugugccaca

SEQ ID NO: 1113071 - RNA, 19 nt, Artificial Sequence
  Description of Artificial Sequence: Synthetic oligonucleotide
auccuuaaggugacacucu

SEQ ID NO: 1113072 - RNA, 19 nt, Artificial Sequence
  Description of Artificial Sequence: Synthetic oligonucleotide
uggcuacaaugcccauucc

SEQ ID NO: 1113073 - RNA, 19 nt, Artificial Sequence
  Description of Artificial Sequence: Synthetic oligonucleotide
cauucacagauagcgcuca

SEQ ID NO: 1113074 - RNA, 19 nt, Artificial Sequence
  Description of Artificial Sequence: Synthetic oligonucleotide
ggaaucugcagaauggggu

SEQ ID NO: 1113075 - RNA, 19 nt, Artificial Sequence
  Description of Artificial Sequence: Synthetic oligonucleotide
cuucucggcuugccaagac

SEQ ID NO: 1113076 - RNA, 19 nt, Artificial Sequence
  Description of Artificial Sequence: Synthetic oligonucleotide
gaagcccaaacaacugaaa

SEQ ID NO: 1113077 - RNA, 19 nt, Artificial Sequence
  Description of Artificial Sequence: Synthetic oligonucleotide
ggauaacguuagaaguugc

SEQ ID NO: 1113078 - RNA, 19 nt, Artificial Sequence
  Description of Artificial Sequence: Synthetic oligonucleotide
ucgauugcaggagcgugua

SEQ ID NO: 1113079 - RNA, 19 nt, Artificial Sequence
  Description of Artificial Sequence: Synthetic oligonucleotide
ugacgugcccagagagcac

SEQ ID NO: 1113080 - RNA, 19 nt, Artificial Sequence
  Description of Artificial Sequence: Synthetic oligonucleotide
caagucccggaugugccac

SEQ ID NO: 1113081 - RNA, 19 nt, Artificial Sequence
  Description of Artificial Sequence: Synthetic oligonucleotide
caggauucucgcucuuuca

SEQ ID NO: 1113082 - RNA, 19 nt, Artificial Sequence
  Description of Artificial Sequence: Synthetic oligonucleotide
gacaggucuagcccaugua

SEQ ID NO: 1113083 - RNA, 19 nt, Artificial Sequence
  Description of Artificial Sequence: Synthetic oligonucleotide
uccugaucagggugacauc

SEQ ID NO: 1113084 - RNA, 19 nt, Artificial Sequence
  Description of Artificial Sequence: Synthetic oligonucleotide
aaggguugacgugcccaga

SEQ ID NO: 1113085 - RNA, 19 nt, Artificial Sequence
  Description of Artificial Sequence: Synthetic oligonucleotide
aucgcggugagagggcgcu

SEQ ID NO: 1113086 - RNA, 19 nt, Artificial Sequence
  Description of Artificial Sequence: Synthetic oligonucleotide
ugcauggaaucugcagaau

SEQ ID NO: 1113087 - RNA, 19 nt, Artificial Sequence
  Description of Artificial Sequence: Synthetic oligonucleotide
ucgggucacaagccggcuu

SEQ ID NO: 1113088 - RNA, 19 nt, Artificial Sequence
  Description of Artificial Sequence: Synthetic oligonucleotide
acguuagaaguugcaugga

SEQ ID NO: 1113089 - RNA, 19 nt, Artificial Sequence
  Description of Artificial Sequence: Synthetic oligonucleotide
ggauucucgcucuuucaaa

SEQ ID NO: 1113090 - RNA, 19 nt, Artificial Sequence
  Description of Artificial Sequence: Synthetic oligonucleotide
gcgaccacguaggagauga

SEQ ID NO: 1113091 - RNA, 19 nt, Artificial Sequence
  Description of Artificial Sequence: Synthetic oligonucleotide
guccugaucagggugacau

SEQ ID NO: 1113092 - RNA, 19 nt, Artificial Sequence
  Description of Artificial Sequence: Synthetic oligonucleotide
gacgacaggcacagcuaac

SEQ ID NO: 1113093 - RNA, 19 nt, Artificial Sequence
  Description of Artificial Sequence: Synthetic oligonucleotide
cauugaugcuaaacauucu

SEQ ID NO: 1113094 - RNA, 19 nt, Artificial Sequence
  Description of Artificial Sequence: Synthetic oligonucleotide
ccaguuugguuauagaaau

SEQ ID NO: 1113095 - RNA, 19 nt, Artificial Sequence
  Description of Artificial Sequence: Synthetic oligonucleotide
caucgcggugagagggcgc

SEQ ID NO: 1113096 - RNA, 19 nt, Artificial Sequence
  Description of Artificial Sequence: Synthetic oligonucleotide
ggugugguuccugugucac

SEQ ID NO: 1113097 - RNA, 19 nt, Artificial Sequence
  Description of Artificial Sequence: Synthetic oligonucleotide
caccaauccaagaacuaau

SEQ ID NO: 1113098 - RNA, 19 nt, Artificial Sequence
  Description of Artificial Sequence: Synthetic oligonucleotide
gucauugaugcuaaacauu

SEQ ID NO: 1113099 - RNA, 19 nt, Artificial Sequence
  Description of Artificial Sequence: Synthetic oligonucleotide
cgcucgucgggucacaagc

SEQ ID NO: 1113100 - RNA, 19 nt, Artificial Sequence
  Description of Artificial Sequence: Synthetic oligonucleotide
auaccacucucuggaggug

SEQ ID NO: 1113101 - RNA, 19 nt, Artificial Sequence
  Description of Artificial Sequence: Synthetic oligonucleotide
acuacgugauacacauaau

SEQ ID NO: 1113102 - RNA, 19 nt, Artificial Sequence
  Description of Artificial Sequence: Synthetic oligonucleotide
accgcagacaaaagccaga

SEQ ID NO: 1113103 - RNA, 19 nt, Artificial Sequence
  Description of Artificial Sequence: Synthetic oligonucleotide
ucacuacgugauacacaua

SEQ ID NO: 1113104 - RNA, 19 nt, Artificial Sequence
  Description of Artificial Sequence: Synthetic oligonucleotide
cuaaagugucauugaugcu

SEQ ID NO: 1113105 - RNA, 19 nt, Artificial Sequence
  Description of Artificial Sequence: Synthetic oligonucleotide
gcaggagcguguaaacuac

SEQ ID NO: 1113106 - RNA, 19 nt, Artificial Sequence
  Description of Artificial Sequence: Synthetic oligonucleotide
ugcggacgaccaugucacc

SEQ ID NO: 1113107 - RNA, 19 nt, Artificial Sequence
  Description of Artificial Sequence: Synthetic oligonucleotide
cacuaugaauuagauuaua

SEQ ID NO: 1113108 - RNA, 19 nt, Artificial Sequence
  Description of Artificial Sequence: Synthetic oligonucleotide
  modified_base (4)..(4): a, c, u, g, unknown or other
gccncgcacagacagcuaa

SEQ ID NO: 1113109 - RNA, 19 nt, Artificial Sequence
  Description of Artificial Sequence: Synthetic oligonucleotide
gucauacauaaaagucuaa

SEQ ID NO: 1113110 - RNA, 19 nt, Artificial Sequence
  Description of Artificial Sequence: Synthetic oligonucleotide
  modified_base (7)..(7): a, c, u, g, unknown or other
guggccncgcacagacagc

SEQ ID NO: 1113111 - RNA, 19 nt, Artificial Sequence
  Description of Artificial Sequence: Synthetic oligonucleotide
cuacaaugcccauuccgau

SEQ ID NO: 1113112 - RNA, 19 nt, Artificial Sequence
  Description of Artificial Sequence: Synthetic oligonucleotide
gcuugcugcgggcugccug

SEQ ID NO: 1113113 - RNA, 19 nt, Artificial Sequence
  Description of Artificial Sequence: Synthetic oligonucleotide
cauggcaugucgugagacu

SEQ ID NO: 1113114 - RNA, 19 nt, Artificial Sequence
  Description of Artificial Sequence: Synthetic oligonucleotide
caggagcguguaaacuaca

SEQ ID NO: 1113115 - RNA, 19 nt, Artificial Sequence
  Description of Artificial Sequence: Synthetic oligonucleotide
ggacgacaggcacagcuaa

SEQ ID NO: 1113116 - RNA, 19 nt, Artificial Sequence
  Description of Artificial Sequence: Synthetic oligonucleotide
ccggacauggcaugucgug

SEQ ID NO: 1113117 - RNA, 19 nt, Artificial Sequence
  Description of Artificial Sequence: Synthetic oligonucleotide
ggucuagcccauguaacaa

SEQ ID NO: 1113118 - RNA, 19 nt, Artificial Sequence
  Description of Artificial Sequence: Synthetic oligonucleotide
ggggaccacagcugcgcag

SEQ ID NO: 1113119 - RNA, 19 nt, Artificial Sequence
  Description of Artificial Sequence: Synthetic oligonucleotide
aaacuacaccgcagacaaa

SEQ ID NO: 1113120 - RNA, 19 nt, Artificial Sequence
  Description of Artificial Sequence: Synthetic oligonucleotide
cccauuccgauacauccca

SEQ ID NO: 1113121 - RNA, 19 nt, Artificial Sequence
  Description of Artificial Sequence: Synthetic oligonucleotide
caaguccauccguccucug

SEQ ID NO: 1113122 - RNA, 19 nt, Artificial Sequence
  Description of Artificial Sequence: Synthetic oligonucleotide
gcaucgcggugagagggcg

SEQ ID NO: 1113123 - RNA, 19 nt, Artificial Sequence
  Description of Artificial Sequence: Synthetic oligonucleotide
cugugguaucuguccagaa

SEQ ID NO: 1113124 - RNA, 19 nt, Artificial Sequence
  Description of Artificial Sequence: Synthetic oligonucleotide
cauccggacauggcauguc

SEQ ID NO: 1113125 - RNA, 19 nt, Artificial Sequence
  Description of Artificial Sequence: Synthetic oligonucleotide
ucuuuaccauuaggauaua

SEQ ID NO: 1113126 - RNA, 19 nt, Artificial Sequence
  Description of Artificial Sequence: Synthetic oligonucleotide
caccgcgaccacguaggag

SEQ ID NO: 1113127 - RNA, 19 nt, Artificial Sequence
  Description of Artificial Sequence: Synthetic oligonucleotide
gugcacaguaaaugguuuu

SEQ ID NO: 1113128 - RNA, 19 nt, Artificial Sequence
  Description of Artificial Sequence: Synthetic oligonucleotide
acgugcccagagagcaccg

SEQ ID NO: 1113129 - RNA, 19 nt, Artificial Sequence
  Description of Artificial Sequence: Synthetic oligonucleotide
gggcgcuacgcucgucggg

SEQ ID NO: 1113130 - RNA, 19 nt, Artificial Sequence
  Description of Artificial Sequence: Synthetic oligonucleotide
ggaccuucucggcuugcca

SEQ ID NO: 1113131 - RNA, 19 nt, Artificial Sequence
  Description of Artificial Sequence: Synthetic oligonucleotide
ucugcagaauggggugauu

SEQ ID NO: 1113132 - RNA, 19 nt, Artificial Sequence
  Description of Artificial Sequence: Synthetic oligonucleotide
uacgcucgucgggucacaa

SEQ ID NO: 1113133 - RNA, 19 nt, Artificial Sequence
  Description of Artificial Sequence: Synthetic oligonucleotide
gcucacuacgugauacaca

SEQ ID NO: 1113134 - RNA, 19 nt, Artificial Sequence
  Description of Artificial Sequence: Synthetic oligonucleotide
cuuuaccauuaggauauau

SEQ ID NO: 1113135 - RNA, 19 nt, Artificial Sequence
  Description of Artificial Sequence: Synthetic oligonucleotide
ccacuauuuuauaucuugu

SEQ ID NO: 1113136 - RNA, 19 nt, Artificial Sequence
  Description of Artificial Sequence: Synthetic oligonucleotide
ggacgaaggccauuccccu

SEQ ID NO: 1113137 - RNA, 19 nt, Artificial Sequence
  Description of Artificial Sequence: Synthetic oligonucleotide
cuagcccauguaacaauuu

SEQ ID NO: 1113138 - RNA, 19 nt, Artificial Sequence
  Description of Artificial Sequence: Synthetic oligonucleotide
gcucgucgggucacaagcc

SEQ ID NO: 1113139 - RNA, 19 nt, Artificial Sequence
  Description of Artificial Sequence: Synthetic oligonucleotide
cgucgggucacaagccggc

SEQ ID NO: 1113140 - RNA, 19 nt, Artificial Sequence
  Description of Artificial Sequence: Synthetic oligonucleotide
gcggugagagggcgcuacg

SEQ ID NO: 1113141 - RNA, 19 nt, Artificial Sequence
  Description of Artificial Sequence: Synthetic oligonucleotide
ggguugacgugcccagaga

SEQ ID NO: 1113142 - RNA, 19 nt, Artificial Sequence
  Description of Artificial Sequence: Synthetic oligonucleotide
ccauuccgauacaucccac

SEQ ID NO: 1113143 - RNA, 19 nt, Artificial Sequence
  Description of Artificial Sequence: Synthetic oligonucleotide
ccgauacaucccaccaauc

SEQ ID NO: 1113144 - RNA, 19 nt, Artificial Sequence
  Description of Artificial Sequence: Synthetic oligonucleotide
cagcuaacuccugaaaauu

SEQ ID NO: 1113145 - RNA, 19 nt, Artificial Sequence
  Description of Artificial Sequence: Synthetic oligonucleotide
agagggcgcuacgcucguc

SEQ ID NO: 1113146 - RNA, 19 nt, Artificial Sequence
  Description of Artificial Sequence: Synthetic oligonucleotide
uccguccucugugccacuu

SEQ ID NO: 1113147 - RNA, 19 nt, Artificial Sequence
  Description of Artificial Sequence: Synthetic oligonucleotide
agagcaccgcgaccacgua

SEQ ID NO: 1113148 - RNA, 19 nt, Artificial Sequence
  Description of Artificial Sequence: Synthetic oligonucleotide
ccaccaauccaagaacuaa

SEQ ID NO: 1113149 - RNA, 19 nt, Artificial Sequence
  Description of Artificial Sequence: Synthetic oligonucleotide
cccggaugugccacagaug

SEQ ID NO: 1113150 - RNA, 19 nt, Artificial Sequence
  Description of Artificial Sequence: Synthetic oligonucleotide
gcggacgaccaugucacca

SEQ ID NO: 1113151 - RNA, 19 nt, Artificial Sequence
  Description of Artificial Sequence: Synthetic oligonucleotide
gugccacuuccagaaacua

SEQ ID NO: 1113152 - RNA, 19 nt, Artificial Sequence
  Description of Artificial Sequence: Synthetic oligonucleotide
cugcaaugccucaucuuuu

SEQ ID NO: 1113153 - RNA, 19 nt, Artificial Sequence
  Description of Artificial Sequence: Synthetic oligonucleotide
caguuugguuauagaaauu

SEQ ID NO: 1113154 - RNA, 19 nt, Artificial Sequence
  Description of Artificial Sequence: Synthetic oligonucleotide
gaaggcugcggacgaccau

SEQ ID NO: 1113155 - RNA, 19 nt, Artificial Sequence
  Description of Artificial Sequence: Synthetic oligonucleotide
cauggacgacaggcacagc

SEQ ID NO: 1113156 - RNA, 19 nt, Artificial Sequence
  Description of Artificial Sequence: Synthetic oligonucleotide
cugcagaauggggugauuu

SEQ ID NO: 1113157 - RNA, 19 nt, Artificial Sequence
  Description of Artificial Sequence: Synthetic oligonucleotide
gcuuuaguauuaauuuauu

SEQ ID NO: 1113158 - RNA, 19 nt, Artificial Sequence
  Description of Artificial Sequence: Synthetic oligonucleotide
cgcucacuacgugauacac

SEQ ID NO: 1113159 - RNA, 19 nt, Artificial Sequence
  Description of Artificial Sequence: Synthetic oligonucleotide
gcgcucacuacgugauaca

SEQ ID NO: 1113160 - RNA, 19 nt, Artificial Sequence
  Description of Artificial Sequence: Synthetic oligonucleotide
gugugguuccugugucacu

SEQ ID NO: 1113161 - RNA, 19 nt, Artificial Sequence
  Description of Artificial Sequence: Synthetic oligonucleotide
cacaaucaugaagcccaaa

SEQ ID NO: 1113162 - RNA, 19 nt, Artificial Sequence
  Description of Artificial Sequence: Synthetic oligonucleotide
gcaaugccucaucuuuucu

SEQ ID NO: 1113163 - RNA, 19 nt, Artificial Sequence
  Description of Artificial Sequence: Synthetic oligonucleotide
gagagggcgcuacgcucgu

SEQ ID NO: 1113164 - RNA, 19 nt, Artificial Sequence
  Description of Artificial Sequence: Synthetic oligonucleotide
ggauauccuuaaggugaca

SEQ ID NO: 1113165 - RNA, 19 nt, Artificial Sequence
  Description of Artificial Sequence: Synthetic oligonucleotide
auaucccgauuuggcuuuu

SEQ ID NO: 1113166 - RNA, 19 nt, Artificial Sequence
  Description of Artificial Sequence: Synthetic oligonucleotide
ggcgcuacgcucgucgggu

SEQ ID NO: 1113167 - RNA, 19 nt, Artificial Sequence
  Description of Artificial Sequence: Synthetic oligonucleotide
ccgcagacaaaagccagaa

SEQ ID NO: 1113168 - RNA, 19 nt, Artificial Sequence
  Description of Artificial Sequence: Synthetic oligonucleotide
cggugagagggcgcuacgc

SEQ ID NO: 1113169 - RNA, 19 nt, Artificial Sequence
  Description of Artificial Sequence: Synthetic oligonucleotide
  modified_base (3)..(3): a, c, u, g, unknown or other
ccncgcacagacagcuaaa

SEQ ID NO: 1113170 - RNA, 19 nt, Artificial Sequence
  Description of Artificial Sequence: Synthetic oligonucleotide
uggggugauuugggaccuu

SEQ ID NO: 1113171 - RNA, 19 nt, Artificial Sequence
  Description of Artificial Sequence: Synthetic oligonucleotide
gcugguuaaugugcacagu

SEQ ID NO: 1113172 - RNA, 19 nt, Artificial Sequence
  Description of Artificial Sequence: Synthetic oligonucleotide
gcaugucgugagacuguuc

SEQ ID NO: 1113173 - RNA, 19 nt, Artificial Sequence
  Description of Artificial Sequence: Synthetic oligonucleotide
cuacgcucgucgggucaca

SEQ ID NO: 1113174 - RNA, 19 nt, Artificial Sequence
  Description of Artificial Sequence: Synthetic oligonucleotide
gggugauuugggaccuucu

SEQ ID NO: 1113175 - RNA, 19 nt, Artificial Sequence
  Description of Artificial Sequence: Synthetic oligonucleotide
ggcugcggacgaccauguc

SEQ ID NO: 1113176 - RNA, 19 nt, Artificial Sequence
  Description of Artificial Sequence: Synthetic oligonucleotide
cgcggugagagggcgcuac

SEQ ID NO: 1113177 - RNA, 19 nt, Artificial Sequence
  Description of Artificial Sequence: Synthetic oligonucleotide
ggcaugucgugagacuguu

SEQ ID NO: 1113178 - RNA, 19 nt, Artificial Sequence
  Description of Artificial Sequence: Synthetic oligonucleotide
ucgcggugagagggcgcua

SEQ ID NO: 1113179 - RNA, 19 nt, Artificial Sequence
  Description of Artificial Sequence: Synthetic oligonucleotide
ggucacaagccggcuugcu

SEQ ID NO: 1113180 - RNA, 19 nt, Artificial Sequence
  Description of Artificial Sequence: Synthetic oligonucleotide
gcgcuacgcucgucggguc

SEQ ID NO: 1113181 - RNA, 19 nt, Artificial Sequence
  Description of Artificial Sequence: Synthetic oligonucleotide
ccauccggacauggcaugu

SEQ ID NO: 1113182 - RNA, 19 nt, Artificial Sequence
  Description of Artificial Sequence: Synthetic oligonucleotide
  modified_base (5)..(5): a, c, u, g, unknown or other
ggccncgcacagacagcua

SEQ ID NO: 1113183 - RNA, 19 nt, Artificial Sequence
  Description of Artificial Sequence: Synthetic oligonucleotide
cgauugcaggagcguguaa

SEQ ID NO: 1113184 - RNA, 19 nt, Artificial Sequence
  Description of Artificial Sequence: Synthetic oligonucleotide
cgcgaccacguaggagaug

SEQ ID NO: 1113185 - RNA, 19 nt, Artificial Sequence
  Description of Artificial Sequence: Synthetic oligonucleotide
  modified_base (9)..(9): a, c, u, g, unknown or other
cgguggccncgcacagaca

SEQ ID NO: 1113186 - RNA, 19 nt, Artificial Sequence
  Description of Artificial Sequence: Synthetic oligonucleotide
ccgcgaccacguaggagau

SEQ ID NO: 1113187 - RNA, 19 nt, Artificial Sequence
  Description of Artificial Sequence: Synthetic oligonucleotide
  modified_base (1)..(1): a, c, u, g, unknown or other
ncgcacagacagcuaaagu

SEQ ID NO: 1113188 - RNA, 19 nt, Artificial Sequence
  Description of Artificial Sequence: Synthetic oligonucleotide
uuccauugaaucaaaaugg

SEQ ID NO: 1113189 - RNA, 19 nt, Artificial Sequence
  Description of Artificial Sequence: Synthetic oligonucleotide
ucuacuuguaccaacauac

SEQ ID NO: 1113190 - RNA, 19 nt, Artificial Sequence
  Description of Artificial Sequence: Synthetic oligonucleotide
acaacaacaaccuuaauau

SEQ ID NO: 1113191 - RNA, 19 nt, Artificial Sequence
  Description of Artificial Sequence: Synthetic oligonucleotide
ucgaaaauggacuggaacc

SEQ ID NO: 1113192 - RNA, 19 nt, Artificial Sequence
  Description of Artificial Sequence: Synthetic oligonucleotide
aagcauaucgaaaauggac

SEQ ID NO: 1113193 - RNA, 19 nt, Artificial Sequence
  Description of Artificial Sequence: Synthetic oligonucleotide
cucaaugggaauucgaggg

SEQ ID NO: 1113194 - RNA, 19 nt, Artificial Sequence
  Description of Artificial Sequence: Synthetic oligonucleotide
guuccauugaaucaaaaug

SEQ ID NO: 1113195 - RNA, 19 nt, Artificial Sequence
  Description of Artificial Sequence: Synthetic oligonucleotide
guagguaucucacacaaag

SEQ ID NO: 1113196 - RNA, 19 nt, Artificial Sequence
  Description of Artificial Sequence: Synthetic oligonucleotide
uuaacagggcucuugaacc

SEQ ID NO: 1113197 - RNA, 19 nt, Artificial Sequence
  Description of Artificial Sequence: Synthetic oligonucleotide
auaacugacagcccuuccc

SEQ ID NO: 1113198 - RNA, 19 nt, Artificial Sequence
  Description of Artificial Sequence: Synthetic oligonucleotide
uguaguguaguaacugggg

SEQ ID NO: 1113199 - RNA, 19 nt, Artificial Sequence
  Description of Artificial Sequence: Synthetic oligonucleotide
cucugaaugauucaggcag

SEQ ID NO: 1113200 - RNA, 19 nt, Artificial Sequence
  Description of Artificial Sequence: Synthetic oligonucleotide
ugacguaccaggaagacac

SEQ ID NO: 1113201 - RNA, 19 nt, Artificial Sequence
  Description of Artificial Sequence: Synthetic oligonucleotide
auaagagccccuuagggag

SEQ ID NO: 1113202 - RNA, 19 nt, Artificial Sequence
  Description of Artificial Sequence: Synthetic oligonucleotide
uccauugaaucaaaauggg

SEQ ID NO: 1113203 - RNA, 19 nt, Artificial Sequence
  Description of Artificial Sequence: Synthetic oligonucleotide
acaacuuaaggcuaggagu

SEQ ID NO: 1113204 - RNA, 19 nt, Artificial Sequence
  Description of Artificial Sequence: Synthetic oligonucleotide
aucgaaaauggacuggaac

SEQ ID NO: 1113205 - RNA, 19 nt, Artificial Sequence
  Description of Artificial Sequence: Synthetic oligonucleotide
accaaggauauccugagag

SEQ ID NO: 1113206 - RNA, 19 nt, Artificial Sequence
  Description of Artificial Sequence: Synthetic oligonucleotide
ucuauguuguccuuuguga

SEQ ID NO: 1113207 - RNA, 19 nt, Artificial Sequence
  Description of Artificial Sequence: Synthetic oligonucleotide
gaguacugguuauuaaugg

SEQ ID NO: 1113208 - RNA, 19 nt, Artificial Sequence
  Description of Artificial Sequence: Synthetic oligonucleotide
guaauuaguggggagauag

SEQ ID NO: 1113209 - RNA, 19 nt, Artificial Sequence
  Description of Artificial Sequence: Synthetic oligonucleotide
gaaugauucaggcagggca

SEQ ID NO: 1113210 - RNA, 19 nt, Artificial Sequence
  Description of Artificial Sequence: Synthetic oligonucleotide
uacacagucacucgcuccg

SEQ ID NO: 1113211 - RNA, 19 nt, Artificial Sequence
  Description of Artificial Sequence: Synthetic oligonucleotide
aacuaggggagaaggaugc

SEQ ID NO: 1113212 - RNA, 19 nt, Artificial Sequence
  Description of Artificial Sequence: Synthetic oligonucleotide
uauguuguccuuugugagg

SEQ ID NO: 1113213 - RNA, 19 nt, Artificial Sequence
  Description of Artificial Sequence: Synthetic oligonucleotide
agaauguacucugaagggc

SEQ ID NO: 1113214 - RNA, 19 nt, Artificial Sequence
  Description of Artificial Sequence: Synthetic oligonucleotide
aauucaaccauggggacca

SEQ ID NO: 1113215 - RNA, 19 nt, Artificial Sequence
  Description of Artificial Sequence: Synthetic oligonucleotide
cauugaaucaaaaugggaa

SEQ ID NO: 1113216 - RNA, 19 nt, Artificial Sequence
  Description of Artificial Sequence: Synthetic oligonucleotide
uccucaaugggaauucgag

SEQ ID NO: 1113217 - RNA, 19 nt, Artificial Sequence
  Description of Artificial Sequence: Synthetic oligonucleotide
aacaaccuuaauauaacug

SEQ ID NO: 1113218 - RNA, 19 nt, Artificial Sequence
  Description of Artificial Sequence: Synthetic oligonucleotide
guaacuggggaguuaacag

SEQ ID NO: 1113219 - RNA, 19 nt, Artificial Sequence
  Description of Artificial Sequence: Synthetic oligonucleotide
cuuagggagguaauggagc

SEQ ID NO: 1113220 - RNA, 19 nt, Artificial Sequence
  Description of Artificial Sequence: Synthetic oligonucleotide
uggaacuaagauaaacccu

SEQ ID NO: 1113221 - RNA, 19 nt, Artificial Sequence
  Description of Artificial Sequence: Synthetic oligonucleotide
ugcucaagcauaucgaaaa

SEQ ID NO: 1113222 - RNA, 19 nt, Artificial Sequence
  Description of Artificial Sequence: Synthetic oligonucleotide
caaggauauccugagaggg

SEQ ID NO: 1113223 - RNA, 19 nt, Artificial Sequence
  Description of Artificial Sequence: Synthetic oligonucleotide
ucauucagugacaaacgca

SEQ ID NO: 1113224 - RNA, 19 nt, Artificial Sequence
  Description of Artificial Sequence: Synthetic oligonucleotide
cugacaagggucaggaagc

SEQ ID NO: 1113225 - RNA, 19 nt, Artificial Sequence
  Description of Artificial Sequence: Synthetic oligonucleotide
agggacugaccauaagagc

SEQ ID NO: 1113226 - RNA, 19 nt, Artificial Sequence
  Description of Artificial Sequence: Synthetic oligonucleotide
uuagggagguaauggagcc

SEQ ID NO: 1113227 - RNA, 19 nt, Artificial Sequence
  Description of Artificial Sequence: Synthetic oligonucleotide
ugcaccauuagggacaccc

SEQ ID NO: 1113228 - RNA, 19 nt, Artificial Sequence
  Description of Artificial Sequence: Synthetic oligonucleotide
gaaccaaggauauccugag

SEQ ID NO: 1113229 - RNA, 19 nt, Artificial Sequence
  Description of Artificial Sequence: Synthetic oligonucleotide
gguaauggagcccaagucc

SEQ ID NO: 1113230 - RNA, 19 nt, Artificial Sequence
  Description of Artificial Sequence: Synthetic oligonucleotide
cuauguuguccuuugugag

SEQ ID NO: 1113231 - RNA, 19 nt, Artificial Sequence
  Description of Artificial Sequence: Synthetic oligonucleotide
acucugacguaccaggaag

SEQ ID NO: 1113232 - RNA, 19 nt, Artificial Sequence
  Description of Artificial Sequence: Synthetic oligonucleotide
acagaacuaggggagaagg

SEQ ID NO: 1113233 - RNA, 19 nt, Artificial Sequence
  Description of Artificial Sequence: Synthetic oligonucleotide
cacaacuuaaggcuaggag

SEQ ID NO: 1113234 - RNA, 19 nt, Artificial Sequence
  Description of Artificial Sequence: Synthetic oligonucleotide
aucgggguagcaucggucg

SEQ ID NO: 1113235 - RNA, 19 nt, Artificial Sequence
  Description of Artificial Sequence: Synthetic oligonucleotide
ugggagggcacauagcuga

SEQ ID NO: 1113236 - RNA, 19 nt, Artificial Sequence
  Description of Artificial Sequence: Synthetic oligonucleotide
gagagcaugccguggaacc

SEQ ID NO: 1113237 - RNA, 19 nt, Artificial Sequence
  Description of Artificial Sequence: Synthetic oligonucleotide
accauaagagccccuuagg

SEQ ID NO: 1113238 - RNA, 19 nt, Artificial Sequence
  Description of Artificial Sequence: Synthetic oligonucleotide
aaauggacuggaaccacag

SEQ ID NO: 1113239 - RNA, 19 nt, Artificial Sequence
  Description of Artificial Sequence: Synthetic oligonucleotide
ugacccuccucauucagug

SEQ ID NO: 1113240 - RNA, 19 nt, Artificial Sequence
  Description of Artificial Sequence: Synthetic oligonucleotide
uggaguauccaggggaggg

SEQ ID NO: 1113241 - RNA, 19 nt, Artificial Sequence
  Description of Artificial Sequence: Synthetic oligonucleotide
acuuguaccaacauacaca

SEQ ID NO: 1113242 - RNA, 19 nt, Artificial Sequence
  Description of Artificial Sequence: Synthetic oligonucleotide
cucauucagugacaaacgc

SEQ ID NO: 1113243 - RNA, 19 nt, Artificial Sequence
  Description of Artificial Sequence: Synthetic oligonucleotide
aaggauauccugagagggg

SEQ ID NO: 1113244 - RNA, 19 nt, Artificial Sequence
  Description of Artificial Sequence: Synthetic oligonucleotide
uccguuacacagucacucg

SEQ ID NO: 1113245 - RNA, 19 nt, Artificial Sequence
  Description of Artificial Sequence: Synthetic oligonucleotide
gcuaggaguaggaaaaugg

SEQ ID NO: 1113246 - RNA, 19 nt, Artificial Sequence
  Description of Artificial Sequence: Synthetic oligonucleotide
acggaagauguuccguuac

SEQ ID NO: 1113247 - RNA, 19 nt, Artificial Sequence
  Description of Artificial Sequence: Synthetic oligonucleotide
cuugagucgagagagcaug

SEQ ID NO: 1113248 - RNA, 19 nt, Artificial Sequence
  Description of Artificial Sequence: Synthetic oligonucleotide
aggaguacugguuauuaau

SEQ ID NO: 1113249 - RNA, 19 nt, Artificial Sequence
  Description of Artificial Sequence: Synthetic oligonucleotide
cauaucgaaaauggacugg

SEQ ID NO: 1113250 - RNA, 19 nt, Artificial Sequence
  Description of Artificial Sequence: Synthetic oligonucleotide
aaccuuaauauaacugaca

SEQ ID NO: 1113251 - RNA, 19 nt, Artificial Sequence
  Description of Artificial Sequence: Synthetic oligonucleotide
ucucugaaugauucaggca

SEQ ID NO: 1113252 - RNA, 19 nt, Artificial Sequence
  Description of Artificial Sequence: Synthetic oligonucleotide
aacuaagauaaacccuuua

SEQ ID NO: 1113253 - RNA, 19 nt, Artificial Sequence
  Description of Artificial Sequence: Synthetic oligonucleotide
aaugauucaggcagggcaa

SEQ ID NO: 1113254 - RNA, 19 nt, Artificial Sequence
  Description of Artificial Sequence: Synthetic oligonucleotide
uaucucacacaaaggagua

SEQ ID NO: 1113255 - RNA, 19 nt, Artificial Sequence
  Description of Artificial Sequence: Synthetic oligonucleotide
auaucgaaaauggacugga

SEQ ID NO: 1113256 - RNA, 19 nt, Artificial Sequence
  Description of Artificial Sequence: Synthetic oligonucleotide
aguaacuggggaguuaaca

SEQ ID NO: 1113257 - RNA, 19 nt, Artificial Sequence
  Description of Artificial Sequence: Synthetic oligonucleotide
ugguuauuaauggcucggg

SEQ ID NO: 1113258 - RNA, 19 nt, Artificial Sequence
  Description of Artificial Sequence: Synthetic oligonucleotide
auauaacugacagcccuuc

SEQ ID NO: 1113259 - RNA, 19 nt, Artificial Sequence
  Description of Artificial Sequence: Synthetic oligonucleotide
cagugacaaacgcaggugc

SEQ ID NO: 1113260 - RNA, 19 nt, Artificial Sequence
  Description of Artificial Sequence: Synthetic oligonucleotide
gggacugaccauaagagcc

SEQ ID NO: 1113261 - RNA, 19 nt, Artificial Sequence
  Description of Artificial Sequence: Synthetic oligonucleotide
cauaagagccccuuaggga

SEQ ID NO: 1113262 - RNA, 19 nt, Artificial Sequence
  Description of Artificial Sequence: Synthetic oligonucleotide
aguguaguaacuggggagu

SEQ ID NO: 1113263 - RNA, 19 nt, Artificial Sequence
  Description of Artificial Sequence: Synthetic oligonucleotide
uaacugggcagccuugagu

SEQ ID NO: 1113264 - RNA, 19 nt, Artificial Sequence
  Description of Artificial Sequence: Synthetic oligonucleotide
cuuccaauucaaccauggg

SEQ ID NO: 1113265 - RNA, 19 nt, Artificial Sequence
  Description of Artificial Sequence: Synthetic oligonucleotide
uuccguuacacagucacuc

SEQ ID NO: 1113266 - RNA, 19 nt, Artificial Sequence
  Description of Artificial Sequence: Synthetic oligonucleotide
auaaacccuuuauuuauuu

SEQ ID NO: 1113267 - RNA, 19 nt, Artificial Sequence
  Description of Artificial Sequence: Synthetic oligonucleotide
cuaggaguaggaaaaugga

SEQ ID NO: 1113268 - RNA, 19 nt, Artificial Sequence
  Description of Artificial Sequence: Synthetic oligonucleotide
agucacucgcuccgaaggg

SEQ ID NO: 1113269 - RNA, 19 nt, Artificial Sequence
  Description of Artificial Sequence: Synthetic oligonucleotide
gacaaacgcaggugcuugg

SEQ ID NO: 1113270 - RNA, 19 nt, Artificial Sequence
  Description of Artificial Sequence: Synthetic oligonucleotide
gaacuaggggagaaggaug

SEQ ID NO: 1113271 - RNA, 19 nt, Artificial Sequence
  Description of Artificial Sequence: Synthetic oligonucleotide
guggguagguaucucacac

SEQ ID NO: 1113272 - RNA, 19 nt, Artificial Sequence
  Description of Artificial Sequence: Synthetic oligonucleotide
acaaacgcaggugcuuggc

SEQ ID NO: 1113273 - RNA, 19 nt, Artificial Sequence
  Description of Artificial Sequence: Synthetic oligonucleotide
uggaaccaaggauauccug

SEQ ID NO: 1113274 - RNA, 19 nt, Artificial Sequence
  Description of Artificial Sequence: Synthetic oligonucleotide
guggccgccacuucuggcg

SEQ ID NO: 1113275 - RNA, 19 nt, Artificial Sequence
  Description of Artificial Sequence: Synthetic oligonucleotide
aacuuaaggcuaggaguag

SEQ ID NO: 1113276 - RNA, 19 nt, Artificial Sequence
  Description of Artificial Sequence: Synthetic oligonucleotide
agaacuaggggagaaggau

SEQ ID NO: 1113277 - RNA, 19 nt, Artificial Sequence
  Description of Artificial Sequence: Synthetic oligonucleotide
guaguguaguaacugggga

SEQ ID NO: 1113278 - RNA, 19 nt, Artificial Sequence
  Description of Artificial Sequence: Synthetic oligonucleotide
ucacgugaagugcaucagu

SEQ ID NO: 1113279 - RNA, 19 nt, Artificial Sequence
  Description of Artificial Sequence: Synthetic oligonucleotide
ccaacauacacacccuugg

SEQ ID NO: 1113280 - RNA, 19 nt, Artificial Sequence
  Description of Artificial Sequence: Synthetic oligonucleotide
ugacaaacgcaggugcuug

SEQ ID NO: 1113281 - RNA, 19 nt, Artificial Sequence
  Description of Artificial Sequence: Synthetic oligonucleotide
aagugcucaagcauaucga

SEQ ID NO: 1113282 - RNA, 19 nt, Artificial Sequence
  Description of Artificial Sequence: Synthetic oligonucleotide
aggaaugacccuguggcug

SEQ ID NO: 1113283 - RNA, 19 nt, Artificial Sequence
  Description of Artificial Sequence: Synthetic oligonucleotide
aauauaacugacagcccuu

SEQ ID NO: 1113284 - RNA, 19 nt, Artificial Sequence
  Description of Artificial Sequence: Synthetic oligonucleotide
ccauaagagccccuuaggg

SEQ ID NO: 1113285 - RNA, 19 nt, Artificial Sequence
  Description of Artificial Sequence: Synthetic oligonucleotide
cugauagcagggcaggguc

SEQ ID NO: 1113286 - RNA, 19 nt, Artificial Sequence
  Description of Artificial Sequence: Synthetic oligonucleotide
uuuuccucggugucccuac

SEQ ID NO: 1113287 - RNA, 19 nt, Artificial Sequence
  Description of Artificial Sequence: Synthetic oligonucleotide
aggacauauucaccacguc

SEQ ID NO: 1113288 - RNA, 19 nt, Artificial Sequence
  Description of Artificial Sequence: Synthetic oligonucleotide
agcaguuccauugaaucaa

SEQ ID NO: 1113289 - RNA, 19 nt, Artificial Sequence
  Description of Artificial Sequence: Synthetic oligonucleotide
ugcccuggaaguugaaagu

SEQ ID NO: 1113290 - RNA, 19 nt, Artificial Sequence
  Description of Artificial Sequence: Synthetic oligonucleotide
cugaaugauucaggcaggg

SEQ ID NO: 1113291 - RNA, 19 nt, Artificial Sequence
  Description of Artificial Sequence: Synthetic oligonucleotide
cuuaaggcuaggaguagga

SEQ ID NO: 1113292 - RNA, 19 nt, Artificial Sequence
  Description of Artificial Sequence: Synthetic oligonucleotide
uucacgugaagugcaucag

SEQ ID NO: 1113293 - RNA, 19 nt, Artificial Sequence
  Description of Artificial Sequence: Synthetic oligonucleotide
caauucaaccauggggacc

SEQ ID NO: 1113294 - RNA, 19 nt, Artificial Sequence
  Description of Artificial Sequence: Synthetic oligonucleotide
ucacucugacguaccagga

SEQ ID NO: 1113295 - RNA, 19 nt, Artificial Sequence
  Description of Artificial Sequence: Synthetic oligonucleotide
acgugaagugcaucaguug

SEQ ID NO: 1113296 - RNA, 19 nt, Artificial Sequence
  Description of Artificial Sequence: Synthetic oligonucleotide
acagucacucgcuccgaag

SEQ ID NO: 1113297 - RNA, 19 nt, Artificial Sequence
  Description of Artificial Sequence: Synthetic oligonucleotide
cacgucuugucucacucug

SEQ ID NO: 1113298 - RNA, 19 nt, Artificial Sequence
  Description of Artificial Sequence: Synthetic oligonucleotide
aaccaaggauauccugaga

SEQ ID NO: 1113299 - RNA, 19 nt, Artificial Sequence
  Description of Artificial Sequence: Synthetic oligonucleotide
ugaaugauucaggcagggc

SEQ ID NO: 1113300 - RNA, 19 nt, Artificial Sequence
  Description of Artificial Sequence: Synthetic oligonucleotide
ggaguacugguuauuaaug

SEQ ID NO: 1113301 - RNA, 19 nt, Artificial Sequence
  Description of Artificial Sequence: Synthetic oligonucleotide
aauucuggaggaagcaguu

SEQ ID NO: 1113302 - RNA, 19 nt, Artificial Sequence
  Description of Artificial Sequence: Synthetic oligonucleotide
agacacccaggccuucacg

SEQ ID NO: 1113303 - RNA, 19 nt, Artificial Sequence
  Description of Artificial Sequence: Synthetic oligonucleotide
guagcaucggucgcccucg

SEQ ID NO: 1113304 - RNA, 19 nt, Artificial Sequence
  Description of Artificial Sequence: Synthetic oligonucleotide
caagcauaucgaaaaugga

SEQ ID NO: 1113305 - RNA, 19 nt, Artificial Sequence
  Description of Artificial Sequence: Synthetic oligonucleotide
guuacucucgcuggguccc

SEQ ID NO: 1113306 - RNA, 19 nt, Artificial Sequence
  Description of Artificial Sequence: Synthetic oligonucleotide
aucucacacaaaggaguac

SEQ ID NO: 1113307 - RNA, 19 nt, Artificial Sequence
  Description of Artificial Sequence: Synthetic oligonucleotide
guaucucacacaaaggagu

SEQ ID NO: 1113308 - RNA, 19 nt, Artificial Sequence
  Description of Artificial Sequence: Synthetic oligonucleotide
ucugacguaccaggaagac

SEQ ID NO: 1113309 - RNA, 19 nt, Artificial Sequence
  Description of Artificial Sequence: Synthetic oligonucleotide
ccucaaugggaauucgagg

SEQ ID NO: 1113310 - RNA, 19 nt, Artificial Sequence
  Description of Artificial Sequence: Synthetic oligonucleotide
gaaggaggucccaggggcg

SEQ ID NO: 1113311 - RNA, 19 nt, Artificial Sequence
  Description of Artificial Sequence: Synthetic oligonucleotide
aagggcaccuguaguguag

SEQ ID NO: 1113312 - RNA, 19 nt, Artificial Sequence
  Description of Artificial Sequence: Synthetic oligonucleotide
gaaaggggaugaacugucc

SEQ ID NO: 1113313 - RNA, 19 nt, Artificial Sequence
  Description of Artificial Sequence: Synthetic oligonucleotide
ucacggaagauguuccguu

SEQ ID NO: 1113314 - RNA, 19 nt, Artificial Sequence
  Description of Artificial Sequence: Synthetic oligonucleotide
uugucucacucugacguac

SEQ ID NO: 1113315 - RNA, 19 nt, Artificial Sequence
  Description of Artificial Sequence: Synthetic oligonucleotide
ucgagagagcaugccgugg

SEQ ID NO: 1113316 - RNA, 19 nt, Artificial Sequence
  Description of Artificial Sequence: Synthetic oligonucleotide
cucacccuugcuuggguug

SEQ ID NO: 1113317 - RNA, 19 nt, Artificial Sequence
  Description of Artificial Sequence: Synthetic oligonucleotide
guuacacagucacucgcuc

SEQ ID NO: 1113318 - RNA, 19 nt, Artificial Sequence
  Description of Artificial Sequence: Synthetic oligonucleotide
aggcggucguuacucucgc

SEQ ID NO: 1113319 - RNA, 19 nt, Artificial Sequence
  Description of Artificial Sequence: Synthetic oligonucleotide
gggaucuguccauggaggg

SEQ ID NO: 1113320 - RNA, 19 nt, Artificial Sequence
  Description of Artificial Sequence: Synthetic oligonucleotide
uuaaggcuaggaguaggaa

SEQ ID NO: 1113321 - RNA, 19 nt, Artificial Sequence
  Description of Artificial Sequence: Synthetic oligonucleotide
gagguaauggagcccaagu

SEQ ID NO: 1113322 - RNA, 19 nt, Artificial Sequence
  Description of Artificial Sequence: Synthetic oligonucleotide
augauucaggcagggcaac

SEQ ID NO: 1113323 - RNA, 19 nt, Artificial Sequence
  Description of Artificial Sequence: Synthetic oligonucleotide
gcaccuguaguguaguaac

SEQ ID NO: 1113324 - RNA, 19 nt, Artificial Sequence
  Description of Artificial Sequence: Synthetic oligonucleotide
ucacaacuuaaggcuagga

SEQ ID NO: 1113325 - RNA, 19 nt, Artificial Sequence
  Description of Artificial Sequence: Synthetic oligonucleotide
agucgagagagcaugccgu

SEQ ID NO: 1113326 - RNA, 19 nt, Artificial Sequence
  Description of Artificial Sequence: Synthetic oligonucleotide
ucguuacucucgcuggguc

SEQ ID NO: 1113327 - RNA, 19 nt, Artificial Sequence
  Description of Artificial Sequence: Synthetic oligonucleotide
ccuuagggagguaauggag

SEQ ID NO: 1113328 - RNA, 19 nt, Artificial Sequence
  Description of Artificial Sequence: Synthetic oligonucleotide
accaacauacacacccuug

SEQ ID NO: 1113329 - RNA, 19 nt, Artificial Sequence
  Description of Artificial Sequence: Synthetic oligonucleotide
guaguaacuggggaguuaa

SEQ ID NO: 1113330 - RNA, 19 nt, Artificial Sequence
  Description of Artificial Sequence: Synthetic oligonucleotide
ggaaccaaggauauccuga

SEQ ID NO: 1113331 - RNA, 19 nt, Artificial Sequence
  Description of Artificial Sequence: Synthetic oligonucleotide
caugccguggaaccaagga

SEQ ID NO: 1113332 - RNA, 19 nt, Artificial Sequence
  Description of Artificial Sequence: Synthetic oligonucleotide
aucggucgcccucgcacac

SEQ ID NO: 1113333 - RNA, 19 nt, Artificial Sequence
  Description of Artificial Sequence: Synthetic oligonucleotide
cucuuccaauucaaccaug

SEQ ID NO: 1113334 - RNA, 19 nt, Artificial Sequence
  Description of Artificial Sequence: Synthetic oligonucleotide
ugguggccgccacuucugg

SEQ ID NO: 1113335 - RNA, 19 nt, Artificial Sequence
  Description of Artificial Sequence: Synthetic oligonucleotide
cucacaacuuaaggcuagg

SEQ ID NO: 1113336 - RNA, 19 nt, Artificial Sequence
  Description of Artificial Sequence: Synthetic oligonucleotide
aguuaacagggcucuugaa

SEQ ID NO: 1113337 - RNA, 19 nt, Artificial Sequence
  Description of Artificial Sequence: Synthetic oligonucleotide
gacugaccauaagagcccc

SEQ ID NO: 1113338 - RNA, 19 nt, Artificial Sequence
  Description of Artificial Sequence: Synthetic oligonucleotide
ggggaucuguccauggagg

SEQ ID NO: 1113339 - RNA, 19 nt, Artificial Sequence
  Description of Artificial Sequence: Synthetic oligonucleotide
gucgagagagcaugccgug

SEQ ID NO: 1113340 - RNA, 19 nt, Artificial Sequence
  Description of Artificial Sequence: Synthetic oligonucleotide
agugacaaacgcaggugcu

SEQ ID NO: 1113341 - RNA, 19 nt, Artificial Sequence
  Description of Artificial Sequence: Synthetic oligonucleotide
ggucacggaagauguuccg

SEQ ID NO: 1113342 - RNA, 19 nt, Artificial Sequence
  Description of Artificial Sequence: Synthetic oligonucleotide
gacacccaggccuucacgu

SEQ ID NO: 1113343 - RNA, 19 nt, Artificial Sequence
  Description of Artificial Sequence: Synthetic oligonucleotide
caucgggguagcaucgguc

SEQ ID NO: 1113344 - RNA, 19 nt, Artificial Sequence
  Description of Artificial Sequence: Synthetic oligonucleotide
gcucuugaaccucuacuug

SEQ ID NO: 1113345 - RNA, 19 nt, Artificial Sequence
  Description of Artificial Sequence: Synthetic oligonucleotide
ugacaagggucaggaagca

SEQ ID NO: 1113346 - RNA, 19 nt, Artificial Sequence
  Description of Artificial Sequence: Synthetic oligonucleotide
aaguccccaccagugccag

SEQ ID NO: 1113347 - RNA, 19 nt, Artificial Sequence
  Description of Artificial Sequence: Synthetic oligonucleotide
ucgggguagcaucggucgc

SEQ ID NO: 1113348 - RNA, 19 nt, Artificial Sequence
  Description of Artificial Sequence: Synthetic oligonucleotide
ggaguuaacagggcucuug

SEQ ID NO: 1113349 - RNA, 19 nt, Artificial Sequence
  Description of Artificial Sequence: Synthetic oligonucleotide
uaguaacuggggaguuaac

SEQ ID NO: 1113350 - RNA, 19 nt, Artificial Sequence
  Description of Artificial Sequence: Synthetic oligonucleotide
ggucguuacucucgcuggg

SEQ ID NO: 1113351 - RNA, 19 nt, Artificial Sequence
  Description of Artificial Sequence: Synthetic oligonucleotide
gguugaaaggggaugaacu

SEQ ID NO: 1113352 - RNA, 19 nt, Artificial Sequence
  Description of Artificial Sequence: Synthetic oligonucleotide
cuggaucccuccaccgccc

SEQ ID NO: 1113353 - RNA, 19 nt, Artificial Sequence
  Description of Artificial Sequence: Synthetic oligonucleotide
ugacggccggucugagagg

SEQ ID NO: 1113354 - RNA, 19 nt, Artificial Sequence
  Description of Artificial Sequence: Synthetic oligonucleotide
gaggacauauucaccacgu

SEQ ID NO: 1113355 - RNA, 19 nt, Artificial Sequence
  Description of Artificial Sequence: Synthetic oligonucleotide
cugggcuuaggcacuccug

SEQ ID NO: 1113356 - RNA, 19 nt, Artificial Sequence
  Description of Artificial Sequence: Synthetic oligonucleotide
aggagggacugaccauaag

SEQ ID NO: 1113357 - RNA, 19 nt, Artificial Sequence
  Description of Artificial Sequence: Synthetic oligonucleotide
ggaacuaagauaaacccuu

SEQ ID NO: 1113358 - RNA, 19 nt, Artificial Sequence
  Description of Artificial Sequence: Synthetic oligonucleotide
cucugacguaccaggaaga

SEQ ID NO: 1113359 - RNA, 19 nt, Artificial Sequence
  Description of Artificial Sequence: Synthetic oligonucleotide
uucaaccauggggaccagc

SEQ ID NO: 1113360 - RNA, 19 nt, Artificial Sequence
  Description of Artificial Sequence: Synthetic oligonucleotide
gcggucguuacucucgcug

SEQ ID NO: 1113361 - RNA, 19 nt, Artificial Sequence
  Description of Artificial Sequence: Synthetic oligonucleotide
gucacucgcuccgaagggc

SEQ ID NO: 1113362 - RNA, 19 nt, Artificial Sequence
  Description of Artificial Sequence: Synthetic oligonucleotide
aggggcggggcugauagca

SEQ ID NO: 1113363 - RNA, 19 nt, Artificial Sequence
  Description of Artificial Sequence: Synthetic oligonucleotide
ggacugaccauaagagccc

SEQ ID NO: 1113364 - RNA, 19 nt, Artificial Sequence
  Description of Artificial Sequence: Synthetic oligonucleotide
accgcccgcuuucucuuuc

SEQ ID NO: 1113365 - RNA, 19 nt, Artificial Sequence
  Description of Artificial Sequence: Synthetic oligonucleotide
ggagccuccagacuccaga

SEQ ID NO: 1113366 - RNA, 19 nt, Artificial Sequence
  Description of Artificial Sequence: Synthetic oligonucleotide
ggugucccuacccagccca

SEQ ID NO: 1113367 - RNA, 19 nt, Artificial Sequence
  Description of Artificial Sequence: Synthetic oligonucleotide
cuuaggcacuccuggaugu

SEQ ID NO: 1113368 - RNA, 19 nt, Artificial Sequence
  Description of Artificial Sequence: Synthetic oligonucleotide
aggcaucgggguagcaucg

SEQ ID NO: 1113369 - RNA, 19 nt, Artificial Sequence
  Description of Artificial Sequence: Synthetic oligonucleotide
cuccucaaugggaauucga

SEQ ID NO: 1113370 - RNA, 19 nt, Artificial Sequence
  Description of Artificial Sequence: Synthetic oligonucleotide
gcaucggucgcccucgcac

SEQ ID NO: 1113371 - RNA, 19 nt, Artificial Sequence
  Description of Artificial Sequence: Synthetic oligonucleotide
ccauugaaucaaaauggga

SEQ ID NO: 1113372 - RNA, 19 nt, Artificial Sequence
  Description of Artificial Sequence: Synthetic oligonucleotide
aggcucucugaaugauuca

SEQ ID NO: 1113373 - RNA, 19 nt, Artificial Sequence
  Description of Artificial Sequence: Synthetic oligonucleotide
gguagcaucggucgcccuc

SEQ ID NO: 1113374 - RNA, 19 nt, Artificial Sequence
  Description of Artificial Sequence: Synthetic oligonucleotide
agcacuaacugggcagccu

SEQ ID NO: 1113375 - RNA, 19 nt, Artificial Sequence
  Description of Artificial Sequence: Synthetic oligonucleotide
ccaauucaaccauggggac

SEQ ID NO: 1113376 - RNA, 19 nt, Artificial Sequence
  Description of Artificial Sequence: Synthetic oligonucleotide
guuggacccggcacugacc

SEQ ID NO: 1113377 - RNA, 19 nt, Artificial Sequence
  Description of Artificial Sequence: Synthetic oligonucleotide
caaguccccaccagugcca

SEQ ID NO: 1113378 - RNA, 19 nt, Artificial Sequence
  Description of Artificial Sequence: Synthetic oligonucleotide
gucccuacccagcccaguc

SEQ ID NO: 1113379 - RNA, 19 nt, Artificial Sequence
  Description of Artificial Sequence: Synthetic oligonucleotide
ccguuacacagucacucgc

SEQ ID NO: 1113380 - RNA, 19 nt, Artificial Sequence
  Description of Artificial Sequence: Synthetic oligonucleotide
gauaaacccuuuauuuauu

SEQ ID NO: 1113381 - RNA, 19 nt, Artificial Sequence
  Description of Artificial Sequence: Synthetic oligonucleotide
gggguaauuaguggggaga

SEQ ID NO: 1113382 - RNA, 19 nt, Artificial Sequence
  Description of Artificial Sequence: Synthetic oligonucleotide
uuaggcacuccuggauguc

SEQ ID NO: 1113383 - RNA, 19 nt, Artificial Sequence
  Description of Artificial Sequence: Synthetic oligonucleotide
gucucacucugacguacca

SEQ ID NO: 1113384 - RNA, 19 nt, Artificial Sequence
  Description of Artificial Sequence: Synthetic oligonucleotide
cuacccagcccagucucac

SEQ ID NO: 1113385 - RNA, 19 nt, Artificial Sequence
  Description of Artificial Sequence: Synthetic oligonucleotide
uacccagcccagucucaca

SEQ ID NO: 1113386 - RNA, 19 nt, Artificial Sequence
  Description of Artificial Sequence: Synthetic oligonucleotide
ggagguaauggagcccaag

SEQ ID NO: 1113387 - RNA, 19 nt, Artificial Sequence
  Description of Artificial Sequence: Synthetic oligonucleotide
gguggguagguaucucaca

SEQ ID NO: 1113388 - RNA, 19 nt, Artificial Sequence
  Description of Artificial Sequence: Synthetic oligonucleotide
aggcacuccuggaugucag

SEQ ID NO: 1113389 - RNA, 19 nt, Artificial Sequence
  Description of Artificial Sequence: Synthetic oligonucleotide
acccuugcuuggguugggg

SEQ ID NO: 1113390 - RNA, 19 nt, Artificial Sequence
  Description of Artificial Sequence: Synthetic oligonucleotide
cugacguaccaggaagaca

SEQ ID NO: 1113391 - RNA, 19 nt, Artificial Sequence
  Description of Artificial Sequence: Synthetic oligonucleotide
gucucacaacuuaaggcua

SEQ ID NO: 1113392 - RNA, 19 nt, Artificial Sequence
  Description of Artificial Sequence: Synthetic oligonucleotide
caucggucgcccucgcaca

SEQ ID NO: 1113393 - RNA, 19 nt, Artificial Sequence
  Description of Artificial Sequence: Synthetic oligonucleotide
cacgugaagugcaucaguu

SEQ ID NO: 1113394 - RNA, 19 nt, Artificial Sequence
  Description of Artificial Sequence: Synthetic oligonucleotide
acuaggggagaaggaugcu

SEQ ID NO: 1113395 - RNA, 19 nt, Artificial Sequence
  Description of Artificial Sequence: Synthetic oligonucleotide
cguuacucucgcugggucc

SEQ ID NO: 1113396 - RNA, 19 nt, Artificial Sequence
  Description of Artificial Sequence: Synthetic oligonucleotide
cacucugacguaccaggaa

SEQ ID NO: 1113397 - RNA, 19 nt, Artificial Sequence
  Description of Artificial Sequence: Synthetic oligonucleotide
ucgcccucgcacaccccug

SEQ ID NO: 1113398 - RNA, 19 nt, Artificial Sequence
  Description of Artificial Sequence: Synthetic oligonucleotide
gugcucaagcauaucgaaa

SEQ ID NO: 1113399 - RNA, 19 nt, Artificial Sequence
  Description of Artificial Sequence: Synthetic oligonucleotide
ccacccugagccucagugc

SEQ ID NO: 1113400 - RNA, 19 nt, Artificial Sequence
  Description of Artificial Sequence: Synthetic oligonucleotide
cacggaagauguuccguua

SEQ ID NO: 1113401 - RNA, 19 nt, Artificial Sequence
  Description of Artificial Sequence: Synthetic oligonucleotide
cuugucucacucugacgua

SEQ ID NO: 1113402 - RNA, 19 nt, Artificial Sequence
  Description of Artificial Sequence: Synthetic oligonucleotide
uacucucgcugggucccag

SEQ ID NO: 1113403 - RNA, 19 nt, Artificial Sequence
  Description of Artificial Sequence: Synthetic oligonucleotide
cggucguuacucucgcugg

SEQ ID NO: 1113404 - RNA, 19 nt, Artificial Sequence
  Description of Artificial Sequence: Synthetic oligonucleotide
cuggggaguuaacagggcu

SEQ ID NO: 1113405 - RNA, 19 nt, Artificial Sequence
  Description of Artificial Sequence: Synthetic oligonucleotide
ccagcacuaacugggcagc

SEQ ID NO: 1113406 - RNA, 19 nt, Artificial Sequence
  Description of Artificial Sequence: Synthetic oligonucleotide
cagcacuaacugggcagcc

SEQ ID NO: 1113407 - RNA, 19 nt, Artificial Sequence
  Description of Artificial Sequence: Synthetic oligonucleotide
uagcaucggucgcccucgc

SEQ ID NO: 1113408 - RNA, 19 nt, Artificial Sequence
  Description of Artificial Sequence: Synthetic oligonucleotide
agcaucggucgcccucgca

SEQ ID NO: 1113409 - RNA, 19 nt, Artificial Sequence
  Description of Artificial Sequence: Synthetic oligonucleotide
uuacucucgcuggguccca

SEQ ID NO: 1113410 - RNA, 19 nt, Artificial Sequence
  Description of Artificial Sequence: Synthetic oligonucleotide
gguggccgccacuucuggc

SEQ ID NO: 1113411 - RNA, 19 nt, Artificial Sequence
  Description of Artificial Sequence: Synthetic oligonucleotide
cacugacccuccucauuca

SEQ ID NO: 1113412 - RNA, 19 nt, Artificial Sequence
  Description of Artificial Sequence: Synthetic oligonucleotide
gggcucuugaaccucuacu

SEQ ID NO: 1113413 - RNA, 19 nt, Artificial Sequence
  Description of Artificial Sequence: Synthetic oligonucleotide
acgucuugucucacucuga

SEQ ID NO: 1113414 - RNA, 19 nt, Artificial Sequence
  Description of Artificial Sequence: Synthetic oligonucleotide
aaugacccuguggcugcuu

SEQ ID NO: 1113415 - RNA, 19 nt, Artificial Sequence
  Description of Artificial Sequence: Synthetic oligonucleotide
guaccaacauacacacccu

SEQ ID NO: 1113416 - RNA, 19 nt, Artificial Sequence
  Description of Artificial Sequence: Synthetic oligonucleotide
ucggucgcccucgcacacc

SEQ ID NO: 1113417 - RNA, 19 nt, Artificial Sequence
  Description of Artificial Sequence: Synthetic oligonucleotide
ucaccacgucuugucucac

SEQ ID NO: 1113418 - RNA, 19 nt, Artificial Sequence
  Description of Artificial Sequence: Synthetic oligonucleotide
cccuuagggagguaaugga

SEQ ID NO: 1113419 - RNA, 19 nt, Artificial Sequence
  Description of Artificial Sequence: Synthetic oligonucleotide
acugaccauaagagccccu

SEQ ID NO: 1113420 - RNA, 19 nt, Artificial Sequence
  Description of Artificial Sequence: Synthetic oligonucleotide
ccucggugucccuacccag

SEQ ID NO: 1113421 - RNA, 19 nt, Artificial Sequence
  Description of Artificial Sequence: Synthetic oligonucleotide
gcaccauuagggacacccc

SEQ ID NO: 1113422 - RNA, 19 nt, Artificial Sequence
  Description of Artificial Sequence: Synthetic oligonucleotide
gacaggcggucguuacucu

SEQ ID NO: 1113423 - RNA, 19 nt, Artificial Sequence
  Description of Artificial Sequence: Synthetic oligonucleotide
ggcaucgggguagcaucgg

SEQ ID NO: 1113424 - RNA, 19 nt, Artificial Sequence
  Description of Artificial Sequence: Synthetic oligonucleotide
auagcagggcaggguccug

SEQ ID NO: 1113425 - RNA, 19 nt, Artificial Sequence
  Description of Artificial Sequence: Synthetic oligonucleotide
auucaaccauggggaccag

SEQ ID NO: 1113426 - RNA, 19 nt, Artificial Sequence
  Description of Artificial Sequence: Synthetic oligonucleotide
caggaaugacccuguggcu

SEQ ID NO: 1113427 - RNA, 19 nt, Artificial Sequence
  Description of Artificial Sequence: Synthetic oligonucleotide
uggacccggcacugacccu

SEQ ID NO: 1113428 - RNA, 19 nt, Artificial Sequence
  Description of Artificial Sequence: Synthetic oligonucleotide
cagggcaacuccaggcugu

SEQ ID NO: 1113429 - RNA, 19 nt, Artificial Sequence
  Description of Artificial Sequence: Synthetic oligonucleotide
gucgcccucgcacaccccu

SEQ ID NO: 1113430 - RNA, 19 nt, Artificial Sequence
  Description of Artificial Sequence: Synthetic oligonucleotide
cacccuugcuuggguuggg

SEQ ID NO: 1113431 - RNA, 19 nt, Artificial Sequence
  Description of Artificial Sequence: Synthetic oligonucleotide
ggacccggcacugacccuc

SEQ ID NO: 1113432 - RNA, 19 nt, Artificial Sequence
  Description of Artificial Sequence: Synthetic oligonucleotide
ccggaagugcucaagcaua

SEQ ID NO: 1113433 - RNA, 19 nt, Artificial Sequence
  Description of Artificial Sequence: Synthetic oligonucleotide
gggguagcaucggucgccc

SEQ ID NO: 1113434 - RNA, 19 nt, Artificial Sequence
  Description of Artificial Sequence: Synthetic oligonucleotide
auguuggacccggcacuga

SEQ ID NO: 1113435 - RNA, 19 nt, Artificial Sequence
  Description of Artificial Sequence: Synthetic oligonucleotide
gggcuuaggcacuccugga

SEQ ID NO: 1113436 - RNA, 19 nt, Artificial Sequence
  Description of Artificial Sequence: Synthetic oligonucleotide
ggaugcacccggaagugcu

SEQ ID NO: 1113437 - RNA, 19 nt, Artificial Sequence
  Description of Artificial Sequence: Synthetic oligonucleotide
cccuacccagcccagucuc

SEQ ID NO: 1113438 - RNA, 19 nt, Artificial Sequence
  Description of Artificial Sequence: Synthetic oligonucleotide
cucgcuccgaagggcagga

SEQ ID NO: 1113439 - RNA, 19 nt, Artificial Sequence
  Description of Artificial Sequence: Synthetic oligonucleotide
gccccuuagggagguaaug

SEQ ID NO: 1113440 - RNA, 19 nt, Artificial Sequence
  Description of Artificial Sequence: Synthetic oligonucleotide
guuccguuacacagucacu

SEQ ID NO: 1113441 - RNA, 19 nt, Artificial Sequence
  Description of Artificial Sequence: Synthetic oligonucleotide
ucgcuccgaagggcaggag

SEQ ID NO: 1113442 - RNA, 19 nt, Artificial Sequence
  Description of Artificial Sequence: Synthetic oligonucleotide
ggaugggaugcacccggaa

SEQ ID NO: 1113443 - RNA, 19 nt, Artificial Sequence
  Description of Artificial Sequence: Synthetic oligonucleotide
gguaauuaguggggagaua

SEQ ID NO: 1113444 - RNA, 19 nt, Artificial Sequence
  Description of Artificial Sequence: Synthetic oligonucleotide
gucguuacucucgcugggu

SEQ ID NO: 1113445 - RNA, 19 nt, Artificial Sequence
  Description of Artificial Sequence: Synthetic oligonucleotide
ggguaauuaguggggagau

SEQ ID NO: 1113446 - RNA, 19 nt, Artificial Sequence
  Description of Artificial Sequence: Synthetic oligonucleotide
ggcuuaggcacuccuggau

SEQ ID NO: 1113447 - RNA, 19 nt, Artificial Sequence
  Description of Artificial Sequence: Synthetic oligonucleotide
agccccuuagggagguaau

SEQ ID NO: 1113448 - RNA, 19 nt, Artificial Sequence
  Description of Artificial Sequence: Synthetic oligonucleotide
caguugucuccagaaugua

SEQ ID NO: 1113449 - RNA, 19 nt, Artificial Sequence
  Description of Artificial Sequence: Synthetic oligonucleotide
cccuccucaaugggaauuc

SEQ ID NO: 1113450 - RNA, 19 nt, Artificial Sequence
  Description of Artificial Sequence: Synthetic oligonucleotide
gcucaagcauaucgaaaau

SEQ ID NO: 1113451 - RNA, 19 nt, Artificial Sequence
  Description of Artificial Sequence: Synthetic oligonucleotide
cugaccauaagagccccuu

SEQ ID NO: 1113452 - RNA, 19 nt, Artificial Sequence
  Description of Artificial Sequence: Synthetic oligonucleotide
ccccaaggagggacugacc

SEQ ID NO: 1113453 - RNA, 19 nt, Artificial Sequence
  Description of Artificial Sequence: Synthetic oligonucleotide
gcugauagcagggcagggu

SEQ ID NO: 1113454 - RNA, 19 nt, Artificial Sequence
  Description of Artificial Sequence: Synthetic oligonucleotide
ggcacuccuggaugucaga

SEQ ID NO: 1113455 - RNA, 19 nt, Artificial Sequence
  Description of Artificial Sequence: Synthetic oligonucleotide
ggccccuccucaaugggaa

SEQ ID NO: 1113456 - RNA, 19 nt, Artificial Sequence
  Description of Artificial Sequence: Synthetic oligonucleotide
gcacuaacugggcagccuu

SEQ ID NO: 1113457 - RNA, 19 nt, Artificial Sequence
  Description of Artificial Sequence: Synthetic oligonucleotide
gcaagggcaccuguagugu

SEQ ID NO: 1113458 - RNA, 19 nt, Artificial Sequence
  Description of Artificial Sequence: Synthetic oligonucleotide
cccuagugguagcugcuga

SEQ ID NO: 1113459 - RNA, 19 nt, Artificial Sequence
  Description of Artificial Sequence: Synthetic oligonucleotide
cgacaggcggucguuacuc

SEQ ID NO: 1113460 - RNA, 19 nt, Artificial Sequence
  Description of Artificial Sequence: Synthetic oligonucleotide
gaaugacccuguggcugcu

SEQ ID NO: 1113461 - RNA, 19 nt, Artificial Sequence
  Description of Artificial Sequence: Synthetic oligonucleotide
ggaggguggguagguaucu

SEQ ID NO: 1113462 - RNA, 19 nt, Artificial Sequence
  Description of Artificial Sequence: Synthetic oligonucleotide
cgggguagcaucggucgcc

SEQ ID NO: 1113463 - RNA, 19 nt, Artificial Sequence
  Description of Artificial Sequence: Synthetic oligonucleotide
gggcaagggcaccuguagu

SEQ ID NO: 1113464 - RNA, 19 nt, Artificial Sequence
  Description of Artificial Sequence: Synthetic oligonucleotide
ggaggcaucgggguagcau

SEQ ID NO: 1113465 - RNA, 19 nt, Artificial Sequence
  Description of Artificial Sequence: Synthetic oligonucleotide
ccccucacccuugcuuggg

SEQ ID NO: 1113466 - RNA, 19 nt, Artificial Sequence
  Description of Artificial Sequence: Synthetic oligonucleotide
ggauauccugagaggggcu

SEQ ID NO: 1113467 - RNA, 19 nt, Artificial Sequence
  Description of Artificial Sequence: Synthetic oligonucleotide
gcggggcugauagcagggc

SEQ ID NO: 1113468 - RNA, 19 nt, Artificial Sequence
  Description of Artificial Sequence: Synthetic oligonucleotide
ccuacccagcccagucuca

SEQ ID NO: 1113469 - RNA, 19 nt, Artificial Sequence
  Description of Artificial Sequence: Synthetic oligonucleotide
gccgccacuucuggcgccc

SEQ ID NO: 1113470 - RNA, 19 nt, Artificial Sequence
  Description of Artificial Sequence: Synthetic oligonucleotide
gggguugaaaggggaugaa

SEQ ID NO: 1113471 - RNA, 19 nt, Artificial Sequence
  Description of Artificial Sequence: Synthetic oligonucleotide
ccccuagugguagcugcug

SEQ ID NO: 1113472 - RNA, 19 nt, Artificial Sequence
  Description of Artificial Sequence: Synthetic oligonucleotide
ccuuggccuggggcaaggg

SEQ ID NO: 1113473 - RNA, 19 nt, Artificial Sequence
  Description of Artificial Sequence: Synthetic oligonucleotide
gcaucgggguagcaucggu

SEQ ID NO: 1113474 - RNA, 19 nt, Artificial Sequence
  Description of Artificial Sequence: Synthetic oligonucleotide
ggcacugacccuccucauu

SEQ ID NO: 1113475 - RNA, 19 nt, Artificial Sequence
  Description of Artificial Sequence: Synthetic oligonucleotide
cccggcacugacccuccuc

SEQ ID NO: 1113476 - RNA, 19 nt, Artificial Sequence
  Description of Artificial Sequence: Synthetic oligonucleotide
ggccggucugagaggcccc

SEQ ID NO: 1113477 - RNA, 19 nt, Artificial Sequence
  Description of Artificial Sequence: Synthetic oligonucleotide
gcgacaggcggucguuacu

SEQ ID NO: 1113478 - RNA, 19 nt, Artificial Sequence
  Description of Artificial Sequence: Synthetic oligonucleotide
cgcccucgcacaccccugc

SEQ ID NO: 1113479 - RNA, 19 nt, Artificial Sequence
  Description of Artificial Sequence: Synthetic oligonucleotide
gggcaccuguaguguagua

SEQ ID NO: 1113480 - RNA, 19 nt, Artificial Sequence
  Description of Artificial Sequence: Synthetic oligonucleotide
ccuugagucgagagagcau

SEQ ID NO: 1113481 - RNA, 19 nt, Artificial Sequence
  Description of Artificial Sequence: Synthetic oligonucleotide
cggggcugauagcagggca

SEQ ID NO: 1113482 - RNA, 19 nt, Artificial Sequence
  Description of Artificial Sequence: Synthetic oligonucleotide
cugcgacaggcggucguua

SEQ ID NO: 1113483 - RNA, 19 nt, Artificial Sequence
  Description of Artificial Sequence: Synthetic oligonucleotide
ccacgucuugucucacucu

SEQ ID NO: 1113484 - RNA, 19 nt, Artificial Sequence
  Description of Artificial Sequence: Synthetic oligonucleotide
gcccucgcacaccccugca

SEQ ID NO: 1113485 - RNA, 19 nt, Artificial Sequence
  Description of Artificial Sequence: Synthetic oligonucleotide
ccguggaaccaaggauauc

SEQ ID NO: 1113486 - RNA, 19 nt, Artificial Sequence
  Description of Artificial Sequence: Synthetic oligonucleotide
ggcugucuauguuguccuu

SEQ ID NO: 1113487 - RNA, 19 nt, Artificial Sequence
  Description of Artificial Sequence: Synthetic oligonucleotide
ggcggucguuacucucgcu

SEQ ID NO: 1113488 - RNA, 19 nt, Artificial Sequence
  Description of Artificial Sequence: Synthetic oligonucleotide
cgcccgcuuucucuuucuc

SEQ ID NO: 1113489 - RNA, 19 nt, Artificial Sequence
  Description of Artificial Sequence: Synthetic oligonucleotide
ggcucccauuuuccucggu

SEQ ID NO: 1113490 - RNA, 19 nt, Artificial Sequence
  Description of Artificial Sequence: Synthetic oligonucleotide
ggguagcaucggucgcccu

SEQ ID NO: 1113491 - RNA, 19 nt, Artificial Sequence
  Description of Artificial Sequence: Synthetic oligonucleotide
ccccugcgacaggcggucg

SEQ ID NO: 1113492 - RNA, 19 nt, Artificial Sequence
  Description of Artificial Sequence: Synthetic oligonucleotide
ccucacccuugcuuggguu

SEQ ID NO: 1113493 - RNA, 19 nt, Artificial Sequence
  Description of Artificial Sequence: Synthetic oligonucleotide
gggaguuaacagggcucuu

SEQ ID NO: 1113494 - RNA, 19 nt, Artificial Sequence
  Description of Artificial Sequence: Synthetic oligonucleotide
cccucacccuugcuugggu

SEQ ID NO: 1113495 - RNA, 19 nt, Artificial Sequence
  Description of Artificial Sequence: Synthetic oligonucleotide
gccccuccucaaugggaau

SEQ ID NO: 1113496 - RNA, 19 nt, Artificial Sequence
  Description of Artificial Sequence: Synthetic oligonucleotide
cccugcgacaggcggucgu

SEQ ID NO: 1113497 - RNA, 19 nt, Artificial Sequence
  Description of Artificial Sequence: Synthetic oligonucleotide
caccgcccgcuuucucuuu

SEQ ID NO: 1113498 - RNA, 19 nt, Artificial Sequence
  Description of Artificial Sequence: Synthetic oligonucleotide
ccaccgcccgcuuucucuu

SEQ ID NO: 1113499 - RNA, 19 nt, Artificial Sequence
  Description of Artificial Sequence: Synthetic oligonucleotide
ccccuccucaaugggaauu

SEQ ID NO: 1113500 - RNA, 19 nt, Artificial Sequence
  Description of Artificial Sequence: Synthetic oligonucleotide
cccucgcacaccccugcau

SEQ ID NO: 1113501 - RNA, 19 nt, Artificial Sequence
  Description of Artificial Sequence: Synthetic oligonucleotide
ccgcccgcuuucucuuucu

SEQ ID NO: 1113502 - RNA, 19 nt, Artificial Sequence
  Description of Artificial Sequence: Synthetic oligonucleotide
ccugcgacaggcggucguu

SEQ ID NO: 1113503 - RNA, 19 nt, Artificial Sequence
  Description of Artificial Sequence: Synthetic oligonucleotide
auuacaauaguccauuccc

SEQ ID NO: 1113504 - RNA, 19 nt, Artificial Sequence
  Description of Artificial Sequence: Synthetic oligonucleotide
uuauaaaccuaauauagca

SEQ ID NO: 1113505 - RNA, 19 nt, Artificial Sequence
  Description of Artificial Sequence: Synthetic oligonucleotide
aaccuaauauagcaaagac

SEQ ID NO: 1113506 - RNA, 19 nt, Artificial Sequence
  Description of Artificial Sequence: Synthetic oligonucleotide
aaaauaugcgcaccuuccc

SEQ ID NO: 1113507 - RNA, 19 nt, Artificial Sequence
  Description of Artificial Sequence: Synthetic oligonucleotide
uaaauuauuccccaacuca

SEQ ID NO: 1113508 - RNA, 19 nt, Artificial Sequence
  Description of Artificial Sequence: Synthetic oligonucleotide
aaauaugcgcaccuucccc

SEQ ID NO: 1113509 - RNA, 19 nt, Artificial Sequence
  Description of Artificial Sequence: Synthetic oligonucleotide
uuugguucuacguugcugg

SEQ ID NO: 1113510 - RNA, 19 nt, Artificial Sequence
  Description of Artificial Sequence: Synthetic oligonucleotide
aacuaaauauugccagugc

SEQ ID NO: 1113511 - RNA, 19 nt, Artificial Sequence
  Description of Artificial Sequence: Synthetic oligonucleotide
uaaagucacacaaucgagg

SEQ ID NO: 1113512 - RNA, 19 nt, Artificial Sequence
  Description of Artificial Sequence: Synthetic oligonucleotide
cuaaauaucacaguccagg

SEQ ID NO: 1113513 - RNA, 19 nt, Artificial Sequence
  Description of Artificial Sequence: Synthetic oligonucleotide
uuugcauauaccgagaaca

SEQ ID NO: 1113514 - RNA, 19 nt, Artificial Sequence
  Description of Artificial Sequence: Synthetic oligonucleotide
agauuuguccagcuuagcc

SEQ ID NO: 1113515 - RNA, 19 nt, Artificial Sequence
  Description of Artificial Sequence: Synthetic oligonucleotide
acuaaauauugccagugcg

SEQ ID NO: 1113516 - RNA, 19 nt, Artificial Sequence
  Description of Artificial Sequence: Synthetic oligonucleotide
aaagcaugucccuauaugu

SEQ ID NO: 1113517 - RNA, 19 nt, Artificial Sequence
  Description of Artificial Sequence: Synthetic oligonucleotide
aaauuauuccccaacucac

SEQ ID NO: 1113518 - RNA, 19 nt, Artificial Sequence
  Description of Artificial Sequence: Synthetic oligonucleotide
ucucaaacaugaaacgccg

SEQ ID NO: 1113519 - RNA, 19 nt, Artificial Sequence
  Description of Artificial Sequence: Synthetic oligonucleotide
uguguuaacaaacgguaug

SEQ ID NO: 1113520 - RNA, 19 nt, Artificial Sequence
  Description of Artificial Sequence: Synthetic oligonucleotide
aaagucacacaaucgagga

SEQ ID NO: 1113521 - RNA, 19 nt, Artificial Sequence
  Description of Artificial Sequence: Synthetic oligonucleotide
auaaaggcucuacaucucc

SEQ ID NO: 1113522 - RNA, 19 nt, Artificial Sequence
  Description of Artificial Sequence: Synthetic oligonucleotide
aaaacuaaauauugccagu

SEQ ID NO: 1113523 - RNA, 19 nt, Artificial Sequence
  Description of Artificial Sequence: Synthetic oligonucleotide
aagaguguccacauacucc

SEQ ID NO: 1113524 - RNA, 19 nt, Artificial Sequence
  Description of Artificial Sequence: Synthetic oligonucleotide
uuugguaggacgcuugucu

SEQ ID NO: 1113525 - RNA, 19 nt, Artificial Sequence
  Description of Artificial Sequence: Synthetic oligonucleotide
aacuuuguaagcucucgug

SEQ ID NO: 1113526 - RNA, 19 nt, Artificial Sequence
  Description of Artificial Sequence: Synthetic oligonucleotide
aauauugccagugcgauuu

SEQ ID NO: 1113527 - RNA, 19 nt, Artificial Sequence
  Description of Artificial Sequence: Synthetic oligonucleotide
aaacuaaauauugccagug

SEQ ID NO: 1113528 - RNA, 19 nt, Artificial Sequence
  Description of Artificial Sequence: Synthetic oligonucleotide
aaacgguauguacacuggg

SEQ ID NO: 1113529 - RNA, 19 nt, Artificial Sequence
  Description of Artificial Sequence: Synthetic oligonucleotide
aguaacaacguggaagugg

SEQ ID NO: 1113530 - RNA, 19 nt, Artificial Sequence
  Description of Artificial Sequence: Synthetic oligonucleotide
uauaaaccuaauauagcaa

SEQ ID NO: 1113531 - RNA, 19 nt, Artificial Sequence
  Description of Artificial Sequence: Synthetic oligonucleotide
acaaacgguauguacacug

SEQ ID NO: 1113532 - RNA, 19 nt, Artificial Sequence
  Description of Artificial Sequence: Synthetic oligonucleotide
aaucagacgcucguuuacc

SEQ ID NO: 1113533 - RNA, 19 nt, Artificial Sequence
  Description of Artificial Sequence: Synthetic oligonucleotide
uugaucauguccacuucgg

SEQ ID NO: 1113534 - RNA, 19 nt, Artificial Sequence
  Description of Artificial Sequence: Synthetic oligonucleotide
agcaugucccuauaugugg

SEQ ID NO: 1113535 - RNA, 19 nt, Artificial Sequence
  Description of Artificial Sequence: Synthetic oligonucleotide
aaauaucacaguccaggcu

SEQ ID NO: 1113536 - RNA, 19 nt, Artificial Sequence
  Description of Artificial Sequence: Synthetic oligonucleotide
ugacaucucucaaacuccg

SEQ ID NO: 1113537 - RNA, 19 nt, Artificial Sequence
  Description of Artificial Sequence: Synthetic oligonucleotide
gauguugugacaucucuca

SEQ ID NO: 1113538 - RNA, 19 nt, Artificial Sequence
  Description of Artificial Sequence: Synthetic oligonucleotide
aacccuugaaccacugugc

SEQ ID NO: 1113539 - RNA, 19 nt, Artificial Sequence
  Description of Artificial Sequence: Synthetic oligonucleotide
ugucaucgaggaaagcccg

SEQ ID NO: 1113540 - RNA, 19 nt, Artificial Sequence
  Description of Artificial Sequence: Synthetic oligonucleotide
ucuuuaaucagacgcucgu

SEQ ID NO: 1113541 - RNA, 19 nt, Artificial Sequence
  Description of Artificial Sequence: Synthetic oligonucleotide
uccacgaauugccugaaga

SEQ ID NO: 1113542 - RNA, 19 nt, Artificial Sequence
  Description of Artificial Sequence: Synthetic oligonucleotide
acaauaguccauucccuuc

SEQ ID NO: 1113543 - RNA, 19 nt, Artificial Sequence
  Description of Artificial Sequence: Synthetic oligonucleotide
guuuaauuauagcagggca

SEQ ID NO: 1113544 - RNA, 19 nt, Artificial Sequence
  Description of Artificial Sequence: Synthetic oligonucleotide
uauaccgagaacagcacaa

SEQ ID NO: 1113545 - RNA, 19 nt, Artificial Sequence
  Description of Artificial Sequence: Synthetic oligonucleotide
guaacaacguggaaguggg

SEQ ID NO: 1113546 - RNA, 19 nt, Artificial Sequence
  Description of Artificial Sequence: Synthetic oligonucleotide
ugcaugaugccagagagcu

SEQ ID NO: 1113547 - RNA, 19 nt, Artificial Sequence
  Description of Artificial Sequence: Synthetic oligonucleotide
acaaucgaggaugagcugg

SEQ ID NO: 1113548 - RNA, 19 nt, Artificial Sequence
  Description of Artificial Sequence: Synthetic oligonucleotide
acaucucucaaacuccguc

SEQ ID NO: 1113549 - RNA, 19 nt, Artificial Sequence
  Description of Artificial Sequence: Synthetic oligonucleotide
uuagggcucaccaaucaca

SEQ ID NO: 1113550 - RNA, 19 nt, Artificial Sequence
  Description of Artificial Sequence: Synthetic oligonucleotide
gagguaaagucacacaauc

SEQ ID NO: 1113551 - RNA, 19 nt, Artificial Sequence
  Description of Artificial Sequence: Synthetic oligonucleotide
acaaggcaugaauauaaag

SEQ ID NO: 1113552 - RNA, 19 nt, Artificial Sequence
  Description of Artificial Sequence: Synthetic oligonucleotide
uugucaggguaucuuuucg

SEQ ID NO: 1113553 - RNA, 19 nt, Artificial Sequence
  Description of Artificial Sequence: Synthetic oligonucleotide
uaacaaacgguauguacac

SEQ ID NO: 1113554 - RNA, 19 nt, Artificial Sequence
  Description of Artificial Sequence: Synthetic oligonucleotide
uugaccugaacgcucacac

SEQ ID NO: 1113555 - RNA, 19 nt, Artificial Sequence
  Description of Artificial Sequence: Synthetic oligonucleotide
uaauauagcaaagacugua

SEQ ID NO: 1113556 - RNA, 19 nt, Artificial Sequence
  Description of Artificial Sequence: Synthetic oligonucleotide
uugcauauaccgagaacag

SEQ ID NO: 1113557 - RNA, 19 nt, Artificial Sequence
  Description of Artificial Sequence: Synthetic oligonucleotide
ugaacgcucacacugcccu

SEQ ID NO: 1113558 - RNA, 19 nt, Artificial Sequence
  Description of Artificial Sequence: Synthetic oligonucleotide
aauuauagcagggcaguga

SEQ ID NO: 1113559 - RNA, 19 nt, Artificial Sequence
  Description of Artificial Sequence: Synthetic oligonucleotide
caagccuccacgaauugcc

SEQ ID NO: 1113560 - RNA, 19 nt, Artificial Sequence
  Description of Artificial Sequence: Synthetic oligonucleotide
uggguucuagucuuagcgg

SEQ ID NO: 1113561 - RNA, 19 nt, Artificial Sequence
  Description of Artificial Sequence: Synthetic oligonucleotide
aaacgccggauguugugac

SEQ ID NO: 1113562 - RNA, 19 nt, Artificial Sequence
  Description of Artificial Sequence: Synthetic oligonucleotide
uccacuucggcugaggagc

SEQ ID NO: 1113563 - RNA, 19 nt, Artificial Sequence
  Description of Artificial Sequence: Synthetic oligonucleotide
uuuguaagcucucgugucu

SEQ ID NO: 1113564 - RNA, 19 nt, Artificial Sequence
  Description of Artificial Sequence: Synthetic oligonucleotide
acuuuguaagcucucgugu

SEQ ID NO: 1113565 - RNA, 19 nt, Artificial Sequence
  Description of Artificial Sequence: Synthetic oligonucleotide
uuaagagaugaggaaaacu

SEQ ID NO: 1113566 - RNA, 19 nt, Artificial Sequence
  Description of Artificial Sequence: Synthetic oligonucleotide
ccugaauggagcaaggagg

SEQ ID NO: 1113567 - RNA, 19 nt, Artificial Sequence
  Description of Artificial Sequence: Synthetic oligonucleotide
cuagucuuagcggagugcg

SEQ ID NO: 1113568 - RNA, 19 nt, Artificial Sequence
  Description of Artificial Sequence: Synthetic oligonucleotide
aguggccacaguaacaacg

SEQ ID NO: 1113569 - RNA, 19 nt, Artificial Sequence
  Description of Artificial Sequence: Synthetic oligonucleotide
aagauguguagggaguuug

SEQ ID NO: 1113570 - RNA, 19 nt, Artificial Sequence
  Description of Artificial Sequence: Synthetic oligonucleotide
aauauagcaaagacuguau

SEQ ID NO: 1113571 - RNA, 19 nt, Artificial Sequence
  Description of Artificial Sequence: Synthetic oligonucleotide
ucaugcaugaugccagaga

SEQ ID NO: 1113572 - RNA, 19 nt, Artificial Sequence
  Description of Artificial Sequence: Synthetic oligonucleotide
uacaugacgggaauccgcu

SEQ ID NO: 1113573 - RNA, 19 nt, Artificial Sequence
  Description of Artificial Sequence: Synthetic oligonucleotide
uggcaaaaggaugaaaagu

SEQ ID NO: 1113574 - RNA, 19 nt, Artificial Sequence
  Description of Artificial Sequence: Synthetic oligonucleotide
uaaauauugccagugcgau

SEQ ID NO: 1113575 - RNA, 19 nt, Artificial Sequence
  Description of Artificial Sequence: Synthetic oligonucleotide
caaacgguauguacacugg

SEQ ID NO: 1113576 - RNA, 19 nt, Artificial Sequence
  Description of Artificial Sequence: Synthetic oligonucleotide
gaggcuguguuaacaaacg

SEQ ID NO: 1113577 - RNA, 19 nt, Artificial Sequence
  Description of Artificial Sequence: Synthetic oligonucleotide
ucuacguugcuggacuagg

SEQ ID NO: 1113578 - RNA, 19 nt, Artificial Sequence
  Description of Artificial Sequence: Synthetic oligonucleotide
cuggacuaggcuuaggcuc

SEQ ID NO: 1113579 - RNA, 19 nt, Artificial Sequence
  Description of Artificial Sequence: Synthetic oligonucleotide
uaaucagacgcucguuuac

SEQ ID NO: 1113580 - RNA, 19 nt, Artificial Sequence
  Description of Artificial Sequence: Synthetic oligonucleotide
aagcucucgugucuccaac

SEQ ID NO: 1113581 - RNA, 19 nt, Artificial Sequence
  Description of Artificial Sequence: Synthetic oligonucleotide
cacacaaucgaggaugagc

SEQ ID NO: 1113582 - RNA, 19 nt, Artificial Sequence
  Description of Artificial Sequence: Synthetic oligonucleotide
ugcaguuugagcugcaguu

SEQ ID NO: 1113583 - RNA, 19 nt, Artificial Sequence
  Description of Artificial Sequence: Synthetic oligonucleotide
cauacuccaccauuuuggc

SEQ ID NO: 1113584 - RNA, 19 nt, Artificial Sequence
  Description of Artificial Sequence: Synthetic oligonucleotide
ugugucagaaauguagaaa

SEQ ID NO: 1113585 - RNA, 19 nt, Artificial Sequence
  Description of Artificial Sequence: Synthetic oligonucleotide
acuccuauaaaaucugcua

SEQ ID NO: 1113586 - RNA, 19 nt, Artificial Sequence
  Description of Artificial Sequence: Synthetic oligonucleotide
uguuugcauauaccgagaa

SEQ ID NO: 1113587 - RNA, 19 nt, Artificial Sequence
  Description of Artificial Sequence: Synthetic oligonucleotide
caacccuugaaccacugug

SEQ ID NO: 1113588 - RNA, 19 nt, Artificial Sequence
  Description of Artificial Sequence: Synthetic oligonucleotide
cugaguuugcacaugacaa

SEQ ID NO: 1113589 - RNA, 19 nt, Artificial Sequence
  Description of Artificial Sequence: Synthetic oligonucleotide
cuuuguaagcucucguguc

SEQ ID NO: 1113590 - RNA, 19 nt, Artificial Sequence
  Description of Artificial Sequence: Synthetic oligonucleotide
uauaaaggcucuacaucuc

SEQ ID NO: 1113591 - RNA, 19 nt, Artificial Sequence
  Description of Artificial Sequence: Synthetic oligonucleotide
uuuagggcucaccaaucac

SEQ ID NO: 1113592 - RNA, 19 nt, Artificial Sequence
  Description of Artificial Sequence: Synthetic oligonucleotide
acacaaucgaggaugagcu

SEQ ID NO: 1113593 - RNA, 19 nt, Artificial Sequence
  Description of Artificial Sequence: Synthetic oligonucleotide
ucguguuggugucaucgag

SEQ ID NO: 1113594 - RNA, 19 nt, Artificial Sequence
  Description of Artificial Sequence: Synthetic oligonucleotide
uuaaucagacgcucguuua

SEQ ID NO: 1113595 - RNA, 19 nt, Artificial Sequence
  Description of Artificial Sequence: Synthetic oligonucleotide
ucaugagguaaagucacac

SEQ ID NO: 1113596 - RNA, 19 nt, Artificial Sequence
  Description of Artificial Sequence: Synthetic oligonucleotide
cuccuguuaagagaugagg

SEQ ID NO: 1113597 - RNA, 19 nt, Artificial Sequence
  Description of Artificial Sequence: Synthetic oligonucleotide
ugcacaugacaaagcaugu

SEQ ID NO: 1113598 - RNA, 19 nt, Artificial Sequence
  Description of Artificial Sequence: Synthetic oligonucleotide
auaacacuacauuguaaaa

SEQ ID NO: 1113599 - RNA, 19 nt, Artificial Sequence
  Description of Artificial Sequence: Synthetic oligonucleotide
uuaccacuagggcuugacc

SEQ ID NO: 1113600 - RNA, 19 nt, Artificial Sequence
  Description of Artificial Sequence: Synthetic oligonucleotide
ugguucgucgcuugcacug

SEQ ID NO: 1113601 - RNA, 19 nt, Artificial Sequence
  Description of Artificial Sequence: Synthetic oligonucleotide
acaacguggaagugggugu

SEQ ID NO: 1113602 - RNA, 19 nt, Artificial Sequence
  Description of Artificial Sequence: Synthetic oligonucleotide
acaggauguuuaauuauag

SEQ ID NO: 1113603 - RNA, 19 nt, Artificial Sequence
  Description of Artificial Sequence: Synthetic oligonucleotide
auauaccgagaacagcaca

SEQ ID NO: 1113604 - RNA, 19 nt, Artificial Sequence
  Description of Artificial Sequence: Synthetic oligonucleotide
agguaaagucacacaaucg

SEQ ID NO: 1113605 - RNA, 19 nt, Artificial Sequence
  Description of Artificial Sequence: Synthetic oligonucleotide
ucaggguaucuuuucgugu

SEQ ID NO: 1113606 - RNA, 19 nt, Artificial Sequence
  Description of Artificial Sequence: Synthetic oligonucleotide
aagcaugucccuauaugug

SEQ ID NO: 1113607 - RNA, 19 nt, Artificial Sequence
  Description of Artificial Sequence: Synthetic oligonucleotide
ggugucaucgaggaaagcc

SEQ ID NO: 1113608 - RNA, 19 nt, Artificial Sequence
  Description of Artificial Sequence: Synthetic oligonucleotide
gaugguucgucgcuugcac

SEQ ID NO: 1113609 - RNA, 19 nt, Artificial Sequence
  Description of Artificial Sequence: Synthetic oligonucleotide
accuaauauagcaaagacu

SEQ ID NO: 1113610 - RNA, 19 nt, Artificial Sequence
  Description of Artificial Sequence: Synthetic oligonucleotide
ucgaggaugagcuggucaa

SEQ ID NO: 1113611 - RNA, 19 nt, Artificial Sequence
  Description of Artificial Sequence: Synthetic oligonucleotide
cuguauggcugucaggaug

SEQ ID NO: 1113612 - RNA, 19 nt, Artificial Sequence
  Description of Artificial Sequence: Synthetic oligonucleotide
cauauaccgagaacagcac

SEQ ID NO: 1113613 - RNA, 19 nt, Artificial Sequence
  Description of Artificial Sequence: Synthetic oligonucleotide
gugaucauaauaaacuuua

SEQ ID NO: 1113614 - RNA, 19 nt, Artificial Sequence
  Description of Artificial Sequence: Synthetic oligonucleotide
ugcauauaccgagaacagc

SEQ ID NO: 1113615 - RNA, 19 nt, Artificial Sequence
  Description of Artificial Sequence: Synthetic oligonucleotide
ugaaacgccggauguugug

SEQ ID NO: 1113616 - RNA, 19 nt, Artificial Sequence
  Description of Artificial Sequence: Synthetic oligonucleotide
acugaacugcagcuuaaga

SEQ ID NO: 1113617 - RNA, 19 nt, Artificial Sequence
  Description of Artificial Sequence: Synthetic oligonucleotide
acgggaauccgcuucuuca

SEQ ID NO: 1113618 - RNA, 19 nt, Artificial Sequence
  Description of Artificial Sequence: Synthetic oligonucleotide
gugaagggcaucucaaaca

SEQ ID NO: 1113619 - RNA, 19 nt, Artificial Sequence
  Description of Artificial Sequence: Synthetic oligonucleotide
aacgguauguacacugggu

SEQ ID NO: 1113620 - RNA, 19 nt, Artificial Sequence
  Description of Artificial Sequence: Synthetic oligonucleotide
auaucacaguccaggcucc

SEQ ID NO: 1113621 - RNA, 19 nt, Artificial Sequence
  Description of Artificial Sequence: Synthetic oligonucleotide
aaauauugccagugcgauu

SEQ ID NO: 1113622 - RNA, 19 nt, Artificial Sequence
  Description of Artificial Sequence: Synthetic oligonucleotide
ugacaaagcaugucccuau

SEQ ID NO: 1113623 - RNA, 19 nt, Artificial Sequence
  Description of Artificial Sequence: Synthetic oligonucleotide
aucgaggaaagcccgggca

SEQ ID NO: 1113624 - RNA, 19 nt, Artificial Sequence
  Description of Artificial Sequence: Synthetic oligonucleotide
ccgagaacagcacaagugg

SEQ ID NO: 1113625 - RNA, 19 nt, Artificial Sequence
  Description of Artificial Sequence: Synthetic oligonucleotide
ucuagucuuagcggagugc

SEQ ID NO: 1113626 - RNA, 19 nt, Artificial Sequence
  Description of Artificial Sequence: Synthetic oligonucleotide
cacaaguggccacaguaac

SEQ ID NO: 1113627 - RNA, 19 nt, Artificial Sequence
  Description of Artificial Sequence: Synthetic oligonucleotide
cugucaggaugguucgucg

SEQ ID NO: 1113628 - RNA, 19 nt, Artificial Sequence
  Description of Artificial Sequence: Synthetic oligonucleotide
ucuccgguuccccauggcu

SEQ ID NO: 1113629 - RNA, 19 nt, Artificial Sequence
  Description of Artificial Sequence: Synthetic oligonucleotide
gugucaucgaggaaagccc

SEQ ID NO: 1113630 - RNA, 19 nt, Artificial Sequence
  Description of Artificial Sequence: Synthetic oligonucleotide
ugucaggaugguucgucgc

SEQ ID NO: 1113631 - RNA, 19 nt, Artificial Sequence
  Description of Artificial Sequence: Synthetic oligonucleotide
aucgaggaugagcugguca

SEQ ID NO: 1113632 - RNA, 19 nt, Artificial Sequence
  Description of Artificial Sequence: Synthetic oligonucleotide
uaccgagaacagcacaagu

SEQ ID NO: 1113633 - RNA, 19 nt, Artificial Sequence
  Description of Artificial Sequence: Synthetic oligonucleotide
accgagaacagcacaagug

SEQ ID NO: 1113634 - RNA, 19 nt, Artificial Sequence
  Description of Artificial Sequence: Synthetic oligonucleotide
uaugcuagugggccagcgu

SEQ ID NO: 1113635 - RNA, 19 nt, Artificial Sequence
  Description of Artificial Sequence: Synthetic oligonucleotide
uguaagcucucgugucucc

SEQ ID NO: 1113636 - RNA, 19 nt, Artificial Sequence
  Description of Artificial Sequence: Synthetic oligonucleotide
uuauuccccaacucaccac

SEQ ID NO: 1113637 - RNA, 19 nt, Artificial Sequence
  Description of Artificial Sequence: Synthetic oligonucleotide
uaauuauagcagggcagug

SEQ ID NO: 1113638 - RNA, 19 nt, Artificial Sequence
  Description of Artificial Sequence: Synthetic oligonucleotide
gucgguguggugcugguac

SEQ ID NO: 1113639 - RNA, 19 nt, Artificial Sequence
  Description of Artificial Sequence: Synthetic oligonucleotide
guuugcauauaccgagaac

SEQ ID NO: 1113640 - RNA, 19 nt, Artificial Sequence
  Description of Artificial Sequence: Synthetic oligonucleotide
uuacuaaauuaaagucuua

SEQ ID NO: 1113641 - RNA, 19 nt, Artificial Sequence
  Description of Artificial Sequence: Synthetic oligonucleotide
aacagcacaaguggccaca

SEQ ID NO: 1113642 - RNA, 19 nt, Artificial Sequence
  Description of Artificial Sequence: Synthetic oligonucleotide
gcauauaccgagaacagca

SEQ ID NO: 1113643 - RNA, 19 nt, Artificial Sequence
  Description of Artificial Sequence: Synthetic oligonucleotide
caugacgggaauccgcuuc

SEQ ID NO: 1113644 - RNA, 19 nt, Artificial Sequence
  Description of Artificial Sequence: Synthetic oligonucleotide
uuuaccacuagggcuugac

SEQ ID NO: 1113645 - RNA, 19 nt, Artificial Sequence
  Description of Artificial Sequence: Synthetic oligonucleotide
ugaccacaagccuccacga

SEQ ID NO: 1113646 - RNA, 19 nt, Artificial Sequence
  Description of Artificial Sequence: Synthetic oligonucleotide
ugauuagcucuggaaguca

SEQ ID NO: 1113647 - RNA, 19 nt, Artificial Sequence
  Description of Artificial Sequence: Synthetic oligonucleotide
agagaugaggaaaacuaaa

SEQ ID NO: 1113648 - RNA, 19 nt, Artificial Sequence
  Description of Artificial Sequence: Synthetic oligonucleotide
agcuuaagaguguccacau

SEQ ID NO: 1113649 - RNA, 19 nt, Artificial Sequence
  Description of Artificial Sequence: Synthetic oligonucleotide
auguacacuggguucuagu

SEQ ID NO: 1113650 - RNA, 19 nt, Artificial Sequence
  Description of Artificial Sequence: Synthetic oligonucleotide
ucuccaacacaaggcauga

SEQ ID NO: 1113651 - RNA, 19 nt, Artificial Sequence
  Description of Artificial Sequence: Synthetic oligonucleotide
ugcguuuguuagugcaggc

SEQ ID NO: 1113652 - RNA, 19 nt, Artificial Sequence
  Description of Artificial Sequence: Synthetic oligonucleotide
cuacguugcuggacuaggc

SEQ ID NO: 1113653 - RNA, 19 nt, Artificial Sequence
  Description of Artificial Sequence: Synthetic oligonucleotide
agugaucauaauaaacuuu

SEQ ID NO: 1113654 - RNA, 19 nt, Artificial Sequence
  Description of Artificial Sequence: Synthetic oligonucleotide
acgcucguuuaccacuagg

SEQ ID NO: 1113655 - RNA, 19 nt, Artificial Sequence
  Description of Artificial Sequence: Synthetic oligonucleotide
gaauugccugaagacuucc

SEQ ID NO: 1113656 - RNA, 19 nt, Artificial Sequence
  Description of Artificial Sequence: Synthetic oligonucleotide
cuuugguucuacguugcug

SEQ ID NO: 1113657 - RNA, 19 nt, Artificial Sequence
  Description of Artificial Sequence: Synthetic oligonucleotide
guuuagggcucaccaauca

SEQ ID NO: 1113658 - RNA, 19 nt, Artificial Sequence
  Description of Artificial Sequence: Synthetic oligonucleotide
ucagacgcucguuuaccac

SEQ ID NO: 1113659 - RNA, 19 nt, Artificial Sequence
  Description of Artificial Sequence: Synthetic oligonucleotide
aucagacgcucguuuacca

SEQ ID NO: 1113660 - RNA, 19 nt, Artificial Sequence
  Description of Artificial Sequence: Synthetic oligonucleotide
ugucccuauaugugguggu

SEQ ID NO: 1113661 - RNA, 19 nt, Artificial Sequence
  Description of Artificial Sequence: Synthetic oligonucleotide
acaggguuuagggcucacc

SEQ ID NO: 1113662 - RNA, 19 nt, Artificial Sequence
  Description of Artificial Sequence: Synthetic oligonucleotide
aguuugguaggacgcuugu

SEQ ID NO: 1113663 - RNA, 19 nt, Artificial Sequence
  Description of Artificial Sequence: Synthetic oligonucleotide
ucgaggaaagcccgggcau

SEQ ID NO: 1113664 - RNA, 19 nt, Artificial Sequence
  Description of Artificial Sequence: Synthetic oligonucleotide
uaggcucacacgcaacuuu

SEQ ID NO: 1113665 - RNA, 19 nt, Artificial Sequence
  Description of Artificial Sequence: Synthetic oligonucleotide
guacaugacgggaauccgc

SEQ ID NO: 1113666 - RNA, 19 nt, Artificial Sequence
  Description of Artificial Sequence: Synthetic oligonucleotide
uuagugcaggccuuugguu

SEQ ID NO: 1113667 - RNA, 19 nt, Artificial Sequence
  Description of Artificial Sequence: Synthetic oligonucleotide
uccgucuuccucucuugug

SEQ ID NO: 1113668 - RNA, 19 nt, Artificial Sequence
  Description of Artificial Sequence: Synthetic oligonucleotide
uagugggccagcguugacc

SEQ ID NO: 1113669 - RNA, 19 nt, Artificial Sequence
  Description of Artificial Sequence: Synthetic oligonucleotide
uggucaacccuugaaccac

SEQ ID NO: 1113670 - RNA, 19 nt, Artificial Sequence
  Description of Artificial Sequence: Synthetic oligonucleotide
uucuacguugcuggacuag

SEQ ID NO: 1113671 - RNA, 19 nt, Artificial Sequence
  Description of Artificial Sequence: Synthetic oligonucleotide
auaugcuagugggccagcg

SEQ ID NO: 1113672 - RNA, 19 nt, Artificial Sequence
  Description of Artificial Sequence: Synthetic oligonucleotide
auacuccaccauuuuggca

SEQ ID NO: 1113673 - RNA, 19 nt, Artificial Sequence
  Description of Artificial Sequence: Synthetic oligonucleotide
aacaaacgguauguacacu

SEQ ID NO: 1113674 - RNA, 19 nt, Artificial Sequence
  Description of Artificial Sequence: Synthetic oligonucleotide
accugaacgcucacacugc

SEQ ID NO: 1113675 - RNA, 19 nt, Artificial Sequence
  Description of Artificial Sequence: Synthetic oligonucleotide
uauguacacuggguucuag

SEQ ID NO: 1113676 - RNA, 19 nt, Artificial Sequence
  Description of Artificial Sequence: Synthetic oligonucleotide
auaccgagaacagcacaag

SEQ ID NO: 1113677 - RNA, 19 nt, Artificial Sequence
  Description of Artificial Sequence: Synthetic oligonucleotide
agugcguuuguuagugcag

SEQ ID NO: 1113678 - RNA, 19 nt, Artificial Sequence
  Description of Artificial Sequence: Synthetic oligonucleotide
cucacacgcaacuuuguaa

SEQ ID NO: 1113679 - RNA, 19 nt, Artificial Sequence
  Description of Artificial Sequence: Synthetic oligonucleotide
acauaggggaagcacugua

SEQ ID NO: 1113680 - RNA, 19 nt, Artificial Sequence
  Description of Artificial Sequence: Synthetic oligonucleotide
caggguuuagggcucacca

SEQ ID NO: 1113681 - RNA, 19 nt, Artificial Sequence
  Description of Artificial Sequence: Synthetic oligonucleotide
ucuuagcggagugcguuug

SEQ ID NO: 1113682 - RNA, 19 nt, Artificial Sequence
  Description of Artificial Sequence: Synthetic oligonucleotide
acgaauugccugaagacuu

SEQ ID NO: 1113683 - RNA, 19 nt, Artificial Sequence
  Description of Artificial Sequence: Synthetic oligonucleotide
guccacuucggcugaggag

SEQ ID NO: 1113684 - RNA, 19 nt, Artificial Sequence
  Description of Artificial Sequence: Synthetic oligonucleotide
aggguaucuuuucguguug

SEQ ID NO: 1113685 - RNA, 19 nt, Artificial Sequence
  Description of Artificial Sequence: Synthetic oligonucleotide
gaguuugguaggacgcuug

SEQ ID NO: 1113686 - RNA, 19 nt, Artificial Sequence
  Description of Artificial Sequence: Synthetic oligonucleotide
aagcccgggcauaugcuag

SEQ ID NO: 1113687 - RNA, 19 nt, Artificial Sequence
  Description of Artificial Sequence: Synthetic oligonucleotide
cugaacgcucacacugccc

SEQ ID NO: 1113688 - RNA, 19 nt, Artificial Sequence
  Description of Artificial Sequence: Synthetic oligonucleotide
auuagcucuggaagucauc

SEQ ID NO: 1113689 - RNA, 19 nt, Artificial Sequence
  Description of Artificial Sequence: Synthetic oligonucleotide
uuauagcagggcagugauc

SEQ ID NO: 1113690 - RNA, 19 nt, Artificial Sequence
  Description of Artificial Sequence: Synthetic oligonucleotide
cuggucaacccuugaacca

SEQ ID NO: 1113691 - RNA, 19 nt, Artificial Sequence
  Description of Artificial Sequence: Synthetic oligonucleotide
agcguugaccugaacgcuc

SEQ ID NO: 1113692 - RNA, 19 nt, Artificial Sequence
  Description of Artificial Sequence: Synthetic oligonucleotide
gcucguuuaccacuagggc

SEQ ID NO: 1113693 - RNA, 19 nt, Artificial Sequence
  Description of Artificial Sequence: Synthetic oligonucleotide
gaaacgccggauguuguga

SEQ ID NO: 1113694 - RNA, 19 nt, Artificial Sequence
  Description of Artificial Sequence: Synthetic oligonucleotide
gugauuagcucuggaaguc

SEQ ID NO: 1113695 - RNA, 19 nt, Artificial Sequence
  Description of Artificial Sequence: Synthetic oligonucleotide
gaacagcacaaguggccac

SEQ ID NO: 1113696 - RNA, 19 nt, Artificial Sequence
  Description of Artificial Sequence: Synthetic oligonucleotide
ucuucacauaggggaagca

SEQ ID NO: 1113697 - RNA, 19 nt, Artificial Sequence
  Description of Artificial Sequence: Synthetic oligonucleotide
cuucggcugaggagcacag

SEQ ID NO: 1113698 - RNA, 19 nt, Artificial Sequence
  Description of Artificial Sequence: Synthetic oligonucleotide
auaguccauucccuucagu

SEQ ID NO: 1113699 - RNA, 19 nt, Artificial Sequence
  Description of Artificial Sequence: Synthetic oligonucleotide
caucgaggaaagcccgggc

SEQ ID NO: 1113700 - RNA, 19 nt, Artificial Sequence
  Description of Artificial Sequence: Synthetic oligonucleotide
uugguucuacguugcugga

SEQ ID NO: 1113701 - RNA, 19 nt, Artificial Sequence
  Description of Artificial Sequence: Synthetic oligonucleotide
caaacuccgucuuccucuc

SEQ ID NO: 1113702 - RNA, 19 nt, Artificial Sequence
  Description of Artificial Sequence: Synthetic oligonucleotide
uuuguuagugcaggccuuu

SEQ ID NO: 1113703 - RNA, 19 nt, Artificial Sequence
  Description of Artificial Sequence: Synthetic oligonucleotide
ggguucuagucuuagcgga

SEQ ID NO: 1113704 - RNA, 19 nt, Artificial Sequence
  Description of Artificial Sequence: Synthetic oligonucleotide
cgcucguuuaccacuaggg

SEQ ID NO: 1113705 - RNA, 19 nt, Artificial Sequence
  Description of Artificial Sequence: Synthetic oligonucleotide
ggugauuagcucuggaagu

SEQ ID NO: 1113706 - RNA, 19 nt, Artificial Sequence
  Description of Artificial Sequence: Synthetic oligonucleotide
cucguucacuaguacaaaa

SEQ ID NO: 1113707 - RNA, 19 nt, Artificial Sequence
  Description of Artificial Sequence: Synthetic oligonucleotide
aggguuuagggcucaccaa

SEQ ID NO: 1113708 - RNA, 19 nt, Artificial Sequence
  Description of Artificial Sequence: Synthetic oligonucleotide
ucccuauauguggugguuc

SEQ ID NO: 1113709 - RNA, 19 nt, Artificial Sequence
  Description of Artificial Sequence: Synthetic oligonucleotide
agucuuagcggagugcguu

SEQ ID NO: 1113710 - RNA, 19 nt, Artificial Sequence
  Description of Artificial Sequence: Synthetic oligonucleotide
augguucgucgcuugcacu

SEQ ID NO: 1113711 - RNA, 19 nt, Artificial Sequence
  Description of Artificial Sequence: Synthetic oligonucleotide
gucaucgaggaaagcccgg

SEQ ID NO: 1113712 - RNA, 19 nt, Artificial Sequence
  Description of Artificial Sequence: Synthetic oligonucleotide
cacaaucgaggaugagcug

SEQ ID NO: 1113713 - RNA, 19 nt, Artificial Sequence
  Description of Artificial Sequence: Synthetic oligonucleotide
ucuuuucguguugguguca

SEQ ID NO: 1113714 - RNA, 19 nt, Artificial Sequence
  Description of Artificial Sequence: Synthetic oligonucleotide
gacuccuauaaaaucugcu

SEQ ID NO: 1113715 - RNA, 19 nt, Artificial Sequence
  Description of Artificial Sequence: Synthetic oligonucleotide
gacgggaauccgcuucuuc

SEQ ID NO: 1113716 - RNA, 19 nt, Artificial Sequence
  Description of Artificial Sequence: Synthetic oligonucleotide
gcuguguuaacaaacggua

SEQ ID NO: 1113717 - RNA, 19 nt, Artificial Sequence
  Description of Artificial Sequence: Synthetic oligonucleotide
ugguucuacguugcuggac

SEQ ID NO: 1113718 - RNA, 19 nt, Artificial Sequence
  Description of Artificial Sequence: Synthetic oligonucleotide
cggugauuagcucuggaag

SEQ ID NO: 1113719 - RNA, 19 nt, Artificial Sequence
  Description of Artificial Sequence: Synthetic oligonucleotide
cguguuggugucaucgagg

SEQ ID NO: 1113720 - RNA, 19 nt, Artificial Sequence
  Description of Artificial Sequence: Synthetic oligonucleotide
caucucucaaacuccgucu

SEQ ID NO: 1113721 - RNA, 19 nt, Artificial Sequence
  Description of Artificial Sequence: Synthetic oligonucleotide
uuguuagugcaggccuuug

SEQ ID NO: 1113722 - RNA, 19 nt, Artificial Sequence
  Description of Artificial Sequence: Synthetic oligonucleotide
uaacaacguggaagugggu

SEQ ID NO: 1113723 - RNA, 19 nt, Artificial Sequence
  Description of Artificial Sequence: Synthetic oligonucleotide
acuucggcugaggagcaca

SEQ ID NO: 1113724 - RNA, 19 nt, Artificial Sequence
  Description of Artificial Sequence: Synthetic oligonucleotide
cucaugcaugaugccagag

SEQ ID NO: 1113725 - RNA, 19 nt, Artificial Sequence
  Description of Artificial Sequence: Synthetic oligonucleotide
ggugguucaugagguaaag

SEQ ID NO: 1113726 - RNA, 19 nt, Artificial Sequence
  Description of Artificial Sequence: Synthetic oligonucleotide
uagcggagugcguuuguua

SEQ ID NO: 1113727 - RNA, 19 nt, Artificial Sequence
  Description of Artificial Sequence: Synthetic oligonucleotide
gguucuacguugcuggacu

SEQ ID NO: 1113728 - RNA, 19 nt, Artificial Sequence
  Description of Artificial Sequence: Synthetic oligonucleotide
auugccagugcgauuuaaa

SEQ ID NO: 1113729 - RNA, 19 nt, Artificial Sequence
  Description of Artificial Sequence: Synthetic oligonucleotide
cuuaggcucacacgcaacu

SEQ ID NO: 1113730 - RNA, 19 nt, Artificial Sequence
  Description of Artificial Sequence: Synthetic oligonucleotide
gguucuagucuuagcggag

SEQ ID NO: 1113731 - RNA, 19 nt, Artificial Sequence
  Description of Artificial Sequence: Synthetic oligonucleotide
uggagcaaggaggcugugu

SEQ ID NO: 1113732 - RNA, 19 nt, Artificial Sequence
  Description of Artificial Sequence: Synthetic oligonucleotide
gugggugugucagaaaugu

SEQ ID NO: 1113733 - RNA, 19 nt, Artificial Sequence
  Description of Artificial Sequence: Synthetic oligonucleotide
aacguggaagugggugugu

SEQ ID NO: 1113734 - RNA, 19 nt, Artificial Sequence
  Description of Artificial Sequence: Synthetic oligonucleotide
acagcacaaguggccacag

SEQ ID NO: 1113735 - RNA, 19 nt, Artificial Sequence
  Description of Artificial Sequence: Synthetic oligonucleotide
auccgcuucuucacauagg

SEQ ID NO: 1113736 - RNA, 19 nt, Artificial Sequence
  Description of Artificial Sequence: Synthetic oligonucleotide
gacgcucguuuaccacuag

SEQ ID NO: 1113737 - RNA, 19 nt, Artificial Sequence
  Description of Artificial Sequence: Synthetic oligonucleotide
uuaggcucacacgcaacuu

SEQ ID NO: 1113738 - RNA, 19 nt, Artificial Sequence
  Description of Artificial Sequence: Synthetic oligonucleotide
ccgacuccuauaaaaucug

SEQ ID NO: 1113739 - RNA, 19 nt, Artificial Sequence
  Description of Artificial Sequence: Synthetic oligonucleotide
gcauaugcuagugggccag

SEQ ID NO: 1113740 - RNA, 19 nt, Artificial Sequence
  Description of Artificial Sequence: Synthetic oligonucleotide
ucggucgcaccggugauua

SEQ ID NO: 1113741 - RNA, 19 nt, Artificial Sequence
  Description of Artificial Sequence: Synthetic oligonucleotide
accggugauuagcucugga

SEQ ID NO: 1113742 - RNA, 19 nt, Artificial Sequence
  Description of Artificial Sequence: Synthetic oligonucleotide
ggucgcaccggugauuagc

SEQ ID NO: 1113743 - RNA, 19 nt, Artificial Sequence
  Description of Artificial Sequence: Synthetic oligonucleotide
gucacacaaucgaggauga

SEQ ID NO: 1113744 - RNA, 19 nt, Artificial Sequence
  Description of Artificial Sequence: Synthetic oligonucleotide
ugggcgucccgcugauggc

SEQ ID NO: 1113745 - RNA, 19 nt, Artificial Sequence
  Description of Artificial Sequence: Synthetic oligonucleotide
cccgcugauggcauugaag

SEQ ID NO: 1113746 - RNA, 19 nt, Artificial Sequence
  Description of Artificial Sequence: Synthetic oligonucleotide
gguauguacacuggguucu

SEQ ID NO: 1113747 - RNA, 19 nt, Artificial Sequence
  Description of Artificial Sequence: Synthetic oligonucleotide
uuagcggagugcguuuguu

SEQ ID NO: 1113748 - RNA, 19 nt, Artificial Sequence
  Description of Artificial Sequence: Synthetic oligonucleotide
ccaacacaaggcaugaaua

SEQ ID NO: 1113749 - RNA, 19 nt, Artificial Sequence
  Description of Artificial Sequence: Synthetic oligonucleotide
acaugaaacgccggauguu

SEQ ID NO: 1113750 - RNA, 19 nt, Artificial Sequence
  Description of Artificial Sequence: Synthetic oligonucleotide
guguuugcauauaccgaga

SEQ ID NO: 1113751 - RNA, 19 nt, Artificial Sequence
  Description of Artificial Sequence: Synthetic oligonucleotide
cauaugcuagugggccagc

SEQ ID NO: 1113752 - RNA, 19 nt, Artificial Sequence
  Description of Artificial Sequence: Synthetic oligonucleotide
caccuuauugucaggguau

SEQ ID NO: 1113753 - RNA, 19 nt, Artificial Sequence
  Description of Artificial Sequence: Synthetic oligonucleotide
ggauguugugacaucucuc

SEQ ID NO: 1113754 - RNA, 19 nt, Artificial Sequence
  Description of Artificial Sequence: Synthetic oligonucleotide
gcguuuguuagugcaggcc

SEQ ID NO: 1113755 - RNA, 19 nt, Artificial Sequence
  Description of Artificial Sequence: Synthetic oligonucleotide
ccugaacgcucacacugcc

SEQ ID NO: 1113756 - RNA, 19 nt, Artificial Sequence
  Description of Artificial Sequence: Synthetic oligonucleotide
cauaggggaagcacuguau

SEQ ID NO: 1113757 - RNA, 19 nt, Artificial Sequence
  Description of Artificial Sequence: Synthetic oligonucleotide
uucggcugaggagcacagc

SEQ ID NO: 1113758 - RNA, 19 nt, Artificial Sequence
  Description of Artificial Sequence: Synthetic oligonucleotide
ccugugcucggucgcaccg

SEQ ID NO: 1113759 - RNA, 19 nt, Artificial Sequence
  Description of Artificial Sequence: Synthetic oligonucleotide
cugguacaugacgggaauc

SEQ ID NO: 1113760 - RNA, 19 nt, Artificial Sequence
  Description of Artificial Sequence: Synthetic oligonucleotide
gauuagcucuggaagucau

SEQ ID NO: 1113761 - RNA, 19 nt, Artificial Sequence
  Description of Artificial Sequence: Synthetic oligonucleotide
cuguguuaacaaacgguau

SEQ ID NO: 1113762 - RNA, 19 nt, Artificial Sequence
  Description of Artificial Sequence: Synthetic oligonucleotide
agcccgggcauaugcuagu

SEQ ID NO: 1113763 - RNA, 19 nt, Artificial Sequence
  Description of Artificial Sequence: Synthetic oligonucleotide
ucccgcugauggcauugaa

SEQ ID NO: 1113764 - RNA, 19 nt, Artificial Sequence
  Description of Artificial Sequence: Synthetic oligonucleotide
gagcaaggaggcuguguua

SEQ ID NO: 1113765 - RNA, 19 nt, Artificial Sequence
  Description of Artificial Sequence: Synthetic oligonucleotide
aucacaguccaggcucccu

SEQ ID NO: 1113766 - RNA, 19 nt, Artificial Sequence
  Description of Artificial Sequence: Synthetic oligonucleotide
gucaacccuugaaccacug

SEQ ID NO: 1113767 - RNA, 19 nt, Artificial Sequence
  Description of Artificial Sequence: Synthetic oligonucleotide
caggccuuugguucuacgu

SEQ ID NO: 1113768 - RNA, 19 nt, Artificial Sequence
  Description of Artificial Sequence: Synthetic oligonucleotide
ggcauaugcuagugggcca

SEQ ID NO: 1113769 - RNA, 19 nt, Artificial Sequence
  Description of Artificial Sequence: Synthetic oligonucleotide
ggagugcguuuguuagugc

SEQ ID NO: 1113770 - RNA, 19 nt, Artificial Sequence
  Description of Artificial Sequence: Synthetic oligonucleotide
gguuuagggcucaccaauc

SEQ ID NO: 1113771 - RNA, 19 nt, Artificial Sequence
  Description of Artificial Sequence: Synthetic oligonucleotide
caacucaccacaggguuua

SEQ ID NO: 1113772 - RNA, 19 nt, Artificial Sequence
  Description of Artificial Sequence: Synthetic oligonucleotide
caggguaucuuuucguguu

SEQ ID NO: 1113773 - RNA, 19 nt, Artificial Sequence
  Description of Artificial Sequence: Synthetic oligonucleotide
ggcuguguuaacaaacggu

SEQ ID NO: 1113774 - RNA, 19 nt, Artificial Sequence
  Description of Artificial Sequence: Synthetic oligonucleotide
acaugacgggaauccgcuu

SEQ ID NO: 1113775 - RNA, 19 nt, Artificial Sequence
  Description of Artificial Sequence: Synthetic oligonucleotide
cgacuccuauaaaaucugc

SEQ ID NO: 1113776 - RNA, 19 nt, Artificial Sequence
  Description of Artificial Sequence: Synthetic oligonucleotide
cccgacuccuauaaaaucu

SEQ ID NO: 1113777 - RNA, 19 nt, Artificial Sequence
  Description of Artificial Sequence: Synthetic oligonucleotide
auauugccagugcgauuua

SEQ ID NO: 1113778 - RNA, 19 nt, Artificial Sequence
  Description of Artificial Sequence: Synthetic oligonucleotide
ggguuuagggcucaccaau

SEQ ID NO: 1113779 - RNA, 19 nt, Artificial Sequence
  Description of Artificial Sequence: Synthetic oligonucleotide
cuagugggccagcguugac

SEQ ID NO: 1113780 - RNA, 19 nt, Artificial Sequence
  Description of Artificial Sequence: Synthetic oligonucleotide
guucuagucuuagcggagu

SEQ ID NO: 1113781 - RNA, 19 nt, Artificial Sequence
  Description of Artificial Sequence: Synthetic oligonucleotide
ggcuuaggcucacacgcaa

SEQ ID NO: 1113782 - RNA, 19 nt, Artificial Sequence
  Description of Artificial Sequence: Synthetic oligonucleotide
cgguauguacacuggguuc

SEQ ID NO: 1113783 - RNA, 19 nt, Artificial Sequence
  Description of Artificial Sequence: Synthetic oligonucleotide
aggucgguguggugcuggu

SEQ ID NO: 1113784 - RNA, 19 nt, Artificial Sequence
  Description of Artificial Sequence: Synthetic oligonucleotide
gcugucaggaugguucguc

SEQ ID NO: 1113785 - RNA, 19 nt, Artificial Sequence
  Description of Artificial Sequence: Synthetic oligonucleotide
gguucgucgcuugcacugc

SEQ ID NO: 1113786 - RNA, 19 nt, Artificial Sequence
  Description of Artificial Sequence: Synthetic oligonucleotide
ggacgcuugucuucuccuc

SEQ ID NO: 1113787 - RNA, 19 nt, Artificial Sequence
  Description of Artificial Sequence: Synthetic oligonucleotide
guucuacguugcuggacua

SEQ ID NO: 1113788 - RNA, 19 nt, Artificial Sequence
  Description of Artificial Sequence: Synthetic oligonucleotide
aggcuuaggcucacacgca

SEQ ID NO: 1113789 - RNA, 19 nt, Artificial Sequence
  Description of Artificial Sequence: Synthetic oligonucleotide
agacgcucguuuaccacua

SEQ ID NO: 1113790 - RNA, 19 nt, Artificial Sequence
  Description of Artificial Sequence: Synthetic oligonucleotide
gcacaugacaaagcauguc

SEQ ID NO: 1113791 - RNA, 19 nt, Artificial Sequence
  Description of Artificial Sequence: Synthetic oligonucleotide
ucgcaccggugauuagcuc

SEQ ID NO: 1113792 - RNA, 19 nt, Artificial Sequence
  Description of Artificial Sequence: Synthetic oligonucleotide
gguaggacgcuugucuucu

SEQ ID NO: 1113793 - RNA, 19 nt, Artificial Sequence
  Description of Artificial Sequence: Synthetic oligonucleotide
cacuagggcuugaccacaa

SEQ ID NO: 1113794 - RNA, 19 nt, Artificial Sequence
  Description of Artificial Sequence: Synthetic oligonucleotide
caccggugauuagcucugg

SEQ ID NO: 1113795 - RNA, 19 nt, Artificial Sequence
  Description of Artificial Sequence: Synthetic oligonucleotide
ggaugguucgucgcuugca

SEQ ID NO: 1113796 - RNA, 19 nt, Artificial Sequence
  Description of Artificial Sequence: Synthetic oligonucleotide
ccccauaacacuacauugu

SEQ ID NO: 1113797 - RNA, 19 nt, Artificial Sequence
  Description of Artificial Sequence: Synthetic oligonucleotide
ggggaagcacuguauggcu

SEQ ID NO: 1113798 - RNA, 19 nt, Artificial Sequence
  Description of Artificial Sequence: Synthetic oligonucleotide
guaggacgcuugucuucuc

SEQ ID NO: 1113799 - RNA, 19 nt, Artificial Sequence
  Description of Artificial Sequence: Synthetic oligonucleotide
cgggaauccgcuucuucac

SEQ ID NO: 1113800 - RNA, 19 nt, Artificial Sequence
  Description of Artificial Sequence: Synthetic oligonucleotide
cgaauugccugaagacuuc

SEQ ID NO: 1113801 - RNA, 19 nt, Artificial Sequence
  Description of Artificial Sequence: Synthetic oligonucleotide
cgggcauaugcuagugggc

SEQ ID NO: 1113802 - RNA, 19 nt, Artificial Sequence
  Description of Artificial Sequence: Synthetic oligonucleotide
cuuccugugcucggucgca

SEQ ID NO: 1113803 - RNA, 19 nt, Artificial Sequence
  Description of Artificial Sequence: Synthetic oligonucleotide
gacaucucucaaacuccgu

SEQ ID NO: 1113804 - RNA, 19 nt, Artificial Sequence
  Description of Artificial Sequence: Synthetic oligonucleotide
cggagugcguuuguuagug

SEQ ID NO: 1113805 - RNA, 19 nt, Artificial Sequence
  Description of Artificial Sequence: Synthetic oligonucleotide
gucgcaccggugauuagcu

SEQ ID NO: 1113806 - RNA, 19 nt, Artificial Sequence
  Description of Artificial Sequence: Synthetic oligonucleotide
gcucuacaucuccucguuc

SEQ ID NO: 1113807 - RNA, 19 nt, Artificial Sequence
  Description of Artificial Sequence: Synthetic oligonucleotide
ccggugauuagcucuggaa

SEQ ID NO: 1113808 - RNA, 19 nt, Artificial Sequence
  Description of Artificial Sequence: Synthetic oligonucleotide
cuuuaaucagacgcucguu

SEQ ID NO: 1113809 - RNA, 19 nt, Artificial Sequence
  Description of Artificial Sequence: Synthetic oligonucleotide
gcucaugcaugaugccaga

SEQ ID NO: 1113810 - RNA, 19 nt, Artificial Sequence
  Description of Artificial Sequence: Synthetic oligonucleotide
gcuuaggcucacacgcaac

SEQ ID NO: 1113811 - RNA, 19 nt, Artificial Sequence
  Description of Artificial Sequence: Synthetic oligonucleotide
guauguacacuggguucua

SEQ ID NO: 1113812 - RNA, 19 nt, Artificial Sequence
  Description of Artificial Sequence: Synthetic oligonucleotide
guuuguuagugcaggccuu

SEQ ID NO: 1113813 - RNA, 19 nt, Artificial Sequence
  Description of Artificial Sequence: Synthetic oligonucleotide
gcuagugggccagcguuga

SEQ ID NO: 1113814 - RNA, 19 nt, Artificial Sequence
  Description of Artificial Sequence: Synthetic oligonucleotide
cuuagcggagugcguuugu

SEQ ID NO: 1113815 - RNA, 19 nt, Artificial Sequence
  Description of Artificial Sequence: Synthetic oligonucleotide
guucgucgcuugcacugcu

SEQ ID NO: 1113816 - RNA, 19 nt, Artificial Sequence
  Description of Artificial Sequence: Synthetic oligonucleotide
gcugguacaugacgggaau

SEQ ID NO: 1113817 - RNA, 19 nt, Artificial Sequence
  Description of Artificial Sequence: Synthetic oligonucleotide
gcguugaccugaacgcuca

SEQ ID NO: 1113818 - RNA, 19 nt, Artificial Sequence
  Description of Artificial Sequence: Synthetic oligonucleotide
guuuaccacuagggcuuga

SEQ ID NO: 1113819 - RNA, 19 nt, Artificial Sequence
  Description of Artificial Sequence: Synthetic oligonucleotide
gucuuagcggagugcguuu

SEQ ID NO: 1113820 - RNA, 19 nt, Artificial Sequence
  Description of Artificial Sequence: Synthetic oligonucleotide
cacgccgcccugccucuuc

SEQ ID NO: 1113821 - RNA, 19 nt, Artificial Sequence
  Description of Artificial Sequence: Synthetic oligonucleotide
cguugcuggacuaggcuua

SEQ ID NO: 1113822 - RNA, 19 nt, Artificial Sequence
  Description of Artificial Sequence: Synthetic oligonucleotide
cagcguugaccugaacgcu

SEQ ID NO: 1113823 - RNA, 19 nt, Artificial Sequence
  Description of Artificial Sequence: Synthetic oligonucleotide
gggcgucccgcugauggca

SEQ ID NO: 1113824 - RNA, 19 nt, Artificial Sequence
  Description of Artificial Sequence: Synthetic oligonucleotide
gucccuauauguggugguu

SEQ ID NO: 1113825 - RNA, 19 nt, Artificial Sequence
  Description of Artificial Sequence: Synthetic oligonucleotide
cgcaccggugauuagcucu

SEQ ID NO: 1113826 - RNA, 19 nt, Artificial Sequence
  Description of Artificial Sequence: Synthetic oligonucleotide
ggaguuugguaggacgcuu

SEQ ID NO: 1113827 - RNA, 19 nt, Artificial Sequence
  Description of Artificial Sequence: Synthetic oligonucleotide
gcccgggcauaugcuagug

SEQ ID NO: 1113828 - RNA, 19 nt, Artificial Sequence
  Description of Artificial Sequence: Synthetic oligonucleotide
caucgauggccaccucaau

SEQ ID NO: 1113829 - RNA, 19 nt, Artificial Sequence
  Description of Artificial Sequence: Synthetic oligonucleotide
ccacuucggcugaggagca

SEQ ID NO: 1113830 - RNA, 19 nt, Artificial Sequence
  Description of Artificial Sequence: Synthetic oligonucleotide
ggucaacccuugaaccacu

SEQ ID NO: 1113831 - RNA, 19 nt, Artificial Sequence
  Description of Artificial Sequence: Synthetic oligonucleotide
gcggagugcguuuguuagu

SEQ ID NO: 1113832 - RNA, 19 nt, Artificial Sequence
  Description of Artificial Sequence: Synthetic oligonucleotide
ccacuagggcuugaccaca

SEQ ID NO: 1113833 - RNA, 19 nt, Artificial Sequence
  Description of Artificial Sequence: Synthetic oligonucleotide
cgucccgcugauggcauug

SEQ ID NO: 1113834 - RNA, 19 nt, Artificial Sequence
  Description of Artificial Sequence: Synthetic oligonucleotide
ccucguucacuaguacaaa

SEQ ID NO: 1113835 - RNA, 19 nt, Artificial Sequence
  Description of Artificial Sequence: Synthetic oligonucleotide
ccuuauugucaggguaucu

SEQ ID NO: 1113836 - RNA, 19 nt, Artificial Sequence
  Description of Artificial Sequence: Synthetic oligonucleotide
ccaacucaccacaggguuu

SEQ ID NO: 1113837 - RNA, 19 nt, Artificial Sequence
  Description of Artificial Sequence: Synthetic oligonucleotide
cguugaccugaacgcucac

SEQ ID NO: 1113838 - RNA, 19 nt, Artificial Sequence
  Description of Artificial Sequence: Synthetic oligonucleotide
caaugggguucaggucggu

SEQ ID NO: 1113839 - RNA, 19 nt, Artificial Sequence
  Description of Artificial Sequence: Synthetic oligonucleotide
gcucggucgcaccggugau

SEQ ID NO: 1113840 - RNA, 19 nt, Artificial Sequence
  Description of Artificial Sequence: Synthetic oligonucleotide
cucggucgcaccggugauu

SEQ ID NO: 1113841 - RNA, 19 nt, Artificial Sequence
  Description of Artificial Sequence: Synthetic oligonucleotide
ccuauauguggugguucau

SEQ ID NO: 1113842 - RNA, 19 nt, Artificial Sequence
  Description of Artificial Sequence: Synthetic oligonucleotide
cgguguggugcugguacau

SEQ ID NO: 1113843 - RNA, 19 nt, Artificial Sequence
  Description of Artificial Sequence: Synthetic oligonucleotide
ccgguuccccauggcuucu

SEQ ID NO: 1113844 - RNA, 19 nt, Artificial Sequence
  Description of Artificial Sequence: Synthetic oligonucleotide
aauagauucucacaugggc

SEQ ID NO: 1113845 - RNA, 19 nt, Artificial Sequence
  Description of Artificial Sequence: Synthetic oligonucleotide
aaaagggacucacagacgc

SEQ ID NO: 1113846 - RNA, 19 nt, Artificial Sequence
  Description of Artificial Sequence: Synthetic oligonucleotide
gaaauagauucucacaugg

SEQ ID NO: 1113847 - RNA, 19 nt, Artificial Sequence
  Description of Artificial Sequence: Synthetic oligonucleotide
uuuaugugcacaauuauga

SEQ ID NO: 1113848 - RNA, 19 nt, Artificial Sequence
  Description of Artificial Sequence: Synthetic oligonucleotide
aaguccaacuguuaauugc

SEQ ID NO: 1113849 - RNA, 19 nt, Artificial Sequence
  Description of Artificial Sequence: Synthetic oligonucleotide
ugcacaauuaugaaaagga

SEQ ID NO: 1113850 - RNA, 19 nt, Artificial Sequence
  Description of Artificial Sequence: Synthetic oligonucleotide
aacgccaccgaacacacgg

SEQ ID NO: 1113851 - RNA, 19 nt, Artificial Sequence
  Description of Artificial Sequence: Synthetic oligonucleotide
aaagcuggggccuauagcu

SEQ ID NO: 1113852 - RNA, 19 nt, Artificial Sequence
  Description of Artificial Sequence: Synthetic oligonucleotide
uugaacguaagagaaaggg

SEQ ID NO: 1113853 - RNA, 19 nt, Artificial Sequence
  Description of Artificial Sequence: Synthetic oligonucleotide
ugaauauugccuaauggga

SEQ ID NO: 1113854 - RNA, 19 nt, Artificial Sequence
  Description of Artificial Sequence: Synthetic oligonucleotide
aacucaaccaugcaggaca

SEQ ID NO: 1113855 - RNA, 19 nt, Artificial Sequence
  Description of Artificial Sequence: Synthetic oligonucleotide
uuuuaugugcacaauuaug

SEQ ID NO: 1113856 - RNA, 19 nt, Artificial Sequence
  Description of Artificial Sequence: Synthetic oligonucleotide
ugaacguaagagaaagggg

SEQ ID NO: 1113857 - RNA, 19 nt, Artificial Sequence
  Description of Artificial Sequence: Synthetic oligonucleotide
uauggugacugacacagag

SEQ ID NO: 1113858 - RNA, 19 nt, Artificial Sequence
  Description of Artificial Sequence: Synthetic oligonucleotide
uguauuauugcugugaaua

SEQ ID NO: 1113859 - RNA, 19 nt, Artificial Sequence
  Description of Artificial Sequence: Synthetic oligonucleotide
auugguugcaagcaagcac

SEQ ID NO: 1113860 - RNA, 19 nt, Artificial Sequence
  Description of Artificial Sequence: Synthetic oligonucleotide
ucuugaacguaagagaaag

SEQ ID NO: 1113861 - RNA, 19 nt, Artificial Sequence
  Description of Artificial Sequence: Synthetic oligonucleotide
aagagaaaggggaaacgcc

SEQ ID NO: 1113862 - RNA, 19 nt, Artificial Sequence
  Description of Artificial Sequence: Synthetic oligonucleotide
gauuaccccaaccugugcg

SEQ ID NO: 1113863 - RNA, 19 nt, Artificial Sequence
  Description of Artificial Sequence: Synthetic oligonucleotide
gacuuagucggucuugacg

SEQ ID NO: 1113864 - RNA, 19 nt, Artificial Sequence
  Description of Artificial Sequence: Synthetic oligonucleotide
agagguucccuaaacagcc

SEQ ID NO: 1113865 - RNA, 19 nt, Artificial Sequence
  Description of Artificial Sequence: Synthetic oligonucleotide
acuuagucggucuugacgu

SEQ ID NO: 1113866 - RNA, 19 nt, Artificial Sequence
  Description of Artificial Sequence: Synthetic oligonucleotide
agacauagcaggcaacggg

SEQ ID NO: 1113867 - RNA, 19 nt, Artificial Sequence
  Description of Artificial Sequence: Synthetic oligonucleotide
ugcacuaagggguuggagc

SEQ ID NO: 1113868 - RNA, 19 nt, Artificial Sequence
  Description of Artificial Sequence: Synthetic oligonucleotide
uuacucacaguucauggcu

SEQ ID NO: 1113869 - RNA, 19 nt, Artificial Sequence
  Description of Artificial Sequence: Synthetic oligonucleotide
uaaacagccagcagacucc

SEQ ID NO: 1113870 - RNA, 19 nt, Artificial Sequence
  Description of Artificial Sequence: Synthetic oligonucleotide
cuugacguggccauuggcc

SEQ ID NO: 1113871 - RNA, 19 nt, Artificial Sequence
  Description of Artificial Sequence: Synthetic oligonucleotide
aguccaacuguuaauugcc

SEQ ID NO: 1113872 - RNA, 19 nt, Artificial Sequence
  Description of Artificial Sequence: Synthetic oligonucleotide
auuaccccaaccugugcgc

SEQ ID NO: 1113873 - RNA, 19 nt, Artificial Sequence
  Description of Artificial Sequence: Synthetic oligonucleotide
cuugugcugaaccaagagg

SEQ ID NO: 1113874 - RNA, 19 nt, Artificial Sequence
  Description of Artificial Sequence: Synthetic oligonucleotide
uguuaauugcccaggcccc

SEQ ID NO: 1113875 - RNA, 19 nt, Artificial Sequence
  Description of Artificial Sequence: Synthetic oligonucleotide
uauguauuauugcugugaa

SEQ ID NO: 1113876 - RNA, 19 nt, Artificial Sequence
  Description of Artificial Sequence: Synthetic oligonucleotide
uggugacugacacagagaa

SEQ ID NO: 1113877 - RNA, 19 nt, Artificial Sequence
  Description of Artificial Sequence: Synthetic oligonucleotide
gaacguaagagaaagggga

SEQ ID NO: 1113878 - RNA, 19 nt, Artificial Sequence
  Description of Artificial Sequence: Synthetic oligonucleotide
uauuauugcugugaauaag

SEQ ID NO: 1113879 - RNA, 19 nt, Artificial Sequence
  Description of Artificial Sequence: Synthetic oligonucleotide
cuagcagacauccaaagca

SEQ ID NO: 1113880 - RNA, 19 nt, Artificial Sequence
  Description of Artificial Sequence: Synthetic oligonucleotide
uauagcuuguccagguaug

SEQ ID NO: 1113881 - RNA, 19 nt, Artificial Sequence
  Description of Artificial Sequence: Synthetic oligonucleotide
uugccuuacucacaguuca

SEQ ID NO: 1113882 - RNA, 19 nt, Artificial Sequence
  Description of Artificial Sequence: Synthetic oligonucleotide
agaaaggggaaacgccacc

SEQ ID NO: 1113883 - RNA, 19 nt, Artificial Sequence
  Description of Artificial Sequence: Synthetic oligonucleotide
uccuuaaguuccuaggaga

SEQ ID NO: 1113884 - RNA, 19 nt, Artificial Sequence
  Description of Artificial Sequence: Synthetic oligonucleotide
agaaauagauucucacaug

SEQ ID NO: 1113885 - RNA, 19 nt, Artificial Sequence
  Description of Artificial Sequence: Synthetic oligonucleotide
uagauucucacaugggcug

SEQ ID NO: 1113886 - RNA, 19 nt, Artificial Sequence
  Description of Artificial Sequence: Synthetic oligonucleotide
uccuauccacuucaaaggc

SEQ ID NO: 1113887 - RNA, 19 nt, Artificial Sequence
  Description of Artificial Sequence: Synthetic oligonucleotide
uaaaugucuugaacguaag

SEQ ID NO: 1113888 - RNA, 19 nt, Artificial Sequence
  Description of Artificial Sequence: Synthetic oligonucleotide
gauggguagagagccaugg

SEQ ID NO: 1113889 - RNA, 19 nt, Artificial Sequence
  Description of Artificial Sequence: Synthetic oligonucleotide
gguauggugacugacacag

SEQ ID NO: 1113890 - RNA, 19 nt, Artificial Sequence
  Description of Artificial Sequence: Synthetic oligonucleotide
auagucaauaaagcaagag

SEQ ID NO: 1113891 - RNA, 19 nt, Artificial Sequence
  Description of Artificial Sequence: Synthetic oligonucleotide
gaacaggggaccuacauaa

SEQ ID NO: 1113892 - RNA, 19 nt, Artificial Sequence
  Description of Artificial Sequence: Synthetic oligonucleotide
gauauggguauggugacug

SEQ ID NO: 1113893 - RNA, 19 nt, Artificial Sequence
  Description of Artificial Sequence: Synthetic oligonucleotide
ucaaccaugcaggacagca

SEQ ID NO: 1113894 - RNA, 19 nt, Artificial Sequence
  Description of Artificial Sequence: Synthetic oligonucleotide
aaaugucuugaacguaaga

SEQ ID NO: 1113895 - RNA, 19 nt, Artificial Sequence
  Description of Artificial Sequence: Synthetic oligonucleotide
ugugauugcccuacugggc

SEQ ID NO: 1113896 - RNA, 19 nt, Artificial Sequence
  Description of Artificial Sequence: Synthetic oligonucleotide
gaaaggggaaacgccaccg

SEQ ID NO: 1113897 - RNA, 19 nt, Artificial Sequence
  Description of Artificial Sequence: Synthetic oligonucleotide
ugcaacucugagauggcug

SEQ ID NO: 1113898 - RNA, 19 nt, Artificial Sequence
  Description of Artificial Sequence: Synthetic oligonucleotide
aagccuagcagacauccaa

SEQ ID NO: 1113899 - RNA, 19 nt, Artificial Sequence
  Description of Artificial Sequence: Synthetic oligonucleotide
guuggagcccugaagauag

SEQ ID NO: 1113900 - RNA, 19 nt, Artificial Sequence
  Description of Artificial Sequence: Synthetic oligonucleotide
aaacagccagcagacuccc

SEQ ID NO: 1113901 - RNA, 19 nt, Artificial Sequence
  Description of Artificial Sequence: Synthetic oligonucleotide
acaaauggagacauagcag

SEQ ID NO: 1113902 - RNA, 19 nt, Artificial Sequence
  Description of Artificial Sequence: Synthetic oligonucleotide
aguaucgccgggcaagcag

SEQ ID NO: 1113903 - RNA, 19 nt, Artificial Sequence
  Description of Artificial Sequence: Synthetic oligonucleotide
guauauuuuaugugcacaa

SEQ ID NO: 1113904 - RNA, 19 nt, Artificial Sequence
  Description of Artificial Sequence: Synthetic oligonucleotide
uggguauggugacugacac

SEQ ID NO: 1113905 - RNA, 19 nt, Artificial Sequence
  Description of Artificial Sequence: Synthetic oligonucleotide
ugugcugaguaucgccggg

SEQ ID NO: 1113906 - RNA, 19 nt, Artificial Sequence
  Description of Artificial Sequence: Synthetic oligonucleotide
aggaaguuuucccagcccu

SEQ ID NO: 1113907 - RNA, 19 nt, Artificial Sequence
  Description of Artificial Sequence: Synthetic oligonucleotide
cuugaacguaagagaaagg

SEQ ID NO: 1113908 - RNA, 19 nt, Artificial Sequence
  Description of Artificial Sequence: Synthetic oligonucleotide
uccuaggagagaccuuagg

SEQ ID NO: 1113909 - RNA, 19 nt, Artificial Sequence
  Description of Artificial Sequence: Synthetic oligonucleotide
uucucacaugggcugaccc

SEQ ID NO: 1113910 - RNA, 19 nt, Artificial Sequence
  Description of Artificial Sequence: Synthetic oligonucleotide
caugugccuuucuugagag

SEQ ID NO: 1113911 - RNA, 19 nt, Artificial Sequence
  Description of Artificial Sequence: Synthetic oligonucleotide
uugacguggccauuggcca

SEQ ID NO: 1113912 - RNA, 19 nt, Artificial Sequence
  Description of Artificial Sequence: Synthetic oligonucleotide
uugccuaaugggaccagcc

SEQ ID NO: 1113913 - RNA, 19 nt, Artificial Sequence
  Description of Artificial Sequence: Synthetic oligonucleotide
auagauucucacaugggcu

SEQ ID NO: 1113914 - RNA, 19 nt, Artificial Sequence
  Description of Artificial Sequence: Synthetic oligonucleotide
caaaagggacucacagacg

SEQ ID NO: 1113915 - RNA, 19 nt, Artificial Sequence
  Description of Artificial Sequence: Synthetic oligonucleotide
ugcugaaccaagagguaac

SEQ ID NO: 1113916 - RNA, 19 nt, Artificial Sequence
  Description of Artificial Sequence: Synthetic oligonucleotide
uccugauauggguauggug

SEQ ID NO: 1113917 - RNA, 19 nt, Artificial Sequence
  Description of Artificial Sequence: Synthetic oligonucleotide
uuagguccucacauuaguc

SEQ ID NO: 1113918 - RNA, 19 nt, Artificial Sequence
  Description of Artificial Sequence: Synthetic oligonucleotide
ucacagacgcucccuaugu

SEQ ID NO: 1113919 - RNA, 19 nt, Artificial Sequence
  Description of Artificial Sequence: Synthetic oligonucleotide
auugccuaaugggaccagc

SEQ ID NO: 1113920 - RNA, 19 nt, Artificial Sequence
  Description of Artificial Sequence: Synthetic oligonucleotide
uagcagacauccaaagcaa

SEQ ID NO: 1113921 - RNA, 19 nt, Artificial Sequence
  Description of Artificial Sequence: Synthetic oligonucleotide
uuuucccagcccuugcaca

SEQ ID NO: 1113922 - RNA, 19 nt, Artificial Sequence
  Description of Artificial Sequence: Synthetic oligonucleotide
ccuuaugugguugugauug

SEQ ID NO: 1113923 - RNA, 19 nt, Artificial Sequence
  Description of Artificial Sequence: Synthetic oligonucleotide
auugugacucucuggcaug

SEQ ID NO: 1113924 - RNA, 19 nt, Artificial Sequence
  Description of Artificial Sequence: Synthetic oligonucleotide
aggggaccuacauaagcag

SEQ ID NO: 1113925 - RNA, 19 nt, Artificial Sequence
  Description of Artificial Sequence: Synthetic oligonucleotide
gccauugugacucucuggc

SEQ ID NO: 1113926 - RNA, 19 nt, Artificial Sequence
  Description of Artificial Sequence: Synthetic oligonucleotide
agucugggcuauuugguga

SEQ ID NO: 1113927 - RNA, 19 nt, Artificial Sequence
  Description of Artificial Sequence: Synthetic oligonucleotide
agagaaaggggaaacgcca

SEQ ID NO: 1113928 - RNA, 19 nt, Artificial Sequence
  Description of Artificial Sequence: Synthetic oligonucleotide
uaaugggaccagccaaagc

SEQ ID NO: 1113929 - RNA, 19 nt, Artificial Sequence
  Description of Artificial Sequence: Synthetic oligonucleotide
aaaggggaaacgccaccga

SEQ ID NO: 1113930 - RNA, 19 nt, Artificial Sequence
  Description of Artificial Sequence: Synthetic oligonucleotide
guaaaugucuugaacguaa

SEQ ID NO: 1113931 - RNA, 19 nt, Artificial Sequence
  Description of Artificial Sequence: Synthetic oligonucleotide
uuaugugguugugauugcc

SEQ ID NO: 1113932 - RNA, 19 nt, Artificial Sequence
  Description of Artificial Sequence: Synthetic oligonucleotide
uauugguugcaagcaagca

SEQ ID NO: 1113933 - RNA, 19 nt, Artificial Sequence
  Description of Artificial Sequence: Synthetic oligonucleotide
caugggcugacccacucag

SEQ ID NO: 1113934 - RNA, 19 nt, Artificial Sequence
  Description of Artificial Sequence: Synthetic oligonucleotide
gugacucucuggcaugagg

SEQ ID NO: 1113935 - RNA, 19 nt, Artificial Sequence
  Description of Artificial Sequence: Synthetic oligonucleotide
ggagacauagcaggcaacg

SEQ ID NO: 1113936 - RNA, 19 nt, Artificial Sequence
  Description of Artificial Sequence: Synthetic oligonucleotide
ucgccgggcaagcagauuc

SEQ ID NO: 1113937 - RNA, 19 nt, Artificial Sequence
  Description of Artificial Sequence: Synthetic oligonucleotide
caaagcuggggccuauagc

SEQ ID NO: 1113938 - RNA, 19 nt, Artificial Sequence
  Description of Artificial Sequence: Synthetic oligonucleotide
cugauauggguauggugac

SEQ ID NO: 1113939 - RNA, 19 nt, Artificial Sequence
  Description of Artificial Sequence: Synthetic oligonucleotide
cccuacugggcuaagaccc

SEQ ID NO: 1113940 - RNA, 19 nt, Artificial Sequence
  Description of Artificial Sequence: Synthetic oligonucleotide
gaaacccuccugauauggg

SEQ ID NO: 1113941 - RNA, 19 nt, Artificial Sequence
  Description of Artificial Sequence: Synthetic oligonucleotide
accuacauaagcagcccac

SEQ ID NO: 1113942 - RNA, 19 nt, Artificial Sequence
  Description of Artificial Sequence: Synthetic oligonucleotide
ucuugacguggccauuggc

SEQ ID NO: 1113943 - RNA, 19 nt, Artificial Sequence
  Description of Artificial Sequence: Synthetic oligonucleotide
cuuaugugguugugauugc

SEQ ID NO: 1113944 - RNA, 19 nt, Artificial Sequence
  Description of Artificial Sequence: Synthetic oligonucleotide
acacacgggauugaaaccu

SEQ ID NO: 1113945 - RNA, 19 nt, Artificial Sequence
  Description of Artificial Sequence: Synthetic oligonucleotide
acaaaucaaucaugugccu

SEQ ID NO: 1113946 - RNA, 19 nt, Artificial Sequence
  Description of Artificial Sequence: Synthetic oligonucleotide
gaauaagcacaggccauug

SEQ ID NO: 1113947 - RNA, 19 nt, Artificial Sequence
  Description of Artificial Sequence: Synthetic oligonucleotide
caacuguuaauugcccagg

SEQ ID NO: 1113948 - RNA, 19 nt, Artificial Sequence
  Description of Artificial Sequence: Synthetic oligonucleotide
ugauuaccccaaccugugc

SEQ ID NO: 1113949 - RNA, 19 nt, Artificial Sequence
  Description of Artificial Sequence: Synthetic oligonucleotide
cugaguaucgccgggcaag

SEQ ID NO: 1113950 - RNA, 19 nt, Artificial Sequence
  Description of Artificial Sequence: Synthetic oligonucleotide
guauugguugcaagcaagc

SEQ ID NO: 1113951 - RNA, 19 nt, Artificial Sequence
  Description of Artificial Sequence: Synthetic oligonucleotide
cuugauuaccccaaccugu

SEQ ID NO: 1113952 - RNA, 19 nt, Artificial Sequence
  Description of Artificial Sequence: Synthetic oligonucleotide
gagguauugguugcaagca

SEQ ID NO: 1113953 - RNA, 19 nt, Artificial Sequence
  Description of Artificial Sequence: Synthetic oligonucleotide
acagacgcucccuauguau

SEQ ID NO: 1113954 - RNA, 19 nt, Artificial Sequence
  Description of Artificial Sequence: Synthetic oligonucleotide
uauggguauggugacugac

SEQ ID NO: 1113955 - RNA, 19 nt, Artificial Sequence
  Description of Artificial Sequence: Synthetic oligonucleotide
agguaaccccaccagcuug

SEQ ID NO: 1113956 - RNA, 19 nt, Artificial Sequence
  Description of Artificial Sequence: Synthetic oligonucleotide
aacguaagagaaaggggaa

SEQ ID NO: 1113957 - RNA, 19 nt, Artificial Sequence
  Description of Artificial Sequence: Synthetic oligonucleotide
gguagccucagguuagaag

SEQ ID NO: 1113958 - RNA, 19 nt, Artificial Sequence
  Description of Artificial Sequence: Synthetic oligonucleotide
cagcccuugcacaagagca

SEQ ID NO: 1113959 - RNA, 19 nt, Artificial Sequence
  Description of Artificial Sequence: Synthetic oligonucleotide
uggcaugaggaagggacag

SEQ ID NO: 1113960 - RNA, 19 nt, Artificial Sequence
  Description of Artificial Sequence: Synthetic oligonucleotide
gcacuaagggguuggagcc

SEQ ID NO: 1113961 - RNA, 19 nt, Artificial Sequence
  Description of Artificial Sequence: Synthetic oligonucleotide
cuaugagcgccacaggaga

SEQ ID NO: 1113962 - RNA, 19 nt, Artificial Sequence
  Description of Artificial Sequence: Synthetic oligonucleotide
gaaacgccaccgaacacac

SEQ ID NO: 1113963 - RNA, 19 nt, Artificial Sequence
  Description of Artificial Sequence: Synthetic oligonucleotide
aggggaaacgccaccgaac

SEQ ID NO: 1113964 - RNA, 19 nt, Artificial Sequence
  Description of Artificial Sequence: Synthetic oligonucleotide
agaacaggggaccuacaua

SEQ ID NO: 1113965 - RNA, 19 nt, Artificial Sequence
  Description of Artificial Sequence: Synthetic oligonucleotide
accugugcgccccagugca

SEQ ID NO: 1113966 - RNA, 19 nt, Artificial Sequence
  Description of Artificial Sequence: Synthetic oligonucleotide
agcagacauccaaagcaac

SEQ ID NO: 1113967 - RNA, 19 nt, Artificial Sequence
  Description of Artificial Sequence: Synthetic oligonucleotide
accuuagguccucacauua

SEQ ID NO: 1113968 - RNA, 19 nt, Artificial Sequence
  Description of Artificial Sequence: Synthetic oligonucleotide
ugugcugaaccaagaggua

SEQ ID NO: 1113969 - RNA, 19 nt, Artificial Sequence
  Description of Artificial Sequence: Synthetic oligonucleotide
uuaauugcccaggccccag

SEQ ID NO: 1113970 - RNA, 19 nt, Artificial Sequence
  Description of Artificial Sequence: Synthetic oligonucleotide
uacucacaguucauggcua

SEQ ID NO: 1113971 - RNA, 19 nt, Artificial Sequence
  Description of Artificial Sequence: Synthetic oligonucleotide
caugaaaagugagggacca

SEQ ID NO: 1113972 - RNA, 19 nt, Artificial Sequence
  Description of Artificial Sequence: Synthetic oligonucleotide
acacgggauugaaaccucc

SEQ ID NO: 1113973 - RNA, 19 nt, Artificial Sequence
  Description of Artificial Sequence: Synthetic oligonucleotide
cucacagacgcucccuaug

SEQ ID NO: 1113974 - RNA, 19 nt, Artificial Sequence
  Description of Artificial Sequence: Synthetic oligonucleotide
aacgggcucacaaaucaau

SEQ ID NO: 1113975 - RNA, 19 nt, Artificial Sequence
  Description of Artificial Sequence: Synthetic oligonucleotide
ugcuagugguaaaugucuu

SEQ ID NO: 1113976 - RNA, 19 nt, Artificial Sequence
  Description of Artificial Sequence: Synthetic oligonucleotide
auagcaggcaacgggcuca

SEQ ID NO: 1113977 - RNA, 19 nt, Artificial Sequence
  Description of Artificial Sequence: Synthetic oligonucleotide
uggagacauagcaggcaac

SEQ ID NO: 1113978 - RNA, 19 nt, Artificial Sequence
  Description of Artificial Sequence: Synthetic oligonucleotide
agguauugguugcaagcaa

SEQ ID NO: 1113979 - RNA, 19 nt, Artificial Sequence
  Description of Artificial Sequence: Synthetic oligonucleotide
caauaaagcaagagcugaa

SEQ ID NO: 1113980 - RNA, 19 nt, Artificial Sequence
  Description of Artificial Sequence: Synthetic oligonucleotide
ugaguaucgccgggcaagc

SEQ ID NO: 1113981 - RNA, 19 nt, Artificial Sequence
  Description of Artificial Sequence: Synthetic oligonucleotide
uccccgcuguucagaaggg

SEQ ID NO: 1113982 - RNA, 19 nt, Artificial Sequence
  Description of Artificial Sequence: Synthetic oligonucleotide
acgggcucacaaaucaauc

SEQ ID NO: 1113983 - RNA, 19 nt, Artificial Sequence
  Description of Artificial Sequence: Synthetic oligonucleotide
auguauuauugcugugaau

SEQ ID NO: 1113984 - RNA, 19 nt, Artificial Sequence
  Description of Artificial Sequence: Synthetic oligonucleotide
ccaugaaaagugagggacc

SEQ ID NO: 1113985 - RNA, 19 nt, Artificial Sequence
  Description of Artificial Sequence: Synthetic oligonucleotide
gcuagugguaaaugucuug

SEQ ID NO: 1113986 - RNA, 19 nt, Artificial Sequence
  Description of Artificial Sequence: Synthetic oligonucleotide
ucggucuugacguggccau

SEQ ID NO: 1113987 - RNA, 19 nt, Artificial Sequence
  Description of Artificial Sequence: Synthetic oligonucleotide
uggggccuauagcuugucc

SEQ ID NO: 1113988 - RNA, 19 nt, Artificial Sequence
  Description of Artificial Sequence: Synthetic oligonucleotide
gggaccuacauaagcagcc

SEQ ID NO: 1113989 - RNA, 19 nt, Artificial Sequence
  Description of Artificial Sequence: Synthetic oligonucleotide
  modified_base (13)..(13): a, c, u, g, unknown or other
uggcggacuggcnggcucc

SEQ ID NO: 1113990 - RNA, 19 nt, Artificial Sequence
  Description of Artificial Sequence: Synthetic oligonucleotide
ccuauccacuucaaaggcc

SEQ ID NO: 1113991 - RNA, 19 nt, Artificial Sequence
  Description of Artificial Sequence: Synthetic oligonucleotide
gugguugugauugcccuac

SEQ ID NO: 1113992 - RNA, 19 nt, Artificial Sequence
  Description of Artificial Sequence: Synthetic oligonucleotide
cuugggcccagaacaucag

SEQ ID NO: 1113993 - RNA, 19 nt, Artificial Sequence
  Description of Artificial Sequence: Synthetic oligonucleotide
ugauauggguauggugacu

SEQ ID NO: 1113994 - RNA, 19 nt, Artificial Sequence
  Description of Artificial Sequence: Synthetic oligonucleotide
cuuagucggucuugacgug

SEQ ID NO: 1113995 - RNA, 19 nt, Artificial Sequence
  Description of Artificial Sequence: Synthetic oligonucleotide
gccaagggaacaguguggg

SEQ ID NO: 1113996 - RNA, 19 nt, Artificial Sequence
  Description of Artificial Sequence: Synthetic oligonucleotide
ugcgccccagugcacuaag

SEQ ID NO: 1113997 - RNA, 19 nt, Artificial Sequence
  Description of Artificial Sequence: Synthetic oligonucleotide
ggcccuguuccaaagcugg

SEQ ID NO: 1113998 - RNA, 19 nt, Artificial Sequence
  Description of Artificial Sequence: Synthetic oligonucleotide
auauggguauggugacuga

SEQ ID NO: 1113999 - RNA, 19 nt, Artificial Sequence
  Description of Artificial Sequence: Synthetic oligonucleotide
cauagcaggcaacgggcuc

SEQ ID NO: 1114000 - RNA, 19 nt, Artificial Sequence
  Description of Artificial Sequence: Synthetic oligonucleotide
ggaaacgccaccgaacaca

SEQ ID NO: 1114001 - RNA, 19 nt, Artificial Sequence
  Description of Artificial Sequence: Synthetic oligonucleotide
ugugguugugauugcccua

SEQ ID NO: 1114002 - RNA, 19 nt, Artificial Sequence
  Description of Artificial Sequence: Synthetic oligonucleotide
aggcaacgggcucacaaau

SEQ ID NO: 1114003 - RNA, 19 nt, Artificial Sequence
  Description of Artificial Sequence: Synthetic oligonucleotide
ccuagcagacauccaaagc

SEQ ID NO: 1114004 - RNA, 19 nt, Artificial Sequence
  Description of Artificial Sequence: Synthetic oligonucleotide
uuaccccaaccugugcgcc

SEQ ID NO: 1114005 - RNA, 19 nt, Artificial Sequence
  Description of Artificial Sequence: Synthetic oligonucleotide
gcaagcaagcaccugaaua

SEQ ID NO: 1114006 - RNA, 19 nt, Artificial Sequence
  Description of Artificial Sequence: Synthetic oligonucleotide
ccuugcacaagagcaaugc

SEQ ID NO: 1114007 - RNA, 19 nt, Artificial Sequence
  Description of Artificial Sequence: Synthetic oligonucleotide
uugugacucucuggcauga

SEQ ID NO: 1114008 - RNA, 19 nt, Artificial Sequence
  Description of Artificial Sequence: Synthetic oligonucleotide
uauugccuaaugggaccag

SEQ ID NO: 1114009 - RNA, 19 nt, Artificial Sequence
  Description of Artificial Sequence: Synthetic oligonucleotide
ucugugccuaugagcgcca

SEQ ID NO: 1114010 - RNA, 19 nt, Artificial Sequence
  Description of Artificial Sequence: Synthetic oligonucleotide
caccaagcagccugcuggc

SEQ ID NO: 1114011 - RNA, 19 nt, Artificial Sequence
  Description of Artificial Sequence: Synthetic oligonucleotide
auggguauggugacugaca

SEQ ID NO: 1114012 - RNA, 19 nt, Artificial Sequence
  Description of Artificial Sequence: Synthetic oligonucleotide
gacacccaacuucccaaca

SEQ ID NO: 1114013 - RNA, 19 nt, Artificial Sequence
  Description of Artificial Sequence: Synthetic oligonucleotide
aggaaacccuccugauaug

SEQ ID NO: 1114014 - RNA, 19 nt, Artificial Sequence
  Description of Artificial Sequence: Synthetic oligonucleotide
  modified_base (8)..(8): a, c, u, g, unknown or other
gacuggcnggcuccccggg

SEQ ID NO: 1114015 - RNA, 19 nt, Artificial Sequence
  Description of Artificial Sequence: Synthetic oligonucleotide
ggccauugugacucucugg

SEQ ID NO: 1114016 - RNA, 19 nt, Artificial Sequence
  Description of Artificial Sequence: Synthetic oligonucleotide
ugcaagcaagcaccugaau

SEQ ID NO: 1114017 - RNA, 19 nt, Artificial Sequence
  Description of Artificial Sequence: Synthetic oligonucleotide
gccuagcagacauccaaag

SEQ ID NO: 1114018 - RNA, 19 nt, Artificial Sequence
  Description of Artificial Sequence: Synthetic oligonucleotide
guucugugccuaugagcgc

SEQ ID NO: 1114019 - RNA, 19 nt, Artificial Sequence
  Description of Artificial Sequence: Synthetic oligonucleotide
ggcuaggccucucaccugc

SEQ ID NO: 1114020 - RNA, 19 nt, Artificial Sequence
  Description of Artificial Sequence: Synthetic oligonucleotide
caguguagccuccccuggc

SEQ ID NO: 1114021 - RNA, 19 nt, Artificial Sequence
  Description of Artificial Sequence: Synthetic oligonucleotide
ggggccuauagcuugucca

SEQ ID NO: 1114022 - RNA, 19 nt, Artificial Sequence
  Description of Artificial Sequence: Synthetic oligonucleotide
gauucucacaugggcugac

SEQ ID NO: 1114023 - RNA, 19 nt, Artificial Sequence
  Description of Artificial Sequence: Synthetic oligonucleotide
gguauggguagccucaggu

SEQ ID NO: 1114024 - RNA, 19 nt, Artificial Sequence
  Description of Artificial Sequence: Synthetic oligonucleotide
agacgcucccuauguauua

SEQ ID NO: 1114025 - RNA, 19 nt, Artificial Sequence
  Description of Artificial Sequence: Synthetic oligonucleotide
acguaagagaaaggggaaa

SEQ ID NO: 1114026 - RNA, 19 nt, Artificial Sequence
  Description of Artificial Sequence: Synthetic oligonucleotide
cacacgggauugaaaccuc

SEQ ID NO: 1114027 - RNA, 19 nt, Artificial Sequence
  Description of Artificial Sequence: Synthetic oligonucleotide
ugccugcuagugguaaaug

SEQ ID NO: 1114028 - RNA, 19 nt, Artificial Sequence
  Description of Artificial Sequence: Synthetic oligonucleotide
ugugacucucuggcaugag

SEQ ID NO: 1114029 - RNA, 19 nt, Artificial Sequence
  Description of Artificial Sequence: Synthetic oligonucleotide
cuauagcuuguccagguau

SEQ ID NO: 1114030 - RNA, 19 nt, Artificial Sequence
  Description of Artificial Sequence: Synthetic oligonucleotide
aggacaaaagggacucaca

SEQ ID NO: 1114031 - RNA, 19 nt, Artificial Sequence
  Description of Artificial Sequence: Synthetic oligonucleotide
ggcuaagacccagucgggg

SEQ ID NO: 1114032 - RNA, 19 nt, Artificial Sequence
  Description of Artificial Sequence: Synthetic oligonucleotide
cucagacuuugccucccac

SEQ ID NO: 1114033 - RNA, 19 nt, Artificial Sequence
  Description of Artificial Sequence: Synthetic oligonucleotide
guagagagccauggaccag

SEQ ID NO: 1114034 - RNA, 19 nt, Artificial Sequence
  Description of Artificial Sequence: Synthetic oligonucleotide
ccuuagguccucacauuag

SEQ ID NO: 1114035 - RNA, 19 nt, Artificial Sequence
  Description of Artificial Sequence: Synthetic oligonucleotide
aggauggguagagagccau

SEQ ID NO: 1114036 - RNA, 19 nt, Artificial Sequence
  Description of Artificial Sequence: Synthetic oligonucleotide
ggcuugauuaccccaaccu

SEQ ID NO: 1114037 - RNA, 19 nt, Artificial Sequence
  Description of Artificial Sequence: Synthetic oligonucleotide
ugccuuacucacaguucau

SEQ ID NO: 1114038 - RNA, 19 nt, Artificial Sequence
  Description of Artificial Sequence: Synthetic oligonucleotide
aaacgccaccgaacacacg

SEQ ID NO: 1114039 - RNA, 19 nt, Artificial Sequence
  Description of Artificial Sequence: Synthetic oligonucleotide
cacuaagggguuggagccc

SEQ ID NO: 1114040 - RNA, 19 nt, Artificial Sequence
  Description of Artificial Sequence: Synthetic oligonucleotide
auggugacugacacagaga

SEQ ID NO: 1114041 - RNA, 19 nt, Artificial Sequence
  Description of Artificial Sequence: Synthetic oligonucleotide
caacaccaucccacugccc

SEQ ID NO: 1114042 - RNA, 19 nt, Artificial Sequence
  Description of Artificial Sequence: Synthetic oligonucleotide
caucccacugcccaccuua

SEQ ID NO: 1114043 - RNA, 19 nt, Artificial Sequence
  Description of Artificial Sequence: Synthetic oligonucleotide
cacgggauugaaaccucca

SEQ ID NO: 1114044 - RNA, 19 nt, Artificial Sequence
  Description of Artificial Sequence: Synthetic oligonucleotide
gugcacuaagggguuggag

SEQ ID NO: 1114045 - RNA, 19 nt, Artificial Sequence
  Description of Artificial Sequence: Synthetic oligonucleotide
cguaagagaaaggggaaac

SEQ ID NO: 1114046 - RNA, 19 nt, Artificial Sequence
  Description of Artificial Sequence: Synthetic oligonucleotide
uaaccccaccagcuugguc

SEQ ID NO: 1114047 - RNA, 19 nt, Artificial Sequence
  Description of Artificial Sequence: Synthetic oligonucleotide
accuuaugugguugugauu

SEQ ID NO: 1114048 - RNA, 19 nt, Artificial Sequence
  Description of Artificial Sequence: Synthetic oligonucleotide
gcccuacugggcuaagacc

SEQ ID NO: 1114049 - RNA, 19 nt, Artificial Sequence
  Description of Artificial Sequence: Synthetic oligonucleotide
uaucgccgggcaagcagau

SEQ ID NO: 1114050 - RNA, 19 nt, Artificial Sequence
  Description of Artificial Sequence: Synthetic oligonucleotide
guaucgccgggcaagcaga

SEQ ID NO: 1114051 - RNA, 19 nt, Artificial Sequence
  Description of Artificial Sequence: Synthetic oligonucleotide
ugguugugauugcccuacu

SEQ ID NO: 1114052 - RNA, 19 nt, Artificial Sequence
  Description of Artificial Sequence: Synthetic oligonucleotide
ccaaagcaacucaaccaug

SEQ ID NO: 1114053 - RNA, 19 nt, Artificial Sequence
  Description of Artificial Sequence: Synthetic oligonucleotide
  modified_base (9)..(9): a, c, u, g, unknown or other
ggacuggcnggcuccccgg

SEQ ID NO: 1114054 - RNA, 19 nt, Artificial Sequence
  Description of Artificial Sequence: Synthetic oligonucleotide
gcaacucaaccaugcagga

SEQ ID NO: 1114055 - RNA, 19 nt, Artificial Sequence
  Description of Artificial Sequence: Synthetic oligonucleotide
gcacaauuaugaaaaggaa

SEQ ID NO: 1114056 - RNA, 19 nt, Artificial Sequence
  Description of Artificial Sequence: Synthetic oligonucleotide
aguucauggcuaggccucu

SEQ ID NO: 1114057 - RNA, 19 nt, Artificial Sequence
  Description of Artificial Sequence: Synthetic oligonucleotide
aggagagaccuuagguccu

SEQ ID NO: 1114058 - RNA, 19 nt, Artificial Sequence
  Description of Artificial Sequence: Synthetic oligonucleotide
gacuccccgcuguucagaa

SEQ ID NO: 1114059 - RNA, 19 nt, Artificial Sequence
  Description of Artificial Sequence: Synthetic oligonucleotide
gccuaaugggaccagccaa

SEQ ID NO: 1114060 - RNA, 19 nt, Artificial Sequence
  Description of Artificial Sequence: Synthetic oligonucleotide
gaagccuagcagacaucca

SEQ ID NO: 1114061 - RNA, 19 nt, Artificial Sequence
  Description of Artificial Sequence: Synthetic oligonucleotide
gucggucuugacguggcca

SEQ ID NO: 1114062 - RNA, 19 nt, Artificial Sequence
  Description of Artificial Sequence: Synthetic oligonucleotide
cuucugacuuagucggucu

SEQ ID NO: 1114063 - RNA, 19 nt, Artificial Sequence
  Description of Artificial Sequence: Synthetic oligonucleotide
gucuugaacguaagagaaa

SEQ ID NO: 1114064 - RNA, 19 nt, Artificial Sequence
  Description of Artificial Sequence: Synthetic oligonucleotide
agugcacuaagggguugga

SEQ ID NO: 1114065 - RNA, 19 nt, Artificial Sequence
  Description of Artificial Sequence: Synthetic oligonucleotide
ccagguauggguagccuca

SEQ ID NO: 1114066 - RNA, 19 nt, Artificial Sequence
  Description of Artificial Sequence: Synthetic oligonucleotide
caggcaacgggcucacaaa

SEQ ID NO: 1114067 - RNA, 19 nt, Artificial Sequence
  Description of Artificial Sequence: Synthetic oligonucleotide
caccuuaugugguugugau

SEQ ID NO: 1114068 - RNA, 19 nt, Artificial Sequence
  Description of Artificial Sequence: Synthetic oligonucleotide
aggcacuucccuugccuua

SEQ ID NO: 1114069 - RNA, 19 nt, Artificial Sequence
  Description of Artificial Sequence: Synthetic oligonucleotide
gucccuucaccaggacagg

SEQ ID NO: 1114070 - RNA, 19 nt, Artificial Sequence
  Description of Artificial Sequence: Synthetic oligonucleotide
ggacacccaacuucccaac

SEQ ID NO: 1114071 - RNA, 19 nt, Artificial Sequence
  Description of Artificial Sequence: Synthetic oligonucleotide
gagcgccacaggagaacag

SEQ ID NO: 1114072 - RNA, 19 nt, Artificial Sequence
  Description of Artificial Sequence: Synthetic oligonucleotide
gguaaaugucuugaacgua

SEQ ID NO: 1114073 - RNA, 19 nt, Artificial Sequence
  Description of Artificial Sequence: Synthetic oligonucleotide
gaggacaguccuauccacu

SEQ ID NO: 1114074 - RNA, 19 nt, Artificial Sequence
  Description of Artificial Sequence: Synthetic oligonucleotide
ccaagggaacagugugggg

SEQ ID NO: 1114075 - RNA, 19 nt, Artificial Sequence
  Description of Artificial Sequence: Synthetic oligonucleotide
guauggguagccucagguu

SEQ ID NO: 1114076 - RNA, 19 nt, Artificial Sequence
  Description of Artificial Sequence: Synthetic oligonucleotide
ccuaggagagaccuuaggu

SEQ ID NO: 1114077 - RNA, 19 nt, Artificial Sequence
  Description of Artificial Sequence: Synthetic oligonucleotide
cuccccgggcucugcgucc

SEQ ID NO: 1114078 - RNA, 19 nt, Artificial Sequence
  Description of Artificial Sequence: Synthetic oligonucleotide
gggcuugugcugaaccaag

SEQ ID NO: 1114079 - RNA, 19 nt, Artificial Sequence
  Description of Artificial Sequence: Synthetic oligonucleotide
acgccaccgaacacacggg

SEQ ID NO: 1114080 - RNA, 19 nt, Artificial Sequence
  Description of Artificial Sequence: Synthetic oligonucleotide
gucgccccagaguucaugu

SEQ ID NO: 1114081 - RNA, 19 nt, Artificial Sequence
  Description of Artificial Sequence: Synthetic oligonucleotide
ucgccccagaguucauguc

SEQ ID NO: 1114082 - RNA, 19 nt, Artificial Sequence
  Description of Artificial Sequence: Synthetic oligonucleotide
ccuaaugggaccagccaaa

SEQ ID NO: 1114083 - RNA, 19 nt, Artificial Sequence
  Description of Artificial Sequence: Synthetic oligonucleotide
cuaagggguuggagcccug

SEQ ID NO: 1114084 - RNA, 19 nt, Artificial Sequence
  Description of Artificial Sequence: Synthetic oligonucleotide
cucaaccaugcaggacagc

SEQ ID NO: 1114085 - RNA, 19 nt, Artificial Sequence
  Description of Artificial Sequence: Synthetic oligonucleotide
ugugcgccccagugcacua

SEQ ID NO: 1114086 - RNA, 19 nt, Artificial Sequence
  Description of Artificial Sequence: Synthetic oligonucleotide
agacuccccgcuguucaga

SEQ ID NO: 1114087 - RNA, 19 nt, Artificial Sequence
  Description of Artificial Sequence: Synthetic oligonucleotide
caacgggcucacaaaucaa

SEQ ID NO: 1114088 - RNA, 19 nt, Artificial Sequence
  Description of Artificial Sequence: Synthetic oligonucleotide
  modified_base (10)..(10): a, c, u, g, unknown or other
cggacuggcnggcuccccg

SEQ ID NO: 1114089 - RNA, 19 nt, Artificial Sequence
  Description of Artificial Sequence: Synthetic oligonucleotide
cgcucccuauguauuauug

SEQ ID NO: 1114090 - RNA, 19 nt, Artificial Sequence
  Description of Artificial Sequence: Synthetic oligonucleotide
gggcucacaaaucaaucau

SEQ ID NO: 1114091 - RNA, 19 nt, Artificial Sequence
  Description of Artificial Sequence: Synthetic oligonucleotide
acgcucccuauguauuauu

SEQ ID NO: 1114092 - RNA, 19 nt, Artificial Sequence
  Description of Artificial Sequence: Synthetic oligonucleotide
auugcccuacugggcuaag

SEQ ID NO: 1114093 - RNA, 19 nt, Artificial Sequence
  Description of Artificial Sequence: Synthetic oligonucleotide
gagagaccuuagguccuca

SEQ ID NO: 1114094 - RNA, 19 nt, Artificial Sequence
  Description of Artificial Sequence: Synthetic oligonucleotide
gggaaacgccaccgaacac

SEQ ID NO: 1114095 - RNA, 19 nt, Artificial Sequence
  Description of Artificial Sequence: Synthetic oligonucleotide
ggguauggugacugacaca

SEQ ID NO: 1114096 - RNA, 19 nt, Artificial Sequence
  Description of Artificial Sequence: Synthetic oligonucleotide
gggcuaagacccagucggg

SEQ ID NO: 1114097 - RNA, 19 nt, Artificial Sequence
  Description of Artificial Sequence: Synthetic oligonucleotide
gguuggagcccugaagaua

SEQ ID NO: 1114098 - RNA, 19 nt, Artificial Sequence
  Description of Artificial Sequence: Synthetic oligonucleotide
gccuauagcuuguccaggu

SEQ ID NO: 1114099 - RNA, 19 nt, Artificial Sequence
  Description of Artificial Sequence: Synthetic oligonucleotide
ggccuuuacaguguagccu

SEQ ID NO: 1114100 - RNA, 19 nt, Artificial Sequence
  Description of Artificial Sequence: Synthetic oligonucleotide
ggcaacgggcucacaaauc

SEQ ID NO: 1114101 - RNA, 19 nt, Artificial Sequence
  Description of Artificial Sequence: Synthetic oligonucleotide
cgggcucacaaaucaauca

SEQ ID NO: 1114102 - RNA, 19 nt, Artificial Sequence
  Description of Artificial Sequence: Synthetic oligonucleotide
guauggugacugacacaga

SEQ ID NO: 1114103 - RNA, 19 nt, Artificial Sequence
  Description of Artificial Sequence: Synthetic oligonucleotide
gccucagguuagaaggcac

SEQ ID NO: 1114104 - RNA, 19 nt, Artificial Sequence
  Description of Artificial Sequence: Synthetic oligonucleotide
caaccaugcaggacagcau

SEQ ID NO: 1114105 - RNA, 19 nt, Artificial Sequence
  Description of Artificial Sequence: Synthetic oligonucleotide
agugagggaccaggacaaa

SEQ ID NO: 1114106 - RNA, 19 nt, Artificial Sequence
  Description of Artificial Sequence: Synthetic oligonucleotide
cagacgcucccuauguauu

SEQ ID NO: 1114107 - RNA, 19 nt, Artificial Sequence
  Description of Artificial Sequence: Synthetic oligonucleotide
ggggccaaaggaaguuuuc

SEQ ID NO: 1114108 - RNA, 19 nt, Artificial Sequence
  Description of Artificial Sequence: Synthetic oligonucleotide
gacgcucccuauguauuau

SEQ ID NO: 1114109 - RNA, 19 nt, Artificial Sequence
  Description of Artificial Sequence: Synthetic oligonucleotide
ggagagaccuuagguccuc

SEQ ID NO: 1114110 - RNA, 19 nt, Artificial Sequence
  Description of Artificial Sequence: Synthetic oligonucleotide
cacagacgcucccuaugua

SEQ ID NO: 1114111 - RNA, 19 nt, Artificial Sequence
  Description of Artificial Sequence: Synthetic oligonucleotide
cugugccuaugagcgccac

SEQ ID NO: 1114112 - RNA, 19 nt, Artificial Sequence
  Description of Artificial Sequence: Synthetic oligonucleotide
gcugaguaucgccgggcaa

SEQ ID NO: 1114113 - RNA, 19 nt, Artificial Sequence
  Description of Artificial Sequence: Synthetic oligonucleotide
ccuacugggcuaagaccca

SEQ ID NO: 1114114 - RNA, 19 nt, Artificial Sequence
  Description of Artificial Sequence: Synthetic oligonucleotide
cccagcccuugcacaagag

SEQ ID NO: 1114115 - RNA, 19 nt, Artificial Sequence
  Description of Artificial Sequence: Synthetic oligonucleotide
cuccugggagauccaugaa

SEQ ID NO: 1114116 - RNA, 19 nt, Artificial Sequence
  Description of Artificial Sequence: Synthetic oligonucleotide
ccaccuuaugugguuguga

SEQ ID NO: 1114117 - RNA, 19 nt, Artificial Sequence
  Description of Artificial Sequence: Synthetic oligonucleotide
cccgcuguucagaagggcu

SEQ ID NO: 1114118 - RNA, 19 nt, Artificial Sequence
  Description of Artificial Sequence: Synthetic oligonucleotide
cugcaacucugagauggcu

SEQ ID NO: 1114119 - RNA, 19 nt, Artificial Sequence
  Description of Artificial Sequence: Synthetic oligonucleotide
cuggggccuauagcuuguc

SEQ ID NO: 1114120 - RNA, 19 nt, Artificial Sequence
  Description of Artificial Sequence: Synthetic oligonucleotide
  modified_base (2)..(2): a, c, u, g, unknown or other
cnggcuccccgggcucugc

SEQ ID NO: 1114121 - RNA, 19 nt, Artificial Sequence
  Description of Artificial Sequence: Synthetic oligonucleotide
ccucagguuagaaggcacu

SEQ ID NO: 1114122 - RNA, 19 nt, Artificial Sequence
  Description of Artificial Sequence: Synthetic oligonucleotide
ccuauagcuuguccaggua

SEQ ID NO: 1114123 - RNA, 19 nt, Artificial Sequence
  Description of Artificial Sequence: Synthetic oligonucleotide
  modified_base (12)..(12): a, c, u, g, unknown or other
ggcggacuggcnggcuccc

SEQ ID NO: 1114124 - RNA, 19 nt, Artificial Sequence
  Description of Artificial Sequence: Synthetic oligonucleotide
gcgccccagugcacuaagg

SEQ ID NO: 1114125 - RNA, 19 nt, Artificial Sequence
  Description of Artificial Sequence: Synthetic oligonucleotide
aucgccgggcaagcagauu

SEQ ID NO: 1114126 - RNA, 19 nt, Artificial Sequence
  Description of Artificial Sequence: Synthetic oligonucleotide
ccuacauaagcagcccacu

SEQ ID NO: 1114127 - RNA, 19 nt, Artificial Sequence
  Description of Artificial Sequence: Synthetic oligonucleotide
gccgggcaagcagauucac

SEQ ID NO: 1114128 - RNA, 19 nt, Artificial Sequence
  Description of Artificial Sequence: Synthetic oligonucleotide
cuguucagaagggcuugau

SEQ ID NO: 1114129 - RNA, 19 nt, Artificial Sequence
  Description of Artificial Sequence: Synthetic oligonucleotide
ccgaacacacgggauugaa

SEQ ID NO: 1114130 - RNA, 19 nt, Artificial Sequence
  Description of Artificial Sequence: Synthetic oligonucleotide
ggugggguaguggccccaa

SEQ ID NO: 1114131 - RNA, 19 nt, Artificial Sequence
  Description of Artificial Sequence: Synthetic oligonucleotide
gcccaccuuaugugguugu

SEQ ID NO: 1114132 - RNA, 19 nt, Artificial Sequence
  Description of Artificial Sequence: Synthetic oligonucleotide
gugcgccccagugcacuaa

SEQ ID NO: 1114133 - RNA, 19 nt, Artificial Sequence
  Description of Artificial Sequence: Synthetic oligonucleotide
  modified_base (3)..(3): a, c, u, g, unknown or other
gcnggcuccccgggcucug

SEQ ID NO: 1114134 - RNA, 19 nt, Artificial Sequence
  Description of Artificial Sequence: Synthetic oligonucleotide
gcccagaacaucagagguu

SEQ ID NO: 1114135 - RNA, 19 nt, Artificial Sequence
  Description of Artificial Sequence: Synthetic oligonucleotide
  modified_base (11)..(11): a, c, u, g, unknown or other
gcggacuggcnggcucccc

SEQ ID NO: 1114136 - RNA, 19 nt, Artificial Sequence
  Description of Artificial Sequence: Synthetic oligonucleotide
ccgcuguucagaagggcuu

SEQ ID NO: 1114137 - RNA, 19 nt, Artificial Sequence
  Description of Artificial Sequence: Synthetic oligonucleotide
ccuaaacagccagcagacu

SEQ ID NO: 1114138 - RNA, 19 nt, Artificial Sequence
  Description of Artificial Sequence: Synthetic oligonucleotide
cgccgggcaagcagauuca

SEQ ID NO: 1114139 - RNA, 19 nt, Artificial Sequence
  Description of Artificial Sequence: Synthetic oligonucleotide
ggcuccccgggcucugcgu

SEQ ID NO: 1114140 - RNA, 19 nt, Artificial Sequence
  Description of Artificial Sequence: Synthetic oligonucleotide
cgggcucugcguccuuguc

SEQ ID NO: 1114141 - RNA, 19 nt, Artificial Sequence
  Description of Artificial Sequence: Synthetic oligonucleotide
  modified_base (4)..(4): a, c, u, g, unknown or other
ggcnggcuccccgggcucu

SEQ ID NO: 1114142 - RNA, 19 nt, Artificial Sequence
  Description of Artificial Sequence: Synthetic oligonucleotide
cugucgccccagaguucau

SEQ ID NO: 1114143 - RNA, 19 nt, Artificial Sequence
  Description of Artificial Sequence: Synthetic oligonucleotide
gcccaagguuggugggaau

SEQ ID NO: 1114144 - RNA, 19 nt, Artificial Sequence
  Description of Artificial Sequence: Synthetic oligonucleotide
ggccaggggcuggcggacu

SEQ ID NO: 1114145 - RNA, 19 nt, Artificial Sequence
  Description of Artificial Sequence: Synthetic oligonucleotide
ccccgggcucugcguccuu

SEQ ID NO: 1114146 - RNA, 19 nt, Artificial Sequence
  Description of Artificial Sequence: Synthetic oligonucleotide
uguaaagacugucagcucg

SEQ ID NO: 1114147 - RNA, 19 nt, Artificial Sequence
  Description of Artificial Sequence: Synthetic oligonucleotide
aacgauguagucuugagcu

SEQ ID NO: 1114148 - RNA, 19 nt, Artificial Sequence
  Description of Artificial Sequence: Synthetic oligonucleotide
aaagcuaccccacagugug

SEQ ID NO: 1114149 - RNA, 19 nt, Artificial Sequence
  Description of Artificial Sequence: Synthetic oligonucleotide
ucgaguagaucgaagauag

SEQ ID NO: 1114150 - RNA, 19 nt, Artificial Sequence
  Description of Artificial Sequence: Synthetic oligonucleotide
agauagcggacacugaacc

SEQ ID NO: 1114151 - RNA, 19 nt, Artificial Sequence
  Description of Artificial Sequence: Synthetic oligonucleotide
auacgaggaagacuuaagc

SEQ ID NO: 1114152 - RNA, 19 nt, Artificial Sequence
  Description of Artificial Sequence: Synthetic oligonucleotide
acgucauagacguagacag

SEQ ID NO: 1114153 - RNA, 19 nt, Artificial Sequence
  Description of Artificial Sequence: Synthetic oligonucleotide
uuuucgggcaaacaguuug

SEQ ID NO: 1114154 - RNA, 19 nt, Artificial Sequence
  Description of Artificial Sequence: Synthetic oligonucleotide
aacacaauccgucggaacu

SEQ ID NO: 1114155 - RNA, 19 nt, Artificial Sequence
  Description of Artificial Sequence: Synthetic oligonucleotide
aaaaggcucuaaaagaguc

SEQ ID NO: 1114156 - RNA, 19 nt, Artificial Sequence
  Description of Artificial Sequence: Synthetic oligonucleotide
aacucaagugggaagacac

SEQ ID NO: 1114157 - RNA, 19 nt, Artificial Sequence
  Description of Artificial Sequence: Synthetic oligonucleotide
augacuacaugacagacgu

SEQ ID NO: 1114158 - RNA, 19 nt, Artificial Sequence
  Description of Artificial Sequence: Synthetic oligonucleotide
aagaauacgaggaagacuu

SEQ ID NO: 1114159 - RNA, 19 nt, Artificial Sequence
  Description of Artificial Sequence: Synthetic oligonucleotide
ugggugaauaaccagaguc

SEQ ID NO: 1114160 - RNA, 19 nt, Artificial Sequence
  Description of Artificial Sequence: Synthetic oligonucleotide
ucagugguaauccaaaaua

SEQ ID NO: 1114161 - RNA, 19 nt, Artificial Sequence
  Description of Artificial Sequence: Synthetic oligonucleotide
gauacucuguuguccaugg

SEQ ID NO: 1114162 - RNA, 19 nt, Artificial Sequence
  Description of Artificial Sequence: Synthetic oligonucleotide
gguaauccaaaauagguug

SEQ ID NO: 1114163 - RNA, 19 nt, Artificial Sequence
  Description of Artificial Sequence: Synthetic oligonucleotide
uucacgacuugucaggacc

SEQ ID NO: 1114164 - RNA, 19 nt, Artificial Sequence
  Description of Artificial Sequence: Synthetic oligonucleotide
ugacagacgucauagacgu

SEQ ID NO: 1114165 - RNA, 19 nt, Artificial Sequence
  Description of Artificial Sequence: Synthetic oligonucleotide
aaacccugauccaucaagc

SEQ ID NO: 1114166 - RNA, 19 nt, Artificial Sequence
  Description of Artificial Sequence: Synthetic oligonucleotide
uuugauagcucuccuagaa

SEQ ID NO: 1114167 - RNA, 19 nt, Artificial Sequence
  Description of Artificial Sequence: Synthetic oligonucleotide
aaaauagguugugguaggc

SEQ ID NO: 1114168 - RNA, 19 nt, Artificial Sequence
  Description of Artificial Sequence: Synthetic oligonucleotide
gaaacccugauccaucaag

SEQ ID NO: 1114169 - RNA, 19 nt, Artificial Sequence
  Description of Artificial Sequence: Synthetic oligonucleotide
caugaaauagagaggcagg

SEQ ID NO: 1114170 - RNA, 19 nt, Artificial Sequence
  Description of Artificial Sequence: Synthetic oligonucleotide
aaugacuacaugacagacg

SEQ ID NO: 1114171 - RNA, 19 nt, Artificial Sequence
  Description of Artificial Sequence: Synthetic oligonucleotide
uugucaaugacuacaugac

SEQ ID NO: 1114172 - RNA, 19 nt, Artificial Sequence
  Description of Artificial Sequence: Synthetic oligonucleotide
uguagcgaacuuccgaaag

SEQ ID NO: 1114173 - RNA, 19 nt, Artificial Sequence
  Description of Artificial Sequence: Synthetic oligonucleotide
uugcuaaggccaaacauca

SEQ ID NO: 1114174 - RNA, 19 nt, Artificial Sequence
  Description of Artificial Sequence: Synthetic oligonucleotide
ugacccaucaugaacugca

SEQ ID NO: 1114175 - RNA, 19 nt, Artificial Sequence
  Description of Artificial Sequence: Synthetic oligonucleotide
uucggugggauggagaagg

SEQ ID NO: 1114176 - RNA, 19 nt, Artificial Sequence
  Description of Artificial Sequence: Synthetic oligonucleotide
aauccgucggaacuguuca

SEQ ID NO: 1114177 - RNA, 19 nt, Artificial Sequence
  Description of Artificial Sequence: Synthetic oligonucleotide
ugcaaguugucaaugacua

SEQ ID NO: 1114178 - RNA, 19 nt, Artificial Sequence
  Description of Artificial Sequence: Synthetic oligonucleotide
gucaaugacuacaugacag

SEQ ID NO: 1114179 - RNA, 19 nt, Artificial Sequence
  Description of Artificial Sequence: Synthetic oligonucleotide
aagaccaaacuucgaguag

SEQ ID NO: 1114180 - RNA, 19 nt, Artificial Sequence
  Description of Artificial Sequence: Synthetic oligonucleotide
gguacauaaauccagggca

SEQ ID NO: 1114181 - RNA, 19 nt, Artificial Sequence
  Description of Artificial Sequence: Synthetic oligonucleotide
uugugucuauuacagaccu

SEQ ID NO: 1114182 - RNA, 19 nt, Artificial Sequence
  Description of Artificial Sequence: Synthetic oligonucleotide
aaacgacuccaacggacac

SEQ ID NO: 1114183 - RNA, 19 nt, Artificial Sequence
  Description of Artificial Sequence: Synthetic oligonucleotide
gacaccuacaucuccauca

SEQ ID NO: 1114184 - RNA, 19 nt, Artificial Sequence
  Description of Artificial Sequence: Synthetic oligonucleotide
cugggaaacgacuccaacg

SEQ ID NO: 1114185 - RNA, 19 nt, Artificial Sequence
  Description of Artificial Sequence: Synthetic oligonucleotide
aagguaagggaacucuugu

SEQ ID NO: 1114186 - RNA, 19 nt, Artificial Sequence
  Description of Artificial Sequence: Synthetic oligonucleotide
aagggaagaccaaacuucg

SEQ ID NO: 1114187 - RNA, 19 nt, Artificial Sequence
  Description of Artificial Sequence: Synthetic oligonucleotide
aguagaucgaagauagcgg

SEQ ID NO: 1114188 - RNA, 19 nt, Artificial Sequence
  Description of Artificial Sequence: Synthetic oligonucleotide
caaaauagguugugguagg

SEQ ID NO: 1114189 - RNA, 19 nt, Artificial Sequence
  Description of Artificial Sequence: Synthetic oligonucleotide
cuuccgaaaggcuccaacg

SEQ ID NO: 1114190 - RNA, 19 nt, Artificial Sequence
  Description of Artificial Sequence: Synthetic oligonucleotide
caucacacgagccagcuug

SEQ ID NO: 1114191 - RNA, 19 nt, Artificial Sequence
  Description of Artificial Sequence: Synthetic oligonucleotide
ucgaagauagcggacacug

SEQ ID NO: 1114192 - RNA, 19 nt, Artificial Sequence
  Description of Artificial Sequence: Synthetic oligonucleotide
aauccugagccucccgggg

SEQ ID NO: 1114193 - RNA, 19 nt, Artificial Sequence
  Description of Artificial Sequence: Synthetic oligonucleotide
ugaucucaaagcuacccca

SEQ ID NO: 1114194 - RNA, 19 nt, Artificial Sequence
  Description of Artificial Sequence: Synthetic oligonucleotide
gaggcagguccucaaagcg

SEQ ID NO: 1114195 - RNA, 19 nt, Artificial Sequence
  Description of Artificial Sequence: Synthetic oligonucleotide
acuucgaguagaucgaaga

SEQ ID NO: 1114196 - RNA, 19 nt, Artificial Sequence
  Description of Artificial Sequence: Synthetic oligonucleotide
caugacagacgucauagac

SEQ ID NO: 1114197 - RNA, 19 nt, Artificial Sequence
  Description of Artificial Sequence: Synthetic oligonucleotide
acagacgucauagacguag

SEQ ID NO: 1114198 - RNA, 19 nt, Artificial Sequence
  Description of Artificial Sequence: Synthetic oligonucleotide
aaagcgauucuuggacacc

SEQ ID NO: 1114199 - RNA, 19 nt, Artificial Sequence
  Description of Artificial Sequence: Synthetic oligonucleotide
acacugaaccuccugagug

SEQ ID NO: 1114200 - RNA, 19 nt, Artificial Sequence
  Description of Artificial Sequence: Synthetic oligonucleotide
aauacgaggaagacuuaag

SEQ ID NO: 1114201 - RNA, 19 nt, Artificial Sequence
  Description of Artificial Sequence: Synthetic oligonucleotide
uagacuugugccaggcggg

SEQ ID NO: 1114202 - RNA, 19 nt, Artificial Sequence
  Description of Artificial Sequence: Synthetic oligonucleotide
aacaguuuggcggccuccc

SEQ ID NO: 1114203 - RNA, 19 nt, Artificial Sequence
  Description of Artificial Sequence: Synthetic oligonucleotide
uugagcugcgauccugucg

SEQ ID NO: 1114204 - RNA, 19 nt, Artificial Sequence
  Description of Artificial Sequence: Synthetic oligonucleotide
ugucaaugacuacaugaca

SEQ ID NO: 1114205 - RNA, 19 nt, Artificial Sequence
  Description of Artificial Sequence: Synthetic oligonucleotide
agggcauacucacugauga

SEQ ID NO: 1114206 - RNA, 19 nt, Artificial Sequence
  Description of Artificial Sequence: Synthetic oligonucleotide
acucuuguugaacucaagu

SEQ ID NO: 1114207 - RNA, 19 nt, Artificial Sequence
  Description of Artificial Sequence: Synthetic oligonucleotide
agugguaauccaaaauagg

SEQ ID NO: 1114208 - RNA, 19 nt, Artificial Sequence
  Description of Artificial Sequence: Synthetic oligonucleotide
caagguaagggaguaacgc

SEQ ID NO: 1114209 - RNA, 19 nt, Artificial Sequence
  Description of Artificial Sequence: Synthetic oligonucleotide
aagagcaucgcuugggguu

SEQ ID NO: 1114210 - RNA, 19 nt, Artificial Sequence
  Description of Artificial Sequence: Synthetic oligonucleotide
acauaaauccagggcauac

SEQ ID NO: 1114211 - RNA, 19 nt, Artificial Sequence
  Description of Artificial Sequence: Synthetic oligonucleotide
ugaccuucagccccuagca

SEQ ID NO: 1114212 - RNA, 19 nt, Artificial Sequence
  Description of Artificial Sequence: Synthetic oligonucleotide
gcagcuauugucuguagcg

SEQ ID NO: 1114213 - RNA, 19 nt, Artificial Sequence
  Description of Artificial Sequence: Synthetic oligonucleotide
aagggaacucuuguugaac

SEQ ID NO: 1114214 - RNA, 19 nt, Artificial Sequence
  Description of Artificial Sequence: Synthetic oligonucleotide
aagauagcggacacugaac

SEQ ID NO: 1114215 - RNA, 19 nt, Artificial Sequence
  Description of Artificial Sequence: Synthetic oligonucleotide
uacucuguuguccauggaa

SEQ ID NO: 1114216 - RNA, 19 nt, Artificial Sequence
  Description of Artificial Sequence: Synthetic oligonucleotide
uagucuugagcugcgaucc

SEQ ID NO: 1114217 - RNA, 19 nt, Artificial Sequence
  Description of Artificial Sequence: Synthetic oligonucleotide
cuuccgugggugaauaacc

SEQ ID NO: 1114218 - RNA, 19 nt, Artificial Sequence
  Description of Artificial Sequence: Synthetic oligonucleotide
guagcgaacuuccgaaagg

SEQ ID NO: 1114219 - RNA, 19 nt, Artificial Sequence
  Description of Artificial Sequence: Synthetic oligonucleotide
auccaaaauagguuguggu

SEQ ID NO: 1114220 - RNA, 19 nt, Artificial Sequence
  Description of Artificial Sequence: Synthetic oligonucleotide
acuuccgaaaggcuccaac

SEQ ID NO: 1114221 - RNA, 19 nt, Artificial Sequence
  Description of Artificial Sequence: Synthetic oligonucleotide
ugguaauccaaaauagguu

SEQ ID NO: 1114222 - RNA, 19 nt, Artificial Sequence
  Description of Artificial Sequence: Synthetic oligonucleotide
uccaacggacaccagcugc

SEQ ID NO: 1114223 - RNA, 19 nt, Artificial Sequence
  Description of Artificial Sequence: Synthetic oligonucleotide
uucaagguaagggaguaac

SEQ ID NO: 1114224 - RNA, 19 nt, Artificial Sequence
  Description of Artificial Sequence: Synthetic oligonucleotide
ggaaaaggcucuaaaagag

SEQ ID NO: 1114225 - RNA, 19 nt, Artificial Sequence
  Description of Artificial Sequence: Synthetic oligonucleotide
ucacauggcagcuauuguc

SEQ ID NO: 1114226 - RNA, 19 nt, Artificial Sequence
  Description of Artificial Sequence: Synthetic oligonucleotide
augacagacgucauagacg

SEQ ID NO: 1114227 - RNA, 19 nt, Artificial Sequence
  Description of Artificial Sequence: Synthetic oligonucleotide
uugguuaccaggccucacc

SEQ ID NO: 1114228 - RNA, 19 nt, Artificial Sequence
  Description of Artificial Sequence: Synthetic oligonucleotide
auagcggacacugaaccuc

SEQ ID NO: 1114229 - RNA, 19 nt, Artificial Sequence
  Description of Artificial Sequence: Synthetic oligonucleotide
uuccgaaaggcuccaacga

SEQ ID NO: 1114230 - RNA, 19 nt, Artificial Sequence
  Description of Artificial Sequence: Synthetic oligonucleotide
ugaggucugggaaacgacu

SEQ ID NO: 1114231 - RNA, 19 nt, Artificial Sequence
  Description of Artificial Sequence: Synthetic oligonucleotide
uccaaaauagguuguggua

SEQ ID NO: 1114232 - RNA, 19 nt, Artificial Sequence
  Description of Artificial Sequence: Synthetic oligonucleotide
aaaagaguccuaacuccag

SEQ ID NO: 1114233 - RNA, 19 nt, Artificial Sequence
  Description of Artificial Sequence: Synthetic oligonucleotide
ucaaagcgauucuuggaca

SEQ ID NO: 1114234 - RNA, 19 nt, Artificial Sequence
  Description of Artificial Sequence: Synthetic oligonucleotide
guaucuggcugguaggagc

SEQ ID NO: 1114235 - RNA, 19 nt, Artificial Sequence
  Description of Artificial Sequence: Synthetic oligonucleotide
cuguagguccuguaaagac

SEQ ID NO: 1114236 - RNA, 19 nt, Artificial Sequence
  Description of Artificial Sequence: Synthetic oligonucleotide
ucgggcaaacaguuuggcg

SEQ ID NO: 1114237 - RNA, 19 nt, Artificial Sequence
  Description of Artificial Sequence: Synthetic oligonucleotide
gaagaccaaacuucgagua

SEQ ID NO: 1114238 - RNA, 19 nt, Artificial Sequence
  Description of Artificial Sequence: Synthetic oligonucleotide
cauacuguacuucguuccc

SEQ ID NO: 1114239 - RNA, 19 nt, Artificial Sequence
  Description of Artificial Sequence: Synthetic oligonucleotide
uaauccaaaauagguugug

SEQ ID NO: 1114240 - RNA, 19 nt, Artificial Sequence
  Description of Artificial Sequence: Synthetic oligonucleotide
uugauagcucuccuagaac

SEQ ID NO: 1114241 - RNA, 19 nt, Artificial Sequence
  Description of Artificial Sequence: Synthetic oligonucleotide
aaauagguugugguaggca

SEQ ID NO: 1114242 - RNA, 19 nt, Artificial Sequence
  Description of Artificial Sequence: Synthetic oligonucleotide
aacccugauccaucaagcu

SEQ ID NO: 1114243 - RNA, 19 nt, Artificial Sequence
  Description of Artificial Sequence: Synthetic oligonucleotide
caaagcgauucuuggacac

SEQ ID NO: 1114244 - RNA, 19 nt, Artificial Sequence
  Description of Artificial Sequence: Synthetic oligonucleotide
caacgauguagucuugagc

SEQ ID NO: 1114245 - RNA, 19 nt, Artificial Sequence
  Description of Artificial Sequence: Synthetic oligonucleotide
gaagguaagggaacucuug

SEQ ID NO: 1114246 - RNA, 19 nt, Artificial Sequence
  Description of Artificial Sequence: Synthetic oligonucleotide
uccuuucaccaaaaugcug

SEQ ID NO: 1114247 - RNA, 19 nt, Artificial Sequence
  Description of Artificial Sequence: Synthetic oligonucleotide
agacgucauagacguagac

SEQ ID NO: 1114248 - RNA, 19 nt, Artificial Sequence
  Description of Artificial Sequence: Synthetic oligonucleotide
cauagacguagacagcaug

SEQ ID NO: 1114249 - RNA, 19 nt, Artificial Sequence
  Description of Artificial Sequence: Synthetic oligonucleotide
gacgauugaggucugggaa

SEQ ID NO: 1114250 - RNA, 19 nt, Artificial Sequence
  Description of Artificial Sequence: Synthetic oligonucleotide
gauaccgcuuccccggccc

SEQ ID NO: 1114251 - RNA, 19 nt, Artificial Sequence
  Description of Artificial Sequence: Synthetic oligonucleotide
gucgguagagaacuguuca

SEQ ID NO: 1114252 - RNA, 19 nt, Artificial Sequence
  Description of Artificial Sequence: Synthetic oligonucleotide
augaaauagagaggcaggu

SEQ ID NO: 1114253 - RNA, 19 nt, Artificial Sequence
  Description of Artificial Sequence: Synthetic oligonucleotide
ugguuaccaggccucacca

SEQ ID NO: 1114254 - RNA, 19 nt, Artificial Sequence
  Description of Artificial Sequence: Synthetic oligonucleotide
caggggacgggguuguugg

SEQ ID NO: 1114255 - RNA, 19 nt, Artificial Sequence
  Description of Artificial Sequence: Synthetic oligonucleotide
uagaaccuccucacggagc

SEQ ID NO: 1114256 - RNA, 19 nt, Artificial Sequence
  Description of Artificial Sequence: Synthetic oligonucleotide
uuccgugggugaauaacca

SEQ ID NO: 1114257 - RNA, 19 nt, Artificial Sequence
  Description of Artificial Sequence: Synthetic oligonucleotide
gcuagucucacauugcuga

SEQ ID NO: 1114258 - RNA, 19 nt, Artificial Sequence
  Description of Artificial Sequence: Synthetic oligonucleotide
cuucauacuuguccaguug

SEQ ID NO: 1114259 - RNA, 19 nt, Artificial Sequence
  Description of Artificial Sequence: Synthetic oligonucleotide
cugaccuucagccccuagc

SEQ ID NO: 1114260 - RNA, 19 nt, Artificial Sequence
  Description of Artificial Sequence: Synthetic oligonucleotide
cuaugcacagcuuucaccu

SEQ ID NO: 1114261 - RNA, 19 nt, Artificial Sequence
  Description of Artificial Sequence: Synthetic oligonucleotide
agaucgaagauagcggaca

SEQ ID NO: 1114262 - RNA, 19 nt, Artificial Sequence
  Description of Artificial Sequence: Synthetic oligonucleotide
cucaaagcgaucugcccac

SEQ ID NO: 1114263 - RNA, 19 nt, Artificial Sequence
  Description of Artificial Sequence: Synthetic oligonucleotide
caaacuucgaguagaucga

SEQ ID NO: 1114264 - RNA, 19 nt, Artificial Sequence
  Description of Artificial Sequence: Synthetic oligonucleotide
cagcauguugcauuguguc

SEQ ID NO: 1114265 - RNA, 19 nt, Artificial Sequence
  Description of Artificial Sequence: Synthetic oligonucleotide
gaucgaagauagcggacac

SEQ ID NO: 1114266 - RNA, 19 nt, Artificial Sequence
  Description of Artificial Sequence: Synthetic oligonucleotide
uguugaacucaagugggaa

SEQ ID NO: 1114267 - RNA, 19 nt, Artificial Sequence
  Description of Artificial Sequence: Synthetic oligonucleotide
auagacguagacagcaugu

SEQ ID NO: 1114268 - RNA, 19 nt, Artificial Sequence
  Description of Artificial Sequence: Synthetic oligonucleotide
ugauacucuguuguccaug

SEQ ID NO: 1114269 - RNA, 19 nt, Artificial Sequence
  Description of Artificial Sequence: Synthetic oligonucleotide
ucacgacuugucaggacca

SEQ ID NO: 1114270 - RNA, 19 nt, Artificial Sequence
  Description of Artificial Sequence: Synthetic oligonucleotide
caauccugagccucccggg

SEQ ID NO: 1114271 - RNA, 19 nt, Artificial Sequence
  Description of Artificial Sequence: Synthetic oligonucleotide
guagucuugagcugcgauc

SEQ ID NO: 1114272 - RNA, 19 nt, Artificial Sequence
  Description of Artificial Sequence: Synthetic oligonucleotide
ugucgguagagaacuguuc

SEQ ID NO: 1114273 - RNA, 19 nt, Artificial Sequence
  Description of Artificial Sequence: Synthetic oligonucleotide
cuagaaccuccucacggag

SEQ ID NO: 1114274 - RNA, 19 nt, Artificial Sequence
  Description of Artificial Sequence: Synthetic oligonucleotide
cuugaggcgggcuuugcuc

SEQ ID NO: 1114275 - RNA, 19 nt, Artificial Sequence
  Description of Artificial Sequence: Synthetic oligonucleotide
gaagacuuaagccuugguu

SEQ ID NO: 1114276 - RNA, 19 nt, Artificial Sequence
  Description of Artificial Sequence: Synthetic oligonucleotide
agaccaaacuucgaguaga

SEQ ID NO: 1114277 - RNA, 19 nt, Artificial Sequence
  Description of Artificial Sequence: Synthetic oligonucleotide
uccgaaaggcuccaacgau

SEQ ID NO: 1114278 - RNA, 19 nt, Artificial Sequence
  Description of Artificial Sequence: Synthetic oligonucleotide
gaacacaauccgucggaac

SEQ ID NO: 1114279 - RNA, 19 nt, Artificial Sequence
  Description of Artificial Sequence: Synthetic oligonucleotide
agacgauugaggucuggga

SEQ ID NO: 1114280 - RNA, 19 nt, Artificial Sequence
  Description of Artificial Sequence: Synthetic oligonucleotide
cauuuuagcaagcagcuau

SEQ ID NO: 1114281 - RNA, 19 nt, Artificial Sequence
  Description of Artificial Sequence: Synthetic oligonucleotide
acucaagugggaagacacc

SEQ ID NO: 1114282 - RNA, 19 nt, Artificial Sequence
  Description of Artificial Sequence: Synthetic oligonucleotide
uaagggaacucuuguugaa

SEQ ID NO: 1114283 - RNA, 19 nt, Artificial Sequence
  Description of Artificial Sequence: Synthetic oligonucleotide
uagcggacacugaaccucc

SEQ ID NO: 1114284 - RNA, 19 nt, Artificial Sequence
  Description of Artificial Sequence: Synthetic oligonucleotide
cgggcaaacaguuuggcgg

SEQ ID NO: 1114285 - RNA, 19 nt, Artificial Sequence
  Description of Artificial Sequence: Synthetic oligonucleotide
auccugucgguagagaacu

SEQ ID NO: 1114286 - RNA, 19 nt, Artificial Sequence
  Description of Artificial Sequence: Synthetic oligonucleotide
aacuucgaguagaucgaag

SEQ ID NO: 1114287 - RNA, 19 nt, Artificial Sequence
  Description of Artificial Sequence: Synthetic oligonucleotide
gaaagucaugaaauagaga

SEQ ID NO: 1114288 - RNA, 19 nt, Artificial Sequence
  Description of Artificial Sequence: Synthetic oligonucleotide
uugaggcgggcuuugcucu

SEQ ID NO: 1114289 - RNA, 19 nt, Artificial Sequence
  Description of Artificial Sequence: Synthetic oligonucleotide
accccuuggguacauaaau

SEQ ID NO: 1114290 - RNA, 19 nt, Artificial Sequence
  Description of Artificial Sequence: Synthetic oligonucleotide
auuuuagcaagcagcuaug

SEQ ID NO: 1114291 - RNA, 19 nt, Artificial Sequence
  Description of Artificial Sequence: Synthetic oligonucleotide
cucuaaaagaguccuaacu

SEQ ID NO: 1114292 - RNA, 19 nt, Artificial Sequence
  Description of Artificial Sequence: Synthetic oligonucleotide
gaaacgacuccaacggaca

SEQ ID NO: 1114293 - RNA, 19 nt, Artificial Sequence
  Description of Artificial Sequence: Synthetic oligonucleotide
uuuggcggccucccaagac

SEQ ID NO: 1114294 - RNA, 19 nt, Artificial Sequence
  Description of Artificial Sequence: Synthetic oligonucleotide
uagccagaacacaauccgu

SEQ ID NO: 1114295 - RNA, 19 nt, Artificial Sequence
  Description of Artificial Sequence: Synthetic oligonucleotide
agauaccgcuuccccggcc

SEQ ID NO: 1114296 - RNA, 19 nt, Artificial Sequence
  Description of Artificial Sequence: Synthetic oligonucleotide
caucauccuccuuccgugg

SEQ ID NO: 1114297 - RNA, 19 nt, Artificial Sequence
  Description of Artificial Sequence: Synthetic oligonucleotide
caauccgucggaacuguuc

SEQ ID NO: 1114298 - RNA, 19 nt, Artificial Sequence
  Description of Artificial Sequence: Synthetic oligonucleotide
guaaagacugucagcucgc

SEQ ID NO: 1114299 - RNA, 19 nt, Artificial Sequence
  Description of Artificial Sequence: Synthetic oligonucleotide
gcuaaggccaaacaucaca

SEQ ID NO: 1114300 - RNA, 19 nt, Artificial Sequence
  Description of Artificial Sequence: Synthetic oligonucleotide
gugguaauccaaaauaggu

SEQ ID NO: 1114301 - RNA, 19 nt, Artificial Sequence
  Description of Artificial Sequence: Synthetic oligonucleotide
guuaccaggccucaccaaa

SEQ ID NO: 1114302 - RNA, 19 nt, Artificial Sequence
  Description of Artificial Sequence: Synthetic oligonucleotide
guguucaccccuuggguac

SEQ ID NO: 1114303 - RNA, 19 nt, Artificial Sequence
  Description of Artificial Sequence: Synthetic oligonucleotide
acgacuugucaggaccacc

SEQ ID NO: 1114304 - RNA, 19 nt, Artificial Sequence
  Description of Artificial Sequence: Synthetic oligonucleotide
caugacccgggcuagucuc

SEQ ID NO: 1114305 - RNA, 19 nt, Artificial Sequence
  Description of Artificial Sequence: Synthetic oligonucleotide
agcuauugucuguagcgaa

SEQ ID NO: 1114306 - RNA, 19 nt, Artificial Sequence
  Description of Artificial Sequence: Synthetic oligonucleotide
gaauacgaggaagacuuaa

SEQ ID NO: 1114307 - RNA, 19 nt, Artificial Sequence
  Description of Artificial Sequence: Synthetic oligonucleotide
cagacgauugaggucuggg

SEQ ID NO: 1114308 - RNA, 19 nt, Artificial Sequence
  Description of Artificial Sequence: Synthetic oligonucleotide
acgauguagucuugagcug

SEQ ID NO: 1114309 - RNA, 19 nt, Artificial Sequence
  Description of Artificial Sequence: Synthetic oligonucleotide
ggcggaaagacacaauaga

SEQ ID NO: 1114310 - RNA, 19 nt, Artificial Sequence
  Description of Artificial Sequence: Synthetic oligonucleotide
gaagaauacgaggaagacu

SEQ ID NO: 1114311 - RNA, 19 nt, Artificial Sequence
  Description of Artificial Sequence: Synthetic oligonucleotide
cacgcaauccugagccucc

SEQ ID NO: 1114312 - RNA, 19 nt, Artificial Sequence
  Description of Artificial Sequence: Synthetic oligonucleotide
aagcgaucugcccacucuu

SEQ ID NO: 1114313 - RNA, 19 nt, Artificial Sequence
  Description of Artificial Sequence: Synthetic oligonucleotide
agaacuguucaugacccau

SEQ ID NO: 1114314 - RNA, 19 nt, Artificial Sequence
  Description of Artificial Sequence: Synthetic oligonucleotide
uccaacgauguagucuuga

SEQ ID NO: 1114315 - RNA, 19 nt, Artificial Sequence
  Description of Artificial Sequence: Synthetic oligonucleotide
guaagggaguaacgccggg

SEQ ID NO: 1114316 - RNA, 19 nt, Artificial Sequence
  Description of Artificial Sequence: Synthetic oligonucleotide
cacacgagccagcuuggcc

SEQ ID NO: 1114317 - RNA, 19 nt, Artificial Sequence
  Description of Artificial Sequence: Synthetic oligonucleotide
uguccaguucacgacuugu

SEQ ID NO: 1114318 - RNA, 19 nt, Artificial Sequence
  Description of Artificial Sequence: Synthetic oligonucleotide
caucuccuagccagaacac

SEQ ID NO: 1114319 - RNA, 19 nt, Artificial Sequence
  Description of Artificial Sequence: Synthetic oligonucleotide
acuuaagccuugguucaag

SEQ ID NO: 1114320 - RNA, 19 nt, Artificial Sequence
  Description of Artificial Sequence: Synthetic oligonucleotide
ucccggcuaagcaagucuc

SEQ ID NO: 1114321 - RNA, 19 nt, Artificial Sequence
  Description of Artificial Sequence: Synthetic oligonucleotide
cucccaagaccgaagguca

SEQ ID NO: 1114322 - RNA, 19 nt, Artificial Sequence
  Description of Artificial Sequence: Synthetic oligonucleotide
aggaagacuuaagccuugg

SEQ ID NO: 1114323 - RNA, 19 nt, Artificial Sequence
  Description of Artificial Sequence: Synthetic oligonucleotide
cauggaaagucaugaaaua

SEQ ID NO: 1114324 - RNA, 19 nt, Artificial Sequence
  Description of Artificial Sequence: Synthetic oligonucleotide
gucuguagcgaacuuccga

SEQ ID NO: 1114325 - RNA, 19 nt, Artificial Sequence
  Description of Artificial Sequence: Synthetic oligonucleotide
uucguuccuuucaccaaaa

SEQ ID NO: 1114326 - RNA, 19 nt, Artificial Sequence
  Description of Artificial Sequence: Synthetic oligonucleotide
gaccuucagccccuagcag

SEQ ID NO: 1114327 - RNA, 19 nt, Artificial Sequence
  Description of Artificial Sequence: Synthetic oligonucleotide
ucgguagagaacuguucau

SEQ ID NO: 1114328 - RNA, 19 nt, Artificial Sequence
  Description of Artificial Sequence: Synthetic oligonucleotide
ucgccggcugaucaguggu

SEQ ID NO: 1114329 - RNA, 19 nt, Artificial Sequence
  Description of Artificial Sequence: Synthetic oligonucleotide
acacaauccgucggaacug

SEQ ID NO: 1114330 - RNA, 19 nt, Artificial Sequence
  Description of Artificial Sequence: Synthetic oligonucleotide
aggccaaacaucacacgag

SEQ ID NO: 1114331 - RNA, 19 nt, Artificial Sequence
  Description of Artificial Sequence: Synthetic oligonucleotide
ucccggggugaaccaaggg

SEQ ID NO: 1114332 - RNA, 19 nt, Artificial Sequence
  Description of Artificial Sequence: Synthetic oligonucleotide
gaggacuuggagguaucug

SEQ ID NO: 1114333 - RNA, 19 nt, Artificial Sequence
  Description of Artificial Sequence: Synthetic oligonucleotide
aaacuucgaguagaucgaa

SEQ ID NO: 1114334 - RNA, 19 nt, Artificial Sequence
  Description of Artificial Sequence: Synthetic oligonucleotide
ggaaacgacuccaacggac

SEQ ID NO: 1114335 - RNA, 19 nt, Artificial Sequence
  Description of Artificial Sequence: Synthetic oligonucleotide
uugcuccacauuugauagc

SEQ ID NO: 1114336 - RNA, 19 nt, Artificial Sequence
  Description of Artificial Sequence: Synthetic oligonucleotide
agccgugucacagcaaacu

SEQ ID NO: 1114337 - RNA, 19 nt, Artificial Sequence
  Description of Artificial Sequence: Synthetic oligonucleotide
uucgggcaaacaguuuggc

SEQ ID NO: 1114338 - RNA, 19 nt, Artificial Sequence
  Description of Artificial Sequence: Synthetic oligonucleotide
uggccacuaguccauuguc

SEQ ID NO: 1114339 - RNA, 19 nt, Artificial Sequence
  Description of Artificial Sequence: Synthetic oligonucleotide
gguaagggaguaacgccgg

SEQ ID NO: 1114340 - RNA, 19 nt, Artificial Sequence
  Description of Artificial Sequence: Synthetic oligonucleotide
agagcaucgcuugggguug

SEQ ID NO: 1114341 - RNA, 19 nt, Artificial Sequence
  Description of Artificial Sequence: Synthetic oligonucleotide
cugaucagugguaauccaa

SEQ ID NO: 1114342 - RNA, 19 nt, Artificial Sequence
  Description of Artificial Sequence: Synthetic oligonucleotide
gucggaacuguucaaggua

SEQ ID NO: 1114343 - RNA, 19 nt, Artificial Sequence
  Description of Artificial Sequence: Synthetic oligonucleotide
ccaguucacgacuugucag

SEQ ID NO: 1114344 - RNA, 19 nt, Artificial Sequence
  Description of Artificial Sequence: Synthetic oligonucleotide
accuugcuaaggccaaaca

SEQ ID NO: 1114345 - RNA, 19 nt, Artificial Sequence
  Description of Artificial Sequence: Synthetic oligonucleotide
gagaagguaagggaacucu

SEQ ID NO: 1114346 - RNA, 19 nt, Artificial Sequence
  Description of Artificial Sequence: Synthetic oligonucleotide
aguccuaacuccagcguca

SEQ ID NO: 1114347 - RNA, 19 nt, Artificial Sequence
  Description of Artificial Sequence: Synthetic oligonucleotide
cagaacacaauccgucgga

SEQ ID NO: 1114348 - RNA, 19 nt, Artificial Sequence
  Description of Artificial Sequence: Synthetic oligonucleotide
gaacucaagugggaagaca

SEQ ID NO: 1114349 - RNA, 19 nt, Artificial Sequence
  Description of Artificial Sequence: Synthetic oligonucleotide
ggaaagggugggcagcccc

SEQ ID NO: 1114350 - RNA, 19 nt, Artificial Sequence
  Description of Artificial Sequence: Synthetic oligonucleotide
agcaugacccgggcuaguc

SEQ ID NO: 1114351 - RNA, 19 nt, Artificial Sequence
  Description of Artificial Sequence: Synthetic oligonucleotide
agguaagggaacucuuguu

SEQ ID NO: 1114352 - RNA, 19 nt, Artificial Sequence
  Description of Artificial Sequence: Synthetic oligonucleotide
gcggaaagacacaauagac

SEQ ID NO: 1114353 - RNA, 19 nt, Artificial Sequence
  Description of Artificial Sequence: Synthetic oligonucleotide
gggcaaacaguuuggcggc

SEQ ID NO: 1114354 - RNA, 19 nt, Artificial Sequence
  Description of Artificial Sequence: Synthetic oligonucleotide
uguugguuaccaggccuca

SEQ ID NO: 1114355 - RNA, 19 nt, Artificial Sequence
  Description of Artificial Sequence: Synthetic oligonucleotide
gauagcggacacugaaccu

SEQ ID NO: 1114356 - RNA, 19 nt, Artificial Sequence
  Description of Artificial Sequence: Synthetic oligonucleotide
cugagucagcaugacccgg

SEQ ID NO: 1114357 - RNA, 19 nt, Artificial Sequence
  Description of Artificial Sequence: Synthetic oligonucleotide
acagcauguugcauugugu

SEQ ID NO: 1114358 - RNA, 19 nt, Artificial Sequence
  Description of Artificial Sequence: Synthetic oligonucleotide
ggcugaucagugguaaucc

SEQ ID NO: 1114359 - RNA, 19 nt, Artificial Sequence
  Description of Artificial Sequence: Synthetic oligonucleotide
acucacugaugaauguugu

SEQ ID NO: 1114360 - RNA, 19 nt, Artificial Sequence
  Description of Artificial Sequence: Synthetic oligonucleotide
cucgccggcugaucagugg

SEQ ID NO: 1114361 - RNA, 19 nt, Artificial Sequence
  Description of Artificial Sequence: Synthetic oligonucleotide
gagggcagugcgaagaaua

SEQ ID NO: 1114362 - RNA, 19 nt, Artificial Sequence
  Description of Artificial Sequence: Synthetic oligonucleotide
auacucacugaugaauguu

SEQ ID NO: 1114363 - RNA, 19 nt, Artificial Sequence
  Description of Artificial Sequence: Synthetic oligonucleotide
uacauaaauccagggcaua

SEQ ID NO: 1114364 - RNA, 19 nt, Artificial Sequence
  Description of Artificial Sequence: Synthetic oligonucleotide
ugcgauccugucgguagag

SEQ ID NO: 1114365 - RNA, 19 nt, Artificial Sequence
  Description of Artificial Sequence: Synthetic oligonucleotide
cacauggcagcuauugucu

SEQ ID NO: 1114366 - RNA, 19 nt, Artificial Sequence
  Description of Artificial Sequence: Synthetic oligonucleotide
agaccguuccucgggguag

SEQ ID NO: 1114367 - RNA, 19 nt, Artificial Sequence
  Description of Artificial Sequence: Synthetic oligonucleotide
ucauuuuagcaagcagcua

SEQ ID NO: 1114368 - RNA, 19 nt, Artificial Sequence
  Description of Artificial Sequence: Synthetic oligonucleotide
acuaguccauugucauccu

SEQ ID NO: 1114369 - RNA, 19 nt, Artificial Sequence
  Description of Artificial Sequence: Synthetic oligonucleotide
caggccacgcaauccugag

SEQ ID NO: 1114370 - RNA, 19 nt, Artificial Sequence
  Description of Artificial Sequence: Synthetic oligonucleotide
ugccccuucagcagacgau

SEQ ID NO: 1114371 - RNA, 19 nt, Artificial Sequence
  Description of Artificial Sequence: Synthetic oligonucleotide
ccacauuugauagcucucc

SEQ ID NO: 1114372 - RNA, 19 nt, Artificial Sequence
  Description of Artificial Sequence: Synthetic oligonucleotide
ucucgccggcugaucagug

SEQ ID NO: 1114373 - RNA, 19 nt, Artificial Sequence
  Description of Artificial Sequence: Synthetic oligonucleotide
gaacucuuguugaacucaa

SEQ ID NO: 1114374 - RNA, 19 nt, Artificial Sequence
  Description of Artificial Sequence: Synthetic oligonucleotide
caucucgccggcugaucag

SEQ ID NO: 1114375 - RNA, 19 nt, Artificial Sequence
  Description of Artificial Sequence: Synthetic oligonucleotide
agguaucuggcugguagga

SEQ ID NO: 1114376 - RNA, 19 nt, Artificial Sequence
  Description of Artificial Sequence: Synthetic oligonucleotide
ccaacgauguagucuugag

SEQ ID NO: 1114377 - RNA, 19 nt, Artificial Sequence
  Description of Artificial Sequence: Synthetic oligonucleotide
aucacacgagccagcuugg

SEQ ID NO: 1114378 - RNA, 19 nt, Artificial Sequence
  Description of Artificial Sequence: Synthetic oligonucleotide
agucagcaugacccgggcu

SEQ ID NO: 1114379 - RNA, 19 nt, Artificial Sequence
  Description of Artificial Sequence: Synthetic oligonucleotide
guucacgacuugucaggac

SEQ ID NO: 1114380 - RNA, 19 nt, Artificial Sequence
  Description of Artificial Sequence: Synthetic oligonucleotide
agaacacaauccgucggaa

SEQ ID NO: 1114381 - RNA, 19 nt, Artificial Sequence
  Description of Artificial Sequence: Synthetic oligonucleotide
cauacucacugaugaaugu

SEQ ID NO: 1114382 - RNA, 19 nt, Artificial Sequence
  Description of Artificial Sequence: Synthetic oligonucleotide
ucguuccuuucaccaaaau

SEQ ID NO: 1114383 - RNA, 19 nt, Artificial Sequence
  Description of Artificial Sequence: Synthetic oligonucleotide
acuucguuccccugaccuu

SEQ ID NO: 1114384 - RNA, 19 nt, Artificial Sequence
  Description of Artificial Sequence: Synthetic oligonucleotide
ccgaaaggcuccaacgaug

SEQ ID NO: 1114385 - RNA, 19 nt, Artificial Sequence
  Description of Artificial Sequence: Synthetic oligonucleotide
cucgcccuuccgaugcccc

SEQ ID NO: 1114386 - RNA, 19 nt, Artificial Sequence
  Description of Artificial Sequence: Synthetic oligonucleotide
ggaagaccaaacuucgagu

SEQ ID NO: 1114387 - RNA, 19 nt, Artificial Sequence
  Description of Artificial Sequence: Synthetic oligonucleotide
uaccccacaguguguucac

SEQ ID NO: 1114388 - RNA, 19 nt, Artificial Sequence
  Description of Artificial Sequence: Synthetic oligonucleotide
agaagguaagggaacucuu

SEQ ID NO: 1114389 - RNA, 19 nt, Artificial Sequence
  Description of Artificial Sequence: Synthetic oligonucleotide
acgcaauccugagccuccc

SEQ ID NO: 1114390 - RNA, 19 nt, Artificial Sequence
  Description of Artificial Sequence: Synthetic oligonucleotide
agcgaucugcccacucuuc

SEQ ID NO: 1114391 - RNA, 19 nt, Artificial Sequence
  Description of Artificial Sequence: Synthetic oligonucleotide
auacucuguuguccaugga

SEQ ID NO: 1114392 - RNA, 19 nt, Artificial Sequence
  Description of Artificial Sequence: Synthetic oligonucleotide
gcucuaaaagaguccuaac

SEQ ID NO: 1114393 - RNA, 19 nt, Artificial Sequence
  Description of Artificial Sequence: Synthetic oligonucleotide
aucgaagauagcggacacu

SEQ ID NO: 1114394 - RNA, 19 nt, Artificial Sequence
  Description of Artificial Sequence: Synthetic oligonucleotide
ugacuacaugacagacguc

SEQ ID NO: 1114395 - RNA, 19 nt, Artificial Sequence
  Description of Artificial Sequence: Synthetic oligonucleotide
ccuguaaagacugucagcu

SEQ ID NO: 1114396 - RNA, 19 nt, Artificial Sequence
  Description of Artificial Sequence: Synthetic oligonucleotide
ggcucuaaaagaguccuaa

SEQ ID NO: 1114397 - RNA, 19 nt, Artificial Sequence
  Description of Artificial Sequence: Synthetic oligonucleotide
gaaccuccugaguguguca

SEQ ID NO: 1114398 - RNA, 19 nt, Artificial Sequence
  Description of Artificial Sequence: Synthetic oligonucleotide
ccgggcuagucucacauug

SEQ ID NO: 1114399 - RNA, 19 nt, Artificial Sequence
  Description of Artificial Sequence: Synthetic oligonucleotide
gcuauugucuguagcgaac

SEQ ID NO: 1114400 - RNA, 19 nt, Artificial Sequence
  Description of Artificial Sequence: Synthetic oligonucleotide
ccgucggaacuguucaagg

SEQ ID NO: 1114401 - RNA, 19 nt, Artificial Sequence
  Description of Artificial Sequence: Synthetic oligonucleotide
caccuugcuaaggccaaac

SEQ ID NO: 1114402 - RNA, 19 nt, Artificial Sequence
  Description of Artificial Sequence: Synthetic oligonucleotide
uccuaacuccagcgucaga

SEQ ID NO: 1114403 - RNA, 19 nt, Artificial Sequence
  Description of Artificial Sequence: Synthetic oligonucleotide
gacgggguuguugguuacc

SEQ ID NO: 1114404 - RNA, 19 nt, Artificial Sequence
  Description of Artificial Sequence: Synthetic oligonucleotide
guccuaacuccagcgucag

SEQ ID NO: 1114405 - RNA, 19 nt, Artificial Sequence
  Description of Artificial Sequence: Synthetic oligonucleotide
gggaacucuuguugaacuc

SEQ ID NO: 1114406 - RNA, 19 nt, Artificial Sequence
  Description of Artificial Sequence: Synthetic oligonucleotide
caagaccgaaggucaucuc

SEQ ID NO: 1114407 - RNA, 19 nt, Artificial Sequence
  Description of Artificial Sequence: Synthetic oligonucleotide
uucuugaggcgggcuuugc

SEQ ID NO: 1114408 - RNA, 19 nt, Artificial Sequence
  Description of Artificial Sequence: Synthetic oligonucleotide
cuucaggccacgcaauccu

SEQ ID NO: 1114409 - RNA, 19 nt, Artificial Sequence
  Description of Artificial Sequence: Synthetic oligonucleotide
cagauaccgcuuccccggc

SEQ ID NO: 1114410 - RNA, 19 nt, Artificial Sequence
  Description of Artificial Sequence: Synthetic oligonucleotide
gggcagugcgaagaauacg

SEQ ID NO: 1114411 - RNA, 19 nt, Artificial Sequence
  Description of Artificial Sequence: Synthetic oligonucleotide
agcgaacuuccgaaaggcu

SEQ ID NO: 1114412 - RNA, 19 nt, Artificial Sequence
  Description of Artificial Sequence: Synthetic oligonucleotide
uccuauccugcaggaucag

SEQ ID NO: 1114413 - RNA, 19 nt, Artificial Sequence
  Description of Artificial Sequence: Synthetic oligonucleotide
cagacgucauagacguaga

SEQ ID NO: 1114414 - RNA, 19 nt, Artificial Sequence
  Description of Artificial Sequence: Synthetic oligonucleotide
guccaguucacgacuuguc

SEQ ID NO: 1114415 - RNA, 19 nt, Artificial Sequence
  Description of Artificial Sequence: Synthetic oligonucleotide
cagcuauugucuguagcga

SEQ ID NO: 1114416 - RNA, 19 nt, Artificial Sequence
  Description of Artificial Sequence: Synthetic oligonucleotide
cuucggugggauggagaag

SEQ ID NO: 1114417 - RNA, 19 nt, Artificial Sequence
  Description of Artificial Sequence: Synthetic oligonucleotide
cuucgaguagaucgaagau

SEQ ID NO: 1114418 - RNA, 19 nt, Artificial Sequence
  Description of Artificial Sequence: Synthetic oligonucleotide
agcuaccccacaguguguu

SEQ ID NO: 1114419 - RNA, 19 nt, Artificial Sequence
  Description of Artificial Sequence: Synthetic oligonucleotide
gcugaucagugguaaucca

SEQ ID NO: 1114420 - RNA, 19 nt, Artificial Sequence
  Description of Artificial Sequence: Synthetic oligonucleotide
aucucgccggcugaucagu

SEQ ID NO: 1114421 - RNA, 19 nt, Artificial Sequence
  Description of Artificial Sequence: Synthetic oligonucleotide
gcauguugcauugugucua

SEQ ID NO: 1114422 - RNA, 19 nt, Artificial Sequence
  Description of Artificial Sequence: Synthetic oligonucleotide
ccuagaaccuccucacgga

SEQ ID NO: 1114423 - RNA, 19 nt, Artificial Sequence
  Description of Artificial Sequence: Synthetic oligonucleotide
gcaucucgccggcugauca

SEQ ID NO: 1114424 - RNA, 19 nt, Artificial Sequence
  Description of Artificial Sequence: Synthetic oligonucleotide
ccuuccgugggugaauaac

SEQ ID NO: 1114425 - RNA, 19 nt, Artificial Sequence
  Description of Artificial Sequence: Synthetic oligonucleotide
cuguagcgaacuuccgaaa

SEQ ID NO: 1114426 - RNA, 19 nt, Artificial Sequence
  Description of Artificial Sequence: Synthetic oligonucleotide
cagccgugucacagcaaac

SEQ ID NO: 1114427 - RNA, 19 nt, Artificial Sequence
  Description of Artificial Sequence: Synthetic oligonucleotide
ggcuagucucacauugcug

SEQ ID NO: 1114428 - RNA, 19 nt, Artificial Sequence
  Description of Artificial Sequence: Synthetic oligonucleotide
ggggucccggcuaagcaag

SEQ ID NO: 1114429 - RNA, 19 nt, Artificial Sequence
  Description of Artificial Sequence: Synthetic oligonucleotide
uccuuccgugggugaauaa

SEQ ID NO: 1114430 - RNA, 19 nt, Artificial Sequence
  Description of Artificial Sequence: Synthetic oligonucleotide
cacauuugauagcucuccu

SEQ ID NO: 1114431 - RNA, 19 nt, Artificial Sequence
  Description of Artificial Sequence: Synthetic oligonucleotide
gacuuaagccuugguucaa

SEQ ID NO: 1114432 - RNA, 19 nt, Artificial Sequence
  Description of Artificial Sequence: Synthetic oligonucleotide
aagcuaccccacagugugu

SEQ ID NO: 1114433 - RNA, 19 nt, Artificial Sequence
  Description of Artificial Sequence: Synthetic oligonucleotide
cuccaacgauguagucuug

SEQ ID NO: 1114434 - RNA, 19 nt, Artificial Sequence
  Description of Artificial Sequence: Synthetic oligonucleotide
auccgucggaacuguucaa

SEQ ID NO: 1114435 - RNA, 19 nt, Artificial Sequence
  Description of Artificial Sequence: Synthetic oligonucleotide
cacgacuugucaggaccac

SEQ ID NO: 1114436 - RNA, 19 nt, Artificial Sequence
  Description of Artificial Sequence: Synthetic oligonucleotide
agcgauucuuggacaccug

SEQ ID NO: 1114437 - RNA, 19 nt, Artificial Sequence
  Description of Artificial Sequence: Synthetic oligonucleotide
gggaaacgacuccaacgga

SEQ ID NO: 1114438 - RNA, 19 nt, Artificial Sequence
  Description of Artificial Sequence: Synthetic oligonucleotide
ccggggugaaccaagggaa

SEQ ID NO: 1114439 - RNA, 19 nt, Artificial Sequence
  Description of Artificial Sequence: Synthetic oligonucleotide
ggccacuaguccauuguca

SEQ ID NO: 1114440 - RNA, 19 nt, Artificial Sequence
  Description of Artificial Sequence: Synthetic oligonucleotide
agcgucagaggcagcacuu

SEQ ID NO: 1114441 - RNA, 19 nt, Artificial Sequence
  Description of Artificial Sequence: Synthetic oligonucleotide
aacuuccgaaaggcuccaa

SEQ ID NO: 1114442 - RNA, 19 nt, Artificial Sequence
  Description of Artificial Sequence: Synthetic oligonucleotide
accaggccggggaauggug

SEQ ID NO: 1114443 - RNA, 19 nt, Artificial Sequence
  Description of Artificial Sequence: Synthetic oligonucleotide
caccccuuggguacauaaa

SEQ ID NO: 1114444 - RNA, 19 nt, Artificial Sequence
  Description of Artificial Sequence: Synthetic oligonucleotide
agaauacgaggaagacuua

SEQ ID NO: 1114445 - RNA, 19 nt, Artificial Sequence
  Description of Artificial Sequence: Synthetic oligonucleotide
ggcuccaacgauguagucu

SEQ ID NO: 1114446 - RNA, 19 nt, Artificial Sequence
  Description of Artificial Sequence: Synthetic oligonucleotide
gccacuaguccauugucau

SEQ ID NO: 1114447 - RNA, 19 nt, Artificial Sequence
  Description of Artificial Sequence: Synthetic oligonucleotide
ggggugaaccaagggaaga

SEQ ID NO: 1114448 - RNA, 19 nt, Artificial Sequence
  Description of Artificial Sequence: Synthetic oligonucleotide
gaaccuccucacggagcug

SEQ ID NO: 1114449 - RNA, 19 nt, Artificial Sequence
  Description of Artificial Sequence: Synthetic oligonucleotide
gggcuagucucacauugcu

SEQ ID NO: 1114450 - RNA, 19 nt, Artificial Sequence
  Description of Artificial Sequence: Synthetic oligonucleotide
augacccgggcuagucuca

SEQ ID NO: 1114451 - RNA, 19 nt, Artificial Sequence
  Description of Artificial Sequence: Synthetic oligonucleotide
gucucacauugcugaucuc

SEQ ID NO: 1114452 - RNA, 19 nt, Artificial Sequence
  Description of Artificial Sequence: Synthetic oligonucleotide
ccagccgugucacagcaaa

SEQ ID NO: 1114453 - RNA, 19 nt, Artificial Sequence
  Description of Artificial Sequence: Synthetic oligonucleotide
cagaccguuccucggggua

SEQ ID NO: 1114454 - RNA, 19 nt, Artificial Sequence
  Description of Artificial Sequence: Synthetic oligonucleotide
gguuaccaggccucaccaa

SEQ ID NO: 1114455 - RNA, 19 nt, Artificial Sequence
  Description of Artificial Sequence: Synthetic oligonucleotide
gggacgggguuguugguua

SEQ ID NO: 1114456 - RNA, 19 nt, Artificial Sequence
  Description of Artificial Sequence: Synthetic oligonucleotide
ggcaaacaguuuggcggcc

SEQ ID NO: 1114457 - RNA, 19 nt, Artificial Sequence
  Description of Artificial Sequence: Synthetic oligonucleotide
agcaucgcuugggguugag

SEQ ID NO: 1114458 - RNA, 19 nt, Artificial Sequence
  Description of Artificial Sequence: Synthetic oligonucleotide
gacccgggcuagucucaca

SEQ ID NO: 1114459 - RNA, 19 nt, Artificial Sequence
  Description of Artificial Sequence: Synthetic oligonucleotide
cgggcuagucucacauugc

SEQ ID NO: 1114460 - RNA, 19 nt, Artificial Sequence
  Description of Artificial Sequence: Synthetic oligonucleotide
cgaguagaucgaagauagc

SEQ ID NO: 1114461 - RNA, 19 nt, Artificial Sequence
  Description of Artificial Sequence: Synthetic oligonucleotide
ggacgggguuguugguuac

SEQ ID NO: 1114462 - RNA, 19 nt, Artificial Sequence
  Description of Artificial Sequence: Synthetic oligonucleotide
agcugcgauccugucggua

SEQ ID NO: 1114463 - RNA, 19 nt, Artificial Sequence
  Description of Artificial Sequence: Synthetic oligonucleotide
ccacgcaauccugagccuc

SEQ ID NO: 1114464 - RNA, 19 nt, Artificial Sequence
  Description of Artificial Sequence: Synthetic oligonucleotide
cuccagcgucagaggcagc

SEQ ID NO: 1114465 - RNA, 19 nt, Artificial Sequence
  Description of Artificial Sequence: Synthetic oligonucleotide
cagccccguggacuggcuc

SEQ ID NO: 1114466 - RNA, 19 nt, Artificial Sequence
  Description of Artificial Sequence: Synthetic oligonucleotide
cacaauccgucggaacugu

SEQ ID NO: 1114467 - RNA, 19 nt, Artificial Sequence
  Description of Artificial Sequence: Synthetic oligonucleotide
gcucuucggugggauggag

SEQ ID NO: 1114468 - RNA, 19 nt, Artificial Sequence
  Description of Artificial Sequence: Synthetic oligonucleotide
ccaacggacaccagcugcu

SEQ ID NO: 1114469 - RNA, 19 nt, Artificial Sequence
  Description of Artificial Sequence: Synthetic oligonucleotide
acaauccgucggaacuguu

SEQ ID NO: 1114470 - RNA, 19 nt, Artificial Sequence
  Description of Artificial Sequence: Synthetic oligonucleotide
cggcugaucagugguaauc

SEQ ID NO: 1114471 - RNA, 19 nt, Artificial Sequence
  Description of Artificial Sequence: Synthetic oligonucleotide
ccaagaccgaaggucaucu

SEQ ID NO: 1114472 - RNA, 19 nt, Artificial Sequence
  Description of Artificial Sequence: Synthetic oligonucleotide
agcggacacugaaccuccu

SEQ ID NO: 1114473 - RNA, 19 nt, Artificial Sequence
  Description of Artificial Sequence: Synthetic oligonucleotide
gagcaucgcuugggguuga

SEQ ID NO: 1114474 - RNA, 19 nt, Artificial Sequence
  Description of Artificial Sequence: Synthetic oligonucleotide
cuccuuccgugggugaaua

SEQ ID NO: 1114475 - RNA, 19 nt, Artificial Sequence
  Description of Artificial Sequence: Synthetic oligonucleotide
cgacuugucaggaccaccu

SEQ ID NO: 1114476 - RNA, 19 nt, Artificial Sequence
  Description of Artificial Sequence: Synthetic oligonucleotide
cccggcuaagcaagucuca

SEQ ID NO: 1114477 - RNA, 19 nt, Artificial Sequence
  Description of Artificial Sequence: Synthetic oligonucleotide
cgcaauccugagccucccg

SEQ ID NO: 1114478 - RNA, 19 nt, Artificial Sequence
  Description of Artificial Sequence: Synthetic oligonucleotide
gcaugacccgggcuagucu

SEQ ID NO: 1114479 - RNA, 19 nt, Artificial Sequence
  Description of Artificial Sequence: Synthetic oligonucleotide
gacagacgucauagacgua

SEQ ID NO: 1114480 - RNA, 19 nt, Artificial Sequence
  Description of Artificial Sequence: Synthetic oligonucleotide
cgaugccccuucagcagac

SEQ ID NO: 1114481 - RNA, 19 nt, Artificial Sequence
  Description of Artificial Sequence: Synthetic oligonucleotide
gccggcugaucagugguaa

SEQ ID NO: 1114482 - RNA, 19 nt, Artificial Sequence
  Description of Artificial Sequence: Synthetic oligonucleotide
gcucgcccuuccgaugccc

SEQ ID NO: 1114483 - RNA, 19 nt, Artificial Sequence
  Description of Artificial Sequence: Synthetic oligonucleotide
aggcagcacuucguuccuu

SEQ ID NO: 1114484 - RNA, 19 nt, Artificial Sequence
  Description of Artificial Sequence: Synthetic oligonucleotide
gcccuuccgaugccccuuc

SEQ ID NO: 1114485 - RNA, 19 nt, Artificial Sequence
  Description of Artificial Sequence: Synthetic oligonucleotide
cgucggaacuguucaaggu

SEQ ID NO: 1114486 - RNA, 19 nt, Artificial Sequence
  Description of Artificial Sequence: Synthetic oligonucleotide
gcgauccugucgguagaga

SEQ ID NO: 1114487 - RNA, 19 nt, Artificial Sequence
  Description of Artificial Sequence: Synthetic oligonucleotide
gagcugcgauccugucggu

SEQ ID NO: 1114488 - RNA, 19 nt, Artificial Sequence
  Description of Artificial Sequence: Synthetic oligonucleotide
gcagaccguuccucggggu

SEQ ID NO: 1114489 - RNA, 19 nt, Artificial Sequence
  Description of Artificial Sequence: Synthetic oligonucleotide
gccggggaaugguggucuc

SEQ ID NO: 1114490 - RNA, 19 nt, Artificial Sequence
  Description of Artificial Sequence: Synthetic oligonucleotide
ggccggggaaugguggucu

SEQ ID NO: 1114491 - RNA, 19 nt, Artificial Sequence
  Description of Artificial Sequence: Synthetic oligonucleotide
ccagggcauacucacugau

SEQ ID NO: 1114492 - RNA, 19 nt, Artificial Sequence
  Description of Artificial Sequence: Synthetic oligonucleotide
gagucacauggcagcuauu

SEQ ID NO: 1114493 - RNA, 19 nt, Artificial Sequence
  Description of Artificial Sequence: Synthetic oligonucleotide
gccccuucagcagacgauu

SEQ ID NO: 1114494 - RNA, 19 nt, Artificial Sequence
  Description of Artificial Sequence: Synthetic oligonucleotide
gccacgcaauccugagccu

SEQ ID NO: 1114495 - RNA, 19 nt, Artificial Sequence
  Description of Artificial Sequence: Synthetic oligonucleotide
gcuguccaguucacgacuu

SEQ ID NO: 1114496 - RNA, 19 nt, Artificial Sequence
  Description of Artificial Sequence: Synthetic oligonucleotide
cuuccccggcccagucacu

SEQ ID NO: 1114497 - RNA, 19 nt, Artificial Sequence
  Description of Artificial Sequence: Synthetic oligonucleotide
ggggacgggguuguugguu

SEQ ID NO: 1114498 - RNA, 19 nt, Artificial Sequence
  Description of Artificial Sequence: Synthetic oligonucleotide
gcaucgcuugggguugagu

SEQ ID NO: 1114499 - RNA, 19 nt, Artificial Sequence
  Description of Artificial Sequence: Synthetic oligonucleotide
ccugcaggaucagaacguu

SEQ ID NO: 1114500 - RNA, 19 nt, Artificial Sequence
  Description of Artificial Sequence: Synthetic oligonucleotide
ccguuccucgggguaggga

SEQ ID NO: 1114501 - RNA, 19 nt, Artificial Sequence
  Description of Artificial Sequence: Synthetic oligonucleotide
cagcaugacccgggcuagu

SEQ ID NO: 1114502 - RNA, 19 nt, Artificial Sequence
  Description of Artificial Sequence: Synthetic oligonucleotide
ccccguggacuggcucaag

SEQ ID NO: 1114503 - RNA, 19 nt, Artificial Sequence
  Description of Artificial Sequence: Synthetic oligonucleotide
gggucccggcuaagcaagu

SEQ ID NO: 1114504 - RNA, 19 nt, Artificial Sequence
  Description of Artificial Sequence: Synthetic oligonucleotide
ccggcugaucagugguaau

SEQ ID NO: 1114505 - RNA, 19 nt, Artificial Sequence
  Description of Artificial Sequence: Synthetic oligonucleotide
cgccggcugaucaguggua

SEQ ID NO: 1114506 - RNA, 19 nt, Artificial Sequence
  Description of Artificial Sequence: Synthetic oligonucleotide
gcagccccguggacuggcu

SEQ ID NO: 1114507 - RNA, 19 nt, Artificial Sequence
  Description of Artificial Sequence: Synthetic oligonucleotide
cccgggcuagucucacauu

SEQ ID NO: 1114508 - RNA, 19 nt, Artificial Sequence
  Description of Artificial Sequence: Synthetic oligonucleotide
auuaagaguaggcacugcc

SEQ ID NO: 1114509 - RNA, 19 nt, Artificial Sequence
  Description of Artificial Sequence: Synthetic oligonucleotide
aaugaccuuguucugcccc

SEQ ID NO: 1114510 - RNA, 19 nt, Artificial Sequence
  Description of Artificial Sequence: Synthetic oligonucleotide
aaaagaacgggucgagugg

SEQ ID NO: 1114511 - RNA, 19 nt, Artificial Sequence
  Description of Artificial Sequence: Synthetic oligonucleotide
aaagguauuuacuggccac

SEQ ID NO: 1114512 - RNA, 19 nt, Artificial Sequence
  Description of Artificial Sequence: Synthetic oligonucleotide
ucauaaagguauuuacugg

SEQ ID NO: 1114513 - RNA, 19 nt, Artificial Sequence
  Description of Artificial Sequence: Synthetic oligonucleotide
aaugcauuccucagaaccc

SEQ ID NO: 1114514 - RNA, 19 nt, Artificial Sequence
  Description of Artificial Sequence: Synthetic oligonucleotide
cauaaagguauuuacuggc

SEQ ID NO: 1114515 - RNA, 19 nt, Artificial Sequence
  Description of Artificial Sequence: Synthetic oligonucleotide
cuaggaucaguguagaggc

SEQ ID NO: 1114516 - RNA, 19 nt, Artificial Sequence
  Description of Artificial Sequence: Synthetic oligonucleotide
auuagucaggcacugcggc

SEQ ID NO: 1114517 - RNA, 19 nt, Artificial Sequence
  Description of Artificial Sequence: Synthetic oligonucleotide
aguacgguuaggcuggugg

SEQ ID NO: 1114518 - RNA, 19 nt, Artificial Sequence
  Description of Artificial Sequence: Synthetic oligonucleotide
cuaacaucauagcacaagg

SEQ ID NO: 1114519 - RNA, 19 nt, Artificial Sequence
  Description of Artificial Sequence: Synthetic oligonucleotide
gauucgagcacucaguuuc

SEQ ID NO: 1114520 - RNA, 19 nt, Artificial Sequence
  Description of Artificial Sequence: Synthetic oligonucleotide
aaucuaaauccucuuccag

SEQ ID NO: 1114521 - RNA, 19 nt, Artificial Sequence
  Description of Artificial Sequence: Synthetic oligonucleotide
aauagagucuccuucggau

SEQ ID NO: 1114522 - RNA, 19 nt, Artificial Sequence
  Description of Artificial Sequence: Synthetic oligonucleotide
acauuagucaggcacugcg

SEQ ID NO: 1114523 - RNA, 19 nt, Artificial Sequence
  Description of Artificial Sequence: Synthetic oligonucleotide
aguguagaggcgccaaucc

SEQ ID NO: 1114524 - RNA, 19 nt, Artificial Sequence
  Description of Artificial Sequence: Synthetic oligonucleotide
guaaaagggacgugaaggg

SEQ ID NO: 1114525 - RNA, 19 nt, Artificial Sequence
  Description of Artificial Sequence: Synthetic oligonucleotide
uaacaucauagcacaaggg

SEQ ID NO: 1114526 - RNA, 19 nt, Artificial Sequence
  Description of Artificial Sequence: Synthetic oligonucleotide
aguguccuagccuacuagc

SEQ ID NO: 1114527 - RNA, 19 nt, Artificial Sequence
  Description of Artificial Sequence: Synthetic oligonucleotide
aacaccuagaaaagaacgg

SEQ ID NO: 1114528 - RNA, 19 nt, Artificial Sequence
  Description of Artificial Sequence: Synthetic oligonucleotide
aggcauuaagaguaggcac

SEQ ID NO: 1114529 - RNA, 19 nt, Artificial Sequence
  Description of Artificial Sequence: Synthetic oligonucleotide
ugagcuacauauuucuucu

SEQ ID NO: 1114530 - RNA, 19 nt, Artificial Sequence
  Description of Artificial Sequence: Synthetic oligonucleotide
uauuuacuggccaccauca

SEQ ID NO: 1114531 - RNA, 19 nt, Artificial Sequence
  Description of Artificial Sequence: Synthetic oligonucleotide
cacaaggggagauacaagc

SEQ ID NO: 1114532 - RNA, 19 nt, Artificial Sequence
  Description of Artificial Sequence: Synthetic oligonucleotide
aagguauuuacuggccacc

SEQ ID NO: 1114533 - RNA, 19 nt, Artificial Sequence
  Description of Artificial Sequence: Synthetic oligonucleotide
aaagguaguugcuucucug

SEQ ID NO: 1114534 - RNA, 19 nt, Artificial Sequence
  Description of Artificial Sequence: Synthetic oligonucleotide
aagacugccccagagugac

SEQ ID NO: 1114535 - RNA, 19 nt, Artificial Sequence
  Description of Artificial Sequence: Synthetic oligonucleotide
agaagacugccccagagug

SEQ ID NO: 1114536 - RNA, 19 nt, Artificial Sequence
  Description of Artificial Sequence: Synthetic oligonucleotide
aacuucucgcaaaagggac

SEQ ID NO: 1114537 - RNA, 19 nt, Artificial Sequence
  Description of Artificial Sequence: Synthetic oligonucleotide
aacgggucgagugggaagc

SEQ ID NO: 1114538 - RNA, 19 nt, Artificial Sequence
  Description of Artificial Sequence: Synthetic oligonucleotide
uaaagguauuuacuggcca

SEQ ID NO: 1114539 - RNA, 19 nt, Artificial Sequence
  Description of Artificial Sequence: Synthetic oligonucleotide
uucuuagggacucccaagc

SEQ ID NO: 1114540 - RNA, 19 nt, Artificial Sequence
  Description of Artificial Sequence: Synthetic oligonucleotide
gaaacaagucagaagauga

SEQ ID NO: 1114541 - RNA, 19 nt, Artificial Sequence
  Description of Artificial Sequence: Synthetic oligonucleotide
ucaguucuacaaaagcgug

SEQ ID NO: 1114542 - RNA, 19 nt, Artificial Sequence
  Description of Artificial Sequence: Synthetic oligonucleotide
gauacaaagcagugguacc

SEQ ID NO: 1114543 - RNA, 19 nt, Artificial Sequence
  Description of Artificial Sequence: Synthetic oligonucleotide
uuaagaguaggcacugcca

SEQ ID NO: 1114544 - RNA, 19 nt, Artificial Sequence
  Description of Artificial Sequence: Synthetic oligonucleotide
ggagauacaagccucucgg

SEQ ID NO: 1114545 - RNA, 19 nt, Artificial Sequence
  Description of Artificial Sequence: Synthetic oligonucleotide
agcuuuaccagccgcuggc

SEQ ID NO: 1114546 - RNA, 19 nt, Artificial Sequence
  Description of Artificial Sequence: Synthetic oligonucleotide
auaauagagucuccuucgg

SEQ ID NO: 1114547 - RNA, 19 nt, Artificial Sequence
  Description of Artificial Sequence: Synthetic oligonucleotide
uggucuaagagggugaaug

SEQ ID NO: 1114548 - RNA, 19 nt, Artificial Sequence
  Description of Artificial Sequence: Synthetic oligonucleotide
auagacacaguacgguuag

SEQ ID NO: 1114549 - RNA, 19 nt, Artificial Sequence
  Description of Artificial Sequence: Synthetic oligonucleotide
aaagaacgggucgaguggg

SEQ ID NO: 1114550 - RNA, 19 nt, Artificial Sequence
  Description of Artificial Sequence: Synthetic oligonucleotide
aagagggugaaugaccuug

SEQ ID NO: 1114551 - RNA, 19 nt, Artificial Sequence
  Description of Artificial Sequence: Synthetic oligonucleotide
aggacugguguauuacagc

SEQ ID NO: 1114552 - RNA, 19 nt, Artificial Sequence
  Description of Artificial Sequence: Synthetic oligonucleotide
agaagaugacacgugcugc

SEQ ID NO: 1114553 - RNA, 19 nt, Artificial Sequence
  Description of Artificial Sequence: Synthetic oligonucleotide
ugaaugaccuuguucugcc

SEQ ID NO: 1114554 - RNA, 19 nt, Artificial Sequence
  Description of Artificial Sequence: Synthetic oligonucleotide
cacaguacgguuaggcugg

SEQ ID NO: 1114555 - RNA, 19 nt, Artificial Sequence
  Description of Artificial Sequence: Synthetic oligonucleotide
uucggauucgagcacucag

SEQ ID NO: 1114556 - RNA, 19 nt, Artificial Sequence
  Description of Artificial Sequence: Synthetic oligonucleotide
aaccccuuaugcuccuacc

SEQ ID NO: 1114557 - RNA, 19 nt, Artificial Sequence
  Description of Artificial Sequence: Synthetic oligonucleotide
guauuacagccacugaugc

SEQ ID NO: 1114558 - RNA, 19 nt, Artificial Sequence
  Description of Artificial Sequence: Synthetic oligonucleotide
aaaccucaguucuacaaaa

SEQ ID NO: 1114559 - RNA, 19 nt, Artificial Sequence
  Description of Artificial Sequence: Synthetic oligonucleotide
auagcacaaggggagauac

SEQ ID NO: 1114560 - RNA, 19 nt, Artificial Sequence
  Description of Artificial Sequence: Synthetic oligonucleotide
aaggcauuaagaguaggca

SEQ ID NO: 1114561 - RNA, 19 nt, Artificial Sequence
  Description of Artificial Sequence: Synthetic oligonucleotide
aggacaagguugaaggacc

SEQ ID NO: 1114562 - RNA, 19 nt, Artificial Sequence
  Description of Artificial Sequence: Synthetic oligonucleotide
acaccuagaaaagaacggg

SEQ ID NO: 1114563 - RNA, 19 nt, Artificial Sequence
  Description of Artificial Sequence: Synthetic oligonucleotide
uguagguguaccagccccg

SEQ ID NO: 1114564 - RNA, 19 nt, Artificial Sequence
  Description of Artificial Sequence: Synthetic oligonucleotide
auguaugcaggacugcaag

SEQ ID NO: 1114565 - RNA, 19 nt, Artificial Sequence
  Description of Artificial Sequence: Synthetic oligonucleotide
uuagggacucccaagcccu

SEQ ID NO: 1114566 - RNA, 19 nt, Artificial Sequence
  Description of Artificial Sequence: Synthetic oligonucleotide
ugaaggacccaacaauccu

SEQ ID NO: 1114567 - RNA, 19 nt, Artificial Sequence
  Description of Artificial Sequence: Synthetic oligonucleotide
aggaucaguguagaggcgc

SEQ ID NO: 1114568 - RNA, 19 nt, Artificial Sequence
  Description of Artificial Sequence: Synthetic oligonucleotide
acgugaagggccaauagac

SEQ ID NO: 1114569 - RNA, 19 nt, Artificial Sequence
  Description of Artificial Sequence: Synthetic oligonucleotide
acguccuugcugcucagcc

SEQ ID NO: 1114570 - RNA, 19 nt, Artificial Sequence
  Description of Artificial Sequence: Synthetic oligonucleotide
agggugaaugaccuuguuc

SEQ ID NO: 1114571 - RNA, 19 nt, Artificial Sequence
  Description of Artificial Sequence: Synthetic oligonucleotide
guaaagagaacaccuagaa

SEQ ID NO: 1114572 - RNA, 19 nt, Artificial Sequence
  Description of Artificial Sequence: Synthetic oligonucleotide
gaugcuaagguuggaagac

SEQ ID NO: 1114573 - RNA, 19 nt, Artificial Sequence
  Description of Artificial Sequence: Synthetic oligonucleotide
cuuagggacucccaagccc

SEQ ID NO: 1114574 - RNA, 19 nt, Artificial Sequence
  Description of Artificial Sequence: Synthetic oligonucleotide
ucccaagcccucuuaaugc

SEQ ID NO: 1114575 - RNA, 19 nt, Artificial Sequence
  Description of Artificial Sequence: Synthetic oligonucleotide
ggaacuucucgcaaaaggg

SEQ ID NO: 1114576 - RNA, 19 nt, Artificial Sequence
  Description of Artificial Sequence: Synthetic oligonucleotide
cagaagucuaucccuaccc

SEQ ID NO: 1114577 - RNA, 19 nt, Artificial Sequence
  Description of Artificial Sequence: Synthetic oligonucleotide
ugguaaaagggacgugaag

SEQ ID NO: 1114578 - RNA, 19 nt, Artificial Sequence
  Description of Artificial Sequence: Synthetic oligonucleotide
uagccuacuagccagccuc

SEQ ID NO: 1114579 - RNA, 19 nt, Artificial Sequence
  Description of Artificial Sequence: Synthetic oligonucleotide
ucgcaaaagggacauuugu

SEQ ID NO: 1114580 - RNA, 19 nt, Artificial Sequence
  Description of Artificial Sequence: Synthetic oligonucleotide
uguuccagcagcacacaca

SEQ ID NO: 1114581 - RNA, 19 nt, Artificial Sequence
  Description of Artificial Sequence: Synthetic oligonucleotide
ugguguauuacagccacug

SEQ ID NO: 1114582 - RNA, 19 nt, Artificial Sequence
  Description of Artificial Sequence: Synthetic oligonucleotide
ugaaagacuugagacgggc

SEQ ID NO: 1114583 - RNA, 19 nt, Artificial Sequence
  Description of Artificial Sequence: Synthetic oligonucleotide
uaauagagucuccuucgga

SEQ ID NO: 1114584 - RNA, 19 nt, Artificial Sequence
  Description of Artificial Sequence: Synthetic oligonucleotide
ucagaagaugacacgugcu

SEQ ID NO: 1114585 - RNA, 19 nt, Artificial Sequence
  Description of Artificial Sequence: Synthetic oligonucleotide
agguguaccagccccgccg

SEQ ID NO: 1114586 - RNA, 19 nt, Artificial Sequence
  Description of Artificial Sequence: Synthetic oligonucleotide
cauuagucaggcacugcgg

SEQ ID NO: 1114587 - RNA, 19 nt, Artificial Sequence
  Description of Artificial Sequence: Synthetic oligonucleotide
uguccuagccuacuagcca

SEQ ID NO: 1114588 - RNA, 19 nt, Artificial Sequence
  Description of Artificial Sequence: Synthetic oligonucleotide
uauuacagccacugaugcc

SEQ ID NO: 1114589 - RNA, 19 nt, Artificial Sequence
  Description of Artificial Sequence: Synthetic oligonucleotide
ucuguggucuaagagggug

SEQ ID NO: 1114590 - RNA, 19 nt, Artificial Sequence
  Description of Artificial Sequence: Synthetic oligonucleotide
aagcccucuuaaugcauuc

SEQ ID NO: 1114591 - RNA, 19 nt, Artificial Sequence
  Description of Artificial Sequence: Synthetic oligonucleotide
uaacaagcaggacagcuuu

SEQ ID NO: 1114592 - RNA, 19 nt, Artificial Sequence
  Description of Artificial Sequence: Synthetic oligonucleotide
cucuagccaauucagcacc

SEQ ID NO: 1114593 - RNA, 19 nt, Artificial Sequence
  Description of Artificial Sequence: Synthetic oligonucleotide
uggagaucagaaacaaguc

SEQ ID NO: 1114594 - RNA, 19 nt, Artificial Sequence
  Description of Artificial Sequence: Synthetic oligonucleotide
auggcacuaaggaagcccc

SEQ ID NO: 1114595 - RNA, 19 nt, Artificial Sequence
  Description of Artificial Sequence: Synthetic oligonucleotide
accuggagacauuagucag

SEQ ID NO: 1114596 - RNA, 19 nt, Artificial Sequence
  Description of Artificial Sequence: Synthetic oligonucleotide
cucagaacccuaccuagcc

SEQ ID NO: 1114597 - RNA, 19 nt, Artificial Sequence
  Description of Artificial Sequence: Synthetic oligonucleotide
agcugaaacggucgcuggc

SEQ ID NO: 1114598 - RNA, 19 nt, Artificial Sequence
  Description of Artificial Sequence: Synthetic oligonucleotide
ucuuagggacucccaagcc

SEQ ID NO: 1114599 - RNA, 19 nt, Artificial Sequence
  Description of Artificial Sequence: Synthetic oligonucleotide
ucucuagccaauucagcac

SEQ ID NO: 1114600 - RNA, 19 nt, Artificial Sequence
  Description of Artificial Sequence: Synthetic oligonucleotide
guauuuacuggccaccauc

SEQ ID NO: 1114601 - RNA, 19 nt, Artificial Sequence
  Description of Artificial Sequence: Synthetic oligonucleotide
uuaugcuccuacccaggag

SEQ ID NO: 1114602 - RNA, 19 nt, Artificial Sequence
  Description of Artificial Sequence: Synthetic oligonucleotide
aagucuaucccuaccccag

SEQ ID NO: 1114603 - RNA, 19 nt, Artificial Sequence
  Description of Artificial Sequence: Synthetic oligonucleotide
gacugcaagaggccuuugg

SEQ ID NO: 1114604 - RNA, 19 nt, Artificial Sequence
  Description of Artificial Sequence: Synthetic oligonucleotide
guaugcaggacugcaagag

SEQ ID NO: 1114605 - RNA, 19 nt, Artificial Sequence
  Description of Artificial Sequence: Synthetic oligonucleotide
cuguguagguguaccagcc

SEQ ID NO: 1114606 - RNA, 19 nt, Artificial Sequence
  Description of Artificial Sequence: Synthetic oligonucleotide
ucucccuaggaucagugua

SEQ ID NO: 1114607 - RNA, 19 nt, Artificial Sequence
  Description of Artificial Sequence: Synthetic oligonucleotide
cagaagaugacacgugcug

SEQ ID NO: 1114608 - RNA, 19 nt, Artificial Sequence
  Description of Artificial Sequence: Synthetic oligonucleotide
ggacugguguauuacagcc

SEQ ID NO: 1114609 - RNA, 19 nt, Artificial Sequence
  Description of Artificial Sequence: Synthetic oligonucleotide
acugcaagaggccuuugga

SEQ ID NO: 1114610 - RNA, 19 nt, Artificial Sequence
  Description of Artificial Sequence: Synthetic oligonucleotide
ugacauccucuccucaccc

SEQ ID NO: 1114611 - RNA, 19 nt, Artificial Sequence
  Description of Artificial Sequence: Synthetic oligonucleotide
accuagaaaagaacggguc

SEQ ID NO: 1114612 - RNA, 19 nt, Artificial Sequence
  Description of Artificial Sequence: Synthetic oligonucleotide
uuuaccagccgcuggcaga

SEQ ID NO: 1114613 - RNA, 19 nt, Artificial Sequence
  Description of Artificial Sequence: Synthetic oligonucleotide
uguaugcaggacugcaaga

SEQ ID NO: 1114614 - RNA, 19 nt, Artificial Sequence
  Description of Artificial Sequence: Synthetic oligonucleotide
accuuuaccuuuccaucuc

SEQ ID NO: 1114615 - RNA, 19 nt, Artificial Sequence
  Description of Artificial Sequence: Synthetic oligonucleotide
ccuagaaaagaacgggucg

SEQ ID NO: 1114616 - RNA, 19 nt, Artificial Sequence
  Description of Artificial Sequence: Synthetic oligonucleotide
gaagucuaucccuacccca

SEQ ID NO: 1114617 - RNA, 19 nt, Artificial Sequence
  Description of Artificial Sequence: Synthetic oligonucleotide
uagccaauucagcaccuca

SEQ ID NO: 1114618 - RNA, 19 nt, Artificial Sequence
  Description of Artificial Sequence: Synthetic oligonucleotide
cacugagcugaaacggucg

SEQ ID NO: 1114619 - RNA, 19 nt, Artificial Sequence
  Description of Artificial Sequence: Synthetic oligonucleotide
uacuagccagccucugugg

SEQ ID NO: 1114620 - RNA, 19 nt, Artificial Sequence
  Description of Artificial Sequence: Synthetic oligonucleotide
guguagguguaccagcccc

SEQ ID NO: 1114621 - RNA, 19 nt, Artificial Sequence
  Description of Artificial Sequence: Synthetic oligonucleotide
uguguagguguaccagccc

SEQ ID NO: 1114622 - RNA, 19 nt, Artificial Sequence
  Description of Artificial Sequence: Synthetic oligonucleotide
ucggauucgagcacucagu

SEQ ID NO: 1114623 - RNA, 19 nt, Artificial Sequence
  Description of Artificial Sequence: Synthetic oligonucleotide
guuucggugacggagccgc

SEQ ID NO: 1114624 - RNA, 19 nt, Artificial Sequence
  Description of Artificial Sequence: Synthetic oligonucleotide
guugaaggacccaacaauc

SEQ ID NO: 1114625 - RNA, 19 nt, Artificial Sequence
  Description of Artificial Sequence: Synthetic oligonucleotide
aagggacauuuguggagag

SEQ ID NO: 1114626 - RNA, 19 nt, Artificial Sequence
  Description of Artificial Sequence: Synthetic oligonucleotide
gacugccccagagugacgg

SEQ ID NO: 1114627 - RNA, 19 nt, Artificial Sequence
  Description of Artificial Sequence: Synthetic oligonucleotide
agagugacggcaacucuac

SEQ ID NO: 1114628 - RNA, 19 nt, Artificial Sequence
  Description of Artificial Sequence: Synthetic oligonucleotide
uaucccuaccccaggcuug

SEQ ID NO: 1114629 - RNA, 19 nt, Artificial Sequence
  Description of Artificial Sequence: Synthetic oligonucleotide
gacgugaagggccaauaga

SEQ ID NO: 1114630 - RNA, 19 nt, Artificial Sequence
  Description of Artificial Sequence: Synthetic oligonucleotide
guccuagccuacuagccag

SEQ ID NO: 1114631 - RNA, 19 nt, Artificial Sequence
  Description of Artificial Sequence: Synthetic oligonucleotide
cacaugagcuacauauuuc

SEQ ID NO: 1114632 - RNA, 19 nt, Artificial Sequence
  Description of Artificial Sequence: Synthetic oligonucleotide
cuacuagccagccucugug

SEQ ID NO: 1114633 - RNA, 19 nt, Artificial Sequence
  Description of Artificial Sequence: Synthetic oligonucleotide
uguaccagccccgccgacg

SEQ ID NO: 1114634 - RNA, 19 nt, Artificial Sequence
  Description of Artificial Sequence: Synthetic oligonucleotide
caguccgucucccaguccc

SEQ ID NO: 1114635 - RNA, 19 nt, Artificial Sequence
  Description of Artificial Sequence: Synthetic oligonucleotide
uuagucaggcacugcggca

SEQ ID NO: 1114636 - RNA, 19 nt, Artificial Sequence
  Description of Artificial Sequence: Synthetic oligonucleotide
ggagaucagaaacaaguca

SEQ ID NO: 1114637 - RNA, 19 nt, Artificial Sequence
  Description of Artificial Sequence: Synthetic oligonucleotide
cuggguuucggugacggag

SEQ ID NO: 1114638 - RNA, 19 nt, Artificial Sequence
  Description of Artificial Sequence: Synthetic oligonucleotide
ucucgcaaaagggacauuu

SEQ ID NO: 1114639 - RNA, 19 nt, Artificial Sequence
  Description of Artificial Sequence: Synthetic oligonucleotide
agccucucgggacacauga

SEQ ID NO: 1114640 - RNA, 19 nt, Artificial Sequence
  Description of Artificial Sequence: Synthetic oligonucleotide
agucuaucccuaccccagg

SEQ ID NO: 1114641 - RNA, 19 nt, Artificial Sequence
  Description of Artificial Sequence: Synthetic oligonucleotide
uagaggcgccaauccaugg

SEQ ID NO: 1114642 - RNA, 19 nt, Artificial Sequence
  Description of Artificial Sequence: Synthetic oligonucleotide
ggacacaugagcuacauau

SEQ ID NO: 1114643 - RNA, 19 nt, Artificial Sequence
  Description of Artificial Sequence: Synthetic oligonucleotide
gaaagacuugagacgggcc

SEQ ID NO: 1114644 - RNA, 19 nt, Artificial Sequence
  Description of Artificial Sequence: Synthetic oligonucleotide
cuuuaccuuuccaucucug

SEQ ID NO: 1114645 - RNA, 19 nt, Artificial Sequence
  Description of Artificial Sequence: Synthetic oligonucleotide
agacgggccagcuccauga

SEQ ID NO: 1114646 - RNA, 19 nt, Artificial Sequence
  Description of Artificial Sequence: Synthetic oligonucleotide
aucauggagaucagaaaca

SEQ ID NO: 1114647 - RNA, 19 nt, Artificial Sequence
  Description of Artificial Sequence: Synthetic oligonucleotide
aggccuguaaagagaacac

SEQ ID NO: 1114648 - RNA, 19 nt, Artificial Sequence
  Description of Artificial Sequence: Synthetic oligonucleotide
cucaguucuacaaaagcgu

SEQ ID NO: 1114649 - RNA, 19 nt, Artificial Sequence
  Description of Artificial Sequence: Synthetic oligonucleotide
ccagucccaaccauaauag

SEQ ID NO: 1114650 - RNA, 19 nt, Artificial Sequence
  Description of Artificial Sequence: Synthetic oligonucleotide
gaaacggucgcuggcacca

SEQ ID NO: 1114651 - RNA, 19 nt, Artificial Sequence
  Description of Artificial Sequence: Synthetic oligonucleotide
ugaaacggucgcuggcacc

SEQ ID NO: 1114652 - RNA, 19 nt, Artificial Sequence
  Description of Artificial Sequence: Synthetic oligonucleotide
gggagauacaagccucucg

SEQ ID NO: 1114653 - RNA, 19 nt, Artificial Sequence
  Description of Artificial Sequence: Synthetic oligonucleotide
aacccuaccuagccuggga

SEQ ID NO: 1114654 - RNA, 19 nt, Artificial Sequence
  Description of Artificial Sequence: Synthetic oligonucleotide
uaaccccuuaugcuccuac

SEQ ID NO: 1114655 - RNA, 19 nt, Artificial Sequence
  Description of Artificial Sequence: Synthetic oligonucleotide
ccaaccauaauagagucuc

SEQ ID NO: 1114656 - RNA, 19 nt, Artificial Sequence
  Description of Artificial Sequence: Synthetic oligonucleotide
cuagaaaagaacgggucga

SEQ ID NO: 1114657 - RNA, 19 nt, Artificial Sequence
  Description of Artificial Sequence: Synthetic oligonucleotide
aaccaguaugaggucagga

SEQ ID NO: 1114658 - RNA, 19 nt, Artificial Sequence
  Description of Artificial Sequence: Synthetic oligonucleotide
cucgcaaaagggacauuug

SEQ ID NO: 1114659 - RNA, 19 nt, Artificial Sequence
  Description of Artificial Sequence: Synthetic oligonucleotide
guacgguuaggcugguggc

SEQ ID NO: 1114660 - RNA, 19 nt, Artificial Sequence
  Description of Artificial Sequence: Synthetic oligonucleotide
cuaaggaagccccuuucca

SEQ ID NO: 1114661 - RNA, 19 nt, Artificial Sequence
  Description of Artificial Sequence: Synthetic oligonucleotide
caagguugaaggacccaac

SEQ ID NO: 1114662 - RNA, 19 nt, Artificial Sequence
  Description of Artificial Sequence: Synthetic oligonucleotide
uggcaggcacggcaguuag

SEQ ID NO: 1114663 - RNA, 19 nt, Artificial Sequence
  Description of Artificial Sequence: Synthetic oligonucleotide
cuaagagggugaaugaccu

SEQ ID NO: 1114664 - RNA, 19 nt, Artificial Sequence
  Description of Artificial Sequence: Synthetic oligonucleotide
ugacggagccgcucaaugu

SEQ ID NO: 1114665 - RNA, 19 nt, Artificial Sequence
  Description of Artificial Sequence: Synthetic oligonucleotide
agcccucuuaaugcauucc

SEQ ID NO: 1114666 - RNA, 19 nt, Artificial Sequence
  Description of Artificial Sequence: Synthetic oligonucleotide
aaagggacgugaagggcca

SEQ ID NO: 1114667 - RNA, 19 nt, Artificial Sequence
  Description of Artificial Sequence: Synthetic oligonucleotide
cuuuaccagccgcuggcag

SEQ ID NO: 1114668 - RNA, 19 nt, Artificial Sequence
  Description of Artificial Sequence: Synthetic oligonucleotide
gucuguguagguguaccag

SEQ ID NO: 1114669 - RNA, 19 nt, Artificial Sequence
  Description of Artificial Sequence: Synthetic oligonucleotide
caagcaggacagcuuuacc

SEQ ID NO: 1114670 - RNA, 19 nt, Artificial Sequence
  Description of Artificial Sequence: Synthetic oligonucleotide
cauugcugggguuggagga

SEQ ID NO: 1114671 - RNA, 19 nt, Artificial Sequence
  Description of Artificial Sequence: Synthetic oligonucleotide
acaagguugaaggacccaa

SEQ ID NO: 1114672 - RNA, 19 nt, Artificial Sequence
  Description of Artificial Sequence: Synthetic oligonucleotide
gaggcgccaauccauggca

SEQ ID NO: 1114673 - RNA, 19 nt, Artificial Sequence
  Description of Artificial Sequence: Synthetic oligonucleotide
gugacggagccgcucaaug

SEQ ID NO: 1114674 - RNA, 19 nt, Artificial Sequence
  Description of Artificial Sequence: Synthetic oligonucleotide
cucgggacacaugagcuac

SEQ ID NO: 1114675 - RNA, 19 nt, Artificial Sequence
  Description of Artificial Sequence: Synthetic oligonucleotide
gagucgccgaauaggacug

SEQ ID NO: 1114676 - RNA, 19 nt, Artificial Sequence
  Description of Artificial Sequence: Synthetic oligonucleotide
agacauuagucaggcacug

SEQ ID NO: 1114677 - RNA, 19 nt, Artificial Sequence
  Description of Artificial Sequence: Synthetic oligonucleotide
uaccuagccugggaaaaug

SEQ ID NO: 1114678 - RNA, 19 nt, Artificial Sequence
  Description of Artificial Sequence: Synthetic oligonucleotide
gccaauagacacaguacgg

SEQ ID NO: 1114679 - RNA, 19 nt, Artificial Sequence
  Description of Artificial Sequence: Synthetic oligonucleotide
agaucagaaacaagucaga

SEQ ID NO: 1114680 - RNA, 19 nt, Artificial Sequence
  Description of Artificial Sequence: Synthetic oligonucleotide
ggacccaacaauccuuggc

SEQ ID NO: 1114681 - RNA, 19 nt, Artificial Sequence
  Description of Artificial Sequence: Synthetic oligonucleotide
cuggagucgccgaauagga

SEQ ID NO: 1114682 - RNA, 19 nt, Artificial Sequence
  Description of Artificial Sequence: Synthetic oligonucleotide
ucaguguccuagccuacua

SEQ ID NO: 1114683 - RNA, 19 nt, Artificial Sequence
  Description of Artificial Sequence: Synthetic oligonucleotide
gucuaucccuaccccaggc

SEQ ID NO: 1114684 - RNA, 19 nt, Artificial Sequence
  Description of Artificial Sequence: Synthetic oligonucleotide
aggacccaacaauccuugg

SEQ ID NO: 1114685 - RNA, 19 nt, Artificial Sequence
  Description of Artificial Sequence: Synthetic oligonucleotide
caguguccuagccuacuag

SEQ ID NO: 1114686 - RNA, 19 nt, Artificial Sequence
  Description of Artificial Sequence: Synthetic oligonucleotide
cccauaaccccuuaugcuc

SEQ ID NO: 1114687 - RNA, 19 nt, Artificial Sequence
  Description of Artificial Sequence: Synthetic oligonucleotide
gggaauguaugcaggacug

SEQ ID NO: 1114688 - RNA, 19 nt, Artificial Sequence
  Description of Artificial Sequence: Synthetic oligonucleotide
ggugcaguccgucucccag

SEQ ID NO: 1114689 - RNA, 19 nt, Artificial Sequence
  Description of Artificial Sequence: Synthetic oligonucleotide
ccaauucagcaccucaaag

SEQ ID NO: 1114690 - RNA, 19 nt, Artificial Sequence
  Description of Artificial Sequence: Synthetic oligonucleotide
gacauuuguggagaggagu

SEQ ID NO: 1114691 - RNA, 19 nt, Artificial Sequence
  Description of Artificial Sequence: Synthetic oligonucleotide
gccgaauaggacugggugc

SEQ ID NO: 1114692 - RNA, 19 nt, Artificial Sequence
  Description of Artificial Sequence: Synthetic oligonucleotide
guguccuagccuacuagcc

SEQ ID NO: 1114693 - RNA, 19 nt, Artificial Sequence
  Description of Artificial Sequence: Synthetic oligonucleotide
agucagaagaugacacgug

SEQ ID NO: 1114694 - RNA, 19 nt, Artificial Sequence
  Description of Artificial Sequence: Synthetic oligonucleotide
uacgguuaggcugguggca

SEQ ID NO: 1114695 - RNA, 19 nt, Artificial Sequence
  Description of Artificial Sequence: Synthetic oligonucleotide
ugcaguccgucucccaguc

SEQ ID NO: 1114696 - RNA, 19 nt, Artificial Sequence
  Description of Artificial Sequence: Synthetic oligonucleotide
uccuagccuacuagccagc

SEQ ID NO: 1114697 - RNA, 19 nt, Artificial Sequence
  Description of Artificial Sequence: Synthetic oligonucleotide
acauuuguggagaggagua

SEQ ID NO: 1114698 - RNA, 19 nt, Artificial Sequence
  Description of Artificial Sequence: Synthetic oligonucleotide
ggaggaauggaggggauac

SEQ ID NO: 1114699 - RNA, 19 nt, Artificial Sequence
  Description of Artificial Sequence: Synthetic oligonucleotide
uggagucgccgaauaggac

SEQ ID NO: 1114700 - RNA, 19 nt, Artificial Sequence
  Description of Artificial Sequence: Synthetic oligonucleotide
gacauuagucaggcacugc

SEQ ID NO: 1114701 - RNA, 19 nt, Artificial Sequence
  Description of Artificial Sequence: Synthetic oligonucleotide
uguggucuaagagggugaa

SEQ ID NO: 1114702 - RNA, 19 nt, Artificial Sequence
  Description of Artificial Sequence: Synthetic oligonucleotide
agggacauuuguggagagg

SEQ ID NO: 1114703 - RNA, 19 nt, Artificial Sequence
  Description of Artificial Sequence: Synthetic oligonucleotide
gacggagccgcucaaugua

SEQ ID NO: 1114704 - RNA, 19 nt, Artificial Sequence
  Description of Artificial Sequence: Synthetic oligonucleotide
gcaagaggccuuuggaaac

SEQ ID NO: 1114705 - RNA, 19 nt, Artificial Sequence
  Description of Artificial Sequence: Synthetic oligonucleotide
agguauuuacuggccacca

SEQ ID NO: 1114706 - RNA, 19 nt, Artificial Sequence
  Description of Artificial Sequence: Synthetic oligonucleotide
acgguuaggcugguggcag

SEQ ID NO: 1114707 - RNA, 19 nt, Artificial Sequence
  Description of Artificial Sequence: Synthetic oligonucleotide
aucucccuaggaucagugu

SEQ ID NO: 1114708 - RNA, 19 nt, Artificial Sequence
  Description of Artificial Sequence: Synthetic oligonucleotide
agaacccuaccuagccugg

SEQ ID NO: 1114709 - RNA, 19 nt, Artificial Sequence
  Description of Artificial Sequence: Synthetic oligonucleotide
cuagccagccucugugguc

SEQ ID NO: 1114710 - RNA, 19 nt, Artificial Sequence
  Description of Artificial Sequence: Synthetic oligonucleotide
aagaggccuuuggaaacca

SEQ ID NO: 1114711 - RNA, 19 nt, Artificial Sequence
  Description of Artificial Sequence: Synthetic oligonucleotide
auuuacuggccaccaucau

SEQ ID NO: 1114712 - RNA, 19 nt, Artificial Sequence
  Description of Artificial Sequence: Synthetic oligonucleotide
ggauacugggcuccagagc

SEQ ID NO: 1114713 - RNA, 19 nt, Artificial Sequence
  Description of Artificial Sequence: Synthetic oligonucleotide
ggacgugaagggccaauag

SEQ ID NO: 1114714 - RNA, 19 nt, Artificial Sequence
  Description of Artificial Sequence: Synthetic oligonucleotide
gcagaagucuaucccuacc

SEQ ID NO: 1114715 - RNA, 19 nt, Artificial Sequence
  Description of Artificial Sequence: Synthetic oligonucleotide
guagaggcgccaauccaug

SEQ ID NO: 1114716 - RNA, 19 nt, Artificial Sequence
  Description of Artificial Sequence: Synthetic oligonucleotide
ucgccgaauaggacugggu

SEQ ID NO: 1114717 - RNA, 19 nt, Artificial Sequence
  Description of Artificial Sequence: Synthetic oligonucleotide
cugaaacggucgcuggcac

SEQ ID NO: 1114718 - RNA, 19 nt, Artificial Sequence
  Description of Artificial Sequence: Synthetic oligonucleotide
cagguucuuagggacuccc

SEQ ID NO: 1114719 - RNA, 19 nt, Artificial Sequence
  Description of Artificial Sequence: Synthetic oligonucleotide
uccuucggauucgagcacu

SEQ ID NO: 1114720 - RNA, 19 nt, Artificial Sequence
  Description of Artificial Sequence: Synthetic oligonucleotide
guguagaggcgccaaucca

SEQ ID NO: 1114721 - RNA, 19 nt, Artificial Sequence
  Description of Artificial Sequence: Synthetic oligonucleotide
gaagccuuggaggaugcua

SEQ ID NO: 1114722 - RNA, 19 nt, Artificial Sequence
  Description of Artificial Sequence: Synthetic oligonucleotide
guaggcacugccacucccc

SEQ ID NO: 1114723 - RNA, 19 nt, Artificial Sequence
  Description of Artificial Sequence: Synthetic oligonucleotide
ggucuaagagggugaauga

SEQ ID NO: 1114724 - RNA, 19 nt, Artificial Sequence
  Description of Artificial Sequence: Synthetic oligonucleotide
cugcaagaggccuuuggaa

SEQ ID NO: 1114725 - RNA, 19 nt, Artificial Sequence
  Description of Artificial Sequence: Synthetic oligonucleotide
ccaauccauggcacuaagg

SEQ ID NO: 1114726 - RNA, 19 nt, Artificial Sequence
  Description of Artificial Sequence: Synthetic oligonucleotide
uggcaccuggagacauuag

SEQ ID NO: 1114727 - RNA, 19 nt, Artificial Sequence
  Description of Artificial Sequence: Synthetic oligonucleotide
uugagacgggccagcucca

SEQ ID NO: 1114728 - RNA, 19 nt, Artificial Sequence
  Description of Artificial Sequence: Synthetic oligonucleotide
caaggggagauacaagccu

SEQ ID NO: 1114729 - RNA, 19 nt, Artificial Sequence
  Description of Artificial Sequence: Synthetic oligonucleotide
cuagccaaggacccagaaa

SEQ ID NO: 1114730 - RNA, 19 nt, Artificial Sequence
  Description of Artificial Sequence: Synthetic oligonucleotide
cagagugacggcaacucua

SEQ ID NO: 1114731 - RNA, 19 nt, Artificial Sequence
  Description of Artificial Sequence: Synthetic oligonucleotide
ccuuaugcuccuacccagg

SEQ ID NO: 1114732 - RNA, 19 nt, Artificial Sequence
  Description of Artificial Sequence: Synthetic oligonucleotide
cgcucaauguacaccagag

SEQ ID NO: 1114733 - RNA, 19 nt, Artificial Sequence
  Description of Artificial Sequence: Synthetic oligonucleotide
ucuucuggagucgccgaau

SEQ ID NO: 1114734 - RNA, 19 nt, Artificial Sequence
  Description of Artificial Sequence: Synthetic oligonucleotide
guaguugcuucucugucau

SEQ ID NO: 1114735 - RNA, 19 nt, Artificial Sequence
  Description of Artificial Sequence: Synthetic oligonucleotide
gguucuuagggacucccaa

SEQ ID NO: 1114736 - RNA, 19 nt, Artificial Sequence
  Description of Artificial Sequence: Synthetic oligonucleotide
gucgagugggaagccuugg

SEQ ID NO: 1114737 - RNA, 19 nt, Artificial Sequence
  Description of Artificial Sequence: Synthetic oligonucleotide
cacaggucuguguaggugu

SEQ ID NO: 1114738 - RNA, 19 nt, Artificial Sequence
  Description of Artificial Sequence: Synthetic oligonucleotide
caguguagaggcgccaauc

SEQ ID NO: 1114739 - RNA, 19 nt, Artificial Sequence
  Description of Artificial Sequence: Synthetic oligonucleotide
ucgggacacaugagcuaca

SEQ ID NO: 1114740 - RNA, 19 nt, Artificial Sequence
  Description of Artificial Sequence: Synthetic oligonucleotide
acccuaccuagccugggaa

SEQ ID NO: 1114741 - RNA, 19 nt, Artificial Sequence
  Description of Artificial Sequence: Synthetic oligonucleotide
gucgccgaauaggacuggg

SEQ ID NO: 1114742 - RNA, 19 nt, Artificial Sequence
  Description of Artificial Sequence: Synthetic oligonucleotide
uggcacuaaggaagccccu

SEQ ID NO: 1114743 - RNA, 19 nt, Artificial Sequence
  Description of Artificial Sequence: Synthetic oligonucleotide
gguaugguaaaagggacgu

SEQ ID NO: 1114744 - RNA, 19 nt, Artificial Sequence
  Description of Artificial Sequence: Synthetic oligonucleotide
cuguggucuaagaggguga

SEQ ID NO: 1114745 - RNA, 19 nt, Artificial Sequence
  Description of Artificial Sequence: Synthetic oligonucleotide
uucgagcacucaguuucug

SEQ ID NO: 1114746 - RNA, 19 nt, Artificial Sequence
  Description of Artificial Sequence: Synthetic oligonucleotide
guagguguaccagccccgc

SEQ ID NO: 1114747 - RNA, 19 nt, Artificial Sequence
  Description of Artificial Sequence: Synthetic oligonucleotide
augguaaaagggacgugaa

SEQ ID NO: 1114748 - RNA, 19 nt, Artificial Sequence
  Description of Artificial Sequence: Synthetic oligonucleotide
cuacauugucuuccuggca

SEQ ID NO: 1114749 - RNA, 19 nt, Artificial Sequence
  Description of Artificial Sequence: Synthetic oligonucleotide
agggugcaguccgucuccc

SEQ ID NO: 1114750 - RNA, 19 nt, Artificial Sequence
  Description of Artificial Sequence: Synthetic oligonucleotide
gacaagccucuggucacug

SEQ ID NO: 1114751 - RNA, 19 nt, Artificial Sequence
  Description of Artificial Sequence: Synthetic oligonucleotide
caccuagaaaagaacgggu

SEQ ID NO: 1114752 - RNA, 19 nt, Artificial Sequence
  Description of Artificial Sequence: Synthetic oligonucleotide
aggacccagaaagguagca

SEQ ID NO: 1114753 - RNA, 19 nt, Artificial Sequence
  Description of Artificial Sequence: Synthetic oligonucleotide
gguguauuacagccacuga

SEQ ID NO: 1114754 - RNA, 19 nt, Artificial Sequence
  Description of Artificial Sequence: Synthetic oligonucleotide
agccaauucagcaccucaa

SEQ ID NO: 1114755 - RNA, 19 nt, Artificial Sequence
  Description of Artificial Sequence: Synthetic oligonucleotide
ugacaagccucuggucacu

SEQ ID NO: 1114756 - RNA, 19 nt, Artificial Sequence
  Description of Artificial Sequence: Synthetic oligonucleotide
cuccccauucaucauugaa

SEQ ID NO: 1114757 - RNA, 19 nt, Artificial Sequence
  Description of Artificial Sequence: Synthetic oligonucleotide
uacaagccucucgggacac

SEQ ID NO: 1114758 - RNA, 19 nt, Artificial Sequence
  Description of Artificial Sequence: Synthetic oligonucleotide
ggcauuaagaguaggcacu

SEQ ID NO: 1114759 - RNA, 19 nt, Artificial Sequence
  Description of Artificial Sequence: Synthetic oligonucleotide
ggggaauguaugcaggacu

SEQ ID NO: 1114760 - RNA, 19 nt, Artificial Sequence
  Description of Artificial Sequence: Synthetic oligonucleotide
accuagccugggaaaauga

SEQ ID NO: 1114761 - RNA, 19 nt, Artificial Sequence
  Description of Artificial Sequence: Synthetic oligonucleotide
acgggucgagugggaagcc

SEQ ID NO: 1114762 - RNA, 19 nt, Artificial Sequence
  Description of Artificial Sequence: Synthetic oligonucleotide
gaucaguguagaggcgcca

SEQ ID NO: 1114763 - RNA, 19 nt, Artificial Sequence
  Description of Artificial Sequence: Synthetic oligonucleotide
gacugggugcugccuucug

SEQ ID NO: 1114764 - RNA, 19 nt, Artificial Sequence
  Description of Artificial Sequence: Synthetic oligonucleotide
cuccuucggauucgagcac

SEQ ID NO: 1114765 - RNA, 19 nt, Artificial Sequence
  Description of Artificial Sequence: Synthetic oligonucleotide
aggcgccaauccauggcac

SEQ ID NO: 1114766 - RNA, 19 nt, Artificial Sequence
  Description of Artificial Sequence: Synthetic oligonucleotide
aacaagcaggacagcuuua

SEQ ID NO: 1114767 - RNA, 19 nt, Artificial Sequence
  Description of Artificial Sequence: Synthetic oligonucleotide
ggaucaguguagaggcgcc

SEQ ID NO: 1114768 - RNA, 19 nt, Artificial Sequence
  Description of Artificial Sequence: Synthetic oligonucleotide
ggcaacucuacauugucuu

SEQ ID NO: 1114769 - RNA, 19 nt, Artificial Sequence
  Description of Artificial Sequence: Synthetic oligonucleotide
gccaauccauggcacuaag

SEQ ID NO: 1114770 - RNA, 19 nt, Artificial Sequence
  Description of Artificial Sequence: Synthetic oligonucleotide
aggggagauacaagccucu

SEQ ID NO: 1114771 - RNA, 19 nt, Artificial Sequence
  Description of Artificial Sequence: Synthetic oligonucleotide
ggacaagguugaaggaccc

SEQ ID NO: 1114772 - RNA, 19 nt, Artificial Sequence
  Description of Artificial Sequence: Synthetic oligonucleotide
cuagccaauucagcaccuc

SEQ ID NO: 1114773 - RNA, 19 nt, Artificial Sequence
  Description of Artificial Sequence: Synthetic oligonucleotide
auucgagcacucaguuucu

SEQ ID NO: 1114774 - RNA, 19 nt, Artificial Sequence
  Description of Artificial Sequence: Synthetic oligonucleotide
gaaggacccaacaauccuu

SEQ ID NO: 1114775 - RNA, 19 nt, Artificial Sequence
  Description of Artificial Sequence: Synthetic oligonucleotide
gcuaacaagcaggacagcu

SEQ ID NO: 1114776 - RNA, 19 nt, Artificial Sequence
  Description of Artificial Sequence: Synthetic oligonucleotide
ccgccgacguccuugcugc

SEQ ID NO: 1114777 - RNA, 19 nt, Artificial Sequence
  Description of Artificial Sequence: Synthetic oligonucleotide
uuucggugacggagccgcu

SEQ ID NO: 1114778 - RNA, 19 nt, Artificial Sequence
  Description of Artificial Sequence: Synthetic oligonucleotide
agucgccgaauaggacugg

SEQ ID NO: 1114779 - RNA, 19 nt, Artificial Sequence
  Description of Artificial Sequence: Synthetic oligonucleotide
gagugacggcaacucuaca

SEQ ID NO: 1114780 - RNA, 19 nt, Artificial Sequence
  Description of Artificial Sequence: Synthetic oligonucleotide
ggagccgcucaauguacac

SEQ ID NO: 1114781 - RNA, 19 nt, Artificial Sequence
  Description of Artificial Sequence: Synthetic oligonucleotide
ucccagucccaaccauaau

SEQ ID NO: 1114782 - RNA, 19 nt, Artificial Sequence
  Description of Artificial Sequence: Synthetic oligonucleotide
ccuaccccaggcuugagaa

SEQ ID NO: 1114783 - RNA, 19 nt, Artificial Sequence
  Description of Artificial Sequence: Synthetic oligonucleotide
ccgucucccagucccaacc

SEQ ID NO: 1114784 - RNA, 19 nt, Artificial Sequence
  Description of Artificial Sequence: Synthetic oligonucleotide
gccuguaaagagaacaccu

SEQ ID NO: 1114785 - RNA, 19 nt, Artificial Sequence
  Description of Artificial Sequence: Synthetic oligonucleotide
aagccucucgggacacaug

SEQ ID NO: 1114786 - RNA, 19 nt, Artificial Sequence
  Description of Artificial Sequence: Synthetic oligonucleotide
cuuggaggaugcuaagguu

SEQ ID NO: 1114787 - RNA, 19 nt, Artificial Sequence
  Description of Artificial Sequence: Synthetic oligonucleotide
caccucaaagaucucccua

SEQ ID NO: 1114788 - RNA, 19 nt, Artificial Sequence
  Description of Artificial Sequence: Synthetic oligonucleotide
ugcuccuacccaggagaac

SEQ ID NO: 1114789 - RNA, 19 nt, Artificial Sequence
  Description of Artificial Sequence: Synthetic oligonucleotide
cuggcuguuccagcagcac

SEQ ID NO: 1114790 - RNA, 19 nt, Artificial Sequence
  Description of Artificial Sequence: Synthetic oligonucleotide
acggucgcuggcaccauca

SEQ ID NO: 1114791 - RNA, 19 nt, Artificial Sequence
  Description of Artificial Sequence: Synthetic oligonucleotide
gcugaaacggucgcuggca

SEQ ID NO: 1114792 - RNA, 19 nt, Artificial Sequence
  Description of Artificial Sequence: Synthetic oligonucleotide
ggguuucggugacggagcc

SEQ ID NO: 1114793 - RNA, 19 nt, Artificial Sequence
  Description of Artificial Sequence: Synthetic oligonucleotide
aucccuaccccaggcuuga

SEQ ID NO: 1114794 - RNA, 19 nt, Artificial Sequence
  Description of Artificial Sequence: Synthetic oligonucleotide
ccaaggcauuaagaguagg

SEQ ID NO: 1114795 - RNA, 19 nt, Artificial Sequence
  Description of Artificial Sequence: Synthetic oligonucleotide
cgccgaauaggacugggug

SEQ ID NO: 1114796 - RNA, 19 nt, Artificial Sequence
  Description of Artificial Sequence: Synthetic oligonucleotide
gccaauucagcaccucaaa

SEQ ID NO: 1114797 - RNA, 19 nt, Artificial Sequence
  Description of Artificial Sequence: Synthetic oligonucleotide
agguucuuagggacuccca

SEQ ID NO: 1114798 - RNA, 19 nt, Artificial Sequence
  Description of Artificial Sequence: Synthetic oligonucleotide
cuucuggagucgccgaaua

SEQ ID NO: 1114799 - RNA, 19 nt, Artificial Sequence
  Description of Artificial Sequence: Synthetic oligonucleotide
cccagagacagcugccaug

SEQ ID NO: 1114800 - RNA, 19 nt, Artificial Sequence
  Description of Artificial Sequence: Synthetic oligonucleotide
cuccuucaucauaaaggua

SEQ ID NO: 1114801 - RNA, 19 nt, Artificial Sequence
  Description of Artificial Sequence: Synthetic oligonucleotide
gcacaaggggagauacaag

SEQ ID NO: 1114802 - RNA, 19 nt, Artificial Sequence
  Description of Artificial Sequence: Synthetic oligonucleotide
gguuucggugacggagccg

SEQ ID NO: 1114803 - RNA, 19 nt, Artificial Sequence
  Description of Artificial Sequence: Synthetic oligonucleotide
gucacugagcugaaacggu

SEQ ID NO: 1114804 - RNA, 19 nt, Artificial Sequence
  Description of Artificial Sequence: Synthetic oligonucleotide
uuccuggcaccuggagaca

SEQ ID NO: 1114805 - RNA, 19 nt, Artificial Sequence
  Description of Artificial Sequence: Synthetic oligonucleotide
gacacaugagcuacauauu

SEQ ID NO: 1114806 - RNA, 19 nt, Artificial Sequence
  Description of Artificial Sequence: Synthetic oligonucleotide
cauagcacaaggggagaua

SEQ ID NO: 1114807 - RNA, 19 nt, Artificial Sequence
  Description of Artificial Sequence: Synthetic oligonucleotide
agucuccuucggauucgag

SEQ ID NO: 1114808 - RNA, 19 nt, Artificial Sequence
  Description of Artificial Sequence: Synthetic oligonucleotide
cccagucccaaccauaaua

SEQ ID NO: 1114809 - RNA, 19 nt, Artificial Sequence
  Description of Artificial Sequence: Synthetic oligonucleotide
agccgcuggcagagggagc

SEQ ID NO: 1114810 - RNA, 19 nt, Artificial Sequence
  Description of Artificial Sequence: Synthetic oligonucleotide
guaccagccccgccgacgu

SEQ ID NO: 1114811 - RNA, 19 nt, Artificial Sequence
  Description of Artificial Sequence: Synthetic oligonucleotide
ggucgagugggaagccuug

SEQ ID NO: 1114812 - RNA, 19 nt, Artificial Sequence
  Description of Artificial Sequence: Synthetic oligonucleotide
gcauuccucagaacccuac

SEQ ID NO: 1114813 - RNA, 19 nt, Artificial Sequence
  Description of Artificial Sequence: Synthetic oligonucleotide
gagucuccuucggauucga

SEQ ID NO: 1114814 - RNA, 19 nt, Artificial Sequence
  Description of Artificial Sequence: Synthetic oligonucleotide
caugagcuacauauuucuu

SEQ ID NO: 1114815 - RNA, 19 nt, Artificial Sequence
  Description of Artificial Sequence: Synthetic oligonucleotide
gacuagccaaggacccaga

SEQ ID NO: 1114816 - RNA, 19 nt, Artificial Sequence
  Description of Artificial Sequence: Synthetic oligonucleotide
cuucggauucgagcacuca

SEQ ID NO: 1114817 - RNA, 19 nt, Artificial Sequence
  Description of Artificial Sequence: Synthetic oligonucleotide
ccuagccuacuagccagcc

SEQ ID NO: 1114818 - RNA, 19 nt, Artificial Sequence
  Description of Artificial Sequence: Synthetic oligonucleotide
cccagagugacggcaacuc

SEQ ID NO: 1114819 - RNA, 19 nt, Artificial Sequence
  Description of Artificial Sequence: Synthetic oligonucleotide
agccuacuagccagccucu

SEQ ID NO: 1114820 - RNA, 19 nt, Artificial Sequence
  Description of Artificial Sequence: Synthetic oligonucleotide
augcuccuacccaggagaa

SEQ ID NO: 1114821 - RNA, 19 nt, Artificial Sequence
  Description of Artificial Sequence: Synthetic oligonucleotide
ccuagccugggaaaaugaa

SEQ ID NO: 1114822 - RNA, 19 nt, Artificial Sequence
  Description of Artificial Sequence: Synthetic oligonucleotide
aaacggucgcuggcaccau

SEQ ID NO: 1114823 - RNA, 19 nt, Artificial Sequence
  Description of Artificial Sequence: Synthetic oligonucleotide
gacagccccaaggacuggu

SEQ ID NO: 1114824 - RNA, 19 nt, Artificial Sequence
  Description of Artificial Sequence: Synthetic oligonucleotide
cgugaagggccaauagaca

SEQ ID NO: 1114825 - RNA, 19 nt, Artificial Sequence
  Description of Artificial Sequence: Synthetic oligonucleotide
caagcccucuuaaugcauu

SEQ ID NO: 1114826 - RNA, 19 nt, Artificial Sequence
  Description of Artificial Sequence: Synthetic oligonucleotide
ggacccagaaagguagcaa

SEQ ID NO: 1114827 - RNA, 19 nt, Artificial Sequence
  Description of Artificial Sequence: Synthetic oligonucleotide
agacugccccagagugacg

SEQ ID NO: 1114828 - RNA, 19 nt, Artificial Sequence
  Description of Artificial Sequence: Synthetic oligonucleotide
cugccccagagugacggca

SEQ ID NO: 1114829 - RNA, 19 nt, Artificial Sequence
  Description of Artificial Sequence: Synthetic oligonucleotide
ccccuuaugcuccuaccca

SEQ ID NO: 1114830 - RNA, 19 nt, Artificial Sequence
  Description of Artificial Sequence: Synthetic oligonucleotide
aagggacgugaagggccaa

SEQ ID NO: 1114831 - RNA, 19 nt, Artificial Sequence
  Description of Artificial Sequence: Synthetic oligonucleotide
cuagccuacuagccagccu

SEQ ID NO: 1114832 - RNA, 19 nt, Artificial Sequence
  Description of Artificial Sequence: Synthetic oligonucleotide
ccuucggauucgagcacuc

SEQ ID NO: 1114833 - RNA, 19 nt, Artificial Sequence
  Description of Artificial Sequence: Synthetic oligonucleotide
gguauuuacuggccaccau

SEQ ID NO: 1114834 - RNA, 19 nt, Artificial Sequence
  Description of Artificial Sequence: Synthetic oligonucleotide
acaagccucucgggacaca

SEQ ID NO: 1114835 - RNA, 19 nt, Artificial Sequence
  Description of Artificial Sequence: Synthetic oligonucleotide
ccuaccuagccugggaaaa

SEQ ID NO: 1114836 - RNA, 19 nt, Artificial Sequence
  Description of Artificial Sequence: Synthetic oligonucleotide
ggcaggcacggcaguuagg

SEQ ID NO: 1114837 - RNA, 19 nt, Artificial Sequence
  Description of Artificial Sequence: Synthetic oligonucleotide
uucucgcaaaagggacauu

SEQ ID NO: 1114838 - RNA, 19 nt, Artificial Sequence
  Description of Artificial Sequence: Synthetic oligonucleotide
gagggugaaugaccuuguu

SEQ ID NO: 1114839 - RNA, 19 nt, Artificial Sequence
  Description of Artificial Sequence: Synthetic oligonucleotide
auaaccccuuaugcuccua

SEQ ID NO: 1114840 - RNA, 19 nt, Artificial Sequence
  Description of Artificial Sequence: Synthetic oligonucleotide
acaguacgguuaggcuggu

SEQ ID NO: 1114841 - RNA, 19 nt, Artificial Sequence
  Description of Artificial Sequence: Synthetic oligonucleotide
ccccauaaccccuuaugcu

SEQ ID NO: 1114842 - RNA, 19 nt, Artificial Sequence
  Description of Artificial Sequence: Synthetic oligonucleotide
ggggagauacaagccucuc

SEQ ID NO: 1114843 - RNA, 19 nt, Artificial Sequence
  Description of Artificial Sequence: Synthetic oligonucleotide
ucccuaccccaggcuugag

SEQ ID NO: 1114844 - RNA, 19 nt, Artificial Sequence
  Description of Artificial Sequence: Synthetic oligonucleotide
gcaguccgucucccagucc

SEQ ID NO: 1114845 - RNA, 19 nt, Artificial Sequence
  Description of Artificial Sequence: Synthetic oligonucleotide
caguacgguuaggcuggug

SEQ ID NO: 1114846 - RNA, 19 nt, Artificial Sequence
  Description of Artificial Sequence: Synthetic oligonucleotide
ccgcucaauguacaccaga

SEQ ID NO: 1114847 - RNA, 19 nt, Artificial Sequence
  Description of Artificial Sequence: Synthetic oligonucleotide
cccaacaauccuuggcugu

SEQ ID NO: 1114848 - RNA, 19 nt, Artificial Sequence
  Description of Artificial Sequence: Synthetic oligonucleotide
ggauucgagcacucaguuu

SEQ ID NO: 1114849 - RNA, 19 nt, Artificial Sequence
  Description of Artificial Sequence: Synthetic oligonucleotide
ccagguucuuagggacucc

SEQ ID NO: 1114850 - RNA, 19 nt, Artificial Sequence
  Description of Artificial Sequence: Synthetic oligonucleotide
ggcgccaauccauggcacu

SEQ ID NO: 1114851 - RNA, 19 nt, Artificial Sequence
  Description of Artificial Sequence: Synthetic oligonucleotide
ccacaccucccaccuuuac

SEQ ID NO: 1114852 - RNA, 19 nt, Artificial Sequence
  Description of Artificial Sequence: Synthetic oligonucleotide
cgguuaggcugguggcagg

SEQ ID NO: 1114853 - RNA, 19 nt, Artificial Sequence
  Description of Artificial Sequence: Synthetic oligonucleotide
cuaccuagccugggaaaau

SEQ ID NO: 1114854 - RNA, 19 nt, Artificial Sequence
  Description of Artificial Sequence: Synthetic oligonucleotide
gccuacuagccagccucug

SEQ ID NO: 1114855 - RNA, 19 nt, Artificial Sequence
  Description of Artificial Sequence: Synthetic oligonucleotide
guacccagagaggccugua

SEQ ID NO: 1114856 - RNA, 19 nt, Artificial Sequence
  Description of Artificial Sequence: Synthetic oligonucleotide
cccuaccuagccugggaaa

SEQ ID NO: 1114857 - RNA, 19 nt, Artificial Sequence
  Description of Artificial Sequence: Synthetic oligonucleotide
gcuccccauucaucauuga

SEQ ID NO: 1114858 - RNA, 19 nt, Artificial Sequence
  Description of Artificial Sequence: Synthetic oligonucleotide
gcacuaaggaagccccuuu

SEQ ID NO: 1114859 - RNA, 19 nt, Artificial Sequence
  Description of Artificial Sequence: Synthetic oligonucleotide
gcgccaauccauggcacua

SEQ ID NO: 1114860 - RNA, 19 nt, Artificial Sequence
  Description of Artificial Sequence: Synthetic oligonucleotide
gccgacguccuugcugcuc

SEQ ID NO: 1114861 - RNA, 19 nt, Artificial Sequence
  Description of Artificial Sequence: Synthetic oligonucleotide
ggcacuaaggaagccccuu

SEQ ID NO: 1114862 - RNA, 19 nt, Artificial Sequence
  Description of Artificial Sequence: Synthetic oligonucleotide
ccagagugacggcaacucu

SEQ ID NO: 1114863 - RNA, 19 nt, Artificial Sequence
  Description of Artificial Sequence: Synthetic oligonucleotide
guggucuaagagggugaau

SEQ ID NO: 1114864 - RNA, 19 nt, Artificial Sequence
  Description of Artificial Sequence: Synthetic oligonucleotide
cgaauaggacugggugcug

SEQ ID NO: 1114865 - RNA, 19 nt, Artificial Sequence
  Description of Artificial Sequence: Synthetic oligonucleotide
ccaagcccucuuaaugcau

SEQ ID NO: 1114866 - RNA, 19 nt, Artificial Sequence
  Description of Artificial Sequence: Synthetic oligonucleotide
gccccaaggacugguguau

SEQ ID NO: 1114867 - RNA, 19 nt, Artificial Sequence
  Description of Artificial Sequence: Synthetic oligonucleotide
gggucgagugggaagccuu

SEQ ID NO: 1114868 - RNA, 19 nt, Artificial Sequence
  Description of Artificial Sequence: Synthetic oligonucleotide
gggacucccaagcccucuu

SEQ ID NO: 1114869 - RNA, 19 nt, Artificial Sequence
  Description of Artificial Sequence: Synthetic oligonucleotide
ggacugggugcugccuucu

SEQ ID NO: 1114870 - RNA, 19 nt, Artificial Sequence
  Description of Artificial Sequence: Synthetic oligonucleotide
cggauucgagcacucaguu

SEQ ID NO: 1114871 - RNA, 19 nt, Artificial Sequence
  Description of Artificial Sequence: Synthetic oligonucleotide
gccaaaccauggguauggu

SEQ ID NO: 1114872 - RNA, 19 nt, Artificial Sequence
  Description of Artificial Sequence: Synthetic oligonucleotide
cccacaccucccaccuuua

SEQ ID NO: 1114873 - RNA, 19 nt, Artificial Sequence
  Description of Artificial Sequence: Synthetic oligonucleotide
cgccaauccauggcacuaa

SEQ ID NO: 1114874 - RNA, 19 nt, Artificial Sequence
  Description of Artificial Sequence: Synthetic oligonucleotide
cgggucgagugggaagccu

SEQ ID NO: 1114875 - RNA, 19 nt, Artificial Sequence
  Description of Artificial Sequence: Synthetic oligonucleotide
ccccaaggacugguguauu

SEQ ID NO: 1114876 - RNA, 19 nt, Artificial Sequence
  Description of Artificial Sequence: Synthetic oligonucleotide
cagccccgccgacguccuu

SEQ ID NO: 1114877 - RNA, 19 nt, Artificial Sequence
  Description of Artificial Sequence: Synthetic oligonucleotide
cgccgacguccuugcugcu

SEQ ID NO: 1114878 - RNA, 19 nt, Artificial Sequence
  Description of Artificial Sequence: Synthetic oligonucleotide
ccccgccgacguccuugcu

SEQ ID NO: 1114879 - RNA, 19 nt, Artificial Sequence
  Description of Artificial Sequence: Synthetic oligonucleotide
aaacaaauuauaaaagugg

SEQ ID NO: 1114880 - RNA, 19 nt, Artificial Sequence
  Description of Artificial Sequence: Synthetic oligonucleotide
aguagugaaaacaacaugc

SEQ ID NO: 1114881 - RNA, 19 nt, Artificial Sequence
  Description of Artificial Sequence: Synthetic oligonucleotide
gauagacucagucugacgg

SEQ ID NO: 1114882 - RNA, 19 nt, Artificial Sequence
  Description of Artificial Sequence: Synthetic oligonucleotide
acaaaguggacucacgccc

SEQ ID NO: 1114883 - RNA, 19 nt, Artificial Sequence
  Description of Artificial Sequence: Synthetic oligonucleotide
aaugguacccuaugucugc

SEQ ID NO: 1114884 - RNA, 19 nt, Artificial Sequence
  Description of Artificial Sequence: Synthetic oligonucleotide
uuaauaaacaguccuuuac

SEQ ID NO: 1114885 - RNA, 19 nt, Artificial Sequence
  Description of Artificial Sequence: Synthetic oligonucleotide
agaacgagaaguuugguca

SEQ ID NO: 1114886 - RNA, 19 nt, Artificial Sequence
  Description of Artificial Sequence: Synthetic oligonucleotide
caaauuaacuaaagcaccg

SEQ ID NO: 1114887 - RNA, 19 nt, Artificial Sequence
  Description of Artificial Sequence: Synthetic oligonucleotide
aguauuucagaguagauuu

SEQ ID NO: 1114888 - RNA, 19 nt, Artificial Sequence
  Description of Artificial Sequence: Synthetic oligonucleotide
gugagaacaaaccagauuc

SEQ ID NO: 1114889 - RNA, 19 nt, Artificial Sequence
  Description of Artificial Sequence: Synthetic oligonucleotide
gaaaacaacaugcaguguc

SEQ ID NO: 1114890 - RNA, 19 nt, Artificial Sequence
  Description of Artificial Sequence: Synthetic oligonucleotide
uggacucacgcccaaaugg

SEQ ID NO: 1114891 - RNA, 19 nt, Artificial Sequence
  Description of Artificial Sequence: Synthetic oligonucleotide
uuuacaguaacaagggaaa

SEQ ID NO: 1114892 - RNA, 19 nt, Artificial Sequence
  Description of Artificial Sequence: Synthetic oligonucleotide
uaugguguguuaaacauuc

SEQ ID NO: 1114893 - RNA, 19 nt, Artificial Sequence
  Description of Artificial Sequence: Synthetic oligonucleotide
uuaacuaaagcaccguuuc

SEQ ID NO: 1114894 - RNA, 19 nt, Artificial Sequence
  Description of Artificial Sequence: Synthetic oligonucleotide
cuugcuauacauaaaacca

SEQ ID NO: 1114895 - RNA, 19 nt, Artificial Sequence
  Description of Artificial Sequence: Synthetic oligonucleotide
agaucuaacaaugacaggu

SEQ ID NO: 1114896 - RNA, 19 nt, Artificial Sequence
  Description of Artificial Sequence: Synthetic oligonucleotide
uaaacaguccuuuacagua

SEQ ID NO: 1114897 - RNA, 19 nt, Artificial Sequence
  Description of Artificial Sequence: Synthetic oligonucleotide
ucaaaucagaacgagaagu

SEQ ID NO: 1114898 - RNA, 19 nt, Artificial Sequence
  Description of Artificial Sequence: Synthetic oligonucleotide
uguuuaaaugaguauggca

SEQ ID NO: 1114899 - RNA, 19 nt, Artificial Sequence
  Description of Artificial Sequence: Synthetic oligonucleotide
acccauuucacauuuccac

SEQ ID NO: 1114900 - RNA, 19 nt, Artificial Sequence
  Description of Artificial Sequence: Synthetic oligonucleotide
acucaaaugcagcauuggc

SEQ ID NO: 1114901 - RNA, 19 nt, Artificial Sequence
  Description of Artificial Sequence: Synthetic oligonucleotide
gaugagucuugccagaggc

SEQ ID NO: 1114902 - RNA, 19 nt, Artificial Sequence
  Description of Artificial Sequence: Synthetic oligonucleotide
uauaaaaguggaauguuuu

SEQ ID NO: 1114903 - RNA, 19 nt, Artificial Sequence
  Description of Artificial Sequence: Synthetic oligonucleotide
uacgucacauucuaaaaca

SEQ ID NO: 1114904 - RNA, 19 nt, Artificial Sequence
  Description of Artificial Sequence: Synthetic oligonucleotide
auuaugguguguuaaacau

SEQ ID NO: 1114905 - RNA, 19 nt, Artificial Sequence
  Description of Artificial Sequence: Synthetic oligonucleotide
uaagucaccucuauccaag

SEQ ID NO: 1114906 - RNA, 19 nt, Artificial Sequence
  Description of Artificial Sequence: Synthetic oligonucleotide
uaugucugccaucaucagg

SEQ ID NO: 1114907 - RNA, 19 nt, Artificial Sequence
  Description of Artificial Sequence: Synthetic oligonucleotide
agcuuuaccuaccuucccc

SEQ ID NO: 1114908 - RNA, 19 nt, Artificial Sequence
  Description of Artificial Sequence: Synthetic oligonucleotide
gagaaguuuggucacuuag

SEQ ID NO: 1114909 - RNA, 19 nt, Artificial Sequence
  Description of Artificial Sequence: Synthetic oligonucleotide
aguuuggucacuuagcuuu

SEQ ID NO: 1114910 - RNA, 19 nt, Artificial Sequence
  Description of Artificial Sequence: Synthetic oligonucleotide
ugugcauaguuuaaggcaa

SEQ ID NO: 1114911 - RNA, 19 nt, Artificial Sequence
  Description of Artificial Sequence: Synthetic oligonucleotide
aaugugagaacaaaccaga

SEQ ID NO: 1114912 - RNA, 19 nt, Artificial Sequence
  Description of Artificial Sequence: Synthetic oligonucleotide
ucagaguagauuuguaaac

SEQ ID NO: 1114913 - RNA, 19 nt, Artificial Sequence
  Description of Artificial Sequence: Synthetic oligonucleotide
agcaccguuucucuuaaac

SEQ ID NO: 1114914 - RNA, 19 nt, Artificial Sequence
  Description of Artificial Sequence: Synthetic oligonucleotide
uccuagaaaacaucuauuc

SEQ ID NO: 1114915 - RNA, 19 nt, Artificial Sequence
  Description of Artificial Sequence: Synthetic oligonucleotide
aauccuacagcuuuaccua

SEQ ID NO: 1114916 - RNA, 19 nt, Artificial Sequence
  Description of Artificial Sequence: Synthetic oligonucleotide
ucacaaaguggacucacgc

SEQ ID NO: 1114917 - RNA, 19 nt, Artificial Sequence
  Description of Artificial Sequence: Synthetic oligonucleotide
uuaggauaaccgauuuucc

SEQ ID NO: 1114918 - RNA, 19 nt, Artificial Sequence
  Description of Artificial Sequence: Synthetic oligonucleotide
aacaaagcgaaacguuuca

SEQ ID NO: 1114919 - RNA, 19 nt, Artificial Sequence
  Description of Artificial Sequence: Synthetic oligonucleotide
guuuaaaugaguauggcaa

SEQ ID NO: 1114920 - RNA, 19 nt, Artificial Sequence
  Description of Artificial Sequence: Synthetic oligonucleotide
aguucaacucaaaugcagc

SEQ ID NO: 1114921 - RNA, 19 nt, Artificial Sequence
  Description of Artificial Sequence: Synthetic oligonucleotide
aggauaaccgauuuuccug

SEQ ID NO: 1114922 - RNA, 19 nt, Artificial Sequence
  Description of Artificial Sequence: Synthetic oligonucleotide
ucuaacaaugacagguacu

SEQ ID NO: 1114923 - RNA, 19 nt, Artificial Sequence
  Description of Artificial Sequence: Synthetic oligonucleotide
gauuaugguguguuaaaca

SEQ ID NO: 1114924 - RNA, 19 nt, Artificial Sequence
  Description of Artificial Sequence: Synthetic oligonucleotide
uguggcuaguaucagugca

SEQ ID NO: 1114925 - RNA, 19 nt, Artificial Sequence
  Description of Artificial Sequence: Synthetic oligonucleotide
ugguguguuaaacauucca

SEQ ID NO: 1114926 - RNA, 19 nt, Artificial Sequence
  Description of Artificial Sequence: Synthetic oligonucleotide
uguuaaacauuccaccuuu

SEQ ID NO: 1114927 - RNA, 19 nt, Artificial Sequence
  Description of Artificial Sequence: Synthetic oligonucleotide
uggcgauagacucagucug

SEQ ID NO: 1114928 - RNA, 19 nt, Artificial Sequence
  Description of Artificial Sequence: Synthetic oligonucleotide
ucaaguguacaguagugaa

SEQ ID NO: 1114929 - RNA, 19 nt, Artificial Sequence
  Description of Artificial Sequence: Synthetic oligonucleotide
guuaggauaaccgauuuuc

SEQ ID NO: 1114930 - RNA, 19 nt, Artificial Sequence
  Description of Artificial Sequence: Synthetic oligonucleotide
aaugaugagucuugccaga

SEQ ID NO: 1114931 - RNA, 19 nt, Artificial Sequence
  Description of Artificial Sequence: Synthetic oligonucleotide
aguaucagugcaccuaucu

SEQ ID NO: 1114932 - RNA, 19 nt, Artificial Sequence
  Description of Artificial Sequence: Synthetic oligonucleotide
uucagguuaggauaaccga

SEQ ID NO: 1114933 - RNA, 19 nt, Artificial Sequence
  Description of Artificial Sequence: Synthetic oligonucleotide
gcuugcuauacauaaaacc

SEQ ID NO: 1114934 - RNA, 19 nt, Artificial Sequence
  Description of Artificial Sequence: Synthetic oligonucleotide
cuaacaaugacagguacuc

SEQ ID NO: 1114935 - RNA, 19 nt, Artificial Sequence
  Description of Artificial Sequence: Synthetic oligonucleotide
uuuaccuaccuuccccucc

SEQ ID NO: 1114936 - RNA, 19 nt, Artificial Sequence
  Description of Artificial Sequence: Synthetic oligonucleotide
caagcuuucucccaagaug

SEQ ID NO: 1114937 - RNA, 19 nt, Artificial Sequence
  Description of Artificial Sequence: Synthetic oligonucleotide
acggucacaaaguggacuc

SEQ ID NO: 1114938 - RNA, 19 nt, Artificial Sequence
  Description of Artificial Sequence: Synthetic oligonucleotide
ucagguuaggauaaccgau

SEQ ID NO: 1114939 - RNA, 19 nt, Artificial Sequence
  Description of Artificial Sequence: Synthetic oligonucleotide
guucagguuaggauaaccg

SEQ ID NO: 1114940 - RNA, 19 nt, Artificial Sequence
  Description of Artificial Sequence: Synthetic oligonucleotide
uaaccgauuuuccugaguu

SEQ ID NO: 1114941 - RNA, 19 nt, Artificial Sequence
  Description of Artificial Sequence: Synthetic oligonucleotide
uuuaguucccuugaucgga

SEQ ID NO: 1114942 - RNA, 19 nt, Artificial Sequence
  Description of Artificial Sequence: Synthetic oligonucleotide
aauaaaggcuccaccaggu

SEQ ID NO: 1114943 - RNA, 19 nt, Artificial Sequence
  Description of Artificial Sequence: Synthetic oligonucleotide
cagucugacggucacaaag

SEQ ID NO: 1114944 - RNA, 19 nt, Artificial Sequence
  Description of Artificial Sequence: Synthetic oligonucleotide
gaaccaguauuucagagua

SEQ ID NO: 1114945 - RNA, 19 nt, Artificial Sequence
  Description of Artificial Sequence: Synthetic oligonucleotide
acauguuggcuugagauug

SEQ ID NO: 1114946 - RNA, 19 nt, Artificial Sequence
  Description of Artificial Sequence: Synthetic oligonucleotide
aaauuaacuaaagcaccgu

SEQ ID NO: 1114947 - RNA, 19 nt, Artificial Sequence
  Description of Artificial Sequence: Synthetic oligonucleotide
aaaacaacaugcagugucu

SEQ ID NO: 1114948 - RNA, 19 nt, Artificial Sequence
  Description of Artificial Sequence: Synthetic oligonucleotide
acaguugugcuugcuauac

SEQ ID NO: 1114949 - RNA, 19 nt, Artificial Sequence
  Description of Artificial Sequence: Synthetic oligonucleotide
uugcuauacauaaaaccau

SEQ ID NO: 1114950 - RNA, 19 nt, Artificial Sequence
  Description of Artificial Sequence: Synthetic oligonucleotide
acucgguaaauaaaggcuc

SEQ ID NO: 1114951 - RNA, 19 nt, Artificial Sequence
  Description of Artificial Sequence: Synthetic oligonucleotide
aguucccuugaucggaagg

SEQ ID NO: 1114952 - RNA, 19 nt, Artificial Sequence
  Description of Artificial Sequence: Synthetic oligonucleotide
uuuacaguugugcuugcua

SEQ ID NO: 1114953 - RNA, 19 nt, Artificial Sequence
  Description of Artificial Sequence: Synthetic oligonucleotide
uaggauaaccgauuuuccu

SEQ ID NO: 1114954 - RNA, 19 nt, Artificial Sequence
  Description of Artificial Sequence: Synthetic oligonucleotide
uuucccacauggauggaca

SEQ ID NO: 1114955 - RNA, 19 nt, Artificial Sequence
  Description of Artificial Sequence: Synthetic oligonucleotide
uucucuuaaacuagauuua

SEQ ID NO: 1114956 - RNA, 19 nt, Artificial Sequence
  Description of Artificial Sequence: Synthetic oligonucleotide
cuacgucacauucuaaaac

SEQ ID NO: 1114957 - RNA, 19 nt, Artificial Sequence
  Description of Artificial Sequence: Synthetic oligonucleotide
acuaaagcaccguuucucu

SEQ ID NO: 1114958 - RNA, 19 nt, Artificial Sequence
  Description of Artificial Sequence: Synthetic oligonucleotide
uggcuguugcaacaaacug

SEQ ID NO: 1114959 - RNA, 19 nt, Artificial Sequence
  Description of Artificial Sequence: Synthetic oligonucleotide
uuacaguugugcuugcuau

SEQ ID NO: 1114960 - RNA, 19 nt, Artificial Sequence
  Description of Artificial Sequence: Synthetic oligonucleotide
uuggcgauagacucagucu

SEQ ID NO: 1114961 - RNA, 19 nt, Artificial Sequence
  Description of Artificial Sequence: Synthetic oligonucleotide
aaaaggcccaacaaagcga

SEQ ID NO: 1114962 - RNA, 19 nt, Artificial Sequence
  Description of Artificial Sequence: Synthetic oligonucleotide
cacaaaguggacucacgcc

SEQ ID NO: 1114963 - RNA, 19 nt, Artificial Sequence
  Description of Artificial Sequence: Synthetic oligonucleotide
cucgguaaauaaaggcucc

SEQ ID NO: 1114964 - RNA, 19 nt, Artificial Sequence
  Description of Artificial Sequence: Synthetic oligonucleotide
uuucaauccuuucccacau

SEQ ID NO: 1114965 - RNA, 19 nt, Artificial Sequence
  Description of Artificial Sequence: Synthetic oligonucleotide
aucagaacgagaaguuugg

SEQ ID NO: 1114966 - RNA, 19 nt, Artificial Sequence
  Description of Artificial Sequence: Synthetic oligonucleotide
ugauuaugguguguuaaac

SEQ ID NO: 1114967 - RNA, 19 nt, Artificial Sequence
  Description of Artificial Sequence: Synthetic oligonucleotide
gacuacgucacauucuaaa

SEQ ID NO: 1114968 - RNA, 19 nt, Artificial Sequence
  Description of Artificial Sequence: Synthetic oligonucleotide
ugaucggaaggacacacuu

SEQ ID NO: 1114969 - RNA, 19 nt, Artificial Sequence
  Description of Artificial Sequence: Synthetic oligonucleotide
guagauuuguaaacaauga

SEQ ID NO: 1114970 - RNA, 19 nt, Artificial Sequence
  Description of Artificial Sequence: Synthetic oligonucleotide
aauuaguccuuaaauuuua

SEQ ID NO: 1114971 - RNA, 19 nt, Artificial Sequence
  Description of Artificial Sequence: Synthetic oligonucleotide
caaguuucagggcucgaag

SEQ ID NO: 1114972 - RNA, 19 nt, Artificial Sequence
  Description of Artificial Sequence: Synthetic oligonucleotide
aggcccaacaaagcgaaac

SEQ ID NO: 1114973 - RNA, 19 nt, Artificial Sequence
  Description of Artificial Sequence: Synthetic oligonucleotide
cccacuguauuucagauug

SEQ ID NO: 1114974 - RNA, 19 nt, Artificial Sequence
  Description of Artificial Sequence: Synthetic oligonucleotide
ucguucuggcgacugaugu

SEQ ID NO: 1114975 - RNA, 19 nt, Artificial Sequence
  Description of Artificial Sequence: Synthetic oligonucleotide
acacaacauaccucucacg

SEQ ID NO: 1114976 - RNA, 19 nt, Artificial Sequence
  Description of Artificial Sequence: Synthetic oligonucleotide
acuacgucacauucuaaaa

SEQ ID NO: 1114977 - RNA, 19 nt, Artificial Sequence
  Description of Artificial Sequence: Synthetic oligonucleotide
ggcuguaucggacauguug

SEQ ID NO: 1114978 - RNA, 19 nt, Artificial Sequence
  Description of Artificial Sequence: Synthetic oligonucleotide
uaacuaaagcaccguuucu

SEQ ID NO: 1114979 - RNA, 19 nt, Artificial Sequence
  Description of Artificial Sequence: Synthetic oligonucleotide
uaacaaugacagguacucg

SEQ ID NO: 1114980 - RNA, 19 nt, Artificial Sequence
  Description of Artificial Sequence: Synthetic oligonucleotide
caaucaugcuccaaggcga

SEQ ID NO: 1114981 - RNA, 19 nt, Artificial Sequence
  Description of Artificial Sequence: Synthetic oligonucleotide
auuuuauccuagaaaacau

SEQ ID NO: 1114982 - RNA, 19 nt, Artificial Sequence
  Description of Artificial Sequence: Synthetic oligonucleotide
agggacuuuaguucccuug

SEQ ID NO: 1114983 - RNA, 19 nt, Artificial Sequence
  Description of Artificial Sequence: Synthetic oligonucleotide
caguagugaaaacaacaug

SEQ ID NO: 1114984 - RNA, 19 nt, Artificial Sequence
  Description of Artificial Sequence: Synthetic oligonucleotide
gacuuuaguucccuugauc

SEQ ID NO: 1114985 - RNA, 19 nt, Artificial Sequence
  Description of Artificial Sequence: Synthetic oligonucleotide
gcuguaucggacauguugg

SEQ ID NO: 1114986 - RNA, 19 nt, Artificial Sequence
  Description of Artificial Sequence: Synthetic oligonucleotide
augaguauggcaaagccuu

SEQ ID NO: 1114987 - RNA, 19 nt, Artificial Sequence
  Description of Artificial Sequence: Synthetic oligonucleotide
accaguauuucagaguaga

SEQ ID NO: 1114988 - RNA, 19 nt, Artificial Sequence
  Description of Artificial Sequence: Synthetic oligonucleotide
cagaacgagaaguuugguc

SEQ ID NO: 1114989 - RNA, 19 nt, Artificial Sequence
  Description of Artificial Sequence: Synthetic oligonucleotide
guuggcgauagacucaguc

SEQ ID NO: 1114990 - RNA, 19 nt, Artificial Sequence
  Description of Artificial Sequence: Synthetic oligonucleotide
acaacauaccucucacgca

SEQ ID NO: 1114991 - RNA, 19 nt, Artificial Sequence
  Description of Artificial Sequence: Synthetic oligonucleotide
gauaaccgauuuuccugag

SEQ ID NO: 1114992 - RNA, 19 nt, Artificial Sequence
  Description of Artificial Sequence: Synthetic oligonucleotide
accucuauccaagugagau

SEQ ID NO: 1114993 - RNA, 19 nt, Artificial Sequence
  Description of Artificial Sequence: Synthetic oligonucleotide
acaagcccacugcagaucu

SEQ ID NO: 1114994 - RNA, 19 nt, Artificial Sequence
  Description of Artificial Sequence: Synthetic oligonucleotide
aaaucagaacgagaaguuu

SEQ ID NO: 1114995 - RNA, 19 nt, Artificial Sequence
  Description of Artificial Sequence: Synthetic oligonucleotide
caauccuacagcuuuaccu

SEQ ID NO: 1114996 - RNA, 19 nt, Artificial Sequence
  Description of Artificial Sequence: Synthetic oligonucleotide
agcgaaacguuucaucaaa

SEQ ID NO: 1114997 - RNA, 19 nt, Artificial Sequence
  Description of Artificial Sequence: Synthetic oligonucleotide
ucuguugccugcuuuccaa

SEQ ID NO: 1114998 - RNA, 19 nt, Artificial Sequence
  Description of Artificial Sequence: Synthetic oligonucleotide
cuugaucggaaggacacac

SEQ ID NO: 1114999 - RNA, 19 nt, Artificial Sequence
  Description of Artificial Sequence: Synthetic oligonucleotide
gauuggcaaauacccugag

SEQ ID NO: 1115000 - RNA, 19 nt, Artificial Sequence
  Description of Artificial Sequence: Synthetic oligonucleotide
agaugcguggcuguaucgg

SEQ ID NO: 1115001 - RNA, 19 nt, Artificial Sequence
  Description of Artificial Sequence: Synthetic oligonucleotide
acucacgcccaaaugguac

SEQ ID NO: 1115002 - RNA, 19 nt, Artificial Sequence
  Description of Artificial Sequence: Synthetic oligonucleotide
gaacgagaaguuuggucac

SEQ ID NO: 1115003 - RNA, 19 nt, Artificial Sequence
  Description of Artificial Sequence: Synthetic oligonucleotide
uggcaaauacccugagcug

SEQ ID NO: 1115004 - RNA, 19 nt, Artificial Sequence
  Description of Artificial Sequence: Synthetic oligonucleotide
ggucacuuagcuuugugca

SEQ ID NO: 1115005 - RNA, 19 nt, Artificial Sequence
  Description of Artificial Sequence: Synthetic oligonucleotide
aaucucggugguuccuuca

SEQ ID NO: 1115006 - RNA, 19 nt, Artificial Sequence
  Description of Artificial Sequence: Synthetic oligonucleotide
uuauucagccccacauguc

SEQ ID NO: 1115007 - RNA, 19 nt, Artificial Sequence
  Description of Artificial Sequence: Synthetic oligonucleotide
auagacucagucugacggu

SEQ ID NO: 1115008 - RNA, 19 nt, Artificial Sequence
  Description of Artificial Sequence: Synthetic oligonucleotide
auuaacuaaagcaccguuu

SEQ ID NO: 1115009 - RNA, 19 nt, Artificial Sequence
  Description of Artificial Sequence: Synthetic oligonucleotide
ucaucagguguaagucacc

SEQ ID NO: 1115010 - RNA, 19 nt, Artificial Sequence
  Description of Artificial Sequence: Synthetic oligonucleotide
aaguuuggucacuuagcuu

SEQ ID NO: 1115011 - RNA, 19 nt, Artificial Sequence
  Description of Artificial Sequence: Synthetic oligonucleotide
uuaguucccuugaucggaa

SEQ ID NO: 1115012 - RNA, 19 nt, Artificial Sequence
  Description of Artificial Sequence: Synthetic oligonucleotide
guagugaaaacaacaugca

SEQ ID NO: 1115013 - RNA, 19 nt, Artificial Sequence
  Description of Artificial Sequence: Synthetic oligonucleotide
uaauaacugggaguucaac

SEQ ID NO: 1115014 - RNA, 19 nt, Artificial Sequence
  Description of Artificial Sequence: Synthetic oligonucleotide
cucgaaggagucagaacug

SEQ ID NO: 1115015 - RNA, 19 nt, Artificial Sequence
  Description of Artificial Sequence: Synthetic oligonucleotide
agcucgcuuuauucagccc

SEQ ID NO: 1115016 - RNA, 19 nt, Artificial Sequence
  Description of Artificial Sequence: Synthetic oligonucleotide
agcaauccuacagcuuuac

SEQ ID NO: 1115017 - RNA, 19 nt, Artificial Sequence
  Description of Artificial Sequence: Synthetic oligonucleotide
agugcaccuaucugagucu

SEQ ID NO: 1115018 - RNA, 19 nt, Artificial Sequence
  Description of Artificial Sequence: Synthetic oligonucleotide
cucacgcccaaaugguacc

SEQ ID NO: 1115019 - RNA, 19 nt, Artificial Sequence
  Description of Artificial Sequence: Synthetic oligonucleotide
accguuucucuuaaacuag

SEQ ID NO: 1115020 - RNA, 19 nt, Artificial Sequence
  Description of Artificial Sequence: Synthetic oligonucleotide
acagaacaugcacagccau

SEQ ID NO: 1115021 - RNA, 19 nt, Artificial Sequence
  Description of Artificial Sequence: Synthetic oligonucleotide
gguguguuaaacauuccac

SEQ ID NO: 1115022 - RNA, 19 nt, Artificial Sequence
  Description of Artificial Sequence: Synthetic oligonucleotide
agaggcucggcacuucaca

SEQ ID NO: 1115023 - RNA, 19 nt, Artificial Sequence
  Description of Artificial Sequence: Synthetic oligonucleotide
ucaaguuucagggcucgaa

SEQ ID NO: 1115024 - RNA, 19 nt, Artificial Sequence
  Description of Artificial Sequence: Synthetic oligonucleotide
aaaccuggcccacucggua

SEQ ID NO: 1115025 - RNA, 19 nt, Artificial Sequence
  Description of Artificial Sequence: Synthetic oligonucleotide
uucccacauggauggacag

SEQ ID NO: 1115026 - RNA, 19 nt, Artificial Sequence
  Description of Artificial Sequence: Synthetic oligonucleotide
ccacucgguaaauaaaggc

SEQ ID NO: 1115027 - RNA, 19 nt, Artificial Sequence
  Description of Artificial Sequence: Synthetic oligonucleotide
accgauuuuccugaguuaa

SEQ ID NO: 1115028 - RNA, 19 nt, Artificial Sequence
  Description of Artificial Sequence: Synthetic oligonucleotide
ggcccaacaaagcgaaacg

SEQ ID NO: 1115029 - RNA, 19 nt, Artificial Sequence
  Description of Artificial Sequence: Synthetic oligonucleotide
gagggaguuugucccacug

SEQ ID NO: 1115030 - RNA, 19 nt, Artificial Sequence
  Description of Artificial Sequence: Synthetic oligonucleotide
aagugagaucuaacaauga

SEQ ID NO: 1115031 - RNA, 19 nt, Artificial Sequence
  Description of Artificial Sequence: Synthetic oligonucleotide
uggcuaguaucagugcacc

SEQ ID NO: 1115032 - RNA, 19 nt, Artificial Sequence
  Description of Artificial Sequence: Synthetic oligonucleotide
gcgaaagggacuuuaguuc

SEQ ID NO: 1115033 - RNA, 19 nt, Artificial Sequence
  Description of Artificial Sequence: Synthetic oligonucleotide
uugaucggaaggacacacu

SEQ ID NO: 1115034 - RNA, 19 nt, Artificial Sequence
  Description of Artificial Sequence: Synthetic oligonucleotide
uucaauccuuucccacaug

SEQ ID NO: 1115035 - RNA, 19 nt, Artificial Sequence
  Description of Artificial Sequence: Synthetic oligonucleotide
cuaugucugccaucaucag

SEQ ID NO: 1115036 - RNA, 19 nt, Artificial Sequence
  Description of Artificial Sequence: Synthetic oligonucleotide
cuguaucggacauguuggc

SEQ ID NO: 1115037 - RNA, 19 nt, Artificial Sequence
  Description of Artificial Sequence: Synthetic oligonucleotide
augguacccuaugucugcc

SEQ ID NO: 1115038 - RNA, 19 nt, Artificial Sequence
  Description of Artificial Sequence: Synthetic oligonucleotide
cacucgguaaauaaaggcu

SEQ ID NO: 1115039 - RNA, 19 nt, Artificial Sequence
  Description of Artificial Sequence: Synthetic oligonucleotide
gaugcguggcuguaucgga

SEQ ID NO: 1115040 - RNA, 19 nt, Artificial Sequence
  Description of Artificial Sequence: Synthetic oligonucleotide
acucaagcuuucucccaag

SEQ ID NO: 1115041 - RNA, 19 nt, Artificial Sequence
  Description of Artificial Sequence: Synthetic oligonucleotide
ucucacgcacugcagcgaa

SEQ ID NO: 1115042 - RNA, 19 nt, Artificial Sequence
  Description of Artificial Sequence: Synthetic oligonucleotide
gucacaaaguggacucacg

SEQ ID NO: 1115043 - RNA, 19 nt, Artificial Sequence
  Description of Artificial Sequence: Synthetic oligonucleotide
auacccugagcugauuaug

SEQ ID NO: 1115044 - RNA, 19 nt, Artificial Sequence
  Description of Artificial Sequence: Synthetic oligonucleotide
cagaugcguggcuguaucg

SEQ ID NO: 1115045 - RNA, 19 nt, Artificial Sequence
  Description of Artificial Sequence: Synthetic oligonucleotide
auggcuguugcaacaaacu

SEQ ID NO: 1115046 - RNA, 19 nt, Artificial Sequence
  Description of Artificial Sequence: Synthetic oligonucleotide
gucaaguguacaguaguga

SEQ ID NO: 1115047 - RNA, 19 nt, Artificial Sequence
  Description of Artificial Sequence: Synthetic oligonucleotide
aaacaguccuuuacaguaa

SEQ ID NO: 1115048 - RNA, 19 nt, Artificial Sequence
  Description of Artificial Sequence: Synthetic oligonucleotide
ugcguggcuguaucggaca

SEQ ID NO: 1115049 - RNA, 19 nt, Artificial Sequence
  Description of Artificial Sequence: Synthetic oligonucleotide
ucgguaaauaaaggcucca

SEQ ID NO: 1115050 - RNA, 19 nt, Artificial Sequence
  Description of Artificial Sequence: Synthetic oligonucleotide
cucuauccaagugagaucu

SEQ ID NO: 1115051 - RNA, 19 nt, Artificial Sequence
  Description of Artificial Sequence: Synthetic oligonucleotide
gacugaugucuguggcuag

SEQ ID NO: 1115052 - RNA, 19 nt, Artificial Sequence
  Description of Artificial Sequence: Synthetic oligonucleotide
aaccuggcccacucgguaa

SEQ ID NO: 1115053 - RNA, 19 nt, Artificial Sequence
  Description of Artificial Sequence: Synthetic oligonucleotide
aaccaguauuucagaguag

SEQ ID NO: 1115054 - RNA, 19 nt, Artificial Sequence
  Description of Artificial Sequence: Synthetic oligonucleotide
agucugacggucacaaagu

SEQ ID NO: 1115055 - RNA, 19 nt, Artificial Sequence
  Description of Artificial Sequence: Synthetic oligonucleotide
aacgagaaguuuggucacu

SEQ ID NO: 1115056 - RNA, 19 nt, Artificial Sequence
  Description of Artificial Sequence: Synthetic oligonucleotide
acacucaagcuuucuccca

SEQ ID NO: 1115057 - RNA, 19 nt, Artificial Sequence
  Description of Artificial Sequence: Synthetic oligonucleotide
uggcaaaugugagaacaaa

SEQ ID NO: 1115058 - RNA, 19 nt, Artificial Sequence
  Description of Artificial Sequence: Synthetic oligonucleotide
ugcaccuaucugagucucc

SEQ ID NO: 1115059 - RNA, 19 nt, Artificial Sequence
  Description of Artificial Sequence: Synthetic oligonucleotide
cuguggcuaguaucagugc

SEQ ID NO: 1115060 - RNA, 19 nt, Artificial Sequence
  Description of Artificial Sequence: Synthetic oligonucleotide
ugagauugcugcugagauu

SEQ ID NO: 1115061 - RNA, 19 nt, Artificial Sequence
  Description of Artificial Sequence: Synthetic oligonucleotide
acagccucgcaggagggag

SEQ ID NO: 1115062 - RNA, 19 nt, Artificial Sequence
  Description of Artificial Sequence: Synthetic oligonucleotide
caaguguacaguagugaaa

SEQ ID NO: 1115063 - RNA, 19 nt, Artificial Sequence
  Description of Artificial Sequence: Synthetic oligonucleotide
cagccuugugucugaaaac

SEQ ID NO: 1115064 - RNA, 19 nt, Artificial Sequence
  Description of Artificial Sequence: Synthetic oligonucleotide
ccaaaugguacccuauguc

SEQ ID NO: 1115065 - RNA, 19 nt, Artificial Sequence
  Description of Artificial Sequence: Synthetic oligonucleotide
cugacuacgucacauucua

SEQ ID NO: 1115066 - RNA, 19 nt, Artificial Sequence
  Description of Artificial Sequence: Synthetic oligonucleotide
ucugaaaaccuggcccacu

SEQ ID NO: 1115067 - RNA, 19 nt, Artificial Sequence
  Description of Artificial Sequence: Synthetic oligonucleotide
cagggcucgaaggagucag

SEQ ID NO: 1115068 - RNA, 19 nt, Artificial Sequence
  Description of Artificial Sequence: Synthetic oligonucleotide
ggcaaauacccugagcuga

SEQ ID NO: 1115069 - RNA, 19 nt, Artificial Sequence
  Description of Artificial Sequence: Synthetic oligonucleotide
uaguucccuugaucggaag

SEQ ID NO: 1115070 - RNA, 19 nt, Artificial Sequence
  Description of Artificial Sequence: Synthetic oligonucleotide
ucagaacgagaaguuuggu

SEQ ID NO: 1115071 - RNA, 19 nt, Artificial Sequence
  Description of Artificial Sequence: Synthetic oligonucleotide
ggaaggacacacuucccca

SEQ ID NO: 1115072 - RNA, 19 nt, Artificial Sequence
  Description of Artificial Sequence: Synthetic oligonucleotide
gaucggaaggacacacuuc

SEQ ID NO: 1115073 - RNA, 19 nt, Artificial Sequence
  Description of Artificial Sequence: Synthetic oligonucleotide
cuugggacccauuucacau

SEQ ID NO: 1115074 - RNA, 19 nt, Artificial Sequence
  Description of Artificial Sequence: Synthetic oligonucleotide
gaaucucggugguuccuuc

SEQ ID NO: 1115075 - RNA, 19 nt, Artificial Sequence
  Description of Artificial Sequence: Synthetic oligonucleotide
ugagcugauuauggugugu

SEQ ID NO: 1115076 - RNA, 19 nt, Artificial Sequence
  Description of Artificial Sequence: Synthetic oligonucleotide
uacucguucuggcgacuga

SEQ ID NO: 1115077 - RNA, 19 nt, Artificial Sequence
  Description of Artificial Sequence: Synthetic oligonucleotide
gggacuuuaguucccuuga

SEQ ID NO: 1115078 - RNA, 19 nt, Artificial Sequence
  Description of Artificial Sequence: Synthetic oligonucleotide
ggacauguuggcuugagau

SEQ ID NO: 1115079 - RNA, 19 nt, Artificial Sequence
  Description of Artificial Sequence: Synthetic oligonucleotide
ggauacugguguuccuucc

SEQ ID NO: 1115080 - RNA, 19 nt, Artificial Sequence
  Description of Artificial Sequence: Synthetic oligonucleotide
cuuagcuuugugcauaguu

SEQ ID NO: 1115081 - RNA, 19 nt, Artificial Sequence
  Description of Artificial Sequence: Synthetic oligonucleotide
cccacucgguaaauaaagg

SEQ ID NO: 1115082 - RNA, 19 nt, Artificial Sequence
  Description of Artificial Sequence: Synthetic oligonucleotide
ucuggcgacugaugucugu

SEQ ID NO: 1115083 - RNA, 19 nt, Artificial Sequence
  Description of Artificial Sequence: Synthetic oligonucleotide
ugacggucacaaaguggac

SEQ ID NO: 1115084 - RNA, 19 nt, Artificial Sequence
  Description of Artificial Sequence: Synthetic oligonucleotide
gguucagguuaggauaacc

SEQ ID NO: 1115085 - RNA, 19 nt, Artificial Sequence
  Description of Artificial Sequence: Synthetic oligonucleotide
uggagcaauccuacagcuu

SEQ ID NO: 1115086 - RNA, 19 nt, Artificial Sequence
  Description of Artificial Sequence: Synthetic oligonucleotide
guggcuaguaucagugcac

SEQ ID NO: 1115087 - RNA, 19 nt, Artificial Sequence
  Description of Artificial Sequence: Synthetic oligonucleotide
augcguggcuguaucggac

SEQ ID NO: 1115088 - RNA, 19 nt, Artificial Sequence
  Description of Artificial Sequence: Synthetic oligonucleotide
ugacuacgucacauucuaa

SEQ ID NO: 1115089 - RNA, 19 nt, Artificial Sequence
  Description of Artificial Sequence: Synthetic oligonucleotide
cugcgaaucucggugguuc

SEQ ID NO: 1115090 - RNA, 19 nt, Artificial Sequence
  Description of Artificial Sequence: Synthetic oligonucleotide
ucggacauguuggcuugag

SEQ ID NO: 1115091 - RNA, 19 nt, Artificial Sequence
  Description of Artificial Sequence: Synthetic oligonucleotide
auuuacaguugugcuugcu

SEQ ID NO: 1115092 - RNA, 19 nt, Artificial Sequence
  Description of Artificial Sequence: Synthetic oligonucleotide
ugcagcgaaagggacuuua

SEQ ID NO: 1115093 - RNA, 19 nt, Artificial Sequence
  Description of Artificial Sequence: Synthetic oligonucleotide
gcccacucgguaaauaaag

SEQ ID NO: 1115094 - RNA, 19 nt, Artificial Sequence
  Description of Artificial Sequence: Synthetic oligonucleotide
ggucaaguguacaguagug

SEQ ID NO: 1115095 - RNA, 19 nt, Artificial Sequence
  Description of Artificial Sequence: Synthetic oligonucleotide
guaucggacauguuggcuu

SEQ ID NO: 1115096 - RNA, 19 nt, Artificial Sequence
  Description of Artificial Sequence: Synthetic oligonucleotide
caaaucagaacgagaaguu

SEQ ID NO: 1115097 - RNA, 19 nt, Artificial Sequence
  Description of Artificial Sequence: Synthetic oligonucleotide
uucuggcgacugaugucug

SEQ ID NO: 1115098 - RNA, 19 nt, Artificial Sequence
  Description of Artificial Sequence: Synthetic oligonucleotide
gguguaagucaccucuauc

SEQ ID NO: 1115099 - RNA, 19 nt, Artificial Sequence
  Description of Artificial Sequence: Synthetic oligonucleotide
caugugcaggucaagugua

SEQ ID NO: 1115100 - RNA, 19 nt, Artificial Sequence
  Description of Artificial Sequence: Synthetic oligonucleotide
ccucucacgcacugcagcg

SEQ ID NO: 1115101 - RNA, 19 nt, Artificial Sequence
  Description of Artificial Sequence: Synthetic oligonucleotide
uaguaucagugcaccuauc

SEQ ID NO: 1115102 - RNA, 19 nt, Artificial Sequence
  Description of Artificial Sequence: Synthetic oligonucleotide
ggaacaagaaugcacuuuu

SEQ ID NO: 1115103 - RNA, 19 nt, Artificial Sequence
  Description of Artificial Sequence: Synthetic oligonucleotide
ggcgacugaugucuguggc

SEQ ID NO: 1115104 - RNA, 19 nt, Artificial Sequence
  Description of Artificial Sequence: Synthetic oligonucleotide
cucgcuuuauucagcccca

SEQ ID NO: 1115105 - RNA, 19 nt, Artificial Sequence
  Description of Artificial Sequence: Synthetic oligonucleotide
cuauccaagugagaucuaa

SEQ ID NO: 1115106 - RNA, 19 nt, Artificial Sequence
  Description of Artificial Sequence: Synthetic oligonucleotide
uuaaggcaacuggagcaau

SEQ ID NO: 1115107 - RNA, 19 nt, Artificial Sequence
  Description of Artificial Sequence: Synthetic oligonucleotide
caguaacaagggaaauaca

SEQ ID NO: 1115108 - RNA, 19 nt, Artificial Sequence
  Description of Artificial Sequence: Synthetic oligonucleotide
cuggcgacugaugucugug

SEQ ID NO: 1115109 - RNA, 19 nt, Artificial Sequence
  Description of Artificial Sequence: Synthetic oligonucleotide
gaacgcuuggugagagcug

SEQ ID NO: 1115110 - RNA, 19 nt, Artificial Sequence
  Description of Artificial Sequence: Synthetic oligonucleotide
ggagcaauccuacagcuuu

SEQ ID NO: 1115111 - RNA, 19 nt, Artificial Sequence
  Description of Artificial Sequence: Synthetic oligonucleotide
ucuauccaagugagaucua

SEQ ID NO: 1115112 - RNA, 19 nt, Artificial Sequence
  Description of Artificial Sequence: Synthetic oligonucleotide
caaggcgauugagaaccag

SEQ ID NO: 1115113 - RNA, 19 nt, Artificial Sequence
  Description of Artificial Sequence: Synthetic oligonucleotide
cuaguaucagugcaccuau

SEQ ID NO: 1115114 - RNA, 19 nt, Artificial Sequence
  Description of Artificial Sequence: Synthetic oligonucleotide
gcugagauucaguucaagu

SEQ ID NO: 1115115 - RNA, 19 nt, Artificial Sequence
  Description of Artificial Sequence: Synthetic oligonucleotide
gacggucacaaaguggacu

SEQ ID NO: 1115116 - RNA, 19 nt, Artificial Sequence
  Description of Artificial Sequence: Synthetic oligonucleotide
cucaagcuuucucccaaga

SEQ ID NO: 1115117 - RNA, 19 nt, Artificial Sequence
  Description of Artificial Sequence: Synthetic oligonucleotide
agucccuuccagcucgcuu

SEQ ID NO: 1115118 - RNA, 19 nt, Artificial Sequence
  Description of Artificial Sequence: Synthetic oligonucleotide
acguuucaucaaagggagg

SEQ ID NO: 1115119 - RNA, 19 nt, Artificial Sequence
  Description of Artificial Sequence: Synthetic oligonucleotide
guggcuguaucggacaugu

SEQ ID NO: 1115120 - RNA, 19 nt, Artificial Sequence
  Description of Artificial Sequence: Synthetic oligonucleotide
gcaauccuacagcuuuacc

SEQ ID NO: 1115121 - RNA, 19 nt, Artificial Sequence
  Description of Artificial Sequence: Synthetic oligonucleotide
acucguucuggcgacugau

SEQ ID NO: 1115122 - RNA, 19 nt, Artificial Sequence
  Description of Artificial Sequence: Synthetic oligonucleotide
cacucaagcuuucucccaa

SEQ ID NO: 1115123 - RNA, 19 nt, Artificial Sequence
  Description of Artificial Sequence: Synthetic oligonucleotide
gcacauguuuaaaugagua

SEQ ID NO: 1115124 - RNA, 19 nt, Artificial Sequence
  Description of Artificial Sequence: Synthetic oligonucleotide
aggcgauugagaaccagua

SEQ ID NO: 1115125 - RNA, 19 nt, Artificial Sequence
  Description of Artificial Sequence: Synthetic oligonucleotide
ucggugguuccuucacaau

SEQ ID NO: 1115126 - RNA, 19 nt, Artificial Sequence
  Description of Artificial Sequence: Synthetic oligonucleotide
guacucguucuggcgacug

SEQ ID NO: 1115127 - RNA, 19 nt, Artificial Sequence
  Description of Artificial Sequence: Synthetic oligonucleotide
ggucacaaaguggacucac

SEQ ID NO: 1115128 - RNA, 19 nt, Artificial Sequence
  Description of Artificial Sequence: Synthetic oligonucleotide
aaucuggauguuggcgaua

SEQ ID NO: 1115129 - RNA, 19 nt, Artificial Sequence
  Description of Artificial Sequence: Synthetic oligonucleotide
guacccuaugucugccauc

SEQ ID NO: 1115130 - RNA, 19 nt, Artificial Sequence
  Description of Artificial Sequence: Synthetic oligonucleotide
gcaugugcaggucaagugu

SEQ ID NO: 1115131 - RNA, 19 nt, Artificial Sequence
  Description of Artificial Sequence: Synthetic oligonucleotide
gcgaaacguuucaucaaag

SEQ ID NO: 1115132 - RNA, 19 nt, Artificial Sequence
  Description of Artificial Sequence: Synthetic oligonucleotide
gcgauugagaaccaguauu

SEQ ID NO: 1115133 - RNA, 19 nt, Artificial Sequence
  Description of Artificial Sequence: Synthetic oligonucleotide
gugcauaguuuaaggcaac

SEQ ID NO: 1115134 - RNA, 19 nt, Artificial Sequence
  Description of Artificial Sequence: Synthetic oligonucleotide
gcuaguaucagugcaccua

SEQ ID NO: 1115135 - RNA, 19 nt, Artificial Sequence
  Description of Artificial Sequence: Synthetic oligonucleotide
cacagccauacaugcacaa

SEQ ID NO: 1115136 - RNA, 19 nt, Artificial Sequence
  Description of Artificial Sequence: Synthetic oligonucleotide
gcagaugcguggcuguauc

SEQ ID NO: 1115137 - RNA, 19 nt, Artificial Sequence
  Description of Artificial Sequence: Synthetic oligonucleotide
ccaagugagaucuaacaau

SEQ ID NO: 1115138 - RNA, 19 nt, Artificial Sequence
  Description of Artificial Sequence: Synthetic oligonucleotide
cacugguucagguuaggau

SEQ ID NO: 1115139 - RNA, 19 nt, Artificial Sequence
  Description of Artificial Sequence: Synthetic oligonucleotide
ggaacgcuuggugagagcu

SEQ ID NO: 1115140 - RNA, 19 nt, Artificial Sequence
  Description of Artificial Sequence: Synthetic oligonucleotide
agacucagucugacgguca

SEQ ID NO: 1115141 - RNA, 19 nt, Artificial Sequence
  Description of Artificial Sequence: Synthetic oligonucleotide
ccucccucaaguguggcug

SEQ ID NO: 1115142 - RNA, 19 nt, Artificial Sequence
  Description of Artificial Sequence: Synthetic oligonucleotide
ccuaucugagucuccaucu

SEQ ID NO: 1115143 - RNA, 19 nt, Artificial Sequence
  Description of Artificial Sequence: Synthetic oligonucleotide
cagguuaggauaaccgauu

SEQ ID NO: 1115144 - RNA, 19 nt, Artificial Sequence
  Description of Artificial Sequence: Synthetic oligonucleotide
uaccuaccuuccccucccu

SEQ ID NO: 1115145 - RNA, 19 nt, Artificial Sequence
  Description of Artificial Sequence: Synthetic oligonucleotide
gugcaccuaucugagucuc

SEQ ID NO: 1115146 - RNA, 19 nt, Artificial Sequence
  Description of Artificial Sequence: Synthetic oligonucleotide
aagcaccguuucucuuaaa

SEQ ID NO: 1115147 - RNA, 19 nt, Artificial Sequence
  Description of Artificial Sequence: Synthetic oligonucleotide
caguugugcuugcuauaca

SEQ ID NO: 1115148 - RNA, 19 nt, Artificial Sequence
  Description of Artificial Sequence: Synthetic oligonucleotide
gcaccuaucugagucucca

SEQ ID NO: 1115149 - RNA, 19 nt, Artificial Sequence
  Description of Artificial Sequence: Synthetic oligonucleotide
gacucacgcccaaauggua

SEQ ID NO: 1115150 - RNA, 19 nt, Artificial Sequence
  Description of Artificial Sequence: Synthetic oligonucleotide
acuuagcuuugugcauagu

SEQ ID NO: 1115151 - RNA, 19 nt, Artificial Sequence
  Description of Artificial Sequence: Synthetic oligonucleotide
ccucgcaggagggaguuug

SEQ ID NO: 1115152 - RNA, 19 nt, Artificial Sequence
  Description of Artificial Sequence: Synthetic oligonucleotide
ccuuuacaguaacaaggga

SEQ ID NO: 1115153 - RNA, 19 nt, Artificial Sequence
  Description of Artificial Sequence: Synthetic oligonucleotide
caacaagcccacugcagau

SEQ ID NO: 1115154 - RNA, 19 nt, Artificial Sequence
  Description of Artificial Sequence: Synthetic oligonucleotide
ccaacaaagcgaaacguuu

SEQ ID NO: 1115155 - RNA, 19 nt, Artificial Sequence
  Description of Artificial Sequence: Synthetic oligonucleotide
caaucuggauguuggcgau

SEQ ID NO: 1115156 - RNA, 19 nt, Artificial Sequence
  Description of Artificial Sequence: Synthetic oligonucleotide
cagcgaaagggacuuuagu

SEQ ID NO: 1115157 - RNA, 19 nt, Artificial Sequence
  Description of Artificial Sequence: Synthetic oligonucleotide
cuaaagcaccguuucucuu

SEQ ID NO: 1115158 - RNA, 19 nt, Artificial Sequence
  Description of Artificial Sequence: Synthetic oligonucleotide
ccuugggacccauuucaca

SEQ ID NO: 1115159 - RNA, 19 nt, Artificial Sequence
  Description of Artificial Sequence: Synthetic oligonucleotide
ggcgauagacucagucuga

SEQ ID NO: 1115160 - RNA, 19 nt, Artificial Sequence
  Description of Artificial Sequence: Synthetic oligonucleotide
cccuugggacccauuucac

SEQ ID NO: 1115161 - RNA, 19 nt, Artificial Sequence
  Description of Artificial Sequence: Synthetic oligonucleotide
ggcgauugagaaccaguau

SEQ ID NO: 1115162 - RNA, 19 nt, Artificial Sequence
  Description of Artificial Sequence: Synthetic oligonucleotide
ggacucacgcccaaauggu

SEQ ID NO: 1115163 - RNA, 19 nt, Artificial Sequence
  Description of Artificial Sequence: Synthetic oligonucleotide
gcugacuacgucacauucu

SEQ ID NO: 1115164 - RNA, 19 nt, Artificial Sequence
  Description of Artificial Sequence: Synthetic oligonucleotide
agccucgcaggagggaguu

SEQ ID NO: 1115165 - RNA, 19 nt, Artificial Sequence
  Description of Artificial Sequence: Synthetic oligonucleotide
cucccgccccagauuaaaa

SEQ ID NO: 1115166 - RNA, 19 nt, Artificial Sequence
  Description of Artificial Sequence: Synthetic oligonucleotide
uggcuguaucggacauguu

SEQ ID NO: 1115167 - RNA, 19 nt, Artificial Sequence
  Description of Artificial Sequence: Synthetic oligonucleotide
gcgacugaugucuguggcu

SEQ ID NO: 1115168 - RNA, 19 nt, Artificial Sequence
  Description of Artificial Sequence: Synthetic oligonucleotide
cgauugagaaccaguauuu

SEQ ID NO: 1115169 - RNA, 19 nt, Artificial Sequence
  Description of Artificial Sequence: Synthetic oligonucleotide
cagcuugagcugcgaaucu

SEQ ID NO: 1115170 - RNA, 19 nt, Artificial Sequence
  Description of Artificial Sequence: Synthetic oligonucleotide
ggacuuuaguucccuugau

SEQ ID NO: 1115171 - RNA, 19 nt, Artificial Sequence
  Description of Artificial Sequence: Synthetic oligonucleotide
ggcuaguaucagugcaccu

SEQ ID NO: 1115172 - RNA, 19 nt, Artificial Sequence
  Description of Artificial Sequence: Synthetic oligonucleotide
gcccaacaaagcgaaacgu

SEQ ID NO: 1115173 - RNA, 19 nt, Artificial Sequence
  Description of Artificial Sequence: Synthetic oligonucleotide
cccaacaaagcgaaacguu

SEQ ID NO: 1115174 - RNA, 19 nt, Artificial Sequence
  Description of Artificial Sequence: Synthetic oligonucleotide
cucgcaggagggaguuugu

SEQ ID NO: 1115175 - RNA, 19 nt, Artificial Sequence
  Description of Artificial Sequence: Synthetic oligonucleotide
ccuugaucggaaggacaca

SEQ ID NO: 1115176 - RNA, 19 nt, Artificial Sequence
  Description of Artificial Sequence: Synthetic oligonucleotide
gggacccauuucacauuuc

SEQ ID NO: 1115177 - RNA, 19 nt, Artificial Sequence
  Description of Artificial Sequence: Synthetic oligonucleotide
cagccucgcaggagggagu

SEQ ID NO: 1115178 - RNA, 19 nt, Artificial Sequence
  Description of Artificial Sequence: Synthetic oligonucleotide
cgagaaguuuggucacuua

SEQ ID NO: 1115179 - RNA, 19 nt, Artificial Sequence
  Description of Artificial Sequence: Synthetic oligonucleotide
gguacucguucuggcgacu

SEQ ID NO: 1115180 - RNA, 19 nt, Artificial Sequence
  Description of Artificial Sequence: Synthetic oligonucleotide
gcgaaucucggugguuccu

SEQ ID NO: 1115181 - RNA, 19 nt, Artificial Sequence
  Description of Artificial Sequence: Synthetic oligonucleotide
gcguggcuguaucggacau

SEQ ID NO: 1115182 - RNA, 19 nt, Artificial Sequence
  Description of Artificial Sequence: Synthetic oligonucleotide
gcacuggaguggaacgcuu

SEQ ID NO: 1115183 - RNA, 19 nt, Artificial Sequence
  Description of Artificial Sequence: Synthetic oligonucleotide
gcugcgaaucucggugguu

SEQ ID NO: 1115184 - RNA, 19 nt, Artificial Sequence
  Description of Artificial Sequence: Synthetic oligonucleotide
cgaaucucggugguuccuu

SEQ ID NO: 1115185 - RNA, 19 nt, Artificial Sequence
  Description of Artificial Sequence: Synthetic oligonucleotide
cugcagcgaaagggacuuu

SEQ ID NO: 1115186 - RNA, 19 nt, Artificial Sequence
  Description of Artificial Sequence: Synthetic oligonucleotide
gccucgcaggagggaguuu

SEQ ID NO: 1115187 - RNA, 19 nt, Artificial Sequence
  Description of Artificial Sequence: Synthetic oligonucleotide
agauaaauuuaacagcucc

SEQ ID NO: 1115188 - RNA, 19 nt, Artificial Sequence
  Description of Artificial Sequence: Synthetic oligonucleotide
aguaauauugcauaggagu

SEQ ID NO: 1115189 - RNA, 19 nt, Artificial Sequence
  Description of Artificial Sequence: Synthetic oligonucleotide
acuaauuguguauugaaag

SEQ ID NO: 1115190 - RNA, 19 nt, Artificial Sequence
  Description of Artificial Sequence: Synthetic oligonucleotide
uccacuacgaaaaucaagc

SEQ ID NO: 1115191 - RNA, 19 nt, Artificial Sequence
  Description of Artificial Sequence: Synthetic oligonucleotide
ugagauuuccccaagauaa

SEQ ID NO: 1115192 - RNA, 19 nt, Artificial Sequence
  Description of Artificial Sequence: Synthetic oligonucleotide
acugacaccaguuuacagc

SEQ ID NO: 1115193 - RNA, 19 nt, Artificial Sequence
  Description of Artificial Sequence: Synthetic oligonucleotide
aaagcuaaguaauauugca

SEQ ID NO: 1115194 - RNA, 19 nt, Artificial Sequence
  Description of Artificial Sequence: Synthetic oligonucleotide
ucuaauagcuauaauuaca

SEQ ID NO: 1115195 - RNA, 19 nt, Artificial Sequence
  Description of Artificial Sequence: Synthetic oligonucleotide
agcgauacuggccagagac

SEQ ID NO: 1115196 - RNA, 19 nt, Artificial Sequence
  Description of Artificial Sequence: Synthetic oligonucleotide
aaaucggacccuugcaggc

SEQ ID NO: 1115197 - RNA, 19 nt, Artificial Sequence
  Description of Artificial Sequence: Synthetic oligonucleotide
aaaacaguugauuacuaau

SEQ ID NO: 1115198 - RNA, 19 nt, Artificial Sequence
  Description of Artificial Sequence: Synthetic oligonucleotide
ucgaaaugaaaacugaaaa

SEQ ID NO: 1115199 - RNA, 19 nt, Artificial Sequence
  Description of Artificial Sequence: Synthetic oligonucleotide
acugacagugaguugauuc

SEQ ID NO: 1115200 - RNA, 19 nt, Artificial Sequence
  Description of Artificial Sequence: Synthetic oligonucleotide
aguuaagagacuuuauucu

SEQ ID NO: 1115201 - RNA, 19 nt, Artificial Sequence
  Description of Artificial Sequence: Synthetic oligonucleotide
aacccauggagacagcuuc

SEQ ID NO: 1115202 - RNA, 19 nt, Artificial Sequence
  Description of Artificial Sequence: Synthetic oligonucleotide
uguucaaguguucuugucc

SEQ ID NO: 1115203 - RNA, 19 nt, Artificial Sequence
  Description of Artificial Sequence: Synthetic oligonucleotide
ucuaguccuucauagagcc

SEQ ID NO: 1115204 - RNA, 19 nt, Artificial Sequence
  Description of Artificial Sequence: Synthetic oligonucleotide
ugccccuacacccaaaucc

SEQ ID NO: 1115205 - RNA, 19 nt, Artificial Sequence
  Description of Artificial Sequence: Synthetic oligonucleotide
agucuaguccuucauagag

SEQ ID NO: 1115206 - RNA, 19 nt, Artificial Sequence
  Description of Artificial Sequence: Synthetic oligonucleotide
cuugucgaaaugaaaacug

SEQ ID NO: 1115207 - RNA, 19 nt, Artificial Sequence
  Description of Artificial Sequence: Synthetic oligonucleotide
acgaaaaucaagccuuggg

SEQ ID NO: 1115208 - RNA, 19 nt, Artificial Sequence
  Description of Artificial Sequence: Synthetic oligonucleotide
ucuuucgauggcaaaucgg

SEQ ID NO: 1115209 - RNA, 19 nt, Artificial Sequence
  Description of Artificial Sequence: Synthetic oligonucleotide
accuacacuaggcauaguc

SEQ ID NO: 1115210 - RNA, 19 nt, Artificial Sequence
  Description of Artificial Sequence: Synthetic oligonucleotide
uccacgacaccaaauaaac

SEQ ID NO: 1115211 - RNA, 19 nt, Artificial Sequence
  Description of Artificial Sequence: Synthetic oligonucleotide
aggccauuacugcaaaacc

SEQ ID NO: 1115212 - RNA, 19 nt, Artificial Sequence
  Description of Artificial Sequence: Synthetic oligonucleotide
ucugcacauguacagcacg

SEQ ID NO: 1115213 - RNA, 19 nt, Artificial Sequence
  Description of Artificial Sequence: Synthetic oligonucleotide
aauuguguauugaaagcag

SEQ ID NO: 1115214 - RNA, 19 nt, Artificial Sequence
  Description of Artificial Sequence: Synthetic oligonucleotide
aaaguagaggucgucuuuc

SEQ ID NO: 1115215 - RNA, 19 nt, Artificial Sequence
  Description of Artificial Sequence: Synthetic oligonucleotide
gacccuugcaggcugaggg

SEQ ID NO: 1115216 - RNA, 19 nt, Artificial Sequence
  Description of Artificial Sequence: Synthetic oligonucleotide
ucaacugucuccacguuga

SEQ ID NO: 1115217 - RNA, 19 nt, Artificial Sequence
  Description of Artificial Sequence: Synthetic oligonucleotide
accaugugagcacaaguac

SEQ ID NO: 1115218 - RNA, 19 nt, Artificial Sequence
  Description of Artificial Sequence: Synthetic oligonucleotide
cccaagauaaauuuaacag

SEQ ID NO: 1115219 - RNA, 19 nt, Artificial Sequence
  Description of Artificial Sequence: Synthetic oligonucleotide
aaccaguucugagauuucc

SEQ ID NO: 1115220 - RNA, 19 nt, Artificial Sequence
  Description of Artificial Sequence: Synthetic oligonucleotide
ggaaacagaaacuauuuac

SEQ ID NO: 1115221 - RNA, 19 nt, Artificial Sequence
  Description of Artificial Sequence: Synthetic oligonucleotide
ucgauggcaaaucggaccc

SEQ ID NO: 1115222 - RNA, 19 nt, Artificial Sequence
  Description of Artificial Sequence: Synthetic oligonucleotide
uucgauggcaaaucggacc

SEQ ID NO: 1115223 - RNA, 19 nt, Artificial Sequence
  Description of Artificial Sequence: Synthetic oligonucleotide
cugacaccaguuuacagcc

SEQ ID NO: 1115224 - RNA, 19 nt, Artificial Sequence
  Description of Artificial Sequence: Synthetic oligonucleotide
uucuaauagcuauaauuac

SEQ ID NO: 1115225 - RNA, 19 nt, Artificial Sequence
  Description of Artificial Sequence: Synthetic oligonucleotide
aauuuaacagcuccagcuu

SEQ ID NO: 1115226 - RNA, 19 nt, Artificial Sequence
  Description of Artificial Sequence: Synthetic oligonucleotide
acauguacagcacggugcg

SEQ ID NO: 1115227 - RNA, 19 nt, Artificial Sequence
  Description of Artificial Sequence: Synthetic oligonucleotide
aauacaagccaggcccugc

SEQ ID NO: 1115228 - RNA, 19 nt, Artificial Sequence
  Description of Artificial Sequence: Synthetic oligonucleotide
cacgacaccaaauaaacca

SEQ ID NO: 1115229 - RNA, 19 nt, Artificial Sequence
  Description of Artificial Sequence: Synthetic oligonucleotide
uuuacagcccaauggcucc

SEQ ID NO: 1115230 - RNA, 19 nt, Artificial Sequence
  Description of Artificial Sequence: Synthetic oligonucleotide
gauuacuaauuguguauug

SEQ ID NO: 1115231 - RNA, 19 nt, Artificial Sequence
  Description of Artificial Sequence: Synthetic oligonucleotide
uuacuaauuguguauugaa

SEQ ID NO: 1115232 - RNA, 19 nt, Artificial Sequence
  Description of Artificial Sequence: Synthetic oligonucleotide
auaguuaagagacuuuauu

SEQ ID NO: 1115233 - RNA, 19 nt, Artificial Sequence
  Description of Artificial Sequence: Synthetic oligonucleotide
cacguuugccacaugagag

SEQ ID NO: 1115234 - RNA, 19 nt, Artificial Sequence
  Description of Artificial Sequence: Synthetic oligonucleotide
guuuguauagaauuguugu

SEQ ID NO: 1115235 - RNA, 19 nt, Artificial Sequence
  Description of Artificial Sequence: Synthetic oligonucleotide
cacauguacagcacggugc

SEQ ID NO: 1115236 - RNA, 19 nt, Artificial Sequence
  Description of Artificial Sequence: Synthetic oligonucleotide
agacaggcgagucacgggg

SEQ ID NO: 1115237 - RNA, 19 nt, Artificial Sequence
  Description of Artificial Sequence: Synthetic oligonucleotide
aguaagagguuccacgaca

SEQ ID NO: 1115238 - RNA, 19 nt, Artificial Sequence
  Description of Artificial Sequence: Synthetic oligonucleotide
caguuuacagcccaauggc

SEQ ID NO: 1115239 - RNA, 19 nt, Artificial Sequence
  Description of Artificial Sequence: Synthetic oligonucleotide
auaggggaacaggugaucc

SEQ ID NO: 1115240 - RNA, 19 nt, Artificial Sequence
  Description of Artificial Sequence: Synthetic oligonucleotide
uacuaauuguguauugaaa

SEQ ID NO: 1115241 - RNA, 19 nt, Artificial Sequence
  Description of Artificial Sequence: Synthetic oligonucleotide
uacaagcacaaugcuaugg

SEQ ID NO: 1115242 - RNA, 19 nt, Artificial Sequence
  Description of Artificial Sequence: Synthetic oligonucleotide
aaugcaggugacccaaaga

SEQ ID NO: 1115243 - RNA, 19 nt, Artificial Sequence
  Description of Artificial Sequence: Synthetic oligonucleotide
aauuucacccagcuucagu

SEQ ID NO: 1115244 - RNA, 19 nt, Artificial Sequence
  Description of Artificial Sequence: Synthetic oligonucleotide
uugucgaaaugaaaacuga

SEQ ID NO: 1115245 - RNA, 19 nt, Artificial Sequence
  Description of Artificial Sequence: Synthetic oligonucleotide
caaaucggacccuugcagg

SEQ ID NO: 1115246 - RNA, 19 nt, Artificial Sequence
  Description of Artificial Sequence: Synthetic oligonucleotide
aaaccuacacuaggcauag

SEQ ID NO: 1115247 - RNA, 19 nt, Artificial Sequence
  Description of Artificial Sequence: Synthetic oligonucleotide
aacaggugauccgauggac

SEQ ID NO: 1115248 - RNA, 19 nt, Artificial Sequence
  Description of Artificial Sequence: Synthetic oligonucleotide
auggacuagcauucaggcc

SEQ ID NO: 1115249 - RNA, 19 nt, Artificial Sequence
  Description of Artificial Sequence: Synthetic oligonucleotide
gauacugacaccaguuuac

SEQ ID NO: 1115250 - RNA, 19 nt, Artificial Sequence
  Description of Artificial Sequence: Synthetic oligonucleotide
aagauaaauuuaacagcuc

SEQ ID NO: 1115251 - RNA, 19 nt, Artificial Sequence
  Description of Artificial Sequence: Synthetic oligonucleotide
agcuaaguaauauugcaua

SEQ ID NO: 1115252 - RNA, 19 nt, Artificial Sequence
  Description of Artificial Sequence: Synthetic oligonucleotide
gcuauaauuacagugcuug

SEQ ID NO: 1115253 - RNA, 19 nt, Artificial Sequence
  Description of Artificial Sequence: Synthetic oligonucleotide
cuuucgauggcaaaucgga

SEQ ID NO: 1115254 - RNA, 19 nt, Artificial Sequence
  Description of Artificial Sequence: Synthetic oligonucleotide
acguuugccacaugagagg

SEQ ID NO: 1115255 - RNA, 19 nt, Artificial Sequence
  Description of Artificial Sequence: Synthetic oligonucleotide
aagacaggcgagucacggg

SEQ ID NO: 1115256 - RNA, 19 nt, Artificial Sequence
  Description of Artificial Sequence: Synthetic oligonucleotide
auaggaguaccagaaacug

SEQ ID NO: 1115257 - RNA, 19 nt, Artificial Sequence
  Description of Artificial Sequence: Synthetic oligonucleotide
auuacuaauuguguauuga

SEQ ID NO: 1115258 - RNA, 19 nt, Artificial Sequence
  Description of Artificial Sequence: Synthetic oligonucleotide
cuguccacuacgaaaauca

SEQ ID NO: 1115259 - RNA, 19 nt, Artificial Sequence
  Description of Artificial Sequence: Synthetic oligonucleotide
uacucaacugucuccacgu

SEQ ID NO: 1115260 - RNA, 19 nt, Artificial Sequence
  Description of Artificial Sequence: Synthetic oligonucleotide
uaauauugcauaggaguac

SEQ ID NO: 1115261 - RNA, 19 nt, Artificial Sequence
  Description of Artificial Sequence: Synthetic oligonucleotide
aucguggucacaauuucac

SEQ ID NO: 1115262 - RNA, 19 nt, Artificial Sequence
  Description of Artificial Sequence: Synthetic oligonucleotide
agaggucgucuuucgaugg

SEQ ID NO: 1115263 - RNA, 19 nt, Artificial Sequence
  Description of Artificial Sequence: Synthetic oligonucleotide
agaaagcuacuucacacau

SEQ ID NO: 1115264 - RNA, 19 nt, Artificial Sequence
  Description of Artificial Sequence: Synthetic oligonucleotide
aguuuguauagaauuguug

SEQ ID NO: 1115265 - RNA, 19 nt, Artificial Sequence
  Description of Artificial Sequence: Synthetic oligonucleotide
uuccacgacaccaaauaaa

SEQ ID NO: 1115266 - RNA, 19 nt, Artificial Sequence
  Description of Artificial Sequence: Synthetic oligonucleotide
ugcuugucgaaaugaaaac

SEQ ID NO: 1115267 - RNA, 19 nt, Artificial Sequence
  Description of Artificial Sequence: Synthetic oligonucleotide
uguguauugaaagcaguaa

SEQ ID NO: 1115268 - RNA, 19 nt, Artificial Sequence
  Description of Artificial Sequence: Synthetic oligonucleotide
acuacgaaaaucaagccuu

SEQ ID NO: 1115269 - RNA, 19 nt, Artificial Sequence
  Description of Artificial Sequence: Synthetic oligonucleotide
agcgcguccaagugggccc

SEQ ID NO: 1115270 - RNA, 19 nt, Artificial Sequence
  Description of Artificial Sequence: Synthetic oligonucleotide
cugcaaaaccuacacuagg

SEQ ID NO: 1115271 - RNA, 19 nt, Artificial Sequence
  Description of Artificial Sequence: Synthetic oligonucleotide
ccaaccaccaaauggauac

SEQ ID NO: 1115272 - RNA, 19 nt, Artificial Sequence
  Description of Artificial Sequence: Synthetic oligonucleotide
ugaccaugugagcacaagu

SEQ ID NO: 1115273 - RNA, 19 nt, Artificial Sequence
  Description of Artificial Sequence: Synthetic oligonucleotide
ugagcacaaguacaagcac

SEQ ID NO: 1115274 - RNA, 19 nt, Artificial Sequence
  Description of Artificial Sequence: Synthetic oligonucleotide
gaaugcaggugacccaaag

SEQ ID NO: 1115275 - RNA, 19 nt, Artificial Sequence
  Description of Artificial Sequence: Synthetic oligonucleotide
ugagaaugcgcauuucuuu

SEQ ID NO: 1115276 - RNA, 19 nt, Artificial Sequence
  Description of Artificial Sequence: Synthetic oligonucleotide
ugugaccaacccauggaga

SEQ ID NO: 1115277 - RNA, 19 nt, Artificial Sequence
  Description of Artificial Sequence: Synthetic oligonucleotide
aaaaccuacacuaggcaua

SEQ ID NO: 1115278 - RNA, 19 nt, Artificial Sequence
  Description of Artificial Sequence: Synthetic oligonucleotide
aaacugccucaguggaaac

SEQ ID NO: 1115279 - RNA, 19 nt, Artificial Sequence
  Description of Artificial Sequence: Synthetic oligonucleotide
uccuguggcguagagagug

SEQ ID NO: 1115280 - RNA, 19 nt, Artificial Sequence
  Description of Artificial Sequence: Synthetic oligonucleotide
gucuuucgauggcaaaucg

SEQ ID NO: 1115281 - RNA, 19 nt, Artificial Sequence
  Description of Artificial Sequence: Synthetic oligonucleotide
uaauagcuauaauuacagu

SEQ ID NO: 1115282 - RNA, 19 nt, Artificial Sequence
  Description of Artificial Sequence: Synthetic oligonucleotide
uggcaaaucggacccuugc

SEQ ID NO: 1115283 - RNA, 19 nt, Artificial Sequence
  Description of Artificial Sequence: Synthetic oligonucleotide
cuagcauucaggccauuac

SEQ ID NO: 1115284 - RNA, 19 nt, Artificial Sequence
  Description of Artificial Sequence: Synthetic oligonucleotide
cugcacauguacagcacgg

SEQ ID NO: 1115285 - RNA, 19 nt, Artificial Sequence
  Description of Artificial Sequence: Synthetic oligonucleotide
uggacugacccucccagcu

SEQ ID NO: 1115286 - RNA, 19 nt, Artificial Sequence
  Description of Artificial Sequence: Synthetic oligonucleotide
uuacugcaaaaccuacacu

SEQ ID NO: 1115287 - RNA, 19 nt, Artificial Sequence
  Description of Artificial Sequence: Synthetic oligonucleotide
uuucgauggcaaaucggac

SEQ ID NO: 1115288 - RNA, 19 nt, Artificial Sequence
  Description of Artificial Sequence: Synthetic oligonucleotide
aguguuuaucaaaauacaa

SEQ ID NO: 1115289 - RNA, 19 nt, Artificial Sequence
  Description of Artificial Sequence: Synthetic oligonucleotide
ucgcacguuugccacauga

SEQ ID NO: 1115290 - RNA, 19 nt, Artificial Sequence
  Description of Artificial Sequence: Synthetic oligonucleotide
gugaccaacccauggagac

SEQ ID NO: 1115291 - RNA, 19 nt, Artificial Sequence
  Description of Artificial Sequence: Synthetic oligonucleotide
caccaaauaaaccaguucu

SEQ ID NO: 1115292 - RNA, 19 nt, Artificial Sequence
  Description of Artificial Sequence: Synthetic oligonucleotide
agcacggugcgaugcacac

SEQ ID NO: 1115293 - RNA, 19 nt, Artificial Sequence
  Description of Artificial Sequence: Synthetic oligonucleotide
gaaucguggucacaauuuc

SEQ ID NO: 1115294 - RNA, 19 nt, Artificial Sequence
  Description of Artificial Sequence: Synthetic oligonucleotide
aucuucagcuagcauccuc

SEQ ID NO: 1115295 - RNA, 19 nt, Artificial Sequence
  Description of Artificial Sequence: Synthetic oligonucleotide
gaccaacccauggagacag

SEQ ID NO: 1115296 - RNA, 19 nt, Artificial Sequence
  Description of Artificial Sequence: Synthetic oligonucleotide
acagagucgcacguuugcc

SEQ ID NO: 1115297 - RNA, 19 nt, Artificial Sequence
  Description of Artificial Sequence: Synthetic oligonucleotide
uuauucuaauagcuauaau

SEQ ID NO: 1115298 - RNA, 19 nt, Artificial Sequence
  Description of Artificial Sequence: Synthetic oligonucleotide
aaucccuucucaguacuga

SEQ ID NO: 1115299 - RNA, 19 nt, Artificial Sequence
  Description of Artificial Sequence: Synthetic oligonucleotide
agauauuccccaugcuugu

SEQ ID NO: 1115300 - RNA, 19 nt, Artificial Sequence
  Description of Artificial Sequence: Synthetic oligonucleotide
acugccucaguggaaacag

SEQ ID NO: 1115301 - RNA, 19 nt, Artificial Sequence
  Description of Artificial Sequence: Synthetic oligonucleotide
cuacugugaccaugcagcg

SEQ ID NO: 1115302 - RNA, 19 nt, Artificial Sequence
  Description of Artificial Sequence: Synthetic oligonucleotide
aagcuaaguaauauugcau

SEQ ID NO: 1115303 - RNA, 19 nt, Artificial Sequence
  Description of Artificial Sequence: Synthetic oligonucleotide
cacggugcgaugcacacug

SEQ ID NO: 1115304 - RNA, 19 nt, Artificial Sequence
  Description of Artificial Sequence: Synthetic oligonucleotide
aagaguaagcuggguaugu

SEQ ID NO: 1115305 - RNA, 19 nt, Artificial Sequence
  Description of Artificial Sequence: Synthetic oligonucleotide
aaccaccaaauggauacug

SEQ ID NO: 1115306 - RNA, 19 nt, Artificial Sequence
  Description of Artificial Sequence: Synthetic oligonucleotide
ugauuacuaauuguguauu

SEQ ID NO: 1115307 - RNA, 19 nt, Artificial Sequence
  Description of Artificial Sequence: Synthetic oligonucleotide
gaagcgauacuggccagag

SEQ ID NO: 1115308 - RNA, 19 nt, Artificial Sequence
  Description of Artificial Sequence: Synthetic oligonucleotide
cugugaccaacccauggag

SEQ ID NO: 1115309 - RNA, 19 nt, Artificial Sequence
  Description of Artificial Sequence: Synthetic oligonucleotide
auggacugacccucccagc

SEQ ID NO: 1115310 - RNA, 19 nt, Artificial Sequence
  Description of Artificial Sequence: Synthetic oligonucleotide
uucggccgcauucauggca

SEQ ID NO: 1115311 - RNA, 19 nt, Artificial Sequence
  Description of Artificial Sequence: Synthetic oligonucleotide
agcccaauggcucccggag

SEQ ID NO: 1115312 - RNA, 19 nt, Artificial Sequence
  Description of Artificial Sequence: Synthetic oligonucleotide
caguguuuaucaaaauaca

SEQ ID NO: 1115313 - RNA, 19 nt, Artificial Sequence
  Description of Artificial Sequence: Synthetic oligonucleotide
acacccaaaucccuucuca

SEQ ID NO: 1115314 - RNA, 19 nt, Artificial Sequence
  Description of Artificial Sequence: Synthetic oligonucleotide
ucauucacacgcucucugu

SEQ ID NO: 1115315 - RNA, 19 nt, Artificial Sequence
  Description of Artificial Sequence: Synthetic oligonucleotide
guaauauugcauaggagua

SEQ ID NO: 1115316 - RNA, 19 nt, Artificial Sequence
  Description of Artificial Sequence: Synthetic oligonucleotide
aaucguggucacaauuuca

SEQ ID NO: 1115317 - RNA, 19 nt, Artificial Sequence
  Description of Artificial Sequence: Synthetic oligonucleotide
aagugggcccaagaguaag

SEQ ID NO: 1115318 - RNA, 19 nt, Artificial Sequence
  Description of Artificial Sequence: Synthetic oligonucleotide
auguaggcugccaucuggc

SEQ ID NO: 1115319 - RNA, 19 nt, Artificial Sequence
  Description of Artificial Sequence: Synthetic oligonucleotide
ccagucuaguccuucauag

SEQ ID NO: 1115320 - RNA, 19 nt, Artificial Sequence
  Description of Artificial Sequence: Synthetic oligonucleotide
uccccaagauaaauuuaac

SEQ ID NO: 1115321 - RNA, 19 nt, Artificial Sequence
  Description of Artificial Sequence: Synthetic oligonucleotide
ucccauaggggaacaggug

SEQ ID NO: 1115322 - RNA, 19 nt, Artificial Sequence
  Description of Artificial Sequence: Synthetic oligonucleotide
ugccagcgcguccaagugg

SEQ ID NO: 1115323 - RNA, 19 nt, Artificial Sequence
  Description of Artificial Sequence: Synthetic oligonucleotide
caugugagcacaaguacaa

SEQ ID NO: 1115324 - RNA, 19 nt, Artificial Sequence
  Description of Artificial Sequence: Synthetic oligonucleotide
cucaacugucuccacguug

SEQ ID NO: 1115325 - RNA, 19 nt, Artificial Sequence
  Description of Artificial Sequence: Synthetic oligonucleotide
auccgauggacuagcauuc

SEQ ID NO: 1115326 - RNA, 19 nt, Artificial Sequence
  Description of Artificial Sequence: Synthetic oligonucleotide
gacugacccucccagcuug

SEQ ID NO: 1115327 - RNA, 19 nt, Artificial Sequence
  Description of Artificial Sequence: Synthetic oligonucleotide
acgacaccaaauaaaccag

SEQ ID NO: 1115328 - RNA, 19 nt, Artificial Sequence
  Description of Artificial Sequence: Synthetic oligonucleotide
agagaacugcaucccggag

SEQ ID NO: 1115329 - RNA, 19 nt, Artificial Sequence
  Description of Artificial Sequence: Synthetic oligonucleotide
caggccauuacugcaaaac

SEQ ID NO: 1115330 - RNA, 19 nt, Artificial Sequence
  Description of Artificial Sequence: Synthetic oligonucleotide
guuuacagcccaauggcuc

SEQ ID NO: 1115331 - RNA, 19 nt, Artificial Sequence
  Description of Artificial Sequence: Synthetic oligonucleotide
ugcgaugcacacugugacc

SEQ ID NO: 1115332 - RNA, 19 nt, Artificial Sequence
  Description of Artificial Sequence: Synthetic oligonucleotide
gauccgauggacuagcauu

SEQ ID NO: 1115333 - RNA, 19 nt, Artificial Sequence
  Description of Artificial Sequence: Synthetic oligonucleotide
gugagcacaaguacaagca

SEQ ID NO: 1115334 - RNA, 19 nt, Artificial Sequence
  Description of Artificial Sequence: Synthetic oligonucleotide
cacagagucgcacguuugc

SEQ ID NO: 1115335 - RNA, 19 nt, Artificial Sequence
  Description of Artificial Sequence: Synthetic oligonucleotide
cuaggugaccaugugagca

SEQ ID NO: 1115336 - RNA, 19 nt, Artificial Sequence
  Description of Artificial Sequence: Synthetic oligonucleotide
uggauacugacaccaguuu

SEQ ID NO: 1115337 - RNA, 19 nt, Artificial Sequence
  Description of Artificial Sequence: Synthetic oligonucleotide
cauucaggccauuacugca

SEQ ID NO: 1115338 - RNA, 19 nt, Artificial Sequence
  Description of Artificial Sequence: Synthetic oligonucleotide
agcuugcacgcgcuccugc

SEQ ID NO: 1115339 - RNA, 19 nt, Artificial Sequence
  Description of Artificial Sequence: Synthetic oligonucleotide
cauuacugcaaaaccuaca

SEQ ID NO: 1115340 - RNA, 19 nt, Artificial Sequence
  Description of Artificial Sequence: Synthetic oligonucleotide
aggggucugguucacuucu

SEQ ID NO: 1115341 - RNA, 19 nt, Artificial Sequence
  Description of Artificial Sequence: Synthetic oligonucleotide
ugauccgauggacuagcau

SEQ ID NO: 1115342 - RNA, 19 nt, Artificial Sequence
  Description of Artificial Sequence: Synthetic oligonucleotide
ucauagagcccauccccac

SEQ ID NO: 1115343 - RNA, 19 nt, Artificial Sequence
  Description of Artificial Sequence: Synthetic oligonucleotide
uguacagcacggugcgaug

SEQ ID NO: 1115344 - RNA, 19 nt, Artificial Sequence
  Description of Artificial Sequence: Synthetic oligonucleotide
gucgaaaugaaaacugaaa

SEQ ID NO: 1115345 - RNA, 19 nt, Artificial Sequence
  Description of Artificial Sequence: Synthetic oligonucleotide
uguccacuacgaaaaucaa

SEQ ID NO: 1115346 - RNA, 19 nt, Artificial Sequence
  Description of Artificial Sequence: Synthetic oligonucleotide
uggaaugcaggugacccaa

SEQ ID NO: 1115347 - RNA, 19 nt, Artificial Sequence
  Description of Artificial Sequence: Synthetic oligonucleotide
cccuaggugaccaugugag

SEQ ID NO: 1115348 - RNA, 19 nt, Artificial Sequence
  Description of Artificial Sequence: Synthetic oligonucleotide
gugcuugucgaaaugaaaa

SEQ ID NO: 1115349 - RNA, 19 nt, Artificial Sequence
  Description of Artificial Sequence: Synthetic oligonucleotide
uggguauguaggcugccau

SEQ ID NO: 1115350 - RNA, 19 nt, Artificial Sequence
  Description of Artificial Sequence: Synthetic oligonucleotide
uacugugaccaugcagcgg

SEQ ID NO: 1115351 - RNA, 19 nt, Artificial Sequence
  Description of Artificial Sequence: Synthetic oligonucleotide
agugggcccaagaguaagc

SEQ ID NO: 1115352 - RNA, 19 nt, Artificial Sequence
  Description of Artificial Sequence: Synthetic oligonucleotide
aaaccaguucugagauuuc

SEQ ID NO: 1115353 - RNA, 19 nt, Artificial Sequence
  Description of Artificial Sequence: Synthetic oligonucleotide
aacugccucaguggaaaca

SEQ ID NO: 1115354 - RNA, 19 nt, Artificial Sequence
  Description of Artificial Sequence: Synthetic oligonucleotide
cauucacacgcucucuguc

SEQ ID NO: 1115355 - RNA, 19 nt, Artificial Sequence
  Description of Artificial Sequence: Synthetic oligonucleotide
cauaggaguaccagaaacu

SEQ ID NO: 1115356 - RNA, 19 nt, Artificial Sequence
  Description of Artificial Sequence: Synthetic oligonucleotide
gucuaguccuucauagagc

SEQ ID NO: 1115357 - RNA, 19 nt, Artificial Sequence
  Description of Artificial Sequence: Synthetic oligonucleotide
aaaucccuucucaguacug

SEQ ID NO: 1115358 - RNA, 19 nt, Artificial Sequence
  Description of Artificial Sequence: Synthetic oligonucleotide
ucgucuuucgauggcaaau

SEQ ID NO: 1115359 - RNA, 19 nt, Artificial Sequence
  Description of Artificial Sequence: Synthetic oligonucleotide
auacaagccaggcccugca

SEQ ID NO: 1115360 - RNA, 19 nt, Artificial Sequence
  Description of Artificial Sequence: Synthetic oligonucleotide
cuauggaaugcaggugacc

SEQ ID NO: 1115361 - RNA, 19 nt, Artificial Sequence
  Description of Artificial Sequence: Synthetic oligonucleotide
aguuuacagcccaauggcu

SEQ ID NO: 1115362 - RNA, 19 nt, Artificial Sequence
  Description of Artificial Sequence: Synthetic oligonucleotide
gaccaugcagcggauggug

SEQ ID NO: 1115363 - RNA, 19 nt, Artificial Sequence
  Description of Artificial Sequence: Synthetic oligonucleotide
caagaguaagcuggguaug

SEQ ID NO: 1115364 - RNA, 19 nt, Artificial Sequence
  Description of Artificial Sequence: Synthetic oligonucleotide
agauuuccccaagauaaau

SEQ ID NO: 1115365 - RNA, 19 nt, Artificial Sequence
  Description of Artificial Sequence: Synthetic oligonucleotide
ugacaccaguuuacagccc

SEQ ID NO: 1115366 - RNA, 19 nt, Artificial Sequence
  Description of Artificial Sequence: Synthetic oligonucleotide
uucaggccauuacugcaaa

SEQ ID NO: 1115367 - RNA, 19 nt, Artificial Sequence
  Description of Artificial Sequence: Synthetic oligonucleotide
gauauuccccaugcuugug

SEQ ID NO: 1115368 - RNA, 19 nt, Artificial Sequence
  Description of Artificial Sequence: Synthetic oligonucleotide
gaccaugugagcacaagua

SEQ ID NO: 1115369 - RNA, 19 nt, Artificial Sequence
  Description of Artificial Sequence: Synthetic oligonucleotide
gaggucgucuuucgauggc

SEQ ID NO: 1115370 - RNA, 19 nt, Artificial Sequence
  Description of Artificial Sequence: Synthetic oligonucleotide
aaucggacccuugcaggcu

SEQ ID NO: 1115371 - RNA, 19 nt, Artificial Sequence
  Description of Artificial Sequence: Synthetic oligonucleotide
cacacgcucucugucauug

SEQ ID NO: 1115372 - RNA, 19 nt, Artificial Sequence
  Description of Artificial Sequence: Synthetic oligonucleotide
agcggauggugguuuguca

SEQ ID NO: 1115373 - RNA, 19 nt, Artificial Sequence
  Description of Artificial Sequence: Synthetic oligonucleotide
acuaggcauagucuccuuu

SEQ ID NO: 1115374 - RNA, 19 nt, Artificial Sequence
  Description of Artificial Sequence: Synthetic oligonucleotide
auacugacaccaguuuaca

SEQ ID NO: 1115375 - RNA, 19 nt, Artificial Sequence
  Description of Artificial Sequence: Synthetic oligonucleotide
caguaagagguuccacgac

SEQ ID NO: 1115376 - RNA, 19 nt, Artificial Sequence
  Description of Artificial Sequence: Synthetic oligonucleotide
accacagagucgcacguuu

SEQ ID NO: 1115377 - RNA, 19 nt, Artificial Sequence
  Description of Artificial Sequence: Synthetic oligonucleotide
cacuacgaaaaucaagccu

SEQ ID NO: 1115378 - RNA, 19 nt, Artificial Sequence
  Description of Artificial Sequence: Synthetic oligonucleotide
aucggacccuugcaggcug

SEQ ID NO: 1115379 - RNA, 19 nt, Artificial Sequence
  Description of Artificial Sequence: Synthetic oligonucleotide
caugagaaugcgcauuucu

SEQ ID NO: 1115380 - RNA, 19 nt, Artificial Sequence
  Description of Artificial Sequence: Synthetic oligonucleotide
acccaaagacaggcgaguc

SEQ ID NO: 1115381 - RNA, 19 nt, Artificial Sequence
  Description of Artificial Sequence: Synthetic oligonucleotide
guauguaggcugccaucug

SEQ ID NO: 1115382 - RNA, 19 nt, Artificial Sequence
  Description of Artificial Sequence: Synthetic oligonucleotide
aggggaacaggugauccga

SEQ ID NO: 1115383 - RNA, 19 nt, Artificial Sequence
  Description of Artificial Sequence: Synthetic oligonucleotide
ugaccaacccauggagaca

SEQ ID NO: 1115384 - RNA, 19 nt, Artificial Sequence
  Description of Artificial Sequence: Synthetic oligonucleotide
uguucccauaggggaacag

SEQ ID NO: 1115385 - RNA, 19 nt, Artificial Sequence
  Description of Artificial Sequence: Synthetic oligonucleotide
guacagcacggugcgaugc

SEQ ID NO: 1115386 - RNA, 19 nt, Artificial Sequence
  Description of Artificial Sequence: Synthetic oligonucleotide
ugcacugaguuuggguuaa

SEQ ID NO: 1115387 - RNA, 19 nt, Artificial Sequence
  Description of Artificial Sequence: Synthetic oligonucleotide
cugagauuuccccaagaua

SEQ ID NO: 1115388 - RNA, 19 nt, Artificial Sequence
  Description of Artificial Sequence: Synthetic oligonucleotide
ccaagagaacugcaucccg

SEQ ID NO: 1115389 - RNA, 19 nt, Artificial Sequence
  Description of Artificial Sequence: Synthetic oligonucleotide
ugugaccaugcagcggaug

SEQ ID NO: 1115390 - RNA, 19 nt, Artificial Sequence
  Description of Artificial Sequence: Synthetic oligonucleotide
augagaaugcgcauuucuu

SEQ ID NO: 1115391 - RNA, 19 nt, Artificial Sequence
  Description of Artificial Sequence: Synthetic oligonucleotide
caagcacaaugcuauggaa

SEQ ID NO: 1115392 - RNA, 19 nt, Artificial Sequence
  Description of Artificial Sequence: Synthetic oligonucleotide
acaggugauccgauggacu

SEQ ID NO: 1115393 - RNA, 19 nt, Artificial Sequence
  Description of Artificial Sequence: Synthetic oligonucleotide
ccacuacgaaaaucaagcc

SEQ ID NO: 1115394 - RNA, 19 nt, Artificial Sequence
  Description of Artificial Sequence: Synthetic oligonucleotide
auaaaccaguucugagauu

SEQ ID NO: 1115395 - RNA, 19 nt, Artificial Sequence
  Description of Artificial Sequence: Synthetic oligonucleotide
cagcuagcauccucaugag

SEQ ID NO: 1115396 - RNA, 19 nt, Artificial Sequence
  Description of Artificial Sequence: Synthetic oligonucleotide
aguuccuguggcguagaga

SEQ ID NO: 1115397 - RNA, 19 nt, Artificial Sequence
  Description of Artificial Sequence: Synthetic oligonucleotide
ccauuacugcaaaaccuac

SEQ ID NO: 1115398 - RNA, 19 nt, Artificial Sequence
  Description of Artificial Sequence: Synthetic oligonucleotide
aggugauccgauggacuag

SEQ ID NO: 1115399 - RNA, 19 nt, Artificial Sequence
  Description of Artificial Sequence: Synthetic oligonucleotide
cuugcacgcgcuccugcug

SEQ ID NO: 1115400 - RNA, 19 nt, Artificial Sequence
  Description of Artificial Sequence: Synthetic oligonucleotide
ccccaagauaaauuuaaca

SEQ ID NO: 1115401 - RNA, 19 nt, Artificial Sequence
  Description of Artificial Sequence: Synthetic oligonucleotide
ggauacugacaccaguuua

SEQ ID NO: 1115402 - RNA, 19 nt, Artificial Sequence
  Description of Artificial Sequence: Synthetic oligonucleotide
ugcaccccacaauggcccc

SEQ ID NO: 1115403 - RNA, 19 nt, Artificial Sequence
  Description of Artificial Sequence: Synthetic oligonucleotide
cuauaauuacagugcuugu

SEQ ID NO: 1115404 - RNA, 19 nt, Artificial Sequence
  Description of Artificial Sequence: Synthetic oligonucleotide
uuucggccgcauucauggc

SEQ ID NO: 1115405 - RNA, 19 nt, Artificial Sequence
  Description of Artificial Sequence: Synthetic oligonucleotide
gcacguuugccacaugaga

SEQ ID NO: 1115406 - RNA, 19 nt, Artificial Sequence
  Description of Artificial Sequence: Synthetic oligonucleotide
caggugauccgauggacua

SEQ ID NO: 1115407 - RNA, 19 nt, Artificial Sequence
  Description of Artificial Sequence: Synthetic oligonucleotide
cccaauggcucccggaggc

SEQ ID NO: 1115408 - RNA, 19 nt, Artificial Sequence
  Description of Artificial Sequence: Synthetic oligonucleotide
ccacgacaccaaauaaacc

SEQ ID NO: 1115409 - RNA, 19 nt, Artificial Sequence
  Description of Artificial Sequence: Synthetic oligonucleotide
ccaugugagcacaaguaca

SEQ ID NO: 1115410 - RNA, 19 nt, Artificial Sequence
  Description of Artificial Sequence: Synthetic oligonucleotide
ccaaaucccuucucaguac

SEQ ID NO: 1115411 - RNA, 19 nt, Artificial Sequence
  Description of Artificial Sequence: Synthetic oligonucleotide
ggcaaaucggacccuugca

SEQ ID NO: 1115412 - RNA, 19 nt, Artificial Sequence
  Description of Artificial Sequence: Synthetic oligonucleotide
aggucgucuuucgauggca

SEQ ID NO: 1115413 - RNA, 19 nt, Artificial Sequence
  Description of Artificial Sequence: Synthetic oligonucleotide
accccuaggugaccaugug

SEQ ID NO: 1115414 - RNA, 19 nt, Artificial Sequence
  Description of Artificial Sequence: Synthetic oligonucleotide
caggaugugggucuggaau

SEQ ID NO: 1115415 - RNA, 19 nt, Artificial Sequence
  Description of Artificial Sequence: Synthetic oligonucleotide
ccaagugggcccaagagua

SEQ ID NO: 1115416 - RNA, 19 nt, Artificial Sequence
  Description of Artificial Sequence: Synthetic oligonucleotide
uuccuguggcguagagagu

SEQ ID NO: 1115417 - RNA, 19 nt, Artificial Sequence
  Description of Artificial Sequence: Synthetic oligonucleotide
cucaguacugacagugagu

SEQ ID NO: 1115418 - RNA, 19 nt, Artificial Sequence
  Description of Artificial Sequence: Synthetic oligonucleotide
caauuucacccagcuucag

SEQ ID NO: 1115419 - RNA, 19 nt, Artificial Sequence
  Description of Artificial Sequence: Synthetic oligonucleotide
ccuacacccaaaucccuuc

SEQ ID NO: 1115420 - RNA, 19 nt, Artificial Sequence
  Description of Artificial Sequence: Synthetic oligonucleotide
uaccaguuccuguggcgua

SEQ ID NO: 1115421 - RNA, 19 nt, Artificial Sequence
  Description of Artificial Sequence: Synthetic oligonucleotide
cagcgcguccaagugggcc

SEQ ID NO: 1115422 - RNA, 19 nt, Artificial Sequence
  Description of Artificial Sequence: Synthetic oligonucleotide
cugcgucugcacauguaca

SEQ ID NO: 1115423 - RNA, 19 nt, Artificial Sequence
  Description of Artificial Sequence: Synthetic oligonucleotide
caaaucccuucucaguacu

SEQ ID NO: 1115424 - RNA, 19 nt, Artificial Sequence
  Description of Artificial Sequence: Synthetic oligonucleotide
gguauguaggcugccaucu

SEQ ID NO: 1115425 - RNA, 19 nt, Artificial Sequence
  Description of Artificial Sequence: Synthetic oligonucleotide
agggcggagaggaggaagu

SEQ ID NO: 1115426 - RNA, 19 nt, Artificial Sequence
  Description of Artificial Sequence: Synthetic oligonucleotide
agaaacugccucaguggaa

SEQ ID NO: 1115427 - RNA, 19 nt, Artificial Sequence
  Description of Artificial Sequence: Synthetic oligonucleotide
acgcgcuccugcuggugag

SEQ ID NO: 1115428 - RNA, 19 nt, Artificial Sequence
  Description of Artificial Sequence: Synthetic oligonucleotide
agaguaagcuggguaugua

SEQ ID NO: 1115429 - RNA, 19 nt, Artificial Sequence
  Description of Artificial Sequence: Synthetic oligonucleotide
gccccuacacccaaauccc

SEQ ID NO: 1115430 - RNA, 19 nt, Artificial Sequence
  Description of Artificial Sequence: Synthetic oligonucleotide
agucgcacguuugccacau

SEQ ID NO: 1115431 - RNA, 19 nt, Artificial Sequence
  Description of Artificial Sequence: Synthetic oligonucleotide
ggugcgaugcacacuguga

SEQ ID NO: 1115432 - RNA, 19 nt, Artificial Sequence
  Description of Artificial Sequence: Synthetic oligonucleotide
ccuaggugaccaugugagc

SEQ ID NO: 1115433 - RNA, 19 nt, Artificial Sequence
  Description of Artificial Sequence: Synthetic oligonucleotide
agcuauaauuacagugcuu

SEQ ID NO: 1115434 - RNA, 19 nt, Artificial Sequence
  Description of Artificial Sequence: Synthetic oligonucleotide
ggguauguaggcugccauc

SEQ ID NO: 1115435 - RNA, 19 nt, Artificial Sequence
  Description of Artificial Sequence: Synthetic oligonucleotide
uggugagacccaggccucc

SEQ ID NO: 1115436 - RNA, 19 nt, Artificial Sequence
  Description of Artificial Sequence: Synthetic oligonucleotide
gagucgcacguuugccaca

SEQ ID NO: 1115437 - RNA, 19 nt, Artificial Sequence
  Description of Artificial Sequence: Synthetic oligonucleotide
gccucauucacacgcucuc

SEQ ID NO: 1115438 - RNA, 19 nt, Artificial Sequence
  Description of Artificial Sequence: Synthetic oligonucleotide
gcuugucgaaaugaaaacu

SEQ ID NO: 1115439 - RNA, 19 nt, Artificial Sequence
  Description of Artificial Sequence: Synthetic oligonucleotide
gucgucuuucgauggcaaa

SEQ ID NO: 1115440 - RNA, 19 nt, Artificial Sequence
  Description of Artificial Sequence: Synthetic oligonucleotide
gccauuacugcaaaaccua

SEQ ID NO: 1115441 - RNA, 19 nt, Artificial Sequence
  Description of Artificial Sequence: Synthetic oligonucleotide
agccaaccccuaggugacc

SEQ ID NO: 1115442 - RNA, 19 nt, Artificial Sequence
  Description of Artificial Sequence: Synthetic oligonucleotide
gcccaauggcucccggagg

SEQ ID NO: 1115443 - RNA, 19 nt, Artificial Sequence
  Description of Artificial Sequence: Synthetic oligonucleotide
caaguguucuuguccugua

SEQ ID NO: 1115444 - RNA, 19 nt, Artificial Sequence
  Description of Artificial Sequence: Synthetic oligonucleotide
cacgggccucauucacacg

SEQ ID NO: 1115445 - RNA, 19 nt, Artificial Sequence
  Description of Artificial Sequence: Synthetic oligonucleotide
aggcccugcaccccacaau

SEQ ID NO: 1115446 - RNA, 19 nt, Artificial Sequence
  Description of Artificial Sequence: Synthetic oligonucleotide
caguuuguauagaauuguu

SEQ ID NO: 1115447 - RNA, 19 nt, Artificial Sequence
  Description of Artificial Sequence: Synthetic oligonucleotide
ccaagaguaagcuggguau

SEQ ID NO: 1115448 - RNA, 19 nt, Artificial Sequence
  Description of Artificial Sequence: Synthetic oligonucleotide
caagugggcccaagaguaa

SEQ ID NO: 1115449 - RNA, 19 nt, Artificial Sequence
  Description of Artificial Sequence: Synthetic oligonucleotide
ccgauggacuagcauucag

SEQ ID NO: 1115450 - RNA, 19 nt, Artificial Sequence
  Description of Artificial Sequence: Synthetic oligonucleotide
gcuauggaaugcaggugac

SEQ ID NO: 1115451 - RNA, 19 nt, Artificial Sequence
  Description of Artificial Sequence: Synthetic oligonucleotide
cagcggauggugguuuguc

SEQ ID NO: 1115452 - RNA, 19 nt, Artificial Sequence
  Description of Artificial Sequence: Synthetic oligonucleotide
cagcacggugcgaugcaca

SEQ ID NO: 1115453 - RNA, 19 nt, Artificial Sequence
  Description of Artificial Sequence: Synthetic oligonucleotide
cauagagcccauccccacu

SEQ ID NO: 1115454 - RNA, 19 nt, Artificial Sequence
  Description of Artificial Sequence: Synthetic oligonucleotide
ggaaucguggucacaauuu

SEQ ID NO: 1115455 - RNA, 19 nt, Artificial Sequence
  Description of Artificial Sequence: Synthetic oligonucleotide
cgcacguuugccacaugag

SEQ ID NO: 1115456 - RNA, 19 nt, Artificial Sequence
  Description of Artificial Sequence: Synthetic oligonucleotide
acacugugaccaacccaug

SEQ ID NO: 1115457 - RNA, 19 nt, Artificial Sequence
  Description of Artificial Sequence: Synthetic oligonucleotide
gauggcaaaucggacccuu

SEQ ID NO: 1115458 - RNA, 19 nt, Artificial Sequence
  Description of Artificial Sequence: Synthetic oligonucleotide
agguuccacgacaccaaau

SEQ ID NO: 1115459 - RNA, 19 nt, Artificial Sequence
  Description of Artificial Sequence: Synthetic oligonucleotide
gcgauacuggccagagacc

SEQ ID NO: 1115460 - RNA, 19 nt, Artificial Sequence
  Description of Artificial Sequence: Synthetic oligonucleotide
aaccuacacuaggcauagu

SEQ ID NO: 1115461 - RNA, 19 nt, Artificial Sequence
  Description of Artificial Sequence: Synthetic oligonucleotide
ccacagagucgcacguuug

SEQ ID NO: 1115462 - RNA, 19 nt, Artificial Sequence
  Description of Artificial Sequence: Synthetic oligonucleotide
gugccccuacacccaaauc

SEQ ID NO: 1115463 - RNA, 19 nt, Artificial Sequence
  Description of Artificial Sequence: Synthetic oligonucleotide
cuacacccaaaucccuucu

SEQ ID NO: 1115464 - RNA, 19 nt, Artificial Sequence
  Description of Artificial Sequence: Synthetic oligonucleotide
ccaugcuuguggacaggug

SEQ ID NO: 1115465 - RNA, 19 nt, Artificial Sequence
  Description of Artificial Sequence: Synthetic oligonucleotide
cccaagaguaagcugggua

SEQ ID NO: 1115466 - RNA, 19 nt, Artificial Sequence
  Description of Artificial Sequence: Synthetic oligonucleotide
ggacccuugcaggcugagg

SEQ ID NO: 1115467 - RNA, 19 nt, Artificial Sequence
  Description of Artificial Sequence: Synthetic oligonucleotide
ggcccggccacacaccaaa

SEQ ID NO: 1115468 - RNA, 19 nt, Artificial Sequence
  Description of Artificial Sequence: Synthetic oligonucleotide
gggaaucguggucacaauu

SEQ ID NO: 1115469 - RNA, 19 nt, Artificial Sequence
  Description of Artificial Sequence: Synthetic oligonucleotide
gugggcccaagaguaagcu

SEQ ID NO: 1115470 - RNA, 19 nt, Artificial Sequence
  Description of Artificial Sequence: Synthetic oligonucleotide
acaccaguuuacagcccaa

SEQ ID NO: 1115471 - RNA, 19 nt, Artificial Sequence
  Description of Artificial Sequence: Synthetic oligonucleotide
cgucuuucgauggcaaauc

SEQ ID NO: 1115472 - RNA, 19 nt, Artificial Sequence
  Description of Artificial Sequence: Synthetic oligonucleotide
ggcggagaggaggaaguaa

SEQ ID NO: 1115473 - RNA, 19 nt, Artificial Sequence
  Description of Artificial Sequence: Synthetic oligonucleotide
ggaccacagagucgcacgu

SEQ ID NO: 1115474 - RNA, 19 nt, Artificial Sequence
  Description of Artificial Sequence: Synthetic oligonucleotide
gucgcacguuugccacaug

SEQ ID NO: 1115475 - RNA, 19 nt, Artificial Sequence
  Description of Artificial Sequence: Synthetic oligonucleotide
ggucgucuuucgauggcaa

SEQ ID NO: 1115476 - RNA, 19 nt, Artificial Sequence
  Description of Artificial Sequence: Synthetic oligonucleotide
cagcuugcacgcgcuccug

SEQ ID NO: 1115477 - RNA, 19 nt, Artificial Sequence
  Description of Artificial Sequence: Synthetic oligonucleotide
cuguucccauaggggaaca

SEQ ID NO: 1115478 - RNA, 19 nt, Artificial Sequence
  Description of Artificial Sequence: Synthetic oligonucleotide
ccccuaggugaccauguga

SEQ ID NO: 1115479 - RNA, 19 nt, Artificial Sequence
  Description of Artificial Sequence: Synthetic oligonucleotide
ggugccccuacacccaaau

SEQ ID NO: 1115480 - RNA, 19 nt, Artificial Sequence
  Description of Artificial Sequence: Synthetic oligonucleotide
caggugccccuacacccaa

SEQ ID NO: 1115481 - RNA, 19 nt, Artificial Sequence
  Description of Artificial Sequence: Synthetic oligonucleotide
ccuugcaggcugagggaga

SEQ ID NO: 1115482 - RNA, 19 nt, Artificial Sequence
  Description of Artificial Sequence: Synthetic oligonucleotide
gcuugcacgcgcuccugcu

SEQ ID NO: 1115483 - RNA, 19 nt, Artificial Sequence
  Description of Artificial Sequence: Synthetic oligonucleotide
caaccaccaaauggauacu

SEQ ID NO: 1115484 - RNA, 19 nt, Artificial Sequence
  Description of Artificial Sequence: Synthetic oligonucleotide
ggaguaccagaaacugccu

SEQ ID NO: 1115485 - RNA, 19 nt, Artificial Sequence
  Description of Artificial Sequence: Synthetic oligonucleotide
caugcagcggauggugguu

SEQ ID NO: 1115486 - RNA, 19 nt, Artificial Sequence
  Description of Artificial Sequence: Synthetic oligonucleotide
acggugcgaugcacacugu

SEQ ID NO: 1115487 - RNA, 19 nt, Artificial Sequence
  Description of Artificial Sequence: Synthetic oligonucleotide
gcgcuccugcuggugagac

SEQ ID NO: 1115488 - RNA, 19 nt, Artificial Sequence
  Description of Artificial Sequence: Synthetic oligonucleotide
gcguccaagugggcccaag

SEQ ID NO: 1115489 - RNA, 19 nt, Artificial Sequence
  Description of Artificial Sequence: Synthetic oligonucleotide
ccaacccauggagacagcu

SEQ ID NO: 1115490 - RNA, 19 nt, Artificial Sequence
  Description of Artificial Sequence: Synthetic oligonucleotide
gcugagggagaaagcuacu

SEQ ID NO: 1115491 - RNA, 19 nt, Artificial Sequence
  Description of Artificial Sequence: Synthetic oligonucleotide
ggacugacccucccagcuu

SEQ ID NO: 1115492 - RNA, 19 nt, Artificial Sequence
  Description of Artificial Sequence: Synthetic oligonucleotide
cacuaggcauagucuccuu

SEQ ID NO: 1115493 - RNA, 19 nt, Artificial Sequence
  Description of Artificial Sequence: Synthetic oligonucleotide
aggugccccuacacccaaa

SEQ ID NO: 1115494 - RNA, 19 nt, Artificial Sequence
  Description of Artificial Sequence: Synthetic oligonucleotide
cugugaccaugcagcggau

SEQ ID NO: 1115495 - RNA, 19 nt, Artificial Sequence
  Description of Artificial Sequence: Synthetic oligonucleotide
cccggccacacaccaaaua

SEQ ID NO: 1115496 - RNA, 19 nt, Artificial Sequence
  Description of Artificial Sequence: Synthetic oligonucleotide
cccuacacccaaaucccuu

SEQ ID NO: 1115497 - RNA, 19 nt, Artificial Sequence
  Description of Artificial Sequence: Synthetic oligonucleotide
gggcggagaggaggaagua

SEQ ID NO: 1115498 - RNA, 19 nt, Artificial Sequence
  Description of Artificial Sequence: Synthetic oligonucleotide
ggggaacaggugauccgau

SEQ ID NO: 1115499 - RNA, 19 nt, Artificial Sequence
  Description of Artificial Sequence: Synthetic oligonucleotide
gcgcguccaagugggccca

SEQ ID NO: 1115500 - RNA, 19 nt, Artificial Sequence
  Description of Artificial Sequence: Synthetic oligonucleotide
gcagcggauggugguuugu

SEQ ID NO: 1115501 - RNA, 19 nt, Artificial Sequence
  Description of Artificial Sequence: Synthetic oligonucleotide
ggggcucuacugugaccau

SEQ ID NO: 1115502 - RNA, 19 nt, Artificial Sequence
  Description of Artificial Sequence: Synthetic oligonucleotide
gcacggugcgaugcacacu

SEQ ID NO: 1115503 - RNA, 19 nt, Artificial Sequence
  Description of Artificial Sequence: Synthetic oligonucleotide
cgcgcuccugcuggugaga

SEQ ID NO: 1115504 - RNA, 19 nt, Artificial Sequence
  Description of Artificial Sequence: Synthetic oligonucleotide
cccacacggugaagcugau

SEQ ID NO: 1115505 - RNA, 19 nt, Artificial Sequence
  Description of Artificial Sequence: Synthetic oligonucleotide
cgauggcaaaucggacccu

SEQ ID NO: 1115506 - RNA, 19 nt, Artificial Sequence
  Description of Artificial Sequence: Synthetic oligonucleotide
gcccggccacacaccaaau

SEQ ID NO: 1115507 - RNA, 19 nt, Artificial Sequence
  Description of Artificial Sequence: Synthetic oligonucleotide
cgcguccaagugggcccaa

SEQ ID NO: 1115508 - RNA, 19 nt, Artificial Sequence
  Description of Artificial Sequence: Synthetic oligonucleotide
aaagauuuugugaacaucc

SEQ ID NO: 1115509 - RNA, 19 nt, Artificial Sequence
  Description of Artificial Sequence: Synthetic oligonucleotide
auagcaauaggccagaagg

SEQ ID NO: 1115510 - RNA, 19 nt, Artificial Sequence
  Description of Artificial Sequence: Synthetic oligonucleotide
ugaaaugacgauaaagugg

SEQ ID NO: 1115511 - RNA, 19 nt, Artificial Sequence
  Description of Artificial Sequence: Synthetic oligonucleotide
aaggaugucaacuaaacug

SEQ ID NO: 1115512 - RNA, 19 nt, Artificial Sequence
  Description of Artificial Sequence: Synthetic oligonucleotide
uuuauagugucucuguagg

SEQ ID NO: 1115513 - RNA, 19 nt, Artificial Sequence
  Description of Artificial Sequence: Synthetic oligonucleotide
aaguguuaaucucagaaag

SEQ ID NO: 1115514 - RNA, 19 nt, Artificial Sequence
  Description of Artificial Sequence: Synthetic oligonucleotide
aggagugaaaucuggaucc

SEQ ID NO: 1115515 - RNA, 19 nt, Artificial Sequence
  Description of Artificial Sequence: Synthetic oligonucleotide
uauuucauagcaauaggcc

SEQ ID NO: 1115516 - RNA, 19 nt, Artificial Sequence
  Description of Artificial Sequence: Synthetic oligonucleotide
uuucuaauaguccacgcag

SEQ ID NO: 1115517 - RNA, 19 nt, Artificial Sequence
  Description of Artificial Sequence: Synthetic oligonucleotide
uaaaacugcacucuuaccu

SEQ ID NO: 1115518 - RNA, 19 nt, Artificial Sequence
  Description of Artificial Sequence: Synthetic oligonucleotide
acuguaguacacuugacgg

SEQ ID NO: 1115519 - RNA, 19 nt, Artificial Sequence
  Description of Artificial Sequence: Synthetic oligonucleotide
auccuuaauaucaauaacc

SEQ ID NO: 1115520 - RNA, 19 nt, Artificial Sequence
  Description of Artificial Sequence: Synthetic oligonucleotide
uuaaucucagaaaguacgg

SEQ ID NO: 1115521 - RNA, 19 nt, Artificial Sequence
  Description of Artificial Sequence: Synthetic oligonucleotide
uuuaaaacugcacucuuac

SEQ ID NO: 1115522 - RNA, 19 nt, Artificial Sequence
  Description of Artificial Sequence: Synthetic oligonucleotide
auuucaugaacgucugucc

SEQ ID NO: 1115523 - RNA, 19 nt, Artificial Sequence
  Description of Artificial Sequence: Synthetic oligonucleotide
guuaaucucagaaaguacg

SEQ ID NO: 1115524 - RNA, 19 nt, Artificial Sequence
  Description of Artificial Sequence: Synthetic oligonucleotide
agugacacguauuucauag

SEQ ID NO: 1115525 - RNA, 19 nt, Artificial Sequence
  Description of Artificial Sequence: Synthetic oligonucleotide
augacgauaaaguggauag

SEQ ID NO: 1115526 - RNA, 19 nt, Artificial Sequence
  Description of Artificial Sequence: Synthetic oligonucleotide
aagacacuaaugcagcauc

SEQ ID NO: 1115527 - RNA, 19 nt, Artificial Sequence
  Description of Artificial Sequence: Synthetic oligonucleotide
uaauaguccacgcagacuc

SEQ ID NO: 1115528 - RNA, 19 nt, Artificial Sequence
  Description of Artificial Sequence: Synthetic oligonucleotide
uccucuaucagacggagcc

SEQ ID NO: 1115529 - RNA, 19 nt, Artificial Sequence
  Description of Artificial Sequence: Synthetic oligonucleotide
ucaacuaaacuguaguaca

SEQ ID NO: 1115530 - RNA, 19 nt, Artificial Sequence
  Description of Artificial Sequence: Synthetic oligonucleotide
auaucaauaaccucacuca

SEQ ID NO: 1115531 - RNA, 19 nt, Artificial Sequence
  Description of Artificial Sequence: Synthetic oligonucleotide
uagagaucauucaaaauga

SEQ ID NO: 1115532 - RNA, 19 nt, Artificial Sequence
  Description of Artificial Sequence: Synthetic oligonucleotide
aguuaacauguucagcccc

SEQ ID NO: 1115533 - RNA, 19 nt, Artificial Sequence
  Description of Artificial Sequence: Synthetic oligonucleotide
uaaauagugauccgaguca

SEQ ID NO: 1115534 - RNA, 19 nt, Artificial Sequence
  Description of Artificial Sequence: Synthetic oligonucleotide
aaucucagaaaguacggcu

SEQ ID NO: 1115535 - RNA, 19 nt, Artificial Sequence
  Description of Artificial Sequence: Synthetic oligonucleotide
aggcguggaaaucugaagc

SEQ ID NO: 1115536 - RNA, 19 nt, Artificial Sequence
  Description of Artificial Sequence: Synthetic oligonucleotide
ugcacucuuaccuaguugc

SEQ ID NO: 1115537 - RNA, 19 nt, Artificial Sequence
  Description of Artificial Sequence: Synthetic oligonucleotide
uugaaaugacgauaaagug

SEQ ID NO: 1115538 - RNA, 19 nt, Artificial Sequence
  Description of Artificial Sequence: Synthetic oligonucleotide
uucagugacacguauuuca

SEQ ID NO: 1115539 - RNA, 19 nt, Artificial Sequence
  Description of Artificial Sequence: Synthetic oligonucleotide
uacacgucgaacucggagg

SEQ ID NO: 1115540 - RNA, 19 nt, Artificial Sequence
  Description of Artificial Sequence: Synthetic oligonucleotide
gaaaugacgauaaagugga

SEQ ID NO: 1115541 - RNA, 19 nt, Artificial Sequence
  Description of Artificial Sequence: Synthetic oligonucleotide
uagaacuugaaguccaccc

SEQ ID NO: 1115542 - RNA, 19 nt, Artificial Sequence
  Description of Artificial Sequence: Synthetic oligonucleotide
ugauccgagucaaauuugg

SEQ ID NO: 1115543 - RNA, 19 nt, Artificial Sequence
  Description of Artificial Sequence: Synthetic oligonucleotide
uaggcuuucaucaccagcu

SEQ ID NO: 1115544 - RNA, 19 nt, Artificial Sequence
  Description of Artificial Sequence: Synthetic oligonucleotide
ucucuguaggcuuucauca

SEQ ID NO: 1115545 - RNA, 19 nt, Artificial Sequence
  Description of Artificial Sequence: Synthetic oligonucleotide
ugacacguauuucauagca

SEQ ID NO: 1115546 - RNA, 19 nt, Artificial Sequence
  Description of Artificial Sequence: Synthetic oligonucleotide
ucaauaaccucacucaguu

SEQ ID NO: 1115547 - RNA, 19 nt, Artificial Sequence
  Description of Artificial Sequence: Synthetic oligonucleotide
uccgagucaaauuuggcca

SEQ ID NO: 1115548 - RNA, 19 nt, Artificial Sequence
  Description of Artificial Sequence: Synthetic oligonucleotide
uccugaaagauuuugugaa

SEQ ID NO: 1115549 - RNA, 19 nt, Artificial Sequence
  Description of Artificial Sequence: Synthetic oligonucleotide
ugugcaucauuccaccaag

SEQ ID NO: 1115550 - RNA, 19 nt, Artificial Sequence
  Description of Artificial Sequence: Synthetic oligonucleotide
ucuucguucagucgcagga

SEQ ID NO: 1115551 - RNA, 19 nt, Artificial Sequence
  Description of Artificial Sequence: Synthetic oligonucleotide
agaaaguacggcuuggcgu

SEQ ID NO: 1115552 - RNA, 19 nt, Artificial Sequence
  Description of Artificial Sequence: Synthetic oligonucleotide
gacgauguggugcuguccg

SEQ ID NO: 1115553 - RNA, 19 nt, Artificial Sequence
  Description of Artificial Sequence: Synthetic oligonucleotide
auuuugugaacauccagga

SEQ ID NO: 1115554 - RNA, 19 nt, Artificial Sequence
  Description of Artificial Sequence: Synthetic oligonucleotide
acuaaugcagcaucaucuc

SEQ ID NO: 1115555 - RNA, 19 nt, Artificial Sequence
  Description of Artificial Sequence: Synthetic oligonucleotide
ugaacgucuguccaagucu

SEQ ID NO: 1115556 - RNA, 19 nt, Artificial Sequence
  Description of Artificial Sequence: Synthetic oligonucleotide
uuaaucugcaucauagguu

SEQ ID NO: 1115557 - RNA, 19 nt, Artificial Sequence
  Description of Artificial Sequence: Synthetic oligonucleotide
ucugagaccucuucauagg

SEQ ID NO: 1115558 - RNA, 19 nt, Artificial Sequence
  Description of Artificial Sequence: Synthetic oligonucleotide
aaacuccgaauccucauca

SEQ ID NO: 1115559 - RNA, 19 nt, Artificial Sequence
  Description of Artificial Sequence: Synthetic oligonucleotide
uacggcuuggcguagaacu

SEQ ID NO: 1115560 - RNA, 19 nt, Artificial Sequence
  Description of Artificial Sequence: Synthetic oligonucleotide
uguuaaucucagaaaguac

SEQ ID NO: 1115561 - RNA, 19 nt, Artificial Sequence
  Description of Artificial Sequence: Synthetic oligonucleotide
ucuaauaguccacgcagac

SEQ ID NO: 1115562 - RNA, 19 nt, Artificial Sequence
  Description of Artificial Sequence: Synthetic oligonucleotide
uuucaugaacgucugucca

SEQ ID NO: 1115563 - RNA, 19 nt, Artificial Sequence
  Description of Artificial Sequence: Synthetic oligonucleotide
uccuugggcaaucgaaugg

SEQ ID NO: 1115564 - RNA, 19 nt, Artificial Sequence
  Description of Artificial Sequence: Synthetic oligonucleotide
cuugaaaugacgauaaagu

SEQ ID NO: 1115565 - RNA, 19 nt, Artificial Sequence
  Description of Artificial Sequence: Synthetic oligonucleotide
aaacugcacucuuaccuag

SEQ ID NO: 1115566 - RNA, 19 nt, Artificial Sequence
  Description of Artificial Sequence: Synthetic oligonucleotide
guauuucauagcaauaggc

SEQ ID NO: 1115567 - RNA, 19 nt, Artificial Sequence
  Description of Artificial Sequence: Synthetic oligonucleotide
uuccugaaagauuuuguga

SEQ ID NO: 1115568 - RNA, 19 nt, Artificial Sequence
  Description of Artificial Sequence: Synthetic oligonucleotide
acguauuucauagcaauag

SEQ ID NO: 1115569 - RNA, 19 nt, Artificial Sequence
  Description of Artificial Sequence: Synthetic oligonucleotide
agaaggaugucaacuaaac

SEQ ID NO: 1115570 - RNA, 19 nt, Artificial Sequence
  Description of Artificial Sequence: Synthetic oligonucleotide
uccuugaugagcagggcgc

SEQ ID NO: 1115571 - RNA, 19 nt, Artificial Sequence
  Description of Artificial Sequence: Synthetic oligonucleotide
agugauccgagucaaauuu

SEQ ID NO: 1115572 - RNA, 19 nt, Artificial Sequence
  Description of Artificial Sequence: Synthetic oligonucleotide
aaggacuguacuucaaaau

SEQ ID NO: 1115573 - RNA, 19 nt, Artificial Sequence
  Description of Artificial Sequence: Synthetic oligonucleotide
aguggauagcacaaaacuc

SEQ ID NO: 1115574 - RNA, 19 nt, Artificial Sequence
  Description of Artificial Sequence: Synthetic oligonucleotide
aaaacugcacucuuaccua

SEQ ID NO: 1115575 - RNA, 19 nt, Artificial Sequence
  Description of Artificial Sequence: Synthetic oligonucleotide
uugcaguaucuuuauagug

SEQ ID NO: 1115576 - RNA, 19 nt, Artificial Sequence
  Description of Artificial Sequence: Synthetic oligonucleotide
acacgucgaacucggaggc

SEQ ID NO: 1115577 - RNA, 19 nt, Artificial Sequence
  Description of Artificial Sequence: Synthetic oligonucleotide
accgcugaaccacaccugc

SEQ ID NO: 1115578 - RNA, 19 nt, Artificial Sequence
  Description of Artificial Sequence: Synthetic oligonucleotide
uauagugucucuguaggcu

SEQ ID NO: 1115579 - RNA, 19 nt, Artificial Sequence
  Description of Artificial Sequence: Synthetic oligonucleotide
augaacgucuguccaaguc

SEQ ID NO: 1115580 - RNA, 19 nt, Artificial Sequence
  Description of Artificial Sequence: Synthetic oligonucleotide
uuaaaacugcacucuuacc

SEQ ID NO: 1115581 - RNA, 19 nt, Artificial Sequence
  Description of Artificial Sequence: Synthetic oligonucleotide
acacuaaugcagcaucauc

SEQ ID NO: 1115582 - RNA, 19 nt, Artificial Sequence
  Description of Artificial Sequence: Synthetic oligonucleotide
uugacugacuucacauucc

SEQ ID NO: 1115583 - RNA, 19 nt, Artificial Sequence
  Description of Artificial Sequence: Synthetic oligonucleotide
gacgauaaaguggauagca

SEQ ID NO: 1115584 - RNA, 19 nt, Artificial Sequence
  Description of Artificial Sequence: Synthetic oligonucleotide
auacgcaguagucugagau

SEQ ID NO: 1115585 - RNA, 19 nt, Artificial Sequence
  Description of Artificial Sequence: Synthetic oligonucleotide
cucagcuuucuaauagucc

SEQ ID NO: 1115586 - RNA, 19 nt, Artificial Sequence
  Description of Artificial Sequence: Synthetic oligonucleotide
ugcaugugcaucauuccac

SEQ ID NO: 1115587 - RNA, 19 nt, Artificial Sequence
  Description of Artificial Sequence: Synthetic oligonucleotide
acaccaggauuucaugaac

SEQ ID NO: 1115588 - RNA, 19 nt, Artificial Sequence
  Description of Artificial Sequence: Synthetic oligonucleotide
uaucuuuauagugucucug

SEQ ID NO: 1115589 - RNA, 19 nt, Artificial Sequence
  Description of Artificial Sequence: Synthetic oligonucleotide
agggagucugcucaauuuc

SEQ ID NO: 1115590 - RNA, 19 nt, Artificial Sequence
  Description of Artificial Sequence: Synthetic oligonucleotide
cuaaacuguaguacacuug

SEQ ID NO: 1115591 - RNA, 19 nt, Artificial Sequence
  Description of Artificial Sequence: Synthetic oligonucleotide
uuauagugucucuguaggc

SEQ ID NO: 1115592 - RNA, 19 nt, Artificial Sequence
  Description of Artificial Sequence: Synthetic oligonucleotide
uucuaauaguccacgcaga

SEQ ID NO: 1115593 - RNA, 19 nt, Artificial Sequence
  Description of Artificial Sequence: Synthetic oligonucleotide
agcaguuaacauguucagc

SEQ ID NO: 1115594 - RNA, 19 nt, Artificial Sequence
  Description of Artificial Sequence: Synthetic oligonucleotide
aaguacacgucgaacucgg

SEQ ID NO: 1115595 - RNA, 19 nt, Artificial Sequence
  Description of Artificial Sequence: Synthetic oligonucleotide
caccaggauuucaugaacg

SEQ ID NO: 1115596 - RNA, 19 nt, Artificial Sequence
  Description of Artificial Sequence: Synthetic oligonucleotide
uuaccuaguugcaguaucu

SEQ ID NO: 1115597 - RNA, 19 nt, Artificial Sequence
  Description of Artificial Sequence: Synthetic oligonucleotide
aaugacgauaaaguggaua

SEQ ID NO: 1115598 - RNA, 19 nt, Artificial Sequence
  Description of Artificial Sequence: Synthetic oligonucleotide
acacguauuucauagcaau

SEQ ID NO: 1115599 - RNA, 19 nt, Artificial Sequence
  Description of Artificial Sequence: Synthetic oligonucleotide
ucuccuuucucuuggcucu

SEQ ID NO: 1115600 - RNA, 19 nt, Artificial Sequence
  Description of Artificial Sequence: Synthetic oligonucleotide
auccauacgcaguagucug

SEQ ID NO: 1115601 - RNA, 19 nt, Artificial Sequence
  Description of Artificial Sequence: Synthetic oligonucleotide
aagcaccuauuucuuccac

SEQ ID NO: 1115602 - RNA, 19 nt, Artificial Sequence
  Description of Artificial Sequence: Synthetic oligonucleotide
ugcaucauagguucccugu

SEQ ID NO: 1115603 - RNA, 19 nt, Artificial Sequence
  Description of Artificial Sequence: Synthetic oligonucleotide
gucaacuaaacuguaguac

SEQ ID NO: 1115604 - RNA, 19 nt, Artificial Sequence
  Description of Artificial Sequence: Synthetic oligonucleotide
gauagcacaaaacucuccu

SEQ ID NO: 1115605 - RNA, 19 nt, Artificial Sequence
  Description of Artificial Sequence: Synthetic oligonucleotide
ugaaagauuuugugaacau

SEQ ID NO: 1115606 - RNA, 19 nt, Artificial Sequence
  Description of Artificial Sequence: Synthetic oligonucleotide
auguagagaucauucaaaa

SEQ ID NO: 1115607 - RNA, 19 nt, Artificial Sequence
  Description of Artificial Sequence: Synthetic oligonucleotide
agcagguaagacuuauuca

SEQ ID NO: 1115608 - RNA, 19 nt, Artificial Sequence
  Description of Artificial Sequence: Synthetic oligonucleotide
aaaaugaacgcugggucau

SEQ ID NO: 1115609 - RNA, 19 nt, Artificial Sequence
  Description of Artificial Sequence: Synthetic oligonucleotide
ugaacauccaggagacacu

SEQ ID NO: 1115610 - RNA, 19 nt, Artificial Sequence
  Description of Artificial Sequence: Synthetic oligonucleotide
cucgcagguuuccaaaucc

SEQ ID NO: 1115611 - RNA, 19 nt, Artificial Sequence
  Description of Artificial Sequence: Synthetic oligonucleotide
acucuuaccuaguugcagu

SEQ ID NO: 1115612 - RNA, 19 nt, Artificial Sequence
  Description of Artificial Sequence: Synthetic oligonucleotide
uguagagaucauucaaaau

SEQ ID NO: 1115613 - RNA, 19 nt, Artificial Sequence
  Description of Artificial Sequence: Synthetic oligonucleotide
agucgcaggagugaaaucu

SEQ ID NO: 1115614 - RNA, 19 nt, Artificial Sequence
  Description of Artificial Sequence: Synthetic oligonucleotide
aaauagugauccgagucaa

SEQ ID NO: 1115615 - RNA, 19 nt, Artificial Sequence
  Description of Artificial Sequence: Synthetic oligonucleotide
gaaaguacggcuuggcgua

SEQ ID NO: 1115616 - RNA, 19 nt, Artificial Sequence
  Description of Artificial Sequence: Synthetic oligonucleotide
ucuuuauagugucucugua

SEQ ID NO: 1115617 - RNA, 19 nt, Artificial Sequence
  Description of Artificial Sequence: Synthetic oligonucleotide
cagaaaguacggcuuggcg

SEQ ID NO: 1115618 - RNA, 19 nt, Artificial Sequence
  Description of Artificial Sequence: Synthetic oligonucleotide
gugaacauccaggagacac

SEQ ID NO: 1115619 - RNA, 19 nt, Artificial Sequence
  Description of Artificial Sequence: Synthetic oligonucleotide
guacacgucgaacucggag

SEQ ID NO: 1115620 - RNA, 19 nt, Artificial Sequence
  Description of Artificial Sequence: Synthetic oligonucleotide
ugucaacuaaacuguagua

SEQ ID NO: 1115621 - RNA, 19 nt, Artificial Sequence
  Description of Artificial Sequence: Synthetic oligonucleotide
uucccagucaaacuccgaa

SEQ ID NO: 1115622 - RNA, 19 nt, Artificial Sequence
  Description of Artificial Sequence: Synthetic oligonucleotide
uacaauccuuccaggaagu

SEQ ID NO: 1115623 - RNA, 19 nt, Artificial Sequence
  Description of Artificial Sequence: Synthetic oligonucleotide
ucgcaggagugaaaucugg

SEQ ID NO: 1115624 - RNA, 19 nt, Artificial Sequence
  Description of Artificial Sequence: Synthetic oligonucleotide
aggaugucaacuaaacugu

SEQ ID NO: 1115625 - RNA, 19 nt, Artificial Sequence
  Description of Artificial Sequence: Synthetic oligonucleotide
ugcaugggauugcacuggg

SEQ ID NO: 1115626 - RNA, 19 nt, Artificial Sequence
  Description of Artificial Sequence: Synthetic oligonucleotide
cuuaccuaguugcaguauc

SEQ ID NO: 1115627 - RNA, 19 nt, Artificial Sequence
  Description of Artificial Sequence: Synthetic oligonucleotide
uccaagucucaaaccagca

SEQ ID NO: 1115628 - RNA, 19 nt, Artificial Sequence
  Description of Artificial Sequence: Synthetic oligonucleotide
agcuuucuaauaguccacg

SEQ ID NO: 1115629 - RNA, 19 nt, Artificial Sequence
  Description of Artificial Sequence: Synthetic oligonucleotide
ugaaaucuggauccuuaau

SEQ ID NO: 1115630 - RNA, 19 nt, Artificial Sequence
  Description of Artificial Sequence: Synthetic oligonucleotide
agcuaaauagugauccgag

SEQ ID NO: 1115631 - RNA, 19 nt, Artificial Sequence
  Description of Artificial Sequence: Synthetic oligonucleotide
aaacuguaguacacuugac

SEQ ID NO: 1115632 - RNA, 19 nt, Artificial Sequence
  Description of Artificial Sequence: Synthetic oligonucleotide
cauagcaauaggccagaag

SEQ ID NO: 1115633 - RNA, 19 nt, Artificial Sequence
  Description of Artificial Sequence: Synthetic oligonucleotide
uggcguagaacuugaaguc

SEQ ID NO: 1115634 - RNA, 19 nt, Artificial Sequence
  Description of Artificial Sequence: Synthetic oligonucleotide
ugucagacgauguggugcu

SEQ ID NO: 1115635 - RNA, 19 nt, Artificial Sequence
  Description of Artificial Sequence: Synthetic oligonucleotide
caaaguacacgucgaacuc

SEQ ID NO: 1115636 - RNA, 19 nt, Artificial Sequence
  Description of Artificial Sequence: Synthetic oligonucleotide
cuggccaggaguuuccuug

SEQ ID NO: 1115637 - RNA, 19 nt, Artificial Sequence
  Description of Artificial Sequence: Synthetic oligonucleotide
uacgcaguagucugagaug

SEQ ID NO: 1115638 - RNA, 19 nt, Artificial Sequence
  Description of Artificial Sequence: Synthetic oligonucleotide
gaggcguggaaaucugaag

SEQ ID NO: 1115639 - RNA, 19 nt, Artificial Sequence
  Description of Artificial Sequence: Synthetic oligonucleotide
gcuugaaaugacgauaaag

SEQ ID NO: 1115640 - RNA, 19 nt, Artificial Sequence
  Description of Artificial Sequence: Synthetic oligonucleotide
uugggcaaucgaaugguaa

SEQ ID NO: 1115641 - RNA, 19 nt, Artificial Sequence
  Description of Artificial Sequence: Synthetic oligonucleotide
caggagugaaaucuggauc

SEQ ID NO: 1115642 - RNA, 19 nt, Artificial Sequence
  Description of Artificial Sequence: Synthetic oligonucleotide
cuuucuaauaguccacgca

SEQ ID NO: 1115643 - RNA, 19 nt, Artificial Sequence
  Description of Artificial Sequence: Synthetic oligonucleotide
ucuaucagacggagcccgg

SEQ ID NO: 1115644 - RNA, 19 nt, Artificial Sequence
  Description of Artificial Sequence: Synthetic oligonucleotide
uggauagcacaaaacucuc

SEQ ID NO: 1115645 - RNA, 19 nt, Artificial Sequence
  Description of Artificial Sequence: Synthetic oligonucleotide
ugggcaaucgaaugguaaa

SEQ ID NO: 1115646 - RNA, 19 nt, Artificial Sequence
  Description of Artificial Sequence: Synthetic oligonucleotide
uuuucggcaguuucuuccu

SEQ ID NO: 1115647 - RNA, 19 nt, Artificial Sequence
  Description of Artificial Sequence: Synthetic oligonucleotide
ucagugacacguauuucau

SEQ ID NO: 1115648 - RNA, 19 nt, Artificial Sequence
  Description of Artificial Sequence: Synthetic oligonucleotide
acgauaaaguggauagcac

SEQ ID NO: 1115649 - RNA, 19 nt, Artificial Sequence
  Description of Artificial Sequence: Synthetic oligonucleotide
aagauuuugugaacaucca

SEQ ID NO: 1115650 - RNA, 19 nt, Artificial Sequence
  Description of Artificial Sequence: Synthetic oligonucleotide
cucuaucagacggagcccg

SEQ ID NO: 1115651 - RNA, 19 nt, Artificial Sequence
  Description of Artificial Sequence: Synthetic oligonucleotide
uaguacacuugacggugag

SEQ ID NO: 1115652 - RNA, 19 nt, Artificial Sequence
  Description of Artificial Sequence: Synthetic oligonucleotide
auguggugcuguccgaguc

SEQ ID NO: 1115653 - RNA, 19 nt, Artificial Sequence
  Description of Artificial Sequence: Synthetic oligonucleotide
agagcacuuucugagaccu

SEQ ID NO: 1115654 - RNA, 19 nt, Artificial Sequence
  Description of Artificial Sequence: Synthetic oligonucleotide
agcuccuuccucagaaacc

SEQ ID NO: 1115655 - RNA, 19 nt, Artificial Sequence
  Description of Artificial Sequence: Synthetic oligonucleotide
ucaggaggcguggaaaucu

SEQ ID NO: 1115656 - RNA, 19 nt, Artificial Sequence
  Description of Artificial Sequence: Synthetic oligonucleotide
uucguucagucgcaggagu

SEQ ID NO: 1115657 - RNA, 19 nt, Artificial Sequence
  Description of Artificial Sequence: Synthetic oligonucleotide
ugggauugcacugggcugc

SEQ ID NO: 1115658 - RNA, 19 nt, Artificial Sequence
  Description of Artificial Sequence: Synthetic oligonucleotide
uucaugaacgucuguccaa

SEQ ID NO: 1115659 - RNA, 19 nt, Artificial Sequence
  Description of Artificial Sequence: Synthetic oligonucleotide
ucaaacuccgaauccucau

SEQ ID NO: 1115660 - RNA, 19 nt, Artificial Sequence
  Description of Artificial Sequence: Synthetic oligonucleotide
auagugauccgagucaaau

SEQ ID NO: 1115661 - RNA, 19 nt, Artificial Sequence
  Description of Artificial Sequence: Synthetic oligonucleotide
accaggauuucaugaacgu

SEQ ID NO: 1115662 - RNA, 19 nt, Artificial Sequence
  Description of Artificial Sequence: Synthetic oligonucleotide
cacuaaugcagcaucaucu

SEQ ID NO: 1115663 - RNA, 19 nt, Artificial Sequence
  Description of Artificial Sequence: Synthetic oligonucleotide
uggccggccacauuucugc

SEQ ID NO: 1115664 - RNA, 19 nt, Artificial Sequence
  Description of Artificial Sequence: Synthetic oligonucleotide
gugucagacgauguggugc

SEQ ID NO: 1115665 - RNA, 19 nt, Artificial Sequence
  Description of Artificial Sequence: Synthetic oligonucleotide
acaagugguuuugcagacc

SEQ ID NO: 1115666 - RNA, 19 nt, Artificial Sequence
  Description of Artificial Sequence: Synthetic oligonucleotide
ugcuguccgagucacuggu

SEQ ID NO: 1115667 - RNA, 19 nt, Artificial Sequence
  Description of Artificial Sequence: Synthetic oligonucleotide
ucguucagucgcaggagug

SEQ ID NO: 1115668 - RNA, 19 nt, Artificial Sequence
  Description of Artificial Sequence: Synthetic oligonucleotide
gucucuguaggcuuucauc

SEQ ID NO: 1115669 - RNA, 19 nt, Artificial Sequence
  Description of Artificial Sequence: Synthetic oligonucleotide
cacaagugguuuugcagac

SEQ ID NO: 1115670 - RNA, 19 nt, Artificial Sequence
  Description of Artificial Sequence: Synthetic oligonucleotide
agacucgacauugugcucu

SEQ ID NO: 1115671 - RNA, 19 nt, Artificial Sequence
  Description of Artificial Sequence: Synthetic oligonucleotide
aguguuaaucucagaaagu

SEQ ID NO: 1115672 - RNA, 19 nt, Artificial Sequence
  Description of Artificial Sequence: Synthetic oligonucleotide
ucagucgcaggagugaaau

SEQ ID NO: 1115673 - RNA, 19 nt, Artificial Sequence
  Description of Artificial Sequence: Synthetic oligonucleotide
cugaaagauuuugugaaca

SEQ ID NO: 1115674 - RNA, 19 nt, Artificial Sequence
  Description of Artificial Sequence: Synthetic oligonucleotide
ugcgggaugcggauggcga

SEQ ID NO: 1115675 - RNA, 19 nt, Artificial Sequence
  Description of Artificial Sequence: Synthetic oligonucleotide
uucauccuguaaccgcuga

SEQ ID NO: 1115676 - RNA, 19 nt, Artificial Sequence
  Description of Artificial Sequence: Synthetic oligonucleotide
cucaaaguacacgucgaac

SEQ ID NO: 1115677 - RNA, 19 nt, Artificial Sequence
  Description of Artificial Sequence: Synthetic oligonucleotide
acgucgaacucggaggcac

SEQ ID NO: 1115678 - RNA, 19 nt, Artificial Sequence
  Description of Artificial Sequence: Synthetic oligonucleotide
augugcaucauuccaccaa

SEQ ID NO: 1115679 - RNA, 19 nt, Artificial Sequence
  Description of Artificial Sequence: Synthetic oligonucleotide
agcaccuauuucuuccaca

SEQ ID NO: 1115680 - RNA, 19 nt, Artificial Sequence
  Description of Artificial Sequence: Synthetic oligonucleotide
aguucauccuguaaccgcu

SEQ ID NO: 1115681 - RNA, 19 nt, Artificial Sequence
  Description of Artificial Sequence: Synthetic oligonucleotide
uguaaccgcugaaccacac

SEQ ID NO: 1115682 - RNA, 19 nt, Artificial Sequence
  Description of Artificial Sequence: Synthetic oligonucleotide
ucgcagguuuccaaaucca

SEQ ID NO: 1115683 - RNA, 19 nt, Artificial Sequence
  Description of Artificial Sequence: Synthetic oligonucleotide
auuucccagucaaacuccg

SEQ ID NO: 1115684 - RNA, 19 nt, Artificial Sequence
  Description of Artificial Sequence: Synthetic oligonucleotide
guguuaaucucagaaagua

SEQ ID NO: 1115685 - RNA, 19 nt, Artificial Sequence
  Description of Artificial Sequence: Synthetic oligonucleotide
uaucagacggagcccgggu

SEQ ID NO: 1115686 - RNA, 19 nt, Artificial Sequence
  Description of Artificial Sequence: Synthetic oligonucleotide
acgcaguagucugagaugu

SEQ ID NO: 1115687 - RNA, 19 nt, Artificial Sequence
  Description of Artificial Sequence: Synthetic oligonucleotide
gaccgugaggaacucgcug

SEQ ID NO: 1115688 - RNA, 19 nt, Artificial Sequence
  Description of Artificial Sequence: Synthetic oligonucleotide
guggauagcacaaaacucu

SEQ ID NO: 1115689 - RNA, 19 nt, Artificial Sequence
  Description of Artificial Sequence: Synthetic oligonucleotide
gauggcgaccgugaggaac

SEQ ID NO: 1115690 - RNA, 19 nt, Artificial Sequence
  Description of Artificial Sequence: Synthetic oligonucleotide
gaaggaugucaacuaaacu

SEQ ID NO: 1115691 - RNA, 19 nt, Artificial Sequence
  Description of Artificial Sequence: Synthetic oligonucleotide
gaacucgcuguccuggcuc

SEQ ID NO: 1115692 - RNA, 19 nt, Artificial Sequence
  Description of Artificial Sequence: Synthetic oligonucleotide
agacgauguggugcugucc

SEQ ID NO: 1115693 - RNA, 19 nt, Artificial Sequence
  Description of Artificial Sequence: Synthetic oligonucleotide
caaacuccgaauccucauc

SEQ ID NO: 1115694 - RNA, 19 nt, Artificial Sequence
  Description of Artificial Sequence: Synthetic oligonucleotide
caggagacacuuuaaaacu

SEQ ID NO: 1115695 - RNA, 19 nt, Artificial Sequence
  Description of Artificial Sequence: Synthetic oligonucleotide
gauccgagucaaauuuggc

SEQ ID NO: 1115696 - RNA, 19 nt, Artificial Sequence
  Description of Artificial Sequence: Synthetic oligonucleotide
cugaaccacaccugcucgc

SEQ ID NO: 1115697 - RNA, 19 nt, Artificial Sequence
  Description of Artificial Sequence: Synthetic oligonucleotide
cucagaaaguacggcuugg

SEQ ID NO: 1115698 - RNA, 19 nt, Artificial Sequence
  Description of Artificial Sequence: Synthetic oligonucleotide
ggagacacuuuaaaacugc

SEQ ID NO: 1115699 - RNA, 19 nt, Artificial Sequence
  Description of Artificial Sequence: Synthetic oligonucleotide
gcugaaccacaccugcucg

SEQ ID NO: 1115700 - RNA, 19 nt, Artificial Sequence
  Description of Artificial Sequence: Synthetic oligonucleotide
aacuccgaauccucaucau

SEQ ID NO: 1115701 - RNA, 19 nt, Artificial Sequence
  Description of Artificial Sequence: Synthetic oligonucleotide
agucagcuaaauagugauc

SEQ ID NO: 1115702 - RNA, 19 nt, Artificial Sequence
  Description of Artificial Sequence: Synthetic oligonucleotide
uacacuugacggugagcug

SEQ ID NO: 1115703 - RNA, 19 nt, Artificial Sequence
  Description of Artificial Sequence: Synthetic oligonucleotide
uagugauccgagucaaauu

SEQ ID NO: 1115704 - RNA, 19 nt, Artificial Sequence
  Description of Artificial Sequence: Synthetic oligonucleotide
cucuguaggcuuucaucac

SEQ ID NO: 1115705 - RNA, 19 nt, Artificial Sequence
  Description of Artificial Sequence: Synthetic oligonucleotide
cagcuugaaaugacgauaa

SEQ ID NO: 1115706 - RNA, 19 nt, Artificial Sequence
  Description of Artificial Sequence: Synthetic oligonucleotide
gaacucggaggcacgcgcg

SEQ ID NO: 1115707 - RNA, 19 nt, Artificial Sequence
  Description of Artificial Sequence: Synthetic oligonucleotide
gaacgucuguccaagucuc

SEQ ID NO: 1115708 - RNA, 19 nt, Artificial Sequence
  Description of Artificial Sequence: Synthetic oligonucleotide
aacucggaggcacgcgcgu

SEQ ID NO: 1115709 - RNA, 19 nt, Artificial Sequence
  Description of Artificial Sequence: Synthetic oligonucleotide
uuucccagucaaacuccga

SEQ ID NO: 1115710 - RNA, 19 nt, Artificial Sequence
  Description of Artificial Sequence: Synthetic oligonucleotide
gucuucguucagucgcagg

SEQ ID NO: 1115711 - RNA, 19 nt, Artificial Sequence
  Description of Artificial Sequence: Synthetic oligonucleotide
cagcuuucuaauaguccac

SEQ ID NO: 1115712 - RNA, 19 nt, Artificial Sequence
  Description of Artificial Sequence: Synthetic oligonucleotide
cagguaagacuuauucaca

SEQ ID NO: 1115713 - RNA, 19 nt, Artificial Sequence
  Description of Artificial Sequence: Synthetic oligonucleotide
agugaaaucuggauccuua

SEQ ID NO: 1115714 - RNA, 19 nt, Artificial Sequence
  Description of Artificial Sequence: Synthetic oligonucleotide
accuaguugcaguaucuuu

SEQ ID NO: 1115715 - RNA, 19 nt, Artificial Sequence
  Description of Artificial Sequence: Synthetic oligonucleotide
cucuaaccccagcugggcc

SEQ ID NO: 1115716 - RNA, 19 nt, Artificial Sequence
  Description of Artificial Sequence: Synthetic oligonucleotide
ugucucuguaggcuuucau

SEQ ID NO: 1115717 - RNA, 19 nt, Artificial Sequence
  Description of Artificial Sequence: Synthetic oligonucleotide
aaaguacggcuuggcguag

SEQ ID NO: 1115718 - RNA, 19 nt, Artificial Sequence
  Description of Artificial Sequence: Synthetic oligonucleotide
ugcggauggcgaccgugag

SEQ ID NO: 1115719 - RNA, 19 nt, Artificial Sequence
  Description of Artificial Sequence: Synthetic oligonucleotide
caugggauugcacugggcu

SEQ ID NO: 1115720 - RNA, 19 nt, Artificial Sequence
  Description of Artificial Sequence: Synthetic oligonucleotide
aaugaacgcugggucauuu

SEQ ID NO: 1115721 - RNA, 19 nt, Artificial Sequence
  Description of Artificial Sequence: Synthetic oligonucleotide
gcaguagucugagauguag

SEQ ID NO: 1115722 - RNA, 19 nt, Artificial Sequence
  Description of Artificial Sequence: Synthetic oligonucleotide
auagggagucugcucaauu

SEQ ID NO: 1115723 - RNA, 19 nt, Artificial Sequence
  Description of Artificial Sequence: Synthetic oligonucleotide
gaaccacaccugcucgcag

SEQ ID NO: 1115724 - RNA, 19 nt, Artificial Sequence
  Description of Artificial Sequence: Synthetic oligonucleotide
ugggccuuacugagggaga

SEQ ID NO: 1115725 - RNA, 19 nt, Artificial Sequence
  Description of Artificial Sequence: Synthetic oligonucleotide
cuaucagacggagcccggg

SEQ ID NO: 1115726 - RNA, 19 nt, Artificial Sequence
  Description of Artificial Sequence: Synthetic oligonucleotide
agaaaccccagaagcaccu

SEQ ID NO: 1115727 - RNA, 19 nt, Artificial Sequence
  Description of Artificial Sequence: Synthetic oligonucleotide
gcuuucuaauaguccacgc

SEQ ID NO: 1115728 - RNA, 19 nt, Artificial Sequence
  Description of Artificial Sequence: Synthetic oligonucleotide
cuucguucagucgcaggag

SEQ ID NO: 1115729 - RNA, 19 nt, Artificial Sequence
  Description of Artificial Sequence: Synthetic oligonucleotide
ccagucaaacuccgaaucc

SEQ ID NO: 1115730 - RNA, 19 nt, Artificial Sequence
  Description of Artificial Sequence: Synthetic oligonucleotide
acaaauuuucuuagcugau

SEQ ID NO: 1115731 - RNA, 19 nt, Artificial Sequence
  Description of Artificial Sequence: Synthetic oligonucleotide
ucauagggagucugcucaa

SEQ ID NO: 1115732 - RNA, 19 nt, Artificial Sequence
  Description of Artificial Sequence: Synthetic oligonucleotide
ggugcuguccgagucacug

SEQ ID NO: 1115733 - RNA, 19 nt, Artificial Sequence
  Description of Artificial Sequence: Synthetic oligonucleotide
acgcagacucgacauugug

SEQ ID NO: 1115734 - RNA, 19 nt, Artificial Sequence
  Description of Artificial Sequence: Synthetic oligonucleotide
caauaaccucacucaguuc

SEQ ID NO: 1115735 - RNA, 19 nt, Artificial Sequence
  Description of Artificial Sequence: Synthetic oligonucleotide
cagaaggaugucaacuaaa

SEQ ID NO: 1115736 - RNA, 19 nt, Artificial Sequence
  Description of Artificial Sequence: Synthetic oligonucleotide
acugcacucuuaccuaguu

SEQ ID NO: 1115737 - RNA, 19 nt, Artificial Sequence
  Description of Artificial Sequence: Synthetic oligonucleotide
ucgacauugugcucuccuu

SEQ ID NO: 1115738 - RNA, 19 nt, Artificial Sequence
  Description of Artificial Sequence: Synthetic oligonucleotide
gaguuuccuugggcaaucg

SEQ ID NO: 1115739 - RNA, 19 nt, Artificial Sequence
  Description of Artificial Sequence: Synthetic oligonucleotide
cucaaaaugcuggccagga

SEQ ID NO: 1115740 - RNA, 19 nt, Artificial Sequence
  Description of Artificial Sequence: Synthetic oligonucleotide
agacacuaaugcagcauca

SEQ ID NO: 1115741 - RNA, 19 nt, Artificial Sequence
  Description of Artificial Sequence: Synthetic oligonucleotide
gugauccgagucaaauuug

SEQ ID NO: 1115742 - RNA, 19 nt, Artificial Sequence
  Description of Artificial Sequence: Synthetic oligonucleotide
uucagucgcaggagugaaa

SEQ ID NO: 1115743 - RNA, 19 nt, Artificial Sequence
  Description of Artificial Sequence: Synthetic oligonucleotide
agcaucgccgcgcgcuccg

SEQ ID NO: 1115744 - RNA, 19 nt, Artificial Sequence
  Description of Artificial Sequence: Synthetic oligonucleotide
ucuuaccuaguugcaguau

SEQ ID NO: 1115745 - RNA, 19 nt, Artificial Sequence
  Description of Artificial Sequence: Synthetic oligonucleotide
cugcccuugacugacuuca

SEQ ID NO: 1115746 - RNA, 19 nt, Artificial Sequence
  Description of Artificial Sequence: Synthetic oligonucleotide
accacgggccccgcuacgc

SEQ ID NO: 1115747 - RNA, 19 nt, Artificial Sequence
  Description of Artificial Sequence: Synthetic oligonucleotide
ugacggugagcugucuugu

SEQ ID NO: 1115748 - RNA, 19 nt, Artificial Sequence
  Description of Artificial Sequence: Synthetic oligonucleotide
ccugaaagauuuugugaac

SEQ ID NO: 1115749 - RNA, 19 nt, Artificial Sequence
  Description of Artificial Sequence: Synthetic oligonucleotide
gacacguauuucauagcaa

SEQ ID NO: 1115750 - RNA, 19 nt, Artificial Sequence
  Description of Artificial Sequence: Synthetic oligonucleotide
caccuauuucuuccacaag

SEQ ID NO: 1115751 - RNA, 19 nt, Artificial Sequence
  Description of Artificial Sequence: Synthetic oligonucleotide
guuuugcagaccuggauuu

SEQ ID NO: 1115752 - RNA, 19 nt, Artificial Sequence
  Description of Artificial Sequence: Synthetic oligonucleotide
agaggccaucauuucugca

SEQ ID NO: 1115753 - RNA, 19 nt, Artificial Sequence
  Description of Artificial Sequence: Synthetic oligonucleotide
ggcguagaacuugaagucc

SEQ ID NO: 1115754 - RNA, 19 nt, Artificial Sequence
  Description of Artificial Sequence: Synthetic oligonucleotide
auggcgaccgugaggaacu

SEQ ID NO: 1115755 - RNA, 19 nt, Artificial Sequence
  Description of Artificial Sequence: Synthetic oligonucleotide
ggcguggaaaucugaagca

SEQ ID NO: 1115756 - RNA, 19 nt, Artificial Sequence
  Description of Artificial Sequence: Synthetic oligonucleotide
ucgggacuggagccuggag

SEQ ID NO: 1115757 - RNA, 19 nt, Artificial Sequence
  Description of Artificial Sequence: Synthetic oligonucleotide
ccuguaaccgcugaaccac

SEQ ID NO: 1115758 - RNA, 19 nt, Artificial Sequence
  Description of Artificial Sequence: Synthetic oligonucleotide
cagcuaaauagugauccga

SEQ ID NO: 1115759 - RNA, 19 nt, Artificial Sequence
  Description of Artificial Sequence: Synthetic oligonucleotide
gugcaucauuccaccaagg

SEQ ID NO: 1115760 - RNA, 19 nt, Artificial Sequence
  Description of Artificial Sequence: Synthetic oligonucleotide
gucgcaggagugaaaucug

SEQ ID NO: 1115761 - RNA, 19 nt, Artificial Sequence
  Description of Artificial Sequence: Synthetic oligonucleotide
uucugcgagggcagccaac

SEQ ID NO: 1115762 - RNA, 19 nt, Artificial Sequence
  Description of Artificial Sequence: Synthetic oligonucleotide
gcaccuauuucuuccacaa

SEQ ID NO: 1115763 - RNA, 19 nt, Artificial Sequence
  Description of Artificial Sequence: Synthetic oligonucleotide
ccacaagugguuuugcaga

SEQ ID NO: 1115764 - RNA, 19 nt, Artificial Sequence
  Description of Artificial Sequence: Synthetic oligonucleotide
gggagucugcucaauuucc

SEQ ID NO: 1115765 - RNA, 19 nt, Artificial Sequence
  Description of Artificial Sequence: Synthetic oligonucleotide
caggaggcguggaaaucug

SEQ ID NO: 1115766 - RNA, 19 nt, Artificial Sequence
  Description of Artificial Sequence: Synthetic oligonucleotide
aguacggcuuggcguagaa

SEQ ID NO: 1115767 - RNA, 19 nt, Artificial Sequence
  Description of Artificial Sequence: Synthetic oligonucleotide
aggcguuucugucuucguu

SEQ ID NO: 1115768 - RNA, 19 nt, Artificial Sequence
  Description of Artificial Sequence: Synthetic oligonucleotide
cccagucaaacuccgaauc

SEQ ID NO: 1115769 - RNA, 19 nt, Artificial Sequence
  Description of Artificial Sequence: Synthetic oligonucleotide
ucagcaucgccgcgcgcuc

SEQ ID NO: 1115770 - RNA, 19 nt, Artificial Sequence
  Description of Artificial Sequence: Synthetic oligonucleotide
guuaacauguucagccccu

SEQ ID NO: 1115771 - RNA, 19 nt, Artificial Sequence
  Description of Artificial Sequence: Synthetic oligonucleotide
cagacgauguggugcuguc

SEQ ID NO: 1115772 - RNA, 19 nt, Artificial Sequence
  Description of Artificial Sequence: Synthetic oligonucleotide
gacucgacauugugcucuc

SEQ ID NO: 1115773 - RNA, 19 nt, Artificial Sequence
  Description of Artificial Sequence: Synthetic oligonucleotide
agcuugaaaugacgauaaa

SEQ ID NO: 1115774 - RNA, 19 nt, Artificial Sequence
  Description of Artificial Sequence: Synthetic oligonucleotide
cuggccggccacauuucug

SEQ ID NO: 1115775 - RNA, 19 nt, Artificial Sequence
  Description of Artificial Sequence: Synthetic oligonucleotide
uuuugcagaccuggauuuu

SEQ ID NO: 1115776 - RNA, 19 nt, Artificial Sequence
  Description of Artificial Sequence: Synthetic oligonucleotide
aaaugaacgcugggucauu

SEQ ID NO: 1115777 - RNA, 19 nt, Artificial Sequence
  Description of Artificial Sequence: Synthetic oligonucleotide
cuguaguacacuugacggu

SEQ ID NO: 1115778 - RNA, 19 nt, Artificial Sequence
  Description of Artificial Sequence: Synthetic oligonucleotide
ugugaacauccaggagaca

SEQ ID NO: 1115779 - RNA, 19 nt, Artificial Sequence
  Description of Artificial Sequence: Synthetic oligonucleotide
ccgagucaaauuuggccag

SEQ ID NO: 1115780 - RNA, 19 nt, Artificial Sequence
  Description of Artificial Sequence: Synthetic oligonucleotide
aacgucuguccaagucuca

SEQ ID NO: 1115781 - RNA, 19 nt, Artificial Sequence
  Description of Artificial Sequence: Synthetic oligonucleotide
uaccuaguugcaguaucuu

SEQ ID NO: 1115782 - RNA, 19 nt, Artificial Sequence
  Description of Artificial Sequence: Synthetic oligonucleotide
cugggcugccuuuucggca

SEQ ID NO: 1115783 - RNA, 19 nt, Artificial Sequence
  Description of Artificial Sequence: Synthetic oligonucleotide
ggacaagaagugcggcagc

SEQ ID NO: 1115784 - RNA, 19 nt, Artificial Sequence
  Description of Artificial Sequence: Synthetic oligonucleotide
cgcagacucgacauugugc

SEQ ID NO: 1115785 - RNA, 19 nt, Artificial Sequence
  Description of Artificial Sequence: Synthetic oligonucleotide
gguuuugcagaccuggauu

SEQ ID NO: 1115786 - RNA, 19 nt, Artificial Sequence
  Description of Artificial Sequence: Synthetic oligonucleotide
cucuuaccuaguugcagua

SEQ ID NO: 1115787 - RNA, 19 nt, Artificial Sequence
  Description of Artificial Sequence: Synthetic oligonucleotide
aaguacggcuuggcguaga

SEQ ID NO: 1115788 - RNA, 19 nt, Artificial Sequence
  Description of Artificial Sequence: Synthetic oligonucleotide
cagagaguugggcucagcu

SEQ ID NO: 1115789 - RNA, 19 nt, Artificial Sequence
  Description of Artificial Sequence: Synthetic oligonucleotide
cccucaaaaugcuggccag

SEQ ID NO: 1115790 - RNA, 19 nt, Artificial Sequence
  Description of Artificial Sequence: Synthetic oligonucleotide
caggaguuuccuugggcaa

SEQ ID NO: 1115791 - RNA, 19 nt, Artificial Sequence
  Description of Artificial Sequence: Synthetic oligonucleotide
ggucauuuuccugaaagau

SEQ ID NO: 1115792 - RNA, 19 nt, Artificial Sequence
  Description of Artificial Sequence: Synthetic oligonucleotide
acgcugggucauuuuccug

SEQ ID NO: 1115793 - RNA, 19 nt, Artificial Sequence
  Description of Artificial Sequence: Synthetic oligonucleotide
ucauagcaauaggccagaa

SEQ ID NO: 1115794 - RNA, 19 nt, Artificial Sequence
  Description of Artificial Sequence: Synthetic oligonucleotide
ggcugcaugggauugcacu

SEQ ID NO: 1115795 - RNA, 19 nt, Artificial Sequence
  Description of Artificial Sequence: Synthetic oligonucleotide
guaguacacuugacgguga

SEQ ID NO: 1115796 - RNA, 19 nt, Artificial Sequence
  Description of Artificial Sequence: Synthetic oligonucleotide
agccaggcguuucugucuu

SEQ ID NO: 1115797 - RNA, 19 nt, Artificial Sequence
  Description of Artificial Sequence: Synthetic oligonucleotide
cagacucgacauugugcuc

SEQ ID NO: 1115798 - RNA, 19 nt, Artificial Sequence
  Description of Artificial Sequence: Synthetic oligonucleotide
gugcgggaugcggauggcg

SEQ ID NO: 1115799 - RNA, 19 nt, Artificial Sequence
  Description of Artificial Sequence: Synthetic oligonucleotide
cugugucagacgauguggu

SEQ ID NO: 1115800 - RNA, 19 nt, Artificial Sequence
  Description of Artificial Sequence: Synthetic oligonucleotide
gcggauggcgaccgugagg

SEQ ID NO: 1115801 - RNA, 19 nt, Artificial Sequence
  Description of Artificial Sequence: Synthetic oligonucleotide
gggucagcaucgccgcgcg

SEQ ID NO: 1115802 - RNA, 19 nt, Artificial Sequence
  Description of Artificial Sequence: Synthetic oligonucleotide
ccgaauccucaucaucagc

SEQ ID NO: 1115803 - RNA, 19 nt, Artificial Sequence
  Description of Artificial Sequence: Synthetic oligonucleotide
cauacgcaguagucugaga

SEQ ID NO: 1115804 - RNA, 19 nt, Artificial Sequence
  Description of Artificial Sequence: Synthetic oligonucleotide
cuguccgagucacuggucu

SEQ ID NO: 1115805 - RNA, 19 nt, Artificial Sequence
  Description of Artificial Sequence: Synthetic oligonucleotide
ccaggcguuucugucuucg

SEQ ID NO: 1115806 - RNA, 19 nt, Artificial Sequence
  Description of Artificial Sequence: Synthetic oligonucleotide
guucagucgcaggagugaa

SEQ ID NO: 1115807 - RNA, 19 nt, Artificial Sequence
  Description of Artificial Sequence: Synthetic oligonucleotide
cagucgcaggagugaaauc

SEQ ID NO: 1115808 - RNA, 19 nt, Artificial Sequence
  Description of Artificial Sequence: Synthetic oligonucleotide
aucgccgcgcgcuccggga

SEQ ID NO: 1115809 - RNA, 19 nt, Artificial Sequence
  Description of Artificial Sequence: Synthetic oligonucleotide
ccucaaaaugcuggccagg

SEQ ID NO: 1115810 - RNA, 19 nt, Artificial Sequence
  Description of Artificial Sequence: Synthetic oligonucleotide
cucgcuguccuggcucagc

SEQ ID NO: 1115811 - RNA, 19 nt, Artificial Sequence
  Description of Artificial Sequence: Synthetic oligonucleotide
cuugggcaaucgaauggua

SEQ ID NO: 1115812 - RNA, 19 nt, Artificial Sequence
  Description of Artificial Sequence: Synthetic oligonucleotide
caucgccgcgcgcuccggg

SEQ ID NO: 1115813 - RNA, 19 nt, Artificial Sequence
  Description of Artificial Sequence: Synthetic oligonucleotide
cgaacucggaggcacgcgc

SEQ ID NO: 1115814 - RNA, 19 nt, Artificial Sequence
  Description of Artificial Sequence: Synthetic oligonucleotide
cuuucccaaagaggccauc

SEQ ID NO: 1115815 - RNA, 19 nt, Artificial Sequence
  Description of Artificial Sequence: Synthetic oligonucleotide
gucagcaucgccgcgcgcu

SEQ ID NO: 1115816 - RNA, 19 nt, Artificial Sequence
  Description of Artificial Sequence: Synthetic oligonucleotide
caucaggaggcguggaaau

SEQ ID NO: 1115817 - RNA, 19 nt, Artificial Sequence
  Description of Artificial Sequence: Synthetic oligonucleotide
gcucgcagguuuccaaauc

SEQ ID NO: 1115818 - RNA, 19 nt, Artificial Sequence
  Description of Artificial Sequence: Synthetic oligonucleotide
cagugacacguauuucaua

SEQ ID NO: 1115819 - RNA, 19 nt, Artificial Sequence
  Description of Artificial Sequence: Synthetic oligonucleotide
acucggaggcacgcgcgug

SEQ ID NO: 1115820 - RNA, 19 nt, Artificial Sequence
  Description of Artificial Sequence: Synthetic oligonucleotide
gcucuaaccccagcugggc

SEQ ID NO: 1115821 - RNA, 19 nt, Artificial Sequence
  Description of Artificial Sequence: Synthetic oligonucleotide
acgcgcgugcgggaugcgg

SEQ ID NO: 1115822 - RNA, 19 nt, Artificial Sequence
  Description of Artificial Sequence: Synthetic oligonucleotide
ccagcuugaaaugacgaua

SEQ ID NO: 1115823 - RNA, 19 nt, Artificial Sequence
  Description of Artificial Sequence: Synthetic oligonucleotide
guacggcuuggcguagaac

SEQ ID NO: 1115824 - RNA, 19 nt, Artificial Sequence
  Description of Artificial Sequence: Synthetic oligonucleotide
ggggucagcaucgccgcgc

SEQ ID NO: 1115825 - RNA, 19 nt, Artificial Sequence
  Description of Artificial Sequence: Synthetic oligonucleotide
aggaggcguggaaaucuga

SEQ ID NO: 1115826 - RNA, 19 nt, Artificial Sequence
  Description of Artificial Sequence: Synthetic oligonucleotide
cguagaacuugaaguccac

SEQ ID NO: 1115827 - RNA, 19 nt, Artificial Sequence
  Description of Artificial Sequence: Synthetic oligonucleotide
gggcaaucgaaugguaaaa

SEQ ID NO: 1115828 - RNA, 19 nt, Artificial Sequence
  Description of Artificial Sequence: Synthetic oligonucleotide
caccacgggccccgcuacg

SEQ ID NO: 1115829 - RNA, 19 nt, Artificial Sequence
  Description of Artificial Sequence: Synthetic oligonucleotide
ccagaaggaugucaacuaa

SEQ ID NO: 1115830 - RNA, 19 nt, Artificial Sequence
  Description of Artificial Sequence: Synthetic oligonucleotide
ccucuaucagacggagccc

SEQ ID NO: 1115831 - RNA, 19 nt, Artificial Sequence
  Description of Artificial Sequence: Synthetic oligonucleotide
cagacggagcccgggucug

SEQ ID NO: 1115832 - RNA, 19 nt, Artificial Sequence
  Description of Artificial Sequence: Synthetic oligonucleotide
aguacacgucgaacucgga

SEQ ID NO: 1115833 - RNA, 19 nt, Artificial Sequence
  Description of Artificial Sequence: Synthetic oligonucleotide
gggccuuacugagggagac

SEQ ID NO: 1115834 - RNA, 19 nt, Artificial Sequence
  Description of Artificial Sequence: Synthetic oligonucleotide
gugcggcagcuucuaguuc

SEQ ID NO: 1115835 - RNA, 19 nt, Artificial Sequence
  Description of Artificial Sequence: Synthetic oligonucleotide
gaggcacgcgcgugcggga

SEQ ID NO: 1115836 - RNA, 19 nt, Artificial Sequence
  Description of Artificial Sequence: Synthetic oligonucleotide
acggcuuggcguagaacuu

SEQ ID NO: 1115837 - RNA, 19 nt, Artificial Sequence
  Description of Artificial Sequence: Synthetic oligonucleotide
caugaacgucuguccaagu

SEQ ID NO: 1115838 - RNA, 19 nt, Artificial Sequence
  Description of Artificial Sequence: Synthetic oligonucleotide
ggcgaccgugaggaacucg

SEQ ID NO: 1115839 - RNA, 19 nt, Artificial Sequence
  Description of Artificial Sequence: Synthetic oligonucleotide
gcccuugacugacuucaca

SEQ ID NO: 1115840 - RNA, 19 nt, Artificial Sequence
  Description of Artificial Sequence: Synthetic oligonucleotide
acucgcuguccuggcucag

SEQ ID NO: 1115841 - RNA, 19 nt, Artificial Sequence
  Description of Artificial Sequence: Synthetic oligonucleotide
gcgggaugcggauggcgac

SEQ ID NO: 1115842 - RNA, 19 nt, Artificial Sequence
  Description of Artificial Sequence: Synthetic oligonucleotide
gucagacgauguggugcug

SEQ ID NO: 1115843 - RNA, 19 nt, Artificial Sequence
  Description of Artificial Sequence: Synthetic oligonucleotide
cuugacggugagcugucuu

SEQ ID NO: 1115844 - RNA, 19 nt, Artificial Sequence
  Description of Artificial Sequence: Synthetic oligonucleotide
ccauagugacacugugaga

SEQ ID NO: 1115845 - RNA, 19 nt, Artificial Sequence
  Description of Artificial Sequence: Synthetic oligonucleotide
gagugaaaucuggauccuu

SEQ ID NO: 1115846 - RNA, 19 nt, Artificial Sequence
  Description of Artificial Sequence: Synthetic oligonucleotide
cgucgaacucggaggcacg

SEQ ID NO: 1115847 - RNA, 19 nt, Artificial Sequence
  Description of Artificial Sequence: Synthetic oligonucleotide
cacgcagacucgacauugu

SEQ ID NO: 1115848 - RNA, 19 nt, Artificial Sequence
  Description of Artificial Sequence: Synthetic oligonucleotide
cgauguggugcuguccgag

SEQ ID NO: 1115849 - RNA, 19 nt, Artificial Sequence
  Description of Artificial Sequence: Synthetic oligonucleotide
cgugaggaacucgcugucc

SEQ ID NO: 1115850 - RNA, 19 nt, Artificial Sequence
  Description of Artificial Sequence: Synthetic oligonucleotide
gagcuggcugcaugggauu

SEQ ID NO: 1115851 - RNA, 19 nt, Artificial Sequence
  Description of Artificial Sequence: Synthetic oligonucleotide
gcacgcgcgugcgggaugc

SEQ ID NO: 1115852 - RNA, 19 nt, Artificial Sequence
  Description of Artificial Sequence: Synthetic oligonucleotide
ccgugaggaacucgcuguc

SEQ ID NO: 1115853 - RNA, 19 nt, Artificial Sequence
  Description of Artificial Sequence: Synthetic oligonucleotide
gguucccuguucacuucca

SEQ ID NO: 1115854 - RNA, 19 nt, Artificial Sequence
  Description of Artificial Sequence: Synthetic oligonucleotide
gcaucauagguucccuguu

SEQ ID NO: 1115855 - RNA, 19 nt, Artificial Sequence
  Description of Artificial Sequence: Synthetic oligonucleotide
ggcacgcgcgugcgggaug

SEQ ID NO: 1115856 - RNA, 19 nt, Artificial Sequence
  Description of Artificial Sequence: Synthetic oligonucleotide
aggcacgcgcgugcgggau

SEQ ID NO: 1115857 - RNA, 19 nt, Artificial Sequence
  Description of Artificial Sequence: Synthetic oligonucleotide
uggcgaccgugaggaacuc

SEQ ID NO: 1115858 - RNA, 19 nt, Artificial Sequence
  Description of Artificial Sequence: Synthetic oligonucleotide
gacggagcccgggucugcu

SEQ ID NO: 1115859 - RNA, 19 nt, Artificial Sequence
  Description of Artificial Sequence: Synthetic oligonucleotide
ggucagcaucgccgcgcgc

SEQ ID NO: 1115860 - RNA, 19 nt, Artificial Sequence
  Description of Artificial Sequence: Synthetic oligonucleotide
ccuugggcaaucgaauggu

SEQ ID NO: 1115861 - RNA, 19 nt, Artificial Sequence
  Description of Artificial Sequence: Synthetic oligonucleotide
cauagggagucugcucaau

SEQ ID NO: 1115862 - RNA, 19 nt, Artificial Sequence
  Description of Artificial Sequence: Synthetic oligonucleotide
cgggaugcggauggcgacc

SEQ ID NO: 1115863 - RNA, 19 nt, Artificial Sequence
  Description of Artificial Sequence: Synthetic oligonucleotide
gcguggaaaucugaagcau

SEQ ID NO: 1115864 - RNA, 19 nt, Artificial Sequence
  Description of Artificial Sequence: Synthetic oligonucleotide
cacgcgcgugcgggaugcg

SEQ ID NO: 1115865 - RNA, 19 nt, Artificial Sequence
  Description of Artificial Sequence: Synthetic oligonucleotide
cacugacaucaggaggcgu

SEQ ID NO: 1115866 - RNA, 19 nt, Artificial Sequence
  Description of Artificial Sequence: Synthetic oligonucleotide
gcgcugcuauccucuucca

SEQ ID NO: 1115867 - RNA, 19 nt, Artificial Sequence
  Description of Artificial Sequence: Synthetic oligonucleotide
gcgagggcagccaacuuuu

SEQ ID NO: 1115868 - RNA, 19 nt, Artificial Sequence
  Description of Artificial Sequence: Synthetic oligonucleotide
cuaaccccagcugggccuu

SEQ ID NO: 1115869 - RNA, 19 nt, Artificial Sequence
  Description of Artificial Sequence: Synthetic oligonucleotide
gcaucgccgcgcgcuccgg

SEQ ID NO: 1115870 - RNA, 19 nt, Artificial Sequence
  Description of Artificial Sequence: Synthetic oligonucleotide
gccaggcguuucugucuuc

SEQ ID NO: 1115871 - RNA, 19 nt, Artificial Sequence
  Description of Artificial Sequence: Synthetic oligonucleotide
gcuuggcguagaacuugaa

SEQ ID NO: 1115872 - RNA, 19 nt, Artificial Sequence
  Description of Artificial Sequence: Synthetic oligonucleotide
cgcgcgugcgggaugcgga

SEQ ID NO: 1115873 - RNA, 19 nt, Artificial Sequence
  Description of Artificial Sequence: Synthetic oligonucleotide
ccacgggccccgcuacgca

SEQ ID NO: 1115874 - RNA, 19 nt, Artificial Sequence
  Description of Artificial Sequence: Synthetic oligonucleotide
ccuggccggccacauuucu

SEQ ID NO: 1115875 - RNA, 19 nt, Artificial Sequence
  Description of Artificial Sequence: Synthetic oligonucleotide
ccgcugaaccacaccugcu

SEQ ID NO: 1115876 - RNA, 19 nt, Artificial Sequence
  Description of Artificial Sequence: Synthetic oligonucleotide
gcgcgugcgggaugcggau

SEQ ID NO: 1115877 - RNA, 19 nt, Artificial Sequence
  Description of Artificial Sequence: Synthetic oligonucleotide
cgcgugcgggaugcggaug

SEQ ID NO: 1115878 - RNA, 19 nt, Artificial Sequence
  Description of Artificial Sequence: Synthetic oligonucleotide
cgaccgugaggaacucgcu

SEQ ID NO: 1115879 - RNA, 19 nt, Artificial Sequence
  Description of Artificial Sequence: Synthetic oligonucleotide
aauaaaauaguguaaacac

SEQ ID NO: 1115880 - RNA, 19 nt, Artificial Sequence
  Description of Artificial Sequence: Synthetic oligonucleotide
aauaaggucacuuguaucg

SEQ ID NO: 1115881 - RNA, 19 nt, Artificial Sequence
  Description of Artificial Sequence: Synthetic oligonucleotide
aauaaccuuaaauugcccc

SEQ ID NO: 1115882 - RNA, 19 nt, Artificial Sequence
  Description of Artificial Sequence: Synthetic oligonucleotide
uuaggauugaauaagguca

SEQ ID NO: 1115883 - RNA, 19 nt, Artificial Sequence
  Description of Artificial Sequence: Synthetic oligonucleotide
uuaacaggaacagagaacg

SEQ ID NO: 1115884 - RNA, 19 nt, Artificial Sequence
  Description of Artificial Sequence: Synthetic oligonucleotide
aauuauguuuccuccagac

SEQ ID NO: 1115885 - RNA, 19 nt, Artificial Sequence
  Description of Artificial Sequence: Synthetic oligonucleotide
uuugaguucauacgcagcg

SEQ ID NO: 1115886 - RNA, 19 nt, Artificial Sequence
  Description of Artificial Sequence: Synthetic oligonucleotide
uuaaucuuaaagaagccca

SEQ ID NO: 1115887 - RNA, 19 nt, Artificial Sequence
  Description of Artificial Sequence: Synthetic oligonucleotide
uagaaugacacuuccaccg

SEQ ID NO: 1115888 - RNA, 19 nt, Artificial Sequence
  Description of Artificial Sequence: Synthetic oligonucleotide
acauuagaacacuagagac

SEQ ID NO: 1115889 - RNA, 19 nt, Artificial Sequence
  Description of Artificial Sequence: Synthetic oligonucleotide
caauauucagacauggucg

SEQ ID NO: 1115890 - RNA, 19 nt, Artificial Sequence
  Description of Artificial Sequence: Synthetic oligonucleotide
cauuaauaaagucuggucc

SEQ ID NO: 1115891 - RNA, 19 nt, Artificial Sequence
  Description of Artificial Sequence: Synthetic oligonucleotide
auuaggauugaauaagguc

SEQ ID NO: 1115892 - RNA, 19 nt, Artificial Sequence
  Description of Artificial Sequence: Synthetic oligonucleotide
uucacuuguagacaaacag

SEQ ID NO: 1115893 - RNA, 19 nt, Artificial Sequence
  Description of Artificial Sequence: Synthetic oligonucleotide
uagugcauuaaucuuaaag

SEQ ID NO: 1115894 - RNA, 19 nt, Artificial Sequence
  Description of Artificial Sequence: Synthetic oligonucleotide
aaugcuuacguucaagccu

SEQ ID NO: 1115895 - RNA, 19 nt, Artificial Sequence
  Description of Artificial Sequence: Synthetic oligonucleotide
uuauuaggauugaauaagg

SEQ ID NO: 1115896 - RNA, 19 nt, Artificial Sequence
  Description of Artificial Sequence: Synthetic oligonucleotide
ugaaaauuauguuuccucc

SEQ ID NO: 1115897 - RNA, 19 nt, Artificial Sequence
  Description of Artificial Sequence: Synthetic oligonucleotide
agcaaauaaccuuaaauug

SEQ ID NO: 1115898 - RNA, 19 nt, Artificial Sequence
  Description of Artificial Sequence: Synthetic oligonucleotide
aguaugauuuuacagagga

SEQ ID NO: 1115899 - RNA, 19 nt, Artificial Sequence
  Description of Artificial Sequence: Synthetic oligonucleotide
aguagcuuaaaugaauagc

SEQ ID NO: 1115900 - RNA, 19 nt, Artificial Sequence
  Description of Artificial Sequence: Synthetic oligonucleotide
uuauuaauacuucucuuca

SEQ ID NO: 1115901 - RNA, 19 nt, Artificial Sequence
  Description of Artificial Sequence: Synthetic oligonucleotide
uacauuagaacacuagaga

SEQ ID NO: 1115902 - RNA, 19 nt, Artificial Sequence
  Description of Artificial Sequence: Synthetic oligonucleotide
acagaaauaaaauagugua

SEQ ID NO: 1115903 - RNA, 19 nt, Artificial Sequence
  Description of Artificial Sequence: Synthetic oligonucleotide
cucuaaaguaaucacaccc

SEQ ID NO: 1115904 - RNA, 19 nt, Artificial Sequence
  Description of Artificial Sequence: Synthetic oligonucleotide
aaacacuguagaaugacac

SEQ ID NO: 1115905 - RNA, 19 nt, Artificial Sequence
  Description of Artificial Sequence: Synthetic oligonucleotide
cuuucuagagaacaggagc

SEQ ID NO: 1115906 - RNA, 19 nt, Artificial Sequence
  Description of Artificial Sequence: Synthetic oligonucleotide
aaggagguacucgauaacc

SEQ ID NO: 1115907 - RNA, 19 nt, Artificial Sequence
  Description of Artificial Sequence: Synthetic oligonucleotide
ugagguagcguaauaacug

SEQ ID NO: 1115908 - RNA, 19 nt, Artificial Sequence
  Description of Artificial Sequence: Synthetic oligonucleotide
ucucuauggagguagaucu

SEQ ID NO: 1115909 - RNA, 19 nt, Artificial Sequence
  Description of Artificial Sequence: Synthetic oligonucleotide
acauaguaugauuuuacag

SEQ ID NO: 1115910 - RNA, 19 nt, Artificial Sequence
  Description of Artificial Sequence: Synthetic oligonucleotide
aauaaagucugguccagga

SEQ ID NO: 1115911 - RNA, 19 nt, Artificial Sequence
  Description of Artificial Sequence: Synthetic oligonucleotide
aaaacuaaccuggagagau

SEQ ID NO: 1115912 - RNA, 19 nt, Artificial Sequence
  Description of Artificial Sequence: Synthetic oligonucleotide
cuuauuaggauugaauaag

SEQ ID NO: 1115913 - RNA, 19 nt, Artificial Sequence
  Description of Artificial Sequence: Synthetic oligonucleotide
ucaguuuucagcugguuug

SEQ ID NO: 1115914 - RNA, 19 nt, Artificial Sequence
  Description of Artificial Sequence: Synthetic oligonucleotide
uaggucauacaucacaaca

SEQ ID NO: 1115915 - RNA, 19 nt, Artificial Sequence
  Description of Artificial Sequence: Synthetic oligonucleotide
cuacauuagaacacuagag

SEQ ID NO: 1115916 - RNA, 19 nt, Artificial Sequence
  Description of Artificial Sequence: Synthetic oligonucleotide
aauauucagacauggucga

SEQ ID NO: 1115917 - RNA, 19 nt, Artificial Sequence
  Description of Artificial Sequence: Synthetic oligonucleotide
gguaauucagaacagauuc

SEQ ID NO: 1115918 - RNA, 19 nt, Artificial Sequence
  Description of Artificial Sequence: Synthetic oligonucleotide
uuacguucaagccugggca

SEQ ID NO: 1115919 - RNA, 19 nt, Artificial Sequence
  Description of Artificial Sequence: Synthetic oligonucleotide
uucuuguuuaacaggaaca

SEQ ID NO: 1115920 - RNA, 19 nt, Artificial Sequence
  Description of Artificial Sequence: Synthetic oligonucleotide
agaguuaaguguguggggc

SEQ ID NO: 1115921 - RNA, 19 nt, Artificial Sequence
  Description of Artificial Sequence: Synthetic oligonucleotide
uaucccucaacacaucugc

SEQ ID NO: 1115922 - RNA, 19 nt, Artificial Sequence
  Description of Artificial Sequence: Synthetic oligonucleotide
uuuuacagaggauugugcu

SEQ ID NO: 1115923 - RNA, 19 nt, Artificial Sequence
  Description of Artificial Sequence: Synthetic oligonucleotide
ucuuauuaggauugaauaa

SEQ ID NO: 1115924 - RNA, 19 nt, Artificial Sequence
  Description of Artificial Sequence: Synthetic oligonucleotide
uaaauugccccucccaccc

SEQ ID NO: 1115925 - RNA, 19 nt, Artificial Sequence
  Description of Artificial Sequence: Synthetic oligonucleotide
ugaaugcuuacguucaagc

SEQ ID NO: 1115926 - RNA, 19 nt, Artificial Sequence
  Description of Artificial Sequence: Synthetic oligonucleotide
gauugugcuacauuagaac

SEQ ID NO: 1115927 - RNA, 19 nt, Artificial Sequence
  Description of Artificial Sequence: Synthetic oligonucleotide
ucuuguuuaacaggaacag

SEQ ID NO: 1115928 - RNA, 19 nt, Artificial Sequence
  Description of Artificial Sequence: Synthetic oligonucleotide
ugaguucuuuaauugaaca

SEQ ID NO: 1115929 - RNA, 19 nt, Artificial Sequence
  Description of Artificial Sequence: Synthetic oligonucleotide
aaauaguguaaacacuaau

SEQ ID NO: 1115930 - RNA, 19 nt, Artificial Sequence
  Description of Artificial Sequence: Synthetic oligonucleotide
aucuucaguagcuuaaaug

SEQ ID NO: 1115931 - RNA, 19 nt, Artificial Sequence
  Description of Artificial Sequence: Synthetic oligonucleotide
aguaaucacacccauguaa

SEQ ID NO: 1115932 - RNA, 19 nt, Artificial Sequence
  Description of Artificial Sequence: Synthetic oligonucleotide
agacuaagacuugugaucg

SEQ ID NO: 1115933 - RNA, 19 nt, Artificial Sequence
  Description of Artificial Sequence: Synthetic oligonucleotide
gauuggcuggcauaccucg

SEQ ID NO: 1115934 - RNA, 19 nt, Artificial Sequence
  Description of Artificial Sequence: Synthetic oligonucleotide
acuagagacaaacaucacu

SEQ ID NO: 1115935 - RNA, 19 nt, Artificial Sequence
  Description of Artificial Sequence: Synthetic oligonucleotide
ucauccgaaacacuguaga

SEQ ID NO: 1115936 - RNA, 19 nt, Artificial Sequence
  Description of Artificial Sequence: Synthetic oligonucleotide
uccuaggagacuaagacuu

SEQ ID NO: 1115937 - RNA, 19 nt, Artificial Sequence
  Description of Artificial Sequence: Synthetic oligonucleotide
gaaaagggugaagacacgg

SEQ ID NO: 1115938 - RNA, 19 nt, Artificial Sequence
  Description of Artificial Sequence: Synthetic oligonucleotide
aaauaaccuuaaauugccc

SEQ ID NO: 1115939 - RNA, 19 nt, Artificial Sequence
  Description of Artificial Sequence: Synthetic oligonucleotide
aucacacccauguaaggcg

SEQ ID NO: 1115940 - RNA, 19 nt, Artificial Sequence
  Description of Artificial Sequence: Synthetic oligonucleotide
aaucuuaaagaagcccaac

SEQ ID NO: 1115941 - RNA, 19 nt, Artificial Sequence
  Description of Artificial Sequence: Synthetic oligonucleotide
aaagcaaccugauuguguu

SEQ ID NO: 1115942 - RNA, 19 nt, Artificial Sequence
  Description of Artificial Sequence: Synthetic oligonucleotide
acucuaaaguaaucacacc

SEQ ID NO: 1115943 - RNA, 19 nt, Artificial Sequence
  Description of Artificial Sequence: Synthetic oligonucleotide
uaaagaagcccaacauucc

SEQ ID NO: 1115944 - RNA, 19 nt, Artificial Sequence
  Description of Artificial Sequence: Synthetic oligonucleotide
ugcuacauuagaacacuag

SEQ ID NO: 1115945 - RNA, 19 nt, Artificial Sequence
  Description of Artificial Sequence: Synthetic oligonucleotide
aaccuggagagauauaaaa

SEQ ID NO: 1115946 - RNA, 19 nt, Artificial Sequence
  Description of Artificial Sequence: Synthetic oligonucleotide
gaaugcuuacguucaagcc

SEQ ID NO: 1115947 - RNA, 19 nt, Artificial Sequence
  Description of Artificial Sequence: Synthetic oligonucleotide
ugaguucauacgcagcgcc

SEQ ID NO: 1115948 - RNA, 19 nt, Artificial Sequence
  Description of Artificial Sequence: Synthetic oligonucleotide
uauuaggauugaauaaggu

SEQ ID NO: 1115949 - RNA, 19 nt, Artificial Sequence
  Description of Artificial Sequence: Synthetic oligonucleotide
auaaagucugguccaggac

SEQ ID NO: 1115950 - RNA, 19 nt, Artificial Sequence
  Description of Artificial Sequence: Synthetic oligonucleotide
cucgauaaccccuuuuacc

SEQ ID NO: 1115951 - RNA, 19 nt, Artificial Sequence
  Description of Artificial Sequence: Synthetic oligonucleotide
auaaccuuaaauugccccu

SEQ ID NO: 1115952 - RNA, 19 nt, Artificial Sequence
  Description of Artificial Sequence: Synthetic oligonucleotide
uuaauugaacaauuaguuu

SEQ ID NO: 1115953 - RNA, 19 nt, Artificial Sequence
  Description of Artificial Sequence: Synthetic oligonucleotide
uacaucucuauggagguag

SEQ ID NO: 1115954 - RNA, 19 nt, Artificial Sequence
  Description of Artificial Sequence: Synthetic oligonucleotide
gagacuaagacuugugauc

SEQ ID NO: 1115955 - RNA, 19 nt, Artificial Sequence
  Description of Artificial Sequence: Synthetic oligonucleotide
uaugagguagcguaauaac

SEQ ID NO: 1115956 - RNA, 19 nt, Artificial Sequence
  Description of Artificial Sequence: Synthetic oligonucleotide
guagcuuaaaugaauagca

SEQ ID NO: 1115957 - RNA, 19 nt, Artificial Sequence
  Description of Artificial Sequence: Synthetic oligonucleotide
uuaaauugccccucccacc

SEQ ID NO: 1115958 - RNA, 19 nt, Artificial Sequence
  Description of Artificial Sequence: Synthetic oligonucleotide
auuuuacagaggauugugc

SEQ ID NO: 1115959 - RNA, 19 nt, Artificial Sequence
  Description of Artificial Sequence: Synthetic oligonucleotide
ucguaggucauacaucaca

SEQ ID NO: 1115960 - RNA, 19 nt, Artificial Sequence
  Description of Artificial Sequence: Synthetic oligonucleotide
auuagaacacuagagacaa

SEQ ID NO: 1115961 - RNA, 19 nt, Artificial Sequence
  Description of Artificial Sequence: Synthetic oligonucleotide
accccuuuuaccaagggac

SEQ ID NO: 1115962 - RNA, 19 nt, Artificial Sequence
  Description of Artificial Sequence: Synthetic oligonucleotide
guugacgucccauccaagg

SEQ ID NO: 1115963 - RNA, 19 nt, Artificial Sequence
  Description of Artificial Sequence: Synthetic oligonucleotide
uggacuuucuagagaacag

SEQ ID NO: 1115964 - RNA, 19 nt, Artificial Sequence
  Description of Artificial Sequence: Synthetic oligonucleotide
cuuaaauugccccucccac

SEQ ID NO: 1115965 - RNA, 19 nt, Artificial Sequence
  Description of Artificial Sequence: Synthetic oligonucleotide
cuugcauagugcauuaauc

SEQ ID NO: 1115966 - RNA, 19 nt, Artificial Sequence
  Description of Artificial Sequence: Synthetic oligonucleotide
aaauuauguuuccuccaga

SEQ ID NO: 1115967 - RNA, 19 nt, Artificial Sequence
  Description of Artificial Sequence: Synthetic oligonucleotide
agagacaaacaucacuuga

SEQ ID NO: 1115968 - RNA, 19 nt, Artificial Sequence
  Description of Artificial Sequence: Synthetic oligonucleotide
acacuaaucuaacugggga

SEQ ID NO: 1115969 - RNA, 19 nt, Artificial Sequence
  Description of Artificial Sequence: Synthetic oligonucleotide
agcguaauaacugugcugu

SEQ ID NO: 1115970 - RNA, 19 nt, Artificial Sequence
  Description of Artificial Sequence: Synthetic oligonucleotide
caucacaacaaacaucuuc

SEQ ID NO: 1115971 - RNA, 19 nt, Artificial Sequence
  Description of Artificial Sequence: Synthetic oligonucleotide
agaggauugugcuacauua

SEQ ID NO: 1115972 - RNA, 19 nt, Artificial Sequence
  Description of Artificial Sequence: Synthetic oligonucleotide
cauacaugcuugcauagug

SEQ ID NO: 1115973 - RNA, 19 nt, Artificial Sequence
  Description of Artificial Sequence: Synthetic oligonucleotide
aaggcgagggagcauuauc

SEQ ID NO: 1115974 - RNA, 19 nt, Artificial Sequence
  Description of Artificial Sequence: Synthetic oligonucleotide
uaaucacacccauguaagg

SEQ ID NO: 1115975 - RNA, 19 nt, Artificial Sequence
  Description of Artificial Sequence: Synthetic oligonucleotide
uccucaaaauuuccuagga

SEQ ID NO: 1115976 - RNA, 19 nt, Artificial Sequence
  Description of Artificial Sequence: Synthetic oligonucleotide
guaaucacacccauguaag

SEQ ID NO: 1115977 - RNA, 19 nt, Artificial Sequence
  Description of Artificial Sequence: Synthetic oligonucleotide
ucugguugacgucccaucc

SEQ ID NO: 1115978 - RNA, 19 nt, Artificial Sequence
  Description of Artificial Sequence: Synthetic oligonucleotide
cuuuaauugaacaauuagu

SEQ ID NO: 1115979 - RNA, 19 nt, Artificial Sequence
  Description of Artificial Sequence: Synthetic oligonucleotide
acucgauaaccccuuuuac

SEQ ID NO: 1115980 - RNA, 19 nt, Artificial Sequence
  Description of Artificial Sequence: Synthetic oligonucleotide
uguaucguuccugaaggag

SEQ ID NO: 1115981 - RNA, 19 nt, Artificial Sequence
  Description of Artificial Sequence: Synthetic oligonucleotide
acacuugaaugcuucagug

SEQ ID NO: 1115982 - RNA, 19 nt, Artificial Sequence
  Description of Artificial Sequence: Synthetic oligonucleotide
acacuagagacaaacauca

SEQ ID NO: 1115983 - RNA, 19 nt, Artificial Sequence
  Description of Artificial Sequence: Synthetic oligonucleotide
uuucacuuguagacaaaca

SEQ ID NO: 1115984 - RNA, 19 nt, Artificial Sequence
  Description of Artificial Sequence: Synthetic oligonucleotide
uguaucccucaacacaucu

SEQ ID NO: 1115985 - RNA, 19 nt, Artificial Sequence
  Description of Artificial Sequence: Synthetic oligonucleotide
ugaaaagggugaagacacg

SEQ ID NO: 1115986 - RNA, 19 nt, Artificial Sequence
  Description of Artificial Sequence: Synthetic oligonucleotide
agaaugacacuuccaccgg

SEQ ID NO: 1115987 - RNA, 19 nt, Artificial Sequence
  Description of Artificial Sequence: Synthetic oligonucleotide
auugcaacuguccaaugaa

SEQ ID NO: 1115988 - RNA, 19 nt, Artificial Sequence
  Description of Artificial Sequence: Synthetic oligonucleotide
agagaacguccucuggcgc

SEQ ID NO: 1115989 - RNA, 19 nt, Artificial Sequence
  Description of Artificial Sequence: Synthetic oligonucleotide
uguccaaugaagugguuuc

SEQ ID NO: 1115990 - RNA, 19 nt, Artificial Sequence
  Description of Artificial Sequence: Synthetic oligonucleotide
uaggauugaauaaggucac

SEQ ID NO: 1115991 - RNA, 19 nt, Artificial Sequence
  Description of Artificial Sequence: Synthetic oligonucleotide
cauucugugaaugcuuacg

SEQ ID NO: 1115992 - RNA, 19 nt, Artificial Sequence
  Description of Artificial Sequence: Synthetic oligonucleotide
uccauuaauaaagucuggu

SEQ ID NO: 1115993 - RNA, 19 nt, Artificial Sequence
  Description of Artificial Sequence: Synthetic oligonucleotide
guaucguuccugaaggagg

SEQ ID NO: 1115994 - RNA, 19 nt, Artificial Sequence
  Description of Artificial Sequence: Synthetic oligonucleotide
uggucgagaacuucuggag

SEQ ID NO: 1115995 - RNA, 19 nt, Artificial Sequence
  Description of Artificial Sequence: Synthetic oligonucleotide
aggacuugaaaggagaggu

SEQ ID NO: 1115996 - RNA, 19 nt, Artificial Sequence
  Description of Artificial Sequence: Synthetic oligonucleotide
acuaagacuugugaucggg

SEQ ID NO: 1115997 - RNA, 19 nt, Artificial Sequence
  Description of Artificial Sequence: Synthetic oligonucleotide
aguguaagauuugaguuca

SEQ ID NO: 1115998 - RNA, 19 nt, Artificial Sequence
  Description of Artificial Sequence: Synthetic oligonucleotide
ucuaaacgguaauucagaa

SEQ ID NO: 1115999 - RNA, 19 nt, Artificial Sequence
  Description of Artificial Sequence: Synthetic oligonucleotide
uauggagguagaucuuucc

SEQ ID NO: 1116000 - RNA, 19 nt, Artificial Sequence
  Description of Artificial Sequence: Synthetic oligonucleotide
cuaaacgguaauucagaac

SEQ ID NO: 1116001 - RNA, 19 nt, Artificial Sequence
  Description of Artificial Sequence: Synthetic oligonucleotide
gucuuauuaggauugaaua

SEQ ID NO: 1116002 - RNA, 19 nt, Artificial Sequence
  Description of Artificial Sequence: Synthetic oligonucleotide
cuaagacuugugaucgggg

SEQ ID NO: 1116003 - RNA, 19 nt, Artificial Sequence
  Description of Artificial Sequence: Synthetic oligonucleotide
auacaugcuugcauagugc

SEQ ID NO: 1116004 - RNA, 19 nt, Artificial Sequence
  Description of Artificial Sequence: Synthetic oligonucleotide
aguucauacgcagcgccgc

SEQ ID NO: 1116005 - RNA, 19 nt, Artificial Sequence
  Description of Artificial Sequence: Synthetic oligonucleotide
uuguuggcgauucagugua

SEQ ID NO: 1116006 - RNA, 19 nt, Artificial Sequence
  Description of Artificial Sequence: Synthetic oligonucleotide
uagcuuaaaugaauagcac

SEQ ID NO: 1116007 - RNA, 19 nt, Artificial Sequence
  Description of Artificial Sequence: Synthetic oligonucleotide
auuugaguucauacgcagc

SEQ ID NO: 1116008 - RNA, 19 nt, Artificial Sequence
  Description of Artificial Sequence: Synthetic oligonucleotide
ucacuugaguauuaaggaa

SEQ ID NO: 1116009 - RNA, 19 nt, Artificial Sequence
  Description of Artificial Sequence: Synthetic oligonucleotide
aaggucacuuguaucguuc

SEQ ID NO: 1116010 - RNA, 19 nt, Artificial Sequence
  Description of Artificial Sequence: Synthetic oligonucleotide
cauuagaacacuagagaca

SEQ ID NO: 1116011 - RNA, 19 nt, Artificial Sequence
  Description of Artificial Sequence: Synthetic oligonucleotide
uaacuggggauuuugcuau

SEQ ID NO: 1116012 - RNA, 19 nt, Artificial Sequence
  Description of Artificial Sequence: Synthetic oligonucleotide
aaaagcauacaugcuugca

SEQ ID NO: 1116013 - RNA, 19 nt, Artificial Sequence
  Description of Artificial Sequence: Synthetic oligonucleotide
uauucagacauggucgaga

SEQ ID NO: 1116014 - RNA, 19 nt, Artificial Sequence
  Description of Artificial Sequence: Synthetic oligonucleotide
uggacguucucuuuauuaa

SEQ ID NO: 1116015 - RNA, 19 nt, Artificial Sequence
  Description of Artificial Sequence: Synthetic oligonucleotide
uacucgauaaccccuuuua

SEQ ID NO: 1116016 - RNA, 19 nt, Artificial Sequence
  Description of Artificial Sequence: Synthetic oligonucleotide
agcauacaugcuugcauag

SEQ ID NO: 1116017 - RNA, 19 nt, Artificial Sequence
  Description of Artificial Sequence: Synthetic oligonucleotide
uaauaaagucugguccagg

SEQ ID NO: 1116018 - RNA, 19 nt, Artificial Sequence
  Description of Artificial Sequence: Synthetic oligonucleotide
auagcacuuaaaacacacc

SEQ ID NO: 1116019 - RNA, 19 nt, Artificial Sequence
  Description of Artificial Sequence: Synthetic oligonucleotide
ugaugauuggcuggcauac

SEQ ID NO: 1116020 - RNA, 19 nt, Artificial Sequence
  Description of Artificial Sequence: Synthetic oligonucleotide
acaguauugaaaaggguga

SEQ ID NO: 1116021 - RNA, 19 nt, Artificial Sequence
  Description of Artificial Sequence: Synthetic oligonucleotide
aaccccuuuuaccaaggga

SEQ ID NO: 1116022 - RNA, 19 nt, Artificial Sequence
  Description of Artificial Sequence: Synthetic oligonucleotide
ugaaaacugaggauuuguu

SEQ ID NO: 1116023 - RNA, 19 nt, Artificial Sequence
  Description of Artificial Sequence: Synthetic oligonucleotide
gguccauuaauaaagucug

SEQ ID NO: 1116024 - RNA, 19 nt, Artificial Sequence
  Description of Artificial Sequence: Synthetic oligonucleotide
aggagguacucgauaaccc

SEQ ID NO: 1116025 - RNA, 19 nt, Artificial Sequence
  Description of Artificial Sequence: Synthetic oligonucleotide
uaccucguaggucauacau

SEQ ID NO: 1116026 - RNA, 19 nt, Artificial Sequence
  Description of Artificial Sequence: Synthetic oligonucleotide
augauuuuacagaggauug

SEQ ID NO: 1116027 - RNA, 19 nt, Artificial Sequence
  Description of Artificial Sequence: Synthetic oligonucleotide
aggauugugcuacauuaga

SEQ ID NO: 1116028 - RNA, 19 nt, Artificial Sequence
  Description of Artificial Sequence: Synthetic oligonucleotide
uuuacagaggauugugcua

SEQ ID NO: 1116029 - RNA, 19 nt, Artificial Sequence
  Description of Artificial Sequence: Synthetic oligonucleotide
uguagacaaacagugcuuc

SEQ ID NO: 1116030 - RNA, 19 nt, Artificial Sequence
  Description of Artificial Sequence: Synthetic oligonucleotide
uauuaauacuucucuucau

SEQ ID NO: 1116031 - RNA, 19 nt, Artificial Sequence
  Description of Artificial Sequence: Synthetic oligonucleotide
accuuaaauugccccuccc

SEQ ID NO: 1116032 - RNA, 19 nt, Artificial Sequence
  Description of Artificial Sequence: Synthetic oligonucleotide
cugucugagggugaaaggc

SEQ ID NO: 1116033 - RNA, 19 nt, Artificial Sequence
  Description of Artificial Sequence: Synthetic oligonucleotide
uuccuaggagacuaagacu

SEQ ID NO: 1116034 - RNA, 19 nt, Artificial Sequence
  Description of Artificial Sequence: Synthetic oligonucleotide
uccauggacuuucuagaga

SEQ ID NO: 1116035 - RNA, 19 nt, Artificial Sequence
  Description of Artificial Sequence: Synthetic oligonucleotide
uagcguaauaacugugcug

SEQ ID NO: 1116036 - RNA, 19 nt, Artificial Sequence
  Description of Artificial Sequence: Synthetic oligonucleotide
aggagacuaagacuuguga

SEQ ID NO: 1116037 - RNA, 19 nt, Artificial Sequence
  Description of Artificial Sequence: Synthetic oligonucleotide
uggggauuuugcuauugca

SEQ ID NO: 1116038 - RNA, 19 nt, Artificial Sequence
  Description of Artificial Sequence: Synthetic oligonucleotide
gagcauuaucauccgaaac

SEQ ID NO: 1116039 - RNA, 19 nt, Artificial Sequence
  Description of Artificial Sequence: Synthetic oligonucleotide
caguagcuuaaaugaauag

SEQ ID NO: 1116040 - RNA, 19 nt, Artificial Sequence
  Description of Artificial Sequence: Synthetic oligonucleotide
aacgguaauucagaacaga

SEQ ID NO: 1116041 - RNA, 19 nt, Artificial Sequence
  Description of Artificial Sequence: Synthetic oligonucleotide
ugcauagugcauuaaucuu

SEQ ID NO: 1116042 - RNA, 19 nt, Artificial Sequence
  Description of Artificial Sequence: Synthetic oligonucleotide
gaacagagaacguccucug

SEQ ID NO: 1116043 - RNA, 19 nt, Artificial Sequence
  Description of Artificial Sequence: Synthetic oligonucleotide
aaguaccacuggcuccuac

SEQ ID NO: 1116044 - RNA, 19 nt, Artificial Sequence
  Description of Artificial Sequence: Synthetic oligonucleotide
uuucagggguccauuaaua

SEQ ID NO: 1116045 - RNA, 19 nt, Artificial Sequence
  Description of Artificial Sequence: Synthetic oligonucleotide
cagaguuaagugugugggg

SEQ ID NO: 1116046 - RNA, 19 nt, Artificial Sequence
  Description of Artificial Sequence: Synthetic oligonucleotide
ucugugcuaagcugacugc

SEQ ID NO: 1116047 - RNA, 19 nt, Artificial Sequence
  Description of Artificial Sequence: Synthetic oligonucleotide
uagaacucuggaaccucag

SEQ ID NO: 1116048 - RNA, 19 nt, Artificial Sequence
  Description of Artificial Sequence: Synthetic oligonucleotide
guaauucagaacagauucc

SEQ ID NO: 1116049 - RNA, 19 nt, Artificial Sequence
  Description of Artificial Sequence: Synthetic oligonucleotide
ugaaugcuucaguguaucc

SEQ ID NO: 1116050 - RNA, 19 nt, Artificial Sequence
  Description of Artificial Sequence: Synthetic oligonucleotide
ucagggguccauuaauaaa

SEQ ID NO: 1116051 - RNA, 19 nt, Artificial Sequence
  Description of Artificial Sequence: Synthetic oligonucleotide
ugauuuuacagaggauugu

SEQ ID NO: 1116052 - RNA, 19 nt, Artificial Sequence
  Description of Artificial Sequence: Synthetic oligonucleotide
auuuagaacucuggaaccu

SEQ ID NO: 1116053 - RNA, 19 nt, Artificial Sequence
  Description of Artificial Sequence: Synthetic oligonucleotide
cacuugaguauuaaggaaa

SEQ ID NO: 1116054 - RNA, 19 nt, Artificial Sequence
  Description of Artificial Sequence: Synthetic oligonucleotide
agaacaggagccguacauc

SEQ ID NO: 1116055 - RNA, 19 nt, Artificial Sequence
  Description of Artificial Sequence: Synthetic oligonucleotide
aaacgguaauucagaacag

SEQ ID NO: 1116056 - RNA, 19 nt, Artificial Sequence
  Description of Artificial Sequence: Synthetic oligonucleotide
ugacgucccauccaaggaa

SEQ ID NO: 1116057 - RNA, 19 nt, Artificial Sequence
  Description of Artificial Sequence: Synthetic oligonucleotide
uucagggguccauuaauaa

SEQ ID NO: 1116058 - RNA, 19 nt, Artificial Sequence
  Description of Artificial Sequence: Synthetic oligonucleotide
aucuaacuggggauuuugc

SEQ ID NO: 1116059 - RNA, 19 nt, Artificial Sequence
  Description of Artificial Sequence: Synthetic oligonucleotide
ugauuugaugaacuccauu

SEQ ID NO: 1116060 - RNA, 19 nt, Artificial Sequence
  Description of Artificial Sequence: Synthetic oligonucleotide
ugaggucauuuucugugcu

SEQ ID NO: 1116061 - RNA, 19 nt, Artificial Sequence
  Description of Artificial Sequence: Synthetic oligonucleotide
caggguaaguguuauaaaa

SEQ ID NO: 1116062 - RNA, 19 nt, Artificial Sequence
  Description of Artificial Sequence: Synthetic oligonucleotide
auucagacauggucgagaa

SEQ ID NO: 1116063 - RNA, 19 nt, Artificial Sequence
  Description of Artificial Sequence: Synthetic oligonucleotide
aaugacacuuccaccggca

SEQ ID NO: 1116064 - RNA, 19 nt, Artificial Sequence
  Description of Artificial Sequence: Synthetic oligonucleotide
ccaucaacuaugccgaggg

SEQ ID NO: 1116065 - RNA, 19 nt, Artificial Sequence
  Description of Artificial Sequence: Synthetic oligonucleotide
cauggucgagaacuucugg

SEQ ID NO: 1116066 - RNA, 19 nt, Artificial Sequence
  Description of Artificial Sequence: Synthetic oligonucleotide
ugcucacaugucuuugacc

SEQ ID NO: 1116067 - RNA, 19 nt, Artificial Sequence
  Description of Artificial Sequence: Synthetic oligonucleotide
gacuaagacuugugaucgg

SEQ ID NO: 1116068 - RNA, 19 nt, Artificial Sequence
  Description of Artificial Sequence: Synthetic oligonucleotide
cgagggagcauuaucaucc

SEQ ID NO: 1116069 - RNA, 19 nt, Artificial Sequence
  Description of Artificial Sequence: Synthetic oligonucleotide
cuaaccuggagagauauaa

SEQ ID NO: 1116070 - RNA, 19 nt, Artificial Sequence
  Description of Artificial Sequence: Synthetic oligonucleotide
gacuuucuagagaacagga

SEQ ID NO: 1116071 - RNA, 19 nt, Artificial Sequence
  Description of Artificial Sequence: Synthetic oligonucleotide
cuaccucggcaguaaagcc

SEQ ID NO: 1116072 - RNA, 19 nt, Artificial Sequence
  Description of Artificial Sequence: Synthetic oligonucleotide
ucacacccauguaaggcga

SEQ ID NO: 1116073 - RNA, 19 nt, Artificial Sequence
  Description of Artificial Sequence: Synthetic oligonucleotide
ggucuaaacgguaauucag

SEQ ID NO: 1116074 - RNA, 19 nt, Artificial Sequence
  Description of Artificial Sequence: Synthetic oligonucleotide
ucccucaacacaucugcac

SEQ ID NO: 1116075 - RNA, 19 nt, Artificial Sequence
  Description of Artificial Sequence: Synthetic oligonucleotide
cucuucaauauucagacau

SEQ ID NO: 1116076 - RNA, 19 nt, Artificial Sequence
  Description of Artificial Sequence: Synthetic oligonucleotide
cuagagacaaacaucacuu

SEQ ID NO: 1116077 - RNA, 19 nt, Artificial Sequence
  Description of Artificial Sequence: Synthetic oligonucleotide
aggaacagagaacguccuc

SEQ ID NO: 1116078 - RNA, 19 nt, Artificial Sequence
  Description of Artificial Sequence: Synthetic oligonucleotide
ugaaaccuucaguaucuuc

SEQ ID NO: 1116079 - RNA, 19 nt, Artificial Sequence
  Description of Artificial Sequence: Synthetic oligonucleotide
cauaccucguaggucauac

SEQ ID NO: 1116080 - RNA, 19 nt, Artificial Sequence
  Description of Artificial Sequence: Synthetic oligonucleotide
uggcgauucaguguaagau

SEQ ID NO: 1116081 - RNA, 19 nt, Artificial Sequence
  Description of Artificial Sequence: Synthetic oligonucleotide
gucgagaacuucuggagga

SEQ ID NO: 1116082 - RNA, 19 nt, Artificial Sequence
  Description of Artificial Sequence: Synthetic oligonucleotide
cuccauggacuuucuagag

SEQ ID NO: 1116083 - RNA, 19 nt, Artificial Sequence
  Description of Artificial Sequence: Synthetic oligonucleotide
ggucgagaacuucuggagg

SEQ ID NO: 1116084 - RNA, 19 nt, Artificial Sequence
  Description of Artificial Sequence: Synthetic oligonucleotide
uuuagaacucuggaaccuc

SEQ ID NO: 1116085 - RNA, 19 nt, Artificial Sequence
  Description of Artificial Sequence: Synthetic oligonucleotide
uuggcgauucaguguaaga

SEQ ID NO: 1116086 - RNA, 19 nt, Artificial Sequence
  Description of Artificial Sequence: Synthetic oligonucleotide
uaaccuggagagauauaaa

SEQ ID NO: 1116087 - RNA, 19 nt, Artificial Sequence
  Description of Artificial Sequence: Synthetic oligonucleotide
ugguugacgucccauccaa

SEQ ID NO: 1116088 - RNA, 19 nt, Artificial Sequence
  Description of Artificial Sequence: Synthetic oligonucleotide
agacacuugaaugcuucag

SEQ ID NO: 1116089 - RNA, 19 nt, Artificial Sequence
  Description of Artificial Sequence: Synthetic oligonucleotide
accaagggacucuaaagua

SEQ ID NO: 1116090 - RNA, 19 nt, Artificial Sequence
  Description of Artificial Sequence: Synthetic oligonucleotide
gccgcuaucaaccuccaug

SEQ ID NO: 1116091 - RNA, 19 nt, Artificial Sequence
  Description of Artificial Sequence: Synthetic oligonucleotide
gaguucauacgcagcgccg

SEQ ID NO: 1116092 - RNA, 19 nt, Artificial Sequence
  Description of Artificial Sequence: Synthetic oligonucleotide
ccuccagacacuugaaugc

SEQ ID NO: 1116093 - RNA, 19 nt, Artificial Sequence
  Description of Artificial Sequence: Synthetic oligonucleotide
gaaggagguacucgauaac

SEQ ID NO: 1116094 - RNA, 19 nt, Artificial Sequence
  Description of Artificial Sequence: Synthetic oligonucleotide
uccaccggcagaguuaagu

SEQ ID NO: 1116095 - RNA, 19 nt, Artificial Sequence
  Description of Artificial Sequence: Synthetic oligonucleotide
guaaagccaucaacuaugc

SEQ ID NO: 1116096 - RNA, 19 nt, Artificial Sequence
  Description of Artificial Sequence: Synthetic oligonucleotide
augcuuacguucaagccug

SEQ ID NO: 1116097 - RNA, 19 nt, Artificial Sequence
  Description of Artificial Sequence: Synthetic oligonucleotide
ggagguacucgauaacccc

SEQ ID NO: 1116098 - RNA, 19 nt, Artificial Sequence
  Description of Artificial Sequence: Synthetic oligonucleotide
gguagcguaauaacugugc

SEQ ID NO: 1116099 - RNA, 19 nt, Artificial Sequence
  Description of Artificial Sequence: Synthetic oligonucleotide
cuaacuggggauuuugcua

SEQ ID NO: 1116100 - RNA, 19 nt, Artificial Sequence
  Description of Artificial Sequence: Synthetic oligonucleotide
uguaaggcgagggagcauu

SEQ ID NO: 1116101 - RNA, 19 nt, Artificial Sequence
  Description of Artificial Sequence: Synthetic oligonucleotide
ugauuggcuggcauaccuc

SEQ ID NO: 1116102 - RNA, 19 nt, Artificial Sequence
  Description of Artificial Sequence: Synthetic oligonucleotide
aaguaaucacacccaugua

SEQ ID NO: 1116103 - RNA, 19 nt, Artificial Sequence
  Description of Artificial Sequence: Synthetic oligonucleotide
acuaaucuaacuggggauu

SEQ ID NO: 1116104 - RNA, 19 nt, Artificial Sequence
  Description of Artificial Sequence: Synthetic oligonucleotide
uacguucaagccugggcac

SEQ ID NO: 1116105 - RNA, 19 nt, Artificial Sequence
  Description of Artificial Sequence: Synthetic oligonucleotide
agauuugaguucauacgca

SEQ ID NO: 1116106 - RNA, 19 nt, Artificial Sequence
  Description of Artificial Sequence: Synthetic oligonucleotide
agccguacaucucuaugga

SEQ ID NO: 1116107 - RNA, 19 nt, Artificial Sequence
  Description of Artificial Sequence: Synthetic oligonucleotide
auaaccccuuuuaccaagg

SEQ ID NO: 1116108 - RNA, 19 nt, Artificial Sequence
  Description of Artificial Sequence: Synthetic oligonucleotide
uaaccuuaaauugccccuc

SEQ ID NO: 1116109 - RNA, 19 nt, Artificial Sequence
  Description of Artificial Sequence: Synthetic oligonucleotide
ugcuucaguguaucccuca

SEQ ID NO: 1116110 - RNA, 19 nt, Artificial Sequence
  Description of Artificial Sequence: Synthetic oligonucleotide
ccgcuaucaaccuccaugg

SEQ ID NO: 1116111 - RNA, 19 nt, Artificial Sequence
  Description of Artificial Sequence: Synthetic oligonucleotide
uagagaacaggagccguac

SEQ ID NO: 1116112 - RNA, 19 nt, Artificial Sequence
  Description of Artificial Sequence: Synthetic oligonucleotide
gacacuugaaugcuucagu

SEQ ID NO: 1116113 - RNA, 19 nt, Artificial Sequence
  Description of Artificial Sequence: Synthetic oligonucleotide
ugugaaugcuuacguucaa

SEQ ID NO: 1116114 - RNA, 19 nt, Artificial Sequence
  Description of Artificial Sequence: Synthetic oligonucleotide
ucuuucacuuguagacaaa

SEQ ID NO: 1116115 - RNA, 19 nt, Artificial Sequence
  Description of Artificial Sequence: Synthetic oligonucleotide
gaguuaaguguguggggca

SEQ ID NO: 1116116 - RNA, 19 nt, Artificial Sequence
  Description of Artificial Sequence: Synthetic oligonucleotide
ucguuccugaaggagguac

SEQ ID NO: 1116117 - RNA, 19 nt, Artificial Sequence
  Description of Artificial Sequence: Synthetic oligonucleotide
cuggggauuuugcuauugc

SEQ ID NO: 1116118 - RNA, 19 nt, Artificial Sequence
  Description of Artificial Sequence: Synthetic oligonucleotide
auccgaaacacuguagaau

SEQ ID NO: 1116119 - RNA, 19 nt, Artificial Sequence
  Description of Artificial Sequence: Synthetic oligonucleotide
gucuaaacgguaauucaga

SEQ ID NO: 1116120 - RNA, 19 nt, Artificial Sequence
  Description of Artificial Sequence: Synthetic oligonucleotide
gagaacguccucuggcgca

SEQ ID NO: 1116121 - RNA, 19 nt, Artificial Sequence
  Description of Artificial Sequence: Synthetic oligonucleotide
ugugcuaagcugacugcuu

SEQ ID NO: 1116122 - RNA, 19 nt, Artificial Sequence
  Description of Artificial Sequence: Synthetic oligonucleotide
acaucuuggugaaaacuga

SEQ ID NO: 1116123 - RNA, 19 nt, Artificial Sequence
  Description of Artificial Sequence: Synthetic oligonucleotide
aagaagcccaacauuccau

SEQ ID NO: 1116124 - RNA, 19 nt, Artificial Sequence
  Description of Artificial Sequence: Synthetic oligonucleotide
ggauuuguuggcgauucag

SEQ ID NO: 1116125 - RNA, 19 nt, Artificial Sequence
  Description of Artificial Sequence: Synthetic oligonucleotide
ucauacgcagcgccgcuau

SEQ ID NO: 1116126 - RNA, 19 nt, Artificial Sequence
  Description of Artificial Sequence: Synthetic oligonucleotide
aagucugguccaggacagc

SEQ ID NO: 1116127 - RNA, 19 nt, Artificial Sequence
  Description of Artificial Sequence: Synthetic oligonucleotide
accggcagaguuaagugug

SEQ ID NO: 1116128 - RNA, 19 nt, Artificial Sequence
  Description of Artificial Sequence: Synthetic oligonucleotide
ggucagcccugucugaggg

SEQ ID NO: 1116129 - RNA, 19 nt, Artificial Sequence
  Description of Artificial Sequence: Synthetic oligonucleotide
uuaaguguguggggcagaa

SEQ ID NO: 1116130 - RNA, 19 nt, Artificial Sequence
  Description of Artificial Sequence: Synthetic oligonucleotide
aggucauacaucacaacaa

SEQ ID NO: 1116131 - RNA, 19 nt, Artificial Sequence
  Description of Artificial Sequence: Synthetic oligonucleotide
acuugaguauuaaggaaaa

SEQ ID NO: 1116132 - RNA, 19 nt, Artificial Sequence
  Description of Artificial Sequence: Synthetic oligonucleotide
gcucacaugucuuugaccu

SEQ ID NO: 1116133 - RNA, 19 nt, Artificial Sequence
  Description of Artificial Sequence: Synthetic oligonucleotide
ucggcaguaaagccaucaa

SEQ ID NO: 1116134 - RNA, 19 nt, Artificial Sequence
  Description of Artificial Sequence: Synthetic oligonucleotide
auaaggucacuuguaucgu

SEQ ID NO: 1116135 - RNA, 19 nt, Artificial Sequence
  Description of Artificial Sequence: Synthetic oligonucleotide
cuugaguauuaaggaaaac

SEQ ID NO: 1116136 - RNA, 19 nt, Artificial Sequence
  Description of Artificial Sequence: Synthetic oligonucleotide
cuuugcucacaugucuuug

SEQ ID NO: 1116137 - RNA, 19 nt, Artificial Sequence
  Description of Artificial Sequence: Synthetic oligonucleotide
acgguaauucagaacagau

SEQ ID NO: 1116138 - RNA, 19 nt, Artificial Sequence
  Description of Artificial Sequence: Synthetic oligonucleotide
uuuuaccaagggacucuaa

SEQ ID NO: 1116139 - RNA, 19 nt, Artificial Sequence
  Description of Artificial Sequence: Synthetic oligonucleotide
accucguaggucauacauc

SEQ ID NO: 1116140 - RNA, 19 nt, Artificial Sequence
  Description of Artificial Sequence: Synthetic oligonucleotide
ggagguagaucuuuccaga

SEQ ID NO: 1116141 - RNA, 19 nt, Artificial Sequence
  Description of Artificial Sequence: Synthetic oligonucleotide
guuggcgauucaguguaag

SEQ ID NO: 1116142 - RNA, 19 nt, Artificial Sequence
  Description of Artificial Sequence: Synthetic oligonucleotide
gagguagcguaauaacugu

SEQ ID NO: 1116143 - RNA, 19 nt, Artificial Sequence
  Description of Artificial Sequence: Synthetic oligonucleotide
gaugauuggcuggcauacc

SEQ ID NO: 1116144 - RNA, 19 nt, Artificial Sequence
  Description of Artificial Sequence: Synthetic oligonucleotide
uuggcuggcauaccucgua

SEQ ID NO: 1116145 - RNA, 19 nt, Artificial Sequence
  Description of Artificial Sequence: Synthetic oligonucleotide
caucaacuaugccgagggg

SEQ ID NO: 1116146 - RNA, 19 nt, Artificial Sequence
  Description of Artificial Sequence: Synthetic oligonucleotide
auauucagacauggucgag

SEQ ID NO: 1116147 - RNA, 19 nt, Artificial Sequence
  Description of Artificial Sequence: Synthetic oligonucleotide
cacccauguaaggcgaggg

SEQ ID NO: 1116148 - RNA, 19 nt, Artificial Sequence
  Description of Artificial Sequence: Synthetic oligonucleotide
cuuaaagaagcccaacauu

SEQ ID NO: 1116149 - RNA, 19 nt, Artificial Sequence
  Description of Artificial Sequence: Synthetic oligonucleotide
ugcuuacguucaagccugg

SEQ ID NO: 1116150 - RNA, 19 nt, Artificial Sequence
  Description of Artificial Sequence: Synthetic oligonucleotide
ccuaccucggcaguaaagc

SEQ ID NO: 1116151 - RNA, 19 nt, Artificial Sequence
  Description of Artificial Sequence: Synthetic oligonucleotide
agguagaucuuuccagauu

SEQ ID NO: 1116152 - RNA, 19 nt, Artificial Sequence
  Description of Artificial Sequence: Synthetic oligonucleotide
gguagaucuuuccagauuu

SEQ ID NO: 1116153 - RNA, 19 nt, Artificial Sequence
  Description of Artificial Sequence: Synthetic oligonucleotide
caccacagucuuauuagga

SEQ ID NO: 1116154 - RNA, 19 nt, Artificial Sequence
  Description of Artificial Sequence: Synthetic oligonucleotide
cuggacguucucuuuauua

SEQ ID NO: 1116155 - RNA, 19 nt, Artificial Sequence
  Description of Artificial Sequence: Synthetic oligonucleotide
gauuuguuggcgauucagu

SEQ ID NO: 1116156 - RNA, 19 nt, Artificial Sequence
  Description of Artificial Sequence: Synthetic oligonucleotide
guagcguaauaacugugcu

SEQ ID NO: 1116157 - RNA, 19 nt, Artificial Sequence
  Description of Artificial Sequence: Synthetic oligonucleotide
cucugguugacgucccauc

SEQ ID NO: 1116158 - RNA, 19 nt, Artificial Sequence
  Description of Artificial Sequence: Synthetic oligonucleotide
ccucguaggucauacauca

SEQ ID NO: 1116159 - RNA, 19 nt, Artificial Sequence
  Description of Artificial Sequence: Synthetic oligonucleotide
guaucccucaacacaucug

SEQ ID NO: 1116160 - RNA, 19 nt, Artificial Sequence
  Description of Artificial Sequence: Synthetic oligonucleotide
ggugaaaggcucugguuga

SEQ ID NO: 1116161 - RNA, 19 nt, Artificial Sequence
  Description of Artificial Sequence: Synthetic oligonucleotide
uucuggaggacaggcuucu

SEQ ID NO: 1116162 - RNA, 19 nt, Artificial Sequence
  Description of Artificial Sequence: Synthetic oligonucleotide
agaacguccucuggcgcag

SEQ ID NO: 1116163 - RNA, 19 nt, Artificial Sequence
  Description of Artificial Sequence: Synthetic oligonucleotide
acccauguaaggcgaggga

SEQ ID NO: 1116164 - RNA, 19 nt, Artificial Sequence
  Description of Artificial Sequence: Synthetic oligonucleotide
ggagccguacaucucuaug

SEQ ID NO: 1116165 - RNA, 19 nt, Artificial Sequence
  Description of Artificial Sequence: Synthetic oligonucleotide
uccucuggcgcaggaaugu

SEQ ID NO: 1116166 - RNA, 19 nt, Artificial Sequence
  Description of Artificial Sequence: Synthetic oligonucleotide
aacguccucuggcgcagga

SEQ ID NO: 1116167 - RNA, 19 nt, Artificial Sequence
  Description of Artificial Sequence: Synthetic oligonucleotide
cauccgaaacacuguagaa

SEQ ID NO: 1116168 - RNA, 19 nt, Artificial Sequence
  Description of Artificial Sequence: Synthetic oligonucleotide
ggagcacucgaacucaaaa

SEQ ID NO: 1116169 - RNA, 19 nt, Artificial Sequence
  Description of Artificial Sequence: Synthetic oligonucleotide
acauggucgagaacuucug

SEQ ID NO: 1116170 - RNA, 19 nt, Artificial Sequence
  Description of Artificial Sequence: Synthetic oligonucleotide
ggguccauuaauaaagucu

SEQ ID NO: 1116171 - RNA, 19 nt, Artificial Sequence
  Description of Artificial Sequence: Synthetic oligonucleotide
ccauggacuuucuagagaa

SEQ ID NO: 1116172 - RNA, 19 nt, Artificial Sequence
  Description of Artificial Sequence: Synthetic oligonucleotide
agguagcguaauaacugug

SEQ ID NO: 1116173 - RNA, 19 nt, Artificial Sequence
  Description of Artificial Sequence: Synthetic oligonucleotide
auguaugagguagcguaau

SEQ ID NO: 1116174 - RNA, 19 nt, Artificial Sequence
  Description of Artificial Sequence: Synthetic oligonucleotide
uaaucuaacuggggauuuu

SEQ ID NO: 1116175 - RNA, 19 nt, Artificial Sequence
  Description of Artificial Sequence: Synthetic oligonucleotide
ggggucuaaacgguaauuc

SEQ ID NO: 1116176 - RNA, 19 nt, Artificial Sequence
  Description of Artificial Sequence: Synthetic oligonucleotide
agugauguguccagaucaa

SEQ ID NO: 1116177 - RNA, 19 nt, Artificial Sequence
  Description of Artificial Sequence: Synthetic oligonucleotide
gagggugaaaggcucuggu

SEQ ID NO: 1116178 - RNA, 19 nt, Artificial Sequence
  Description of Artificial Sequence: Synthetic oligonucleotide
aggauuuguuggcgauuca

SEQ ID NO: 1116179 - RNA, 19 nt, Artificial Sequence
  Description of Artificial Sequence: Synthetic oligonucleotide
ggagacuaagacuugugau

SEQ ID NO: 1116180 - RNA, 19 nt, Artificial Sequence
  Description of Artificial Sequence: Synthetic oligonucleotide
auaccucguaggucauaca

SEQ ID NO: 1116181 - RNA, 19 nt, Artificial Sequence
  Description of Artificial Sequence: Synthetic oligonucleotide
cucguaggucauacaucac

SEQ ID NO: 1116182 - RNA, 19 nt, Artificial Sequence
  Description of Artificial Sequence: Synthetic oligonucleotide
ggcuggcauaccucguagg

SEQ ID NO: 1116183 - RNA, 19 nt, Artificial Sequence
  Description of Artificial Sequence: Synthetic oligonucleotide
agggagcauuaucauccga

SEQ ID NO: 1116184 - RNA, 19 nt, Artificial Sequence
  Description of Artificial Sequence: Synthetic oligonucleotide
aaacuaaccuggagagaua

SEQ ID NO: 1116185 - RNA, 19 nt, Artificial Sequence
  Description of Artificial Sequence: Synthetic oligonucleotide
cccauguaaggcgagggag

SEQ ID NO: 1116186 - RNA, 19 nt, Artificial Sequence
  Description of Artificial Sequence: Synthetic oligonucleotide
aacuggggauuuugcuauu

SEQ ID NO: 1116187 - RNA, 19 nt, Artificial Sequence
  Description of Artificial Sequence: Synthetic oligonucleotide
cacuaaucuaacuggggau

SEQ ID NO: 1116188 - RNA, 19 nt, Artificial Sequence
  Description of Artificial Sequence: Synthetic oligonucleotide
gagguagaucuuuccagau

SEQ ID NO: 1116189 - RNA, 19 nt, Artificial Sequence
  Description of Artificial Sequence: Synthetic oligonucleotide
ggggauuuugcuauugcaa

SEQ ID NO: 1116190 - RNA, 19 nt, Artificial Sequence
  Description of Artificial Sequence: Synthetic oligonucleotide
gcauagugcauuaaucuua

SEQ ID NO: 1116191 - RNA, 19 nt, Artificial Sequence
  Description of Artificial Sequence: Synthetic oligonucleotide
gagguacucgauaaccccu

SEQ ID NO: 1116192 - RNA, 19 nt, Artificial Sequence
  Description of Artificial Sequence: Synthetic oligonucleotide
cacuugaaugcuucagugu

SEQ ID NO: 1116193 - RNA, 19 nt, Artificial Sequence
  Description of Artificial Sequence: Synthetic oligonucleotide
ggauugugcuacauuagaa

SEQ ID NO: 1116194 - RNA, 19 nt, Artificial Sequence
  Description of Artificial Sequence: Synthetic oligonucleotide
caagggacucuaaaguaau

SEQ ID NO: 1116195 - RNA, 19 nt, Artificial Sequence
  Description of Artificial Sequence: Synthetic oligonucleotide
ggaacagagaacguccucu

SEQ ID NO: 1116196 - RNA, 19 nt, Artificial Sequence
  Description of Artificial Sequence: Synthetic oligonucleotide
gccguacaucucuauggag

SEQ ID NO: 1116197 - RNA, 19 nt, Artificial Sequence
  Description of Artificial Sequence: Synthetic oligonucleotide
acugagcaaauaaccuuaa

SEQ ID NO: 1116198 - RNA, 19 nt, Artificial Sequence
  Description of Artificial Sequence: Synthetic oligonucleotide
cugguugacgucccaucca

SEQ ID NO: 1116199 - RNA, 19 nt, Artificial Sequence
  Description of Artificial Sequence: Synthetic oligonucleotide
accucagauguaugaggua

SEQ ID NO: 1116200 - RNA, 19 nt, Artificial Sequence
  Description of Artificial Sequence: Synthetic oligonucleotide
caaaauuuccuaggagacu

SEQ ID NO: 1116201 - RNA, 19 nt, Artificial Sequence
  Description of Artificial Sequence: Synthetic oligonucleotide
cugcacuuuucagucuuuc

SEQ ID NO: 1116202 - RNA, 19 nt, Artificial Sequence
  Description of Artificial Sequence: Synthetic oligonucleotide
ccuuaaauugccccuccca

SEQ ID NO: 1116203 - RNA, 19 nt, Artificial Sequence
  Description of Artificial Sequence: Synthetic oligonucleotide
gcaggggagggccacuccc

SEQ ID NO: 1116204 - RNA, 19 nt, Artificial Sequence
  Description of Artificial Sequence: Synthetic oligonucleotide
ccaccggcagaguuaagug

SEQ ID NO: 1116205 - RNA, 19 nt, Artificial Sequence
  Description of Artificial Sequence: Synthetic oligonucleotide
gggguccauuaauaaaguc

SEQ ID NO: 1116206 - RNA, 19 nt, Artificial Sequence
  Description of Artificial Sequence: Synthetic oligonucleotide
caguauugaaaagggugaa

SEQ ID NO: 1116207 - RNA, 19 nt, Artificial Sequence
  Description of Artificial Sequence: Synthetic oligonucleotide
cauuaucauccgaaacacu

SEQ ID NO: 1116208 - RNA, 19 nt, Artificial Sequence
  Description of Artificial Sequence: Synthetic oligonucleotide
uaaggcgagggagcauuau

SEQ ID NO: 1116209 - RNA, 19 nt, Artificial Sequence
  Description of Artificial Sequence: Synthetic oligonucleotide
acuuccaccggcagaguua

SEQ ID NO: 1116210 - RNA, 19 nt, Artificial Sequence
  Description of Artificial Sequence: Synthetic oligonucleotide
cgaaacacuguagaaugac

SEQ ID NO: 1116211 - RNA, 19 nt, Artificial Sequence
  Description of Artificial Sequence: Synthetic oligonucleotide
aggagccguacaucucuau

SEQ ID NO: 1116212 - RNA, 19 nt, Artificial Sequence
  Description of Artificial Sequence: Synthetic oligonucleotide
caguuuucagcugguuuga

SEQ ID NO: 1116213 - RNA, 19 nt, Artificial Sequence
  Description of Artificial Sequence: Synthetic oligonucleotide
uucauacgcagcgccgcua

SEQ ID NO: 1116214 - RNA, 19 nt, Artificial Sequence
  Description of Artificial Sequence: Synthetic oligonucleotide
ccuaggagacuaagacuug

SEQ ID NO: 1116215 - RNA, 19 nt, Artificial Sequence
  Description of Artificial Sequence: Synthetic oligonucleotide
cuuccaccggcagaguuaa

SEQ ID NO: 1116216 - RNA, 19 nt, Artificial Sequence
  Description of Artificial Sequence: Synthetic oligonucleotide
cagaucaaagcaaccugau

SEQ ID NO: 1116217 - RNA, 19 nt, Artificial Sequence
  Description of Artificial Sequence: Synthetic oligonucleotide
cuaggagacuaagacuugu

SEQ ID NO: 1116218 - RNA, 19 nt, Artificial Sequence
  Description of Artificial Sequence: Synthetic oligonucleotide
uggcuccuaccucggcagu

SEQ ID NO: 1116219 - RNA, 19 nt, Artificial Sequence
  Description of Artificial Sequence: Synthetic oligonucleotide
cuuuuaccaagggacucua

SEQ ID NO: 1116220 - RNA, 19 nt, Artificial Sequence
  Description of Artificial Sequence: Synthetic oligonucleotide
gcuugcauagugcauuaau

SEQ ID NO: 1116221 - RNA, 19 nt, Artificial Sequence
  Description of Artificial Sequence: Synthetic oligonucleotide
cccaggguaaguguuauaa

SEQ ID NO: 1116222 - RNA, 19 nt, Artificial Sequence
  Description of Artificial Sequence: Synthetic oligonucleotide
agguacucgauaaccccuu

SEQ ID NO: 1116223 - RNA, 19 nt, Artificial Sequence
  Description of Artificial Sequence: Synthetic oligonucleotide
ggcgauucaguguaagauu

SEQ ID NO: 1116224 - RNA, 19 nt, Artificial Sequence
  Description of Artificial Sequence: Synthetic oligonucleotide
gcguaauaacugugcugug

SEQ ID NO: 1116225 - RNA, 19 nt, Artificial Sequence
  Description of Artificial Sequence: Synthetic oligonucleotide
guagaucuuuccagauuua

SEQ ID NO: 1116226 - RNA, 19 nt, Artificial Sequence
  Description of Artificial Sequence: Synthetic oligonucleotide
ggauugaauaaggucacuu

SEQ ID NO: 1116227 - RNA, 19 nt, Artificial Sequence
  Description of Artificial Sequence: Synthetic oligonucleotide
caccggcagaguuaagugu

SEQ ID NO: 1116228 - RNA, 19 nt, Artificial Sequence
  Description of Artificial Sequence: Synthetic oligonucleotide
ggacuugaaaggagagguc

SEQ ID NO: 1116229 - RNA, 19 nt, Artificial Sequence
  Description of Artificial Sequence: Synthetic oligonucleotide
guaugauuuuacagaggau

SEQ ID NO: 1116230 - RNA, 19 nt, Artificial Sequence
  Description of Artificial Sequence: Synthetic oligonucleotide
guucauacgcagcgccgcu

SEQ ID NO: 1116231 - RNA, 19 nt, Artificial Sequence
  Description of Artificial Sequence: Synthetic oligonucleotide
cauacgcagcgccgcuauc

SEQ ID NO: 1116232 - RNA, 19 nt, Artificial Sequence
  Description of Artificial Sequence: Synthetic oligonucleotide
gguugacgucccauccaag

SEQ ID NO: 1116233 - RNA, 19 nt, Artificial Sequence
  Description of Artificial Sequence: Synthetic oligonucleotide
acgucccauccaaggaaug

SEQ ID NO: 1116234 - RNA, 19 nt, Artificial Sequence
  Description of Artificial Sequence: Synthetic oligonucleotide
gacgucccauccaaggaau

SEQ ID NO: 1116235 - RNA, 19 nt, Artificial Sequence
  Description of Artificial Sequence: Synthetic oligonucleotide
cuaaucuaacuggggauuu

SEQ ID NO: 1116236 - RNA, 19 nt, Artificial Sequence
  Description of Artificial Sequence: Synthetic oligonucleotide
cucuggcgcaggaaugucu

SEQ ID NO: 1116237 - RNA, 19 nt, Artificial Sequence
  Description of Artificial Sequence: Synthetic oligonucleotide
cuguccaaugaagugguuu

SEQ ID NO: 1116238 - RNA, 19 nt, Artificial Sequence
  Description of Artificial Sequence: Synthetic oligonucleotide
ccgaaacacuguagaauga

SEQ ID NO: 1116239 - RNA, 19 nt, Artificial Sequence
  Description of Artificial Sequence: Synthetic oligonucleotide
cuccagacacuugaaugcu

SEQ ID NO: 1116240 - RNA, 19 nt, Artificial Sequence
  Description of Artificial Sequence: Synthetic oligonucleotide
caucugcacuuuucagucu

SEQ ID NO: 1116241 - RNA, 19 nt, Artificial Sequence
  Description of Artificial Sequence: Synthetic oligonucleotide
cuggcgcaggaaugucuga

SEQ ID NO: 1116242 - RNA, 19 nt, Artificial Sequence
  Description of Artificial Sequence: Synthetic oligonucleotide
gugugcuggacguucucuu

SEQ ID NO: 1116243 - RNA, 19 nt, Artificial Sequence
  Description of Artificial Sequence: Synthetic oligonucleotide
ccaggguaaguguuauaaa

SEQ ID NO: 1116244 - RNA, 19 nt, Artificial Sequence
  Description of Artificial Sequence: Synthetic oligonucleotide
agcccugucugagggugaa

SEQ ID NO: 1116245 - RNA, 19 nt, Artificial Sequence
  Description of Artificial Sequence: Synthetic oligonucleotide
cagaggauugugcuacauu

SEQ ID NO: 1116246 - RNA, 19 nt, Artificial Sequence
  Description of Artificial Sequence: Synthetic oligonucleotide
ggucacuuguaucguuccu

SEQ ID NO: 1116247 - RNA, 19 nt, Artificial Sequence
  Description of Artificial Sequence: Synthetic oligonucleotide
cguacaucucuauggaggu

SEQ ID NO: 1116248 - RNA, 19 nt, Artificial Sequence
  Description of Artificial Sequence: Synthetic oligonucleotide
guaaggcgagggagcauua

SEQ ID NO: 1116249 - RNA, 19 nt, Artificial Sequence
  Description of Artificial Sequence: Synthetic oligonucleotide
cagacauggucgagaacuu

SEQ ID NO: 1116250 - RNA, 19 nt, Artificial Sequence
  Description of Artificial Sequence: Synthetic oligonucleotide
acguccucuggcgcaggaa

SEQ ID NO: 1116251 - RNA, 19 nt, Artificial Sequence
  Description of Artificial Sequence: Synthetic oligonucleotide
caggagccguacaucucua

SEQ ID NO: 1116252 - RNA, 19 nt, Artificial Sequence
  Description of Artificial Sequence: Synthetic oligonucleotide
gcauacaugcuugcauagu

SEQ ID NO: 1116253 - RNA, 19 nt, Artificial Sequence
  Description of Artificial Sequence: Synthetic oligonucleotide
cagcccugucugaggguga

SEQ ID NO: 1116254 - RNA, 19 nt, Artificial Sequence
  Description of Artificial Sequence: Synthetic oligonucleotide
cguaauaacugugcugugu

SEQ ID NO: 1116255 - RNA, 19 nt, Artificial Sequence
  Description of Artificial Sequence: Synthetic oligonucleotide
gcuccuaccucggcaguaa

SEQ ID NO: 1116256 - RNA, 19 nt, Artificial Sequence
  Description of Artificial Sequence: Synthetic oligonucleotide
ccucaacacaucugcacuu

SEQ ID NO: 1116257 - RNA, 19 nt, Artificial Sequence
  Description of Artificial Sequence: Synthetic oligonucleotide
gcagcgccgcuaucaaccu

SEQ ID NO: 1116258 - RNA, 19 nt, Artificial Sequence
  Description of Artificial Sequence: Synthetic oligonucleotide
cgguaauucagaacagauu

SEQ ID NO: 1116259 - RNA, 19 nt, Artificial Sequence
  Description of Artificial Sequence: Synthetic oligonucleotide
ggccacuccccuggcucug

SEQ ID NO: 1116260 - RNA, 19 nt, Artificial Sequence
  Description of Artificial Sequence: Synthetic oligonucleotide
ggcuccuaccucggcagua

SEQ ID NO: 1116261 - RNA, 19 nt, Artificial Sequence
  Description of Artificial Sequence: Synthetic oligonucleotide
ccucuggcgcaggaauguc

SEQ ID NO: 1116262 - RNA, 19 nt, Artificial Sequence
  Description of Artificial Sequence: Synthetic oligonucleotide
ggggagcacucgaacucaa

SEQ ID NO: 1116263 - RNA, 19 nt, Artificial Sequence
  Description of Artificial Sequence: Synthetic oligonucleotide
gcauaccucguaggucaua

SEQ ID NO: 1116264 - RNA, 19 nt, Artificial Sequence
  Description of Artificial Sequence: Synthetic oligonucleotide
gcucugguugacgucccau

SEQ ID NO: 1116265 - RNA, 19 nt, Artificial Sequence
  Description of Artificial Sequence: Synthetic oligonucleotide
ccggcagaguuaagugugu

SEQ ID NO: 1116266 - RNA, 19 nt, Artificial Sequence
  Description of Artificial Sequence: Synthetic oligonucleotide
gcuggacguucucuuuauu

SEQ ID NO: 1116267 - RNA, 19 nt, Artificial Sequence
  Description of Artificial Sequence: Synthetic oligonucleotide
cgcuaucaaccuccaugga

SEQ ID NO: 1116268 - RNA, 19 nt, Artificial Sequence
  Description of Artificial Sequence: Synthetic oligonucleotide
cguccucuggcgcaggaau

SEQ ID NO: 1116269 - RNA, 19 nt, Artificial Sequence
  Description of Artificial Sequence: Synthetic oligonucleotide
gccacuccccuggcucuga

SEQ ID NO: 1116270 - RNA, 19 nt, Artificial Sequence
  Description of Artificial Sequence: Synthetic oligonucleotide
ggcauaccucguaggucau

SEQ ID NO: 1116271 - RNA, 19 nt, Artificial Sequence
  Description of Artificial Sequence: Synthetic oligonucleotide
cgcaggaaugucugaugau

SEQ ID NO: 1116272 - RNA, 19 nt, Artificial Sequence
  Description of Artificial Sequence: Synthetic oligonucleotide
ccccaggguaaguguuaua

SEQ ID NO: 1116273 - RNA, 19 nt, Artificial Sequence
  Description of Artificial Sequence: Synthetic oligonucleotide
cgccgcuaucaaccuccau

SEQ ID NO: 1116274 - RNA, 19 nt, Artificial Sequence
  Description of Artificial Sequence: Synthetic oligonucleotide
aaucaguuaacuuacaauc

SEQ ID NO: 1116275 - RNA, 19 nt, Artificial Sequence
  Description of Artificial Sequence: Synthetic oligonucleotide
aagcaaaucaacuuuagac

SEQ ID NO: 1116276 - RNA, 19 nt, Artificial Sequence
  Description of Artificial Sequence: Synthetic oligonucleotide
aaucguaacugacauaggc

SEQ ID NO: 1116277 - RNA, 19 nt, Artificial Sequence
  Description of Artificial Sequence: Synthetic oligonucleotide
aaaaucguaacugacauag

SEQ ID NO: 1116278 - RNA, 19 nt, Artificial Sequence
  Description of Artificial Sequence: Synthetic oligonucleotide
auauuguguacuuugaugg

SEQ ID NO: 1116279 - RNA, 19 nt, Artificial Sequence
  Description of Artificial Sequence: Synthetic oligonucleotide
caucuuauaagaaugagag

SEQ ID NO: 1116280 - RNA, 19 nt, Artificial Sequence
  Description of Artificial Sequence: Synthetic oligonucleotide
aagacuaccaucuuauaag

SEQ ID NO: 1116281 - RNA, 19 nt, Artificial Sequence
  Description of Artificial Sequence: Synthetic oligonucleotide
agaacuauagauuaagucu

SEQ ID NO: 1116282 - RNA, 19 nt, Artificial Sequence
  Description of Artificial Sequence: Synthetic oligonucleotide
uguacuuugauggagauca

SEQ ID NO: 1116283 - RNA, 19 nt, Artificial Sequence
  Description of Artificial Sequence: Synthetic oligonucleotide
caaauuauguucaugacug

SEQ ID NO: 1116284 - RNA, 19 nt, Artificial Sequence
  Description of Artificial Sequence: Synthetic oligonucleotide
auauacuucacaucaauag

SEQ ID NO: 1116285 - RNA, 19 nt, Artificial Sequence
  Description of Artificial Sequence: Synthetic oligonucleotide
ucaacuuuagacaugcuca

SEQ ID NO: 1116286 - RNA, 19 nt, Artificial Sequence
  Description of Artificial Sequence: Synthetic oligonucleotide
uacguuaucauauagucga

SEQ ID NO: 1116287 - RNA, 19 nt, Artificial Sequence
  Description of Artificial Sequence: Synthetic oligonucleotide
acuauaugggaucaaugcc

SEQ ID NO: 1116288 - RNA, 19 nt, Artificial Sequence
  Description of Artificial Sequence: Synthetic oligonucleotide
acauuuagcuaauagcuac

SEQ ID NO: 1116289 - RNA, 19 nt, Artificial Sequence
  Description of Artificial Sequence: Synthetic oligonucleotide
uguuguuacaguuacuugc

SEQ ID NO: 1116290 - RNA, 19 nt, Artificial Sequence
  Description of Artificial Sequence: Synthetic oligonucleotide
aaaaggaauauguuugaug

SEQ ID NO: 1116291 - RNA, 19 nt, Artificial Sequence
  Description of Artificial Sequence: Synthetic oligonucleotide
ugucaaauuauguucauga

SEQ ID NO: 1116292 - RNA, 19 nt, Artificial Sequence
  Description of Artificial Sequence: Synthetic oligonucleotide
uucauuaugcaccucacug

SEQ ID NO: 1116293 - RNA, 19 nt, Artificial Sequence
  Description of Artificial Sequence: Synthetic oligonucleotide
uaucaauagaacuauagau

SEQ ID NO: 1116294 - RNA, 19 nt, Artificial Sequence
  Description of Artificial Sequence: Synthetic oligonucleotide
uuuauuguauuagaggaag

SEQ ID NO: 1116295 - RNA, 19 nt, Artificial Sequence
  Description of Artificial Sequence: Synthetic oligonucleotide
guuauauuuagcguguucg

SEQ ID NO: 1116296 - RNA, 19 nt, Artificial Sequence
  Description of Artificial Sequence: Synthetic oligonucleotide
uuagacuuuacuguugugg

SEQ ID NO: 1116297 - RNA, 19 nt, Artificial Sequence
  Description of Artificial Sequence: Synthetic oligonucleotide
ucaaauuauguucaugacu

SEQ ID NO: 1116298 - RNA, 19 nt, Artificial Sequence
  Description of Artificial Sequence: Synthetic oligonucleotide
uauauuguguacuuugaug

SEQ ID NO: 1116299 - RNA, 19 nt, Artificial Sequence
  Description of Artificial Sequence: Synthetic oligonucleotide
guuuguuauauuuagcgug

SEQ ID NO: 1116300 - RNA, 19 nt, Artificial Sequence
  Description of Artificial Sequence: Synthetic oligonucleotide
auagauuaagucuaugacu

SEQ ID NO: 1116301 - RNA, 19 nt, Artificial Sequence
  Description of Artificial Sequence: Synthetic oligonucleotide
uaucauauagucgaaagac

SEQ ID NO: 1116302 - RNA, 19 nt, Artificial Sequence
  Description of Artificial Sequence: Synthetic oligonucleotide
cuuacaaucgaggaaaggc

SEQ ID NO: 1116303 - RNA, 19 nt, Artificial Sequence
  Description of Artificial Sequence: Synthetic oligonucleotide
ucaauagaacuauagauua

SEQ ID NO: 1116304 - RNA, 19 nt, Artificial Sequence
  Description of Artificial Sequence: Synthetic oligonucleotide
agccaauccagacaggagc

SEQ ID NO: 1116305 - RNA, 19 nt, Artificial Sequence
  Description of Artificial Sequence: Synthetic oligonucleotide
uuaaaaguccuccaugagu

SEQ ID NO: 1116306 - RNA, 19 nt, Artificial Sequence
  Description of Artificial Sequence: Synthetic oligonucleotide
aguaucuccucacugacag

SEQ ID NO: 1116307 - RNA, 19 nt, Artificial Sequence
  Description of Artificial Sequence: Synthetic oligonucleotide
guuaucauauagucgaaag

SEQ ID NO: 1116308 - RNA, 19 nt, Artificial Sequence
  Description of Artificial Sequence: Synthetic oligonucleotide
acuguuaacgaguccauuc

SEQ ID NO: 1116309 - RNA, 19 nt, Artificial Sequence
  Description of Artificial Sequence: Synthetic oligonucleotide
auguuugagguuuuaaaag

SEQ ID NO: 1116310 - RNA, 19 nt, Artificial Sequence
  Description of Artificial Sequence: Synthetic oligonucleotide
auauagucgaaagacuacc

SEQ ID NO: 1116311 - RNA, 19 nt, Artificial Sequence
  Description of Artificial Sequence: Synthetic oligonucleotide
uacuauauuguguacuuug

SEQ ID NO: 1116312 - RNA, 19 nt, Artificial Sequence
  Description of Artificial Sequence: Synthetic oligonucleotide
uaccguauaaucaaucugu

SEQ ID NO: 1116313 - RNA, 19 nt, Artificial Sequence
  Description of Artificial Sequence: Synthetic oligonucleotide
aaaaguaauugggaccuac

SEQ ID NO: 1116314 - RNA, 19 nt, Artificial Sequence
  Description of Artificial Sequence: Synthetic oligonucleotide
agcaaaucaacuuuagaca

SEQ ID NO: 1116315 - RNA, 19 nt, Artificial Sequence
  Description of Artificial Sequence: Synthetic oligonucleotide
uccgucuucauuaugcacc

SEQ ID NO: 1116316 - RNA, 19 nt, Artificial Sequence
  Description of Artificial Sequence: Synthetic oligonucleotide
uaaaaguccuccaugagua

SEQ ID NO: 1116317 - RNA, 19 nt, Artificial Sequence
  Description of Artificial Sequence: Synthetic oligonucleotide
auacaugaagcacauacug

SEQ ID NO: 1116318 - RNA, 19 nt, Artificial Sequence
  Description of Artificial Sequence: Synthetic oligonucleotide
uuugaaaaucguaacugac

SEQ ID NO: 1116319 - RNA, 19 nt, Artificial Sequence
  Description of Artificial Sequence: Synthetic oligonucleotide
uuuguuauauuuagcgugu

SEQ ID NO: 1116320 - RNA, 19 nt, Artificial Sequence
  Description of Artificial Sequence: Synthetic oligonucleotide
uagauacucagacugggcc

SEQ ID NO: 1116321 - RNA, 19 nt, Artificial Sequence
  Description of Artificial Sequence: Synthetic oligonucleotide
aguuauguuguuuaagcgu

SEQ ID NO: 1116322 - RNA, 19 nt, Artificial Sequence
  Description of Artificial Sequence: Synthetic oligonucleotide
uuaucauauagucgaaaga

SEQ ID NO: 1116323 - RNA, 19 nt, Artificial Sequence
  Description of Artificial Sequence: Synthetic oligonucleotide
aaguguacaacagaauuug

SEQ ID NO: 1116324 - RNA, 19 nt, Artificial Sequence
  Description of Artificial Sequence: Synthetic oligonucleotide
aacugguaagucguguucc

SEQ ID NO: 1116325 - RNA, 19 nt, Artificial Sequence
  Description of Artificial Sequence: Synthetic oligonucleotide
uaugguucgcuuuugaaaa

SEQ ID NO: 1116326 - RNA, 19 nt, Artificial Sequence
  Description of Artificial Sequence: Synthetic oligonucleotide
aaguaauugggaccuacug

SEQ ID NO: 1116327 - RNA, 19 nt, Artificial Sequence
  Description of Artificial Sequence: Synthetic oligonucleotide
uuuagauacucagacuggg

SEQ ID NO: 1116328 - RNA, 19 nt, Artificial Sequence
  Description of Artificial Sequence: Synthetic oligonucleotide
aaugcaaagguaaaugaga

SEQ ID NO: 1116329 - RNA, 19 nt, Artificial Sequence
  Description of Artificial Sequence: Synthetic oligonucleotide
aagccaaucaguuaacuua

SEQ ID NO: 1116330 - RNA, 19 nt, Artificial Sequence
  Description of Artificial Sequence: Synthetic oligonucleotide
ugaaugcaaagguaaauga

SEQ ID NO: 1116331 - RNA, 19 nt, Artificial Sequence
  Description of Artificial Sequence: Synthetic oligonucleotide
uuaacuuacaaucgaggaa

SEQ ID NO: 1116332 - RNA, 19 nt, Artificial Sequence
  Description of Artificial Sequence: Synthetic oligonucleotide
uuuuacgccaauauacuuc

SEQ ID NO: 1116333 - RNA, 19 nt, Artificial Sequence
  Description of Artificial Sequence: Synthetic oligonucleotide
ucaguuaacuuacaaucga

SEQ ID NO: 1116334 - RNA, 19 nt, Artificial Sequence
  Description of Artificial Sequence: Synthetic oligonucleotide
ucauauagucgaaagacua

SEQ ID NO: 1116335 - RNA, 19 nt, Artificial Sequence
  Description of Artificial Sequence: Synthetic oligonucleotide
uuuacgccaauauacuuca

SEQ ID NO: 1116336 - RNA, 19 nt, Artificial Sequence
  Description of Artificial Sequence: Synthetic oligonucleotide
uagaacuauagauuaaguc

SEQ ID NO: 1116337 - RNA, 19 nt, Artificial Sequence
  Description of Artificial Sequence: Synthetic oligonucleotide
ucauuugacaguuaucaaa

SEQ ID NO: 1116338 - RNA, 19 nt, Artificial Sequence
  Description of Artificial Sequence: Synthetic oligonucleotide
aauagcuacguuaucauau

SEQ ID NO: 1116339 - RNA, 19 nt, Artificial Sequence
  Description of Artificial Sequence: Synthetic oligonucleotide
uuacaaucgaggaaaggcu

SEQ ID NO: 1116340 - RNA, 19 nt, Artificial Sequence
  Description of Artificial Sequence: Synthetic oligonucleotide
acagucgacguacugguac

SEQ ID NO: 1116341 - RNA, 19 nt, Artificial Sequence
  Description of Artificial Sequence: Synthetic oligonucleotide
caugacugaacuauuauca

SEQ ID NO: 1116342 - RNA, 19 nt, Artificial Sequence
  Description of Artificial Sequence: Synthetic oligonucleotide
uuguauuagaggaagucuc

SEQ ID NO: 1116343 - RNA, 19 nt, Artificial Sequence
  Description of Artificial Sequence: Synthetic oligonucleotide
agcuuuguucuucuaggcc

SEQ ID NO: 1116344 - RNA, 19 nt, Artificial Sequence
  Description of Artificial Sequence: Synthetic oligonucleotide
uuuagacaugcucaauuca

SEQ ID NO: 1116345 - RNA, 19 nt, Artificial Sequence
  Description of Artificial Sequence: Synthetic oligonucleotide
auuuaaauauaugguucgc

SEQ ID NO: 1116346 - RNA, 19 nt, Artificial Sequence
  Description of Artificial Sequence: Synthetic oligonucleotide
uuaaauauaugguucgcuu

SEQ ID NO: 1116347 - RNA, 19 nt, Artificial Sequence
  Description of Artificial Sequence: Synthetic oligonucleotide
uuauuaaccauuagcuaaa

SEQ ID NO: 1116348 - RNA, 19 nt, Artificial Sequence
  Description of Artificial Sequence: Synthetic oligonucleotide
ugacaguuaucaaagcugu

SEQ ID NO: 1116349 - RNA, 19 nt, Artificial Sequence
  Description of Artificial Sequence: Synthetic oligonucleotide
uauacaugaagcacauacu

SEQ ID NO: 1116350 - RNA, 19 nt, Artificial Sequence
  Description of Artificial Sequence: Synthetic oligonucleotide
uugaaugcaaagguaaaug

SEQ ID NO: 1116351 - RNA, 19 nt, Artificial Sequence
  Description of Artificial Sequence: Synthetic oligonucleotide
uguggguaccguauaauca

SEQ ID NO: 1116352 - RNA, 19 nt, Artificial Sequence
  Description of Artificial Sequence: Synthetic oligonucleotide
ucuaucacaccuccuuuag

SEQ ID NO: 1116353 - RNA, 19 nt, Artificial Sequence
  Description of Artificial Sequence: Synthetic oligonucleotide
aagauaagaagaaagccaa

SEQ ID NO: 1116354 - RNA, 19 nt, Artificial Sequence
  Description of Artificial Sequence: Synthetic oligonucleotide
gaucaguguacagaagucg

SEQ ID NO: 1116355 - RNA, 19 nt, Artificial Sequence
  Description of Artificial Sequence: Synthetic oligonucleotide
cauacugagagguucuuac

SEQ ID NO: 1116356 - RNA, 19 nt, Artificial Sequence
  Description of Artificial Sequence: Synthetic oligonucleotide
aguaaugguuuauauuuca

SEQ ID NO: 1116357 - RNA, 19 nt, Artificial Sequence
  Description of Artificial Sequence: Synthetic oligonucleotide
uguuuguuauauuuagcgu

SEQ ID NO: 1116358 - RNA, 19 nt, Artificial Sequence
  Description of Artificial Sequence: Synthetic oligonucleotide
aauugggaccuacugauua

SEQ ID NO: 1116359 - RNA, 19 nt, Artificial Sequence
  Description of Artificial Sequence: Synthetic oligonucleotide
guuaacuuacaaucgagga

SEQ ID NO: 1116360 - RNA, 19 nt, Artificial Sequence
  Description of Artificial Sequence: Synthetic oligonucleotide
cacaucaauagaucguggg

SEQ ID NO: 1116361 - RNA, 19 nt, Artificial Sequence
  Description of Artificial Sequence: Synthetic oligonucleotide
cuacguuaucauauagucg

SEQ ID NO: 1116362 - RNA, 19 nt, Artificial Sequence
  Description of Artificial Sequence: Synthetic oligonucleotide
gauaagaagaaagccaauc

SEQ ID NO: 1116363 - RNA, 19 nt, Artificial Sequence
  Description of Artificial Sequence: Synthetic oligonucleotide
uuuaaauauaugguucgcu

SEQ ID NO: 1116364 - RNA, 19 nt, Artificial Sequence
  Description of Artificial Sequence: Synthetic oligonucleotide
uucacaucaauagaucgug

SEQ ID NO: 1116365 - RNA, 19 nt, Artificial Sequence
  Description of Artificial Sequence: Synthetic oligonucleotide
guuauguuguuuaagcgug

SEQ ID NO: 1116366 - RNA, 19 nt, Artificial Sequence
  Description of Artificial Sequence: Synthetic oligonucleotide
auuagaggaagucucaguu

SEQ ID NO: 1116367 - RNA, 19 nt, Artificial Sequence
  Description of Artificial Sequence: Synthetic oligonucleotide
uuccuaaucaauaccacuu

SEQ ID NO: 1116368 - RNA, 19 nt, Artificial Sequence
  Description of Artificial Sequence: Synthetic oligonucleotide
uauagucgaaagacuacca

SEQ ID NO: 1116369 - RNA, 19 nt, Artificial Sequence
  Description of Artificial Sequence: Synthetic oligonucleotide
uucagaguguccaaaguau

SEQ ID NO: 1116370 - RNA, 19 nt, Artificial Sequence
  Description of Artificial Sequence: Synthetic oligonucleotide
uuaacgaguccauuccuca

SEQ ID NO: 1116371 - RNA, 19 nt, Artificial Sequence
  Description of Artificial Sequence: Synthetic oligonucleotide
cauuuagcuaauagcuacg

SEQ ID NO: 1116372 - RNA, 19 nt, Artificial Sequence
  Description of Artificial Sequence: Synthetic oligonucleotide
ucacuauaugggaucaaug

SEQ ID NO: 1116373 - RNA, 19 nt, Artificial Sequence
  Description of Artificial Sequence: Synthetic oligonucleotide
uuaccuuccuaaucaauac

SEQ ID NO: 1116374 - RNA, 19 nt, Artificial Sequence
  Description of Artificial Sequence: Synthetic oligonucleotide
acagaagucguacauguaa

SEQ ID NO: 1116375 - RNA, 19 nt, Artificial Sequence
  Description of Artificial Sequence: Synthetic oligonucleotide
uacgccaauauacuucaca

SEQ ID NO: 1116376 - RNA, 19 nt, Artificial Sequence
  Description of Artificial Sequence: Synthetic oligonucleotide
ugggccaacugguaagucg

SEQ ID NO: 1116377 - RNA, 19 nt, Artificial Sequence
  Description of Artificial Sequence: Synthetic oligonucleotide
aacgaguccauuccucaug

SEQ ID NO: 1116378 - RNA, 19 nt, Artificial Sequence
  Description of Artificial Sequence: Synthetic oligonucleotide
ucuucuaggccguaaccgc

SEQ ID NO: 1116379 - RNA, 19 nt, Artificial Sequence
  Description of Artificial Sequence: Synthetic oligonucleotide
cuuuagacaugcucaauuc

SEQ ID NO: 1116380 - RNA, 19 nt, Artificial Sequence
  Description of Artificial Sequence: Synthetic oligonucleotide
ucauuaugcaccucacugu

SEQ ID NO: 1116381 - RNA, 19 nt, Artificial Sequence
  Description of Artificial Sequence: Synthetic oligonucleotide
uguuuaagcgugccuuucc

SEQ ID NO: 1116382 - RNA, 19 nt, Artificial Sequence
  Description of Artificial Sequence: Synthetic oligonucleotide
uuuagcguguucgugauau

SEQ ID NO: 1116383 - RNA, 19 nt, Artificial Sequence
  Description of Artificial Sequence: Synthetic oligonucleotide
auaugguucgcuuuugaaa

SEQ ID NO: 1116384 - RNA, 19 nt, Artificial Sequence
  Description of Artificial Sequence: Synthetic oligonucleotide
uaaucaauaccacuucauu

SEQ ID NO: 1116385 - RNA, 19 nt, Artificial Sequence
  Description of Artificial Sequence: Synthetic oligonucleotide
agcaauaacuguggguacc

SEQ ID NO: 1116386 - RNA, 19 nt, Artificial Sequence
  Description of Artificial Sequence: Synthetic oligonucleotide
ucaauucaagguguccugg

SEQ ID NO: 1116387 - RNA, 19 nt, Artificial Sequence
  Description of Artificial Sequence: Synthetic oligonucleotide
auuguauuagaggaagucu

SEQ ID NO: 1116388 - RNA, 19 nt, Artificial Sequence
  Description of Artificial Sequence: Synthetic oligonucleotide
gaaugagaguuuauaaaac

SEQ ID NO: 1116389 - RNA, 19 nt, Artificial Sequence
  Description of Artificial Sequence: Synthetic oligonucleotide
cauauagucgaaagacuac

SEQ ID NO: 1116390 - RNA, 19 nt, Artificial Sequence
  Description of Artificial Sequence: Synthetic oligonucleotide
gucuaugacuuuuauauaa

SEQ ID NO: 1116391 - RNA, 19 nt, Artificial Sequence
  Description of Artificial Sequence: Synthetic oligonucleotide
uucgugauauuuaaauaua

SEQ ID NO: 1116392 - RNA, 19 nt, Artificial Sequence
  Description of Artificial Sequence: Synthetic oligonucleotide
uuuaaaaggaaagcaugaa

SEQ ID NO: 1116393 - RNA, 19 nt, Artificial Sequence
  Description of Artificial Sequence: Synthetic oligonucleotide
uuguguacuuugauggaga

SEQ ID NO: 1116394 - RNA, 19 nt, Artificial Sequence
  Description of Artificial Sequence: Synthetic oligonucleotide
aguuaucaaagcuguauaa

SEQ ID NO: 1116395 - RNA, 19 nt, Artificial Sequence
  Description of Artificial Sequence: Synthetic oligonucleotide
uagaucgugggaaaaggaa

SEQ ID NO: 1116396 - RNA, 19 nt, Artificial Sequence
  Description of Artificial Sequence: Synthetic oligonucleotide
cuguuaacgaguccauucc

SEQ ID NO: 1116397 - RNA, 19 nt, Artificial Sequence
  Description of Artificial Sequence: Synthetic oligonucleotide
ucguacauguaacucauuu

SEQ ID NO: 1116398 - RNA, 19 nt, Artificial Sequence
  Description of Artificial Sequence: Synthetic oligonucleotide
acaucaauagaucguggga

SEQ ID NO: 1116399 - RNA, 19 nt, Artificial Sequence
  Description of Artificial Sequence: Synthetic oligonucleotide
acagaauaauaguuauugu

SEQ ID NO: 1116400 - RNA, 19 nt, Artificial Sequence
  Description of Artificial Sequence: Synthetic oligonucleotide
uguuauauuuagcguguuc

SEQ ID NO: 1116401 - RNA, 19 nt, Artificial Sequence
  Description of Artificial Sequence: Synthetic oligonucleotide
aauauaugguucgcuuuug

SEQ ID NO: 1116402 - RNA, 19 nt, Artificial Sequence
  Description of Artificial Sequence: Synthetic oligonucleotide
auuuagauacucagacugg

SEQ ID NO: 1116403 - RNA, 19 nt, Artificial Sequence
  Description of Artificial Sequence: Synthetic oligonucleotide
uauuagaggaagucucagu

SEQ ID NO: 1116404 - RNA, 19 nt, Artificial Sequence
  Description of Artificial Sequence: Synthetic oligonucleotide
cauguuugagguuuuaaaa

SEQ ID NO: 1116405 - RNA, 19 nt, Artificial Sequence
  Description of Artificial Sequence: Synthetic oligonucleotide
ucguguuccuuccacaguc

SEQ ID NO: 1116406 - RNA, 19 nt, Artificial Sequence
  Description of Artificial Sequence: Synthetic oligonucleotide
uuauguuguuuaagcgugc

SEQ ID NO: 1116407 - RNA, 19 nt, Artificial Sequence
  Description of Artificial Sequence: Synthetic oligonucleotide
aguaaauuccacauaugga

SEQ ID NO: 1116408 - RNA, 19 nt, Artificial Sequence
  Description of Artificial Sequence: Synthetic oligonucleotide
agucgaaagacuaccaucu

SEQ ID NO: 1116409 - RNA, 19 nt, Artificial Sequence
  Description of Artificial Sequence: Synthetic oligonucleotide
aucaauagaacuauagauu

SEQ ID NO: 1116410 - RNA, 19 nt, Artificial Sequence
  Description of Artificial Sequence: Synthetic oligonucleotide
uauuguguacuuugaugga

SEQ ID NO: 1116411 - RNA, 19 nt, Artificial Sequence
  Description of Artificial Sequence: Synthetic oligonucleotide
uaguuauuguuuguuauau

SEQ ID NO: 1116412 - RNA, 19 nt, Artificial Sequence
  Description of Artificial Sequence: Synthetic oligonucleotide
uauaugguucgcuuuugaa

SEQ ID NO: 1116413 - RNA, 19 nt, Artificial Sequence
  Description of Artificial Sequence: Synthetic oligonucleotide
aacugacauaggcugauuu

SEQ ID NO: 1116414 - RNA, 19 nt, Artificial Sequence
  Description of Artificial Sequence: Synthetic oligonucleotide
uguuaacgaguccauuccu

SEQ ID NO: 1116415 - RNA, 19 nt, Artificial Sequence
  Description of Artificial Sequence: Synthetic oligonucleotide
agacuaccaucuuauaaga

SEQ ID NO: 1116416 - RNA, 19 nt, Artificial Sequence
  Description of Artificial Sequence: Synthetic oligonucleotide
agccaaucaguuaacuuac

SEQ ID NO: 1116417 - RNA, 19 nt, Artificial Sequence
  Description of Artificial Sequence: Synthetic oligonucleotide
guaccguauaaucaaucug

SEQ ID NO: 1116418 - RNA, 19 nt, Artificial Sequence
  Description of Artificial Sequence: Synthetic oligonucleotide
uauaagaaugagaguuuau

SEQ ID NO: 1116419 - RNA, 19 nt, Artificial Sequence
  Description of Artificial Sequence: Synthetic oligonucleotide
uagcuacguuaucauauag

SEQ ID NO: 1116420 - RNA, 19 nt, Artificial Sequence
  Description of Artificial Sequence: Synthetic oligonucleotide
agucguguuccuuccacag

SEQ ID NO: 1116421 - RNA, 19 nt, Artificial Sequence
  Description of Artificial Sequence: Synthetic oligonucleotide
gcuacguuaucauauaguc

SEQ ID NO: 1116422 - RNA, 19 nt, Artificial Sequence
  Description of Artificial Sequence: Synthetic oligonucleotide
auaggcugauuuuacgcca

SEQ ID NO: 1116423 - RNA, 19 nt, Artificial Sequence
  Description of Artificial Sequence: Synthetic oligonucleotide
gaacuauagauuaagucua

SEQ ID NO: 1116424 - RNA, 19 nt, Artificial Sequence
  Description of Artificial Sequence: Synthetic oligonucleotide
uguuguuuaagcgugccuu

SEQ ID NO: 1116425 - RNA, 19 nt, Artificial Sequence
  Description of Artificial Sequence: Synthetic oligonucleotide
gagaucaguguacagaagu

SEQ ID NO: 1116426 - RNA, 19 nt, Artificial Sequence
  Description of Artificial Sequence: Synthetic oligonucleotide
caauucaagguguccuggg

SEQ ID NO: 1116427 - RNA, 19 nt, Artificial Sequence
  Description of Artificial Sequence: Synthetic oligonucleotide
uccuaaucaauaccacuuc

SEQ ID NO: 1116428 - RNA, 19 nt, Artificial Sequence
  Description of Artificial Sequence: Synthetic oligonucleotide
uuauaagaaugagaguuua

SEQ ID NO: 1116429 - RNA, 19 nt, Artificial Sequence
  Description of Artificial Sequence: Synthetic oligonucleotide
auaucaagugggccaaugu

SEQ ID NO: 1116430 - RNA, 19 nt, Artificial Sequence
  Description of Artificial Sequence: Synthetic oligonucleotide
uuaagcgugccuuuccaau

SEQ ID NO: 1116431 - RNA, 19 nt, Artificial Sequence
  Description of Artificial Sequence: Synthetic oligonucleotide
cugaucacuauaugggauc

SEQ ID NO: 1116432 - RNA, 19 nt, Artificial Sequence
  Description of Artificial Sequence: Synthetic oligonucleotide
ucgaaagacuaccaucuua

SEQ ID NO: 1116433 - RNA, 19 nt, Artificial Sequence
  Description of Artificial Sequence: Synthetic oligonucleotide
uauguuguuuaagcgugcc

SEQ ID NO: 1116434 - RNA, 19 nt, Artificial Sequence
  Description of Artificial Sequence: Synthetic oligonucleotide
cagaagucguacauguaac

SEQ ID NO: 1116435 - RNA, 19 nt, Artificial Sequence
  Description of Artificial Sequence: Synthetic oligonucleotide
guucgugauauuuaaauau

SEQ ID NO: 1116436 - RNA, 19 nt, Artificial Sequence
  Description of Artificial Sequence: Synthetic oligonucleotide
uguuaguuauguuguuuaa

SEQ ID NO: 1116437 - RNA, 19 nt, Artificial Sequence
  Description of Artificial Sequence: Synthetic oligonucleotide
acgccaauauacuucacau

SEQ ID NO: 1116438 - RNA, 19 nt, Artificial Sequence
  Description of Artificial Sequence: Synthetic oligonucleotide
aaaguaauugggaccuacu

SEQ ID NO: 1116439 - RNA, 19 nt, Artificial Sequence
  Description of Artificial Sequence: Synthetic oligonucleotide
aucuuauaagaaugagagu

SEQ ID NO: 1116440 - RNA, 19 nt, Artificial Sequence
  Description of Artificial Sequence: Synthetic oligonucleotide
uuguacacaaaaggaauau

SEQ ID NO: 1116441 - RNA, 19 nt, Artificial Sequence
  Description of Artificial Sequence: Synthetic oligonucleotide
auagucgaaagacuaccau

SEQ ID NO: 1116442 - RNA, 19 nt, Artificial Sequence
  Description of Artificial Sequence: Synthetic oligonucleotide
ucagagguuacuugucaaa

SEQ ID NO: 1116443 - RNA, 19 nt, Artificial Sequence
  Description of Artificial Sequence: Synthetic oligonucleotide
uuacuugcaucaugaguac

SEQ ID NO: 1116444 - RNA, 19 nt, Artificial Sequence
  Description of Artificial Sequence: Synthetic oligonucleotide
auuuuacgccaauauacuu

SEQ ID NO: 1116445 - RNA, 19 nt, Artificial Sequence
  Description of Artificial Sequence: Synthetic oligonucleotide
cucaauucaagguguccug

SEQ ID NO: 1116446 - RNA, 19 nt, Artificial Sequence
  Description of Artificial Sequence: Synthetic oligonucleotide
aaaucguaacugacauagg

SEQ ID NO: 1116447 - RNA, 19 nt, Artificial Sequence
  Description of Artificial Sequence: Synthetic oligonucleotide
uuuagacuuuacuguugug

SEQ ID NO: 1116448 - RNA, 19 nt, Artificial Sequence
  Description of Artificial Sequence: Synthetic oligonucleotide
uauuuagcguguucgugau

SEQ ID NO: 1116449 - RNA, 19 nt, Artificial Sequence
  Description of Artificial Sequence: Synthetic oligonucleotide
ugguaagucguguuccuuc

SEQ ID NO: 1116450 - RNA, 19 nt, Artificial Sequence
  Description of Artificial Sequence: Synthetic oligonucleotide
aagucguguuccuuccaca

SEQ ID NO: 1116451 - RNA, 19 nt, Artificial Sequence
  Description of Artificial Sequence: Synthetic oligonucleotide
uugucaaauuauguucaug

SEQ ID NO: 1116452 - RNA, 19 nt, Artificial Sequence
  Description of Artificial Sequence: Synthetic oligonucleotide
aucaauagaucgugggaaa

SEQ ID NO: 1116453 - RNA, 19 nt, Artificial Sequence
  Description of Artificial Sequence: Synthetic oligonucleotide
aacauuuagcuaauagcua

SEQ ID NO: 1116454 - RNA, 19 nt, Artificial Sequence
  Description of Artificial Sequence: Synthetic oligonucleotide
guaauugggaccuacugau

SEQ ID NO: 1116455 - RNA, 19 nt, Artificial Sequence
  Description of Artificial Sequence: Synthetic oligonucleotide
aguguacagaagucguaca

SEQ ID NO: 1116456 - RNA, 19 nt, Artificial Sequence
  Description of Artificial Sequence: Synthetic oligonucleotide
uuuagcuaauagcuacguu

SEQ ID NO: 1116457 - RNA, 19 nt, Artificial Sequence
  Description of Artificial Sequence: Synthetic oligonucleotide
ugucgaggugaccccauca

SEQ ID NO: 1116458 - RNA, 19 nt, Artificial Sequence
  Description of Artificial Sequence: Synthetic oligonucleotide
uuagaggaagucucaguuu

SEQ ID NO: 1116459 - RNA, 19 nt, Artificial Sequence
  Description of Artificial Sequence: Synthetic oligonucleotide
auuuagcuaauagcuacgu

SEQ ID NO: 1116460 - RNA, 19 nt, Artificial Sequence
  Description of Artificial Sequence: Synthetic oligonucleotide
aacuguggguaccguauaa

SEQ ID NO: 1116461 - RNA, 19 nt, Artificial Sequence
  Description of Artificial Sequence: Synthetic oligonucleotide
auaaucaaucuguuucaua

SEQ ID NO: 1116462 - RNA, 19 nt, Artificial Sequence
  Description of Artificial Sequence: Synthetic oligonucleotide
uuuaagcgugccuuuccaa

SEQ ID NO: 1116463 - RNA, 19 nt, Artificial Sequence
  Description of Artificial Sequence: Synthetic oligonucleotide
aucauauagucgaaagacu

SEQ ID NO: 1116464 - RNA, 19 nt, Artificial Sequence
  Description of Artificial Sequence: Synthetic oligonucleotide
accuuccuaaucaauacca

SEQ ID NO: 1116465 - RNA, 19 nt, Artificial Sequence
  Description of Artificial Sequence: Synthetic oligonucleotide
aacuuacaaucgaggaaag

SEQ ID NO: 1116466 - RNA, 19 nt, Artificial Sequence
  Description of Artificial Sequence: Synthetic oligonucleotide
ugggacaagugacacuauc

SEQ ID NO: 1116467 - RNA, 19 nt, Artificial Sequence
  Description of Artificial Sequence: Synthetic oligonucleotide
aagcgugccuuuccaauaa

SEQ ID NO: 1116468 - RNA, 19 nt, Artificial Sequence
  Description of Artificial Sequence: Synthetic oligonucleotide
uauguucaugacugaacua

SEQ ID NO: 1116469 - RNA, 19 nt, Artificial Sequence
  Description of Artificial Sequence: Synthetic oligonucleotide
acugacauaggcugauuuu

SEQ ID NO: 1116470 - RNA, 19 nt, Artificial Sequence
  Description of Artificial Sequence: Synthetic oligonucleotide
acuauauuguguacuuuga

SEQ ID NO: 1116471 - RNA, 19 nt, Artificial Sequence
  Description of Artificial Sequence: Synthetic oligonucleotide
uucuaggccguaaccgcug

SEQ ID NO: 1116472 - RNA, 19 nt, Artificial Sequence
  Description of Artificial Sequence: Synthetic oligonucleotide
acaagcaaaucaacuuuag

SEQ ID NO: 1116473 - RNA, 19 nt, Artificial Sequence
  Description of Artificial Sequence: Synthetic oligonucleotide
cuguggguaccguauaauc

SEQ ID NO: 1116474 - RNA, 19 nt, Artificial Sequence
  Description of Artificial Sequence: Synthetic oligonucleotide
gacaugcucaauucaaggu

SEQ ID NO: 1116475 - RNA, 19 nt, Artificial Sequence
  Description of Artificial Sequence: Synthetic oligonucleotide
uguguacuuugauggagau

SEQ ID NO: 1116476 - RNA, 19 nt, Artificial Sequence
  Description of Artificial Sequence: Synthetic oligonucleotide
aguguacaacagaauuugg

SEQ ID NO: 1116477 - RNA, 19 nt, Artificial Sequence
  Description of Artificial Sequence: Synthetic oligonucleotide
ucgacguacugguaccucu

SEQ ID NO: 1116478 - RNA, 19 nt, Artificial Sequence
  Description of Artificial Sequence: Synthetic oligonucleotide
auacugagagguucuuaca

SEQ ID NO: 1116479 - RNA, 19 nt, Artificial Sequence
  Description of Artificial Sequence: Synthetic oligonucleotide
agcuaauagcuacguuauc

SEQ ID NO: 1116480 - RNA, 19 nt, Artificial Sequence
  Description of Artificial Sequence: Synthetic oligonucleotide
gauuuuacgccaauauacu

SEQ ID NO: 1116481 - RNA, 19 nt, Artificial Sequence
  Description of Artificial Sequence: Synthetic oligonucleotide
auagcuacguuaucauaua

SEQ ID NO: 1116482 - RNA, 19 nt, Artificial Sequence
  Description of Artificial Sequence: Synthetic oligonucleotide
acuauagauuaagucuaug

SEQ ID NO: 1116483 - RNA, 19 nt, Artificial Sequence
  Description of Artificial Sequence: Synthetic oligonucleotide
ucaauagaucgugggaaaa

SEQ ID NO: 1116484 - RNA, 19 nt, Artificial Sequence
  Description of Artificial Sequence: Synthetic oligonucleotide
caguguacagaagucguac

SEQ ID NO: 1116485 - RNA, 19 nt, Artificial Sequence
  Description of Artificial Sequence: Synthetic oligonucleotide
gguuacuugucaaauuaug

SEQ ID NO: 1116486 - RNA, 19 nt, Artificial Sequence
  Description of Artificial Sequence: Synthetic oligonucleotide
ucaguguacagaagucgua

SEQ ID NO: 1116487 - RNA, 19 nt, Artificial Sequence
  Description of Artificial Sequence: Synthetic oligonucleotide
ccgcugaucacuauauggg

SEQ ID NO: 1116488 - RNA, 19 nt, Artificial Sequence
  Description of Artificial Sequence: Synthetic oligonucleotide
ugacacuaucucuuccagu

SEQ ID NO: 1116489 - RNA, 19 nt, Artificial Sequence
  Description of Artificial Sequence: Synthetic oligonucleotide
guggguaccguauaaucaa

SEQ ID NO: 1116490 - RNA, 19 nt, Artificial Sequence
  Description of Artificial Sequence: Synthetic oligonucleotide
gaguaaugguuuauauuuc

SEQ ID NO: 1116491 - RNA, 19 nt, Artificial Sequence
  Description of Artificial Sequence: Synthetic oligonucleotide
uaagcgugccuuuccaaua

SEQ ID NO: 1116492 - RNA, 19 nt, Artificial Sequence
  Description of Artificial Sequence: Synthetic oligonucleotide
aucaguguacagaagucgu

SEQ ID NO: 1116493 - RNA, 19 nt, Artificial Sequence
  Description of Artificial Sequence: Synthetic oligonucleotide
gguaagucguguuccuucc

SEQ ID NO: 1116494 - RNA, 19 nt, Artificial Sequence
  Description of Artificial Sequence: Synthetic oligonucleotide
guuuaagcgugccuuucca

SEQ ID NO: 1116495 - RNA, 19 nt, Artificial Sequence
  Description of Artificial Sequence: Synthetic oligonucleotide
gacguacugguaccucucc

SEQ ID NO: 1116496 - RNA, 19 nt, Artificial Sequence
  Description of Artificial Sequence: Synthetic oligonucleotide
ggaauauguuugaugauca

SEQ ID NO: 1116497 - RNA, 19 nt, Artificial Sequence
  Description of Artificial Sequence: Synthetic oligonucleotide
guguucgugauauuuaaau

SEQ ID NO: 1116498 - RNA, 19 nt, Artificial Sequence
  Description of Artificial Sequence: Synthetic oligonucleotide
caucaauagaucgugggaa

SEQ ID NO: 1116499 - RNA, 19 nt, Artificial Sequence
  Description of Artificial Sequence: Synthetic oligonucleotide
aggccguaaccgcugauca

SEQ ID NO: 1116500 - RNA, 19 nt, Artificial Sequence
  Description of Artificial Sequence: Synthetic oligonucleotide
aaggcucuugguacaagca

SEQ ID NO: 1116501 - RNA, 19 nt, Artificial Sequence
  Description of Artificial Sequence: Synthetic oligonucleotide
uacugguaccucuccugag

SEQ ID NO: 1116502 - RNA, 19 nt, Artificial Sequence
  Description of Artificial Sequence: Synthetic oligonucleotide
cagucgacguacugguacc

SEQ ID NO: 1116503 - RNA, 19 nt, Artificial Sequence
  Description of Artificial Sequence: Synthetic oligonucleotide
gaucgugggaaaaggaaaa

SEQ ID NO: 1116504 - RNA, 19 nt, Artificial Sequence
  Description of Artificial Sequence: Synthetic oligonucleotide
aucacuauaugggaucaau

SEQ ID NO: 1116505 - RNA, 19 nt, Artificial Sequence
  Description of Artificial Sequence: Synthetic oligonucleotide
aaucgaggaaaggcucuug

SEQ ID NO: 1116506 - RNA, 19 nt, Artificial Sequence
  Description of Artificial Sequence: Synthetic oligonucleotide
aacuauagauuaagucuau

SEQ ID NO: 1116507 - RNA, 19 nt, Artificial Sequence
  Description of Artificial Sequence: Synthetic oligonucleotide
auguuguuuaagcgugccu

SEQ ID NO: 1116508 - RNA, 19 nt, Artificial Sequence
  Description of Artificial Sequence: Synthetic oligonucleotide
ugucugucgaggugacccc

SEQ ID NO: 1116509 - RNA, 19 nt, Artificial Sequence
  Description of Artificial Sequence: Synthetic oligonucleotide
caagcaaaucaacuuuaga

SEQ ID NO: 1116510 - RNA, 19 nt, Artificial Sequence
  Description of Artificial Sequence: Synthetic oligonucleotide
caacugguaagucguguuc

SEQ ID NO: 1116511 - RNA, 19 nt, Artificial Sequence
  Description of Artificial Sequence: Synthetic oligonucleotide
agcuacguuaucauauagu

SEQ ID NO: 1116512 - RNA, 19 nt, Artificial Sequence
  Description of Artificial Sequence: Synthetic oligonucleotide
caugaguacuauauugugu

SEQ ID NO: 1116513 - RNA, 19 nt, Artificial Sequence
  Description of Artificial Sequence: Synthetic oligonucleotide
uaggcugauuuuacgccaa

SEQ ID NO: 1116514 - RNA, 19 nt, Artificial Sequence
  Description of Artificial Sequence: Synthetic oligonucleotide
auagaucgugggaaaagga

SEQ ID NO: 1116515 - RNA, 19 nt, Artificial Sequence
  Description of Artificial Sequence: Synthetic oligonucleotide
guuaacgaguccauuccuc

SEQ ID NO: 1116516 - RNA, 19 nt, Artificial Sequence
  Description of Artificial Sequence: Synthetic oligonucleotide
gaaaaucguaacugacaua

SEQ ID NO: 1116517 - RNA, 19 nt, Artificial Sequence
  Description of Artificial Sequence: Synthetic oligonucleotide
agcgugccuuuccaauaac

SEQ ID NO: 1116518 - RNA, 19 nt, Artificial Sequence
  Description of Artificial Sequence: Synthetic oligonucleotide
ucuaggccguaaccgcuga

SEQ ID NO: 1116519 - RNA, 19 nt, Artificial Sequence
  Description of Artificial Sequence: Synthetic oligonucleotide
aggcucuugguacaagcaa

SEQ ID NO: 1116520 - RNA, 19 nt, Artificial Sequence
  Description of Artificial Sequence: Synthetic oligonucleotide
cugauuuuacgccaauaua

SEQ ID NO: 1116521 - RNA, 19 nt, Artificial Sequence
  Description of Artificial Sequence: Synthetic oligonucleotide
caguuacuugcaucaugag

SEQ ID NO: 1116522 - RNA, 19 nt, Artificial Sequence
  Description of Artificial Sequence: Synthetic oligonucleotide
cuucacaucaauagaucgu

SEQ ID NO: 1116523 - RNA, 19 nt, Artificial Sequence
  Description of Artificial Sequence: Synthetic oligonucleotide
ugguucgcuuuugaaaauc

SEQ ID NO: 1116524 - RNA, 19 nt, Artificial Sequence
  Description of Artificial Sequence: Synthetic oligonucleotide
ggaccuacugauuauuuua

SEQ ID NO: 1116525 - RNA, 19 nt, Artificial Sequence
  Description of Artificial Sequence: Synthetic oligonucleotide
acuugcaucaugaguacua

SEQ ID NO: 1116526 - RNA, 19 nt, Artificial Sequence
  Description of Artificial Sequence: Synthetic oligonucleotide
guacugguaccucuccuga

SEQ ID NO: 1116527 - RNA, 19 nt, Artificial Sequence
  Description of Artificial Sequence: Synthetic oligonucleotide
uaacgaguccauuccucau

SEQ ID NO: 1116528 - RNA, 19 nt, Artificial Sequence
  Description of Artificial Sequence: Synthetic oligonucleotide
uaauugggaccuacugauu

SEQ ID NO: 1116529 - RNA, 19 nt, Artificial Sequence
  Description of Artificial Sequence: Synthetic oligonucleotide
ugggaccuacugauuauuu

SEQ ID NO: 1116530 - RNA, 19 nt, Artificial Sequence
  Description of Artificial Sequence: Synthetic oligonucleotide
cagccaauccagacaggag

SEQ ID NO: 1116531 - RNA, 19 nt, Artificial Sequence
  Description of Artificial Sequence: Synthetic oligonucleotide
uggguaccguauaaucaau

SEQ ID NO: 1116532 - RNA, 19 nt, Artificial Sequence
  Description of Artificial Sequence: Synthetic oligonucleotide
caacuuuagacaugcucaa

SEQ ID NO: 1116533 - RNA, 19 nt, Artificial Sequence
  Description of Artificial Sequence: Synthetic oligonucleotide
agugggccaauguuaguua

SEQ ID NO: 1116534 - RNA, 19 nt, Artificial Sequence
  Description of Artificial Sequence: Synthetic oligonucleotide
agucguacauguaacucau

SEQ ID NO: 1116535 - RNA, 19 nt, Artificial Sequence
  Description of Artificial Sequence: Synthetic oligonucleotide
gcaaaucaacuuuagacau

SEQ ID NO: 1116536 - RNA, 19 nt, Artificial Sequence
  Description of Artificial Sequence: Synthetic oligonucleotide
ucgaggugaccccaucaua

SEQ ID NO: 1116537 - RNA, 19 nt, Artificial Sequence
  Description of Artificial Sequence: Synthetic oligonucleotide
cuuauaagaaugagaguuu

SEQ ID NO: 1116538 - RNA, 19 nt, Artificial Sequence
  Description of Artificial Sequence: Synthetic oligonucleotide
gguaccguauaaucaaucu

SEQ ID NO: 1116539 - RNA, 19 nt, Artificial Sequence
  Description of Artificial Sequence: Synthetic oligonucleotide
gcuuuugaaaaucguaacu

SEQ ID NO: 1116540 - RNA, 19 nt, Artificial Sequence
  Description of Artificial Sequence: Synthetic oligonucleotide
uccaugaguaaugguuuau

SEQ ID NO: 1116541 - RNA, 19 nt, Artificial Sequence
  Description of Artificial Sequence: Synthetic oligonucleotide
cuuccgucuucauuaugca

SEQ ID NO: 1116542 - RNA, 19 nt, Artificial Sequence
  Description of Artificial Sequence: Synthetic oligonucleotide
ccuacugauuauuuuauua

SEQ ID NO: 1116543 - RNA, 19 nt, Artificial Sequence
  Description of Artificial Sequence: Synthetic oligonucleotide
cacuaucucuuccaguaaa

SEQ ID NO: 1116544 - RNA, 19 nt, Artificial Sequence
  Description of Artificial Sequence: Synthetic oligonucleotide
uaccucuccugagauauuu

SEQ ID NO: 1116545 - RNA, 19 nt, Artificial Sequence
  Description of Artificial Sequence: Synthetic oligonucleotide
accuacugauuauuuuauu

SEQ ID NO: 1116546 - RNA, 19 nt, Artificial Sequence
  Description of Artificial Sequence: Synthetic oligonucleotide
uaggccguaaccgcugauc

SEQ ID NO: 1116547 - RNA, 19 nt, Artificial Sequence
  Description of Artificial Sequence: Synthetic oligonucleotide
uacuugcaucaugaguacu

SEQ ID NO: 1116548 - RNA, 19 nt, Artificial Sequence
  Description of Artificial Sequence: Synthetic oligonucleotide
ccaauguuaguuauguugu

SEQ ID NO: 1116549 - RNA, 19 nt, Artificial Sequence
  Description of Artificial Sequence: Synthetic oligonucleotide
augguucgcuuuugaaaau

SEQ ID NO: 1116550 - RNA, 19 nt, Artificial Sequence
  Description of Artificial Sequence: Synthetic oligonucleotide
uuacgccaauauacuucac

SEQ ID NO: 1116551 - RNA, 19 nt, Artificial Sequence
  Description of Artificial Sequence: Synthetic oligonucleotide
ugaccccaucauaaccauc

SEQ ID NO: 1116552 - RNA, 19 nt, Artificial Sequence
  Description of Artificial Sequence: Synthetic oligonucleotide
ccuuccuaaucaauaccac

SEQ ID NO: 1116553 - RNA, 19 nt, Artificial Sequence
  Description of Artificial Sequence: Synthetic oligonucleotide
guucaugacugaacuauua

SEQ ID NO: 1116554 - RNA, 19 nt, Artificial Sequence
  Description of Artificial Sequence: Synthetic oligonucleotide
acuguggguaccguauaau

SEQ ID NO: 1116555 - RNA, 19 nt, Artificial Sequence
  Description of Artificial Sequence: Synthetic oligonucleotide
gacuaccaucuuauaagaa

SEQ ID NO: 1116556 - RNA, 19 nt, Artificial Sequence
  Description of Artificial Sequence: Synthetic oligonucleotide
cuaucacaccuccuuuaga

SEQ ID NO: 1116557 - RNA, 19 nt, Artificial Sequence
  Description of Artificial Sequence: Synthetic oligonucleotide
ccaguaaauuccacauaug

SEQ ID NO: 1116558 - RNA, 19 nt, Artificial Sequence
  Description of Artificial Sequence: Synthetic oligonucleotide
auauggaaacugagagaca

SEQ ID NO: 1116559 - RNA, 19 nt, Artificial Sequence
  Description of Artificial Sequence: Synthetic oligonucleotide
ccacauauggaaacugaga

SEQ ID NO: 1116560 - RNA, 19 nt, Artificial Sequence
  Description of Artificial Sequence: Synthetic oligonucleotide
guaagucguguuccuucca

SEQ ID NO: 1116561 - RNA, 19 nt, Artificial Sequence
  Description of Artificial Sequence: Synthetic oligonucleotide
uuguuauauuuagcguguu

SEQ ID NO: 1116562 - RNA, 19 nt, Artificial Sequence
  Description of Artificial Sequence: Synthetic oligonucleotide
cacuucauuugacaguuau

SEQ ID NO: 1116563 - RNA, 19 nt, Artificial Sequence
  Description of Artificial Sequence: Synthetic oligonucleotide
gaccuacugauuauuuuau

SEQ ID NO: 1116564 - RNA, 19 nt, Artificial Sequence
  Description of Artificial Sequence: Synthetic oligonucleotide
accguauaaucaaucuguu

SEQ ID NO: 1116565 - RNA, 19 nt, Artificial Sequence
  Description of Artificial Sequence: Synthetic oligonucleotide
guacuuugauggagaucag

SEQ ID NO: 1116566 - RNA, 19 nt, Artificial Sequence
  Description of Artificial Sequence: Synthetic oligonucleotide
caccucacuguuaacgagu

SEQ ID NO: 1116567 - RNA, 19 nt, Artificial Sequence
  Description of Artificial Sequence: Synthetic oligonucleotide
agcguguucgugauauuua

SEQ ID NO: 1116568 - RNA, 19 nt, Artificial Sequence
  Description of Artificial Sequence: Synthetic oligonucleotide
ucaaugccaccaguugguu

SEQ ID NO: 1116569 - RNA, 19 nt, Artificial Sequence
  Description of Artificial Sequence: Synthetic oligonucleotide
ggagaucaguguacagaag

SEQ ID NO: 1116570 - RNA, 19 nt, Artificial Sequence
  Description of Artificial Sequence: Synthetic oligonucleotide
agucgacguacugguaccu

SEQ ID NO: 1116571 - RNA, 19 nt, Artificial Sequence
  Description of Artificial Sequence: Synthetic oligonucleotide
auuuagcguguucgugaua

SEQ ID NO: 1116572 - RNA, 19 nt, Artificial Sequence
  Description of Artificial Sequence: Synthetic oligonucleotide
cuucuaggccguaaccgcu

SEQ ID NO: 1116573 - RNA, 19 nt, Artificial Sequence
  Description of Artificial Sequence: Synthetic oligonucleotide
ccaaucaguuaacuuacaa

SEQ ID NO: 1116574 - RNA, 19 nt, Artificial Sequence
  Description of Artificial Sequence: Synthetic oligonucleotide
ugguaccucuccugagaua

SEQ ID NO: 1116575 - RNA, 19 nt, Artificial Sequence
  Description of Artificial Sequence: Synthetic oligonucleotide
uuagcguguucgugauauu

SEQ ID NO: 1116576 - RNA, 19 nt, Artificial Sequence
  Description of Artificial Sequence: Synthetic oligonucleotide
gaacaugucucaggugggu

SEQ ID NO: 1116577 - RNA, 19 nt, Artificial Sequence
  Description of Artificial Sequence: Synthetic oligonucleotide
gaucacuauaugggaucaa

SEQ ID NO: 1116578 - RNA, 19 nt, Artificial Sequence
  Description of Artificial Sequence: Synthetic oligonucleotide
gcguguucgugauauuuaa

SEQ ID NO: 1116579 - RNA, 19 nt, Artificial Sequence
  Description of Artificial Sequence: Synthetic oligonucleotide
uaacugacauaggcugauu

SEQ ID NO: 1116580 - RNA, 19 nt, Artificial Sequence
  Description of Artificial Sequence: Synthetic oligonucleotide
uuuguucuucuaggccgua

SEQ ID NO: 1116581 - RNA, 19 nt, Artificial Sequence
  Description of Artificial Sequence: Synthetic oligonucleotide
gacaguuaucaaagcugua

SEQ ID NO: 1116582 - RNA, 19 nt, Artificial Sequence
  Description of Artificial Sequence: Synthetic oligonucleotide
gggacaagugacacuaucu

SEQ ID NO: 1116583 - RNA, 19 nt, Artificial Sequence
  Description of Artificial Sequence: Synthetic oligonucleotide
ucauaucaagugggccaau

SEQ ID NO: 1116584 - RNA, 19 nt, Artificial Sequence
  Description of Artificial Sequence: Synthetic oligonucleotide
aggcugauuuuacgccaau

SEQ ID NO: 1116585 - RNA, 19 nt, Artificial Sequence
  Description of Artificial Sequence: Synthetic oligonucleotide
ggguaccguauaaucaauc

SEQ ID NO: 1116586 - RNA, 19 nt, Artificial Sequence
  Description of Artificial Sequence: Synthetic oligonucleotide
acguuaucauauagucgaa

SEQ ID NO: 1116587 - RNA, 19 nt, Artificial Sequence
  Description of Artificial Sequence: Synthetic oligonucleotide
acuauacaugaagcacaua

SEQ ID NO: 1116588 - RNA, 19 nt, Artificial Sequence
  Description of Artificial Sequence: Synthetic oligonucleotide
gucgaggugaccccaucau

SEQ ID NO: 1116589 - RNA, 19 nt, Artificial Sequence
  Description of Artificial Sequence: Synthetic oligonucleotide
cgaggugaccccaucauaa

SEQ ID NO: 1116590 - RNA, 19 nt, Artificial Sequence
  Description of Artificial Sequence: Synthetic oligonucleotide
accccaucauaaccaucuu

SEQ ID NO: 1116591 - RNA, 19 nt, Artificial Sequence
  Description of Artificial Sequence: Synthetic oligonucleotide
cuugcaucaugaguacuau

SEQ ID NO: 1116592 - RNA, 19 nt, Artificial Sequence
  Description of Artificial Sequence: Synthetic oligonucleotide
gucgacguacugguaccuc

SEQ ID NO: 1116593 - RNA, 19 nt, Artificial Sequence
  Description of Artificial Sequence: Synthetic oligonucleotide
cgccaauauacuucacauc

SEQ ID NO: 1116594 - RNA, 19 nt, Artificial Sequence
  Description of Artificial Sequence: Synthetic oligonucleotide
cugguaccucuccugagau

SEQ ID NO: 1116595 - RNA, 19 nt, Artificial Sequence
  Description of Artificial Sequence: Synthetic oligonucleotide
gccguaaccgcugaucacu

SEQ ID NO: 1116596 - RNA, 19 nt, Artificial Sequence
  Description of Artificial Sequence: Synthetic oligonucleotide
cauaaccaucuucuuuauu

SEQ ID NO: 1116597 - RNA, 19 nt, Artificial Sequence
  Description of Artificial Sequence: Synthetic oligonucleotide
gggccaacugguaagucgu

SEQ ID NO: 1116598 - RNA, 19 nt, Artificial Sequence
  Description of Artificial Sequence: Synthetic oligonucleotide
gcaucaugaguacuauauu

SEQ ID NO: 1116599 - RNA, 19 nt, Artificial Sequence
  Description of Artificial Sequence: Synthetic oligonucleotide
gucgaaagacuaccaucuu

SEQ ID NO: 1116600 - RNA, 19 nt, Artificial Sequence
  Description of Artificial Sequence: Synthetic oligonucleotide
gggaccuacugauuauuuu

SEQ ID NO: 1116601 - RNA, 19 nt, Artificial Sequence
  Description of Artificial Sequence: Synthetic oligonucleotide
ggcugauuuuacgccaaua

SEQ ID NO: 1116602 - RNA, 19 nt, Artificial Sequence
  Description of Artificial Sequence: Synthetic oligonucleotide
cgacguacugguaccucuc

SEQ ID NO: 1116603 - RNA, 19 nt, Artificial Sequence
  Description of Artificial Sequence: Synthetic oligonucleotide
gccaaucaguuaacuuaca

SEQ ID NO: 1116604 - RNA, 19 nt, Artificial Sequence
  Description of Artificial Sequence: Synthetic oligonucleotide
cguuaucauauagucgaaa

SEQ ID NO: 1116605 - RNA, 19 nt, Artificial Sequence
  Description of Artificial Sequence: Synthetic oligonucleotide
cguguucgugauauuuaaa

SEQ ID NO: 1116606 - RNA, 19 nt, Artificial Sequence
  Description of Artificial Sequence: Synthetic oligonucleotide
gcgugccuuuccaauaacu

SEQ ID NO: 1116607 - RNA, 19 nt, Artificial Sequence
  Description of Artificial Sequence: Synthetic oligonucleotide
ccguauaaucaaucuguuu

SEQ ID NO: 1116608 - RNA, 19 nt, Artificial Sequence
  Description of Artificial Sequence: Synthetic oligonucleotide
cccuaggaauucuucccgu

SEQ ID NO: 1116609 - RNA, 19 nt, Artificial Sequence
  Description of Artificial Sequence: Synthetic oligonucleotide
cacauacugagagguucuu

SEQ ID NO: 1116610 - RNA, 19 nt, Artificial Sequence
  Description of Artificial Sequence: Synthetic oligonucleotide
ccguaaccgcugaucacua

SEQ ID NO: 1116611 - RNA, 19 nt, Artificial Sequence
  Description of Artificial Sequence: Synthetic oligonucleotide
ggccaauguuaguuauguu

SEQ ID NO: 1116612 - RNA, 19 nt, Artificial Sequence
  Description of Artificial Sequence: Synthetic oligonucleotide
cuaggccguaaccgcugau

SEQ ID NO: 1116613 - RNA, 19 nt, Artificial Sequence
  Description of Artificial Sequence: Synthetic oligonucleotide
gucguacauguaacucauu

SEQ ID NO: 1116614 - RNA, 19 nt, Artificial Sequence
  Description of Artificial Sequence: Synthetic oligonucleotide
ccacuucauuugacaguua

SEQ ID NO: 1116615 - RNA, 19 nt, Artificial Sequence
  Description of Artificial Sequence: Synthetic oligonucleotide
guaccucuccugagauauu

SEQ ID NO: 1116616 - RNA, 19 nt, Artificial Sequence
  Description of Artificial Sequence: Synthetic oligonucleotide
uucaacacaacucagggga

SEQ ID NO: 1116617 - RNA, 19 nt, Artificial Sequence
  Description of Artificial Sequence: Synthetic oligonucleotide
agugcgacagcuuaugucg

SEQ ID NO: 1116618 - RNA, 19 nt, Artificial Sequence
  Description of Artificial Sequence: Synthetic oligonucleotide
cuuaugucgguucaggugg

SEQ ID NO: 1116619 - RNA, 19 nt, Artificial Sequence
  Description of Artificial Sequence: Synthetic oligonucleotide
uggacagauauccaguagg

SEQ ID NO: 1116620 - RNA, 19 nt, Artificial Sequence
  Description of Artificial Sequence: Synthetic oligonucleotide
aaaccuagugaauuccuuc

SEQ ID NO: 1116621 - RNA, 19 nt, Artificial Sequence
  Description of Artificial Sequence: Synthetic oligonucleotide
ugugguccgaaauauaagc

SEQ ID NO: 1116622 - RNA, 19 nt, Artificial Sequence
  Description of Artificial Sequence: Synthetic oligonucleotide
auuguagccguucuugaac

SEQ ID NO: 1116623 - RNA, 19 nt, Artificial Sequence
  Description of Artificial Sequence: Synthetic oligonucleotide
aauauaagcggagcucagc

SEQ ID NO: 1116624 - RNA, 19 nt, Artificial Sequence
  Description of Artificial Sequence: Synthetic oligonucleotide
ucugacgugacuguugagg

SEQ ID NO: 1116625 - RNA, 19 nt, Artificial Sequence
  Description of Artificial Sequence: Synthetic oligonucleotide
ugguccgaaauauaagcgg

SEQ ID NO: 1116626 - RNA, 19 nt, Artificial Sequence
  Description of Artificial Sequence: Synthetic oligonucleotide
auaagcggagcucagcauc

SEQ ID NO: 1116627 - RNA, 19 nt, Artificial Sequence
  Description of Artificial Sequence: Synthetic oligonucleotide
cuuacugaaaguaucccuc

SEQ ID NO: 1116628 - RNA, 19 nt, Artificial Sequence
  Description of Artificial Sequence: Synthetic oligonucleotide
gggguuuaaagguugaggg

SEQ ID NO: 1116629 - RNA, 19 nt, Artificial Sequence
  Description of Artificial Sequence: Synthetic oligonucleotide
uuaguguucaaccacccua

SEQ ID NO: 1116630 - RNA, 19 nt, Artificial Sequence
  Description of Artificial Sequence: Synthetic oligonucleotide
gauccuucguagcaaaagc

SEQ ID NO: 1116631 - RNA, 19 nt, Artificial Sequence
  Description of Artificial Sequence: Synthetic oligonucleotide
aaccuagugaauuccuucu

SEQ ID NO: 1116632 - RNA, 19 nt, Artificial Sequence
  Description of Artificial Sequence: Synthetic oligonucleotide
cacgugguaacucaugcgg

SEQ ID NO: 1116633 - RNA, 19 nt, Artificial Sequence
  Description of Artificial Sequence: Synthetic oligonucleotide
uggggcacgcucaagaggc

SEQ ID NO: 1116634 - RNA, 19 nt, Artificial Sequence
  Description of Artificial Sequence: Synthetic oligonucleotide
aaauguagggccccuugcu

SEQ ID NO: 1116635 - RNA, 19 nt, Artificial Sequence
  Description of Artificial Sequence: Synthetic oligonucleotide
auauaagcggagcucagca

SEQ ID NO: 1116636 - RNA, 19 nt, Artificial Sequence
  Description of Artificial Sequence: Synthetic oligonucleotide
uguucaaccacccuaccuu

SEQ ID NO: 1116637 - RNA, 19 nt, Artificial Sequence
  Description of Artificial Sequence: Synthetic oligonucleotide
ggauguuuaguguucaacc

SEQ ID NO: 1116638 - RNA, 19 nt, Artificial Sequence
  Description of Artificial Sequence: Synthetic oligonucleotide
uuaaaccuagugaauuccu

SEQ ID NO: 1116639 - RNA, 19 nt, Artificial Sequence
  Description of Artificial Sequence: Synthetic oligonucleotide
uccuucguagcaaaagcug

SEQ ID NO: 1116640 - RNA, 19 nt, Artificial Sequence
  Description of Artificial Sequence: Synthetic oligonucleotide
uguugaggugauccggccg

SEQ ID NO: 1116641 - RNA, 19 nt, Artificial Sequence
  Description of Artificial Sequence: Synthetic oligonucleotide
cucgcucccaucaacuugg

SEQ ID NO: 1116642 - RNA, 19 nt, Artificial Sequence
  Description of Artificial Sequence: Synthetic oligonucleotide
aguaccuuuguugcagagc

SEQ ID NO: 1116643 - RNA, 19 nt, Artificial Sequence
  Description of Artificial Sequence: Synthetic oligonucleotide
guugaggugauccggccgg

SEQ ID NO: 1116644 - RNA, 19 nt, Artificial Sequence
  Description of Artificial Sequence: Synthetic oligonucleotide
cauuggacaaaccucacca

SEQ ID NO: 1116645 - RNA, 19 nt, Artificial Sequence
  Description of Artificial Sequence: Synthetic oligonucleotide
cugaaaguaucccucugcc

SEQ ID NO: 1116646 - RNA, 19 nt, Artificial Sequence
  Description of Artificial Sequence: Synthetic oligonucleotide
agcacaggaccuucuaggg

SEQ ID NO: 1116647 - RNA, 19 nt, Artificial Sequence
  Description of Artificial Sequence: Synthetic oligonucleotide
aagauuccaucucucuugu

SEQ ID NO: 1116648 - RNA, 19 nt, Artificial Sequence
  Description of Artificial Sequence: Synthetic oligonucleotide
cacccuaccuuacugaaag

SEQ ID NO: 1116649 - RNA, 19 nt, Artificial Sequence
  Description of Artificial Sequence: Synthetic oligonucleotide
uauccaguaggauguuuag

SEQ ID NO: 1116650 - RNA, 19 nt, Artificial Sequence
  Description of Artificial Sequence: Synthetic oligonucleotide
uguaccaagaagagcuuuc

SEQ ID NO: 1116651 - RNA, 19 nt, Artificial Sequence
  Description of Artificial Sequence: Synthetic oligonucleotide
aggauguuuaguguucaac

SEQ ID NO: 1116652 - RNA, 19 nt, Artificial Sequence
  Description of Artificial Sequence: Synthetic oligonucleotide
gagauuguagccguucuug

SEQ ID NO: 1116653 - RNA, 19 nt, Artificial Sequence
  Description of Artificial Sequence: Synthetic oligonucleotide
ugucugacgugacuguuga

SEQ ID NO: 1116654 - RNA, 19 nt, Artificial Sequence
  Description of Artificial Sequence: Synthetic oligonucleotide
gcucccaucaacuuggagc

SEQ ID NO: 1116655 - RNA, 19 nt, Artificial Sequence
  Description of Artificial Sequence: Synthetic oligonucleotide
cuucguagcaaaagcugcc

SEQ ID NO: 1116656 - RNA, 19 nt, Artificial Sequence
  Description of Artificial Sequence: Synthetic oligonucleotide
cuaccuuacugaaaguauc

SEQ ID NO: 1116657 - RNA, 19 nt, Artificial Sequence
  Description of Artificial Sequence: Synthetic oligonucleotide
gucacaacgccaccgggcg

SEQ ID NO: 1116658 - RNA, 19 nt, Artificial Sequence
  Description of Artificial Sequence: Synthetic oligonucleotide
ugauucuuccggaugcgcu

SEQ ID NO: 1116659 - RNA, 19 nt, Artificial Sequence
  Description of Artificial Sequence: Synthetic oligonucleotide
caacuuggagcucaccagg

SEQ ID NO: 1116660 - RNA, 19 nt, Artificial Sequence
  Description of Artificial Sequence: Synthetic oligonucleotide
gagacuguaccaagaagag

SEQ ID NO: 1116661 - RNA, 19 nt, Artificial Sequence
  Description of Artificial Sequence: Synthetic oligonucleotide
ugacuguugaggugauccg

SEQ ID NO: 1116662 - RNA, 19 nt, Artificial Sequence
  Description of Artificial Sequence: Synthetic oligonucleotide
guucaggugguagacgucg

SEQ ID NO: 1116663 - RNA, 19 nt, Artificial Sequence
  Description of Artificial Sequence: Synthetic oligonucleotide
uuacugaaaguaucccucu

SEQ ID NO: 1116664 - RNA, 19 nt, Artificial Sequence
  Description of Artificial Sequence: Synthetic oligonucleotide
auuggacaaaccucaccag

SEQ ID NO: 1116665 - RNA, 19 nt, Artificial Sequence
  Description of Artificial Sequence: Synthetic oligonucleotide
uuuaguguucaaccacccu

SEQ ID NO: 1116666 - RNA, 19 nt, Artificial Sequence
  Description of Artificial Sequence: Synthetic oligonucleotide
accuuacugaaaguauccc

SEQ ID NO: 1116667 - RNA, 19 nt, Artificial Sequence
  Description of Artificial Sequence: Synthetic oligonucleotide
aguaggauguuuaguguuc

SEQ ID NO: 1116668 - RNA, 19 nt, Artificial Sequence
  Description of Artificial Sequence: Synthetic oligonucleotide
uucucacauuugaagggcc

SEQ ID NO: 1116669 - RNA, 19 nt, Artificial Sequence
  Description of Artificial Sequence: Synthetic oligonucleotide
agacuguaccaagaagagc

SEQ ID NO: 1116670 - RNA, 19 nt, Artificial Sequence
  Description of Artificial Sequence: Synthetic oligonucleotide
cauagcacccgaagggacc

SEQ ID NO: 1116671 - RNA, 19 nt, Artificial Sequence
  Description of Artificial Sequence: Synthetic oligonucleotide
uccgaaauauaagcggagc

SEQ ID NO: 1116672 - RNA, 19 nt, Artificial Sequence
  Description of Artificial Sequence: Synthetic oligonucleotide
aaauauaagcggagcucag

SEQ ID NO: 1116673 - RNA, 19 nt, Artificial Sequence
  Description of Artificial Sequence: Synthetic oligonucleotide
auagcacccgaagggaccc

SEQ ID NO: 1116674 - RNA, 19 nt, Artificial Sequence
  Description of Artificial Sequence: Synthetic oligonucleotide
ucuccaagacagaugcaac

SEQ ID NO: 1116675 - RNA, 19 nt, Artificial Sequence
  Description of Artificial Sequence: Synthetic oligonucleotide
uggacaaaccucaccagua

SEQ ID NO: 1116676 - RNA, 19 nt, Artificial Sequence
  Description of Artificial Sequence: Synthetic oligonucleotide
agcgccgucaugugagcgc

SEQ ID NO: 1116677 - RNA, 19 nt, Artificial Sequence
  Description of Artificial Sequence: Synthetic oligonucleotide
aacuuggagcucaccaggg

SEQ ID NO: 1116678 - RNA, 19 nt, Artificial Sequence
  Description of Artificial Sequence: Synthetic oligonucleotide
gugguccgaaauauaagcg

SEQ ID NO: 1116679 - RNA, 19 nt, Artificial Sequence
  Description of Artificial Sequence: Synthetic oligonucleotide
gauggcuucgugccuccgg

SEQ ID NO: 1116680 - RNA, 19 nt, Artificial Sequence
  Description of Artificial Sequence: Synthetic oligonucleotide
acuccccuuggcuuuuccc

SEQ ID NO: 1116681 - RNA, 19 nt, Artificial Sequence
  Description of Artificial Sequence: Synthetic oligonucleotide
uaagcggagcucagcaucu

SEQ ID NO: 1116682 - RNA, 19 nt, Artificial Sequence
  Description of Artificial Sequence: Synthetic oligonucleotide
aaccacccuaccuuacuga

SEQ ID NO: 1116683 - RNA, 19 nt, Artificial Sequence
  Description of Artificial Sequence: Synthetic oligonucleotide
caugugguccgaaauauaa

SEQ ID NO: 1116684 - RNA, 19 nt, Artificial Sequence
  Description of Artificial Sequence: Synthetic oligonucleotide
uucauagcacccgaaggga

SEQ ID NO: 1116685 - RNA, 19 nt, Artificial Sequence
  Description of Artificial Sequence: Synthetic oligonucleotide
uagacgucgcggaaggccu

SEQ ID NO: 1116686 - RNA, 19 nt, Artificial Sequence
  Description of Artificial Sequence: Synthetic oligonucleotide
cacagcgccgucaugugag

SEQ ID NO: 1116687 - RNA, 19 nt, Artificial Sequence
  Description of Artificial Sequence: Synthetic oligonucleotide
agcucugauagggagaaga

SEQ ID NO: 1116688 - RNA, 19 nt, Artificial Sequence
  Description of Artificial Sequence: Synthetic oligonucleotide
aagcgcugcuggcacacag

SEQ ID NO: 1116689 - RNA, 19 nt, Artificial Sequence
  Description of Artificial Sequence: Synthetic oligonucleotide
uuccggaugcgcuuuccag

SEQ ID NO: 1116690 - RNA, 19 nt, Artificial Sequence
  Description of Artificial Sequence: Synthetic oligonucleotide
agauuguagccguucuuga

SEQ ID NO: 1116691 - RNA, 19 nt, Artificial Sequence
  Description of Artificial Sequence: Synthetic oligonucleotide
gacgugacuguugagguga

SEQ ID NO: 1116692 - RNA, 19 nt, Artificial Sequence
  Description of Artificial Sequence: Synthetic oligonucleotide
guugagugcacuugucuga

SEQ ID NO: 1116693 - RNA, 19 nt, Artificial Sequence
  Description of Artificial Sequence: Synthetic oligonucleotide
ucgugucguacugugugcg

SEQ ID NO: 1116694 - RNA, 19 nt, Artificial Sequence
  Description of Artificial Sequence: Synthetic oligonucleotide
aaaggcucacaaaucccug

SEQ ID NO: 1116695 - RNA, 19 nt, Artificial Sequence
  Description of Artificial Sequence: Synthetic oligonucleotide
gagucgauccuucguagca

SEQ ID NO: 1116696 - RNA, 19 nt, Artificial Sequence
  Description of Artificial Sequence: Synthetic oligonucleotide
gaggaguuggugagaagag

SEQ ID NO: 1116697 - RNA, 19 nt, Artificial Sequence
  Description of Artificial Sequence: Synthetic oligonucleotide
acaccguggcugcauuccc

SEQ ID NO: 1116698 - RNA, 19 nt, Artificial Sequence
  Description of Artificial Sequence: Synthetic oligonucleotide
ugucgguucaggugguaga

SEQ ID NO: 1116699 - RNA, 19 nt, Artificial Sequence
  Description of Artificial Sequence: Synthetic oligonucleotide
gagugcgacagcuuauguc

SEQ ID NO: 1116700 - RNA, 19 nt, Artificial Sequence
  Description of Artificial Sequence: Synthetic oligonucleotide
ucaugugagcgcacguggu

SEQ ID NO: 1116701 - RNA, 19 nt, Artificial Sequence
  Description of Artificial Sequence: Synthetic oligonucleotide
guagacgucgcggaaggcc

SEQ ID NO: 1116702 - RNA, 19 nt, Artificial Sequence
  Description of Artificial Sequence: Synthetic oligonucleotide
ucucguccgagugcgacag

SEQ ID NO: 1116703 - RNA, 19 nt, Artificial Sequence
  Description of Artificial Sequence: Synthetic oligonucleotide
ucggagucgauccuucgua

SEQ ID NO: 1116704 - RNA, 19 nt, Artificial Sequence
  Description of Artificial Sequence: Synthetic oligonucleotide
gcaggcgugauucuuccgg

SEQ ID NO: 1116705 - RNA, 19 nt, Artificial Sequence
  Description of Artificial Sequence: Synthetic oligonucleotide
uccaggggacuucaacaca

SEQ ID NO: 1116706 - RNA, 19 nt, Artificial Sequence
  Description of Artificial Sequence: Synthetic oligonucleotide
uauaagcggagcucagcau

SEQ ID NO: 1116707 - RNA, 19 nt, Artificial Sequence
  Description of Artificial Sequence: Synthetic oligonucleotide
ccuucguagcaaaagcugc

SEQ ID NO: 1116708 - RNA, 19 nt, Artificial Sequence
  Description of Artificial Sequence: Synthetic oligonucleotide
ugauccggccgggagaagc

SEQ ID NO: 1116709 - RNA, 19 nt, Artificial Sequence
  Description of Artificial Sequence: Synthetic oligonucleotide
aaaccucaccaguaccuuu

SEQ ID NO: 1116710 - RNA, 19 nt, Artificial Sequence
  Description of Artificial Sequence: Synthetic oligonucleotide
cuggacagauauccaguag

SEQ ID NO: 1116711 - RNA, 19 nt, Artificial Sequence
  Description of Artificial Sequence: Synthetic oligonucleotide
agcuuaugucgguucaggu

SEQ ID NO: 1116712 - RNA, 19 nt, Artificial Sequence
  Description of Artificial Sequence: Synthetic oligonucleotide
uugaagggccgcucuguug

SEQ ID NO: 1116713 - RNA, 19 nt, Artificial Sequence
  Description of Artificial Sequence: Synthetic oligonucleotide
acuugucugacgugacugu

SEQ ID NO: 1116714 - RNA, 19 nt, Artificial Sequence
  Description of Artificial Sequence: Synthetic oligonucleotide
ugagugcacuugucugacg

SEQ ID NO: 1116715 - RNA, 19 nt, Artificial Sequence
  Description of Artificial Sequence: Synthetic oligonucleotide
cacuugucugacgugacug

SEQ ID NO: 1116716 - RNA, 19 nt, Artificial Sequence
  Description of Artificial Sequence: Synthetic oligonucleotide
caaaucccugggaggaaag

SEQ ID NO: 1116717 - RNA, 19 nt, Artificial Sequence
  Description of Artificial Sequence: Synthetic oligonucleotide
ggguuuaaagguugagggc

SEQ ID NO: 1116718 - RNA, 19 nt, Artificial Sequence
  Description of Artificial Sequence: Synthetic oligonucleotide
auuguuaaaccuagugaau

SEQ ID NO: 1116719 - RNA, 19 nt, Artificial Sequence
  Description of Artificial Sequence: Synthetic oligonucleotide
gcaguuguagggcuugugc

SEQ ID NO: 1116720 - RNA, 19 nt, Artificial Sequence
  Description of Artificial Sequence: Synthetic oligonucleotide
gacaccguggcugcauucc

SEQ ID NO: 1116721 - RNA, 19 nt, Artificial Sequence
  Description of Artificial Sequence: Synthetic oligonucleotide
uagggcuugugcacagcgc

SEQ ID NO: 1116722 - RNA, 19 nt, Artificial Sequence
  Description of Artificial Sequence: Synthetic oligonucleotide
ugacgugacuguugaggug

SEQ ID NO: 1116723 - RNA, 19 nt, Artificial Sequence
  Description of Artificial Sequence: Synthetic oligonucleotide
aggggacuucaacacaacu

SEQ ID NO: 1116724 - RNA, 19 nt, Artificial Sequence
  Description of Artificial Sequence: Synthetic oligonucleotide
uucguagcaaaagcugccu

SEQ ID NO: 1116725 - RNA, 19 nt, Artificial Sequence
  Description of Artificial Sequence: Synthetic oligonucleotide
ucaguaccaccguaucccu

SEQ ID NO: 1116726 - RNA, 19 nt, Artificial Sequence
  Description of Artificial Sequence: Synthetic oligonucleotide
uucaaccacccuaccuuac

SEQ ID NO: 1116727 - RNA, 19 nt, Artificial Sequence
  Description of Artificial Sequence: Synthetic oligonucleotide
ggucagcucugauagggag

SEQ ID NO: 1116728 - RNA, 19 nt, Artificial Sequence
  Description of Artificial Sequence: Synthetic oligonucleotide
cucgugucguacugugugc

SEQ ID NO: 1116729 - RNA, 19 nt, Artificial Sequence
  Description of Artificial Sequence: Synthetic oligonucleotide
guccaggggacuucaacac

SEQ ID NO: 1116730 - RNA, 19 nt, Artificial Sequence
  Description of Artificial Sequence: Synthetic oligonucleotide
uggagggucagcucugaua

SEQ ID NO: 1116731 - RNA, 19 nt, Artificial Sequence
  Description of Artificial Sequence: Synthetic oligonucleotide
acagcgccgucaugugagc

SEQ ID NO: 1116732 - RNA, 19 nt, Artificial Sequence
  Description of Artificial Sequence: Synthetic oligonucleotide
cuggggcacgcucaagagg

SEQ ID NO: 1116733 - RNA, 19 nt, Artificial Sequence
  Description of Artificial Sequence: Synthetic oligonucleotide
ucguagcaaaagcugccuc

SEQ ID NO: 1116734 - RNA, 19 nt, Artificial Sequence
  Description of Artificial Sequence: Synthetic oligonucleotide
ugcacuugucugacgugac

SEQ ID NO: 1116735 - RNA, 19 nt, Artificial Sequence
  Description of Artificial Sequence: Synthetic oligonucleotide
aguaucccucugccuuccc

SEQ ID NO: 1116736 - RNA, 19 nt, Artificial Sequence
  Description of Artificial Sequence: Synthetic oligonucleotide
ugcgcuuuccagaggcggu

SEQ ID NO: 1116737 - RNA, 19 nt, Artificial Sequence
  Description of Artificial Sequence: Synthetic oligonucleotide
ucuagucccuggcucuccu

SEQ ID NO: 1116738 - RNA, 19 nt, Artificial Sequence
  Description of Artificial Sequence: Synthetic oligonucleotide
guagcaaaagcugccucac

SEQ ID NO: 1116739 - RNA, 19 nt, Artificial Sequence
  Description of Artificial Sequence: Synthetic oligonucleotide
uuaugucgguucagguggu

SEQ ID NO: 1116740 - RNA, 19 nt, Artificial Sequence
  Description of Artificial Sequence: Synthetic oligonucleotide
cagcuuaugucgguucagg

SEQ ID NO: 1116741 - RNA, 19 nt, Artificial Sequence
  Description of Artificial Sequence: Synthetic oligonucleotide
ugccuccggagauuguagc

SEQ ID NO: 1116742 - RNA, 19 nt, Artificial Sequence
  Description of Artificial Sequence: Synthetic oligonucleotide
agacaguaggagaggggac

SEQ ID NO: 1116743 - RNA, 19 nt, Artificial Sequence
  Description of Artificial Sequence: Synthetic oligonucleotide
gugcgcucggagucgaucc

SEQ ID NO: 1116744 - RNA, 19 nt, Artificial Sequence
  Description of Artificial Sequence: Synthetic oligonucleotide
augugguccgaaauauaag

SEQ ID NO: 1116745 - RNA, 19 nt, Artificial Sequence
  Description of Artificial Sequence: Synthetic oligonucleotide
auccuucguagcaaaagcu

SEQ ID NO: 1116746 - RNA, 19 nt, Artificial Sequence
  Description of Artificial Sequence: Synthetic oligonucleotide
agguguuuggagggucagc

SEQ ID NO: 1116747 - RNA, 19 nt, Artificial Sequence
  Description of Artificial Sequence: Synthetic oligonucleotide
ugugagcgcacgugguaac

SEQ ID NO: 1116748 - RNA, 19 nt, Artificial Sequence
  Description of Artificial Sequence: Synthetic oligonucleotide
guccgaaauauaagcggag

SEQ ID NO: 1116749 - RNA, 19 nt, Artificial Sequence
  Description of Artificial Sequence: Synthetic oligonucleotide
uucucguccgagugcgaca

SEQ ID NO: 1116750 - RNA, 19 nt, Artificial Sequence
  Description of Artificial Sequence: Synthetic oligonucleotide
uucgugccuccggagauug

SEQ ID NO: 1116751 - RNA, 19 nt, Artificial Sequence
  Description of Artificial Sequence: Synthetic oligonucleotide
uccuuggcgcacagggcgc

SEQ ID NO: 1116752 - RNA, 19 nt, Artificial Sequence
  Description of Artificial Sequence: Synthetic oligonucleotide
agcaccaacuccccaggaa

SEQ ID NO: 1116753 - RNA, 19 nt, Artificial Sequence
  Description of Artificial Sequence: Synthetic oligonucleotide
gugggcaucuucauagcac

SEQ ID NO: 1116754 - RNA, 19 nt, Artificial Sequence
  Description of Artificial Sequence: Synthetic oligonucleotide
ggcggucguggucacaacg

SEQ ID NO: 1116755 - RNA, 19 nt, Artificial Sequence
  Description of Artificial Sequence: Synthetic oligonucleotide
uuggugagaagaggagacu

SEQ ID NO: 1116756 - RNA, 19 nt, Artificial Sequence
  Description of Artificial Sequence: Synthetic oligonucleotide
augucgguucaggugguag

SEQ ID NO: 1116757 - RNA, 19 nt, Artificial Sequence
  Description of Artificial Sequence: Synthetic oligonucleotide
uggugagcagugaggaguu

SEQ ID NO: 1116758 - RNA, 19 nt, Artificial Sequence
  Description of Artificial Sequence: Synthetic oligonucleotide
ugucguacugugugcgcuc

SEQ ID NO: 1116759 - RNA, 19 nt, Artificial Sequence
  Description of Artificial Sequence: Synthetic oligonucleotide
cuccucgugucguacugug

SEQ ID NO: 1116760 - RNA, 19 nt, Artificial Sequence
  Description of Artificial Sequence: Synthetic oligonucleotide
gucguggucacaacgccac

SEQ ID NO: 1116761 - RNA, 19 nt, Artificial Sequence
  Description of Artificial Sequence: Synthetic oligonucleotide
guaggauguuuaguguuca

SEQ ID NO: 1116762 - RNA, 19 nt, Artificial Sequence
  Description of Artificial Sequence: Synthetic oligonucleotide
guaacucaugcgguccuug

SEQ ID NO: 1116763 - RNA, 19 nt, Artificial Sequence
  Description of Artificial Sequence: Synthetic oligonucleotide
uaggauguuuaguguucaa

SEQ ID NO: 1116764 - RNA, 19 nt, Artificial Sequence
  Description of Artificial Sequence: Synthetic oligonucleotide
agcggagcucagcaucuug

SEQ ID NO: 1116765 - RNA, 19 nt, Artificial Sequence
  Description of Artificial Sequence: Synthetic oligonucleotide
ugcgacagcuuaugucggu

SEQ ID NO: 1116766 - RNA, 19 nt, Artificial Sequence
  Description of Artificial Sequence: Synthetic oligonucleotide
gagcgcacgugguaacuca

SEQ ID NO: 1116767 - RNA, 19 nt, Artificial Sequence
  Description of Artificial Sequence: Synthetic oligonucleotide
ucgauccuucguagcaaaa

SEQ ID NO: 1116768 - RNA, 19 nt, Artificial Sequence
  Description of Artificial Sequence: Synthetic oligonucleotide
gguccgaaauauaagcgga

SEQ ID NO: 1116769 - RNA, 19 nt, Artificial Sequence
  Description of Artificial Sequence: Synthetic oligonucleotide
ggagucgauccuucguagc

SEQ ID NO: 1116770 - RNA, 19 nt, Artificial Sequence
  Description of Artificial Sequence: Synthetic oligonucleotide
ggggacuucaacacaacuc

SEQ ID NO: 1116771 - RNA, 19 nt, Artificial Sequence
  Description of Artificial Sequence: Synthetic oligonucleotide
gucguacugugugcgcucg

SEQ ID NO: 1116772 - RNA, 19 nt, Artificial Sequence
  Description of Artificial Sequence: Synthetic oligonucleotide
uccgagugcgacagcuuau

SEQ ID NO: 1116773 - RNA, 19 nt, Artificial Sequence
  Description of Artificial Sequence: Synthetic oligonucleotide
ccuaguggcuccuucugac

SEQ ID NO: 1116774 - RNA, 19 nt, Artificial Sequence
  Description of Artificial Sequence: Synthetic oligonucleotide
accuagugaauuccuucuu

SEQ ID NO: 1116775 - RNA, 19 nt, Artificial Sequence
  Description of Artificial Sequence: Synthetic oligonucleotide
uugaggugauccggccggg

SEQ ID NO: 1116776 - RNA, 19 nt, Artificial Sequence
  Description of Artificial Sequence: Synthetic oligonucleotide
uggauggcuucgugccucc

SEQ ID NO: 1116777 - RNA, 19 nt, Artificial Sequence
  Description of Artificial Sequence: Synthetic oligonucleotide
uccucgugucguacugugu

SEQ ID NO: 1116778 - RNA, 19 nt, Artificial Sequence
  Description of Artificial Sequence: Synthetic oligonucleotide
caccguggcugcauucccc

SEQ ID NO: 1116779 - RNA, 19 nt, Artificial Sequence
  Description of Artificial Sequence: Synthetic oligonucleotide
uccggccgggagaagcucu

SEQ ID NO: 1116780 - RNA, 19 nt, Artificial Sequence
  Description of Artificial Sequence: Synthetic oligonucleotide
ggcgugauucuuccggaug

SEQ ID NO: 1116781 - RNA, 19 nt, Artificial Sequence
  Description of Artificial Sequence: Synthetic oligonucleotide
ccucgugucguacugugug

SEQ ID NO: 1116782 - RNA, 19 nt, Artificial Sequence
  Description of Artificial Sequence: Synthetic oligonucleotide
gcaagggguuuaaagguug

SEQ ID NO: 1116783 - RNA, 19 nt, Artificial Sequence
  Description of Artificial Sequence: Synthetic oligonucleotide
cugacgugacuguugaggu

SEQ ID NO: 1116784 - RNA, 19 nt, Artificial Sequence
  Description of Artificial Sequence: Synthetic oligonucleotide
guucaaccacccuaccuua

SEQ ID NO: 1116785 - RNA, 19 nt, Artificial Sequence
  Description of Artificial Sequence: Synthetic oligonucleotide
cuuuucccuggacagauau

SEQ ID NO: 1116786 - RNA, 19 nt, Artificial Sequence
  Description of Artificial Sequence: Synthetic oligonucleotide
gauucuuccggaugcgcuu

SEQ ID NO: 1116787 - RNA, 19 nt, Artificial Sequence
  Description of Artificial Sequence: Synthetic oligonucleotide
gcacagggcgcaaauguag

SEQ ID NO: 1116788 - RNA, 19 nt, Artificial Sequence
  Description of Artificial Sequence: Synthetic oligonucleotide
uccccucgcucccaucaac

SEQ ID NO: 1116789 - RNA, 19 nt, Artificial Sequence
  Description of Artificial Sequence: Synthetic oligonucleotide
ugagcgcacgugguaacuc

SEQ ID NO: 1116790 - RNA, 19 nt, Artificial Sequence
  Description of Artificial Sequence: Synthetic oligonucleotide
ggucacaacgccaccgggc

SEQ ID NO: 1116791 - RNA, 19 nt, Artificial Sequence
  Description of Artificial Sequence: Synthetic oligonucleotide
uuccagaggcggucguggu

SEQ ID NO: 1116792 - RNA, 19 nt, Artificial Sequence
  Description of Artificial Sequence: Synthetic oligonucleotide
gugcgacagcuuaugucgg

SEQ ID NO: 1116793 - RNA, 19 nt, Artificial Sequence
  Description of Artificial Sequence: Synthetic oligonucleotide
ggacagauauccaguagga

SEQ ID NO: 1116794 - RNA, 19 nt, Artificial Sequence
  Description of Artificial Sequence: Synthetic oligonucleotide
cuaagauuccaucucucuu

SEQ ID NO: 1116795 - RNA, 19 nt, Artificial Sequence
  Description of Artificial Sequence: Synthetic oligonucleotide
ugugcgcucggagucgauc

SEQ ID NO: 1116796 - RNA, 19 nt, Artificial Sequence
  Description of Artificial Sequence: Synthetic oligonucleotide
uguagggccccuugcucuu

SEQ ID NO: 1116797 - RNA, 19 nt, Artificial Sequence
  Description of Artificial Sequence: Synthetic oligonucleotide
agcacccgaagggacccgg

SEQ ID NO: 1116798 - RNA, 19 nt, Artificial Sequence
  Description of Artificial Sequence: Synthetic oligonucleotide
cgaaauauaagcggagcuc

SEQ ID NO: 1116799 - RNA, 19 nt, Artificial Sequence
  Description of Artificial Sequence: Synthetic oligonucleotide
uagggccccuugcucuuug

SEQ ID NO: 1116800 - RNA, 19 nt, Artificial Sequence
  Description of Artificial Sequence: Synthetic oligonucleotide
caggggacuucaacacaac

SEQ ID NO: 1116801 - RNA, 19 nt, Artificial Sequence
  Description of Artificial Sequence: Synthetic oligonucleotide
guguucaaccacccuaccu

SEQ ID NO: 1116802 - RNA, 19 nt, Artificial Sequence
  Description of Artificial Sequence: Synthetic oligonucleotide
cugugugcgcucggagucg

SEQ ID NO: 1116803 - RNA, 19 nt, Artificial Sequence
  Description of Artificial Sequence: Synthetic oligonucleotide
agucgauccuucguagcaa

SEQ ID NO: 1116804 - RNA, 19 nt, Artificial Sequence
  Description of Artificial Sequence: Synthetic oligonucleotide
gucgauccuucguagcaaa

SEQ ID NO: 1116805 - RNA, 19 nt, Artificial Sequence
  Description of Artificial Sequence: Synthetic oligonucleotide
ugugugcgcucggagucga

SEQ ID NO: 1116806 - RNA, 19 nt, Artificial Sequence
  Description of Artificial Sequence: Synthetic oligonucleotide
uggcuuuucccuggacaga

SEQ ID NO: 1116807 - RNA, 19 nt, Artificial Sequence
  Description of Artificial Sequence: Synthetic oligonucleotide
acgugguaacucaugcggu

SEQ ID NO: 1116808 - RNA, 19 nt, Artificial Sequence
  Description of Artificial Sequence: Synthetic oligonucleotide
ggacuucaacacaacucag

SEQ ID NO: 1116809 - RNA, 19 nt, Artificial Sequence
  Description of Artificial Sequence: Synthetic oligonucleotide
gcagacaguaggagagggg

SEQ ID NO: 1116810 - RNA, 19 nt, Artificial Sequence
  Description of Artificial Sequence: Synthetic oligonucleotide
cucugauagggagaagaaa

SEQ ID NO: 1116811 - RNA, 19 nt, Artificial Sequence
  Description of Artificial Sequence: Synthetic oligonucleotide
gaggcggucguggucacaa

SEQ ID NO: 1116812 - RNA, 19 nt, Artificial Sequence
  Description of Artificial Sequence: Synthetic oligonucleotide
cugccucacauuucucaca

SEQ ID NO: 1116813 - RNA, 19 nt, Artificial Sequence
  Description of Artificial Sequence: Synthetic oligonucleotide
gugccuccggagauuguag

SEQ ID NO: 1116814 - RNA, 19 nt, Artificial Sequence
  Description of Artificial Sequence: Synthetic oligonucleotide
gucugacgugacuguugag

SEQ ID NO: 1116815 - RNA, 19 nt, Artificial Sequence
  Description of Artificial Sequence: Synthetic oligonucleotide
cgcacgugguaacucaugc

SEQ ID NO: 1116816 - RNA, 19 nt, Artificial Sequence
  Description of Artificial Sequence: Synthetic oligonucleotide
uggcgcacagggcgcaaau

SEQ ID NO: 1116817 - RNA, 19 nt, Artificial Sequence
  Description of Artificial Sequence: Synthetic oligonucleotide
caggcgugauucuuccgga

SEQ ID NO: 1116818 - RNA, 19 nt, Artificial Sequence
  Description of Artificial Sequence: Synthetic oligonucleotide
aggcggucguggucacaac

SEQ ID NO: 1116819 - RNA, 19 nt, Artificial Sequence
  Description of Artificial Sequence: Synthetic oligonucleotide
uggcccuaguggcuccuuc

SEQ ID NO: 1116820 - RNA, 19 nt, Artificial Sequence
  Description of Artificial Sequence: Synthetic oligonucleotide
caguaccaccguaucccuc

SEQ ID NO: 1116821 - RNA, 19 nt, Artificial Sequence
  Description of Artificial Sequence: Synthetic oligonucleotide
gccgccauuggacaaaccu

SEQ ID NO: 1116822 - RNA, 19 nt, Artificial Sequence
  Description of Artificial Sequence: Synthetic oligonucleotide
caguaggauguuuaguguu

SEQ ID NO: 1116823 - RNA, 19 nt, Artificial Sequence
  Description of Artificial Sequence: Synthetic oligonucleotide
aggcgugauucuuccggau

SEQ ID NO: 1116824 - RNA, 19 nt, Artificial Sequence
  Description of Artificial Sequence: Synthetic oligonucleotide
uuccccucgcucccaucaa

SEQ ID NO: 1116825 - RNA, 19 nt, Artificial Sequence
  Description of Artificial Sequence: Synthetic oligonucleotide
ccgccauuggacaaaccuc

SEQ ID NO: 1116826 - RNA, 19 nt, Artificial Sequence
  Description of Artificial Sequence: Synthetic oligonucleotide
caugugagcgcacguggua

SEQ ID NO: 1116827 - RNA, 19 nt, Artificial Sequence
  Description of Artificial Sequence: Synthetic oligonucleotide
gacgucgcggaaggccuug

SEQ ID NO: 1116828 - RNA, 19 nt, Artificial Sequence
  Description of Artificial Sequence: Synthetic oligonucleotide
ugccgccauuggacaaacc

SEQ ID NO: 1116829 - RNA, 19 nt, Artificial Sequence
  Description of Artificial Sequence: Synthetic oligonucleotide
cguagcaaaagcugccuca

SEQ ID NO: 1116830 - RNA, 19 nt, Artificial Sequence
  Description of Artificial Sequence: Synthetic oligonucleotide
cuugugcacagcgccguca

SEQ ID NO: 1116831 - RNA, 19 nt, Artificial Sequence
  Description of Artificial Sequence: Synthetic oligonucleotide
cagcgccgucaugugagcg

SEQ ID NO: 1116832 - RNA, 19 nt, Artificial Sequence
  Description of Artificial Sequence: Synthetic oligonucleotide
gccgucaugugagcgcacg

SEQ ID NO: 1116833 - RNA, 19 nt, Artificial Sequence
  Description of Artificial Sequence: Synthetic oligonucleotide
cgauccuucguagcaaaag

SEQ ID NO: 1116834 - RNA, 19 nt, Artificial Sequence
  Description of Artificial Sequence: Synthetic oligonucleotide
acgucgcggaaggccuugc

SEQ ID NO: 1116835 - RNA, 19 nt, Artificial Sequence
  Description of Artificial Sequence: Synthetic oligonucleotide
ggcgcaaauguagggcccc

SEQ ID NO: 1116836 - RNA, 19 nt, Artificial Sequence
  Description of Artificial Sequence: Synthetic oligonucleotide
ccucgcucccaucaacuug

SEQ ID NO: 1116837 - RNA, 19 nt, Artificial Sequence
  Description of Artificial Sequence: Synthetic oligonucleotide
gcggucguggucacaacgc

SEQ ID NO: 1116838 - RNA, 19 nt, Artificial Sequence
  Description of Artificial Sequence: Synthetic oligonucleotide
uagcacccgaagggacccg

SEQ ID NO: 1116839 - RNA, 19 nt, Artificial Sequence
  Description of Artificial Sequence: Synthetic oligonucleotide
ccuuacugaaaguaucccu

SEQ ID NO: 1116840 - RNA, 19 nt, Artificial Sequence
  Description of Artificial Sequence: Synthetic oligonucleotide
cgccauuggacaaaccuca

SEQ ID NO: 1116841 - RNA, 19 nt, Artificial Sequence
  Description of Artificial Sequence: Synthetic oligonucleotide
ucgcucccaucaacuugga

SEQ ID NO: 1116842 - RNA, 19 nt, Artificial Sequence
  Description of Artificial Sequence: Synthetic oligonucleotide
acuguaccaagaagagcuu

SEQ ID NO: 1116843 - RNA, 19 nt, Artificial Sequence
  Description of Artificial Sequence: Synthetic oligonucleotide
auccggccgggagaagcuc

SEQ ID NO: 1116844 - RNA, 19 nt, Artificial Sequence
  Description of Artificial Sequence: Synthetic oligonucleotide
ccaggggacuucaacacaa

SEQ ID NO: 1116845 - RNA, 19 nt, Artificial Sequence
  Description of Artificial Sequence: Synthetic oligonucleotide
uccggagauuguagccguu

SEQ ID NO: 1116846 - RNA, 19 nt, Artificial Sequence
  Description of Artificial Sequence: Synthetic oligonucleotide
ggcuucgugccuccggaga

SEQ ID NO: 1116847 - RNA, 19 nt, Artificial Sequence
  Description of Artificial Sequence: Synthetic oligonucleotide
uaugucgguucagguggua

SEQ ID NO: 1116848 - RNA, 19 nt, Artificial Sequence
  Description of Artificial Sequence: Synthetic oligonucleotide
gccgcugccgccauuggac

SEQ ID NO: 1116849 - RNA, 19 nt, Artificial Sequence
  Description of Artificial Sequence: Synthetic oligonucleotide
ccuaagauuccaucucucu

SEQ ID NO: 1116850 - RNA, 19 nt, Artificial Sequence
  Description of Artificial Sequence: Synthetic oligonucleotide
ggacugcaggaggagagca

SEQ ID NO: 1116851 - RNA, 19 nt, Artificial Sequence
  Description of Artificial Sequence: Synthetic oligonucleotide
gaagggacccggccagccu

SEQ ID NO: 1116852 - RNA, 19 nt, Artificial Sequence
  Description of Artificial Sequence: Synthetic oligonucleotide
cccgaagggacccggccag

SEQ ID NO: 1116853 - RNA, 19 nt, Artificial Sequence
  Description of Artificial Sequence: Synthetic oligonucleotide
ccgaaauauaagcggagcu

SEQ ID NO: 1116854 - RNA, 19 nt, Artificial Sequence
  Description of Artificial Sequence: Synthetic oligonucleotide
cggagucgauccuucguag

SEQ ID NO: 1116855 - RNA, 19 nt, Artificial Sequence
  Description of Artificial Sequence: Synthetic oligonucleotide
ggugauccggccgggagaa

SEQ ID NO: 1116856 - RNA, 19 nt, Artificial Sequence
  Description of Artificial Sequence: Synthetic oligonucleotide
ucgugccuccggagauugu

SEQ ID NO: 1116857 - RNA, 19 nt, Artificial Sequence
  Description of Artificial Sequence: Synthetic oligonucleotide
gagggcccuggcugugcac

SEQ ID NO: 1116858 - RNA, 19 nt, Artificial Sequence
  Description of Artificial Sequence: Synthetic oligonucleotide
cguaucccuccucugggac

SEQ ID NO: 1116859 - RNA, 19 nt, Artificial Sequence
  Description of Artificial Sequence: Synthetic oligonucleotide
ggucguggucacaacgcca

SEQ ID NO: 1116860 - RNA, 19 nt, Artificial Sequence
  Description of Artificial Sequence: Synthetic oligonucleotide
uuggcgcacagggcgcaaa

SEQ ID NO: 1116861 - RNA, 19 nt, Artificial Sequence
  Description of Artificial Sequence: Synthetic oligonucleotide
agggccccuugcucuuugu

SEQ ID NO: 1116862 - RNA, 19 nt, Artificial Sequence
  Description of Artificial Sequence: Synthetic oligonucleotide
cgugauucuuccggaugcg

SEQ ID NO: 1116863 - RNA, 19 nt, Artificial Sequence
  Description of Artificial Sequence: Synthetic oligonucleotide
gauccggccgggagaagcu

SEQ ID NO: 1116864 - RNA, 19 nt, Artificial Sequence
  Description of Artificial Sequence: Synthetic oligonucleotide
ccuggacagauauccagua

SEQ ID NO: 1116865 - RNA, 19 nt, Artificial Sequence
  Description of Artificial Sequence: Synthetic oligonucleotide
gcgcacagggcgcaaaugu

SEQ ID NO: 1116866 - RNA, 19 nt, Artificial Sequence
  Description of Artificial Sequence: Synthetic oligonucleotide
cccucaguaccaccguauc

SEQ ID NO: 1116867 - RNA, 19 nt, Artificial Sequence
  Description of Artificial Sequence: Synthetic oligonucleotide
agcgcacgugguaacucau

SEQ ID NO: 1116868 - RNA, 19 nt, Artificial Sequence
  Description of Artificial Sequence: Synthetic oligonucleotide
aagcggagcucagcaucuu

SEQ ID NO: 1116869 - RNA, 19 nt, Artificial Sequence
  Description of Artificial Sequence: Synthetic oligonucleotide
ccaguaggauguuuagugu

SEQ ID NO: 1116870 - RNA, 19 nt, Artificial Sequence
  Description of Artificial Sequence: Synthetic oligonucleotide
cagaggcggucguggucac

SEQ ID NO: 1116871 - RNA, 19 nt, Artificial Sequence
  Description of Artificial Sequence: Synthetic oligonucleotide
cgugucguacugugugcgc

SEQ ID NO: 1116872 - RNA, 19 nt, Artificial Sequence
  Description of Artificial Sequence: Synthetic oligonucleotide
ucccaucaacuuggagcuc

SEQ ID NO: 1116873 - RNA, 19 nt, Artificial Sequence
  Description of Artificial Sequence: Synthetic oligonucleotide
ccgagugcgacagcuuaug

SEQ ID NO: 1116874 - RNA, 19 nt, Artificial Sequence
  Description of Artificial Sequence: Synthetic oligonucleotide
gccaccccugcucacuguc

SEQ ID NO: 1116875 - RNA, 19 nt, Artificial Sequence
  Description of Artificial Sequence: Synthetic oligonucleotide
cgacagcuuaugucgguuc

SEQ ID NO: 1116876 - RNA, 19 nt, Artificial Sequence
  Description of Artificial Sequence: Synthetic oligonucleotide
cggucguggucacaacgcc

SEQ ID NO: 1116877 - RNA, 19 nt, Artificial Sequence
  Description of Artificial Sequence: Synthetic oligonucleotide
cacaaaucccugggaggaa

SEQ ID NO: 1116878 - RNA, 19 nt, Artificial Sequence
  Description of Artificial Sequence: Synthetic oligonucleotide
gaagcgcugcuggcacaca

SEQ ID NO: 1116879 - RNA, 19 nt, Artificial Sequence
  Description of Artificial Sequence: Synthetic oligonucleotide
ggcgcacagggcgcaaaug

SEQ ID NO: 1116880 - RNA, 19 nt, Artificial Sequence
  Description of Artificial Sequence: Synthetic oligonucleotide
gccauuggacaaaccucac

SEQ ID NO: 1116881 - RNA, 19 nt, Artificial Sequence
  Description of Artificial Sequence: Synthetic oligonucleotide
cccuaccuuacugaaagua

SEQ ID NO: 1116882 - RNA, 19 nt, Artificial Sequence
  Description of Artificial Sequence: Synthetic oligonucleotide
ggagauuguagccguucuu

SEQ ID NO: 1116883 - RNA, 19 nt, Artificial Sequence
  Description of Artificial Sequence: Synthetic oligonucleotide
ccaguaccuuuguugcaga

SEQ ID NO: 1116884 - RNA, 19 nt, Artificial Sequence
  Description of Artificial Sequence: Synthetic oligonucleotide
ggauggcuucgugccuccg

SEQ ID NO: 1116885 - RNA, 19 nt, Artificial Sequence
  Description of Artificial Sequence: Synthetic oligonucleotide
ccggagauuguagccguuc

SEQ ID NO: 1116886 - RNA, 19 nt, Artificial Sequence
  Description of Artificial Sequence: Synthetic oligonucleotide
cagcucugauagggagaag

SEQ ID NO: 1116887 - RNA, 19 nt, Artificial Sequence
  Description of Artificial Sequence: Synthetic oligonucleotide
acgccaccgggcgccacug

SEQ ID NO: 1116888 - RNA, 19 nt, Artificial Sequence
  Description of Artificial Sequence: Synthetic oligonucleotide
cuguaccaagaagagcuuu

SEQ ID NO: 1116889 - RNA, 19 nt, Artificial Sequence
  Description of Artificial Sequence: Synthetic oligonucleotide
accgggcgccacugcggcu

SEQ ID NO: 1116890 - RNA, 19 nt, Artificial Sequence
  Description of Artificial Sequence: Synthetic oligonucleotide
gugagcgcacgugguaacu

SEQ ID NO: 1116891 - RNA, 19 nt, Artificial Sequence
  Description of Artificial Sequence: Synthetic oligonucleotide
ggcccuaguggcuccuucu

SEQ ID NO: 1116892 - RNA, 19 nt, Artificial Sequence
  Description of Artificial Sequence: Synthetic oligonucleotide
gcuucgugccuccggagau

SEQ ID NO: 1116893 - RNA, 19 nt, Artificial Sequence
  Description of Artificial Sequence: Synthetic oligonucleotide
guaccaccguaucccuccu

SEQ ID NO: 1116894 - RNA, 19 nt, Artificial Sequence
  Description of Artificial Sequence: Synthetic oligonucleotide
gcgcacgugguaacucaug

SEQ ID NO: 1116895 - RNA, 19 nt, Artificial Sequence
  Description of Artificial Sequence: Synthetic oligonucleotide
gcacuugucugacgugacu

SEQ ID NO: 1116896 - RNA, 19 nt, Artificial Sequence
  Description of Artificial Sequence: Synthetic oligonucleotide
gugauccggccgggagaag

SEQ ID NO: 1116897 - RNA, 19 nt, Artificial Sequence
  Description of Artificial Sequence: Synthetic oligonucleotide
cccggccagccuuggcucc

SEQ ID NO: 1116898 - RNA, 19 nt, Artificial Sequence
  Description of Artificial Sequence: Synthetic oligonucleotide
acgugacuguugaggugau

SEQ ID NO: 1116899 - RNA, 19 nt, Artificial Sequence
  Description of Artificial Sequence: Synthetic oligonucleotide
ccccuaagauuccaucucu

SEQ ID NO: 1116900 - RNA, 19 nt, Artificial Sequence
  Description of Artificial Sequence: Synthetic oligonucleotide
cagcuggggcacgcucaag

SEQ ID NO: 1116901 - RNA, 19 nt, Artificial Sequence
  Description of Artificial Sequence: Synthetic oligonucleotide
ggacccggccagccuuggc

SEQ ID NO: 1116902 - RNA, 19 nt, Artificial Sequence
  Description of Artificial Sequence: Synthetic oligonucleotide
ccacccuaccuuacugaaa

SEQ ID NO: 1116903 - RNA, 19 nt, Artificial Sequence
  Description of Artificial Sequence: Synthetic oligonucleotide
ccgggcgccacugcggcug

SEQ ID NO: 1116904 - RNA, 19 nt, Artificial Sequence
  Description of Artificial Sequence: Synthetic oligonucleotide
agacgucgcggaaggccuu

SEQ ID NO: 1116905 - RNA, 19 nt, Artificial Sequence
  Description of Artificial Sequence: Synthetic oligonucleotide
gggacccggccagccuugg

SEQ ID NO: 1116906 - RNA, 19 nt, Artificial Sequence
  Description of Artificial Sequence: Synthetic oligonucleotide
cgcucggagucgauccuuc

SEQ ID NO: 1116907 - RNA, 19 nt, Artificial Sequence
  Description of Artificial Sequence: Synthetic oligonucleotide
gcacccgaagggacccggc

SEQ ID NO: 1116908 - RNA, 19 nt, Artificial Sequence
  Description of Artificial Sequence: Synthetic oligonucleotide
cgcucccaucaacuuggag

SEQ ID NO: 1116909 - RNA, 19 nt, Artificial Sequence
  Description of Artificial Sequence: Synthetic oligonucleotide
ccgcugccgccauuggaca

SEQ ID NO: 1116910 - RNA, 19 nt, Artificial Sequence
  Description of Artificial Sequence: Synthetic oligonucleotide
cacaucucgcaggcgugau

SEQ ID NO: 1116911 - RNA, 19 nt, Artificial Sequence
  Description of Artificial Sequence: Synthetic oligonucleotide
ccgaagggacccggccagc

SEQ ID NO: 1116912 - RNA, 19 nt, Artificial Sequence
  Description of Artificial Sequence: Synthetic oligonucleotide
ccccucgcucccaucaacu

SEQ ID NO: 1116913 - RNA, 19 nt, Artificial Sequence
  Description of Artificial Sequence: Synthetic oligonucleotide
ccacugcggcugugccucc

SEQ ID NO: 1116914 - RNA, 19 nt, Artificial Sequence
  Description of Artificial Sequence: Synthetic oligonucleotide
gcuuuucccuggacagaua

SEQ ID NO: 1116915 - RNA, 19 nt, Artificial Sequence
  Description of Artificial Sequence: Synthetic oligonucleotide
cggagauuguagccguucu

SEQ ID NO: 1116916 - RNA, 19 nt, Artificial Sequence
  Description of Artificial Sequence: Synthetic oligonucleotide
cuucgugccuccggagauu

SEQ ID NO: 1116917 - RNA, 19 nt, Artificial Sequence
  Description of Artificial Sequence: Synthetic oligonucleotide
cgugccuccggagauugua

SEQ ID NO: 1116918 - RNA, 19 nt, Artificial Sequence
  Description of Artificial Sequence: Synthetic oligonucleotide
ccgcucagcuggggcacgc

SEQ ID NO: 1116919 - RNA, 19 nt, Artificial Sequence
  Description of Artificial Sequence: Synthetic oligonucleotide
gcgacagcuuaugucgguu

SEQ ID NO: 1116920 - RNA, 19 nt, Artificial Sequence
  Description of Artificial Sequence: Synthetic oligonucleotide
ccgucaugugagcgcacgu

SEQ ID NO: 1116921 - RNA, 19 nt, Artificial Sequence
  Description of Artificial Sequence: Synthetic oligonucleotide
cgagugcgacagcuuaugu

SEQ ID NO: 1116922 - RNA, 19 nt, Artificial Sequence
  Description of Artificial Sequence: Synthetic oligonucleotide
guagggccccuugcucuuu

SEQ ID NO: 1116923 - RNA, 19 nt, Artificial Sequence
  Description of Artificial Sequence: Synthetic oligonucleotide
gcgcaaauguagggccccu

SEQ ID NO: 1116924 - RNA, 19 nt, Artificial Sequence
  Description of Artificial Sequence: Synthetic oligonucleotide
cgcucuguugagugcacuu

SEQ ID NO: 1116925 - RNA, 19 nt, Artificial Sequence
  Description of Artificial Sequence: Synthetic oligonucleotide
cgccgcugccgccauugga

SEQ ID NO: 1116926 - RNA, 19 nt, Artificial Sequence
  Description of Artificial Sequence: Synthetic oligonucleotide
cccucgcucccaucaacuu

SEQ ID NO: 1116927 - RNA, 19 nt, Artificial Sequence
  Description of Artificial Sequence: Synthetic oligonucleotide
cgccaccgggcgccacugc

SEQ ID NO: 1116928 - RNA, 19 nt, Artificial Sequence
  Description of Artificial Sequence: Synthetic oligonucleotide
gugugcgcucggagucgau

SEQ ID NO: 1116929 - RNA, 19 nt, Artificial Sequence
  Description of Artificial Sequence: Synthetic oligonucleotide
gggcgccacugcggcugug

SEQ ID NO: 1116930 - RNA, 19 nt, Artificial Sequence
  Description of Artificial Sequence: Synthetic oligonucleotide
gcgcucggagucgauccuu

SEQ ID NO: 1116931 - RNA, 19 nt, Artificial Sequence
  Description of Artificial Sequence: Synthetic oligonucleotide
ccgccagccccggcuucuc

SEQ ID NO: 1116932 - RNA, 19 nt, Artificial Sequence
  Description of Artificial Sequence: Synthetic oligonucleotide
ccgcucuguugagugcacu

SEQ ID NO: 1116933 - RNA, 19 nt, Artificial Sequence
  Description of Artificial Sequence: Synthetic oligonucleotide
ccggccgggagaagcucuu

SEQ ID NO: 1116934 - RNA, 19 nt, Artificial Sequence
  Description of Artificial Sequence: Synthetic oligonucleotide
cgcaaauguagggccccuu

SEQ ID NO: 1116935 - RNA, 19 nt, Artificial Sequence
  Description of Artificial Sequence: Synthetic oligonucleotide
cgggcgccacugcggcugu

SEQ ID NO: 1116936 - RNA, 19 nt, Artificial Sequence
  Description of Artificial Sequence: Synthetic oligonucleotide
aaguguaaccuugagaucc

SEQ ID NO: 1116937 - RNA, 19 nt, Artificial Sequence
  Description of Artificial Sequence: Synthetic oligonucleotide
ugaaguguaaccuugagau

SEQ ID NO: 1116938 - RNA, 19 nt, Artificial Sequence
  Description of Artificial Sequence: Synthetic oligonucleotide
ugugauggcaucauggugc

SEQ ID NO: 1116939 - RNA, 19 nt, Artificial Sequence
  Description of Artificial Sequence: Synthetic oligonucleotide
uuauugucagaguagagga

SEQ ID NO: 1116940 - RNA, 19 nt, Artificial Sequence
  Description of Artificial Sequence: Synthetic oligonucleotide
guaaccuugagauccaccg

SEQ ID NO: 1116941 - RNA, 19 nt, Artificial Sequence
  Description of Artificial Sequence: Synthetic oligonucleotide
auuauugucagaguagagg

SEQ ID NO: 1116942 - RNA, 19 nt, Artificial Sequence
  Description of Artificial Sequence: Synthetic oligonucleotide
ugugagauuguacuucagg

SEQ ID NO: 1116943 - RNA, 19 nt, Artificial Sequence
  Description of Artificial Sequence: Synthetic oligonucleotide
uuuacauuggggaaaggga

SEQ ID NO: 1116944 - RNA, 19 nt, Artificial Sequence
  Description of Artificial Sequence: Synthetic oligonucleotide
agauguuccacguacaugu

SEQ ID NO: 1116945 - RNA, 19 nt, Artificial Sequence
  Description of Artificial Sequence: Synthetic oligonucleotide
aucggugauauuuacauug

SEQ ID NO: 1116946 - RNA, 19 nt, Artificial Sequence
  Description of Artificial Sequence: Synthetic oligonucleotide
ugaauacuauguaacaugu

SEQ ID NO: 1116947 - RNA, 19 nt, Artificial Sequence
  Description of Artificial Sequence: Synthetic oligonucleotide
agaaguacugccuuauguc

SEQ ID NO: 1116948 - RNA, 19 nt, Artificial Sequence
  Description of Artificial Sequence: Synthetic oligonucleotide
aguaauuccgggcaauggg

SEQ ID NO: 1116949 - RNA, 19 nt, Artificial Sequence
  Description of Artificial Sequence: Synthetic oligonucleotide
guaguugucagaaaugggg

SEQ ID NO: 1116950 - RNA, 19 nt, Artificial Sequence
  Description of Artificial Sequence: Synthetic oligonucleotide
ucuuagauguuccacguac

SEQ ID NO: 1116951 - RNA, 19 nt, Artificial Sequence
  Description of Artificial Sequence: Synthetic oligonucleotide
aaccuugagauccaccguc

SEQ ID NO: 1116952 - RNA, 19 nt, Artificial Sequence
  Description of Artificial Sequence: Synthetic oligonucleotide
cauucuuagauguuccacg

SEQ ID NO: 1116953 - RNA, 19 nt, Artificial Sequence
  Description of Artificial Sequence: Synthetic oligonucleotide
ucagauacagcccagcgaa

SEQ ID NO: 1116954 - RNA, 19 nt, Artificial Sequence
  Description of Artificial Sequence: Synthetic oligonucleotide
agaaauggggcccugcuuc

SEQ ID NO: 1116955 - RNA, 19 nt, Artificial Sequence
  Description of Artificial Sequence: Synthetic oligonucleotide
uauguaacauguuaguguc

SEQ ID NO: 1116956 - RNA, 19 nt, Artificial Sequence
  Description of Artificial Sequence: Synthetic oligonucleotide
ugaacaacacgacaggccu

SEQ ID NO: 1116957 - RNA, 19 nt, Artificial Sequence
  Description of Artificial Sequence: Synthetic oligonucleotide
aaugucacagcaucggggu

SEQ ID NO: 1116958 - RNA, 19 nt, Artificial Sequence
  Description of Artificial Sequence: Synthetic oligonucleotide
auuuacauuggggaaaggg

SEQ ID NO: 1116959 - RNA, 19 nt, Artificial Sequence
  Description of Artificial Sequence: Synthetic oligonucleotide
augggauugcucuugaaag

SEQ ID NO: 1116960 - RNA, 19 nt, Artificial Sequence
  Description of Artificial Sequence: Synthetic oligonucleotide
ugaagugccaacccgcucc

SEQ ID NO: 1116961 - RNA, 19 nt, Artificial Sequence
  Description of Artificial Sequence: Synthetic oligonucleotide
uguauugaagugccaaccc

SEQ ID NO: 1116962 - RNA, 19 nt, Artificial Sequence
  Description of Artificial Sequence: Synthetic oligonucleotide
uauugaagugccaacccgc

SEQ ID NO: 1116963 - RNA, 19 nt, Artificial Sequence
  Description of Artificial Sequence: Synthetic oligonucleotide
gaaguacugccuuaugucc

SEQ ID NO: 1116964 - RNA, 19 nt, Artificial Sequence
  Description of Artificial Sequence: Synthetic oligonucleotide
uugagauccaccgucacag

SEQ ID NO: 1116965 - RNA, 19 nt, Artificial Sequence
  Description of Artificial Sequence: Synthetic oligonucleotide
cagugauggauuuaggccc

SEQ ID NO: 1116966 - RNA, 19 nt, Artificial Sequence
  Description of Artificial Sequence: Synthetic oligonucleotide
gugauauuuacauugggga

SEQ ID NO: 1116967 - RNA, 19 nt, Artificial Sequence
  Description of Artificial Sequence: Synthetic oligonucleotide
acgagugugaaucgaauag

SEQ ID NO: 1116968 - RNA, 19 nt, Artificial Sequence
  Description of Artificial Sequence: Synthetic oligonucleotide
ucgaauagauguaauccug

SEQ ID NO: 1116969 - RNA, 19 nt, Artificial Sequence
  Description of Artificial Sequence: Synthetic oligonucleotide
aaugguggugaucuuccag

SEQ ID NO: 1116970 - RNA, 19 nt, Artificial Sequence
  Description of Artificial Sequence: Synthetic oligonucleotide
ucuggggucuccaaauggg

SEQ ID NO: 1116971 - RNA, 19 nt, Artificial Sequence
  Description of Artificial Sequence: Synthetic oligonucleotide
ucaucggugauauuuacau

SEQ ID NO: 1116972 - RNA, 19 nt, Artificial Sequence
  Description of Artificial Sequence: Synthetic oligonucleotide
acugccuuauguccguugc

SEQ ID NO: 1116973 - RNA, 19 nt, Artificial Sequence
  Description of Artificial Sequence: Synthetic oligonucleotide
ugagcguuccuccacagcu

SEQ ID NO: 1116974 - RNA, 19 nt, Artificial Sequence
  Description of Artificial Sequence: Synthetic oligonucleotide
uguaccaugggguaguaau

SEQ ID NO: 1116975 - RNA, 19 nt, Artificial Sequence
  Description of Artificial Sequence: Synthetic oligonucleotide
guauugaagugccaacccg

SEQ ID NO: 1116976 - RNA, 19 nt, Artificial Sequence
  Description of Artificial Sequence: Synthetic oligonucleotide
aucgaauagauguaauccu

SEQ ID NO: 1116977 - RNA, 19 nt, Artificial Sequence
  Description of Artificial Sequence: Synthetic oligonucleotide
ugauauuuacauuggggaa

SEQ ID NO: 1116978 - RNA, 19 nt, Artificial Sequence
  Description of Artificial Sequence: Synthetic oligonucleotide
ucggugauauuuacauugg

SEQ ID NO: 1116979 - RNA, 19 nt, Artificial Sequence
  Description of Artificial Sequence: Synthetic oligonucleotide
uggagcauuaccuccaccu

SEQ ID NO: 1116980 - RNA, 19 nt, Artificial Sequence
  Description of Artificial Sequence: Synthetic oligonucleotide
gaaucgaauagauguaauc

SEQ ID NO: 1116981 - RNA, 19 nt, Artificial Sequence
  Description of Artificial Sequence: Synthetic oligonucleotide
gugugaaucgaauagaugu

SEQ ID NO: 1116982 - RNA, 19 nt, Artificial Sequence
  Description of Artificial Sequence: Synthetic oligonucleotide
gaacucuugggucaugcgc

SEQ ID NO: 1116983 - RNA, 19 nt, Artificial Sequence
  Description of Artificial Sequence: Synthetic oligonucleotide
uuuaggccccagcagaagc

SEQ ID NO: 1116984 - RNA, 19 nt, Artificial Sequence
  Description of Artificial Sequence: Synthetic oligonucleotide
uguaacauguuaguguccu

SEQ ID NO: 1116985 - RNA, 19 nt, Artificial Sequence
  Description of Artificial Sequence: Synthetic oligonucleotide
ucagcgguaucauugggug

SEQ ID NO: 1116986 - RNA, 19 nt, Artificial Sequence
  Description of Artificial Sequence: Synthetic oligonucleotide
guuguauacagaggcaagg

SEQ ID NO: 1116987 - RNA, 19 nt, Artificial Sequence
  Description of Artificial Sequence: Synthetic oligonucleotide
cugaacaacacgacaggcc

SEQ ID NO: 1116988 - RNA, 19 nt, Artificial Sequence
  Description of Artificial Sequence: Synthetic oligonucleotide
uuauauuccuguagaagua

SEQ ID NO: 1116989 - RNA, 19 nt, Artificial Sequence
  Description of Artificial Sequence: Synthetic oligonucleotide
ggaggugucauucagugug

SEQ ID NO: 1116990 - RNA, 19 nt, Artificial Sequence
  Description of Artificial Sequence: Synthetic oligonucleotide
aggauaagcaggucauagg

SEQ ID NO: 1116991 - RNA, 19 nt, Artificial Sequence
  Description of Artificial Sequence: Synthetic oligonucleotide
acagguaguugucagaaau

SEQ ID NO: 1116992 - RNA, 19 nt, Artificial Sequence
  Description of Artificial Sequence: Synthetic oligonucleotide
agaccagcggguuguauac

SEQ ID NO: 1116993 - RNA, 19 nt, Artificial Sequence
  Description of Artificial Sequence: Synthetic oligonucleotide
ggauaagcaggucauaggc

SEQ ID NO: 1116994 - RNA, 19 nt, Artificial Sequence
  Description of Artificial Sequence: Synthetic oligonucleotide
auacuauguaacauguuag

SEQ ID NO: 1116995 - RNA, 19 nt, Artificial Sequence
  Description of Artificial Sequence: Synthetic oligonucleotide
gacuuuguagugccgguag

SEQ ID NO: 1116996 - RNA, 19 nt, Artificial Sequence
  Description of Artificial Sequence: Synthetic oligonucleotide
agguauacugaggaucugc

SEQ ID NO: 1116997 - RNA, 19 nt, Artificial Sequence
  Description of Artificial Sequence: Synthetic oligonucleotide
uucacgucuccauuggccc

SEQ ID NO: 1116998 - RNA, 19 nt, Artificial Sequence
  Description of Artificial Sequence: Synthetic oligonucleotide
uauacagaggcaagguauc

SEQ ID NO: 1116999 - RNA, 19 nt, Artificial Sequence
  Description of Artificial Sequence: Synthetic oligonucleotide
aacacgacaggccuguauu

SEQ ID NO: 1117000 - RNA, 19 nt, Artificial Sequence
  Description of Artificial Sequence: Synthetic oligonucleotide
caugggguaguaauuccgg

SEQ ID NO: 1117001 - RNA, 19 nt, Artificial Sequence
  Description of Artificial Sequence: Synthetic oligonucleotide
uuggcuugagacaccaugu

SEQ ID NO: 1117002 - RNA, 19 nt, Artificial Sequence
  Description of Artificial Sequence: Synthetic oligonucleotide
cuucacgucuccauuggcc

SEQ ID NO: 1117003 - RNA, 19 nt, Artificial Sequence
  Description of Artificial Sequence: Synthetic oligonucleotide
auaggcagaaggguccucc

SEQ ID NO: 1117004 - RNA, 19 nt, Artificial Sequence
  Description of Artificial Sequence: Synthetic oligonucleotide
cuuggcuugagacaccaug

SEQ ID NO: 1117005 - RNA, 19 nt, Artificial Sequence
  Description of Artificial Sequence: Synthetic oligonucleotide
acuuuguagugccgguagc

SEQ ID NO: 1117006 - RNA, 19 nt, Artificial Sequence
  Description of Artificial Sequence: Synthetic oligonucleotide
ucuauccgauggcagagca

SEQ ID NO: 1117007 - RNA, 19 nt, Artificial Sequence
  Description of Artificial Sequence: Synthetic oligonucleotide
gggacgaccaguuuccugg

SEQ ID NO: 1117008 - RNA, 19 nt, Artificial Sequence
  Description of Artificial Sequence: Synthetic oligonucleotide
ugugaaucgaauagaugua

SEQ ID NO: 1117009 - RNA, 19 nt, Artificial Sequence
  Description of Artificial Sequence: Synthetic oligonucleotide
gucaaacagcaaaauauag

SEQ ID NO: 1117010 - RNA, 19 nt, Artificial Sequence
  Description of Artificial Sequence: Synthetic oligonucleotide
acguacauguuguucaccu

SEQ ID NO: 1117011 - RNA, 19 nt, Artificial Sequence
  Description of Artificial Sequence: Synthetic oligonucleotide
uauauuccuguagaaguac

SEQ ID NO: 1117012 - RNA, 19 nt, Artificial Sequence
  Description of Artificial Sequence: Synthetic oligonucleotide
uauguccguugccaguggg

SEQ ID NO: 1117013 - RNA, 19 nt, Artificial Sequence
  Description of Artificial Sequence: Synthetic oligonucleotide
agauuguacuucagguucc

SEQ ID NO: 1117014 - RNA, 19 nt, Artificial Sequence
  Description of Artificial Sequence: Synthetic oligonucleotide
acucaucggugauauuuac

SEQ ID NO: 1117015 - RNA, 19 nt, Artificial Sequence
  Description of Artificial Sequence: Synthetic oligonucleotide
agugugagauuguacuuca

SEQ ID NO: 1117016 - RNA, 19 nt, Artificial Sequence
  Description of Artificial Sequence: Synthetic oligonucleotide
cuaaacuugcgggugcugg

SEQ ID NO: 1117017 - RNA, 19 nt, Artificial Sequence
  Description of Artificial Sequence: Synthetic oligonucleotide
cuugaaagccuuguagggc

SEQ ID NO: 1117018 - RNA, 19 nt, Artificial Sequence
  Description of Artificial Sequence: Synthetic oligonucleotide
agcccagcgaagcuguugg

SEQ ID NO: 1117019 - RNA, 19 nt, Artificial Sequence
  Description of Artificial Sequence: Synthetic oligonucleotide
acggaggugucauucagug

SEQ ID NO: 1117020 - RNA, 19 nt, Artificial Sequence
  Description of Artificial Sequence: Synthetic oligonucleotide
uugcguacgcccagcaucc

SEQ ID NO: 1117021 - RNA, 19 nt, Artificial Sequence
  Description of Artificial Sequence: Synthetic oligonucleotide
gauaaugguggugaucuuc

SEQ ID NO: 1117022 - RNA, 19 nt, Artificial Sequence
  Description of Artificial Sequence: Synthetic oligonucleotide
cucacgguucauuuccagg

SEQ ID NO: 1117023 - RNA, 19 nt, Artificial Sequence
  Description of Artificial Sequence: Synthetic oligonucleotide
gauggauuuaggccccagc

SEQ ID NO: 1117024 - RNA, 19 nt, Artificial Sequence
  Description of Artificial Sequence: Synthetic oligonucleotide
ugaaucgaauagauguaau

SEQ ID NO: 1117025 - RNA, 19 nt, Artificial Sequence
  Description of Artificial Sequence: Synthetic oligonucleotide
uuaggccccagcagaagcc

SEQ ID NO: 1117026 - RNA, 19 nt, Artificial Sequence
  Description of Artificial Sequence: Synthetic oligonucleotide
cuugcguacgcccagcauc

SEQ ID NO: 1117027 - RNA, 19 nt, Artificial Sequence
  Description of Artificial Sequence: Synthetic oligonucleotide
uccguagaguucuggaucu

SEQ ID NO: 1117028 - RNA, 19 nt, Artificial Sequence
  Description of Artificial Sequence: Synthetic oligonucleotide
uugucagaguagaggaucu

SEQ ID NO: 1117029 - RNA, 19 nt, Artificial Sequence
  Description of Artificial Sequence: Synthetic oligonucleotide
cauuauugucagaguagag

SEQ ID NO: 1117030 - RNA, 19 nt, Artificial Sequence
  Description of Artificial Sequence: Synthetic oligonucleotide
agugauggauuuaggcccc

SEQ ID NO: 1117031 - RNA, 19 nt, Artificial Sequence
  Description of Artificial Sequence: Synthetic oligonucleotide
gagauccaccgucacaggc

SEQ ID NO: 1117032 - RNA, 19 nt, Artificial Sequence
  Description of Artificial Sequence: Synthetic oligonucleotide
aggcccuuugucucugugc

SEQ ID NO: 1117033 - RNA, 19 nt, Artificial Sequence
  Description of Artificial Sequence: Synthetic oligonucleotide
ucaaugaaggcugacugua

SEQ ID NO: 1117034 - RNA, 19 nt, Artificial Sequence
  Description of Artificial Sequence: Synthetic oligonucleotide
ucccaaguaggcucagcgg

SEQ ID NO: 1117035 - RNA, 19 nt, Artificial Sequence
  Description of Artificial Sequence: Synthetic oligonucleotide
aacaacacgacaggccugu

SEQ ID NO: 1117036 - RNA, 19 nt, Artificial Sequence
  Description of Artificial Sequence: Synthetic oligonucleotide
uaaacuugcgggugcuggc

SEQ ID NO: 1117037 - RNA, 19 nt, Artificial Sequence
  Description of Artificial Sequence: Synthetic oligonucleotide
ucuccauuggcccgguacu

SEQ ID NO: 1117038 - RNA, 19 nt, Artificial Sequence
  Description of Artificial Sequence: Synthetic oligonucleotide
gacagucagggugauaaug

SEQ ID NO: 1117039 - RNA, 19 nt, Artificial Sequence
  Description of Artificial Sequence: Synthetic oligonucleotide
cuugaaguguaaccuugag

SEQ ID NO: 1117040 - RNA, 19 nt, Artificial Sequence
  Description of Artificial Sequence: Synthetic oligonucleotide
uuuggguagccucucugaa

SEQ ID NO: 1117041 - RNA, 19 nt, Artificial Sequence
  Description of Artificial Sequence: Synthetic oligonucleotide
guauacugaggaucugcag

SEQ ID NO: 1117042 - RNA, 19 nt, Artificial Sequence
  Description of Artificial Sequence: Synthetic oligonucleotide
uuauguccguugccagugg

SEQ ID NO: 1117043 - RNA, 19 nt, Artificial Sequence
  Description of Artificial Sequence: Synthetic oligonucleotide
acgcccagcauccccauuc

SEQ ID NO: 1117044 - RNA, 19 nt, Artificial Sequence
  Description of Artificial Sequence: Synthetic oligonucleotide
ucagcucucugaacaacac

SEQ ID NO: 1117045 - RNA, 19 nt, Artificial Sequence
  Description of Artificial Sequence: Synthetic oligonucleotide
caggauaagcaggucauag

SEQ ID NO: 1117046 - RNA, 19 nt, Artificial Sequence
  Description of Artificial Sequence: Synthetic oligonucleotide
auggggacgaccaguuucc

SEQ ID NO: 1117047 - RNA, 19 nt, Artificial Sequence
  Description of Artificial Sequence: Synthetic oligonucleotide
uuguauacagaggcaaggu

SEQ ID NO: 1117048 - RNA, 19 nt, Artificial Sequence
  Description of Artificial Sequence: Synthetic oligonucleotide
ugggacuaaacuugcgggu

SEQ ID NO: 1117049 - RNA, 19 nt, Artificial Sequence
  Description of Artificial Sequence: Synthetic oligonucleotide
cagcggguuguauacagag

SEQ ID NO: 1117050 - RNA, 19 nt, Artificial Sequence
  Description of Artificial Sequence: Synthetic oligonucleotide
cauggggacgaccaguuuc

SEQ ID NO: 1117051 - RNA, 19 nt, Artificial Sequence
  Description of Artificial Sequence: Synthetic oligonucleotide
ugguugcuacuguaguucc

SEQ ID NO: 1117052 - RNA, 19 nt, Artificial Sequence
  Description of Artificial Sequence: Synthetic oligonucleotide
accagcggguuguauacag

SEQ ID NO: 1117053 - RNA, 19 nt, Artificial Sequence
  Description of Artificial Sequence: Synthetic oligonucleotide
cuaccacggacccuagucc

SEQ ID NO: 1117054 - RNA, 19 nt, Artificial Sequence
  Description of Artificial Sequence: Synthetic oligonucleotide
uguagaaguacugccuuau

SEQ ID NO: 1117055 - RNA, 19 nt, Artificial Sequence
  Description of Artificial Sequence: Synthetic oligonucleotide
uauugucagaguagaggau

SEQ ID NO: 1117056 - RNA, 19 nt, Artificial Sequence
  Description of Artificial Sequence: Synthetic oligonucleotide
auucagugugagauuguac

SEQ ID NO: 1117057 - RNA, 19 nt, Artificial Sequence
  Description of Artificial Sequence: Synthetic oligonucleotide
uaauuccgggcaaugggau

SEQ ID NO: 1117058 - RNA, 19 nt, Artificial Sequence
  Description of Artificial Sequence: Synthetic oligonucleotide
uguccguugccagugggcc

SEQ ID NO: 1117059 - RNA, 19 nt, Artificial Sequence
  Description of Artificial Sequence: Synthetic oligonucleotide
acgaccaguuuccuggugu

SEQ ID NO: 1117060 - RNA, 19 nt, Artificial Sequence
  Description of Artificial Sequence: Synthetic oligonucleotide
uagauguuccacguacaug

SEQ ID NO: 1117061 - RNA, 19 nt, Artificial Sequence
  Description of Artificial Sequence: Synthetic oligonucleotide
uaaccuugagauccaccgu

SEQ ID NO: 1117062 - RNA, 19 nt, Artificial Sequence
  Description of Artificial Sequence: Synthetic oligonucleotide
cuggggucuccaaaugggg

SEQ ID NO: 1117063 - RNA, 19 nt, Artificial Sequence
  Description of Artificial Sequence: Synthetic oligonucleotide
gauaagcaggucauaggca

SEQ ID NO: 1117064 - RNA, 19 nt, Artificial Sequence
  Description of Artificial Sequence: Synthetic oligonucleotide
gaaguguaaccuugagauc

SEQ ID NO: 1117065 - RNA, 19 nt, Artificial Sequence
  Description of Artificial Sequence: Synthetic oligonucleotide
auggagcauuaccuccacc

SEQ ID NO: 1117066 - RNA, 19 nt, Artificial Sequence
  Description of Artificial Sequence: Synthetic oligonucleotide
cagucauucaucacaggca

SEQ ID NO: 1117067 - RNA, 19 nt, Artificial Sequence
  Description of Artificial Sequence: Synthetic oligonucleotide
aaggguccuccguagaguu

SEQ ID NO: 1117068 - RNA, 19 nt, Artificial Sequence
  Description of Artificial Sequence: Synthetic oligonucleotide
ugccuuauguccguugcca

SEQ ID NO: 1117069 - RNA, 19 nt, Artificial Sequence
  Description of Artificial Sequence: Synthetic oligonucleotide
cuccguagaguucuggauc

SEQ ID NO: 1117070 - RNA, 19 nt, Artificial Sequence
  Description of Artificial Sequence: Synthetic oligonucleotide
auuccgggcaaugggauug

SEQ ID NO: 1117071 - RNA, 19 nt, Artificial Sequence
  Description of Artificial Sequence: Synthetic oligonucleotide
agcgguaucauugggugca

SEQ ID NO: 1117072 - RNA, 19 nt, Artificial Sequence
  Description of Artificial Sequence: Synthetic oligonucleotide
auguaacauguuagugucc

SEQ ID NO: 1117073 - RNA, 19 nt, Artificial Sequence
  Description of Artificial Sequence: Synthetic oligonucleotide
aguacugccuuauguccgu

SEQ ID NO: 1117074 - RNA, 19 nt, Artificial Sequence
  Description of Artificial Sequence: Synthetic oligonucleotide
acugugugguugcucuguc

SEQ ID NO: 1117075 - RNA, 19 nt, Artificial Sequence
  Description of Artificial Sequence: Synthetic oligonucleotide
gaauagauguaauccuggu

SEQ ID NO: 1117076 - RNA, 19 nt, Artificial Sequence
  Description of Artificial Sequence: Synthetic oligonucleotide
ugggucaugcgcacugugu

SEQ ID NO: 1117077 - RNA, 19 nt, Artificial Sequence
  Description of Artificial Sequence: Synthetic oligonucleotide
ugucucuccugaauacuau

SEQ ID NO: 1117078 - RNA, 19 nt, Artificial Sequence
  Description of Artificial Sequence: Synthetic oligonucleotide
aaguaggcucagcgguauc

SEQ ID NO: 1117079 - RNA, 19 nt, Artificial Sequence
  Description of Artificial Sequence: Synthetic oligonucleotide
gagcaccgggugcacaacg

SEQ ID NO: 1117080 - RNA, 19 nt, Artificial Sequence
  Description of Artificial Sequence: Synthetic oligonucleotide
cacgguucauuuccagggg

SEQ ID NO: 1117081 - RNA, 19 nt, Artificial Sequence
  Description of Artificial Sequence: Synthetic oligonucleotide
aacagguaguugucagaaa

SEQ ID NO: 1117082 - RNA, 19 nt, Artificial Sequence
  Description of Artificial Sequence: Synthetic oligonucleotide
ggauuuaggccccagcaga

SEQ ID NO: 1117083 - RNA, 19 nt, Artificial Sequence
  Description of Artificial Sequence: Synthetic oligonucleotide
gucuccauuggcccgguac

SEQ ID NO: 1117084 - RNA, 19 nt, Artificial Sequence
  Description of Artificial Sequence: Synthetic oligonucleotide
agucagcucucugaacaac

SEQ ID NO: 1117085 - RNA, 19 nt, Artificial Sequence
  Description of Artificial Sequence: Synthetic oligonucleotide
agccuuguagggccuccgc

SEQ ID NO: 1117086 - RNA, 19 nt, Artificial Sequence
  Description of Artificial Sequence: Synthetic oligonucleotide
agugugaaucgaauagaug

SEQ ID NO: 1117087 - RNA, 19 nt, Artificial Sequence
  Description of Artificial Sequence: Synthetic oligonucleotide
uaccacggacccuaguccu

SEQ ID NO: 1117088 - RNA, 19 nt, Artificial Sequence
  Description of Artificial Sequence: Synthetic oligonucleotide
aauuccgggcaaugggauu

SEQ ID NO: 1117089 - RNA, 19 nt, Artificial Sequence
  Description of Artificial Sequence: Synthetic oligonucleotide
aaauggggcccugcuucac

SEQ ID NO: 1117090 - RNA, 19 nt, Artificial Sequence
  Description of Artificial Sequence: Synthetic oligonucleotide
ucgcuguucaggucacugc

SEQ ID NO: 1117091 - RNA, 19 nt, Artificial Sequence
  Description of Artificial Sequence: Synthetic oligonucleotide
caaugaaggcugacuguac

SEQ ID NO: 1117092 - RNA, 19 nt, Artificial Sequence
  Description of Artificial Sequence: Synthetic oligonucleotide
acaacggaggugucauuca

SEQ ID NO: 1117093 - RNA, 19 nt, Artificial Sequence
  Description of Artificial Sequence: Synthetic oligonucleotide
acacgacaggccuguauug

SEQ ID NO: 1117094 - RNA, 19 nt, Artificial Sequence
  Description of Artificial Sequence: Synthetic oligonucleotide
guaauuccgggcaauggga

SEQ ID NO: 1117095 - RNA, 19 nt, Artificial Sequence
  Description of Artificial Sequence: Synthetic oligonucleotide
ugacuguaccaugggguag

SEQ ID NO: 1117096 - RNA, 19 nt, Artificial Sequence
  Description of Artificial Sequence: Synthetic oligonucleotide
guagaaguacugccuuaug

SEQ ID NO: 1117097 - RNA, 19 nt, Artificial Sequence
  Description of Artificial Sequence: Synthetic oligonucleotide
aacuugcgggugcuggcca

SEQ ID NO: 1117098 - RNA, 19 nt, Artificial Sequence
  Description of Artificial Sequence: Synthetic oligonucleotide
ugcugacacuggauggccc

SEQ ID NO: 1117099 - RNA, 19 nt, Artificial Sequence
  Description of Artificial Sequence: Synthetic oligonucleotide
guaguaauuccgggcaaug

SEQ ID NO: 1117100 - RNA, 19 nt, Artificial Sequence
  Description of Artificial Sequence: Synthetic oligonucleotide
aguaggcucagcgguauca

SEQ ID NO: 1117101 - RNA, 19 nt, Artificial Sequence
  Description of Artificial Sequence: Synthetic oligonucleotide
uugggucaugcgcacugug

SEQ ID NO: 1117102 - RNA, 19 nt, Artificial Sequence
  Description of Artificial Sequence: Synthetic oligonucleotide
caacggaggugucauucag

SEQ ID NO: 1117103 - RNA, 19 nt, Artificial Sequence
  Description of Artificial Sequence: Synthetic oligonucleotide
guagaguucuggaucugug

SEQ ID NO: 1117104 - RNA, 19 nt, Artificial Sequence
  Description of Artificial Sequence: Synthetic oligonucleotide
ugcacaacggaggugucau

SEQ ID NO: 1117105 - RNA, 19 nt, Artificial Sequence
  Description of Artificial Sequence: Synthetic oligonucleotide
gacgagugugaaucgaaua

SEQ ID NO: 1117106 - RNA, 19 nt, Artificial Sequence
  Description of Artificial Sequence: Synthetic oligonucleotide
cuauccgauggcagagcag

SEQ ID NO: 1117107 - RNA, 19 nt, Artificial Sequence
  Description of Artificial Sequence: Synthetic oligonucleotide
cacaacggaggugucauuc

SEQ ID NO: 1117108 - RNA, 19 nt, Artificial Sequence
  Description of Artificial Sequence: Synthetic oligonucleotide
gggauugcucuugaaagcc

SEQ ID NO: 1117109 - RNA, 19 nt, Artificial Sequence
  Description of Artificial Sequence: Synthetic oligonucleotide
cuuuggguagccucucuga

SEQ ID NO: 1117110 - RNA, 19 nt, Artificial Sequence
  Description of Artificial Sequence: Synthetic oligonucleotide
ggcuugagacaccaugugc

SEQ ID NO: 1117111 - RNA, 19 nt, Artificial Sequence
  Description of Artificial Sequence: Synthetic oligonucleotide
auguccguugccagugggc

SEQ ID NO: 1117112 - RNA, 19 nt, Artificial Sequence
  Description of Artificial Sequence: Synthetic oligonucleotide
aacucaucggugauauuua

SEQ ID NO: 1117113 - RNA, 19 nt, Artificial Sequence
  Description of Artificial Sequence: Synthetic oligonucleotide
uacugccuuauguccguug

SEQ ID NO: 1117114 - RNA, 19 nt, Artificial Sequence
  Description of Artificial Sequence: Synthetic oligonucleotide
uucuuagauguuccacgua

SEQ ID NO: 1117115 - RNA, 19 nt, Artificial Sequence
  Description of Artificial Sequence: Synthetic oligonucleotide
uccccaguggggcucagau

SEQ ID NO: 1117116 - RNA, 19 nt, Artificial Sequence
  Description of Artificial Sequence: Synthetic oligonucleotide
gaaauggggcccugcuuca

SEQ ID NO: 1117117 - RNA, 19 nt, Artificial Sequence
  Description of Artificial Sequence: Synthetic oligonucleotide
ggucaugcgcacugugugg

SEQ ID NO: 1117118 - RNA, 19 nt, Artificial Sequence
  Description of Artificial Sequence: Synthetic oligonucleotide
agggcaauggaggccauca

SEQ ID NO: 1117119 - RNA, 19 nt, Artificial Sequence
  Description of Artificial Sequence: Synthetic oligonucleotide
ccaugggguaguaauuccg

SEQ ID NO: 1117120 - RNA, 19 nt, Artificial Sequence
  Description of Artificial Sequence: Synthetic oligonucleotide
cuccgcugcaucugguagc

SEQ ID NO: 1117121 - RNA, 19 nt, Artificial Sequence
  Description of Artificial Sequence: Synthetic oligonucleotide
uagccauuauugucagagu

SEQ ID NO: 1117122 - RNA, 19 nt, Artificial Sequence
  Description of Artificial Sequence: Synthetic oligonucleotide
cagccagguauacugagga

SEQ ID NO: 1117123 - RNA, 19 nt, Artificial Sequence
  Description of Artificial Sequence: Synthetic oligonucleotide
gcugagagagcacuggguc

SEQ ID NO: 1117124 - RNA, 19 nt, Artificial Sequence
  Description of Artificial Sequence: Synthetic oligonucleotide
auauuccuguagaaguacu

SEQ ID NO: 1117125 - RNA, 19 nt, Artificial Sequence
  Description of Artificial Sequence: Synthetic oligonucleotide
uugcuacuguaguuccagc

SEQ ID NO: 1117126 - RNA, 19 nt, Artificial Sequence
  Description of Artificial Sequence: Synthetic oligonucleotide
cucagauacagcccagcga

SEQ ID NO: 1117127 - RNA, 19 nt, Artificial Sequence
  Description of Artificial Sequence: Synthetic oligonucleotide
aagccuuguagggccuccg

SEQ ID NO: 1117128 - RNA, 19 nt, Artificial Sequence
  Description of Artificial Sequence: Synthetic oligonucleotide
accgggugcacaacggagg

SEQ ID NO: 1117129 - RNA, 19 nt, Artificial Sequence
  Description of Artificial Sequence: Synthetic oligonucleotide
accggugugcaugacuuug

SEQ ID NO: 1117130 - RNA, 19 nt, Artificial Sequence
  Description of Artificial Sequence: Synthetic oligonucleotide
cacaugggccagacgagug

SEQ ID NO: 1117131 - RNA, 19 nt, Artificial Sequence
  Description of Artificial Sequence: Synthetic oligonucleotide
auugaagugccaacccgcu

SEQ ID NO: 1117132 - RNA, 19 nt, Artificial Sequence
  Description of Artificial Sequence: Synthetic oligonucleotide
aagguaucccacaggcccu

SEQ ID NO: 1117133 - RNA, 19 nt, Artificial Sequence
  Description of Artificial Sequence: Synthetic oligonucleotide
caccgggugcacaacggag

SEQ ID NO: 1117134 - RNA, 19 nt, Artificial Sequence
  Description of Artificial Sequence: Synthetic oligonucleotide
aacggaggugucauucagu

SEQ ID NO: 1117135 - RNA, 19 nt, Artificial Sequence
  Description of Artificial Sequence: Synthetic oligonucleotide
gguuguauacagaggcaag

SEQ ID NO: 1117136 - RNA, 19 nt, Artificial Sequence
  Description of Artificial Sequence: Synthetic oligonucleotide
auacagcccagcgaagcug

SEQ ID NO: 1117137 - RNA, 19 nt, Artificial Sequence
  Description of Artificial Sequence: Synthetic oligonucleotide
ggcucagcgguaucauugg

SEQ ID NO: 1117138 - RNA, 19 nt, Artificial Sequence
  Description of Artificial Sequence: Synthetic oligonucleotide
gugaaucgaauagauguaa

SEQ ID NO: 1117139 - RNA, 19 nt, Artificial Sequence
  Description of Artificial Sequence: Synthetic oligonucleotide
agauccaccgucacaggcu

SEQ ID NO: 1117140 - RNA, 19 nt, Artificial Sequence
  Description of Artificial Sequence: Synthetic oligonucleotide
aguuuccuggugucugccu

SEQ ID NO: 1117141 - RNA, 19 nt, Artificial Sequence
  Description of Artificial Sequence: Synthetic oligonucleotide
gcuaccacggacccuaguc

SEQ ID NO: 1117142 - RNA, 19 nt, Artificial Sequence
  Description of Artificial Sequence: Synthetic oligonucleotide
ggacuaaacuugcgggugc

SEQ ID NO: 1117143 - RNA, 19 nt, Artificial Sequence
  Description of Artificial Sequence: Synthetic oligonucleotide
gauacagcccagcgaagcu

SEQ ID NO: 1117144 - RNA, 19 nt, Artificial Sequence
  Description of Artificial Sequence: Synthetic oligonucleotide
gggucaugcgcacugugug

SEQ ID NO: 1117145 - RNA, 19 nt, Artificial Sequence
  Description of Artificial Sequence: Synthetic oligonucleotide
agcggguuguauacagagg

SEQ ID NO: 1117146 - RNA, 19 nt, Artificial Sequence
  Description of Artificial Sequence: Synthetic oligonucleotide
gauuuaggccccagcagaa

SEQ ID NO: 1117147 - RNA, 19 nt, Artificial Sequence
  Description of Artificial Sequence: Synthetic oligonucleotide
ugauggauuuaggccccag

SEQ ID NO: 1117148 - RNA, 19 nt, Artificial Sequence
  Description of Artificial Sequence: Synthetic oligonucleotide
ggagcauuaccuccaccug

SEQ ID NO: 1117149 - RNA, 19 nt, Artificial Sequence
  Description of Artificial Sequence: Synthetic oligonucleotide
gagugagcguuccuccaca

SEQ ID NO: 1117150 - RNA, 19 nt, Artificial Sequence
  Description of Artificial Sequence: Synthetic oligonucleotide
ucuugcguacgcccagcau

SEQ ID NO: 1117151 - RNA, 19 nt, Artificial Sequence
  Description of Artificial Sequence: Synthetic oligonucleotide
ggaccucagauacagccca

SEQ ID NO: 1117152 - RNA, 19 nt, Artificial Sequence
  Description of Artificial Sequence: Synthetic oligonucleotide
cugccuuauguccguugcc

SEQ ID NO: 1117153 - RNA, 19 nt, Artificial Sequence
  Description of Artificial Sequence: Synthetic oligonucleotide
cucgcuguucaggucacug

SEQ ID NO: 1117154 - RNA, 19 nt, Artificial Sequence
  Description of Artificial Sequence: Synthetic oligonucleotide
uugccagugggcccaccac

SEQ ID NO: 1117155 - RNA, 19 nt, Artificial Sequence
  Description of Artificial Sequence: Synthetic oligonucleotide
acgacaggccuguauugaa

SEQ ID NO: 1117156 - RNA, 19 nt, Artificial Sequence
  Description of Artificial Sequence: Synthetic oligonucleotide
ggccagacgagugugaauc

SEQ ID NO: 1117157 - RNA, 19 nt, Artificial Sequence
  Description of Artificial Sequence: Synthetic oligonucleotide
cagcgguaucauugggugc

SEQ ID NO: 1117158 - RNA, 19 nt, Artificial Sequence
  Description of Artificial Sequence: Synthetic oligonucleotide
auguaauccuggucuguua

SEQ ID NO: 1117159 - RNA, 19 nt, Artificial Sequence
  Description of Artificial Sequence: Synthetic oligonucleotide
ggauggcccaacucaucgg

SEQ ID NO: 1117160 - RNA, 19 nt, Artificial Sequence
  Description of Artificial Sequence: Synthetic oligonucleotide
cuuccagaccagcggguug

SEQ ID NO: 1117161 - RNA, 19 nt, Artificial Sequence
  Description of Artificial Sequence: Synthetic oligonucleotide
cuacaugguacugcugcuc

SEQ ID NO: 1117162 - RNA, 19 nt, Artificial Sequence
  Description of Artificial Sequence: Synthetic oligonucleotide
gcagaaggguccuccguag

SEQ ID NO: 1117163 - RNA, 19 nt, Artificial Sequence
  Description of Artificial Sequence: Synthetic oligonucleotide
gggacuaaacuugcgggug

SEQ ID NO: 1117164 - RNA, 19 nt, Artificial Sequence
  Description of Artificial Sequence: Synthetic oligonucleotide
caugcgcacugugugguug

SEQ ID NO: 1117165 - RNA, 19 nt, Artificial Sequence
  Description of Artificial Sequence: Synthetic oligonucleotide
agcaccgggugcacaacgg

SEQ ID NO: 1117166 - RNA, 19 nt, Artificial Sequence
  Description of Artificial Sequence: Synthetic oligonucleotide
guagccucucugaaggcuc

SEQ ID NO: 1117167 - RNA, 19 nt, Artificial Sequence
  Description of Artificial Sequence: Synthetic oligonucleotide
gacgaccaguuuccuggug

SEQ ID NO: 1117168 - RNA, 19 nt, Artificial Sequence
  Description of Artificial Sequence: Synthetic oligonucleotide
aucuugcguacgcccagca

SEQ ID NO: 1117169 - RNA, 19 nt, Artificial Sequence
  Description of Artificial Sequence: Synthetic oligonucleotide
ugacuuuguagugccggua

SEQ ID NO: 1117170 - RNA, 19 nt, Artificial Sequence
  Description of Artificial Sequence: Synthetic oligonucleotide
aguguaaccuugagaucca

SEQ ID NO: 1117171 - RNA, 19 nt, Artificial Sequence
  Description of Artificial Sequence: Synthetic oligonucleotide
ggucaaacagcaaaauaua

SEQ ID NO: 1117172 - RNA, 19 nt, Artificial Sequence
  Description of Artificial Sequence: Synthetic oligonucleotide
gugagcguuccuccacagc

SEQ ID NO: 1117173 - RNA, 19 nt, Artificial Sequence
  Description of Artificial Sequence: Synthetic oligonucleotide
gagugugaaucgaauagau

SEQ ID NO: 1117174 - RNA, 19 nt, Artificial Sequence
  Description of Artificial Sequence: Synthetic oligonucleotide
uuguagggccuccgcugca

SEQ ID NO: 1117175 - RNA, 19 nt, Artificial Sequence
  Description of Artificial Sequence: Synthetic oligonucleotide
gccagguauacugaggauc

SEQ ID NO: 1117176 - RNA, 19 nt, Artificial Sequence
  Description of Artificial Sequence: Synthetic oligonucleotide
uuccacagccgccgaugga

SEQ ID NO: 1117177 - RNA, 19 nt, Artificial Sequence
  Description of Artificial Sequence: Synthetic oligonucleotide
ggacccuaguccuugaagu

SEQ ID NO: 1117178 - RNA, 19 nt, Artificial Sequence
  Description of Artificial Sequence: Synthetic oligonucleotide
acuaaacuugcgggugcug

SEQ ID NO: 1117179 - RNA, 19 nt, Artificial Sequence
  Description of Artificial Sequence: Synthetic oligonucleotide
cugucucuccugaauacua

SEQ ID NO: 1117180 - RNA, 19 nt, Artificial Sequence
  Description of Artificial Sequence: Synthetic oligonucleotide
ccccauucuuagauguucc

SEQ ID NO: 1117181 - RNA, 19 nt, Artificial Sequence
  Description of Artificial Sequence: Synthetic oligonucleotide
uuggcccgguacuccagga

SEQ ID NO: 1117182 - RNA, 19 nt, Artificial Sequence
  Description of Artificial Sequence: Synthetic oligonucleotide
cucuauccgauggcagagc

SEQ ID NO: 1117183 - RNA, 19 nt, Artificial Sequence
  Description of Artificial Sequence: Synthetic oligonucleotide
guccccaccggugugcaug

SEQ ID NO: 1117184 - RNA, 19 nt, Artificial Sequence
  Description of Artificial Sequence: Synthetic oligonucleotide
agagcaccgggugcacaac

SEQ ID NO: 1117185 - RNA, 19 nt, Artificial Sequence
  Description of Artificial Sequence: Synthetic oligonucleotide
ggagcuagcugcagggccc

SEQ ID NO: 1117186 - RNA, 19 nt, Artificial Sequence
  Description of Artificial Sequence: Synthetic oligonucleotide
uagccucacgguucauuuc

SEQ ID NO: 1117187 - RNA, 19 nt, Artificial Sequence
  Description of Artificial Sequence: Synthetic oligonucleotide
cuggauggcccaacucauc

SEQ ID NO: 1117188 - RNA, 19 nt, Artificial Sequence
  Description of Artificial Sequence: Synthetic oligonucleotide
ucuuccagaccagcggguu

SEQ ID NO: 1117189 - RNA, 19 nt, Artificial Sequence
  Description of Artificial Sequence: Synthetic oligonucleotide
caacccgcuccuugggcac

SEQ ID NO: 1117190 - RNA, 19 nt, Artificial Sequence
  Description of Artificial Sequence: Synthetic oligonucleotide
caucaggagcuugccuucc

SEQ ID NO: 1117191 - RNA, 19 nt, Artificial Sequence
  Description of Artificial Sequence: Synthetic oligonucleotide
caggccaaguuguuccaca

SEQ ID NO: 1117192 - RNA, 19 nt, Artificial Sequence
  Description of Artificial Sequence: Synthetic oligonucleotide
gugcugacacuggauggcc

SEQ ID NO: 1117193 - RNA, 19 nt, Artificial Sequence
  Description of Artificial Sequence: Synthetic oligonucleotide
cagaccagcggguuguaua

SEQ ID NO: 1117194 - RNA, 19 nt, Artificial Sequence
  Description of Artificial Sequence: Synthetic oligonucleotide
gccuuauguccguugccag

SEQ ID NO: 1117195 - RNA, 19 nt, Artificial Sequence
  Description of Artificial Sequence: Synthetic oligonucleotide
gcaauggaggccaucaucu

SEQ ID NO: 1117196 - RNA, 19 nt, Artificial Sequence
  Description of Artificial Sequence: Synthetic oligonucleotide
ggugauaaugguggugauc

SEQ ID NO: 1117197 - RNA, 19 nt, Artificial Sequence
  Description of Artificial Sequence: Synthetic oligonucleotide
gaccucagauacagcccag

SEQ ID NO: 1117198 - RNA, 19 nt, Artificial Sequence
  Description of Artificial Sequence: Synthetic oligonucleotide
uccccaccggugugcauga

SEQ ID NO: 1117199 - RNA, 19 nt, Artificial Sequence
  Description of Artificial Sequence: Synthetic oligonucleotide
caucuugcguacgcccagc

SEQ ID NO: 1117200 - RNA, 19 nt, Artificial Sequence
  Description of Artificial Sequence: Synthetic oligonucleotide
agacgagugugaaucgaau

SEQ ID NO: 1117201 - RNA, 19 nt, Artificial Sequence
  Description of Artificial Sequence: Synthetic oligonucleotide
gauguaauccuggucuguu

SEQ ID NO: 1117202 - RNA, 19 nt, Artificial Sequence
  Description of Artificial Sequence: Synthetic oligonucleotide
cucagcgguaucauugggu

SEQ ID NO: 1117203 - RNA, 19 nt, Artificial Sequence
  Description of Artificial Sequence: Synthetic oligonucleotide
accuugagauccaccguca

SEQ ID NO: 1117204 - RNA, 19 nt, Artificial Sequence
  Description of Artificial Sequence: Synthetic oligonucleotide
ccauuauugucagaguaga

SEQ ID NO: 1117205 - RNA, 19 nt, Artificial Sequence
  Description of Artificial Sequence: Synthetic oligonucleotide
gcuugagacaccaugugcu

SEQ ID NO: 1117206 - RNA, 19 nt, Artificial Sequence
  Description of Artificial Sequence: Synthetic oligonucleotide
ccgucacaggcugagagag

SEQ ID NO: 1117207 - RNA, 19 nt, Artificial Sequence
  Description of Artificial Sequence: Synthetic oligonucleotide
gcucagcgguaucauuggg

SEQ ID NO: 1117208 - RNA, 19 nt, Artificial Sequence
  Description of Artificial Sequence: Synthetic oligonucleotide
cuucuuuggguagccucuc

SEQ ID NO: 1117209 - RNA, 19 nt, Artificial Sequence
  Description of Artificial Sequence: Synthetic oligonucleotide
ucuuggcuugagacaccau

SEQ ID NO: 1117210 - RNA, 19 nt, Artificial Sequence
  Description of Artificial Sequence: Synthetic oligonucleotide
gcauccccauucuuagaug

SEQ ID NO: 1117211 - RNA, 19 nt, Artificial Sequence
  Description of Artificial Sequence: Synthetic oligonucleotide
cuuuguagugccgguagcu

SEQ ID NO: 1117212 - RNA, 19 nt, Artificial Sequence
  Description of Artificial Sequence: Synthetic oligonucleotide
uguagggccuccgcugcau

SEQ ID NO: 1117213 - RNA, 19 nt, Artificial Sequence
  Description of Artificial Sequence: Synthetic oligonucleotide
gccgauggagcauuaccuc

SEQ ID NO: 1117214 - RNA, 19 nt, Artificial Sequence
  Description of Artificial Sequence: Synthetic oligonucleotide
cauuaccuccaccuguccu

SEQ ID NO: 1117215 - RNA, 19 nt, Artificial Sequence
  Description of Artificial Sequence: Synthetic oligonucleotide
cagagcaccgggugcacaa

SEQ ID NO: 1117216 - RNA, 19 nt, Artificial Sequence
  Description of Artificial Sequence: Synthetic oligonucleotide
uuccgggcaaugggauugc

SEQ ID NO: 1117217 - RNA, 19 nt, Artificial Sequence
  Description of Artificial Sequence: Synthetic oligonucleotide
cagugggcccaccaccauc

SEQ ID NO: 1117218 - RNA, 19 nt, Artificial Sequence
  Description of Artificial Sequence: Synthetic oligonucleotide
cacgacaggccuguauuga

SEQ ID NO: 1117219 - RNA, 19 nt, Artificial Sequence
  Description of Artificial Sequence: Synthetic oligonucleotide
cauugggugcaaacaggua

SEQ ID NO: 1117220 - RNA, 19 nt, Artificial Sequence
  Description of Artificial Sequence: Synthetic oligonucleotide
gaagugccaacccgcuccu

SEQ ID NO: 1117221 - RNA, 19 nt, Artificial Sequence
  Description of Artificial Sequence: Synthetic oligonucleotide
ccgccgauggagcauuacc

SEQ ID NO: 1117222 - RNA, 19 nt, Artificial Sequence
  Description of Artificial Sequence: Synthetic oligonucleotide
acuugcgggugcuggccau

SEQ ID NO: 1117223 - RNA, 19 nt, Artificial Sequence
  Description of Artificial Sequence: Synthetic oligonucleotide
ggcaucaggagcuugccuu

SEQ ID NO: 1117224 - RNA, 19 nt, Artificial Sequence
  Description of Artificial Sequence: Synthetic oligonucleotide
agcuaccacggacccuagu

SEQ ID NO: 1117225 - RNA, 19 nt, Artificial Sequence
  Description of Artificial Sequence: Synthetic oligonucleotide
ugggugcaaacagguaguu

SEQ ID NO: 1117226 - RNA, 19 nt, Artificial Sequence
  Description of Artificial Sequence: Synthetic oligonucleotide
gacuaaacuugcgggugcu

SEQ ID NO: 1117227 - RNA, 19 nt, Artificial Sequence
  Description of Artificial Sequence: Synthetic oligonucleotide
ucaugcgcacugugugguu

SEQ ID NO: 1117228 - RNA, 19 nt, Artificial Sequence
  Description of Artificial Sequence: Synthetic oligonucleotide
gcauuaccuccaccugucc

SEQ ID NO: 1117229 - RNA, 19 nt, Artificial Sequence
  Description of Artificial Sequence: Synthetic oligonucleotide
ggggacgaccaguuuccug

SEQ ID NO: 1117230 - RNA, 19 nt, Artificial Sequence
  Description of Artificial Sequence: Synthetic oligonucleotide
ggcagaaggguccuccgua

SEQ ID NO: 1117231 - RNA, 19 nt, Artificial Sequence
  Description of Artificial Sequence: Synthetic oligonucleotide
aggguccuccguagaguuc

SEQ ID NO: 1117232 - RNA, 19 nt, Artificial Sequence
  Description of Artificial Sequence: Synthetic oligonucleotide
cuccuucauacagguggug

SEQ ID NO: 1117233 - RNA, 19 nt, Artificial Sequence
  Description of Artificial Sequence: Synthetic oligonucleotide
cagguauacugaggaucug

SEQ ID NO: 1117234 - RNA, 19 nt, Artificial Sequence
  Description of Artificial Sequence: Synthetic oligonucleotide
ccucacgguucauuuccag

SEQ ID NO: 1117235 - RNA, 19 nt, Artificial Sequence
  Description of Artificial Sequence: Synthetic oligonucleotide
cagaaggguccuccguaga

SEQ ID NO: 1117236 - RNA, 19 nt, Artificial Sequence
  Description of Artificial Sequence: Synthetic oligonucleotide
gauagccucacgguucauu

SEQ ID NO: 1117237 - RNA, 19 nt, Artificial Sequence
  Description of Artificial Sequence: Synthetic oligonucleotide
gucccugugagugagcguu

SEQ ID NO: 1117238 - RNA, 19 nt, Artificial Sequence
  Description of Artificial Sequence: Synthetic oligonucleotide
gccuguauugaagugccaa

SEQ ID NO: 1117239 - RNA, 19 nt, Artificial Sequence
  Description of Artificial Sequence: Synthetic oligonucleotide
guaguuccagccagguaua

SEQ ID NO: 1117240 - RNA, 19 nt, Artificial Sequence
  Description of Artificial Sequence: Synthetic oligonucleotide
agaaccuguccagggcaau

SEQ ID NO: 1117241 - RNA, 19 nt, Artificial Sequence
  Description of Artificial Sequence: Synthetic oligonucleotide
gucaugcgcacuguguggu

SEQ ID NO: 1117242 - RNA, 19 nt, Artificial Sequence
  Description of Artificial Sequence: Synthetic oligonucleotide
acggacccuaguccuugaa

SEQ ID NO: 1117243 - RNA, 19 nt, Artificial Sequence
  Description of Artificial Sequence: Synthetic oligonucleotide
gugcacaacggagguguca

SEQ ID NO: 1117244 - RNA, 19 nt, Artificial Sequence
  Description of Artificial Sequence: Synthetic oligonucleotide
gggugcacaacggaggugu

SEQ ID NO: 1117245 - RNA, 19 nt, Artificial Sequence
  Description of Artificial Sequence: Synthetic oligonucleotide
cagcccagcgaagcuguug

SEQ ID NO: 1117246 - RNA, 19 nt, Artificial Sequence
  Description of Artificial Sequence: Synthetic oligonucleotide
cuugcgggugcuggccaug

SEQ ID NO: 1117247 - RNA, 19 nt, Artificial Sequence
  Description of Artificial Sequence: Synthetic oligonucleotide
aucgggguucuggggucuc

SEQ ID NO: 1117248 - RNA, 19 nt, Artificial Sequence
  Description of Artificial Sequence: Synthetic oligonucleotide
gccaacccgcuccuugggc

SEQ ID NO: 1117249 - RNA, 19 nt, Artificial Sequence
  Description of Artificial Sequence: Synthetic oligonucleotide
ggguagccucucugaaggc

SEQ ID NO: 1117250 - RNA, 19 nt, Artificial Sequence
  Description of Artificial Sequence: Synthetic oligonucleotide
gcguacgcccagcaucccc

SEQ ID NO: 1117251 - RNA, 19 nt, Artificial Sequence
  Description of Artificial Sequence: Synthetic oligonucleotide
cauaggcagaaggguccuc

SEQ ID NO: 1117252 - RNA, 19 nt, Artificial Sequence
  Description of Artificial Sequence: Synthetic oligonucleotide
acagccgccgauggagcau

SEQ ID NO: 1117253 - RNA, 19 nt, Artificial Sequence
  Description of Artificial Sequence: Synthetic oligonucleotide
uggggacgaccaguuuccu

SEQ ID NO: 1117254 - RNA, 19 nt, Artificial Sequence
  Description of Artificial Sequence: Synthetic oligonucleotide
ugcguacgcccagcauccc

SEQ ID NO: 1117255 - RNA, 19 nt, Artificial Sequence
  Description of Artificial Sequence: Synthetic oligonucleotide
cccaaguaggcucagcggu

SEQ ID NO: 1117256 - RNA, 19 nt, Artificial Sequence
  Description of Artificial Sequence: Synthetic oligonucleotide
ggguaguaauuccgggcaa

SEQ ID NO: 1117257 - RNA, 19 nt, Artificial Sequence
  Description of Artificial Sequence: Synthetic oligonucleotide
ccaacccgcuccuugggca

SEQ ID NO: 1117258 - RNA, 19 nt, Artificial Sequence
  Description of Artificial Sequence: Synthetic oligonucleotide
caugguacugcugcucuau

SEQ ID NO: 1117259 - RNA, 19 nt, Artificial Sequence
  Description of Artificial Sequence: Synthetic oligonucleotide
cagcuaccacggacccuag

SEQ ID NO: 1117260 - RNA, 19 nt, Artificial Sequence
  Description of Artificial Sequence: Synthetic oligonucleotide
uccgggcaaugggauugcu

SEQ ID NO: 1117261 - RNA, 19 nt, Artificial Sequence
  Description of Artificial Sequence: Synthetic oligonucleotide
gguagccucucugaaggcu

SEQ ID NO: 1117262 - RNA, 19 nt, Artificial Sequence
  Description of Artificial Sequence: Synthetic oligonucleotide
gguugcuacuguaguucca

SEQ ID NO: 1117263 - RNA, 19 nt, Artificial Sequence
  Description of Artificial Sequence: Synthetic oligonucleotide
ggguccuccguagaguucu

SEQ ID NO: 1117264 - RNA, 19 nt, Artificial Sequence
  Description of Artificial Sequence: Synthetic oligonucleotide
cugcaucugguagccauua

SEQ ID NO: 1117265 - RNA, 19 nt, Artificial Sequence
  Description of Artificial Sequence: Synthetic oligonucleotide
caucggugauauuuacauu

SEQ ID NO: 1117266 - RNA, 19 nt, Artificial Sequence
  Description of Artificial Sequence: Synthetic oligonucleotide
caacacgacaggccuguau

SEQ ID NO: 1117267 - RNA, 19 nt, Artificial Sequence
  Description of Artificial Sequence: Synthetic oligonucleotide
cagccugcucuugucaucu

SEQ ID NO: 1117268 - RNA, 19 nt, Artificial Sequence
  Description of Artificial Sequence: Synthetic oligonucleotide
gguaguaauuccgggcaau

SEQ ID NO: 1117269 - RNA, 19 nt, Artificial Sequence
  Description of Artificial Sequence: Synthetic oligonucleotide
gcaccgggugcacaacgga

SEQ ID NO: 1117270 - RNA, 19 nt, Artificial Sequence
  Description of Artificial Sequence: Synthetic oligonucleotide
cgagugugaaucgaauaga

SEQ ID NO: 1117271 - RNA, 19 nt, Artificial Sequence
  Description of Artificial Sequence: Synthetic oligonucleotide
ggccaugguugcuacugua

SEQ ID NO: 1117272 - RNA, 19 nt, Artificial Sequence
  Description of Artificial Sequence: Synthetic oligonucleotide
cuggaucugugcugacacu

SEQ ID NO: 1117273 - RNA, 19 nt, Artificial Sequence
  Description of Artificial Sequence: Synthetic oligonucleotide
gugauggauuuaggcccca

SEQ ID NO: 1117274 - RNA, 19 nt, Artificial Sequence
  Description of Artificial Sequence: Synthetic oligonucleotide
caaguaggcucagcgguau

SEQ ID NO: 1117275 - RNA, 19 nt, Artificial Sequence
  Description of Artificial Sequence: Synthetic oligonucleotide
cguacgcccagcaucccca

SEQ ID NO: 1117276 - RNA, 19 nt, Artificial Sequence
  Description of Artificial Sequence: Synthetic oligonucleotide
ccaugugcuugcucugcca

SEQ ID NO: 1117277 - RNA, 19 nt, Artificial Sequence
  Description of Artificial Sequence: Synthetic oligonucleotide
cacggacccuaguccuuga

SEQ ID NO: 1117278 - RNA, 19 nt, Artificial Sequence
  Description of Artificial Sequence: Synthetic oligonucleotide
cccuaguccuugaagugua

SEQ ID NO: 1117279 - RNA, 19 nt, Artificial Sequence
  Description of Artificial Sequence: Synthetic oligonucleotide
ccaaguaggcucagcggua

SEQ ID NO: 1117280 - RNA, 19 nt, Artificial Sequence
  Description of Artificial Sequence: Synthetic oligonucleotide
ggauugcucuugaaagccu

SEQ ID NO: 1117281 - RNA, 19 nt, Artificial Sequence
  Description of Artificial Sequence: Synthetic oligonucleotide
ccacggacccuaguccuug

SEQ ID NO: 1117282 - RNA, 19 nt, Artificial Sequence
  Description of Artificial Sequence: Synthetic oligonucleotide
aagugccaacccgcuccuu

SEQ ID NO: 1117283 - RNA, 19 nt, Artificial Sequence
  Description of Artificial Sequence: Synthetic oligonucleotide
cugacacuggauggcccaa

SEQ ID NO: 1117284 - RNA, 19 nt, Artificial Sequence
  Description of Artificial Sequence: Synthetic oligonucleotide
uccagaccagcggguugua

SEQ ID NO: 1117285 - RNA, 19 nt, Artificial Sequence
  Description of Artificial Sequence: Synthetic oligonucleotide
ccccaguggggcucagaug

SEQ ID NO: 1117286 - RNA, 19 nt, Artificial Sequence
  Description of Artificial Sequence: Synthetic oligonucleotide
gggacucagugccugugau

SEQ ID NO: 1117287 - RNA, 19 nt, Artificial Sequence
  Description of Artificial Sequence: Synthetic oligonucleotide
ccagcggguuguauacaga

SEQ ID NO: 1117288 - RNA, 19 nt, Artificial Sequence
  Description of Artificial Sequence: Synthetic oligonucleotide
cuguaccaugggguaguaa

SEQ ID NO: 1117289 - RNA, 19 nt, Artificial Sequence
  Description of Artificial Sequence: Synthetic oligonucleotide
ccaggccaaguuguuccac

SEQ ID NO: 1117290 - RNA, 19 nt, Artificial Sequence
  Description of Artificial Sequence: Synthetic oligonucleotide
cuugggucaugcgcacugu

SEQ ID NO: 1117291 - RNA, 19 nt, Artificial Sequence
  Description of Artificial Sequence: Synthetic oligonucleotide
acaacacgacaggccugua

SEQ ID NO: 1117292 - RNA, 19 nt, Artificial Sequence
  Description of Artificial Sequence: Synthetic oligonucleotide
ccuaguccuugaaguguaa

SEQ ID NO: 1117293 - RNA, 19 nt, Artificial Sequence
  Description of Artificial Sequence: Synthetic oligonucleotide
cccaacucaucggugauau

SEQ ID NO: 1117294 - RNA, 19 nt, Artificial Sequence
  Description of Artificial Sequence: Synthetic oligonucleotide
ggugcacaacggagguguc

SEQ ID NO: 1117295 - RNA, 19 nt, Artificial Sequence
  Description of Artificial Sequence: Synthetic oligonucleotide
acgucuccauuggcccggu

SEQ ID NO: 1117296 - RNA, 19 nt, Artificial Sequence
  Description of Artificial Sequence: Synthetic oligonucleotide
agggacagucagggugaua

SEQ ID NO: 1117297 - RNA, 19 nt, Artificial Sequence
  Description of Artificial Sequence: Synthetic oligonucleotide
cauuggggaaagggacagu

SEQ ID NO: 1117298 - RNA, 19 nt, Artificial Sequence
  Description of Artificial Sequence: Synthetic oligonucleotide
gggugauaaugguggugau

SEQ ID NO: 1117299 - RNA, 19 nt, Artificial Sequence
  Description of Artificial Sequence: Synthetic oligonucleotide
guacgcccagcauccccau

SEQ ID NO: 1117300 - RNA, 19 nt, Artificial Sequence
  Description of Artificial Sequence: Synthetic oligonucleotide
ccguagaguucuggaucug

SEQ ID NO: 1117301 - RNA, 19 nt, Artificial Sequence
  Description of Artificial Sequence: Synthetic oligonucleotide
ggccuguauugaagugcca

SEQ ID NO: 1117302 - RNA, 19 nt, Artificial Sequence
  Description of Artificial Sequence: Synthetic oligonucleotide
gccgccgauggagcauuac

SEQ ID NO: 1117303 - RNA, 19 nt, Artificial Sequence
  Description of Artificial Sequence: Synthetic oligonucleotide
ccggugugcaugacuuugu

SEQ ID NO: 1117304 - RNA, 19 nt, Artificial Sequence
  Description of Artificial Sequence: Synthetic oligonucleotide
ccgggugcacaacggaggu

SEQ ID NO: 1117305 - RNA, 19 nt, Artificial Sequence
  Description of Artificial Sequence: Synthetic oligonucleotide
cccaccggugugcaugacu

SEQ ID NO: 1117306 - RNA, 19 nt, Artificial Sequence
  Description of Artificial Sequence: Synthetic oligonucleotide
gggccagacgagugugaau

SEQ ID NO: 1117307 - RNA, 19 nt, Artificial Sequence
  Description of Artificial Sequence: Synthetic oligonucleotide
caccggugugcaugacuuu

SEQ ID NO: 1117308 - RNA, 19 nt, Artificial Sequence
  Description of Artificial Sequence: Synthetic oligonucleotide
ccccacugcuucccaagua

SEQ ID NO: 1117309 - RNA, 19 nt, Artificial Sequence
  Description of Artificial Sequence: Synthetic oligonucleotide
guacugccuuauguccguu

SEQ ID NO: 1117310 - RNA, 19 nt, Artificial Sequence
  Description of Artificial Sequence: Synthetic oligonucleotide
gcgguaucauugggugcaa

SEQ ID NO: 1117311 - RNA, 19 nt, Artificial Sequence
  Description of Artificial Sequence: Synthetic oligonucleotide
cggugugcaugacuuugua

SEQ ID NO: 1117312 - RNA, 19 nt, Artificial Sequence
  Description of Artificial Sequence: Synthetic oligonucleotide
cgggugcacaacggaggug

SEQ ID NO: 1117313 - RNA, 19 nt, Artificial Sequence
  Description of Artificial Sequence: Synthetic oligonucleotide
cguacauguuguucaccuu

SEQ ID NO: 1117314 - RNA, 19 nt, Artificial Sequence
  Description of Artificial Sequence: Synthetic oligonucleotide
agccgccgauggagcauua

SEQ ID NO: 1117315 - RNA, 19 nt, Artificial Sequence
  Description of Artificial Sequence: Synthetic oligonucleotide
cagccgccgauggagcauu

SEQ ID NO: 1117316 - RNA, 19 nt, Artificial Sequence
  Description of Artificial Sequence: Synthetic oligonucleotide
gcacaacggaggugucauu

SEQ ID NO: 1117317 - RNA, 19 nt, Artificial Sequence
  Description of Artificial Sequence: Synthetic oligonucleotide
ccgguacuccaggaacucu

SEQ ID NO: 1117318 - RNA, 19 nt, Artificial Sequence
  Description of Artificial Sequence: Synthetic oligonucleotide
cguugccagugggcccacc

SEQ ID NO: 1117319 - RNA, 19 nt, Artificial Sequence
  Description of Artificial Sequence: Synthetic oligonucleotide
ccaacucaucggugauauu

SEQ ID NO: 1117320 - RNA, 19 nt, Artificial Sequence
  Description of Artificial Sequence: Synthetic oligonucleotide
ggauagccucacgguucau

SEQ ID NO: 1117321 - RNA, 19 nt, Artificial Sequence
  Description of Artificial Sequence: Synthetic oligonucleotide
ccguugccagugggcccac

SEQ ID NO: 1117322 - RNA, 19 nt, Artificial Sequence
  Description of Artificial Sequence: Synthetic oligonucleotide
ccccaccggugugcaugac

SEQ ID NO: 1117323 - RNA, 19 nt, Artificial Sequence
  Description of Artificial Sequence: Synthetic oligonucleotide
ccagaccagcggguuguau

SEQ ID NO: 1117324 - RNA, 19 nt, Artificial Sequence
  Description of Artificial Sequence: Synthetic oligonucleotide
aauacaauaguucugauac

SEQ ID NO: 1117325 - RNA, 19 nt, Artificial Sequence
  Description of Artificial Sequence: Synthetic oligonucleotide
aaagauuccaauuagcuga

SEQ ID NO: 1117326 - RNA, 19 nt, Artificial Sequence
  Description of Artificial Sequence: Synthetic oligonucleotide
aagagaacgcuuuugaaac

SEQ ID NO: 1117327 - RNA, 19 nt, Artificial Sequence
  Description of Artificial Sequence: Synthetic oligonucleotide
uuaagcaaaauguugacag

SEQ ID NO: 1117328 - RNA, 19 nt, Artificial Sequence
  Description of Artificial Sequence: Synthetic oligonucleotide
aaugccuuaguuuggagac

SEQ ID NO: 1117329 - RNA, 19 nt, Artificial Sequence
  Description of Artificial Sequence: Synthetic oligonucleotide
uuugaaacaaguaaugacu

SEQ ID NO: 1117330 - RNA, 19 nt, Artificial Sequence
  Description of Artificial Sequence: Synthetic oligonucleotide
uauagcacgagaaaggcag

SEQ ID NO: 1117331 - RNA, 19 nt, Artificial Sequence
  Description of Artificial Sequence: Synthetic oligonucleotide
auuaaucaaggauacaagg

SEQ ID NO: 1117332 - RNA, 19 nt, Artificial Sequence
  Description of Artificial Sequence: Synthetic oligonucleotide
ucuauaauugucauuaccu

SEQ ID NO: 1117333 - RNA, 19 nt, Artificial Sequence
  Description of Artificial Sequence: Synthetic oligonucleotide
aaugccaacggcaagaagg

SEQ ID NO: 1117334 - RNA, 19 nt, Artificial Sequence
  Description of Artificial Sequence: Synthetic oligonucleotide
uuuacaauuuacuagcucu

SEQ ID NO: 1117335 - RNA, 19 nt, Artificial Sequence
  Description of Artificial Sequence: Synthetic oligonucleotide
ucugauaccauuaaaguaa

SEQ ID NO: 1117336 - RNA, 19 nt, Artificial Sequence
  Description of Artificial Sequence: Synthetic oligonucleotide
uuucaagcuaaucagaugu

SEQ ID NO: 1117337 - RNA, 19 nt, Artificial Sequence
  Description of Artificial Sequence: Synthetic oligonucleotide
caaauaaccuuaaaguugg

SEQ ID NO: 1117338 - RNA, 19 nt, Artificial Sequence
  Description of Artificial Sequence: Synthetic oligonucleotide
uguuauagcacgagaaagg

SEQ ID NO: 1117339 - RNA, 19 nt, Artificial Sequence
  Description of Artificial Sequence: Synthetic oligonucleotide
aaaauacauacauugugug

SEQ ID NO: 1117340 - RNA, 19 nt, Artificial Sequence
  Description of Artificial Sequence: Synthetic oligonucleotide
gauugaaucagucuacugc

SEQ ID NO: 1117341 - RNA, 19 nt, Artificial Sequence
  Description of Artificial Sequence: Synthetic oligonucleotide
uuaaucaaggauacaaggc

SEQ ID NO: 1117342 - RNA, 19 nt, Artificial Sequence
  Description of Artificial Sequence: Synthetic oligonucleotide
aaugaaauucaagggaaac

SEQ ID NO: 1117343 - RNA, 19 nt, Artificial Sequence
  Description of Artificial Sequence: Synthetic oligonucleotide
aaacaucgcauacaguuuc

SEQ ID NO: 1117344 - RNA, 19 nt, Artificial Sequence
  Description of Artificial Sequence: Synthetic oligonucleotide
uuaaauuuccaucaccacu

SEQ ID NO: 1117345 - RNA, 19 nt, Artificial Sequence
  Description of Artificial Sequence: Synthetic oligonucleotide
aauacauacauugugugcu

SEQ ID NO: 1117346 - RNA, 19 nt, Artificial Sequence
  Description of Artificial Sequence: Synthetic oligonucleotide
aagagaauaaugacagugc

SEQ ID NO: 1117347 - RNA, 19 nt, Artificial Sequence
  Description of Artificial Sequence: Synthetic oligonucleotide
cagauuuauacaaucaagc

SEQ ID NO: 1117348 - RNA, 19 nt, Artificial Sequence
  Description of Artificial Sequence: Synthetic oligonucleotide
aaauguugacaguugaugu

SEQ ID NO: 1117349 - RNA, 19 nt, Artificial Sequence
  Description of Artificial Sequence: Synthetic oligonucleotide
uauuaaucaaggauacaag

SEQ ID NO: 1117350 - RNA, 19 nt, Artificial Sequence
  Description of Artificial Sequence: Synthetic oligonucleotide
uuagcugaaagcaagcaac

SEQ ID NO: 1117351 - RNA, 19 nt, Artificial Sequence
  Description of Artificial Sequence: Synthetic oligonucleotide
uauacaaucaagcccucag

SEQ ID NO: 1117352 - RNA, 19 nt, Artificial Sequence
  Description of Artificial Sequence: Synthetic oligonucleotide
uuauucuuaaagcuguucu

SEQ ID NO: 1117353 - RNA, 19 nt, Artificial Sequence
  Description of Artificial Sequence: Synthetic oligonucleotide
uacaaucaagcccucaggg

SEQ ID NO: 1117354 - RNA, 19 nt, Artificial Sequence
  Description of Artificial Sequence: Synthetic oligonucleotide
aguauaaccaguauaaaug

SEQ ID NO: 1117355 - RNA, 19 nt, Artificial Sequence
  Description of Artificial Sequence: Synthetic oligonucleotide
uuuacuagcucuuccagug

SEQ ID NO: 1117356 - RNA, 19 nt, Artificial Sequence
  Description of Artificial Sequence: Synthetic oligonucleotide
aaauuacacgauaugacuc

SEQ ID NO: 1117357 - RNA, 19 nt, Artificial Sequence
  Description of Artificial Sequence: Synthetic oligonucleotide
aaaugcgggguuuauugcg

SEQ ID NO: 1117358 - RNA, 19 nt, Artificial Sequence
  Description of Artificial Sequence: Synthetic oligonucleotide
aguaaugacugguuuaguc

SEQ ID NO: 1117359 - RNA, 19 nt, Artificial Sequence
  Description of Artificial Sequence: Synthetic oligonucleotide
uauugauuauuuguuauag

SEQ ID NO: 1117360 - RNA, 19 nt, Artificial Sequence
  Description of Artificial Sequence: Synthetic oligonucleotide
uuauuaaucaaggauacaa

SEQ ID NO: 1117361 - RNA, 19 nt, Artificial Sequence
  Description of Artificial Sequence: Synthetic oligonucleotide
auuauuucagcuuggugag

SEQ ID NO: 1117362 - RNA, 19 nt, Artificial Sequence
  Description of Artificial Sequence: Synthetic oligonucleotide
aaccuuugaaauaacaaag

SEQ ID NO: 1117363 - RNA, 19 nt, Artificial Sequence
  Description of Artificial Sequence: Synthetic oligonucleotide
aauuacacgauaugacucu

SEQ ID NO: 1117364 - RNA, 19 nt, Artificial Sequence
  Description of Artificial Sequence: Synthetic oligonucleotide
aaguauaaccaguauaaau

SEQ ID NO: 1117365 - RNA, 19 nt, Artificial Sequence
  Description of Artificial Sequence: Synthetic oligonucleotide
aauaagcccguguguauac

SEQ ID NO: 1117366 - RNA, 19 nt, Artificial Sequence
  Description of Artificial Sequence: Synthetic oligonucleotide
aaucuagcuagaguuaagg

SEQ ID NO: 1117367 - RNA, 19 nt, Artificial Sequence
  Description of Artificial Sequence: Synthetic oligonucleotide
uugaaacaaguaaugacug

SEQ ID NO: 1117368 - RNA, 19 nt, Artificial Sequence
  Description of Artificial Sequence: Synthetic oligonucleotide
ugucauuaccuuuaugaag

SEQ ID NO: 1117369 - RNA, 19 nt, Artificial Sequence
  Description of Artificial Sequence: Synthetic oligonucleotide
ucuucguugacuuuaucug

SEQ ID NO: 1117370 - RNA, 19 nt, Artificial Sequence
  Description of Artificial Sequence: Synthetic oligonucleotide
aguuucagcauccaugcag

SEQ ID NO: 1117371 - RNA, 19 nt, Artificial Sequence
  Description of Artificial Sequence: Synthetic oligonucleotide
auaaugacagugccugugc

SEQ ID NO: 1117372 - RNA, 19 nt, Artificial Sequence
  Description of Artificial Sequence: Synthetic oligonucleotide
acauagaacacaacaauac

SEQ ID NO: 1117373 - RNA, 19 nt, Artificial Sequence
  Description of Artificial Sequence: Synthetic oligonucleotide
aauaaguaguaccuuucca

SEQ ID NO: 1117374 - RNA, 19 nt, Artificial Sequence
  Description of Artificial Sequence: Synthetic oligonucleotide
uaccauuaaaguaauaaua

SEQ ID NO: 1117375 - RNA, 19 nt, Artificial Sequence
  Description of Artificial Sequence: Synthetic oligonucleotide
agagaaauaagcccgugug

SEQ ID NO: 1117376 - RNA, 19 nt, Artificial Sequence
  Description of Artificial Sequence: Synthetic oligonucleotide
guauaaccaguauaaaugc

SEQ ID NO: 1117377 - RNA, 19 nt, Artificial Sequence
  Description of Artificial Sequence: Synthetic oligonucleotide
aucgcauacaguuucagca

SEQ ID NO: 1117378 - RNA, 19 nt, Artificial Sequence
  Description of Artificial Sequence: Synthetic oligonucleotide
aaguaguaccuuuccaguc

SEQ ID NO: 1117379 - RNA, 19 nt, Artificial Sequence
  Description of Artificial Sequence: Synthetic oligonucleotide
aacgacucccauuucugac

SEQ ID NO: 1117380 - RNA, 19 nt, Artificial Sequence
  Description of Artificial Sequence: Synthetic oligonucleotide
aaugcaacguacuuuggau

SEQ ID NO: 1117381 - RNA, 19 nt, Artificial Sequence
  Description of Artificial Sequence: Synthetic oligonucleotide
uaaccuuugaaauaacaaa

SEQ ID NO: 1117382 - RNA, 19 nt, Artificial Sequence
  Description of Artificial Sequence: Synthetic oligonucleotide
auugaaucagucuacugcu

SEQ ID NO: 1117383 - RNA, 19 nt, Artificial Sequence
  Description of Artificial Sequence: Synthetic oligonucleotide
acaauacacaaauaucuug

SEQ ID NO: 1117384 - RNA, 19 nt, Artificial Sequence
  Description of Artificial Sequence: Synthetic oligonucleotide
gucauuaccuuuaugaagc

SEQ ID NO: 1117385 - RNA, 19 nt, Artificial Sequence
  Description of Artificial Sequence: Synthetic oligonucleotide
aauaaccuuaaaguuggag

SEQ ID NO: 1117386 - RNA, 19 nt, Artificial Sequence
  Description of Artificial Sequence: Synthetic oligonucleotide
aauucauagggguuaaauu

SEQ ID NO: 1117387 - RNA, 19 nt, Artificial Sequence
  Description of Artificial Sequence: Synthetic oligonucleotide
ucuauaguuggugacacca

SEQ ID NO: 1117388 - RNA, 19 nt, Artificial Sequence
  Description of Artificial Sequence: Synthetic oligonucleotide
aaggauaacaccagugauc

SEQ ID NO: 1117389 - RNA, 19 nt, Artificial Sequence
  Description of Artificial Sequence: Synthetic oligonucleotide
cuagaguuaagguaaguuc

SEQ ID NO: 1117390 - RNA, 19 nt, Artificial Sequence
  Description of Artificial Sequence: Synthetic oligonucleotide
gaaagcuaaugauaggcac

SEQ ID NO: 1117391 - RNA, 19 nt, Artificial Sequence
  Description of Artificial Sequence: Synthetic oligonucleotide
uuguuauagcacgagaaag

SEQ ID NO: 1117392 - RNA, 19 nt, Artificial Sequence
  Description of Artificial Sequence: Synthetic oligonucleotide
uaugacucugccuaucagc

SEQ ID NO: 1117393 - RNA, 19 nt, Artificial Sequence
  Description of Artificial Sequence: Synthetic oligonucleotide
gaucacucgagccagccag

SEQ ID NO: 1117394 - RNA, 19 nt, Artificial Sequence
  Description of Artificial Sequence: Synthetic oligonucleotide
auaauaaccuuugaaauaa

SEQ ID NO: 1117395 - RNA, 19 nt, Artificial Sequence
  Description of Artificial Sequence: Synthetic oligonucleotide
aguguagaucaagagaacg

SEQ ID NO: 1117396 - RNA, 19 nt, Artificial Sequence
  Description of Artificial Sequence: Synthetic oligonucleotide
caagagaauaaugacagug

SEQ ID NO: 1117397 - RNA, 19 nt, Artificial Sequence
  Description of Artificial Sequence: Synthetic oligonucleotide
uucaagggaaacaugguau

SEQ ID NO: 1117398 - RNA, 19 nt, Artificial Sequence
  Description of Artificial Sequence: Synthetic oligonucleotide
uuaccuuuaugaagcaacc

SEQ ID NO: 1117399 - RNA, 19 nt, Artificial Sequence
  Description of Artificial Sequence: Synthetic oligonucleotide
uucacuucuauaaucccgu

SEQ ID NO: 1117400 - RNA, 19 nt, Artificial Sequence
  Description of Artificial Sequence: Synthetic oligonucleotide
acucgagccagccaggcac

SEQ ID NO: 1117401 - RNA, 19 nt, Artificial Sequence
  Description of Artificial Sequence: Synthetic oligonucleotide
aucauacaacaucaacagc

SEQ ID NO: 1117402 - RNA, 19 nt, Artificial Sequence
  Description of Artificial Sequence: Synthetic oligonucleotide
agaaauuccagcaacgacu

SEQ ID NO: 1117403 - RNA, 19 nt, Artificial Sequence
  Description of Artificial Sequence: Synthetic oligonucleotide
augguuuguagucuuacug

SEQ ID NO: 1117404 - RNA, 19 nt, Artificial Sequence
  Description of Artificial Sequence: Synthetic oligonucleotide
ugguuuguagucuuacugc

SEQ ID NO: 1117405 - RNA, 19 nt, Artificial Sequence
  Description of Artificial Sequence: Synthetic oligonucleotide
uuuauugcguaaaggauuu

SEQ ID NO: 1117406 - RNA, 19 nt, Artificial Sequence
  Description of Artificial Sequence: Synthetic oligonucleotide
guuaccaccacccaggaaa

SEQ ID NO: 1117407 - RNA, 19 nt, Artificial Sequence
  Description of Artificial Sequence: Synthetic oligonucleotide
agccaggcgauguuaaagc

SEQ ID NO: 1117408 - RNA, 19 nt, Artificial Sequence
  Description of Artificial Sequence: Synthetic oligonucleotide
caaucaagcccucagggag

SEQ ID NO: 1117409 - RNA, 19 nt, Artificial Sequence
  Description of Artificial Sequence: Synthetic oligonucleotide
ugcagauuuauacaaucaa

SEQ ID NO: 1117410 - RNA, 19 nt, Artificial Sequence
  Description of Artificial Sequence: Synthetic oligonucleotide
caguaggcgagaaagauuc

SEQ ID NO: 1117411 - RNA, 19 nt, Artificial Sequence
  Description of Artificial Sequence: Synthetic oligonucleotide
agggauauaggaauaggac

SEQ ID NO: 1117412 - RNA, 19 nt, Artificial Sequence
  Description of Artificial Sequence: Synthetic oligonucleotide
uauaauugucauuaccuuu

SEQ ID NO: 1117413 - RNA, 19 nt, Artificial Sequence
  Description of Artificial Sequence: Synthetic oligonucleotide
auacaaucaagcccucagg

SEQ ID NO: 1117414 - RNA, 19 nt, Artificial Sequence
  Description of Artificial Sequence: Synthetic oligonucleotide
acaaaguauaaccaguaua

SEQ ID NO: 1117415 - RNA, 19 nt, Artificial Sequence
  Description of Artificial Sequence: Synthetic oligonucleotide
aacggcaagaaggauaaca

SEQ ID NO: 1117416 - RNA, 19 nt, Artificial Sequence
  Description of Artificial Sequence: Synthetic oligonucleotide
uucauagggguuaaauuuc

SEQ ID NO: 1117417 - RNA, 19 nt, Artificial Sequence
  Description of Artificial Sequence: Synthetic oligonucleotide
uaaguaguaccuuuccagu

SEQ ID NO: 1117418 - RNA, 19 nt, Artificial Sequence
  Description of Artificial Sequence: Synthetic oligonucleotide
ucgacagguagcaaaacaa

SEQ ID NO: 1117419 - RNA, 19 nt, Artificial Sequence
  Description of Artificial Sequence: Synthetic oligonucleotide
ucuauaaucccguguggca

SEQ ID NO: 1117420 - RNA, 19 nt, Artificial Sequence
  Description of Artificial Sequence: Synthetic oligonucleotide
ugguuauacuauuucauau

SEQ ID NO: 1117421 - RNA, 19 nt, Artificial Sequence
  Description of Artificial Sequence: Synthetic oligonucleotide
aaugguuuguagucuuacu

SEQ ID NO: 1117422 - RNA, 19 nt, Artificial Sequence
  Description of Artificial Sequence: Synthetic oligonucleotide
agucucuauaguuggugac

SEQ ID NO: 1117423 - RNA, 19 nt, Artificial Sequence
  Description of Artificial Sequence: Synthetic oligonucleotide
gauacaaggcaaaacgaac

SEQ ID NO: 1117424 - RNA, 19 nt, Artificial Sequence
  Description of Artificial Sequence: Synthetic oligonucleotide
cuugauugaaucagucuac

SEQ ID NO: 1117425 - RNA, 19 nt, Artificial Sequence
  Description of Artificial Sequence: Synthetic oligonucleotide
uguauacugguuauacuau

SEQ ID NO: 1117426 - RNA, 19 nt, Artificial Sequence
  Description of Artificial Sequence: Synthetic oligonucleotide
ugcaacguacuuuggaucu

SEQ ID NO: 1117427 - RNA, 19 nt, Artificial Sequence
  Description of Artificial Sequence: Synthetic oligonucleotide
uucugauaccauuaaagua

SEQ ID NO: 1117428 - RNA, 19 nt, Artificial Sequence
  Description of Artificial Sequence: Synthetic oligonucleotide
uguagaucaagagaacgcu

SEQ ID NO: 1117429 - RNA, 19 nt, Artificial Sequence
  Description of Artificial Sequence: Synthetic oligonucleotide
uugcguaaaggauuuauau

SEQ ID NO: 1117430 - RNA, 19 nt, Artificial Sequence
  Description of Artificial Sequence: Synthetic oligonucleotide
aacgaacacuauuaaaauu

SEQ ID NO: 1117431 - RNA, 19 nt, Artificial Sequence
  Description of Artificial Sequence: Synthetic oligonucleotide
uuaaaguuggagagaaaua

SEQ ID NO: 1117432 - RNA, 19 nt, Artificial Sequence
  Description of Artificial Sequence: Synthetic oligonucleotide
ggauauaggaauaggacag

SEQ ID NO: 1117433 - RNA, 19 nt, Artificial Sequence
  Description of Artificial Sequence: Synthetic oligonucleotide
aggaaauuacacgauauga

SEQ ID NO: 1117434 - RNA, 19 nt, Artificial Sequence
  Description of Artificial Sequence: Synthetic oligonucleotide
aaugacugguuuagucugc

SEQ ID NO: 1117435 - RNA, 19 nt, Artificial Sequence
  Description of Artificial Sequence: Synthetic oligonucleotide
uuauuuguuauagcacgag

SEQ ID NO: 1117436 - RNA, 19 nt, Artificial Sequence
  Description of Artificial Sequence: Synthetic oligonucleotide
uacaaggcaaaacgaacac

SEQ ID NO: 1117437 - RNA, 19 nt, Artificial Sequence
  Description of Artificial Sequence: Synthetic oligonucleotide
guuaagguaaguuccauua

SEQ ID NO: 1117438 - RNA, 19 nt, Artificial Sequence
  Description of Artificial Sequence: Synthetic oligonucleotide
caugacuagcccgagaccc

SEQ ID NO: 1117439 - RNA, 19 nt, Artificial Sequence
  Description of Artificial Sequence: Synthetic oligonucleotide
cuucguugacuuuaucugc

SEQ ID NO: 1117440 - RNA, 19 nt, Artificial Sequence
  Description of Artificial Sequence: Synthetic oligonucleotide
ugugaacuauuauuucagc

SEQ ID NO: 1117441 - RNA, 19 nt, Artificial Sequence
  Description of Artificial Sequence: Synthetic oligonucleotide
auacauugugugcuggaag

SEQ ID NO: 1117442 - RNA, 19 nt, Artificial Sequence
  Description of Artificial Sequence: Synthetic oligonucleotide
cucucugcggagaacaccc

SEQ ID NO: 1117443 - RNA, 19 nt, Artificial Sequence
  Description of Artificial Sequence: Synthetic oligonucleotide
auaaccaguauaaaugccu

SEQ ID NO: 1117444 - RNA, 19 nt, Artificial Sequence
  Description of Artificial Sequence: Synthetic oligonucleotide
uaucuugauugaaucaguc

SEQ ID NO: 1117445 - RNA, 19 nt, Artificial Sequence
  Description of Artificial Sequence: Synthetic oligonucleotide
auggguaaugguuuguagu

SEQ ID NO: 1117446 - RNA, 19 nt, Artificial Sequence
  Description of Artificial Sequence: Synthetic oligonucleotide
guuauagcacgagaaaggc

SEQ ID NO: 1117447 - RNA, 19 nt, Artificial Sequence
  Description of Artificial Sequence: Synthetic oligonucleotide
ggaaaugcgggguuuauug

SEQ ID NO: 1117448 - RNA, 19 nt, Artificial Sequence
  Description of Artificial Sequence: Synthetic oligonucleotide
uggguaaugguuuguaguc

SEQ ID NO: 1117449 - RNA, 19 nt, Artificial Sequence
  Description of Artificial Sequence: Synthetic oligonucleotide
uucuauaaucccguguggc

SEQ ID NO: 1117450 - RNA, 19 nt, Artificial Sequence
  Description of Artificial Sequence: Synthetic oligonucleotide
caaguaaugacugguuuag

SEQ ID NO: 1117451 - RNA, 19 nt, Artificial Sequence
  Description of Artificial Sequence: Synthetic oligonucleotide
uucuuaaucucaugucuga

SEQ ID NO: 1117452 - RNA, 19 nt, Artificial Sequence
  Description of Artificial Sequence: Synthetic oligonucleotide
aaagccugagaugguuacc

SEQ ID NO: 1117453 - RNA, 19 nt, Artificial Sequence
  Description of Artificial Sequence: Synthetic oligonucleotide
accaguauaaaugccuuag

SEQ ID NO: 1117454 - RNA, 19 nt, Artificial Sequence
  Description of Artificial Sequence: Synthetic oligonucleotide
uuauagcacgagaaaggca

SEQ ID NO: 1117455 - RNA, 19 nt, Artificial Sequence
  Description of Artificial Sequence: Synthetic oligonucleotide
uuaagguaaguuccauuaa

SEQ ID NO: 1117456 - RNA, 19 nt, Artificial Sequence
  Description of Artificial Sequence: Synthetic oligonucleotide
augcaacguacuuuggauc

SEQ ID NO: 1117457 - RNA, 19 nt, Artificial Sequence
  Description of Artificial Sequence: Synthetic oligonucleotide
uugucauuaccuuuaugaa

SEQ ID NO: 1117458 - RNA, 19 nt, Artificial Sequence
  Description of Artificial Sequence: Synthetic oligonucleotide
uccaauuagcugaaagcaa

SEQ ID NO: 1117459 - RNA, 19 nt, Artificial Sequence
  Description of Artificial Sequence: Synthetic oligonucleotide
caauuagcugaaagcaagc

SEQ ID NO: 1117460 - RNA, 19 nt, Artificial Sequence
  Description of Artificial Sequence: Synthetic oligonucleotide
agaaaauacaauaguucug

SEQ ID NO: 1117461 - RNA, 19 nt, Artificial Sequence
  Description of Artificial Sequence: Synthetic oligonucleotide
gaaaugcgggguuuauugc

SEQ ID NO: 1117462 - RNA, 19 nt, Artificial Sequence
  Description of Artificial Sequence: Synthetic oligonucleotide
aacugccgaaaacuuacga

SEQ ID NO: 1117463 - RNA, 19 nt, Artificial Sequence
  Description of Artificial Sequence: Synthetic oligonucleotide
gguagcaaaacaaccaaag

SEQ ID NO: 1117464 - RNA, 19 nt, Artificial Sequence
  Description of Artificial Sequence: Synthetic oligonucleotide
uagaucaagagaacgcuuu

SEQ ID NO: 1117465 - RNA, 19 nt, Artificial Sequence
  Description of Artificial Sequence: Synthetic oligonucleotide
acggcaagaaggauaacac

SEQ ID NO: 1117466 - RNA, 19 nt, Artificial Sequence
  Description of Artificial Sequence: Synthetic oligonucleotide
acgagaaaggcaguaggcg

SEQ ID NO: 1117467 - RNA, 19 nt, Artificial Sequence
  Description of Artificial Sequence: Synthetic oligonucleotide
aucuugauugaaucagucu

SEQ ID NO: 1117468 - RNA, 19 nt, Artificial Sequence
  Description of Artificial Sequence: Synthetic oligonucleotide
uaaugacagugccugugcc

SEQ ID NO: 1117469 - RNA, 19 nt, Artificial Sequence
  Description of Artificial Sequence: Synthetic oligonucleotide
acgaacacuauuaaaauua

SEQ ID NO: 1117470 - RNA, 19 nt, Artificial Sequence
  Description of Artificial Sequence: Synthetic oligonucleotide
uccagcuuacagcagcucu

SEQ ID NO: 1117471 - RNA, 19 nt, Artificial Sequence
  Description of Artificial Sequence: Synthetic oligonucleotide
guguauacugguuauacua

SEQ ID NO: 1117472 - RNA, 19 nt, Artificial Sequence
  Description of Artificial Sequence: Synthetic oligonucleotide
auuuguuauagcacgagaa

SEQ ID NO: 1117473 - RNA, 19 nt, Artificial Sequence
  Description of Artificial Sequence: Synthetic oligonucleotide
ugaugugaacuauuauuuc

SEQ ID NO: 1117474 - RNA, 19 nt, Artificial Sequence
  Description of Artificial Sequence: Synthetic oligonucleotide
ucaagcuaaucagaugucu

SEQ ID NO: 1117475 - RNA, 19 nt, Artificial Sequence
  Description of Artificial Sequence: Synthetic oligonucleotide
auuaagcaaaauguugaca

SEQ ID NO: 1117476 - RNA, 19 nt, Artificial Sequence
  Description of Artificial Sequence: Synthetic oligonucleotide
cacgagaaaggcaguaggc

SEQ ID NO: 1117477 - RNA, 19 nt, Artificial Sequence
  Description of Artificial Sequence: Synthetic oligonucleotide
aaguguagaucaagagaac

SEQ ID NO: 1117478 - RNA, 19 nt, Artificial Sequence
  Description of Artificial Sequence: Synthetic oligonucleotide
uuacaauuuacuagcucuu

SEQ ID NO: 1117479 - RNA, 19 nt, Artificial Sequence
  Description of Artificial Sequence: Synthetic oligonucleotide
gaguucccgaguuuccccg

SEQ ID NO: 1117480 - RNA, 19 nt, Artificial Sequence
  Description of Artificial Sequence: Synthetic oligonucleotide
acaaguaaugacugguuua

SEQ ID NO: 1117481 - RNA, 19 nt, Artificial Sequence
  Description of Artificial Sequence: Synthetic oligonucleotide
gaaauuccagcaacgacuc

SEQ ID NO: 1117482 - RNA, 19 nt, Artificial Sequence
  Description of Artificial Sequence: Synthetic oligonucleotide
uuuauuaaucaaggauaca

SEQ ID NO: 1117483 - RNA, 19 nt, Artificial Sequence
  Description of Artificial Sequence: Synthetic oligonucleotide
uuacacgauaugacucugc

SEQ ID NO: 1117484 - RNA, 19 nt, Artificial Sequence
  Description of Artificial Sequence: Synthetic oligonucleotide
cuaucagcagagacuaaug

SEQ ID NO: 1117485 - RNA, 19 nt, Artificial Sequence
  Description of Artificial Sequence: Synthetic oligonucleotide
ugcccaagagaauaaugac

SEQ ID NO: 1117486 - RNA, 19 nt, Artificial Sequence
  Description of Artificial Sequence: Synthetic oligonucleotide
aacgggcgaucacucgagc

SEQ ID NO: 1117487 - RNA, 19 nt, Artificial Sequence
  Description of Artificial Sequence: Synthetic oligonucleotide
ugcguaaaggauuuauauu

SEQ ID NO: 1117488 - RNA, 19 nt, Artificial Sequence
  Description of Artificial Sequence: Synthetic oligonucleotide
cuaaugauaggcaccaucu

SEQ ID NO: 1117489 - RNA, 19 nt, Artificial Sequence
  Description of Artificial Sequence: Synthetic oligonucleotide
auacaaggcaaaacgaaca

SEQ ID NO: 1117490 - RNA, 19 nt, Artificial Sequence
  Description of Artificial Sequence: Synthetic oligonucleotide
ggguuuauugcguaaagga

SEQ ID NO: 1117491 - RNA, 19 nt, Artificial Sequence
  Description of Artificial Sequence: Synthetic oligonucleotide
aagguaaguuccauuaaau

SEQ ID NO: 1117492 - RNA, 19 nt, Artificial Sequence
  Description of Artificial Sequence: Synthetic oligonucleotide
gggauauaggaauaggaca

SEQ ID NO: 1117493 - RNA, 19 nt, Artificial Sequence
  Description of Artificial Sequence: Synthetic oligonucleotide
agcaacgacucccauuucu

SEQ ID NO: 1117494 - RNA, 19 nt, Artificial Sequence
  Description of Artificial Sequence: Synthetic oligonucleotide
uacagggauauaggaauag

SEQ ID NO: 1117495 - RNA, 19 nt, Artificial Sequence
  Description of Artificial Sequence: Synthetic oligonucleotide
acgggcgaucacucgagcc

SEQ ID NO: 1117496 - RNA, 19 nt, Artificial Sequence
  Description of Artificial Sequence: Synthetic oligonucleotide
acugccgaaaacuuacgaa

SEQ ID NO: 1117497 - RNA, 19 nt, Artificial Sequence
  Description of Artificial Sequence: Synthetic oligonucleotide
cauggguaaugguuuguag

SEQ ID NO: 1117498 - RNA, 19 nt, Artificial Sequence
  Description of Artificial Sequence: Synthetic oligonucleotide
auaauugucauuaccuuua

SEQ ID NO: 1117499 - RNA, 19 nt, Artificial Sequence
  Description of Artificial Sequence: Synthetic oligonucleotide
aucuagcuagaguuaaggu

SEQ ID NO: 1117500 - RNA, 19 nt, Artificial Sequence
  Description of Artificial Sequence: Synthetic oligonucleotide
cacgauaugacucugccua

SEQ ID NO: 1117501 - RNA, 19 nt, Artificial Sequence
  Description of Artificial Sequence: Synthetic oligonucleotide
ggaaauuacacgauaugac

SEQ ID NO: 1117502 - RNA, 19 nt, Artificial Sequence
  Description of Artificial Sequence: Synthetic oligonucleotide
guguagaucaagagaacgc

SEQ ID NO: 1117503 - RNA, 19 nt, Artificial Sequence
  Description of Artificial Sequence: Synthetic oligonucleotide
aaugagcacaaaagggaca

SEQ ID NO: 1117504 - RNA, 19 nt, Artificial Sequence
  Description of Artificial Sequence: Synthetic oligonucleotide
uauugcguaaaggauuuau

SEQ ID NO: 1117505 - RNA, 19 nt, Artificial Sequence
  Description of Artificial Sequence: Synthetic oligonucleotide
aaaucuagcuagaguuaag

SEQ ID NO: 1117506 - RNA, 19 nt, Artificial Sequence
  Description of Artificial Sequence: Synthetic oligonucleotide
auaugacucugccuaucag

SEQ ID NO: 1117507 - RNA, 19 nt, Artificial Sequence
  Description of Artificial Sequence: Synthetic oligonucleotide
ucccguguggcauuguacu

SEQ ID NO: 1117508 - RNA, 19 nt, Artificial Sequence
  Description of Artificial Sequence: Synthetic oligonucleotide
auacauacauugugugcug

SEQ ID NO: 1117509 - RNA, 19 nt, Artificial Sequence
  Description of Artificial Sequence: Synthetic oligonucleotide
ucucuauaguuggugacac

SEQ ID NO: 1117510 - RNA, 19 nt, Artificial Sequence
  Description of Artificial Sequence: Synthetic oligonucleotide
acagggauauaggaauagg

SEQ ID NO: 1117511 - RNA, 19 nt, Artificial Sequence
  Description of Artificial Sequence: Synthetic oligonucleotide
agaaauaagcccgugugua

SEQ ID NO: 1117512 - RNA, 19 nt, Artificial Sequence
  Description of Artificial Sequence: Synthetic oligonucleotide
caucgcauacaguuucagc

SEQ ID NO: 1117513 - RNA, 19 nt, Artificial Sequence
  Description of Artificial Sequence: Synthetic oligonucleotide
cacaacaauacacaaauau

SEQ ID NO: 1117514 - RNA, 19 nt, Artificial Sequence
  Description of Artificial Sequence: Synthetic oligonucleotide
uaagcccguguguauacug

SEQ ID NO: 1117515 - RNA, 19 nt, Artificial Sequence
  Description of Artificial Sequence: Synthetic oligonucleotide
auaguucugauaccauuaa

SEQ ID NO: 1117516 - RNA, 19 nt, Artificial Sequence
  Description of Artificial Sequence: Synthetic oligonucleotide
ugacaguugaugugaacua

SEQ ID NO: 1117517 - RNA, 19 nt, Artificial Sequence
  Description of Artificial Sequence: Synthetic oligonucleotide
agguaaguuccauuaaauu

SEQ ID NO: 1117518 - RNA, 19 nt, Artificial Sequence
  Description of Artificial Sequence: Synthetic oligonucleotide
aagcaacuccaaaagaaau

SEQ ID NO: 1117519 - RNA, 19 nt, Artificial Sequence
  Description of Artificial Sequence: Synthetic oligonucleotide
uguagucuuacugcuuuac

SEQ ID NO: 1117520 - RNA, 19 nt, Artificial Sequence
  Description of Artificial Sequence: Synthetic oligonucleotide
cagggauauaggaauagga

SEQ ID NO: 1117521 - RNA, 19 nt, Artificial Sequence
  Description of Artificial Sequence: Synthetic oligonucleotide
ugauaggcaccaucugaug

SEQ ID NO: 1117522 - RNA, 19 nt, Artificial Sequence
  Description of Artificial Sequence: Synthetic oligonucleotide
uaggcgagaaagauuccaa

SEQ ID NO: 1117523 - RNA, 19 nt, Artificial Sequence
  Description of Artificial Sequence: Synthetic oligonucleotide
caggcgauguuaaagcuca

SEQ ID NO: 1117524 - RNA, 19 nt, Artificial Sequence
  Description of Artificial Sequence: Synthetic oligonucleotide
uucaagcuaaucagauguc

SEQ ID NO: 1117525 - RNA, 19 nt, Artificial Sequence
  Description of Artificial Sequence: Synthetic oligonucleotide
guacuuuggaucuugucua

SEQ ID NO: 1117526 - RNA, 19 nt, Artificial Sequence
  Description of Artificial Sequence: Synthetic oligonucleotide
aaauaagcccguguguaua

SEQ ID NO: 1117527 - RNA, 19 nt, Artificial Sequence
  Description of Artificial Sequence: Synthetic oligonucleotide
agggaggccaauuuucuau

SEQ ID NO: 1117528 - RNA, 19 nt, Artificial Sequence
  Description of Artificial Sequence: Synthetic oligonucleotide
ugccgaaaacuuacgaaua

SEQ ID NO: 1117529 - RNA, 19 nt, Artificial Sequence
  Description of Artificial Sequence: Synthetic oligonucleotide
aacgcuuuugaaacaagua

SEQ ID NO: 1117530 - RNA, 19 nt, Artificial Sequence
  Description of Artificial Sequence: Synthetic oligonucleotide
aaacugccgaaaacuuacg

SEQ ID NO: 1117531 - RNA, 19 nt, Artificial Sequence
  Description of Artificial Sequence: Synthetic oligonucleotide
uuuccccggaaacugccga

SEQ ID NO: 1117532 - RNA, 19 nt, Artificial Sequence
  Description of Artificial Sequence: Synthetic oligonucleotide
cuauaguuggugacaccac

SEQ ID NO: 1117533 - RNA, 19 nt, Artificial Sequence
  Description of Artificial Sequence: Synthetic oligonucleotide
uaccuuuaugaagcaaccc

SEQ ID NO: 1117534 - RNA, 19 nt, Artificial Sequence
  Description of Artificial Sequence: Synthetic oligonucleotide
aguuaagguaaguuccauu

SEQ ID NO: 1117535 - RNA, 19 nt, Artificial Sequence
  Description of Artificial Sequence: Synthetic oligonucleotide
ugccuaucagcagagacua

SEQ ID NO: 1117536 - RNA, 19 nt, Artificial Sequence
  Description of Artificial Sequence: Synthetic oligonucleotide
agugucagaaacaucgcau

SEQ ID NO: 1117537 - RNA, 19 nt, Artificial Sequence
  Description of Artificial Sequence: Synthetic oligonucleotide
aagcaacccucuucguuga

SEQ ID NO: 1117538 - RNA, 19 nt, Artificial Sequence
  Description of Artificial Sequence: Synthetic oligonucleotide
acauacauugugugcugga

SEQ ID NO: 1117539 - RNA, 19 nt, Artificial Sequence
  Description of Artificial Sequence: Synthetic oligonucleotide
uuacuagcucuuccagugu

SEQ ID NO: 1117540 - RNA, 19 nt, Artificial Sequence
  Description of Artificial Sequence: Synthetic oligonucleotide
uuauacaaucaagcccuca

SEQ ID NO: 1117541 - RNA, 19 nt, Artificial Sequence
  Description of Artificial Sequence: Synthetic oligonucleotide
acgacucccauuucugacu

SEQ ID NO: 1117542 - RNA, 19 nt, Artificial Sequence
  Description of Artificial Sequence: Synthetic oligonucleotide
caagcaacuccaaaagaaa

SEQ ID NO: 1117543 - RNA, 19 nt, Artificial Sequence
  Description of Artificial Sequence: Synthetic oligonucleotide
aaugcgggguuuauugcgu

SEQ ID NO: 1117544 - RNA, 19 nt, Artificial Sequence
  Description of Artificial Sequence: Synthetic oligonucleotide
agagaacgcuuuugaaaca

SEQ ID NO: 1117545 - RNA, 19 nt, Artificial Sequence
  Description of Artificial Sequence: Synthetic oligonucleotide
aaccaguauaaaugccuua

SEQ ID NO: 1117546 - RNA, 19 nt, Artificial Sequence
  Description of Artificial Sequence: Synthetic oligonucleotide
gugcccaagagaauaauga

SEQ ID NO: 1117547 - RNA, 19 nt, Artificial Sequence
  Description of Artificial Sequence: Synthetic oligonucleotide
gaaggauaacaccagugau

SEQ ID NO: 1117548 - RNA, 19 nt, Artificial Sequence
  Description of Artificial Sequence: Synthetic oligonucleotide
ucugcggagaacaccccuc

SEQ ID NO: 1117549 - RNA, 19 nt, Artificial Sequence
  Description of Artificial Sequence: Synthetic oligonucleotide
aggauacaaggcaaaacga

SEQ ID NO: 1117550 - RNA, 19 nt, Artificial Sequence
  Description of Artificial Sequence: Synthetic oligonucleotide
auauaggaauaggacagaa

SEQ ID NO: 1117551 - RNA, 19 nt, Artificial Sequence
  Description of Artificial Sequence: Synthetic oligonucleotide
agcugaaagcaagcaacuc

SEQ ID NO: 1117552 - RNA, 19 nt, Artificial Sequence
  Description of Artificial Sequence: Synthetic oligonucleotide
gauauaggaauaggacaga

SEQ ID NO: 1117553 - RNA, 19 nt, Artificial Sequence
  Description of Artificial Sequence: Synthetic oligonucleotide
auuacacgauaugacucug

SEQ ID NO: 1117554 - RNA, 19 nt, Artificial Sequence
  Description of Artificial Sequence: Synthetic oligonucleotide
auaucuugauugaaucagu

SEQ ID NO: 1117555 - RNA, 19 nt, Artificial Sequence
  Description of Artificial Sequence: Synthetic oligonucleotide
uugacuuuaucugcaucuc

SEQ ID NO: 1117556 - RNA, 19 nt, Artificial Sequence
  Description of Artificial Sequence: Synthetic oligonucleotide
guuucagcauccaugcaga

SEQ ID NO: 1117557 - RNA, 19 nt, Artificial Sequence
  Description of Artificial Sequence: Synthetic oligonucleotide
agaguuaagguaaguucca

SEQ ID NO: 1117558 - RNA, 19 nt, Artificial Sequence
  Description of Artificial Sequence: Synthetic oligonucleotide
gagaaauaagcccgugugu

SEQ ID NO: 1117559 - RNA, 19 nt, Artificial Sequence
  Description of Artificial Sequence: Synthetic oligonucleotide
ucucucugcggagaacacc

SEQ ID NO: 1117560 - RNA, 19 nt, Artificial Sequence
  Description of Artificial Sequence: Synthetic oligonucleotide
uauaaucccguguggcauu

SEQ ID NO: 1117561 - RNA, 19 nt, Artificial Sequence
  Description of Artificial Sequence: Synthetic oligonucleotide
acacgauaugacucugccu

SEQ ID NO: 1117562 - RNA, 19 nt, Artificial Sequence
  Description of Artificial Sequence: Synthetic oligonucleotide
guagucuuacugcuuuaca

SEQ ID NO: 1117563 - RNA, 19 nt, Artificial Sequence
  Description of Artificial Sequence: Synthetic oligonucleotide
ccuuuaugaagcaacccuc

SEQ ID NO: 1117564 - RNA, 19 nt, Artificial Sequence
  Description of Artificial Sequence: Synthetic oligonucleotide
agcacgagaaaggcaguag

SEQ ID NO: 1117565 - RNA, 19 nt, Artificial Sequence
  Description of Artificial Sequence: Synthetic oligonucleotide
uccgcaacgggcgaucacu

SEQ ID NO: 1117566 - RNA, 19 nt, Artificial Sequence
  Description of Artificial Sequence: Synthetic oligonucleotide
aguucccgaguuuccccgg

SEQ ID NO: 1117567 - RNA, 19 nt, Artificial Sequence
  Description of Artificial Sequence: Synthetic oligonucleotide
cucgacagguagcaaaaca

SEQ ID NO: 1117568 - RNA, 19 nt, Artificial Sequence
  Description of Artificial Sequence: Synthetic oligonucleotide
aaguaaugacugguuuagu

SEQ ID NO: 1117569 - RNA, 19 nt, Artificial Sequence
  Description of Artificial Sequence: Synthetic oligonucleotide
aggccaauuuucuaucaua

SEQ ID NO: 1117570 - RNA, 19 nt, Artificial Sequence
  Description of Artificial Sequence: Synthetic oligonucleotide
gggguuuauugcguaaagg

SEQ ID NO: 1117571 - RNA, 19 nt, Artificial Sequence
  Description of Artificial Sequence: Synthetic oligonucleotide
aguaggcgagaaagauucc

SEQ ID NO: 1117572 - RNA, 19 nt, Artificial Sequence
  Description of Artificial Sequence: Synthetic oligonucleotide
gagaacgcuuuugaaacaa

SEQ ID NO: 1117573 - RNA, 19 nt, Artificial Sequence
  Description of Artificial Sequence: Synthetic oligonucleotide
agaggcucgacagguagca

SEQ ID NO: 1117574 - RNA, 19 nt, Artificial Sequence
  Description of Artificial Sequence: Synthetic oligonucleotide
auggggacgccaugacuag

SEQ ID NO: 1117575 - RNA, 19 nt, Artificial Sequence
  Description of Artificial Sequence: Synthetic oligonucleotide
agucuacugcuguaguuuu

SEQ ID NO: 1117576 - RNA, 19 nt, Artificial Sequence
  Description of Artificial Sequence: Synthetic oligonucleotide
acaccccuccagcuuacag

SEQ ID NO: 1117577 - RNA, 19 nt, Artificial Sequence
  Description of Artificial Sequence: Synthetic oligonucleotide
ggcaaaacgaacacuauua

SEQ ID NO: 1117578 - RNA, 19 nt, Artificial Sequence
  Description of Artificial Sequence: Synthetic oligonucleotide
ugacucuauaauugucauu

SEQ ID NO: 1117579 - RNA, 19 nt, Artificial Sequence
  Description of Artificial Sequence: Synthetic oligonucleotide
gcguaaaggauuuauauuu

SEQ ID NO: 1117580 - RNA, 19 nt, Artificial Sequence
  Description of Artificial Sequence: Synthetic oligonucleotide
gaaucagucuacugcugua

SEQ ID NO: 1117581 - RNA, 19 nt, Artificial Sequence
  Description of Artificial Sequence: Synthetic oligonucleotide
guaggcgagaaagauucca

SEQ ID NO: 1117582 - RNA, 19 nt, Artificial Sequence
  Description of Artificial Sequence: Synthetic oligonucleotide
caacgggcgaucacucgag

SEQ ID NO: 1117583 - RNA, 19 nt, Artificial Sequence
  Description of Artificial Sequence: Synthetic oligonucleotide
augucugucuccagccagg

SEQ ID NO: 1117584 - RNA, 19 nt, Artificial Sequence
  Description of Artificial Sequence: Synthetic oligonucleotide
agcaacuccaaaagaaauu

SEQ ID NO: 1117585 - RNA, 19 nt, Artificial Sequence
  Description of Artificial Sequence: Synthetic oligonucleotide
cagucucuauaguugguga

SEQ ID NO: 1117586 - RNA, 19 nt, Artificial Sequence
  Description of Artificial Sequence: Synthetic oligonucleotide
acaucgcauacaguuucag

SEQ ID NO: 1117587 - RNA, 19 nt, Artificial Sequence
  Description of Artificial Sequence: Synthetic oligonucleotide
ugauaccauuaaaguaaua

SEQ ID NO: 1117588 - RNA, 19 nt, Artificial Sequence
  Description of Artificial Sequence: Synthetic oligonucleotide
gaaauaagcccguguguau

SEQ ID NO: 1117589 - RNA, 19 nt, Artificial Sequence
  Description of Artificial Sequence: Synthetic oligonucleotide
cugcggagaacaccccucc

SEQ ID NO: 1117590 - RNA, 19 nt, Artificial Sequence
  Description of Artificial Sequence: Synthetic oligonucleotide
cucgagccagccaggcacg

SEQ ID NO: 1117591 - RNA, 19 nt, Artificial Sequence
  Description of Artificial Sequence: Synthetic oligonucleotide
auugcguaaaggauuuaua

SEQ ID NO: 1117592 - RNA, 19 nt, Artificial Sequence
  Description of Artificial Sequence: Synthetic oligonucleotide
uccagcaacgacucccauu

SEQ ID NO: 1117593 - RNA, 19 nt, Artificial Sequence
  Description of Artificial Sequence: Synthetic oligonucleotide
gcgauguuaaagcucacaa

SEQ ID NO: 1117594 - RNA, 19 nt, Artificial Sequence
  Description of Artificial Sequence: Synthetic oligonucleotide
agaacgcuuuugaaacaag

SEQ ID NO: 1117595 - RNA, 19 nt, Artificial Sequence
  Description of Artificial Sequence: Synthetic oligonucleotide
gcgagaaagauuccaauua

SEQ ID NO: 1117596 - RNA, 19 nt, Artificial Sequence
  Description of Artificial Sequence: Synthetic oligonucleotide
acgagcuggaaggaaauua

SEQ ID NO: 1117597 - RNA, 19 nt, Artificial Sequence
  Description of Artificial Sequence: Synthetic oligonucleotide
cuauaauugucauuaccuu

SEQ ID NO: 1117598 - RNA, 19 nt, Artificial Sequence
  Description of Artificial Sequence: Synthetic oligonucleotide
gaacgcuuuugaaacaagu

SEQ ID NO: 1117599 - RNA, 19 nt, Artificial Sequence
  Description of Artificial Sequence: Synthetic oligonucleotide
caacguacuuuggaucuug

SEQ ID NO: 1117600 - RNA, 19 nt, Artificial Sequence
  Description of Artificial Sequence: Synthetic oligonucleotide
ucucugcggagaacacccc

SEQ ID NO: 1117601 - RNA, 19 nt, Artificial Sequence
  Description of Artificial Sequence: Synthetic oligonucleotide
ggacgccaugacuagcccg

SEQ ID NO: 1117602 - RNA, 19 nt, Artificial Sequence
  Description of Artificial Sequence: Synthetic oligonucleotide
ggauacaaggcaaaacgaa

SEQ ID NO: 1117603 - RNA, 19 nt, Artificial Sequence
  Description of Artificial Sequence: Synthetic oligonucleotide
auaaucccguguggcauug

SEQ ID NO: 1117604 - RNA, 19 nt, Artificial Sequence
  Description of Artificial Sequence: Synthetic oligonucleotide
cugccgaaaacuuacgaau

SEQ ID NO: 1117605 - RNA, 19 nt, Artificial Sequence
  Description of Artificial Sequence: Synthetic oligonucleotide
augccaacggcaagaagga

SEQ ID NO: 1117606 - RNA, 19 nt, Artificial Sequence
  Description of Artificial Sequence: Synthetic oligonucleotide
aacguacuuuggaucuugu

SEQ ID NO: 1117607 - RNA, 19 nt, Artificial Sequence
  Description of Artificial Sequence: Synthetic oligonucleotide
ugcggagaacaccccucca

SEQ ID NO: 1117608 - RNA, 19 nt, Artificial Sequence
  Description of Artificial Sequence: Synthetic oligonucleotide
augacgagcuggaaggaaa

SEQ ID NO: 1117609 - RNA, 19 nt, Artificial Sequence
  Description of Artificial Sequence: Synthetic oligonucleotide
agcaacccucuucguugac

SEQ ID NO: 1117610 - RNA, 19 nt, Artificial Sequence
  Description of Artificial Sequence: Synthetic oligonucleotide
cacaacaaugcaacguacu

SEQ ID NO: 1117611 - RNA, 19 nt, Artificial Sequence
  Description of Artificial Sequence: Synthetic oligonucleotide
acgauaugacucugccuau

SEQ ID NO: 1117612 - RNA, 19 nt, Artificial Sequence
  Description of Artificial Sequence: Synthetic oligonucleotide
ggugcccaagagaauaaug

SEQ ID NO: 1117613 - RNA, 19 nt, Artificial Sequence
  Description of Artificial Sequence: Synthetic oligonucleotide
ucccgaguuuccccggaaa

SEQ ID NO: 1117614 - RNA, 19 nt, Artificial Sequence
  Description of Artificial Sequence: Synthetic oligonucleotide
acuuuggaucuugucuaca

SEQ ID NO: 1117615 - RNA, 19 nt, Artificial Sequence
  Description of Artificial Sequence: Synthetic oligonucleotide
auggcagcaacuaguucga

SEQ ID NO: 1117616 - RNA, 19 nt, Artificial Sequence
  Description of Artificial Sequence: Synthetic oligonucleotide
gaugacgagcuggaaggaa

SEQ ID NO: 1117617 - RNA, 19 nt, Artificial Sequence
  Description of Artificial Sequence: Synthetic oligonucleotide
cugagaugguuaccaccac

SEQ ID NO: 1117618 - RNA, 19 nt, Artificial Sequence
  Description of Artificial Sequence: Synthetic oligonucleotide
ugcgggguuuauugcguaa

SEQ ID NO: 1117619 - RNA, 19 nt, Artificial Sequence
  Description of Artificial Sequence: Synthetic oligonucleotide
gacccugcgccuccgcaac

SEQ ID NO: 1117620 - RNA, 19 nt, Artificial Sequence
  Description of Artificial Sequence: Synthetic oligonucleotide
aucacucgagccagccagg

SEQ ID NO: 1117621 - RNA, 19 nt, Artificial Sequence
  Description of Artificial Sequence: Synthetic oligonucleotide
uagaggaaaugcgggguuu

SEQ ID NO: 1117622 - RNA, 19 nt, Artificial Sequence
  Description of Artificial Sequence: Synthetic oligonucleotide
cagugauccaaaagaugaa

SEQ ID NO: 1117623 - RNA, 19 nt, Artificial Sequence
  Description of Artificial Sequence: Synthetic oligonucleotide
ccaacggcaagaaggauaa

SEQ ID NO: 1117624 - RNA, 19 nt, Artificial Sequence
  Description of Artificial Sequence: Synthetic oligonucleotide
gaaacaucgcauacaguuu

SEQ ID NO: 1117625 - RNA, 19 nt, Artificial Sequence
  Description of Artificial Sequence: Synthetic oligonucleotide
gcaacgacucccauuucug

SEQ ID NO: 1117626 - RNA, 19 nt, Artificial Sequence
  Description of Artificial Sequence: Synthetic oligonucleotide
uagcacgagaaaggcagua

SEQ ID NO: 1117627 - RNA, 19 nt, Artificial Sequence
  Description of Artificial Sequence: Synthetic oligonucleotide
uuccccggaaacugccgaa

SEQ ID NO: 1117628 - RNA, 19 nt, Artificial Sequence
  Description of Artificial Sequence: Synthetic oligonucleotide
auaagcccguguguauacu

SEQ ID NO: 1117629 - RNA, 19 nt, Artificial Sequence
  Description of Artificial Sequence: Synthetic oligonucleotide
agacccugcgccuccgcaa

SEQ ID NO: 1117630 - RNA, 19 nt, Artificial Sequence
  Description of Artificial Sequence: Synthetic oligonucleotide
cugacucuauaauugucau

SEQ ID NO: 1117631 - RNA, 19 nt, Artificial Sequence
  Description of Artificial Sequence: Synthetic oligonucleotide
gagacccugcgccuccgca

SEQ ID NO: 1117632 - RNA, 19 nt, Artificial Sequence
  Description of Artificial Sequence: Synthetic oligonucleotide
gcaacgggcgaucacucga

SEQ ID NO: 1117633 - RNA, 19 nt, Artificial Sequence
  Description of Artificial Sequence: Synthetic oligonucleotide
ccaggcgauguuaaagcuc

SEQ ID NO: 1117634 - RNA, 19 nt, Artificial Sequence
  Description of Artificial Sequence: Synthetic oligonucleotide
gggaggccaauuuucuauc

SEQ ID NO: 1117635 - RNA, 19 nt, Artificial Sequence
  Description of Artificial Sequence: Synthetic oligonucleotide
ggggacgccaugacuagcc

SEQ ID NO: 1117636 - RNA, 19 nt, Artificial Sequence
  Description of Artificial Sequence: Synthetic oligonucleotide
aguuauucuuaaagcuguu

SEQ ID NO: 1117637 - RNA, 19 nt, Artificial Sequence
  Description of Artificial Sequence: Synthetic oligonucleotide
gcuaaucagaugucugucu

SEQ ID NO: 1117638 - RNA, 19 nt, Artificial Sequence
  Description of Artificial Sequence: Synthetic oligonucleotide
agaggaaaugcgggguuua

SEQ ID NO: 1117639 - RNA, 19 nt, Artificial Sequence
  Description of Artificial Sequence: Synthetic oligonucleotide
cugauaccauuaaaguaau

SEQ ID NO: 1117640 - RNA, 19 nt, Artificial Sequence
  Description of Artificial Sequence: Synthetic oligonucleotide
cagagacuaaugaagcauu

SEQ ID NO: 1117641 - RNA, 19 nt, Artificial Sequence
  Description of Artificial Sequence: Synthetic oligonucleotide
ccagucucuauaguuggug

SEQ ID NO: 1117642 - RNA, 19 nt, Artificial Sequence
  Description of Artificial Sequence: Synthetic oligonucleotide
auagcacgagaaaggcagu

SEQ ID NO: 1117643 - RNA, 19 nt, Artificial Sequence
  Description of Artificial Sequence: Synthetic oligonucleotide
cacuucuauaaucccgugu

SEQ ID NO: 1117644 - RNA, 19 nt, Artificial Sequence
  Description of Artificial Sequence: Synthetic oligonucleotide
cuauaaucccguguggcau

SEQ ID NO: 1117645 - RNA, 19 nt, Artificial Sequence
  Description of Artificial Sequence: Synthetic oligonucleotide
uggggacgccaugacuagc

SEQ ID NO: 1117646 - RNA, 19 nt, Artificial Sequence
  Description of Artificial Sequence: Synthetic oligonucleotide
cggcaagaaggauaacacc

SEQ ID NO: 1117647 - RNA, 19 nt, Artificial Sequence
  Description of Artificial Sequence: Synthetic oligonucleotide
ccguguggcauuguacucc

SEQ ID NO: 1117648 - RNA, 19 nt, Artificial Sequence
  Description of Artificial Sequence: Synthetic oligonucleotide
uuauugcguaaaggauuua

SEQ ID NO: 1117649 - RNA, 19 nt, Artificial Sequence
  Description of Artificial Sequence: Synthetic oligonucleotide
uccccggaaacugccgaaa

SEQ ID NO: 1117650 - RNA, 19 nt, Artificial Sequence
  Description of Artificial Sequence: Synthetic oligonucleotide
ccuuaguuuggagacaaaa

SEQ ID NO: 1117651 - RNA, 19 nt, Artificial Sequence
  Description of Artificial Sequence: Synthetic oligonucleotide
gagacuaaugaagcauuuu

SEQ ID NO: 1117652 - RNA, 19 nt, Artificial Sequence
  Description of Artificial Sequence: Synthetic oligonucleotide
agcccgagacccugcgccu

SEQ ID NO: 1117653 - RNA, 19 nt, Artificial Sequence
  Description of Artificial Sequence: Synthetic oligonucleotide
caccacaacaaugcaacgu

SEQ ID NO: 1117654 - RNA, 19 nt, Artificial Sequence
  Description of Artificial Sequence: Synthetic oligonucleotide
ggaaacugccgaaaacuua

SEQ ID NO: 1117655 - RNA, 19 nt, Artificial Sequence
  Description of Artificial Sequence: Synthetic oligonucleotide
cccgaguuuccccggaaac

SEQ ID NO: 1117656 - RNA, 19 nt, Artificial Sequence
  Description of Artificial Sequence: Synthetic oligonucleotide
ccaugacuagcccgagacc

SEQ ID NO: 1117657 - RNA, 19 nt, Artificial Sequence
  Description of Artificial Sequence: Synthetic oligonucleotide
ggcgauguuaaagcucaca

SEQ ID NO: 1117658 - RNA, 19 nt, Artificial Sequence
  Description of Artificial Sequence: Synthetic oligonucleotide
aacaccccuccagcuuaca

SEQ ID NO: 1117659 - RNA, 19 nt, Artificial Sequence
  Description of Artificial Sequence: Synthetic oligonucleotide
ccuacaauggcagcaacua

SEQ ID NO: 1117660 - RNA, 19 nt, Artificial Sequence
  Description of Artificial Sequence: Synthetic oligonucleotide
ggcgagaaagauuccaauu

SEQ ID NO: 1117661 - RNA, 19 nt, Artificial Sequence
  Description of Artificial Sequence: Synthetic oligonucleotide
gaacaccccuccagcuuac

SEQ ID NO: 1117662 - RNA, 19 nt, Artificial Sequence
  Description of Artificial Sequence: Synthetic oligonucleotide
gaguuaagguaaguuccau

SEQ ID NO: 1117663 - RNA, 19 nt, Artificial Sequence
  Description of Artificial Sequence: Synthetic oligonucleotide
augcgggguuuauugcgua

SEQ ID NO: 1117664 - RNA, 19 nt, Artificial Sequence
  Description of Artificial Sequence: Synthetic oligonucleotide
gggcgaucacucgagccag

SEQ ID NO: 1117665 - RNA, 19 nt, Artificial Sequence
  Description of Artificial Sequence: Synthetic oligonucleotide
cccggaaacugccgaaaac

SEQ ID NO: 1117666 - RNA, 19 nt, Artificial Sequence
  Description of Artificial Sequence: Synthetic oligonucleotide
gggacgccaugacuagccc

SEQ ID NO: 1117667 - RNA, 19 nt, Artificial Sequence
  Description of Artificial Sequence: Synthetic oligonucleotide
gcuagaguuaagguaaguu

SEQ ID NO: 1117668 - RNA, 19 nt, Artificial Sequence
  Description of Artificial Sequence: Synthetic oligonucleotide
guagaucaagagaacgcuu

SEQ ID NO: 1117669 - RNA, 19 nt, Artificial Sequence
  Description of Artificial Sequence: Synthetic oligonucleotide
aggcgauguuaaagcucac

SEQ ID NO: 1117670 - RNA, 19 nt, Artificial Sequence
  Description of Artificial Sequence: Synthetic oligonucleotide
cgaacacuauuaaaauuaa

SEQ ID NO: 1117671 - RNA, 19 nt, Artificial Sequence
  Description of Artificial Sequence: Synthetic oligonucleotide
gccaacggcaagaaggaua

SEQ ID NO: 1117672 - RNA, 19 nt, Artificial Sequence
  Description of Artificial Sequence: Synthetic oligonucleotide
cuccgcaacgggcgaucac

SEQ ID NO: 1117673 - RNA, 19 nt, Artificial Sequence
  Description of Artificial Sequence: Synthetic oligonucleotide
cauccaugcagaggcucga

SEQ ID NO: 1117674 - RNA, 19 nt, Artificial Sequence
  Description of Artificial Sequence: Synthetic oligonucleotide
aggcaccaucugaugacga

SEQ ID NO: 1117675 - RNA, 19 nt, Artificial Sequence
  Description of Artificial Sequence: Synthetic oligonucleotide
gccgaaaacuuacgaauau

SEQ ID NO: 1117676 - RNA, 19 nt, Artificial Sequence
  Description of Artificial Sequence: Synthetic oligonucleotide
ggcucgacagguagcaaaa

SEQ ID NO: 1117677 - RNA, 19 nt, Artificial Sequence
  Description of Artificial Sequence: Synthetic oligonucleotide
ucaagcccucagggaggcc

SEQ ID NO: 1117678 - RNA, 19 nt, Artificial Sequence
  Description of Artificial Sequence: Synthetic oligonucleotide
uggcagcaacuaguucgac

SEQ ID NO: 1117679 - RNA, 19 nt, Artificial Sequence
  Description of Artificial Sequence: Synthetic oligonucleotide
ggauaacaccagugaucca

SEQ ID NO: 1117680 - RNA, 19 nt, Artificial Sequence
  Description of Artificial Sequence: Synthetic oligonucleotide
cucugcggagaacaccccu

SEQ ID NO: 1117681 - RNA, 19 nt, Artificial Sequence
  Description of Artificial Sequence: Synthetic oligonucleotide
caggcacgggaguucccga

SEQ ID NO: 1117682 - RNA, 19 nt, Artificial Sequence
  Description of Artificial Sequence: Synthetic oligonucleotide
ccggaaacugccgaaaacu

SEQ ID NO: 1117683 - RNA, 19 nt, Artificial Sequence
  Description of Artificial Sequence: Synthetic oligonucleotide
cccguguggcauuguacuc

SEQ ID NO: 1117684 - RNA, 19 nt, Artificial Sequence
  Description of Artificial Sequence: Synthetic oligonucleotide
cccguguguauacugguua

SEQ ID NO: 1117685 - RNA, 19 nt, Artificial Sequence
  Description of Artificial Sequence: Synthetic oligonucleotide
cgcaacgggcgaucacucg

SEQ ID NO: 1117686 - RNA, 19 nt, Artificial Sequence
  Description of Artificial Sequence: Synthetic oligonucleotide
gccaggcgauguuaaagcu

SEQ ID NO: 1117687 - RNA, 19 nt, Artificial Sequence
  Description of Artificial Sequence: Synthetic oligonucleotide
cuccgagauggggacgcca

SEQ ID NO: 1117688 - RNA, 19 nt, Artificial Sequence
  Description of Artificial Sequence: Synthetic oligonucleotide
caacggcaagaaggauaac

SEQ ID NO: 1117689 - RNA, 19 nt, Artificial Sequence
  Description of Artificial Sequence: Synthetic oligonucleotide
ccuaucagcagagacuaau

SEQ ID NO: 1117690 - RNA, 19 nt, Artificial Sequence
  Description of Artificial Sequence: Synthetic oligonucleotide
gcucgacagguagcaaaac

SEQ ID NO: 1117691 - RNA, 19 nt, Artificial Sequence
  Description of Artificial Sequence: Synthetic oligonucleotide
gaggcucgacagguagcaa

SEQ ID NO: 1117692 - RNA, 19 nt, Artificial Sequence
  Description of Artificial Sequence: Synthetic oligonucleotide
cgggcgaucacucgagcca

SEQ ID NO: 1117693 - RNA, 19 nt, Artificial Sequence
  Description of Artificial Sequence: Synthetic oligonucleotide
gcgggguuuauugcguaaa

SEQ ID NO: 1117694 - RNA, 19 nt, Artificial Sequence
  Description of Artificial Sequence: Synthetic oligonucleotide
ccgcaacgggcgaucacuc

SEQ ID NO: 1117695 - RNA, 19 nt, Artificial Sequence
  Description of Artificial Sequence: Synthetic oligonucleotide
gcaacccucuucguugacu

SEQ ID NO: 1117696 - RNA, 19 nt, Artificial Sequence
  Description of Artificial Sequence: Synthetic oligonucleotide
ggcgaucacucgagccagc

SEQ ID NO: 1117697 - RNA, 19 nt, Artificial Sequence
  Description of Artificial Sequence: Synthetic oligonucleotide
ccagcuuacagcagcucuu

SEQ ID NO: 1117698 - RNA, 19 nt, Artificial Sequence
  Description of Artificial Sequence: Synthetic oligonucleotide
ccguguguauacugguuau

SEQ ID NO: 1117699 - RNA, 19 nt, Artificial Sequence
  Description of Artificial Sequence: Synthetic oligonucleotide
ccagccaggcgauguuaaa

SEQ ID NO: 1117700 - RNA, 19 nt, Artificial Sequence
  Description of Artificial Sequence: Synthetic oligonucleotide
ccgaguuuccccggaaacu

SEQ ID NO: 1117701 - RNA, 19 nt, Artificial Sequence
  Description of Artificial Sequence: Synthetic oligonucleotide
ccccggaaacugccgaaaa

SEQ ID NO: 1117702 - RNA, 19 nt, Artificial Sequence
  Description of Artificial Sequence: Synthetic oligonucleotide
gccuccgcaacgggcgauc

SEQ ID NO: 1117703 - RNA, 19 nt, Artificial Sequence
  Description of Artificial Sequence: Synthetic oligonucleotide
ccgagacccugcgccuccg

SEQ ID NO: 1117704 - RNA, 19 nt, Artificial Sequence
  Description of Artificial Sequence: Synthetic oligonucleotide
cguguguauacugguuaua

SEQ ID NO: 1117705 - RNA, 19 nt, Artificial Sequence
  Description of Artificial Sequence: Synthetic oligonucleotide
gccuuaguuuggagacaaa

SEQ ID NO: 1117706 - RNA, 19 nt, Artificial Sequence
  Description of Artificial Sequence: Synthetic oligonucleotide
gcaacguacuuuggaucuu

SEQ ID NO: 1117707 - RNA, 19 nt, Artificial Sequence
  Description of Artificial Sequence: Synthetic oligonucleotide
gcccgagacccugcgccuc

SEQ ID NO: 1117708 - RNA, 19 nt, Artificial Sequence
  Description of Artificial Sequence: Synthetic oligonucleotide
ccuccgcaacgggcgauca

SEQ ID NO: 1117709 - RNA, 19 nt, Artificial Sequence
  Description of Artificial Sequence: Synthetic oligonucleotide
cgccaugacuagcccgaga

SEQ ID NO: 1117710 - RNA, 19 nt, Artificial Sequence
  Description of Artificial Sequence: Synthetic oligonucleotide
cgccuccgcaacgggcgau

SEQ ID NO: 1117711 - RNA, 19 nt, Artificial Sequence
  Description of Artificial Sequence: Synthetic oligonucleotide
gaaauuaacagcaagaucc

SEQ ID NO: 1117712 - RNA, 19 nt, Artificial Sequence
  Description of Artificial Sequence: Synthetic oligonucleotide
aauguuaaaggugagccac

SEQ ID NO: 1117713 - RNA, 19 nt, Artificial Sequence
  Description of Artificial Sequence: Synthetic oligonucleotide
aaagaauguauggacaccc

SEQ ID NO: 1117714 - RNA, 19 nt, Artificial Sequence
  Description of Artificial Sequence: Synthetic oligonucleotide
augagaauacaguaguagc

SEQ ID NO: 1117715 - RNA, 19 nt, Artificial Sequence
  Description of Artificial Sequence: Synthetic oligonucleotide
uauuacagagaauacuagg

SEQ ID NO: 1117716 - RNA, 19 nt, Artificial Sequence
  Description of Artificial Sequence: Synthetic oligonucleotide
aacuugugaugauuugucc

SEQ ID NO: 1117717 - RNA, 19 nt, Artificial Sequence
  Description of Artificial Sequence: Synthetic oligonucleotide
uuagaugugaucugaacca

SEQ ID NO: 1117718 - RNA, 19 nt, Artificial Sequence
  Description of Artificial Sequence: Synthetic oligonucleotide
uguauuguauacauccaag

SEQ ID NO: 1117719 - RNA, 19 nt, Artificial Sequence
  Description of Artificial Sequence: Synthetic oligonucleotide
uuguauucgacccaccgag

SEQ ID NO: 1117720 - RNA, 19 nt, Artificial Sequence
  Description of Artificial Sequence: Synthetic oligonucleotide
uugaagacgcaucacaagc

SEQ ID NO: 1117721 - RNA, 19 nt, Artificial Sequence
  Description of Artificial Sequence: Synthetic oligonucleotide
ucggcaacaggacaaauag

SEQ ID NO: 1117722 - RNA, 19 nt, Artificial Sequence
  Description of Artificial Sequence: Synthetic oligonucleotide
uuaacagcaagauccaaug

SEQ ID NO: 1117723 - RNA, 19 nt, Artificial Sequence
  Description of Artificial Sequence: Synthetic oligonucleotide
aaugcaauguccauuggag

SEQ ID NO: 1117724 - RNA, 19 nt, Artificial Sequence
  Description of Artificial Sequence: Synthetic oligonucleotide
auuaauauaauaaauggua

SEQ ID NO: 1117725 - RNA, 19 nt, Artificial Sequence
  Description of Artificial Sequence: Synthetic oligonucleotide
gauccaaugguucaaagga

SEQ ID NO: 1117726 - RNA, 19 nt, Artificial Sequence
  Description of Artificial Sequence: Synthetic oligonucleotide
uuuccuauuacagagaaua

SEQ ID NO: 1117727 - RNA, 19 nt, Artificial Sequence
  Description of Artificial Sequence: Synthetic oligonucleotide
guagccuggaaucauaucc

SEQ ID NO: 1117728 - RNA, 19 nt, Artificial Sequence
  Description of Artificial Sequence: Synthetic oligonucleotide
gauucuaagaaaacugucc

SEQ ID NO: 1117729 - RNA, 19 nt, Artificial Sequence
  Description of Artificial Sequence: Synthetic oligonucleotide
auuguauacauccaaguaa

SEQ ID NO: 1117730 - RNA, 19 nt, Artificial Sequence
  Description of Artificial Sequence: Synthetic oligonucleotide
ucuaagaaaacugucccag

SEQ ID NO: 1117731 - RNA, 19 nt, Artificial Sequence
  Description of Artificial Sequence: Synthetic oligonucleotide
uccauauuagaugugaucu

SEQ ID NO: 1117732 - RNA, 19 nt, Artificial Sequence
  Description of Artificial Sequence: Synthetic oligonucleotide
ugagaauacaguaguagcu

SEQ ID NO: 1117733 - RNA, 19 nt, Artificial Sequence
  Description of Artificial Sequence: Synthetic oligonucleotide
cuaagaaucggcaacagga

SEQ ID NO: 1117734 - RNA, 19 nt, Artificial Sequence
  Description of Artificial Sequence: Synthetic oligonucleotide
ugucaugagaauacaguag

SEQ ID NO: 1117735 - RNA, 19 nt, Artificial Sequence
  Description of Artificial Sequence: Synthetic oligonucleotide
aucgcuaacaggcuccacc

SEQ ID NO: 1117736 - RNA, 19 nt, Artificial Sequence
  Description of Artificial Sequence: Synthetic oligonucleotide
auaugacacuguuaauucc

SEQ ID NO: 1117737 - RNA, 19 nt, Artificial Sequence
  Description of Artificial Sequence: Synthetic oligonucleotide
uucaaugcgucccacacac

SEQ ID NO: 1117738 - RNA, 19 nt, Artificial Sequence
  Description of Artificial Sequence: Synthetic oligonucleotide
cauaguuuccagauggggc

SEQ ID NO: 1117739 - RNA, 19 nt, Artificial Sequence
  Description of Artificial Sequence: Synthetic oligonucleotide
uucaagucaggacucagug

SEQ ID NO: 1117740 - RNA, 19 nt, Artificial Sequence
  Description of Artificial Sequence: Synthetic oligonucleotide
ucuaagaaucggcaacagg

SEQ ID NO: 1117741 - RNA, 19 nt, Artificial Sequence
  Description of Artificial Sequence: Synthetic oligonucleotide
uccauuggagaacagaaaa

SEQ ID NO: 1117742 - RNA, 19 nt, Artificial Sequence
  Description of Artificial Sequence: Synthetic oligonucleotide
aacccacaaaggcagcacc

SEQ ID NO: 1117743 - RNA, 19 nt, Artificial Sequence
  Description of Artificial Sequence: Synthetic oligonucleotide
ucaucuaagaaucggcaac

SEQ ID NO: 1117744 - RNA, 19 nt, Artificial Sequence
  Description of Artificial Sequence: Synthetic oligonucleotide
aucacuuagauuccuagca

SEQ ID NO: 1117745 - RNA, 19 nt, Artificial Sequence
  Description of Artificial Sequence: Synthetic oligonucleotide
caagucaggacucagugag

SEQ ID NO: 1117746 - RNA, 19 nt, Artificial Sequence
  Description of Artificial Sequence: Synthetic oligonucleotide
aagacgugccaguugagug

SEQ ID NO: 1117747 - RNA, 19 nt, Artificial Sequence
  Description of Artificial Sequence: Synthetic oligonucleotide
aaauguuaaaggugagcca

SEQ ID NO: 1117748 - RNA, 19 nt, Artificial Sequence
  Description of Artificial Sequence: Synthetic oligonucleotide
agacucaucacaucacccg

SEQ ID NO: 1117749 - RNA, 19 nt, Artificial Sequence
  Description of Artificial Sequence: Synthetic oligonucleotide
aggacaaauagccugugug

SEQ ID NO: 1117750 - RNA, 19 nt, Artificial Sequence
  Description of Artificial Sequence: Synthetic oligonucleotide
aguacauucuacaaacuag

SEQ ID NO: 1117751 - RNA, 19 nt, Artificial Sequence
  Description of Artificial Sequence: Synthetic oligonucleotide
uccagaauaugaaauuaac

SEQ ID NO: 1117752 - RNA, 19 nt, Artificial Sequence
  Description of Artificial Sequence: Synthetic oligonucleotide
uucgcauuuguauucgacc

SEQ ID NO: 1117753 - RNA, 19 nt, Artificial Sequence
  Description of Artificial Sequence: Synthetic oligonucleotide
aaguaacccacaaaggcag

SEQ ID NO: 1117754 - RNA, 19 nt, Artificial Sequence
  Description of Artificial Sequence: Synthetic oligonucleotide
guacauucuacaaacuagg

SEQ ID NO: 1117755 - RNA, 19 nt, Artificial Sequence
  Description of Artificial Sequence: Synthetic oligonucleotide
auaguuuccagauggggca

SEQ ID NO: 1117756 - RNA, 19 nt, Artificial Sequence
  Description of Artificial Sequence: Synthetic oligonucleotide
uuugaagacgcaucacaag

SEQ ID NO: 1117757 - RNA, 19 nt, Artificial Sequence
  Description of Artificial Sequence: Synthetic oligonucleotide
gagcgaaucgcuaacaggc

SEQ ID NO: 1117758 - RNA, 19 nt, Artificial Sequence
  Description of Artificial Sequence: Synthetic oligonucleotide
uaauuccagauucuaagaa

SEQ ID NO: 1117759 - RNA, 19 nt, Artificial Sequence
  Description of Artificial Sequence: Synthetic oligonucleotide
aaaggaucacuuagauucc

SEQ ID NO: 1117760 - RNA, 19 nt, Artificial Sequence
  Description of Artificial Sequence: Synthetic oligonucleotide
auugauaucugagaugugu

SEQ ID NO: 1117761 - RNA, 19 nt, Artificial Sequence
  Description of Artificial Sequence: Synthetic oligonucleotide
ucgcauuuguauucgaccc

SEQ ID NO: 1117762 - RNA, 19 nt, Artificial Sequence
  Description of Artificial Sequence: Synthetic oligonucleotide
ugauaucugagaugugucc

SEQ ID NO: 1117763 - RNA, 19 nt, Artificial Sequence
  Description of Artificial Sequence: Synthetic oligonucleotide
aagacugucuacacauccc

SEQ ID NO: 1117764 - RNA, 19 nt, Artificial Sequence
  Description of Artificial Sequence: Synthetic oligonucleotide
aaaugguauugacauuuca

SEQ ID NO: 1117765 - RNA, 19 nt, Artificial Sequence
  Description of Artificial Sequence: Synthetic oligonucleotide
caccuaagcagcuaacacg

SEQ ID NO: 1117766 - RNA, 19 nt, Artificial Sequence
  Description of Artificial Sequence: Synthetic oligonucleotide
gguauugacauuucagugc

SEQ ID NO: 1117767 - RNA, 19 nt, Artificial Sequence
  Description of Artificial Sequence: Synthetic oligonucleotide
uagaucuuagccaggugcc

SEQ ID NO: 1117768 - RNA, 19 nt, Artificial Sequence
  Description of Artificial Sequence: Synthetic oligonucleotide
ugucguauagcuaucccaa

SEQ ID NO: 1117769 - RNA, 19 nt, Artificial Sequence
  Description of Artificial Sequence: Synthetic oligonucleotide
aaaacugucccaggagccg

SEQ ID NO: 1117770 - RNA, 19 nt, Artificial Sequence
  Description of Artificial Sequence: Synthetic oligonucleotide
auaaaugguauugacauuu

SEQ ID NO: 1117771 - RNA, 19 nt, Artificial Sequence
  Description of Artificial Sequence: Synthetic oligonucleotide
uuuguauucgacccaccga

SEQ ID NO: 1117772 - RNA, 19 nt, Artificial Sequence
  Description of Artificial Sequence: Synthetic oligonucleotide
aauacaguaguagcucuug

SEQ ID NO: 1117773 - RNA, 19 nt, Artificial Sequence
  Description of Artificial Sequence: Synthetic oligonucleotide
uccaaugguucaaaggacu

SEQ ID NO: 1117774 - RNA, 19 nt, Artificial Sequence
  Description of Artificial Sequence: Synthetic oligonucleotide
uccaucaucuaagaaucgg

SEQ ID NO: 1117775 - RNA, 19 nt, Artificial Sequence
  Description of Artificial Sequence: Synthetic oligonucleotide
uucugaaauacuaguacau

SEQ ID NO: 1117776 - RNA, 19 nt, Artificial Sequence
  Description of Artificial Sequence: Synthetic oligonucleotide
caugagaauacaguaguag

SEQ ID NO: 1117777 - RNA, 19 nt, Artificial Sequence
  Description of Artificial Sequence: Synthetic oligonucleotide
ucagguuaaaaugcaaugu

SEQ ID NO: 1117778 - RNA, 19 nt, Artificial Sequence
  Description of Artificial Sequence: Synthetic oligonucleotide
aagauccaaugguucaaag

SEQ ID NO: 1117779 - RNA, 19 nt, Artificial Sequence
  Description of Artificial Sequence: Synthetic oligonucleotide
aagaaucggcaacaggaca

SEQ ID NO: 1117780 - RNA, 19 nt, Artificial Sequence
  Description of Artificial Sequence: Synthetic oligonucleotide
uauuagaugugaucugaac

SEQ ID NO: 1117781 - RNA, 19 nt, Artificial Sequence
  Description of Artificial Sequence: Synthetic oligonucleotide
uaagaaucggcaacaggac

SEQ ID NO: 1117782 - RNA, 19 nt, Artificial Sequence
  Description of Artificial Sequence: Synthetic oligonucleotide
gucagguuaaaaugcaaug

SEQ ID NO: 1117783 - RNA, 19 nt, Artificial Sequence
  Description of Artificial Sequence: Synthetic oligonucleotide
ucucacgugaagaacugga

SEQ ID NO: 1117784 - RNA, 19 nt, Artificial Sequence
  Description of Artificial Sequence: Synthetic oligonucleotide
ugaagacgcaucacaagca

SEQ ID NO: 1117785 - RNA, 19 nt, Artificial Sequence
  Description of Artificial Sequence: Synthetic oligonucleotide
agguuugucaaacuucuga

SEQ ID NO: 1117786 - RNA, 19 nt, Artificial Sequence
  Description of Artificial Sequence: Synthetic oligonucleotide
uucagauacagggacaagu

SEQ ID NO: 1117787 - RNA, 19 nt, Artificial Sequence
  Description of Artificial Sequence: Synthetic oligonucleotide
gaugcacugacuaguagcc

SEQ ID NO: 1117788 - RNA, 19 nt, Artificial Sequence
  Description of Artificial Sequence: Synthetic oligonucleotide
gaucacuuagauuccuagc

SEQ ID NO: 1117789 - RNA, 19 nt, Artificial Sequence
  Description of Artificial Sequence: Synthetic oligonucleotide
auuugucguauagcuaucc

SEQ ID NO: 1117790 - RNA, 19 nt, Artificial Sequence
  Description of Artificial Sequence: Synthetic oligonucleotide
aagaauguauggacacccc

SEQ ID NO: 1117791 - RNA, 19 nt, Artificial Sequence
  Description of Artificial Sequence: Synthetic oligonucleotide
ucuacacaucccaucucgg

SEQ ID NO: 1117792 - RNA, 19 nt, Artificial Sequence
  Description of Artificial Sequence: Synthetic oligonucleotide
caucuuauuugucguauag

SEQ ID NO: 1117793 - RNA, 19 nt, Artificial Sequence
  Description of Artificial Sequence: Synthetic oligonucleotide
uuugucguauagcuauccc

SEQ ID NO: 1117794 - RNA, 19 nt, Artificial Sequence
  Description of Artificial Sequence: Synthetic oligonucleotide
gaaucauauccccagugca

SEQ ID NO: 1117795 - RNA, 19 nt, Artificial Sequence
  Description of Artificial Sequence: Synthetic oligonucleotide
acagggacaagucagguuu

SEQ ID NO: 1117796 - RNA, 19 nt, Artificial Sequence
  Description of Artificial Sequence: Synthetic oligonucleotide
uccagauucuaagaaaacu

SEQ ID NO: 1117797 - RNA, 19 nt, Artificial Sequence
  Description of Artificial Sequence: Synthetic oligonucleotide
uugucguauagcuauccca

SEQ ID NO: 1117798 - RNA, 19 nt, Artificial Sequence
  Description of Artificial Sequence: Synthetic oligonucleotide
cugucagaccuccugauag

SEQ ID NO: 1117799 - RNA, 19 nt, Artificial Sequence
  Description of Artificial Sequence: Synthetic oligonucleotide
gacaaauagccugugugcc

SEQ ID NO: 1117800 - RNA, 19 nt, Artificial Sequence
  Description of Artificial Sequence: Synthetic oligonucleotide
ugugaugauuuguccauca

SEQ ID NO: 1117801 - RNA, 19 nt, Artificial Sequence
  Description of Artificial Sequence: Synthetic oligonucleotide
auagcuaucccaaauaauu

SEQ ID NO: 1117802 - RNA, 19 nt, Artificial Sequence
  Description of Artificial Sequence: Synthetic oligonucleotide
uguauacauccaaguaacc

SEQ ID NO: 1117803 - RNA, 19 nt, Artificial Sequence
  Description of Artificial Sequence: Synthetic oligonucleotide
aaugcgucccacacacugc

SEQ ID NO: 1117804 - RNA, 19 nt, Artificial Sequence
  Description of Artificial Sequence: Synthetic oligonucleotide
ugacuaguagccuggaauc

SEQ ID NO: 1117805 - RNA, 19 nt, Artificial Sequence
  Description of Artificial Sequence: Synthetic oligonucleotide
agacgugccaguugagugg

SEQ ID NO: 1117806 - RNA, 19 nt, Artificial Sequence
  Description of Artificial Sequence: Synthetic oligonucleotide
guauugacauuucagugca

SEQ ID NO: 1117807 - RNA, 19 nt, Artificial Sequence
  Description of Artificial Sequence: Synthetic oligonucleotide
uguccugcgaacguuguag

SEQ ID NO: 1117808 - RNA, 19 nt, Artificial Sequence
  Description of Artificial Sequence: Synthetic oligonucleotide
ggcaacaggacaaauagcc

SEQ ID NO: 1117809 - RNA, 19 nt, Artificial Sequence
  Description of Artificial Sequence: Synthetic oligonucleotide
ugcacugacuaguagccug

SEQ ID NO: 1117810 - RNA, 19 nt, Artificial Sequence
  Description of Artificial Sequence: Synthetic oligonucleotide
guuuugaagacgcaucaca

SEQ ID NO: 1117811 - RNA, 19 nt, Artificial Sequence
  Description of Artificial Sequence: Synthetic oligonucleotide
accgaguccauauuagaug

SEQ ID NO: 1117812 - RNA, 19 nt, Artificial Sequence
  Description of Artificial Sequence: Synthetic oligonucleotide
aauaaaugguauugacauu

SEQ ID NO: 1117813 - RNA, 19 nt, Artificial Sequence
  Description of Artificial Sequence: Synthetic oligonucleotide
gaugugaucugaaccagug

SEQ ID NO: 1117814 - RNA, 19 nt, Artificial Sequence
  Description of Artificial Sequence: Synthetic oligonucleotide
uugauaucugagauguguc

SEQ ID NO: 1117815 - RNA, 19 nt, Artificial Sequence
  Description of Artificial Sequence: Synthetic oligonucleotide
uccugauagagaaacuguc

SEQ ID NO: 1117816 - RNA, 19 nt, Artificial Sequence
  Description of Artificial Sequence: Synthetic oligonucleotide
uauagcuaucccaaauaau

SEQ ID NO: 1117817 - RNA, 19 nt, Artificial Sequence
  Description of Artificial Sequence: Synthetic oligonucleotide
uauucgacccaccgagucc

SEQ ID NO: 1117818 - RNA, 19 nt, Artificial Sequence
  Description of Artificial Sequence: Synthetic oligonucleotide
aagacgcaucacaagcacc

SEQ ID NO: 1117819 - RNA, 19 nt, Artificial Sequence
  Description of Artificial Sequence: Synthetic oligonucleotide
ugugaaagacugucuacac

SEQ ID NO: 1117820 - RNA, 19 nt, Artificial Sequence
  Description of Artificial Sequence: Synthetic oligonucleotide
agcaagacgugccaguuga

SEQ ID NO: 1117821 - RNA, 19 nt, Artificial Sequence
  Description of Artificial Sequence: Synthetic oligonucleotide
agcggaauggcaugcaucu

SEQ ID NO: 1117822 - RNA, 19 nt, Artificial Sequence
  Description of Artificial Sequence: Synthetic oligonucleotide
agauucuaagaaaacuguc

SEQ ID NO: 1117823 - RNA, 19 nt, Artificial Sequence
  Description of Artificial Sequence: Synthetic oligonucleotide
caaacuagguuccagaaua

SEQ ID NO: 1117824 - RNA, 19 nt, Artificial Sequence
  Description of Artificial Sequence: Synthetic oligonucleotide
uacauucuacaaacuaggu

SEQ ID NO: 1117825 - RNA, 19 nt, Artificial Sequence
  Description of Artificial Sequence: Synthetic oligonucleotide
acaguuuugaagacgcauc

SEQ ID NO: 1117826 - RNA, 19 nt, Artificial Sequence
  Description of Artificial Sequence: Synthetic oligonucleotide
cuuguucgcauuuguauuc

SEQ ID NO: 1117827 - RNA, 19 nt, Artificial Sequence
  Description of Artificial Sequence: Synthetic oligonucleotide
ugucuacugguuauuaaua

SEQ ID NO: 1117828 - RNA, 19 nt, Artificial Sequence
  Description of Artificial Sequence: Synthetic oligonucleotide
uacaaacuagguuccagaa

SEQ ID NO: 1117829 - RNA, 19 nt, Artificial Sequence
  Description of Artificial Sequence: Synthetic oligonucleotide
cacgcgugcgccuuguucg

SEQ ID NO: 1117830 - RNA, 19 nt, Artificial Sequence
  Description of Artificial Sequence: Synthetic oligonucleotide
gaagacgcaucacaagcac

SEQ ID NO: 1117831 - RNA, 19 nt, Artificial Sequence
  Description of Artificial Sequence: Synthetic oligonucleotide
agaauguauggacacccca

SEQ ID NO: 1117832 - RNA, 19 nt, Artificial Sequence
  Description of Artificial Sequence: Synthetic oligonucleotide
uauccgcuugggaagaaac

SEQ ID NO: 1117833 - RNA, 19 nt, Artificial Sequence
  Description of Artificial Sequence: Synthetic oligonucleotide
aggucaaagagccggcaag

SEQ ID NO: 1117834 - RNA, 19 nt, Artificial Sequence
  Description of Artificial Sequence: Synthetic oligonucleotide
ucuacugguuauuaauaua

SEQ ID NO: 1117835 - RNA, 19 nt, Artificial Sequence
  Description of Artificial Sequence: Synthetic oligonucleotide
auauccccagugcauggcg

SEQ ID NO: 1117836 - RNA, 19 nt, Artificial Sequence
  Description of Artificial Sequence: Synthetic oligonucleotide
gagaauacaguaguagcuc

SEQ ID NO: 1117837 - RNA, 19 nt, Artificial Sequence
  Description of Artificial Sequence: Synthetic oligonucleotide
auagccggccagcaggagg

SEQ ID NO: 1117838 - RNA, 19 nt, Artificial Sequence
  Description of Artificial Sequence: Synthetic oligonucleotide
gacaagucagguuugucaa

SEQ ID NO: 1117839 - RNA, 19 nt, Artificial Sequence
  Description of Artificial Sequence: Synthetic oligonucleotide
ucggcuuccugccucaacu

SEQ ID NO: 1117840 - RNA, 19 nt, Artificial Sequence
  Description of Artificial Sequence: Synthetic oligonucleotide
aguggcaaaggcauauccg

SEQ ID NO: 1117841 - RNA, 19 nt, Artificial Sequence
  Description of Artificial Sequence: Synthetic oligonucleotide
acuagguuccagaauauga

SEQ ID NO: 1117842 - RNA, 19 nt, Artificial Sequence
  Description of Artificial Sequence: Synthetic oligonucleotide
acauucuacaaacuagguu

SEQ ID NO: 1117843 - RNA, 19 nt, Artificial Sequence
  Description of Artificial Sequence: Synthetic oligonucleotide
gagaauacuaggcaagagu

SEQ ID NO: 1117844 - RNA, 19 nt, Artificial Sequence
  Description of Artificial Sequence: Synthetic oligonucleotide
agcuaucccaaauaauuaa

SEQ ID NO: 1117845 - RNA, 19 nt, Artificial Sequence
  Description of Artificial Sequence: Synthetic oligonucleotide
cuaacaggcuccaccacac

SEQ ID NO: 1117846 - RNA, 19 nt, Artificial Sequence
  Description of Artificial Sequence: Synthetic oligonucleotide
cacuuagauuccuagcaug

SEQ ID NO: 1117847 - RNA, 19 nt, Artificial Sequence
  Description of Artificial Sequence: Synthetic oligonucleotide
ucaccugucagaccuccug

SEQ ID NO: 1117848 - RNA, 19 nt, Artificial Sequence
  Description of Artificial Sequence: Synthetic oligonucleotide
ggaugcacugacuaguagc

SEQ ID NO: 1117849 - RNA, 19 nt, Artificial Sequence
  Description of Artificial Sequence: Synthetic oligonucleotide
uuucaaugcgucccacaca

SEQ ID NO: 1117850 - RNA, 19 nt, Artificial Sequence
  Description of Artificial Sequence: Synthetic oligonucleotide
uagcuaucccaaauaauua

SEQ ID NO: 1117851 - RNA, 19 nt, Artificial Sequence
  Description of Artificial Sequence: Synthetic oligonucleotide
uccgcuugggaagaaacug

SEQ ID NO: 1117852 - RNA, 19 nt, Artificial Sequence
  Description of Artificial Sequence: Synthetic oligonucleotide
auacuaguacauucuacaa

SEQ ID NO: 1117853 - RNA, 19 nt, Artificial Sequence
  Description of Artificial Sequence: Synthetic oligonucleotide
ucguauagcuaucccaaau

SEQ ID NO: 1117854 - RNA, 19 nt, Artificial Sequence
  Description of Artificial Sequence: Synthetic oligonucleotide
guauggacaccccacuggc

SEQ ID NO: 1117855 - RNA, 19 nt, Artificial Sequence
  Description of Artificial Sequence: Synthetic oligonucleotide
ucacuuagauuccuagcau

SEQ ID NO: 1117856 - RNA, 19 nt, Artificial Sequence
  Description of Artificial Sequence: Synthetic oligonucleotide
aggcauauccgcuugggaa

SEQ ID NO: 1117857 - RNA, 19 nt, Artificial Sequence
  Description of Artificial Sequence: Synthetic oligonucleotide
agucaggacucagugagag

SEQ ID NO: 1117858 - RNA, 19 nt, Artificial Sequence
  Description of Artificial Sequence: Synthetic oligonucleotide
ucuucagauacagggacaa

SEQ ID NO: 1117859 - RNA, 19 nt, Artificial Sequence
  Description of Artificial Sequence: Synthetic oligonucleotide
cuugggaugcacugacuag

SEQ ID NO: 1117860 - RNA, 19 nt, Artificial Sequence
  Description of Artificial Sequence: Synthetic oligonucleotide
ggaaucauauccccagugc

SEQ ID NO: 1117861 - RNA, 19 nt, Artificial Sequence
  Description of Artificial Sequence: Synthetic oligonucleotide
ucaucacccaggaggaccu

SEQ ID NO: 1117862 - RNA, 19 nt, Artificial Sequence
  Description of Artificial Sequence: Synthetic oligonucleotide
aucaucuaagaaucggcaa

SEQ ID NO: 1117863 - RNA, 19 nt, Artificial Sequence
  Description of Artificial Sequence: Synthetic oligonucleotide
uguugcccagucucgaugu

SEQ ID NO: 1117864 - RNA, 19 nt, Artificial Sequence
  Description of Artificial Sequence: Synthetic oligonucleotide
aguagccuggaaucauauc

SEQ ID NO: 1117865 - RNA, 19 nt, Artificial Sequence
  Description of Artificial Sequence: Synthetic oligonucleotide
guauagcuaucccaaauaa

SEQ ID NO: 1117866 - RNA, 19 nt, Artificial Sequence
  Description of Artificial Sequence: Synthetic oligonucleotide
ucgcuaacaggcuccacca

SEQ ID NO: 1117867 - RNA, 19 nt, Artificial Sequence
  Description of Artificial Sequence: Synthetic oligonucleotide
gugaucugaaccagugugg

SEQ ID NO: 1117868 - RNA, 19 nt, Artificial Sequence
  Description of Artificial Sequence: Synthetic oligonucleotide
gacauaguuuccagauggg

SEQ ID NO: 1117869 - RNA, 19 nt, Artificial Sequence
  Description of Artificial Sequence: Synthetic oligonucleotide
aaccaguguggcaucauug

SEQ ID NO: 1117870 - RNA, 19 nt, Artificial Sequence
  Description of Artificial Sequence: Synthetic oligonucleotide
caucaucuaagaaucggca

SEQ ID NO: 1117871 - RNA, 19 nt, Artificial Sequence
  Description of Artificial Sequence: Synthetic oligonucleotide
aaucauauccccagugcau

SEQ ID NO: 1117872 - RNA, 19 nt, Artificial Sequence
  Description of Artificial Sequence: Synthetic oligonucleotide
aacuagguuccagaauaug

SEQ ID NO: 1117873 - RNA, 19 nt, Artificial Sequence
  Description of Artificial Sequence: Synthetic oligonucleotide
auuaacagcaagauccaau

SEQ ID NO: 1117874 - RNA, 19 nt, Artificial Sequence
  Description of Artificial Sequence: Synthetic oligonucleotide
cuuugagaaggccacagaa

SEQ ID NO: 1117875 - RNA, 19 nt, Artificial Sequence
  Description of Artificial Sequence: Synthetic oligonucleotide
cauauuagaugugaucuga

SEQ ID NO: 1117876 - RNA, 19 nt, Artificial Sequence
  Description of Artificial Sequence: Synthetic oligonucleotide
gucaugagaauacaguagu

SEQ ID NO: 1117877 - RNA, 19 nt, Artificial Sequence
  Description of Artificial Sequence: Synthetic oligonucleotide
acguuguagucuguugccc

SEQ ID NO: 1117878 - RNA, 19 nt, Artificial Sequence
  Description of Artificial Sequence: Synthetic oligonucleotide
caaguugugucuccugaac

SEQ ID NO: 1117879 - RNA, 19 nt, Artificial Sequence
  Description of Artificial Sequence: Synthetic oligonucleotide
cgacauaguuuccagaugg

SEQ ID NO: 1117880 - RNA, 19 nt, Artificial Sequence
  Description of Artificial Sequence: Synthetic oligonucleotide
ucaugagaauacaguagua

SEQ ID NO: 1117881 - RNA, 19 nt, Artificial Sequence
  Description of Artificial Sequence: Synthetic oligonucleotide
uugggaugcacugacuagu

SEQ ID NO: 1117882 - RNA, 19 nt, Artificial Sequence
  Description of Artificial Sequence: Synthetic oligonucleotide
gacauuucagugcagcccu

SEQ ID NO: 1117883 - RNA, 19 nt, Artificial Sequence
  Description of Artificial Sequence: Synthetic oligonucleotide
ggagcgaaucgcuaacagg

SEQ ID NO: 1117884 - RNA, 19 nt, Artificial Sequence
  Description of Artificial Sequence: Synthetic oligonucleotide
agagaauacuaggcaagag

SEQ ID NO: 1117885 - RNA, 19 nt, Artificial Sequence
  Description of Artificial Sequence: Synthetic oligonucleotide
ggcauauccgcuugggaag

SEQ ID NO: 1117886 - RNA, 19 nt, Artificial Sequence
  Description of Artificial Sequence: Synthetic oligonucleotide
guccauauuagaugugauc

SEQ ID NO: 1117887 - RNA, 19 nt, Artificial Sequence
  Description of Artificial Sequence: Synthetic oligonucleotide
agagcacaaguugugucuc

SEQ ID NO: 1117888 - RNA, 19 nt, Artificial Sequence
  Description of Artificial Sequence: Synthetic oligonucleotide
uucgcucauccuuugugac

SEQ ID NO: 1117889 - RNA, 19 nt, Artificial Sequence
  Description of Artificial Sequence: Synthetic oligonucleotide
cagaccuccugauagagaa

SEQ ID NO: 1117890 - RNA, 19 nt, Artificial Sequence
  Description of Artificial Sequence: Synthetic oligonucleotide
agagccggcaaguggcauc

SEQ ID NO: 1117891 - RNA, 19 nt, Artificial Sequence
  Description of Artificial Sequence: Synthetic oligonucleotide
gacucaucacaucacccga

SEQ ID NO: 1117892 - RNA, 19 nt, Artificial Sequence
  Description of Artificial Sequence: Synthetic oligonucleotide
ucacgagucuucagguugu

SEQ ID NO: 1117893 - RNA, 19 nt, Artificial Sequence
  Description of Artificial Sequence: Synthetic oligonucleotide
uauuugucguauagcuauc

SEQ ID NO: 1117894 - RNA, 19 nt, Artificial Sequence
  Description of Artificial Sequence: Synthetic oligonucleotide
agccugugugcccugguag

SEQ ID NO: 1117895 - RNA, 19 nt, Artificial Sequence
  Description of Artificial Sequence: Synthetic oligonucleotide
ucucugcucacccgcacgu

SEQ ID NO: 1117896 - RNA, 19 nt, Artificial Sequence
  Description of Artificial Sequence: Synthetic oligonucleotide
ugcaucuuauuugucguau

SEQ ID NO: 1117897 - RNA, 19 nt, Artificial Sequence
  Description of Artificial Sequence: Synthetic oligonucleotide
uguauucgacccaccgagu

SEQ ID NO: 1117898 - RNA, 19 nt, Artificial Sequence
  Description of Artificial Sequence: Synthetic oligonucleotide
ugucagaccuccugauaga

SEQ ID NO: 1117899 - RNA, 19 nt, Artificial Sequence
  Description of Artificial Sequence: Synthetic oligonucleotide
ugggcguuuggcugcgggg

SEQ ID NO: 1117900 - RNA, 19 nt, Artificial Sequence
  Description of Artificial Sequence: Synthetic oligonucleotide
agugucuacugguuauuaa

SEQ ID NO: 1117901 - RNA, 19 nt, Artificial Sequence
  Description of Artificial Sequence: Synthetic oligonucleotide
uaguagccuggaaucauau

SEQ ID NO: 1117902 - RNA, 19 nt, Artificial Sequence
  Description of Artificial Sequence: Synthetic oligonucleotide
guauucgacccaccgaguc

SEQ ID NO: 1117903 - RNA, 19 nt, Artificial Sequence
  Description of Artificial Sequence: Synthetic oligonucleotide
ucauccuuugugacugguc

SEQ ID NO: 1117904 - RNA, 19 nt, Artificial Sequence
  Description of Artificial Sequence: Synthetic oligonucleotide
agcccuaggucaaagugag

SEQ ID NO: 1117905 - RNA, 19 nt, Artificial Sequence
  Description of Artificial Sequence: Synthetic oligonucleotide
agaaucggcaacaggacaa

SEQ ID NO: 1117906 - RNA, 19 nt, Artificial Sequence
  Description of Artificial Sequence: Synthetic oligonucleotide
cugcgaacguuguagucug

SEQ ID NO: 1117907 - RNA, 19 nt, Artificial Sequence
  Description of Artificial Sequence: Synthetic oligonucleotide
ugaagaacuggagcccggc

SEQ ID NO: 1117908 - RNA, 19 nt, Artificial Sequence
  Description of Artificial Sequence: Synthetic oligonucleotide
ugaccagcaaggacaccug

SEQ ID NO: 1117909 - RNA, 19 nt, Artificial Sequence
  Description of Artificial Sequence: Synthetic oligonucleotide
aaggaucacuuagauuccu

SEQ ID NO: 1117910 - RNA, 19 nt, Artificial Sequence
  Description of Artificial Sequence: Synthetic oligonucleotide
agcaaggacaccugcccga

SEQ ID NO: 1117911 - RNA, 19 nt, Artificial Sequence
  Description of Artificial Sequence: Synthetic oligonucleotide
cuagcauggaaaagaaugu

SEQ ID NO: 1117912 - RNA, 19 nt, Artificial Sequence
  Description of Artificial Sequence: Synthetic oligonucleotide
cauuuguauucgacccacc

SEQ ID NO: 1117913 - RNA, 19 nt, Artificial Sequence
  Description of Artificial Sequence: Synthetic oligonucleotide
cuuauuugucguauagcua

SEQ ID NO: 1117914 - RNA, 19 nt, Artificial Sequence
  Description of Artificial Sequence: Synthetic oligonucleotide
guugugucuccugaacuug

SEQ ID NO: 1117915 - RNA, 19 nt, Artificial Sequence
  Description of Artificial Sequence: Synthetic oligonucleotide
acaaguugugucuccugaa

SEQ ID NO: 1117916 - RNA, 19 nt, Artificial Sequence
  Description of Artificial Sequence: Synthetic oligonucleotide
uauggacaccccacuggcu

SEQ ID NO: 1117917 - RNA, 19 nt, Artificial Sequence
  Description of Artificial Sequence: Synthetic oligonucleotide
ugucagggagucagguuaa

SEQ ID NO: 1117918 - RNA, 19 nt, Artificial Sequence
  Description of Artificial Sequence: Synthetic oligonucleotide
uauccccagugcauggcgu

SEQ ID NO: 1117919 - RNA, 19 nt, Artificial Sequence
  Description of Artificial Sequence: Synthetic oligonucleotide
ugacagcauugauaucuga

SEQ ID NO: 1117920 - RNA, 19 nt, Artificial Sequence
  Description of Artificial Sequence: Synthetic oligonucleotide
cugugaaagacugucuaca

SEQ ID NO: 1117921 - RNA, 19 nt, Artificial Sequence
  Description of Artificial Sequence: Synthetic oligonucleotide
auucgacccaccgagucca

SEQ ID NO: 1117922 - RNA, 19 nt, Artificial Sequence
  Description of Artificial Sequence: Synthetic oligonucleotide
aucuaagaaucggcaacag

SEQ ID NO: 1117923 - RNA, 19 nt, Artificial Sequence
  Description of Artificial Sequence: Synthetic oligonucleotide
caggcgacauaguuuccag

SEQ ID NO: 1117924 - RNA, 19 nt, Artificial Sequence
  Description of Artificial Sequence: Synthetic oligonucleotide
ucacaccuaagcagcuaac

SEQ ID NO: 1117925 - RNA, 19 nt, Artificial Sequence
  Description of Artificial Sequence: Synthetic oligonucleotide
cacaaguugugucuccuga

SEQ ID NO: 1117926 - RNA, 19 nt, Artificial Sequence
  Description of Artificial Sequence: Synthetic oligonucleotide
augcgucccacacacugca

SEQ ID NO: 1117927 - RNA, 19 nt, Artificial Sequence
  Description of Artificial Sequence: Synthetic oligonucleotide
uguucgcauuuguauucga

SEQ ID NO: 1117928 - RNA, 19 nt, Artificial Sequence
  Description of Artificial Sequence: Synthetic oligonucleotide
ucacaucacccgagugucc

SEQ ID NO: 1117929 - RNA, 19 nt, Artificial Sequence
  Description of Artificial Sequence: Synthetic oligonucleotide
caucuaagaaucggcaaca

SEQ ID NO: 1117930 - RNA, 19 nt, Artificial Sequence
  Description of Artificial Sequence: Synthetic oligonucleotide
ucagcggaauggcaugcau

SEQ ID NO: 1117931 - RNA, 19 nt, Artificial Sequence
  Description of Artificial Sequence: Synthetic oligonucleotide
aaucgcuaacaggcuccac

SEQ ID NO: 1117932 - RNA, 19 nt, Artificial Sequence
  Description of Artificial Sequence: Synthetic oligonucleotide
accucagcggaauggcaug

SEQ ID NO: 1117933 - RNA, 19 nt, Artificial Sequence
  Description of Artificial Sequence: Synthetic oligonucleotide
gagagacucaucacaucac

SEQ ID NO: 1117934 - RNA, 19 nt, Artificial Sequence
  Description of Artificial Sequence: Synthetic oligonucleotide
acccgaguguccugcgaac

SEQ ID NO: 1117935 - RNA, 19 nt, Artificial Sequence
  Description of Artificial Sequence: Synthetic oligonucleotide
cugucagggagucagguua

SEQ ID NO: 1117936 - RNA, 19 nt, Artificial Sequence
  Description of Artificial Sequence: Synthetic oligonucleotide
uggacaccccacuggcucc

SEQ ID NO: 1117937 - RNA, 19 nt, Artificial Sequence
  Description of Artificial Sequence: Synthetic oligonucleotide
auggggcauaggcacaagu

SEQ ID NO: 1117938 - RNA, 19 nt, Artificial Sequence
  Description of Artificial Sequence: Synthetic oligonucleotide
cuuugugacuggucucuuc

SEQ ID NO: 1117939 - RNA, 19 nt, Artificial Sequence
  Description of Artificial Sequence: Synthetic oligonucleotide
agucuguugcccagucucg

SEQ ID NO: 1117940 - RNA, 19 nt, Artificial Sequence
  Description of Artificial Sequence: Synthetic oligonucleotide
gaggcgcccgcucuuugag

SEQ ID NO: 1117941 - RNA, 19 nt, Artificial Sequence
  Description of Artificial Sequence: Synthetic oligonucleotide
ugggaugcacugacuagua

SEQ ID NO: 1117942 - RNA, 19 nt, Artificial Sequence
  Description of Artificial Sequence: Synthetic oligonucleotide
cacguucccuucacgaguc

SEQ ID NO: 1117943 - RNA, 19 nt, Artificial Sequence
  Description of Artificial Sequence: Synthetic oligonucleotide
guucgcauuuguauucgac

SEQ ID NO: 1117944 - RNA, 19 nt, Artificial Sequence
  Description of Artificial Sequence: Synthetic oligonucleotide
cuacacaucccaucucgga

SEQ ID NO: 1117945 - RNA, 19 nt, Artificial Sequence
  Description of Artificial Sequence: Synthetic oligonucleotide
aauguccauuggagaacag

SEQ ID NO: 1117946 - RNA, 19 nt, Artificial Sequence
  Description of Artificial Sequence: Synthetic oligonucleotide
gacuaguagccuggaauca

SEQ ID NO: 1117947 - RNA, 19 nt, Artificial Sequence
  Description of Artificial Sequence: Synthetic oligonucleotide
gaaaaggaucacuuagauu

SEQ ID NO: 1117948 - RNA, 19 nt, Artificial Sequence
  Description of Artificial Sequence: Synthetic oligonucleotide
cuguugcccagucucgaug

SEQ ID NO: 1117949 - RNA, 19 nt, Artificial Sequence
  Description of Artificial Sequence: Synthetic oligonucleotide
cugacuaguagccuggaau

SEQ ID NO: 1117950 - RNA, 19 nt, Artificial Sequence
  Description of Artificial Sequence: Synthetic oligonucleotide
acgcgugcgccuuguucgc

SEQ ID NO: 1117951 - RNA, 19 nt, Artificial Sequence
  Description of Artificial Sequence: Synthetic oligonucleotide
acuaguagccuggaaucau

SEQ ID NO: 1117952 - RNA, 19 nt, Artificial Sequence
  Description of Artificial Sequence: Synthetic oligonucleotide
cauauccccagugcauggc

SEQ ID NO: 1117953 - RNA, 19 nt, Artificial Sequence
  Description of Artificial Sequence: Synthetic oligonucleotide
gaaagacugucuacacauc

SEQ ID NO: 1117954 - RNA, 19 nt, Artificial Sequence
  Description of Artificial Sequence: Synthetic oligonucleotide
cauugauaucugagaugug

SEQ ID NO: 1117955 - RNA, 19 nt, Artificial Sequence
  Description of Artificial Sequence: Synthetic oligonucleotide
gugucuacugguuauuaau

SEQ ID NO: 1117956 - RNA, 19 nt, Artificial Sequence
  Description of Artificial Sequence: Synthetic oligonucleotide
cagcccuaggucaaaguga

SEQ ID NO: 1117957 - RNA, 19 nt, Artificial Sequence
  Description of Artificial Sequence: Synthetic oligonucleotide
ccauauuagaugugaucug

SEQ ID NO: 1117958 - RNA, 19 nt, Artificial Sequence
  Description of Artificial Sequence: Synthetic oligonucleotide
cagccuuuuagaauaccaa

SEQ ID NO: 1117959 - RNA, 19 nt, Artificial Sequence
  Description of Artificial Sequence: Synthetic oligonucleotide
aucacccgaguguccugcg

SEQ ID NO: 1117960 - RNA, 19 nt, Artificial Sequence
  Description of Artificial Sequence: Synthetic oligonucleotide
auauuagaugugaucugaa

SEQ ID NO: 1117961 - RNA, 19 nt, Artificial Sequence
  Description of Artificial Sequence: Synthetic oligonucleotide
gggagcgaaucgcuaacag

SEQ ID NO: 1117962 - RNA, 19 nt, Artificial Sequence
  Description of Artificial Sequence: Synthetic oligonucleotide
ugcagcccuaggucaaagu

SEQ ID NO: 1117963 - RNA, 19 nt, Artificial Sequence
  Description of Artificial Sequence: Synthetic oligonucleotide
gucucacgugaagaacugg

SEQ ID NO: 1117964 - RNA, 19 nt, Artificial Sequence
  Description of Artificial Sequence: Synthetic oligonucleotide
guugaguggaugagcuuac

SEQ ID NO: 1117965 - RNA, 19 nt, Artificial Sequence
  Description of Artificial Sequence: Synthetic oligonucleotide
agucucacgugaagaacug

SEQ ID NO: 1117966 - RNA, 19 nt, Artificial Sequence
  Description of Artificial Sequence: Synthetic oligonucleotide
gucuacugguuauuaauau

SEQ ID NO: 1117967 - RNA, 19 nt, Artificial Sequence
  Description of Artificial Sequence: Synthetic oligonucleotide
gcuaacaggcuccaccaca

SEQ ID NO: 1117968 - RNA, 19 nt, Artificial Sequence
  Description of Artificial Sequence: Synthetic oligonucleotide
uccugcgaacguuguaguc

SEQ ID NO: 1117969 - RNA, 19 nt, Artificial Sequence
  Description of Artificial Sequence: Synthetic oligonucleotide
agcacaaguugugucuccu

SEQ ID NO: 1117970 - RNA, 19 nt, Artificial Sequence
  Description of Artificial Sequence: Synthetic oligonucleotide
guaacccacaaaggcagca

SEQ ID NO: 1117971 - RNA, 19 nt, Artificial Sequence
  Description of Artificial Sequence: Synthetic oligonucleotide
cugggcguuuggcugcggg

SEQ ID NO: 1117972 - RNA, 19 nt, Artificial Sequence
  Description of Artificial Sequence: Synthetic oligonucleotide
cugagauguguccugugaa

SEQ ID NO: 1117973 - RNA, 19 nt, Artificial Sequence
  Description of Artificial Sequence: Synthetic oligonucleotide
ccgaccuccuuucaaugcg

SEQ ID NO: 1117974 - RNA, 19 nt, Artificial Sequence
  Description of Artificial Sequence: Synthetic oligonucleotide
cuaucccaaauaauuaauu

SEQ ID NO: 1117975 - RNA, 19 nt, Artificial Sequence
  Description of Artificial Sequence: Synthetic oligonucleotide
acugacuaguagccuggaa

SEQ ID NO: 1117976 - RNA, 19 nt, Artificial Sequence
  Description of Artificial Sequence: Synthetic oligonucleotide
cgaaucgcuaacaggcucc

SEQ ID NO: 1117977 - RNA, 19 nt, Artificial Sequence
  Description of Artificial Sequence: Synthetic oligonucleotide
acccgcacguucccuucac

SEQ ID NO: 1117978 - RNA, 19 nt, Artificial Sequence
  Description of Artificial Sequence: Synthetic oligonucleotide
aggcgacauaguuuccaga

SEQ ID NO: 1117979 - RNA, 19 nt, Artificial Sequence
  Description of Artificial Sequence: Synthetic oligonucleotide
cuaacacgguugucaugac

SEQ ID NO: 1117980 - RNA, 19 nt, Artificial Sequence
  Description of Artificial Sequence: Synthetic oligonucleotide
ugcgucccacacacugcag

SEQ ID NO: 1117981 - RNA, 19 nt, Artificial Sequence
  Description of Artificial Sequence: Synthetic oligonucleotide
ugcgccuuguucgcauuug

SEQ ID NO: 1117982 - RNA, 19 nt, Artificial Sequence
  Description of Artificial Sequence: Synthetic oligonucleotide
cacaccuaagcagcuaaca

SEQ ID NO: 1117983 - RNA, 19 nt, Artificial Sequence
  Description of Artificial Sequence: Synthetic oligonucleotide
gguucaaaggacucagccu

SEQ ID NO: 1117984 - RNA, 19 nt, Artificial Sequence
  Description of Artificial Sequence: Synthetic oligonucleotide
cuucagauacagggacaag

SEQ ID NO: 1117985 - RNA, 19 nt, Artificial Sequence
  Description of Artificial Sequence: Synthetic oligonucleotide
gcauuuguauucgacccac

SEQ ID NO: 1117986 - RNA, 19 nt, Artificial Sequence
  Description of Artificial Sequence: Synthetic oligonucleotide
aagucaggacucagugaga

SEQ ID NO: 1117987 - RNA, 19 nt, Artificial Sequence
  Description of Artificial Sequence: Synthetic oligonucleotide
uucugggcguuuggcugcg

SEQ ID NO: 1117988 - RNA, 19 nt, Artificial Sequence
  Description of Artificial Sequence: Synthetic oligonucleotide
cuaguagccuggaaucaua

SEQ ID NO: 1117989 - RNA, 19 nt, Artificial Sequence
  Description of Artificial Sequence: Synthetic oligonucleotide
gacgugccaguugagugga

SEQ ID NO: 1117990 - RNA, 19 nt, Artificial Sequence
  Description of Artificial Sequence: Synthetic oligonucleotide
acccaccgaguccauauua

SEQ ID NO: 1117991 - RNA, 19 nt, Artificial Sequence
  Description of Artificial Sequence: Synthetic oligonucleotide
uuguagucuguugcccagu

SEQ ID NO: 1117992 - RNA, 19 nt, Artificial Sequence
  Description of Artificial Sequence: Synthetic oligonucleotide
gagucagguuaaaaugcaa

SEQ ID NO: 1117993 - RNA, 19 nt, Artificial Sequence
  Description of Artificial Sequence: Synthetic oligonucleotide
auagccugugugcccuggu

SEQ ID NO: 1117994 - RNA, 19 nt, Artificial Sequence
  Description of Artificial Sequence: Synthetic oligonucleotide
gaaucgcuaacaggcucca

SEQ ID NO: 1117995 - RNA, 19 nt, Artificial Sequence
  Description of Artificial Sequence: Synthetic oligonucleotide
cccaccgaguccauauuag

SEQ ID NO: 1117996 - RNA, 19 nt, Artificial Sequence
  Description of Artificial Sequence: Synthetic oligonucleotide
cagcauugauaucugagau

SEQ ID NO: 1117997 - RNA, 19 nt, Artificial Sequence
  Description of Artificial Sequence: Synthetic oligonucleotide
cuaguacauucuacaaacu

SEQ ID NO: 1117998 - RNA, 19 nt, Artificial Sequence
  Description of Artificial Sequence: Synthetic oligonucleotide
cuucaagucaggacucagu

SEQ ID NO: 1117999 - RNA, 19 nt, Artificial Sequence
  Description of Artificial Sequence: Synthetic oligonucleotide
ggagucucacgugaagaac

SEQ ID NO: 1118000 - RNA, 19 nt, Artificial Sequence
  Description of Artificial Sequence: Synthetic oligonucleotide
ggcgacauaguuuccagau

SEQ ID NO: 1118001 - RNA, 19 nt, Artificial Sequence
  Description of Artificial Sequence: Synthetic oligonucleotide
aggcuccaccacacgagac

SEQ ID NO: 1118002 - RNA, 19 nt, Artificial Sequence
  Description of Artificial Sequence: Synthetic oligonucleotide
agcgaaucgcuaacaggcu

SEQ ID NO: 1118003 - RNA, 19 nt, Artificial Sequence
  Description of Artificial Sequence: Synthetic oligonucleotide
caccgcgcugcuucugggc

SEQ ID NO: 1118004 - RNA, 19 nt, Artificial Sequence
  Description of Artificial Sequence: Synthetic oligonucleotide
gucguauagcuaucccaaa

SEQ ID NO: 1118005 - RNA, 19 nt, Artificial Sequence
  Description of Artificial Sequence: Synthetic oligonucleotide
ugcggggagcgaaucgcua

SEQ ID NO: 1118006 - RNA, 19 nt, Artificial Sequence
  Description of Artificial Sequence: Synthetic oligonucleotide
gccaguugaguggaugagc

SEQ ID NO: 1118007 - RNA, 19 nt, Artificial Sequence
  Description of Artificial Sequence: Synthetic oligonucleotide
ccggcaaguggcaucauca

SEQ ID NO: 1118008 - RNA, 19 nt, Artificial Sequence
  Description of Artificial Sequence: Synthetic oligonucleotide
caaggacaccugcccgacc

SEQ ID NO: 1118009 - RNA, 19 nt, Artificial Sequence
  Description of Artificial Sequence: Synthetic oligonucleotide
caaauagccugugugcccu

SEQ ID NO: 1118010 - RNA, 19 nt, Artificial Sequence
  Description of Artificial Sequence: Synthetic oligonucleotide
ugcgaacguuguagucugu

SEQ ID NO: 1118011 - RNA, 19 nt, Artificial Sequence
  Description of Artificial Sequence: Synthetic oligonucleotide
cccgaccuccuuucaaugc

SEQ ID NO: 1118012 - RNA, 19 nt, Artificial Sequence
  Description of Artificial Sequence: Synthetic oligonucleotide
gcgaaucgcuaacaggcuc

SEQ ID NO: 1118013 - RNA, 19 nt, Artificial Sequence
  Description of Artificial Sequence: Synthetic oligonucleotide
auauccgcuugggaagaaa

SEQ ID NO: 1118014 - RNA, 19 nt, Artificial Sequence
  Description of Artificial Sequence: Synthetic oligonucleotide
aggaggaccucagcggaau

SEQ ID NO: 1118015 - RNA, 19 nt, Artificial Sequence
  Description of Artificial Sequence: Synthetic oligonucleotide
guccauuggagaacagaaa

SEQ ID NO: 1118016 - RNA, 19 nt, Artificial Sequence
  Description of Artificial Sequence: Synthetic oligonucleotide
caccgaguccauauuagau

SEQ ID NO: 1118017 - RNA, 19 nt, Artificial Sequence
  Description of Artificial Sequence: Synthetic oligonucleotide
augcacugacuaguagccu

SEQ ID NO: 1118018 - RNA, 19 nt, Artificial Sequence
  Description of Artificial Sequence: Synthetic oligonucleotide
gcacaaguugugucuccug

SEQ ID NO: 1118019 - RNA, 19 nt, Artificial Sequence
  Description of Artificial Sequence: Synthetic oligonucleotide
gaauacaguaguagcucuu

SEQ ID NO: 1118020 - RNA, 19 nt, Artificial Sequence
  Description of Artificial Sequence: Synthetic oligonucleotide
cgaacguuguagucuguug

SEQ ID NO: 1118021 - RNA, 19 nt, Artificial Sequence
  Description of Artificial Sequence: Synthetic oligonucleotide
cucggcuuccugccucaac

SEQ ID NO: 1118022 - RNA, 19 nt, Artificial Sequence
  Description of Artificial Sequence: Synthetic oligonucleotide
gaaccaguguggcaucauu

SEQ ID NO: 1118023 - RNA, 19 nt, Artificial Sequence
  Description of Artificial Sequence: Synthetic oligonucleotide
gcugcggggagcgaaucgc

SEQ ID NO: 1118024 - RNA, 19 nt, Artificial Sequence
  Description of Artificial Sequence: Synthetic oligonucleotide
ccgaguccauauuagaugu

SEQ ID NO: 1118025 - RNA, 19 nt, Artificial Sequence
  Description of Artificial Sequence: Synthetic oligonucleotide
gccuuguucgcauuuguau

SEQ ID NO: 1118026 - RNA, 19 nt, Artificial Sequence
  Description of Artificial Sequence: Synthetic oligonucleotide
gaccucagcggaauggcau

SEQ ID NO: 1118027 - RNA, 19 nt, Artificial Sequence
  Description of Artificial Sequence: Synthetic oligonucleotide
ccaguugaguggaugagcu

SEQ ID NO: 1118028 - RNA, 19 nt, Artificial Sequence
  Description of Artificial Sequence: Synthetic oligonucleotide
aggaucacuuagauuccua

SEQ ID NO: 1118029 - RNA, 19 nt, Artificial Sequence
  Description of Artificial Sequence: Synthetic oligonucleotide
accuccugauagagaaacu

SEQ ID NO: 1118030 - RNA, 19 nt, Artificial Sequence
  Description of Artificial Sequence: Synthetic oligonucleotide
guugcccagucucgauguc

SEQ ID NO: 1118031 - RNA, 19 nt, Artificial Sequence
  Description of Artificial Sequence: Synthetic oligonucleotide
cacccagcaagacgugcca

SEQ ID NO: 1118032 - RNA, 19 nt, Artificial Sequence
  Description of Artificial Sequence: Synthetic oligonucleotide
gucaaacuucugaaauacu

SEQ ID NO: 1118033 - RNA, 19 nt, Artificial Sequence
  Description of Artificial Sequence: Synthetic oligonucleotide
gugcagcccuaggucaaag

SEQ ID NO: 1118034 - RNA, 19 nt, Artificial Sequence
  Description of Artificial Sequence: Synthetic oligonucleotide
cacccgaguguccugcgaa

SEQ ID NO: 1118035 - RNA, 19 nt, Artificial Sequence
  Description of Artificial Sequence: Synthetic oligonucleotide
acgagucuucagguuguau

SEQ ID NO: 1118036 - RNA, 19 nt, Artificial Sequence
  Description of Artificial Sequence: Synthetic oligonucleotide
ggcgcccgcucuuugagaa

SEQ ID NO: 1118037 - RNA, 19 nt, Artificial Sequence
  Description of Artificial Sequence: Synthetic oligonucleotide
caaaggacucagccuuuua

SEQ ID NO: 1118038 - RNA, 19 nt, Artificial Sequence
  Description of Artificial Sequence: Synthetic oligonucleotide
acguucccuucacgagucu

SEQ ID NO: 1118039 - RNA, 19 nt, Artificial Sequence
  Description of Artificial Sequence: Synthetic oligonucleotide
cgcacguucccuucacgag

SEQ ID NO: 1118040 - RNA, 19 nt, Artificial Sequence
  Description of Artificial Sequence: Synthetic oligonucleotide
cgagucuucagguuguaua

SEQ ID NO: 1118041 - RNA, 19 nt, Artificial Sequence
  Description of Artificial Sequence: Synthetic oligonucleotide
cccgaguguccugcgaacg

SEQ ID NO: 1118042 - RNA, 19 nt, Artificial Sequence
  Description of Artificial Sequence: Synthetic oligonucleotide
aggcgcccgcucuuugaga

SEQ ID NO: 1118043 - RNA, 19 nt, Artificial Sequence
  Description of Artificial Sequence: Synthetic oligonucleotide
gcaucuuauuugucguaua

SEQ ID NO: 1118044 - RNA, 19 nt, Artificial Sequence
  Description of Artificial Sequence: Synthetic oligonucleotide
ggacucagccuuuuagaau

SEQ ID NO: 1118045 - RNA, 19 nt, Artificial Sequence
  Description of Artificial Sequence: Synthetic oligonucleotide
augccagugucuacugguu

SEQ ID NO: 1118046 - RNA, 19 nt, Artificial Sequence
  Description of Artificial Sequence: Synthetic oligonucleotide
ucugggcguuuggcugcgg

SEQ ID NO: 1118047 - RNA, 19 nt, Artificial Sequence
  Description of Artificial Sequence: Synthetic oligonucleotide
cggcaacaggacaaauagc

SEQ ID NO: 1118048 - RNA, 19 nt, Artificial Sequence
  Description of Artificial Sequence: Synthetic oligonucleotide
ccgcucuuugagaaggcca

SEQ ID NO: 1118049 - RNA, 19 nt, Artificial Sequence
  Description of Artificial Sequence: Synthetic oligonucleotide
guccugcgaacguuguagu

SEQ ID NO: 1118050 - RNA, 19 nt, Artificial Sequence
  Description of Artificial Sequence: Synthetic oligonucleotide
ccaguucgcucauccuuug

SEQ ID NO: 1118051 - RNA, 19 nt, Artificial Sequence
  Description of Artificial Sequence: Synthetic oligonucleotide
ccgcuugggaagaaacuga

SEQ ID NO: 1118052 - RNA, 19 nt, Artificial Sequence
  Description of Artificial Sequence: Synthetic oligonucleotide
cguuguagucuguugccca

SEQ ID NO: 1118053 - RNA, 19 nt, Artificial Sequence
  Description of Artificial Sequence: Synthetic oligonucleotide
gcauauccgcuugggaaga

SEQ ID NO: 1118054 - RNA, 19 nt, Artificial Sequence
  Description of Artificial Sequence: Synthetic oligonucleotide
uucgacccaccgaguccau

SEQ ID NO: 1118055 - RNA, 19 nt, Artificial Sequence
  Description of Artificial Sequence: Synthetic oligonucleotide
gcacgcgugcgccuuguuc

SEQ ID NO: 1118056 - RNA, 19 nt, Artificial Sequence
  Description of Artificial Sequence: Synthetic oligonucleotide
gacugucuacacaucccau

SEQ ID NO: 1118057 - RNA, 19 nt, Artificial Sequence
  Description of Artificial Sequence: Synthetic oligonucleotide
ccaccgaguccauauuaga

SEQ ID NO: 1118058 - RNA, 19 nt, Artificial Sequence
  Description of Artificial Sequence: Synthetic oligonucleotide
ccuucacgagucuucaggu

SEQ ID NO: 1118059 - RNA, 19 nt, Artificial Sequence
  Description of Artificial Sequence: Synthetic oligonucleotide
ggaggcgcccgcucuuuga

SEQ ID NO: 1118060 - RNA, 19 nt, Artificial Sequence
  Description of Artificial Sequence: Synthetic oligonucleotide
gccagugucuacugguuau

SEQ ID NO: 1118061 - RNA, 19 nt, Artificial Sequence
  Description of Artificial Sequence: Synthetic oligonucleotide
ccaucucggacaucccaca

SEQ ID NO: 1118062 - RNA, 19 nt, Artificial Sequence
  Description of Artificial Sequence: Synthetic oligonucleotide
gcaagacgugccaguugag

SEQ ID NO: 1118063 - RNA, 19 nt, Artificial Sequence
  Description of Artificial Sequence: Synthetic oligonucleotide
guguccugcgaacguugua

SEQ ID NO: 1118064 - RNA, 19 nt, Artificial Sequence
  Description of Artificial Sequence: Synthetic oligonucleotide
cccgcucuuugagaaggcc

SEQ ID NO: 1118065 - RNA, 19 nt, Artificial Sequence
  Description of Artificial Sequence: Synthetic oligonucleotide
gcggggagcgaaucgcuaa

SEQ ID NO: 1118066 - RNA, 19 nt, Artificial Sequence
  Description of Artificial Sequence: Synthetic oligonucleotide
ccugcgaacguuguagucu

SEQ ID NO: 1118067 - RNA, 19 nt, Artificial Sequence
  Description of Artificial Sequence: Synthetic oligonucleotide
ggcaugcaucuuauuuguc

SEQ ID NO: 1118068 - RNA, 19 nt, Artificial Sequence
  Description of Artificial Sequence: Synthetic oligonucleotide
cugcccgaccuccuuucaa

SEQ ID NO: 1118069 - RNA, 19 nt, Artificial Sequence
  Description of Artificial Sequence: Synthetic oligonucleotide
ggacaccccacuggcuccc

SEQ ID NO: 1118070 - RNA, 19 nt, Artificial Sequence
  Description of Artificial Sequence: Synthetic oligonucleotide
ggggagcgaaucgcuaaca

SEQ ID NO: 1118071 - RNA, 19 nt, Artificial Sequence
  Description of Artificial Sequence: Synthetic oligonucleotide
cacugacuaguagccugga

SEQ ID NO: 1118072 - RNA, 19 nt, Artificial Sequence
  Description of Artificial Sequence: Synthetic oligonucleotide
cccgcacguucccuucacg

SEQ ID NO: 1118073 - RNA, 19 nt, Artificial Sequence
  Description of Artificial Sequence: Synthetic oligonucleotide
ggaccucagcggaauggca

SEQ ID NO: 1118074 - RNA, 19 nt, Artificial Sequence
  Description of Artificial Sequence: Synthetic oligonucleotide
cgcauuuguauucgaccca

SEQ ID NO: 1118075 - RNA, 19 nt, Artificial Sequence
  Description of Artificial Sequence: Synthetic oligonucleotide
cauauccgcuugggaagaa

SEQ ID NO: 1118076 - RNA, 19 nt, Artificial Sequence
  Description of Artificial Sequence: Synthetic oligonucleotide
ggugagccacuguuuccua

SEQ ID NO: 1118077 - RNA, 19 nt, Artificial Sequence
  Description of Artificial Sequence: Synthetic oligonucleotide
ggacucagugagagacuca

SEQ ID NO: 1118078 - RNA, 19 nt, Artificial Sequence
  Description of Artificial Sequence: Synthetic oligonucleotide
gcgucccacacacugcagu

SEQ ID NO: 1118079 - RNA, 19 nt, Artificial Sequence
  Description of Artificial Sequence: Synthetic oligonucleotide
gucagggagucagguuaaa

SEQ ID NO: 1118080 - RNA, 19 nt, Artificial Sequence
  Description of Artificial Sequence: Synthetic oligonucleotide
gacccaccgaguccauauu

SEQ ID NO: 1118081 - RNA, 19 nt, Artificial Sequence
  Description of Artificial Sequence: Synthetic oligonucleotide
cugcggggagcgaaucgcu

SEQ ID NO: 1118082 - RNA, 19 nt, Artificial Sequence
  Description of Artificial Sequence: Synthetic oligonucleotide
caucacccaggaggaccuc

SEQ ID NO: 1118083 - RNA, 19 nt, Artificial Sequence
  Description of Artificial Sequence: Synthetic oligonucleotide
caguucgcucauccuuugu

SEQ ID NO: 1118084 - RNA, 19 nt, Artificial Sequence
  Description of Artificial Sequence: Synthetic oligonucleotide
cggggagcgaaucgcuaac

SEQ ID NO: 1118085 - RNA, 19 nt, Artificial Sequence
  Description of Artificial Sequence: Synthetic oligonucleotide
cugccucaacuguuccagu

SEQ ID NO: 1118086 - RNA, 19 nt, Artificial Sequence
  Description of Artificial Sequence: Synthetic oligonucleotide
caguugaguggaugagcuu

SEQ ID NO: 1118087 - RNA, 19 nt, Artificial Sequence
  Description of Artificial Sequence: Synthetic oligonucleotide
cgcuaacaggcuccaccac

SEQ ID NO: 1118088 - RNA, 19 nt, Artificial Sequence
  Description of Artificial Sequence: Synthetic oligonucleotide
guuuggcugcggggagcga

SEQ ID NO: 1118089 - RNA, 19 nt, Artificial Sequence
  Description of Artificial Sequence: Synthetic oligonucleotide
gcgccuuguucgcauuugu

SEQ ID NO: 1118090 - RNA, 19 nt, Artificial Sequence
  Description of Artificial Sequence: Synthetic oligonucleotide
cccagcaagacgugccagu

SEQ ID NO: 1118091 - RNA, 19 nt, Artificial Sequence
  Description of Artificial Sequence: Synthetic oligonucleotide
cacgagucuucagguugua

SEQ ID NO: 1118092 - RNA, 19 nt, Artificial Sequence
  Description of Artificial Sequence: Synthetic oligonucleotide
gcgaacguuguagucuguu

SEQ ID NO: 1118093 - RNA, 19 nt, Artificial Sequence
  Description of Artificial Sequence: Synthetic oligonucleotide
ccugcccgaccuccuuuca

SEQ ID NO: 1118094 - RNA, 19 nt, Artificial Sequence
  Description of Artificial Sequence: Synthetic oligonucleotide
ggagcccggccgccaccac

SEQ ID NO: 1118095 - RNA, 19 nt, Artificial Sequence
  Description of Artificial Sequence: Synthetic oligonucleotide
acgugccaguugaguggau

SEQ ID NO: 1118096 - RNA, 19 nt, Artificial Sequence
  Description of Artificial Sequence: Synthetic oligonucleotide
cgccuuguucgcauuugua

SEQ ID NO: 1118097 - RNA, 19 nt, Artificial Sequence
  Description of Artificial Sequence: Synthetic oligonucleotide
gcgugcgccuuguucgcau

SEQ ID NO: 1118098 - RNA, 19 nt, Artificial Sequence
  Description of Artificial Sequence: Synthetic oligonucleotide
gcccuaggucaaagugaga

SEQ ID NO: 1118099 - RNA, 19 nt, Artificial Sequence
  Description of Artificial Sequence: Synthetic oligonucleotide
cgaccuccuuucaaugcgu

SEQ ID NO: 1118100 - RNA, 19 nt, Artificial Sequence
  Description of Artificial Sequence: Synthetic oligonucleotide
ccagcaagacgugccaguu

SEQ ID NO: 1118101 - RNA, 19 nt, Artificial Sequence
  Description of Artificial Sequence: Synthetic oligonucleotide
gcaggaggcgcccgcucuu

SEQ ID NO: 1118102 - RNA, 19 nt, Artificial Sequence
  Description of Artificial Sequence: Synthetic oligonucleotide
gcggaauggcaugcaucuu

SEQ ID NO: 1118103 - RNA, 19 nt, Artificial Sequence
  Description of Artificial Sequence: Synthetic oligonucleotide
ccaccaccgcgcugcuucu

SEQ ID NO: 1118104 - RNA, 19 nt, Artificial Sequence
  Description of Artificial Sequence: Synthetic oligonucleotide
cgcgugcgccuuguucgca

SEQ ID NO: 1118105 - RNA, 19 nt, Artificial Sequence
  Description of Artificial Sequence: Synthetic oligonucleotide
cgugcgccuuguucgcauu

SEQ ID NO: 1118106 - RNA, 19 nt, Artificial Sequence
  Description of Artificial Sequence: Synthetic oligonucleotide
ccgcacgcgugcgccuugu

SEQ ID NO: 1118107 - RNA, 19 nt, Artificial Sequence
  Description of Artificial Sequence: Synthetic oligonucleotide
cgcacgcgugcgccuuguu

SEQ ID NO: 1118108 - RNA, 19 nt, Artificial Sequence
  Description of Artificial Sequence: Synthetic oligonucleotide
aaaauaaacucuguggucc

SEQ ID NO: 1118109 - RNA, 19 nt, Artificial Sequence
  Description of Artificial Sequence: Synthetic oligonucleotide
aagacaauucguuuaagac

SEQ ID NO: 1118110 - RNA, 19 nt, Artificial Sequence
  Description of Artificial Sequence: Synthetic oligonucleotide
acuuagagggcuuucaucc

SEQ ID NO: 1118111 - RNA, 19 nt, Artificial Sequence
  Description of Artificial Sequence: Synthetic oligonucleotide
uaauugaaugaccagaggc

SEQ ID NO: 1118112 - RNA, 19 nt, Artificial Sequence
  Description of Artificial Sequence: Synthetic oligonucleotide
agacaauucguuuaagacg

SEQ ID NO: 1118113 - RNA, 19 nt, Artificial Sequence
  Description of Artificial Sequence: Synthetic oligonucleotide
gaguguggcaaucagauag

SEQ ID NO: 1118114 - RNA, 19 nt, Artificial Sequence
  Description of Artificial Sequence: Synthetic oligonucleotide
uaagcaaauuuccucaucc

SEQ ID NO: 1118115 - RNA, 19 nt, Artificial Sequence
  Description of Artificial Sequence: Synthetic oligonucleotide
uuuucuaucaggcucugug

SEQ ID NO: 1118116 - RNA, 19 nt, Artificial Sequence
  Description of Artificial Sequence: Synthetic oligonucleotide
aauaauugaaugaccagag

SEQ ID NO: 1118117 - RNA, 19 nt, Artificial Sequence
  Description of Artificial Sequence: Synthetic oligonucleotide
agcuaaagaagacaauucg

SEQ ID NO: 1118118 - RNA, 19 nt, Artificial Sequence
  Description of Artificial Sequence: Synthetic oligonucleotide
gacaauucguuuaagacgc

SEQ ID NO: 1118119 - RNA, 19 nt, Artificial Sequence
  Description of Artificial Sequence: Synthetic oligonucleotide
aaacgaaugagcugcagca

SEQ ID NO: 1118120 - RNA, 19 nt, Artificial Sequence
  Description of Artificial Sequence: Synthetic oligonucleotide
acauguguuuaucaucucc

SEQ ID NO: 1118121 - RNA, 19 nt, Artificial Sequence
  Description of Artificial Sequence: Synthetic oligonucleotide
aagacagcgaacgaaacag

SEQ ID NO: 1118122 - RNA, 19 nt, Artificial Sequence
  Description of Artificial Sequence: Synthetic oligonucleotide
guggcaaucagauagaaga

SEQ ID NO: 1118123 - RNA, 19 nt, Artificial Sequence
  Description of Artificial Sequence: Synthetic oligonucleotide
uauuggaaacgaaugagcu

SEQ ID NO: 1118124 - RNA, 19 nt, Artificial Sequence
  Description of Artificial Sequence: Synthetic oligonucleotide
aagacuagugcagugcuac

SEQ ID NO: 1118125 - RNA, 19 nt, Artificial Sequence
  Description of Artificial Sequence: Synthetic oligonucleotide
uuggaaacgaaugagcugc

SEQ ID NO: 1118126 - RNA, 19 nt, Artificial Sequence
  Description of Artificial Sequence: Synthetic oligonucleotide
agugccaggauauagccag

SEQ ID NO: 1118127 - RNA, 19 nt, Artificial Sequence
  Description of Artificial Sequence: Synthetic oligonucleotide
gaaauaauugaaugaccag

SEQ ID NO: 1118128 - RNA, 19 nt, Artificial Sequence
  Description of Artificial Sequence: Synthetic oligonucleotide
ugcuguuuaauccagccac

SEQ ID NO: 1118129 - RNA, 19 nt, Artificial Sequence
  Description of Artificial Sequence: Synthetic oligonucleotide
ugaguugauggccucaaag

SEQ ID NO: 1118130 - RNA, 19 nt, Artificial Sequence
  Description of Artificial Sequence: Synthetic oligonucleotide
ucguuuaagacgcuuguug

SEQ ID NO: 1118131 - RNA, 19 nt, Artificial Sequence
  Description of Artificial Sequence: Synthetic oligonucleotide
ucaauugugaguugauggc

SEQ ID NO: 1118132 - RNA, 19 nt, Artificial Sequence
  Description of Artificial Sequence: Synthetic oligonucleotide
uuaauccagccacagcacg

SEQ ID NO: 1118133 - RNA, 19 nt, Artificial Sequence
  Description of Artificial Sequence: Synthetic oligonucleotide
aaguccaaugcauugccug

SEQ ID NO: 1118134 - RNA, 19 nt, Artificial Sequence
  Description of Artificial Sequence: Synthetic oligonucleotide
ucugcuaggacugaggccu

SEQ ID NO: 1118135 - RNA, 19 nt, Artificial Sequence
  Description of Artificial Sequence: Synthetic oligonucleotide
agaaagacuagugcagugc

SEQ ID NO: 1118136 - RNA, 19 nt, Artificial Sequence
  Description of Artificial Sequence: Synthetic oligonucleotide
aauugaaugaccagaggcu

SEQ ID NO: 1118137 - RNA, 19 nt, Artificial Sequence
  Description of Artificial Sequence: Synthetic oligonucleotide
aaugagcugcagcaaagug

SEQ ID NO: 1118138 - RNA, 19 nt, Artificial Sequence
  Description of Artificial Sequence: Synthetic oligonucleotide
auaauugaaugaccagagg

SEQ ID NO: 1118139 - RNA, 19 nt, Artificial Sequence
  Description of Artificial Sequence: Synthetic oligonucleotide
gaaacgaaugagcugcagc

SEQ ID NO: 1118140 - RNA, 19 nt, Artificial Sequence
  Description of Artificial Sequence: Synthetic oligonucleotide
ugugccagaaagacuagug

SEQ ID NO: 1118141 - RNA, 19 nt, Artificial Sequence
  Description of Artificial Sequence: Synthetic oligonucleotide
acaacaagccgucccacac

SEQ ID NO: 1118142 - RNA, 19 nt, Artificial Sequence
  Description of Artificial Sequence: Synthetic oligonucleotide
ugugcuguuuaauccagcc

SEQ ID NO: 1118143 - RNA, 19 nt, Artificial Sequence
  Description of Artificial Sequence: Synthetic oligonucleotide
uuagcgucggugcugagac

SEQ ID NO: 1118144 - RNA, 19 nt, Artificial Sequence
  Description of Artificial Sequence: Synthetic oligonucleotide
gaacgaaacagcgaccucc

SEQ ID NO: 1118145 - RNA, 19 nt, Artificial Sequence
  Description of Artificial Sequence: Synthetic oligonucleotide
aauucguuuaagacgcuug

SEQ ID NO: 1118146 - RNA, 19 nt, Artificial Sequence
  Description of Artificial Sequence: Synthetic oligonucleotide
ucgcacaagacagcgaacg

SEQ ID NO: 1118147 - RNA, 19 nt, Artificial Sequence
  Description of Artificial Sequence: Synthetic oligonucleotide
uccacugucaauugugagu

SEQ ID NO: 1118148 - RNA, 19 nt, Artificial Sequence
  Description of Artificial Sequence: Synthetic oligonucleotide
uaggacugaggccugaagu

SEQ ID NO: 1118149 - RNA, 19 nt, Artificial Sequence
  Description of Artificial Sequence: Synthetic oligonucleotide
gacagcgaacgaaacagcg

SEQ ID NO: 1118150 - RNA, 19 nt, Artificial Sequence
  Description of Artificial Sequence: Synthetic oligonucleotide
uguagguggaaccacugau

SEQ ID NO: 1118151 - RNA, 19 nt, Artificial Sequence
  Description of Artificial Sequence: Synthetic oligonucleotide
agagcggucacuuuucuau

SEQ ID NO: 1118152 - RNA, 19 nt, Artificial Sequence
  Description of Artificial Sequence: Synthetic oligonucleotide
uguuuaucaucuccugcca

SEQ ID NO: 1118153 - RNA, 19 nt, Artificial Sequence
  Description of Artificial Sequence: Synthetic oligonucleotide
ucuuacacgaguagcuuuc

SEQ ID NO: 1118154 - RNA, 19 nt, Artificial Sequence
  Description of Artificial Sequence: Synthetic oligonucleotide
augaccagaggcuuccauc

SEQ ID NO: 1118155 - RNA, 19 nt, Artificial Sequence
  Description of Artificial Sequence: Synthetic oligonucleotide
uuuaagacgcuuguuguaa

SEQ ID NO: 1118156 - RNA, 19 nt, Artificial Sequence
  Description of Artificial Sequence: Synthetic oligonucleotide
cucggcuaagcaaauuucc

SEQ ID NO: 1118157 - RNA, 19 nt, Artificial Sequence
  Description of Artificial Sequence: Synthetic oligonucleotide
ucacacucggcuaagcaaa

SEQ ID NO: 1118158 - RNA, 19 nt, Artificial Sequence
  Description of Artificial Sequence: Synthetic oligonucleotide
ucccgaacagcugagaaca

SEQ ID NO: 1118159 - RNA, 19 nt, Artificial Sequence
  Description of Artificial Sequence: Synthetic oligonucleotide
cuugcgaccgaccugccgc

SEQ ID NO: 1118160 - RNA, 19 nt, Artificial Sequence
  Description of Artificial Sequence: Synthetic oligonucleotide
auaaacucugugguccagc

SEQ ID NO: 1118161 - RNA, 19 nt, Artificial Sequence
  Description of Artificial Sequence: Synthetic oligonucleotide
gugcauguggcccaccugg

SEQ ID NO: 1118162 - RNA, 19 nt, Artificial Sequence
  Description of Artificial Sequence: Synthetic oligonucleotide
guagcuuucaauccugcca

SEQ ID NO: 1118163 - RNA, 19 nt, Artificial Sequence
  Description of Artificial Sequence: Synthetic oligonucleotide
uggagcggcagcuaaagaa

SEQ ID NO: 1118164 - RNA, 19 nt, Artificial Sequence
  Description of Artificial Sequence: Synthetic oligonucleotide
uaauaugggcaucuccagu

SEQ ID NO: 1118165 - RNA, 19 nt, Artificial Sequence
  Description of Artificial Sequence: Synthetic oligonucleotide
ugcauugccugccucugag

SEQ ID NO: 1118166 - RNA, 19 nt, Artificial Sequence
  Description of Artificial Sequence: Synthetic oligonucleotide
ugaccagaggcuuccaucu

SEQ ID NO: 1118167 - RNA, 19 nt, Artificial Sequence
  Description of Artificial Sequence: Synthetic oligonucleotide
aauugugaguugauggccu

SEQ ID NO: 1118168 - RNA, 19 nt, Artificial Sequence
  Description of Artificial Sequence: Synthetic oligonucleotide
guagcuucauguccuuugg

SEQ ID NO: 1118169 - RNA, 19 nt, Artificial Sequence
  Description of Artificial Sequence: Synthetic oligonucleotide
cacgaguagcuuucaaucc

SEQ ID NO: 1118170 - RNA, 19 nt, Artificial Sequence
  Description of Artificial Sequence: Synthetic oligonucleotide
aacgaaacagcgaccuccg

SEQ ID NO: 1118171 - RNA, 19 nt, Artificial Sequence
  Description of Artificial Sequence: Synthetic oligonucleotide
aguaagagccugcaugggu

SEQ ID NO: 1118172 - RNA, 19 nt, Artificial Sequence
  Description of Artificial Sequence: Synthetic oligonucleotide
gcaguaagagccugcaugg

SEQ ID NO: 1118173 - RNA, 19 nt, Artificial Sequence
  Description of Artificial Sequence: Synthetic oligonucleotide
caacacauggggcuggccc

SEQ ID NO: 1118174 - RNA, 19 nt, Artificial Sequence
  Description of Artificial Sequence: Synthetic oligonucleotide
uguguagguggaaccacug

SEQ ID NO: 1118175 - RNA, 19 nt, Artificial Sequence
  Description of Artificial Sequence: Synthetic oligonucleotide
uggaaccacugauggagcg

SEQ ID NO: 1118176 - RNA, 19 nt, Artificial Sequence
  Description of Artificial Sequence: Synthetic oligonucleotide
ugaaugaccagaggcuucc

SEQ ID NO: 1118177 - RNA, 19 nt, Artificial Sequence
  Description of Artificial Sequence: Synthetic oligonucleotide
auucguuuaagacgcuugu

SEQ ID NO: 1118178 - RNA, 19 nt, Artificial Sequence
  Description of Artificial Sequence: Synthetic oligonucleotide
ugcauuuaccacccagcug

SEQ ID NO: 1118179 - RNA, 19 nt, Artificial Sequence
  Description of Artificial Sequence: Synthetic oligonucleotide
cuagaucaagccaggcuag

SEQ ID NO: 1118180 - RNA, 19 nt, Artificial Sequence
  Description of Artificial Sequence: Synthetic oligonucleotide
aacaacaagccgucccaca

SEQ ID NO: 1118181 - RNA, 19 nt, Artificial Sequence
  Description of Artificial Sequence: Synthetic oligonucleotide
caaaagugggcaccagggg

SEQ ID NO: 1118182 - RNA, 19 nt, Artificial Sequence
  Description of Artificial Sequence: Synthetic oligonucleotide
caauugugaguugauggcc

SEQ ID NO: 1118183 - RNA, 19 nt, Artificial Sequence
  Description of Artificial Sequence: Synthetic oligonucleotide
acgaguagcuuucaauccu

SEQ ID NO: 1118184 - RNA, 19 nt, Artificial Sequence
  Description of Artificial Sequence: Synthetic oligonucleotide
gcagguauagccuugggca

SEQ ID NO: 1118185 - RNA, 19 nt, Artificial Sequence
  Description of Artificial Sequence: Synthetic oligonucleotide
aagcuucgcggcgacgucc

SEQ ID NO: 1118186 - RNA, 19 nt, Artificial Sequence
  Description of Artificial Sequence: Synthetic oligonucleotide
cagcgaacgaaacagcgac

SEQ ID NO: 1118187 - RNA, 19 nt, Artificial Sequence
  Description of Artificial Sequence: Synthetic oligonucleotide
acuagugcagugcuaccug

SEQ ID NO: 1118188 - RNA, 19 nt, Artificial Sequence
  Description of Artificial Sequence: Synthetic oligonucleotide
auugugaguugauggccuc

SEQ ID NO: 1118189 - RNA, 19 nt, Artificial Sequence
  Description of Artificial Sequence: Synthetic oligonucleotide
agccggguugcuuagcguc

SEQ ID NO: 1118190 - RNA, 19 nt, Artificial Sequence
  Description of Artificial Sequence: Synthetic oligonucleotide
aaugcauugccugccucug

SEQ ID NO: 1118191 - RNA, 19 nt, Artificial Sequence
  Description of Artificial Sequence: Synthetic oligonucleotide
augggcuagaucaagccag

SEQ ID NO: 1118192 - RNA, 19 nt, Artificial Sequence
  Description of Artificial Sequence: Synthetic oligonucleotide
cuaccugccgggaaugggc

SEQ ID NO: 1118193 - RNA, 19 nt, Artificial Sequence
  Description of Artificial Sequence: Synthetic oligonucleotide
ugggcuagaucaagccagg

SEQ ID NO: 1118194 - RNA, 19 nt, Artificial Sequence
  Description of Artificial Sequence: Synthetic oligonucleotide
cuugaacauguguuuauca

SEQ ID NO: 1118195 - RNA, 19 nt, Artificial Sequence
  Description of Artificial Sequence: Synthetic oligonucleotide
uuagagggcuuucauccuc

SEQ ID NO: 1118196 - RNA, 19 nt, Artificial Sequence
  Description of Artificial Sequence: Synthetic oligonucleotide
caagccgucccacacggcc

SEQ ID NO: 1118197 - RNA, 19 nt, Artificial Sequence
  Description of Artificial Sequence: Synthetic oligonucleotide
gauggagcggcagcuaaag

SEQ ID NO: 1118198 - RNA, 19 nt, Artificial Sequence
  Description of Artificial Sequence: Synthetic oligonucleotide
ugccaucuuacacgaguag

SEQ ID NO: 1118199 - RNA, 19 nt, Artificial Sequence
  Description of Artificial Sequence: Synthetic oligonucleotide
caauccugccaauaauaug

SEQ ID NO: 1118200 - RNA, 19 nt, Artificial Sequence
  Description of Artificial Sequence: Synthetic oligonucleotide
gacucauugaguguggcaa

SEQ ID NO: 1118201 - RNA, 19 nt, Artificial Sequence
  Description of Artificial Sequence: Synthetic oligonucleotide
aagggcuaggcagguauag

SEQ ID NO: 1118202 - RNA, 19 nt, Artificial Sequence
  Description of Artificial Sequence: Synthetic oligonucleotide
cuagccggguugcuuagcg

SEQ ID NO: 1118203 - RNA, 19 nt, Artificial Sequence
  Description of Artificial Sequence: Synthetic oligonucleotide
acugcuugaacauguguuu

SEQ ID NO: 1118204 - RNA, 19 nt, Artificial Sequence
  Description of Artificial Sequence: Synthetic oligonucleotide
guaagagccugcaugggug

SEQ ID NO: 1118205 - RNA, 19 nt, Artificial Sequence
  Description of Artificial Sequence: Synthetic oligonucleotide
gucacuggcccuuagagcu

SEQ ID NO: 1118206 - RNA, 19 nt, Artificial Sequence
  Description of Artificial Sequence: Synthetic oligonucleotide
caguugacugcauuuacca

SEQ ID NO: 1118207 - RNA, 19 nt, Artificial Sequence
  Description of Artificial Sequence: Synthetic oligonucleotide
gaguguacaggcccaauaa

SEQ ID NO: 1118208 - RNA, 19 nt, Artificial Sequence
  Description of Artificial Sequence: Synthetic oligonucleotide
acugucaauugugaguuga

SEQ ID NO: 1118209 - RNA, 19 nt, Artificial Sequence
  Description of Artificial Sequence: Synthetic oligonucleotide
ugcauuccacagcuguggc

SEQ ID NO: 1118210 - RNA, 19 nt, Artificial Sequence
  Description of Artificial Sequence: Synthetic oligonucleotide
aguccucccgaacagcuga

SEQ ID NO: 1118211 - RNA, 19 nt, Artificial Sequence
  Description of Artificial Sequence: Synthetic oligonucleotide
agaucacuggaacccuguc

SEQ ID NO: 1118212 - RNA, 19 nt, Artificial Sequence
  Description of Artificial Sequence: Synthetic oligonucleotide
cacugguugaggcuggaug

SEQ ID NO: 1118213 - RNA, 19 nt, Artificial Sequence
  Description of Artificial Sequence: Synthetic oligonucleotide
ggcaaucagauagaagagg

SEQ ID NO: 1118214 - RNA, 19 nt, Artificial Sequence
  Description of Artificial Sequence: Synthetic oligonucleotide
gucccguuacuccaggccc

SEQ ID NO: 1118215 - RNA, 19 nt, Artificial Sequence
  Description of Artificial Sequence: Synthetic oligonucleotide
acaagacagcgaacgaaac

SEQ ID NO: 1118216 - RNA, 19 nt, Artificial Sequence
  Description of Artificial Sequence: Synthetic oligonucleotide
uaagacgcuuguuguaaaa

SEQ ID NO: 1118217 - RNA, 19 nt, Artificial Sequence
  Description of Artificial Sequence: Synthetic oligonucleotide
gaaagacuagugcagugcu

SEQ ID NO: 1118218 - RNA, 19 nt, Artificial Sequence
  Description of Artificial Sequence: Synthetic oligonucleotide
cagguauagccuugggcag

SEQ ID NO: 1118219 - RNA, 19 nt, Artificial Sequence
  Description of Artificial Sequence: Synthetic oligonucleotide
aaaacacugggcaccgcca

SEQ ID NO: 1118220 - RNA, 19 nt, Artificial Sequence
  Description of Artificial Sequence: Synthetic oligonucleotide
uuaagacgcuuguuguaaa

SEQ ID NO: 1118221 - RNA, 19 nt, Artificial Sequence
  Description of Artificial Sequence: Synthetic oligonucleotide
ggcuaagcaaauuuccuca

SEQ ID NO: 1118222 - RNA, 19 nt, Artificial Sequence
  Description of Artificial Sequence: Synthetic oligonucleotide
aucagauagaagagggucu

SEQ ID NO: 1118223 - RNA, 19 nt, Artificial Sequence
  Description of Artificial Sequence: Synthetic oligonucleotide
aaacagcgaccuccgccuc

SEQ ID NO: 1118224 - RNA, 19 nt, Artificial Sequence
  Description of Artificial Sequence: Synthetic oligonucleotide
acagaucgcacaagacagc

SEQ ID NO: 1118225 - RNA, 19 nt, Artificial Sequence
  Description of Artificial Sequence: Synthetic oligonucleotide
cuaagcaaauuuccucauc

SEQ ID NO: 1118226 - RNA, 19 nt, Artificial Sequence
  Description of Artificial Sequence: Synthetic oligonucleotide
ggcaaaagugggcaccagg

SEQ ID NO: 1118227 - RNA, 19 nt, Artificial Sequence
  Description of Artificial Sequence: Synthetic oligonucleotide
gguugcuuagcgucggugc

SEQ ID NO: 1118228 - RNA, 19 nt, Artificial Sequence
  Description of Artificial Sequence: Synthetic oligonucleotide
aaggacucauugagugugg

SEQ ID NO: 1118229 - RNA, 19 nt, Artificial Sequence
  Description of Artificial Sequence: Synthetic oligonucleotide
uggcccuuagagcuggagu

SEQ ID NO: 1118230 - RNA, 19 nt, Artificial Sequence
  Description of Artificial Sequence: Synthetic oligonucleotide
ucauugaguguggcaauca

SEQ ID NO: 1118231 - RNA, 19 nt, Artificial Sequence
  Description of Artificial Sequence: Synthetic oligonucleotide
acucggcuaagcaaauuuc

SEQ ID NO: 1118232 - RNA, 19 nt, Artificial Sequence
  Description of Artificial Sequence: Synthetic oligonucleotide
auugaaugaccagaggcuu

SEQ ID NO: 1118233 - RNA, 19 nt, Artificial Sequence
  Description of Artificial Sequence: Synthetic oligonucleotide
uccugccaauaauaugggc

SEQ ID NO: 1118234 - RNA, 19 nt, Artificial Sequence
  Description of Artificial Sequence: Synthetic oligonucleotide
agacagcgaacgaaacagc

SEQ ID NO: 1118235 - RNA, 19 nt, Artificial Sequence
  Description of Artificial Sequence: Synthetic oligonucleotide
aggacucauugaguguggc

SEQ ID NO: 1118236 - RNA, 19 nt, Artificial Sequence
  Description of Artificial Sequence: Synthetic oligonucleotide
acgaaugagcugcagcaaa

SEQ ID NO: 1118237 - RNA, 19 nt, Artificial Sequence
  Description of Artificial Sequence: Synthetic oligonucleotide
cacuuagagggcuuucauc

SEQ ID NO: 1118238 - RNA, 19 nt, Artificial Sequence
  Description of Artificial Sequence: Synthetic oligonucleotide
guagguggaaccacugaug

SEQ ID NO: 1118239 - RNA, 19 nt, Artificial Sequence
  Description of Artificial Sequence: Synthetic oligonucleotide
cacaagacagcgaacgaaa

SEQ ID NO: 1118240 - RNA, 19 nt, Artificial Sequence
  Description of Artificial Sequence: Synthetic oligonucleotide
ugaguccagaucuggguua

SEQ ID NO: 1118241 - RNA, 19 nt, Artificial Sequence
  Description of Artificial Sequence: Synthetic oligonucleotide
ggcccuuagagcuggagug

SEQ ID NO: 1118242 - RNA, 19 nt, Artificial Sequence
  Description of Artificial Sequence: Synthetic oligonucleotide
aucuuacacgaguagcuuu

SEQ ID NO: 1118243 - RNA, 19 nt, Artificial Sequence
  Description of Artificial Sequence: Synthetic oligonucleotide
ucagauagaagagggucuu

SEQ ID NO: 1118244 - RNA, 19 nt, Artificial Sequence
  Description of Artificial Sequence: Synthetic oligonucleotide
agcggucacuuuucuauca

SEQ ID NO: 1118245 - RNA, 19 nt, Artificial Sequence
  Description of Artificial Sequence: Synthetic oligonucleotide
uccucaucacauacagauc

SEQ ID NO: 1118246 - RNA, 19 nt, Artificial Sequence
  Description of Artificial Sequence: Synthetic oligonucleotide
aaggggucugaguccagau

SEQ ID NO: 1118247 - RNA, 19 nt, Artificial Sequence
  Description of Artificial Sequence: Synthetic oligonucleotide
caagacagcgaacgaaaca

SEQ ID NO: 1118248 - RNA, 19 nt, Artificial Sequence
  Description of Artificial Sequence: Synthetic oligonucleotide
cuccacugucaauugugag

SEQ ID NO: 1118249 - RNA, 19 nt, Artificial Sequence
  Description of Artificial Sequence: Synthetic oligonucleotide
cucccgaacagcugagaac

SEQ ID NO: 1118250 - RNA, 19 nt, Artificial Sequence
  Description of Artificial Sequence: Synthetic oligonucleotide
auaaaacacugggcaccgc

SEQ ID NO: 1118251 - RNA, 19 nt, Artificial Sequence
  Description of Artificial Sequence: Synthetic oligonucleotide
uggcagugccaggauauag

SEQ ID NO: 1118252 - RNA, 19 nt, Artificial Sequence
  Description of Artificial Sequence: Synthetic oligonucleotide
guuucuugugccagaaaga

SEQ ID NO: 1118253 - RNA, 19 nt, Artificial Sequence
  Description of Artificial Sequence: Synthetic oligonucleotide
agcuccuuagguaggcagg

SEQ ID NO: 1118254 - RNA, 19 nt, Artificial Sequence
  Description of Artificial Sequence: Synthetic oligonucleotide
uuacacgaguagcuuucaa

SEQ ID NO: 1118255 - RNA, 19 nt, Artificial Sequence
  Description of Artificial Sequence: Synthetic oligonucleotide
acagcgaccuccgccuccc

SEQ ID NO: 1118256 - RNA, 19 nt, Artificial Sequence
  Description of Artificial Sequence: Synthetic oligonucleotide
gaugggguuucuugugcca

SEQ ID NO: 1118257 - RNA, 19 nt, Artificial Sequence
  Description of Artificial Sequence: Synthetic oligonucleotide
agcgaacgaaacagcgacc

SEQ ID NO: 1118258 - RNA, 19 nt, Artificial Sequence
  Description of Artificial Sequence: Synthetic oligonucleotide
acgaaacagcgaccuccgc

SEQ ID NO: 1118259 - RNA, 19 nt, Artificial Sequence
  Description of Artificial Sequence: Synthetic oligonucleotide
ggcagguauagccuugggc

SEQ ID NO: 1118260 - RNA, 19 nt, Artificial Sequence
  Description of Artificial Sequence: Synthetic oligonucleotide
ggcccaauaagaaauacaa

SEQ ID NO: 1118261 - RNA, 19 nt, Artificial Sequence
  Description of Artificial Sequence: Synthetic oligonucleotide
gccagaacccauaaaacac

SEQ ID NO: 1118262 - RNA, 19 nt, Artificial Sequence
  Description of Artificial Sequence: Synthetic oligonucleotide
aacgaaugagcugcagcaa

SEQ ID NO: 1118263 - RNA, 19 nt, Artificial Sequence
  Description of Artificial Sequence: Synthetic oligonucleotide
cgaacagcugagaacaggc

SEQ ID NO: 1118264 - RNA, 19 nt, Artificial Sequence
  Description of Artificial Sequence: Synthetic oligonucleotide
aagucauagucuggucuga

SEQ ID NO: 1118265 - RNA, 19 nt, Artificial Sequence
  Description of Artificial Sequence: Synthetic oligonucleotide
aacgggcugcagccgcgac

SEQ ID NO: 1118266 - RNA, 19 nt, Artificial Sequence
  Description of Artificial Sequence: Synthetic oligonucleotide
guuuaagacgcuuguugua

SEQ ID NO: 1118267 - RNA, 19 nt, Artificial Sequence
  Description of Artificial Sequence: Synthetic oligonucleotide
ucaugucacuggcccuuag

SEQ ID NO: 1118268 - RNA, 19 nt, Artificial Sequence
  Description of Artificial Sequence: Synthetic oligonucleotide
uugcgaccgaccugccgcg

SEQ ID NO: 1118269 - RNA, 19 nt, Artificial Sequence
  Description of Artificial Sequence: Synthetic oligonucleotide
ccaguuccaaguccaaugc

SEQ ID NO: 1118270 - RNA, 19 nt, Artificial Sequence
  Description of Artificial Sequence: Synthetic oligonucleotide
gacgucccguuacuccagg

SEQ ID NO: 1118271 - RNA, 19 nt, Artificial Sequence
  Description of Artificial Sequence: Synthetic oligonucleotide
ugucuguggcagacuguug

SEQ ID NO: 1118272 - RNA, 19 nt, Artificial Sequence
  Description of Artificial Sequence: Synthetic oligonucleotide
acgucccguuacuccaggc

SEQ ID NO: 1118273 - RNA, 19 nt, Artificial Sequence
  Description of Artificial Sequence: Synthetic oligonucleotide
gcuuucauccucaccaccc

SEQ ID NO: 1118274 - RNA, 19 nt, Artificial Sequence
  Description of Artificial Sequence: Synthetic oligonucleotide
cuggagcuccuuagguagg

SEQ ID NO: 1118275 - RNA, 19 nt, Artificial Sequence
  Description of Artificial Sequence: Synthetic oligonucleotide
ugauggagcggcagcuaaa

SEQ ID NO: 1118276 - RNA, 19 nt, Artificial Sequence
  Description of Artificial Sequence: Synthetic oligonucleotide
ugcggcugcacuugucacu

SEQ ID NO: 1118277 - RNA, 19 nt, Artificial Sequence
  Description of Artificial Sequence: Synthetic oligonucleotide
gcggccuucacucgggccg

SEQ ID NO: 1118278 - RNA, 19 nt, Artificial Sequence
  Description of Artificial Sequence: Synthetic oligonucleotide
caaacgggcugcagccgcg

SEQ ID NO: 1118279 - RNA, 19 nt, Artificial Sequence
  Description of Artificial Sequence: Synthetic oligonucleotide
agcgucggugcugagacga

SEQ ID NO: 1118280 - RNA, 19 nt, Artificial Sequence
  Description of Artificial Sequence: Synthetic oligonucleotide
gagacgaccucggcgcggg

SEQ ID NO: 1118281 - RNA, 19 nt, Artificial Sequence
  Description of Artificial Sequence: Synthetic oligonucleotide
ggggaagaagcuucgcggc

SEQ ID NO: 1118282 - RNA, 19 nt, Artificial Sequence
  Description of Artificial Sequence: Synthetic oligonucleotide
agcggcagcuaaagaagac

SEQ ID NO: 1118283 - RNA, 19 nt, Artificial Sequence
  Description of Artificial Sequence: Synthetic oligonucleotide
acucauugaguguggcaau

SEQ ID NO: 1118284 - RNA, 19 nt, Artificial Sequence
  Description of Artificial Sequence: Synthetic oligonucleotide
cuuagagcuggaguguaca

SEQ ID NO: 1118285 - RNA, 19 nt, Artificial Sequence
  Description of Artificial Sequence: Synthetic oligonucleotide
uagaucaagccaggcuagc

SEQ ID NO: 1118286 - RNA, 19 nt, Artificial Sequence
  Description of Artificial Sequence: Synthetic oligonucleotide
uaccugccgggaaugggcu

SEQ ID NO: 1118287 - RNA, 19 nt, Artificial Sequence
  Description of Artificial Sequence: Synthetic oligonucleotide
cccaguuccaaguccaaug

SEQ ID NO: 1118288 - RNA, 19 nt, Artificial Sequence
  Description of Artificial Sequence: Synthetic oligonucleotide
guacaggcccaauaagaaa

SEQ ID NO: 1118289 - RNA, 19 nt, Artificial Sequence
  Description of Artificial Sequence: Synthetic oligonucleotide
ucccguuacuccaggcccu

SEQ ID NO: 1118290 - RNA, 19 nt, Artificial Sequence
  Description of Artificial Sequence: Synthetic oligonucleotide
cuuagguaggcagguccag

SEQ ID NO: 1118291 - RNA, 19 nt, Artificial Sequence
  Description of Artificial Sequence: Synthetic oligonucleotide
ugagacgaccucggcgcgg

SEQ ID NO: 1118292 - RNA, 19 nt, Artificial Sequence
  Description of Artificial Sequence: Synthetic oligonucleotide
gguaggcagguccaggcac

SEQ ID NO: 1118293 - RNA, 19 nt, Artificial Sequence
  Description of Artificial Sequence: Synthetic oligonucleotide
ugcuuagcgucggugcuga

SEQ ID NO: 1118294 - RNA, 19 nt, Artificial Sequence
  Description of Artificial Sequence: Synthetic oligonucleotide
ggcucugugcuguuuaauc

SEQ ID NO: 1118295 - RNA, 19 nt, Artificial Sequence
  Description of Artificial Sequence: Synthetic oligonucleotide
accgaccugccgcggaccg

SEQ ID NO: 1118296 - RNA, 19 nt, Artificial Sequence
  Description of Artificial Sequence: Synthetic oligonucleotide
gcugaauucaugacuucug

SEQ ID NO: 1118297 - RNA, 19 nt, Artificial Sequence
  Description of Artificial Sequence: Synthetic oligonucleotide
agccaggcuagccggguug

SEQ ID NO: 1118298 - RNA, 19 nt, Artificial Sequence
  Description of Artificial Sequence: Synthetic oligonucleotide
uugugaguugauggccuca

SEQ ID NO: 1118299 - RNA, 19 nt, Artificial Sequence
  Description of Artificial Sequence: Synthetic oligonucleotide
ggaugggguuucuugugcc

SEQ ID NO: 1118300 - RNA, 19 nt, Artificial Sequence
  Description of Artificial Sequence: Synthetic oligonucleotide
agccgcgacauagccuugc

SEQ ID NO: 1118301 - RNA, 19 nt, Artificial Sequence
  Description of Artificial Sequence: Synthetic oligonucleotide
ucgggccgcauuguauccg

SEQ ID NO: 1118302 - RNA, 19 nt, Artificial Sequence
  Description of Artificial Sequence: Synthetic oligonucleotide
ggaaccacugauggagcgg

SEQ ID NO: 1118303 - RNA, 19 nt, Artificial Sequence
  Description of Artificial Sequence: Synthetic oligonucleotide
cucauugaguguggcaauc

SEQ ID NO: 1118304 - RNA, 19 nt, Artificial Sequence
  Description of Artificial Sequence: Synthetic oligonucleotide
uugcuuagcgucggugcug

SEQ ID NO: 1118305 - RNA, 19 nt, Artificial Sequence
  Description of Artificial Sequence: Synthetic oligonucleotide
gccaucuuacacgaguagc

SEQ ID NO: 1118306 - RNA, 19 nt, Artificial Sequence
  Description of Artificial Sequence: Synthetic oligonucleotide
agcuucgcggcgacguccc

SEQ ID NO: 1118307 - RNA, 19 nt, Artificial Sequence
  Description of Artificial Sequence: Synthetic oligonucleotide
cccauaaaacacugggcac

SEQ ID NO: 1118308 - RNA, 19 nt, Artificial Sequence
  Description of Artificial Sequence: Synthetic oligonucleotide
aggcccaauaagaaauaca

SEQ ID NO: 1118309 - RNA, 19 nt, Artificial Sequence
  Description of Artificial Sequence: Synthetic oligonucleotide
cucgggccgcauuguaucc

SEQ ID NO: 1118310 - RNA, 19 nt, Artificial Sequence
  Description of Artificial Sequence: Synthetic oligonucleotide
cauguccuuugggaugggg

SEQ ID NO: 1118311 - RNA, 19 nt, Artificial Sequence
  Description of Artificial Sequence: Synthetic oligonucleotide
aguguggcaaucagauaga

SEQ ID NO: 1118312 - RNA, 19 nt, Artificial Sequence
  Description of Artificial Sequence: Synthetic oligonucleotide
aaagacuagugcagugcua

SEQ ID NO: 1118313 - RNA, 19 nt, Artificial Sequence
  Description of Artificial Sequence: Synthetic oligonucleotide
ggcccgacaacaacaagcc

SEQ ID NO: 1118314 - RNA, 19 nt, Artificial Sequence
  Description of Artificial Sequence: Synthetic oligonucleotide
gagcggucacuuuucuauc

SEQ ID NO: 1118315 - RNA, 19 nt, Artificial Sequence
  Description of Artificial Sequence: Synthetic oligonucleotide
ugcuaccugccgggaaugg

SEQ ID NO: 1118316 - RNA, 19 nt, Artificial Sequence
  Description of Artificial Sequence: Synthetic oligonucleotide
gggaugggguuucuugugc

SEQ ID NO: 1118317 - RNA, 19 nt, Artificial Sequence
  Description of Artificial Sequence: Synthetic oligonucleotide
gucacuuagagggcuuuca

SEQ ID NO: 1118318 - RNA, 19 nt, Artificial Sequence
  Description of Artificial Sequence: Synthetic oligonucleotide
uucguuuaagacgcuuguu

SEQ ID NO: 1118319 - RNA, 19 nt, Artificial Sequence
  Description of Artificial Sequence: Synthetic oligonucleotide
caguaagagccugcauggg

SEQ ID NO: 1118320 - RNA, 19 nt, Artificial Sequence
  Description of Artificial Sequence: Synthetic oligonucleotide
aucgcacaagacagcgaac

SEQ ID NO: 1118321 - RNA, 19 nt, Artificial Sequence
  Description of Artificial Sequence: Synthetic oligonucleotide
cgaaacagcgaccuccgcc

SEQ ID NO: 1118322 - RNA, 19 nt, Artificial Sequence
  Description of Artificial Sequence: Synthetic oligonucleotide
gcaguugacugcauuuacc

SEQ ID NO: 1118323 - RNA, 19 nt, Artificial Sequence
  Description of Artificial Sequence: Synthetic oligonucleotide
acgggcaguaagagccugc

SEQ ID NO: 1118324 - RNA, 19 nt, Artificial Sequence
  Description of Artificial Sequence: Synthetic oligonucleotide
cucucuugcgaccgaccug

SEQ ID NO: 1118325 - RNA, 19 nt, Artificial Sequence
  Description of Artificial Sequence: Synthetic oligonucleotide
ggccgcauuguauccgggg

SEQ ID NO: 1118326 - RNA, 19 nt, Artificial Sequence
  Description of Artificial Sequence: Synthetic oligonucleotide
guguagguggaaccacuga

SEQ ID NO: 1118327 - RNA, 19 nt, Artificial Sequence
  Description of Artificial Sequence: Synthetic oligonucleotide
gaccgcacagaucgcacaa

SEQ ID NO: 1118328 - RNA, 19 nt, Artificial Sequence
  Description of Artificial Sequence: Synthetic oligonucleotide
ggcgacgucccguuacucc

SEQ ID NO: 1118329 - RNA, 19 nt, Artificial Sequence
  Description of Artificial Sequence: Synthetic oligonucleotide
ggcccugccggcccaaacg

SEQ ID NO: 1118330 - RNA, 19 nt, Artificial Sequence
  Description of Artificial Sequence: Synthetic oligonucleotide
acagggcuucaugucacug

SEQ ID NO: 1118331 - RNA, 19 nt, Artificial Sequence
  Description of Artificial Sequence: Synthetic oligonucleotide
acgaccucggcgcgggcug

SEQ ID NO: 1118332 - RNA, 19 nt, Artificial Sequence
  Description of Artificial Sequence: Synthetic oligonucleotide
cugagacgaccucggcgcg

SEQ ID NO: 1118333 - RNA, 19 nt, Artificial Sequence
  Description of Artificial Sequence: Synthetic oligonucleotide
cugccaauaauaugggcau

SEQ ID NO: 1118334 - RNA, 19 nt, Artificial Sequence
  Description of Artificial Sequence: Synthetic oligonucleotide
ucccggcugaauucaugac

SEQ ID NO: 1118335 - RNA, 19 nt, Artificial Sequence
  Description of Artificial Sequence: Synthetic oligonucleotide
gacuagugcagugcuaccu

SEQ ID NO: 1118336 - RNA, 19 nt, Artificial Sequence
  Description of Artificial Sequence: Synthetic oligonucleotide
ggcccaaacgggcugcagc

SEQ ID NO: 1118337 - RNA, 19 nt, Artificial Sequence
  Description of Artificial Sequence: Synthetic oligonucleotide
cggcccgacaacaacaagc

SEQ ID NO: 1118338 - RNA, 19 nt, Artificial Sequence
  Description of Artificial Sequence: Synthetic oligonucleotide
caaagggcuaggcagguau

SEQ ID NO: 1118339 - RNA, 19 nt, Artificial Sequence
  Description of Artificial Sequence: Synthetic oligonucleotide
aggcuagccggguugcuua

SEQ ID NO: 1118340 - RNA, 19 nt, Artificial Sequence
  Description of Artificial Sequence: Synthetic oligonucleotide
uagcgucggugcugagacg

SEQ ID NO: 1118341 - RNA, 19 nt, Artificial Sequence
  Description of Artificial Sequence: Synthetic oligonucleotide
guugcuuagcgucggugcu

SEQ ID NO: 1118342 - RNA, 19 nt, Artificial Sequence
  Description of Artificial Sequence: Synthetic oligonucleotide
gaagcuucgcggcgacguc

SEQ ID NO: 1118343 - RNA, 19 nt, Artificial Sequence
  Description of Artificial Sequence: Synthetic oligonucleotide
caacaacaagccgucccac

SEQ ID NO: 1118344 - RNA, 19 nt, Artificial Sequence
  Description of Artificial Sequence: Synthetic oligonucleotide
gcuaaagaagacaauucgu

SEQ ID NO: 1118345 - RNA, 19 nt, Artificial Sequence
  Description of Artificial Sequence: Synthetic oligonucleotide
acacggcccggccccacuc

SEQ ID NO: 1118346 - RNA, 19 nt, Artificial Sequence
  Description of Artificial Sequence: Synthetic oligonucleotide
cuuagcgucggugcugaga

SEQ ID NO: 1118347 - RNA, 19 nt, Artificial Sequence
  Description of Artificial Sequence: Synthetic oligonucleotide
gcggucacuuuucuaucag

SEQ ID NO: 1118348 - RNA, 19 nt, Artificial Sequence
  Description of Artificial Sequence: Synthetic oligonucleotide
ugccaauaauaugggcauc

SEQ ID NO: 1118349 - RNA, 19 nt, Artificial Sequence
  Description of Artificial Sequence: Synthetic oligonucleotide
uucacucgggccgcauugu

SEQ ID NO: 1118350 - RNA, 19 nt, Artificial Sequence
  Description of Artificial Sequence: Synthetic oligonucleotide
ugccggcccaaacgggcug

SEQ ID NO: 1118351 - RNA, 19 nt, Artificial Sequence
  Description of Artificial Sequence: Synthetic oligonucleotide
cugagugcggcgcgggcuc

SEQ ID NO: 1118352 - RNA, 19 nt, Artificial Sequence
  Description of Artificial Sequence: Synthetic oligonucleotide
ucacucgggccgcauugua

SEQ ID NO: 1118353 - RNA, 19 nt, Artificial Sequence
  Description of Artificial Sequence: Synthetic oligonucleotide
aaagggcuaggcagguaua

SEQ ID NO: 1118354 - RNA, 19 nt, Artificial Sequence
  Description of Artificial Sequence: Synthetic oligonucleotide
ggaaacgaaugagcugcag

SEQ ID NO: 1118355 - RNA, 19 nt, Artificial Sequence
  Description of Artificial Sequence: Synthetic oligonucleotide
uagccggguugcuuagcgu

SEQ ID NO: 1118356 - RNA, 19 nt, Artificial Sequence
  Description of Artificial Sequence: Synthetic oligonucleotide
cugcauuuaccacccagcu

SEQ ID NO: 1118357 - RNA, 19 nt, Artificial Sequence
  Description of Artificial Sequence: Synthetic oligonucleotide
acuggagggcggcgccgcg

SEQ ID NO: 1118358 - RNA, 19 nt, Artificial Sequence
  Description of Artificial Sequence: Synthetic oligonucleotide
cugauggagcggcagcuaa

SEQ ID NO: 1118359 - RNA, 19 nt, Artificial Sequence
  Description of Artificial Sequence: Synthetic oligonucleotide
ggcgccgcggccuucacuc

SEQ ID NO: 1118360 - RNA, 19 nt, Artificial Sequence
  Description of Artificial Sequence: Synthetic oligonucleotide
agucauagucuggucugaa

SEQ ID NO: 1118361 - RNA, 19 nt, Artificial Sequence
  Description of Artificial Sequence: Synthetic oligonucleotide
aaacgggcugcagccgcga

SEQ ID NO: 1118362 - RNA, 19 nt, Artificial Sequence
  Description of Artificial Sequence: Synthetic oligonucleotide
ugacugcauuuaccaccca

SEQ ID NO: 1118363 - RNA, 19 nt, Artificial Sequence
  Description of Artificial Sequence: Synthetic oligonucleotide
ccaaacgggcugcagccgc

SEQ ID NO: 1118364 - RNA, 19 nt, Artificial Sequence
  Description of Artificial Sequence: Synthetic oligonucleotide
cagugccaggauauagcca

SEQ ID NO: 1118365 - RNA, 19 nt, Artificial Sequence
  Description of Artificial Sequence: Synthetic oligonucleotide
uucgcggcgacgucccguu

SEQ ID NO: 1118366 - RNA, 19 nt, Artificial Sequence
  Description of Artificial Sequence: Synthetic oligonucleotide
ggaguguacaggcccaaua

SEQ ID NO: 1118367 - RNA, 19 nt, Artificial Sequence
  Description of Artificial Sequence: Synthetic oligonucleotide
accgcacagaucgcacaag

SEQ ID NO: 1118368 - RNA, 19 nt, Artificial Sequence
  Description of Artificial Sequence: Synthetic oligonucleotide
ggacucauugaguguggca

SEQ ID NO: 1118369 - RNA, 19 nt, Artificial Sequence
  Description of Artificial Sequence: Synthetic oligonucleotide
ggguguguagacauccaca

SEQ ID NO: 1118370 - RNA, 19 nt, Artificial Sequence
  Description of Artificial Sequence: Synthetic oligonucleotide
cuuagagggcuuucauccu

SEQ ID NO: 1118371 - RNA, 19 nt, Artificial Sequence
  Description of Artificial Sequence: Synthetic oligonucleotide
gcuaccugccgggaauggg

SEQ ID NO: 1118372 - RNA, 19 nt, Artificial Sequence
  Description of Artificial Sequence: Synthetic oligonucleotide
gcagaacugcuugaacaug

SEQ ID NO: 1118373 - RNA, 19 nt, Artificial Sequence
  Description of Artificial Sequence: Synthetic oligonucleotide
cuuacacgaguagcuuuca

SEQ ID NO: 1118374 - RNA, 19 nt, Artificial Sequence
  Description of Artificial Sequence: Synthetic oligonucleotide
gacuggagggcggcgccgc

SEQ ID NO: 1118375 - RNA, 19 nt, Artificial Sequence
  Description of Artificial Sequence: Synthetic oligonucleotide
gcacccucucuugcgaccg

SEQ ID NO: 1118376 - RNA, 19 nt, Artificial Sequence
  Description of Artificial Sequence: Synthetic oligonucleotide
ccaucuuacacgaguagcu

SEQ ID NO: 1118377 - RNA, 19 nt, Artificial Sequence
  Description of Artificial Sequence: Synthetic oligonucleotide
cgaguagcuuucaauccug

SEQ ID NO: 1118378 - RNA, 19 nt, Artificial Sequence
  Description of Artificial Sequence: Synthetic oligonucleotide
ggcuagaucaagccaggcu

SEQ ID NO: 1118379 - RNA, 19 nt, Artificial Sequence
  Description of Artificial Sequence: Synthetic oligonucleotide
agacgaccucggcgcgggc

SEQ ID NO: 1118380 - RNA, 19 nt, Artificial Sequence
  Description of Artificial Sequence: Synthetic oligonucleotide
gcgacgucccguuacucca

SEQ ID NO: 1118381 - RNA, 19 nt, Artificial Sequence
  Description of Artificial Sequence: Synthetic oligonucleotide
cacucggcuaagcaaauuu

SEQ ID NO: 1118382 - RNA, 19 nt, Artificial Sequence
  Description of Artificial Sequence: Synthetic oligonucleotide
gugcugagacgaccucggc

SEQ ID NO: 1118383 - RNA, 19 nt, Artificial Sequence
  Description of Artificial Sequence: Synthetic oligonucleotide
ggucuugcggcugcacuug

SEQ ID NO: 1118384 - RNA, 19 nt, Artificial Sequence
  Description of Artificial Sequence: Synthetic oligonucleotide
gcugagacuuuuccucauc

SEQ ID NO: 1118385 - RNA, 19 nt, Artificial Sequence
  Description of Artificial Sequence: Synthetic oligonucleotide
ugcuaggacugaggccuga

SEQ ID NO: 1118386 - RNA, 19 nt, Artificial Sequence
  Description of Artificial Sequence: Synthetic oligonucleotide
cuggcccuuagagcuggag

SEQ ID NO: 1118387 - RNA, 19 nt, Artificial Sequence
  Description of Artificial Sequence: Synthetic oligonucleotide
ccuuagagcuggaguguac

SEQ ID NO: 1118388 - RNA, 19 nt, Artificial Sequence
  Description of Artificial Sequence: Synthetic oligonucleotide
ggccuugaaguccucccga

SEQ ID NO: 1118389 - RNA, 19 nt, Artificial Sequence
  Description of Artificial Sequence: Synthetic oligonucleotide
acaauucguuuaagacgcu

SEQ ID NO: 1118390 - RNA, 19 nt, Artificial Sequence
  Description of Artificial Sequence: Synthetic oligonucleotide
cggcuaagcaaauuuccuc

SEQ ID NO: 1118391 - RNA, 19 nt, Artificial Sequence
  Description of Artificial Sequence: Synthetic oligonucleotide
ccuuagguaggcaggucca

SEQ ID NO: 1118392 - RNA, 19 nt, Artificial Sequence
  Description of Artificial Sequence: Synthetic oligonucleotide
uggaguguacaggcccaau

SEQ ID NO: 1118393 - RNA, 19 nt, Artificial Sequence
  Description of Artificial Sequence: Synthetic oligonucleotide
ugcgaccgaccugccgcgg

SEQ ID NO: 1118394 - RNA, 19 nt, Artificial Sequence
  Description of Artificial Sequence: Synthetic oligonucleotide
cgucccguuacuccaggcc

SEQ ID NO: 1118395 - RNA, 19 nt, Artificial Sequence
  Description of Artificial Sequence: Synthetic oligonucleotide
gugcuaccugccgggaaug

SEQ ID NO: 1118396 - RNA, 19 nt, Artificial Sequence
  Description of Artificial Sequence: Synthetic oligonucleotide
ucagugcauguggcccacc

SEQ ID NO: 1118397 - RNA, 19 nt, Artificial Sequence
  Description of Artificial Sequence: Synthetic oligonucleotide
gcggcagcuaaagaagaca

SEQ ID NO: 1118398 - RNA, 19 nt, Artificial Sequence
  Description of Artificial Sequence: Synthetic oligonucleotide
cguuacuccaggcccugcc

SEQ ID NO: 1118399 - RNA, 19 nt, Artificial Sequence
  Description of Artificial Sequence: Synthetic oligonucleotide
ccugccgcggaccgcacag

SEQ ID NO: 1118400 - RNA, 19 nt, Artificial Sequence
  Description of Artificial Sequence: Synthetic oligonucleotide
gaccgaccugccgcggacc

SEQ ID NO: 1118401 - RNA, 19 nt, Artificial Sequence
  Description of Artificial Sequence: Synthetic oligonucleotide
ggguguguagguggaacca

SEQ ID NO: 1118402 - RNA, 19 nt, Artificial Sequence
  Description of Artificial Sequence: Synthetic oligonucleotide
ggcugaauucaugacuucu

SEQ ID NO: 1118403 - RNA, 19 nt, Artificial Sequence
  Description of Artificial Sequence: Synthetic oligonucleotide
cugaguccagaucuggguu

SEQ ID NO: 1118404 - RNA, 19 nt, Artificial Sequence
  Description of Artificial Sequence: Synthetic oligonucleotide
cacgggcaguaagagccug

SEQ ID NO: 1118405 - RNA, 19 nt, Artificial Sequence
  Description of Artificial Sequence: Synthetic oligonucleotide
ggaccgcacagaucgcaca

SEQ ID NO: 1118406 - RNA, 19 nt, Artificial Sequence
  Description of Artificial Sequence: Synthetic oligonucleotide
caaggccagaacccauaaa

SEQ ID NO: 1118407 - RNA, 19 nt, Artificial Sequence
  Description of Artificial Sequence: Synthetic oligonucleotide
ugagugcggcgcgggcucc

SEQ ID NO: 1118408 - RNA, 19 nt, Artificial Sequence
  Description of Artificial Sequence: Synthetic oligonucleotide
cacggcccggccccacucc

SEQ ID NO: 1118409 - RNA, 19 nt, Artificial Sequence
  Description of Artificial Sequence: Synthetic oligonucleotide
ggguugcuuagcgucggug

SEQ ID NO: 1118410 - RNA, 19 nt, Artificial Sequence
  Description of Artificial Sequence: Synthetic oligonucleotide
gcgaacgaaacagcgaccu

SEQ ID NO: 1118411 - RNA, 19 nt, Artificial Sequence
  Description of Artificial Sequence: Synthetic oligonucleotide
accgccaacagggcuucau

SEQ ID NO: 1118412 - RNA, 19 nt, Artificial Sequence
  Description of Artificial Sequence: Synthetic oligonucleotide
ccugccgggaaugggcuag

SEQ ID NO: 1118413 - RNA, 19 nt, Artificial Sequence
  Description of Artificial Sequence: Synthetic oligonucleotide
gucggugcugagacgaccu

SEQ ID NO: 1118414 - RNA, 19 nt, Artificial Sequence
  Description of Artificial Sequence: Synthetic oligonucleotide
aggcucugugcuguuuaau

SEQ ID NO: 1118415 - RNA, 19 nt, Artificial Sequence
  Description of Artificial Sequence: Synthetic oligonucleotide
gagggucuugcggcugcac

SEQ ID NO: 1118416 - RNA, 19 nt, Artificial Sequence
  Description of Artificial Sequence: Synthetic oligonucleotide
ccaaaggggucugagucca

SEQ ID NO: 1118417 - RNA, 19 nt, Artificial Sequence
  Description of Artificial Sequence: Synthetic oligonucleotide
agugcggcgcgggcuccuc

SEQ ID NO: 1118418 - RNA, 19 nt, Artificial Sequence
  Description of Artificial Sequence: Synthetic oligonucleotide
acacucggcuaagcaaauu

SEQ ID NO: 1118419 - RNA, 19 nt, Artificial Sequence
  Description of Artificial Sequence: Synthetic oligonucleotide
guaggcagguccaggcacu

SEQ ID NO: 1118420 - RNA, 19 nt, Artificial Sequence
  Description of Artificial Sequence: Synthetic oligonucleotide
cagagcggucacuuuucua

SEQ ID NO: 1118421 - RNA, 19 nt, Artificial Sequence
  Description of Artificial Sequence: Synthetic oligonucleotide
cccucucuugcgaccgacc

SEQ ID NO: 1118422 - RNA, 19 nt, Artificial Sequence
  Description of Artificial Sequence: Synthetic oligonucleotide
gaguccagaucuggguuau

SEQ ID NO: 1118423 - RNA, 19 nt, Artificial Sequence
  Description of Artificial Sequence: Synthetic oligonucleotide
gccgcgacauagccuugcc

SEQ ID NO: 1118424 - RNA, 19 nt, Artificial Sequence
  Description of Artificial Sequence: Synthetic oligonucleotide
gccgggaaugggcuagauc

SEQ ID NO: 1118425 - RNA, 19 nt, Artificial Sequence
  Description of Artificial Sequence: Synthetic oligonucleotide
ggacuggagggcggcgccg

SEQ ID NO: 1118426 - RNA, 19 nt, Artificial Sequence
  Description of Artificial Sequence: Synthetic oligonucleotide
caucuuacacgaguagcuu

SEQ ID NO: 1118427 - RNA, 19 nt, Artificial Sequence
  Description of Artificial Sequence: Synthetic oligonucleotide
gggcuagaucaagccaggc

SEQ ID NO: 1118428 - RNA, 19 nt, Artificial Sequence
  Description of Artificial Sequence: Synthetic oligonucleotide
ccgcgacauagccuugccc

SEQ ID NO: 1118429 - RNA, 19 nt, Artificial Sequence
  Description of Artificial Sequence: Synthetic oligonucleotide
caauucguuuaagacgcuu

SEQ ID NO: 1118430 - RNA, 19 nt, Artificial Sequence
  Description of Artificial Sequence: Synthetic oligonucleotide
ccgccaacagggcuucaug

SEQ ID NO: 1118431 - RNA, 19 nt, Artificial Sequence
  Description of Artificial Sequence: Synthetic oligonucleotide
cccgaacagcugagaacag

SEQ ID NO: 1118432 - RNA, 19 nt, Artificial Sequence
  Description of Artificial Sequence: Synthetic oligonucleotide
cggcagcuaaagaagacaa

SEQ ID NO: 1118433 - RNA, 19 nt, Artificial Sequence
  Description of Artificial Sequence: Synthetic oligonucleotide
cagugcuaccugccgggaa

SEQ ID NO: 1118434 - RNA, 19 nt, Artificial Sequence
  Description of Artificial Sequence: Synthetic oligonucleotide
gaccucggcgcgggcugag

SEQ ID NO: 1118435 - RNA, 19 nt, Artificial Sequence
  Description of Artificial Sequence: Synthetic oligonucleotide
gaucuggguuauagcugua

SEQ ID NO: 1118436 - RNA, 19 nt, Artificial Sequence
  Description of Artificial Sequence: Synthetic oligonucleotide
ggcgcgggcuccucaggac

SEQ ID NO: 1118437 - RNA, 19 nt, Artificial Sequence
  Description of Artificial Sequence: Synthetic oligonucleotide
cccaaacgggcugcagccg

SEQ ID NO: 1118438 - RNA, 19 nt, Artificial Sequence
  Description of Artificial Sequence: Synthetic oligonucleotide
gggguuucuugugccagaa

SEQ ID NO: 1118439 - RNA, 19 nt, Artificial Sequence
  Description of Artificial Sequence: Synthetic oligonucleotide
ccucccgaacagcugagaa

SEQ ID NO: 1118440 - RNA, 19 nt, Artificial Sequence
  Description of Artificial Sequence: Synthetic oligonucleotide
gggcaaaagugggcaccag

SEQ ID NO: 1118441 - RNA, 19 nt, Artificial Sequence
  Description of Artificial Sequence: Synthetic oligonucleotide
ugccgggaaugggcuagau

SEQ ID NO: 1118442 - RNA, 19 nt, Artificial Sequence
  Description of Artificial Sequence: Synthetic oligonucleotide
gccaggcuagccggguugc

SEQ ID NO: 1118443 - RNA, 19 nt, Artificial Sequence
  Description of Artificial Sequence: Synthetic oligonucleotide
cccggcugaauucaugacu

SEQ ID NO: 1118444 - RNA, 19 nt, Artificial Sequence
  Description of Artificial Sequence: Synthetic oligonucleotide
ccggcugaauucaugacuu

SEQ ID NO: 1118445 - RNA, 19 nt, Artificial Sequence
  Description of Artificial Sequence: Synthetic oligonucleotide
cacacucggcuaagcaaau

SEQ ID NO: 1118446 - RNA, 19 nt, Artificial Sequence
  Description of Artificial Sequence: Synthetic oligonucleotide
cagccgcgacauagccuug

SEQ ID NO: 1118447 - RNA, 19 nt, Artificial Sequence
  Description of Artificial Sequence: Synthetic oligonucleotide
ccucggcgcgggcugagug

SEQ ID NO: 1118448 - RNA, 19 nt, Artificial Sequence
  Description of Artificial Sequence: Synthetic oligonucleotide
gccgcggccuucacucggg

SEQ ID NO: 1118449 - RNA, 19 nt, Artificial Sequence
  Description of Artificial Sequence: Synthetic oligonucleotide
ccaacacauggggcuggcc

SEQ ID NO: 1118450 - RNA, 19 nt, Artificial Sequence
  Description of Artificial Sequence: Synthetic oligonucleotide
gggccgcauuguauccggg

SEQ ID NO: 1118451 - RNA, 19 nt, Artificial Sequence
  Description of Artificial Sequence: Synthetic oligonucleotide
cggaccgcacagaucgcac

SEQ ID NO: 1118452 - RNA, 19 nt, Artificial Sequence
  Description of Artificial Sequence: Synthetic oligonucleotide
gcuucgcggcgacgucccg

SEQ ID NO: 1118453 - RNA, 19 nt, Artificial Sequence
  Description of Artificial Sequence: Synthetic oligonucleotide
ccccggcccgacaacaaca

SEQ ID NO: 1118454 - RNA, 19 nt, Artificial Sequence
  Description of Artificial Sequence: Synthetic oligonucleotide
cgacgucccguuacuccag

SEQ ID NO: 1118455 - RNA, 19 nt, Artificial Sequence
  Description of Artificial Sequence: Synthetic oligonucleotide
cgaacgaaacagcgaccuc

SEQ ID NO: 1118456 - RNA, 19 nt, Artificial Sequence
  Description of Artificial Sequence: Synthetic oligonucleotide
ggcccuccuggcagaacug

SEQ ID NO: 1118457 - RNA, 19 nt, Artificial Sequence
  Description of Artificial Sequence: Synthetic oligonucleotide
gcggaccgcacagaucgca

SEQ ID NO: 1118458 - RNA, 19 nt, Artificial Sequence
  Description of Artificial Sequence: Synthetic oligonucleotide
cugccggcccaaacgggcu

SEQ ID NO: 1118459 - RNA, 19 nt, Artificial Sequence
  Description of Artificial Sequence: Synthetic oligonucleotide
cgucggugcugagacgacc

SEQ ID NO: 1118460 - RNA, 19 nt, Artificial Sequence
  Description of Artificial Sequence: Synthetic oligonucleotide
gcuuagcgucggugcugag

SEQ ID NO: 1118461 - RNA, 19 nt, Artificial Sequence
  Description of Artificial Sequence: Synthetic oligonucleotide
aguccagaucuggguuaua

SEQ ID NO: 1118462 - RNA, 19 nt, Artificial Sequence
  Description of Artificial Sequence: Synthetic oligonucleotide
gggcucccggcugaauuca

SEQ ID NO: 1118463 - RNA, 19 nt, Artificial Sequence
  Description of Artificial Sequence: Synthetic oligonucleotide
ccggcccgacaacaacaag

SEQ ID NO: 1118464 - RNA, 19 nt, Artificial Sequence
  Description of Artificial Sequence: Synthetic oligonucleotide
ucgcggcgacgucccguua

SEQ ID NO: 1118465 - RNA, 19 nt, Artificial Sequence
  Description of Artificial Sequence: Synthetic oligonucleotide
gcuaggacugaggccugaa

SEQ ID NO: 1118466 - RNA, 19 nt, Artificial Sequence
  Description of Artificial Sequence: Synthetic oligonucleotide
cgcggcgacgucccguuac

SEQ ID NO: 1118467 - RNA, 19 nt, Artificial Sequence
  Description of Artificial Sequence: Synthetic oligonucleotide
cgcacaagacagcgaacga

SEQ ID NO: 1118468 - RNA, 19 nt, Artificial Sequence
  Description of Artificial Sequence: Synthetic oligonucleotide
gcgaccgaccugccgcgga

SEQ ID NO: 1118469 - RNA, 19 nt, Artificial Sequence
  Description of Artificial Sequence: Synthetic oligonucleotide
cacccucucuugcgaccga

SEQ ID NO: 1118470 - RNA, 19 nt, Artificial Sequence
  Description of Artificial Sequence: Synthetic oligonucleotide
guggcccaccugguaaggu

SEQ ID NO: 1118471 - RNA, 19 nt, Artificial Sequence
  Description of Artificial Sequence: Synthetic oligonucleotide
cuucgcggcgacgucccgu

SEQ ID NO: 1118472 - RNA, 19 nt, Artificial Sequence
  Description of Artificial Sequence: Synthetic oligonucleotide
ggcaccgccaacagggcuu

SEQ ID NO: 1118473 - RNA, 19 nt, Artificial Sequence
  Description of Artificial Sequence: Synthetic oligonucleotide
gcaccgccaacagggcuuc

SEQ ID NO: 1118474 - RNA, 19 nt, Artificial Sequence
  Description of Artificial Sequence: Synthetic oligonucleotide
cccggcccgacaacaacaa

SEQ ID NO: 1118475 - RNA, 19 nt, Artificial Sequence
  Description of Artificial Sequence: Synthetic oligonucleotide
cccguuacuccaggcccug

SEQ ID NO: 1118476 - RNA, 19 nt, Artificial Sequence
  Description of Artificial Sequence: Synthetic oligonucleotide
gcccuuagagcuggagugu

SEQ ID NO: 1118477 - RNA, 19 nt, Artificial Sequence
  Description of Artificial Sequence: Synthetic oligonucleotide
cgaccgaccugccgcggac

SEQ ID NO: 1118478 - RNA, 19 nt, Artificial Sequence
  Description of Artificial Sequence: Synthetic oligonucleotide
gcgcgggcuccucaggacu

SEQ ID NO: 1118479 - RNA, 19 nt, Artificial Sequence
  Description of Artificial Sequence: Synthetic oligonucleotide
ccguuacuccaggcccugc

SEQ ID NO: 1118480 - RNA, 19 nt, Artificial Sequence
  Description of Artificial Sequence: Synthetic oligonucleotide
ggcccggccccacuccucu

SEQ ID NO: 1118481 - RNA, 19 nt, Artificial Sequence
  Description of Artificial Sequence: Synthetic oligonucleotide
gcggcugcacuugucacuu

SEQ ID NO: 1118482 - RNA, 19 nt, Artificial Sequence
  Description of Artificial Sequence: Synthetic oligonucleotide
cccuuagagcuggagugua

SEQ ID NO: 1118483 - RNA, 19 nt, Artificial Sequence
  Description of Artificial Sequence: Synthetic oligonucleotide
caggcuagccggguugcuu

SEQ ID NO: 1118484 - RNA, 19 nt, Artificial Sequence
  Description of Artificial Sequence: Synthetic oligonucleotide
gcggcgacgucccguuacu

SEQ ID NO: 1118485 - RNA, 19 nt, Artificial Sequence
  Description of Artificial Sequence: Synthetic oligonucleotide
ccgcggccuucacucgggc

SEQ ID NO: 1118486 - RNA, 19 nt, Artificial Sequence
  Description of Artificial Sequence: Synthetic oligonucleotide
gcgucggugcugagacgac

SEQ ID NO: 1118487 - RNA, 19 nt, Artificial Sequence
  Description of Artificial Sequence: Synthetic oligonucleotide
cccggccccacuccucuga

SEQ ID NO: 1118488 - RNA, 19 nt, Artificial Sequence
  Description of Artificial Sequence: Synthetic oligonucleotide
cacacggcccggccccacu

SEQ ID NO: 1118489 - RNA, 19 nt, Artificial Sequence
  Description of Artificial Sequence: Synthetic oligonucleotide
cgcggaccgcacagaucgc

SEQ ID NO: 1118490 - RNA, 19 nt, Artificial Sequence
  Description of Artificial Sequence: Synthetic oligonucleotide
ggcggcgccgcggccuuca

SEQ ID NO: 1118491 - RNA, 19 nt, Artificial Sequence
  Description of Artificial Sequence: Synthetic oligonucleotide
caccgccaacagggcuuca

SEQ ID NO: 1118492 - RNA, 19 nt, Artificial Sequence
  Description of Artificial Sequence: Synthetic oligonucleotide
gcggcgccgcggccuucac

SEQ ID NO: 1118493 - RNA, 19 nt, Artificial Sequence
  Description of Artificial Sequence: Synthetic oligonucleotide
cggcgacgucccguuacuc

SEQ ID NO: 1118494 - RNA, 19 nt, Artificial Sequence
  Description of Artificial Sequence: Synthetic oligonucleotide
ggcucccggcugaauucau

SEQ ID NO: 1118495 - RNA, 19 nt, Artificial Sequence
  Description of Artificial Sequence: Synthetic oligonucleotide
cgaccucggcgcgggcuga

SEQ ID NO: 1118496 - RNA, 19 nt, Artificial Sequence
  Description of Artificial Sequence: Synthetic oligonucleotide
cggguugcuuagcgucggu

SEQ ID NO: 1118497 - RNA, 19 nt, Artificial Sequence
  Description of Artificial Sequence: Synthetic oligonucleotide
cggcgccgcggccuucacu

SEQ ID NO: 1118498 - RNA, 19 nt, Artificial Sequence
  Description of Artificial Sequence: Synthetic oligonucleotide
aagauuuucaaauaaacgc

SEQ ID NO: 1118499 - RNA, 19 nt, Artificial Sequence
  Description of Artificial Sequence: Synthetic oligonucleotide
caaaguaaucauuauaugg

SEQ ID NO: 1118500 - RNA, 19 nt, Artificial Sequence
  Description of Artificial Sequence: Synthetic oligonucleotide
aaucgcuugcauuugaacg

SEQ ID NO: 1118501 - RNA, 19 nt, Artificial Sequence
  Description of Artificial Sequence: Synthetic oligonucleotide
uauauggcaacucauuagg

SEQ ID NO: 1118502 - RNA, 19 nt, Artificial Sequence
  Description of Artificial Sequence: Synthetic oligonucleotide
cucacaauaaaacuuagcc

SEQ ID NO: 1118503 - RNA, 19 nt, Artificial Sequence
  Description of Artificial Sequence: Synthetic oligonucleotide
uuuagcaugaccuuugaca

SEQ ID NO: 1118504 - RNA, 19 nt, Artificial Sequence
  Description of Artificial Sequence: Synthetic oligonucleotide
agauaauuacaaaagaugg

SEQ ID NO: 1118505 - RNA, 19 nt, Artificial Sequence
  Description of Artificial Sequence: Synthetic oligonucleotide
aaaauuuguccauaggacu

SEQ ID NO: 1118506 - RNA, 19 nt, Artificial Sequence
  Description of Artificial Sequence: Synthetic oligonucleotide
ucuaugucgauauacaaga

SEQ ID NO: 1118507 - RNA, 19 nt, Artificial Sequence
  Description of Artificial Sequence: Synthetic oligonucleotide
aauaugcaguuugaaaucc

SEQ ID NO: 1118508 - RNA, 19 nt, Artificial Sequence
  Description of Artificial Sequence: Synthetic oligonucleotide
acugcagucucauaugucc

SEQ ID NO: 1118509 - RNA, 19 nt, Artificial Sequence
  Description of Artificial Sequence: Synthetic oligonucleotide
aauuugauauacucaucac

SEQ ID NO: 1118510 - RNA, 19 nt, Artificial Sequence
  Description of Artificial Sequence: Synthetic oligonucleotide
aaguuggggagucaaauuc

SEQ ID NO: 1118511 - RNA, 19 nt, Artificial Sequence
  Description of Artificial Sequence: Synthetic oligonucleotide
uaauuuagcagcaaguuau

SEQ ID NO: 1118512 - RNA, 19 nt, Artificial Sequence
  Description of Artificial Sequence: Synthetic oligonucleotide
aagauaauuacaaaagaug

SEQ ID NO: 1118513 - RNA, 19 nt, Artificial Sequence
  Description of Artificial Sequence: Synthetic oligonucleotide
aacacaucaauuuuaaaua

SEQ ID NO: 1118514 - RNA, 19 nt, Artificial Sequence
  Description of Artificial Sequence: Synthetic oligonucleotide
auaaauacaguccaugcca

SEQ ID NO: 1118515 - RNA, 19 nt, Artificial Sequence
  Description of Artificial Sequence: Synthetic oligonucleotide
uuagcaugaccuuugacag

SEQ ID NO: 1118516 - RNA, 19 nt, Artificial Sequence
  Description of Artificial Sequence: Synthetic oligonucleotide
aaauaaacgcuguuuuauc

SEQ ID NO: 1118517 - RNA, 19 nt, Artificial Sequence
  Description of Artificial Sequence: Synthetic oligonucleotide
uauaccaucucucauggga

SEQ ID NO: 1118518 - RNA, 19 nt, Artificial Sequence
  Description of Artificial Sequence: Synthetic oligonucleotide
ucacuuuugagauuauagg

SEQ ID NO: 1118519 - RNA, 19 nt, Artificial Sequence
  Description of Artificial Sequence: Synthetic oligonucleotide
aaucgaaauccgcuugucc

SEQ ID NO: 1118520 - RNA, 19 nt, Artificial Sequence
  Description of Artificial Sequence: Synthetic oligonucleotide
uuagccaagaaaauuaaaa

SEQ ID NO: 1118521 - RNA, 19 nt, Artificial Sequence
  Description of Artificial Sequence: Synthetic oligonucleotide
aauaaacgcuguuuuaucu

SEQ ID NO: 1118522 - RNA, 19 nt, Artificial Sequence
  Description of Artificial Sequence: Synthetic oligonucleotide
uucgguauaaaccauaauu

SEQ ID NO: 1118523 - RNA, 19 nt, Artificial Sequence
  Description of Artificial Sequence: Synthetic oligonucleotide
aagaaauuuugcuucauaa

SEQ ID NO: 1118524 - RNA, 19 nt, Artificial Sequence
  Description of Artificial Sequence: Synthetic oligonucleotide
aguacaauaucauuaacau

SEQ ID NO: 1118525 - RNA, 19 nt, Artificial Sequence
  Description of Artificial Sequence: Synthetic oligonucleotide
uggacaaucuucuccaacg

SEQ ID NO: 1118526 - RNA, 19 nt, Artificial Sequence
  Description of Artificial Sequence: Synthetic oligonucleotide
aucgcuugcauuugaacgc

SEQ ID NO: 1118527 - RNA, 19 nt, Artificial Sequence
  Description of Artificial Sequence: Synthetic oligonucleotide
uacuucuacacauuuagca

SEQ ID NO: 1118528 - RNA, 19 nt, Artificial Sequence
  Description of Artificial Sequence: Synthetic oligonucleotide
uuuagcagcaaguuaugag

SEQ ID NO: 1118529 - RNA, 19 nt, Artificial Sequence
  Description of Artificial Sequence: Synthetic oligonucleotide
aucgaaauccgcuuguccg

SEQ ID NO: 1118530 - RNA, 19 nt, Artificial Sequence
  Description of Artificial Sequence: Synthetic oligonucleotide
cacuuuugagauuauaggc

SEQ ID NO: 1118531 - RNA, 19 nt, Artificial Sequence
  Description of Artificial Sequence: Synthetic oligonucleotide
uuagcagcaaguuaugagu

SEQ ID NO: 1118532 - RNA, 19 nt, Artificial Sequence
  Description of Artificial Sequence: Synthetic oligonucleotide
uggaaugaaacugucauca

SEQ ID NO: 1118533 - RNA, 19 nt, Artificial Sequence
  Description of Artificial Sequence: Synthetic oligonucleotide
aaucacauaaagcauggua

SEQ ID NO: 1118534 - RNA, 19 nt, Artificial Sequence
  Description of Artificial Sequence: Synthetic oligonucleotide
aggacuaauaugcaguuug

SEQ ID NO: 1118535 - RNA, 19 nt, Artificial Sequence
  Description of Artificial Sequence: Synthetic oligonucleotide
ugauauacucaucacugug

SEQ ID NO: 1118536 - RNA, 19 nt, Artificial Sequence
  Description of Artificial Sequence: Synthetic oligonucleotide
uuuggcaugauguaauccu

SEQ ID NO: 1118537 - RNA, 19 nt, Artificial Sequence
  Description of Artificial Sequence: Synthetic oligonucleotide
gauauacucaucacugugg

SEQ ID NO: 1118538 - RNA, 19 nt, Artificial Sequence
  Description of Artificial Sequence: Synthetic oligonucleotide
aaauucaaggguugcugag

SEQ ID NO: 1118539 - RNA, 19 nt, Artificial Sequence
  Description of Artificial Sequence: Synthetic oligonucleotide
uuccauauauucuggagug

SEQ ID NO: 1118540 - RNA, 19 nt, Artificial Sequence
  Description of Artificial Sequence: Synthetic oligonucleotide
aaaagcuuccucaacacca

SEQ ID NO: 1118541 - RNA, 19 nt, Artificial Sequence
  Description of Artificial Sequence: Synthetic oligonucleotide
aggaaaguauuccccauac

SEQ ID NO: 1118542 - RNA, 19 nt, Artificial Sequence
  Description of Artificial Sequence: Synthetic oligonucleotide
uuugacauaauaacacauc

SEQ ID NO: 1118543 - RNA, 19 nt, Artificial Sequence
  Description of Artificial Sequence: Synthetic oligonucleotide
agcaaguuaugagucaucc

SEQ ID NO: 1118544 - RNA, 19 nt, Artificial Sequence
  Description of Artificial Sequence: Synthetic oligonucleotide
uacuuuaguaacucaagga

SEQ ID NO: 1118545 - RNA, 19 nt, Artificial Sequence
  Description of Artificial Sequence: Synthetic oligonucleotide
aggaauuucacaauccagg

SEQ ID NO: 1118546 - RNA, 19 nt, Artificial Sequence
  Description of Artificial Sequence: Synthetic oligonucleotide
uuuugacauaauaacacau

SEQ ID NO: 1118547 - RNA, 19 nt, Artificial Sequence
  Description of Artificial Sequence: Synthetic oligonucleotide
uaugucgauauacaagacu

SEQ ID NO: 1118548 - RNA, 19 nt, Artificial Sequence
  Description of Artificial Sequence: Synthetic oligonucleotide
aaucauuauauggcaacuc

SEQ ID NO: 1118549 - RNA, 19 nt, Artificial Sequence
  Description of Artificial Sequence: Synthetic oligonucleotide
auacuuauggaaugaaacu

SEQ ID NO: 1118550 - RNA, 19 nt, Artificial Sequence
  Description of Artificial Sequence: Synthetic oligonucleotide
aacucauuaggaauuucac

SEQ ID NO: 1118551 - RNA, 19 nt, Artificial Sequence
  Description of Artificial Sequence: Synthetic oligonucleotide
uugucugaugcacgaaucg

SEQ ID NO: 1118552 - RNA, 19 nt, Artificial Sequence
  Description of Artificial Sequence: Synthetic oligonucleotide
gaucguagaaauuugauau

SEQ ID NO: 1118553 - RNA, 19 nt, Artificial Sequence
  Description of Artificial Sequence: Synthetic oligonucleotide
ugauggaugucuaugucga

SEQ ID NO: 1118554 - RNA, 19 nt, Artificial Sequence
  Description of Artificial Sequence: Synthetic oligonucleotide
augucgauauacaagacuc

SEQ ID NO: 1118555 - RNA, 19 nt, Artificial Sequence
  Description of Artificial Sequence: Synthetic oligonucleotide
aauccuagcuuucuuugcu

SEQ ID NO: 1118556 - RNA, 19 nt, Artificial Sequence
  Description of Artificial Sequence: Synthetic oligonucleotide
aauccgguccaaaauacuc

SEQ ID NO: 1118557 - RNA, 19 nt, Artificial Sequence
  Description of Artificial Sequence: Synthetic oligonucleotide
gguuucucaucccauaucg

SEQ ID NO: 1118558 - RNA, 19 nt, Artificial Sequence
  Description of Artificial Sequence: Synthetic oligonucleotide
aaguauuccccauacuuau

SEQ ID NO: 1118559 - RNA, 19 nt, Artificial Sequence
  Description of Artificial Sequence: Synthetic oligonucleotide
auuccgacgaccuccuucg

SEQ ID NO: 1118560 - RNA, 19 nt, Artificial Sequence
  Description of Artificial Sequence: Synthetic oligonucleotide
accauaauuuagcagcaag

SEQ ID NO: 1118561 - RNA, 19 nt, Artificial Sequence
  Description of Artificial Sequence: Synthetic oligonucleotide
guaaucauuauauggcaac

SEQ ID NO: 1118562 - RNA, 19 nt, Artificial Sequence
  Description of Artificial Sequence: Synthetic oligonucleotide
aucauuauauggcaacuca

SEQ ID NO: 1118563 - RNA, 19 nt, Artificial Sequence
  Description of Artificial Sequence: Synthetic oligonucleotide
uuuaacuucacagccccag

SEQ ID NO: 1118564 - RNA, 19 nt, Artificial Sequence
  Description of Artificial Sequence: Synthetic oligonucleotide
acuaauaugcaguuugaaa

SEQ ID NO: 1118565 - RNA, 19 nt, Artificial Sequence
  Description of Artificial Sequence: Synthetic oligonucleotide
augauguaauccuccggcc

SEQ ID NO: 1118566 - RNA, 19 nt, Artificial Sequence
  Description of Artificial Sequence: Synthetic oligonucleotide
gaugcacgaaucgaaaucc

SEQ ID NO: 1118567 - RNA, 19 nt, Artificial Sequence
  Description of Artificial Sequence: Synthetic oligonucleotide
ucaucuauaccaucucuca

SEQ ID NO: 1118568 - RNA, 19 nt, Artificial Sequence
  Description of Artificial Sequence: Synthetic oligonucleotide
uauacaagacucucugaug

SEQ ID NO: 1118569 - RNA, 19 nt, Artificial Sequence
  Description of Artificial Sequence: Synthetic oligonucleotide
cauauguccaacaccgagc

SEQ ID NO: 1118570 - RNA, 19 nt, Artificial Sequence
  Description of Artificial Sequence: Synthetic oligonucleotide
agcaguggcuuuaugaggc

SEQ ID NO: 1118571 - RNA, 19 nt, Artificial Sequence
  Description of Artificial Sequence: Synthetic oligonucleotide
ugaaauccgguccaaaaua

SEQ ID NO: 1118572 - RNA, 19 nt, Artificial Sequence
  Description of Artificial Sequence: Synthetic oligonucleotide
uuuguugccgguuuaacuu

SEQ ID NO: 1118573 - RNA, 19 nt, Artificial Sequence
  Description of Artificial Sequence: Synthetic oligonucleotide
caagcuauccgcuugucug

SEQ ID NO: 1118574 - RNA, 19 nt, Artificial Sequence
  Description of Artificial Sequence: Synthetic oligonucleotide
ugaccuuugacagugagau

SEQ ID NO: 1118575 - RNA, 19 nt, Artificial Sequence
  Description of Artificial Sequence: Synthetic oligonucleotide
aguccucagacaucaaagg

SEQ ID NO: 1118576 - RNA, 19 nt, Artificial Sequence
  Description of Artificial Sequence: Synthetic oligonucleotide
ugauguaauccuccggccc

SEQ ID NO: 1118577 - RNA, 19 nt, Artificial Sequence
  Description of Artificial Sequence: Synthetic oligonucleotide
ggaucuuuaaguuggggag

SEQ ID NO: 1118578 - RNA, 19 nt, Artificial Sequence
  Description of Artificial Sequence: Synthetic oligonucleotide
aauccuccggcccaguuga

SEQ ID NO: 1118579 - RNA, 19 nt, Artificial Sequence
  Description of Artificial Sequence: Synthetic oligonucleotide
cauaucaguuuguugccgg

SEQ ID NO: 1118580 - RNA, 19 nt, Artificial Sequence
  Description of Artificial Sequence: Synthetic oligonucleotide
ggaauuucacaauccaggg

SEQ ID NO: 1118581 - RNA, 19 nt, Artificial Sequence
  Description of Artificial Sequence: Synthetic oligonucleotide
uuacuauacucagacaugu

SEQ ID NO: 1118582 - RNA, 19 nt, Artificial Sequence
  Description of Artificial Sequence: Synthetic oligonucleotide
gaauuucacaauccagggc

SEQ ID NO: 1118583 - RNA, 19 nt, Artificial Sequence
  Description of Artificial Sequence: Synthetic oligonucleotide
uguggcaacauucgaagau

SEQ ID NO: 1118584 - RNA, 19 nt, Artificial Sequence
  Description of Artificial Sequence: Synthetic oligonucleotide
ugaugcacgaaucgaaauc

SEQ ID NO: 1118585 - RNA, 19 nt, Artificial Sequence
  Description of Artificial Sequence: Synthetic oligonucleotide
caagccuaucaccagacag

SEQ ID NO: 1118586 - RNA, 19 nt, Artificial Sequence
  Description of Artificial Sequence: Synthetic oligonucleotide
gaaugaaacugucaucaca

SEQ ID NO: 1118587 - RNA, 19 nt, Artificial Sequence
  Description of Artificial Sequence: Synthetic oligonucleotide
uuguucuauuucuucagca

SEQ ID NO: 1118588 - RNA, 19 nt, Artificial Sequence
  Description of Artificial Sequence: Synthetic oligonucleotide
gacauaauaacacaucaau

SEQ ID NO: 1118589 - RNA, 19 nt, Artificial Sequence
  Description of Artificial Sequence: Synthetic oligonucleotide
uuucucaucccauaucguc

SEQ ID NO: 1118590 - RNA, 19 nt, Artificial Sequence
  Description of Artificial Sequence: Synthetic oligonucleotide
cugaugguacuuuaguaac

SEQ ID NO: 1118591 - RNA, 19 nt, Artificial Sequence
  Description of Artificial Sequence: Synthetic oligonucleotide
cuaauaugcaguuugaaau

SEQ ID NO: 1118592 - RNA, 19 nt, Artificial Sequence
  Description of Artificial Sequence: Synthetic oligonucleotide
ucgaagauuuucaaauaaa

SEQ ID NO: 1118593 - RNA, 19 nt, Artificial Sequence
  Description of Artificial Sequence: Synthetic oligonucleotide
ucguagaaauuugauauac

SEQ ID NO: 1118594 - RNA, 19 nt, Artificial Sequence
  Description of Artificial Sequence: Synthetic oligonucleotide
aaucagcucagaaaggcca

SEQ ID NO: 1118595 - RNA, 19 nt, Artificial Sequence
  Description of Artificial Sequence: Synthetic oligonucleotide
acuauacucagacauguua

SEQ ID NO: 1118596 - RNA, 19 nt, Artificial Sequence
  Description of Artificial Sequence: Synthetic oligonucleotide
agcagccaagccuaucacc

SEQ ID NO: 1118597 - RNA, 19 nt, Artificial Sequence
  Description of Artificial Sequence: Synthetic oligonucleotide
uugaaauccgguccaaaau

SEQ ID NO: 1118598 - RNA, 19 nt, Artificial Sequence
  Description of Artificial Sequence: Synthetic oligonucleotide
auauacucaucacuguggu

SEQ ID NO: 1118599 - RNA, 19 nt, Artificial Sequence
  Description of Artificial Sequence: Synthetic oligonucleotide
auuguauagccaccuccac

SEQ ID NO: 1118600 - RNA, 19 nt, Artificial Sequence
  Description of Artificial Sequence: Synthetic oligonucleotide
auuuagcaugaccuuugac

SEQ ID NO: 1118601 - RNA, 19 nt, Artificial Sequence
  Description of Artificial Sequence: Synthetic oligonucleotide
aacauucgaagauuuucaa

SEQ ID NO: 1118602 - RNA, 19 nt, Artificial Sequence
  Description of Artificial Sequence: Synthetic oligonucleotide
uaucgaucguagaaauuug

SEQ ID NO: 1118603 - RNA, 19 nt, Artificial Sequence
  Description of Artificial Sequence: Synthetic oligonucleotide
cauaauaacacaucaauuu

SEQ ID NO: 1118604 - RNA, 19 nt, Artificial Sequence
  Description of Artificial Sequence: Synthetic oligonucleotide
ucuuaucgaucguagaaau

SEQ ID NO: 1118605 - RNA, 19 nt, Artificial Sequence
  Description of Artificial Sequence: Synthetic oligonucleotide
acuuuugagauuauaggcu

SEQ ID NO: 1118606 - RNA, 19 nt, Artificial Sequence
  Description of Artificial Sequence: Synthetic oligonucleotide
auguuugaaggacuaauau

SEQ ID NO: 1118607 - RNA, 19 nt, Artificial Sequence
  Description of Artificial Sequence: Synthetic oligonucleotide
uaaauacaguccaugccaa

SEQ ID NO: 1118608 - RNA, 19 nt, Artificial Sequence
  Description of Artificial Sequence: Synthetic oligonucleotide
ucgauauacaagacucucu

SEQ ID NO: 1118609 - RNA, 19 nt, Artificial Sequence
  Description of Artificial Sequence: Synthetic oligonucleotide
ugcauuugaacgccaggug

SEQ ID NO: 1118610 - RNA, 19 nt, Artificial Sequence
  Description of Artificial Sequence: Synthetic oligonucleotide
aacaccgagcaacguuucg

SEQ ID NO: 1118611 - RNA, 19 nt, Artificial Sequence
  Description of Artificial Sequence: Synthetic oligonucleotide
aucacauaaagcaugguaa

SEQ ID NO: 1118612 - RNA, 19 nt, Artificial Sequence
  Description of Artificial Sequence: Synthetic oligonucleotide
aaaacuuagccaagaaaau

SEQ ID NO: 1118613 - RNA, 19 nt, Artificial Sequence
  Description of Artificial Sequence: Synthetic oligonucleotide
uccaggaaaguauucccca

SEQ ID NO: 1118614 - RNA, 19 nt, Artificial Sequence
  Description of Artificial Sequence: Synthetic oligonucleotide
aaacuuagccaagaaaauu

SEQ ID NO: 1118615 - RNA, 19 nt, Artificial Sequence
  Description of Artificial Sequence: Synthetic oligonucleotide
acucacaauaaaacuuagc

SEQ ID NO: 1118616 - RNA, 19 nt, Artificial Sequence
  Description of Artificial Sequence: Synthetic oligonucleotide
uuuacuacuucuacacauu

SEQ ID NO: 1118617 - RNA, 19 nt, Artificial Sequence
  Description of Artificial Sequence: Synthetic oligonucleotide
ugcacgaaucgaaauccgc

SEQ ID NO: 1118618 - RNA, 19 nt, Artificial Sequence
  Description of Artificial Sequence: Synthetic oligonucleotide
auaucgucucacuuuucag

SEQ ID NO: 1118619 - RNA, 19 nt, Artificial Sequence
  Description of Artificial Sequence: Synthetic oligonucleotide
uuaacuucacagccccagc

SEQ ID NO: 1118620 - RNA, 19 nt, Artificial Sequence
  Description of Artificial Sequence: Synthetic oligonucleotide
uaaucauuauauggcaacu

SEQ ID NO: 1118621 - RNA, 19 nt, Artificial Sequence
  Description of Artificial Sequence: Synthetic oligonucleotide
gguuuaacuucacagcccc

SEQ ID NO: 1118622 - RNA, 19 nt, Artificial Sequence
  Description of Artificial Sequence: Synthetic oligonucleotide
aucgucucacuuuucagga

SEQ ID NO: 1118623 - RNA, 19 nt, Artificial Sequence
  Description of Artificial Sequence: Synthetic oligonucleotide
ucagcaauggcaaguugaa

SEQ ID NO: 1118624 - RNA, 19 nt, Artificial Sequence
  Description of Artificial Sequence: Synthetic oligonucleotide
gucuaugucgauauacaag

SEQ ID NO: 1118625 - RNA, 19 nt, Artificial Sequence
  Description of Artificial Sequence: Synthetic oligonucleotide
ugaugguacuuuaguaacu

SEQ ID NO: 1118626 - RNA, 19 nt, Artificial Sequence
  Description of Artificial Sequence: Synthetic oligonucleotide
aaagguuucucaucccaua

SEQ ID NO: 1118627 - RNA, 19 nt, Artificial Sequence
  Description of Artificial Sequence: Synthetic oligonucleotide
acaucaauuuuaaauacaa

SEQ ID NO: 1118628 - RNA, 19 nt, Artificial Sequence
  Description of Artificial Sequence: Synthetic oligonucleotide
ccuaucaccagacagugag

SEQ ID NO: 1118629 - RNA, 19 nt, Artificial Sequence
  Description of Artificial Sequence: Synthetic oligonucleotide
cuuauggaaugaaacuguc

SEQ ID NO: 1118630 - RNA, 19 nt, Artificial Sequence
  Description of Artificial Sequence: Synthetic oligonucleotide
ucugaugcacgaaucgaaa

SEQ ID NO: 1118631 - RNA, 19 nt, Artificial Sequence
  Description of Artificial Sequence: Synthetic oligonucleotide
aauuuguccauaggacuca

SEQ ID NO: 1118632 - RNA, 19 nt, Artificial Sequence
  Description of Artificial Sequence: Synthetic oligonucleotide
ugauuuggcuccuuuggaa

SEQ ID NO: 1118633 - RNA, 19 nt, Artificial Sequence
  Description of Artificial Sequence: Synthetic oligonucleotide
uauacucagacauguuauc

SEQ ID NO: 1118634 - RNA, 19 nt, Artificial Sequence
  Description of Artificial Sequence: Synthetic oligonucleotide
gauguaauccuccggccca

SEQ ID NO: 1118635 - RNA, 19 nt, Artificial Sequence
  Description of Artificial Sequence: Synthetic oligonucleotide
gaaauccgguccaaaauac

SEQ ID NO: 1118636 - RNA, 19 nt, Artificial Sequence
  Description of Artificial Sequence: Synthetic oligonucleotide
gaugguacuuuaguaacuc

SEQ ID NO: 1118637 - RNA, 19 nt, Artificial Sequence
  Description of Artificial Sequence: Synthetic oligonucleotide
ugucgauauacaagacucu

SEQ ID NO: 1118638 - RNA, 19 nt, Artificial Sequence
  Description of Artificial Sequence: Synthetic oligonucleotide
aaaccauaauuuagcagca

SEQ ID NO: 1118639 - RNA, 19 nt, Artificial Sequence
  Description of Artificial Sequence: Synthetic oligonucleotide
caacauuccgacgaccucc

SEQ ID NO: 1118640 - RNA, 19 nt, Artificial Sequence
  Description of Artificial Sequence: Synthetic oligonucleotide
uuuaaguuggggagucaaa

SEQ ID NO: 1118641 - RNA, 19 nt, Artificial Sequence
  Description of Artificial Sequence: Synthetic oligonucleotide
gcaguuugaaauccggucc

SEQ ID NO: 1118642 - RNA, 19 nt, Artificial Sequence
  Description of Artificial Sequence: Synthetic oligonucleotide
guccauaggacucaucauc

SEQ ID NO: 1118643 - RNA, 19 nt, Artificial Sequence
  Description of Artificial Sequence: Synthetic oligonucleotide
aacucacaauaaaacuuag

SEQ ID NO: 1118644 - RNA, 19 nt, Artificial Sequence
  Description of Artificial Sequence: Synthetic oligonucleotide
gaaucgcuugcauuugaac

SEQ ID NO: 1118645 - RNA, 19 nt, Artificial Sequence
  Description of Artificial Sequence: Synthetic oligonucleotide
caacucauuaggaauuuca

SEQ ID NO: 1118646 - RNA, 19 nt, Artificial Sequence
  Description of Artificial Sequence: Synthetic oligonucleotide
uuugagauuauaggcuuaa

SEQ ID NO: 1118647 - RNA, 19 nt, Artificial Sequence
  Description of Artificial Sequence: Synthetic oligonucleotide
ucgaucguagaaauuugau

SEQ ID NO: 1118648 - RNA, 19 nt, Artificial Sequence
  Description of Artificial Sequence: Synthetic oligonucleotide
uucggauuguauagccacc

SEQ ID NO: 1118649 - RNA, 19 nt, Artificial Sequence
  Description of Artificial Sequence: Synthetic oligonucleotide
uuacuacuucuacacauuu

SEQ ID NO: 1118650 - RNA, 19 nt, Artificial Sequence
  Description of Artificial Sequence: Synthetic oligonucleotide
ucauuaggaauuucacaau

SEQ ID NO: 1118651 - RNA, 19 nt, Artificial Sequence
  Description of Artificial Sequence: Synthetic oligonucleotide
cuggucuuaucgaucguag

SEQ ID NO: 1118652 - RNA, 19 nt, Artificial Sequence
  Description of Artificial Sequence: Synthetic oligonucleotide
guaacucaaggauggcaag

SEQ ID NO: 1118653 - RNA, 19 nt, Artificial Sequence
  Description of Artificial Sequence: Synthetic oligonucleotide
uaucaccagacagugaguc

SEQ ID NO: 1118654 - RNA, 19 nt, Artificial Sequence
  Description of Artificial Sequence: Synthetic oligonucleotide
uccccauacuuauggaaug

SEQ ID NO: 1118655 - RNA, 19 nt, Artificial Sequence
  Description of Artificial Sequence: Synthetic oligonucleotide
agguuucucaucccauauc

SEQ ID NO: 1118656 - RNA, 19 nt, Artificial Sequence
  Description of Artificial Sequence: Synthetic oligonucleotide
uugacagccauaucaguuu

SEQ ID NO: 1118657 - RNA, 19 nt, Artificial Sequence
  Description of Artificial Sequence: Synthetic oligonucleotide
auaaacgcuguuuuaucuu

SEQ ID NO: 1118658 - RNA, 19 nt, Artificial Sequence
  Description of Artificial Sequence: Synthetic oligonucleotide
ugucauguuugaaggacua

SEQ ID NO: 1118659 - RNA, 19 nt, Artificial Sequence
  Description of Artificial Sequence: Synthetic oligonucleotide
uaaacgcuguuuuaucuuu

SEQ ID NO: 1118660 - RNA, 19 nt, Artificial Sequence
  Description of Artificial Sequence: Synthetic oligonucleotide
acgaaucgaaauccgcuug

SEQ ID NO: 1118661 - RNA, 19 nt, Artificial Sequence
  Description of Artificial Sequence: Synthetic oligonucleotide
caauccuagcuuucuuugc

SEQ ID NO: 1118662 - RNA, 19 nt, Artificial Sequence
  Description of Artificial Sequence: Synthetic oligonucleotide
gugagauugaagcagccaa

SEQ ID NO: 1118663 - RNA, 19 nt, Artificial Sequence
  Description of Artificial Sequence: Synthetic oligonucleotide
cuugucugaugcacgaauc

SEQ ID NO: 1118664 - RNA, 19 nt, Artificial Sequence
  Description of Artificial Sequence: Synthetic oligonucleotide
auaucccucaaaucuccug

SEQ ID NO: 1118665 - RNA, 19 nt, Artificial Sequence
  Description of Artificial Sequence: Synthetic oligonucleotide
aguaacucaaggauggcaa

SEQ ID NO: 1118666 - RNA, 19 nt, Artificial Sequence
  Description of Artificial Sequence: Synthetic oligonucleotide
uuccuuaacaucugucuuu

SEQ ID NO: 1118667 - RNA, 19 nt, Artificial Sequence
  Description of Artificial Sequence: Synthetic oligonucleotide
cauguuaucuggucuuauc

SEQ ID NO: 1118668 - RNA, 19 nt, Artificial Sequence
  Description of Artificial Sequence: Synthetic oligonucleotide
aaguuaugagucauccgga

SEQ ID NO: 1118669 - RNA, 19 nt, Artificial Sequence
  Description of Artificial Sequence: Synthetic oligonucleotide
aguuuguugccgguuuaac

SEQ ID NO: 1118670 - RNA, 19 nt, Artificial Sequence
  Description of Artificial Sequence: Synthetic oligonucleotide
cauaucgucucacuuuuca

SEQ ID NO: 1118671 - RNA, 19 nt, Artificial Sequence
  Description of Artificial Sequence: Synthetic oligonucleotide
agcaacugaaccaccagug

SEQ ID NO: 1118672 - RNA, 19 nt, Artificial Sequence
  Description of Artificial Sequence: Synthetic oligonucleotide
gguacuuuaguaacucaag

SEQ ID NO: 1118673 - RNA, 19 nt, Artificial Sequence
  Description of Artificial Sequence: Synthetic oligonucleotide
aguuaugagucauccggau

SEQ ID NO: 1118674 - RNA, 19 nt, Artificial Sequence
  Description of Artificial Sequence: Synthetic oligonucleotide
gaacgccaggugcaugugg

SEQ ID NO: 1118675 - RNA, 19 nt, Artificial Sequence
  Description of Artificial Sequence: Synthetic oligonucleotide
caaauucaaggguugcuga

SEQ ID NO: 1118676 - RNA, 19 nt, Artificial Sequence
  Description of Artificial Sequence: Synthetic oligonucleotide
aacugcagucucauauguc

SEQ ID NO: 1118677 - RNA, 19 nt, Artificial Sequence
  Description of Artificial Sequence: Synthetic oligonucleotide
auaugcaguuugaaauccg

SEQ ID NO: 1118678 - RNA, 19 nt, Artificial Sequence
  Description of Artificial Sequence: Synthetic oligonucleotide
uguugccgguuuaacuuca

SEQ ID NO: 1118679 - RNA, 19 nt, Artificial Sequence
  Description of Artificial Sequence: Synthetic oligonucleotide
ugggaaaguugacagcaua

SEQ ID NO: 1118680 - RNA, 19 nt, Artificial Sequence
  Description of Artificial Sequence: Synthetic oligonucleotide
uccucagaaucugagaauu

SEQ ID NO: 1118681 - RNA, 19 nt, Artificial Sequence
  Description of Artificial Sequence: Synthetic oligonucleotide
ucacaagcuauccgcuugu

SEQ ID NO: 1118682 - RNA, 19 nt, Artificial Sequence
  Description of Artificial Sequence: Synthetic oligonucleotide
cuaugucgauauacaagac

SEQ ID NO: 1118683 - RNA, 19 nt, Artificial Sequence
  Description of Artificial Sequence: Synthetic oligonucleotide
ucuuaugaucagcaacauu

SEQ ID NO: 1118684 - RNA, 19 nt, Artificial Sequence
  Description of Artificial Sequence: Synthetic oligonucleotide
gaggaucuuuaaguugggg

SEQ ID NO: 1118685 - RNA, 19 nt, Artificial Sequence
  Description of Artificial Sequence: Synthetic oligonucleotide
uggcaacucauuaggaauu

SEQ ID NO: 1118686 - RNA, 19 nt, Artificial Sequence
  Description of Artificial Sequence: Synthetic oligonucleotide
acauaauaacacaucaauu

SEQ ID NO: 1118687 - RNA, 19 nt, Artificial Sequence
  Description of Artificial Sequence: Synthetic oligonucleotide
uaaguuggggagucaaauu

SEQ ID NO: 1118688 - RNA, 19 nt, Artificial Sequence
  Description of Artificial Sequence: Synthetic oligonucleotide
uccgguccaaaauacucaa

SEQ ID NO: 1118689 - RNA, 19 nt, Artificial Sequence
  Description of Artificial Sequence: Synthetic oligonucleotide
auccgcuugucugaugcac

SEQ ID NO: 1118690 - RNA, 19 nt, Artificial Sequence
  Description of Artificial Sequence: Synthetic oligonucleotide
uuucgguauaaaccauaau

SEQ ID NO: 1118691 - RNA, 19 nt, Artificial Sequence
  Description of Artificial Sequence: Synthetic oligonucleotide
agcaucagcaauggcaagu

SEQ ID NO: 1118692 - RNA, 19 nt, Artificial Sequence
  Description of Artificial Sequence: Synthetic oligonucleotide
ccgguuuaacuucacagcc

SEQ ID NO: 1118693 - RNA, 19 nt, Artificial Sequence
  Description of Artificial Sequence: Synthetic oligonucleotide
gcaacugaaccaccagugg

SEQ ID NO: 1118694 - RNA, 19 nt, Artificial Sequence
  Description of Artificial Sequence: Synthetic oligonucleotide
uuguugccgguuuaacuuc

SEQ ID NO: 1118695 - RNA, 19 nt, Artificial Sequence
  Description of Artificial Sequence: Synthetic oligonucleotide
cauuccgacgaccuccuuc

SEQ ID NO: 1118696 - RNA, 19 nt, Artificial Sequence
  Description of Artificial Sequence: Synthetic oligonucleotide
auuuagcagcaaguuauga

SEQ ID NO: 1118697 - RNA, 19 nt, Artificial Sequence
  Description of Artificial Sequence: Synthetic oligonucleotide
uggucuuaucgaucguaga

SEQ ID NO: 1118698 - RNA, 19 nt, Artificial Sequence
  Description of Artificial Sequence: Synthetic oligonucleotide
gacaucaaagguuucucau

SEQ ID NO: 1118699 - RNA, 19 nt, Artificial Sequence
  Description of Artificial Sequence: Synthetic oligonucleotide
cacacgaucuguuguauaa

SEQ ID NO: 1118700 - RNA, 19 nt, Artificial Sequence
  Description of Artificial Sequence: Synthetic oligonucleotide
ugcuuacuauacucagaca

SEQ ID NO: 1118701 - RNA, 19 nt, Artificial Sequence
  Description of Artificial Sequence: Synthetic oligonucleotide
gcaaguuaugagucauccg

SEQ ID NO: 1118702 - RNA, 19 nt, Artificial Sequence
  Description of Artificial Sequence: Synthetic oligonucleotide
aucguagaaauuugauaua

SEQ ID NO: 1118703 - RNA, 19 nt, Artificial Sequence
  Description of Artificial Sequence: Synthetic oligonucleotide
gauuugucuucuuccuuaa

SEQ ID NO: 1118704 - RNA, 19 nt, Artificial Sequence
  Description of Artificial Sequence: Synthetic oligonucleotide
ucgucucacuuuucaggag

SEQ ID NO: 1118705 - RNA, 19 nt, Artificial Sequence
  Description of Artificial Sequence: Synthetic oligonucleotide
acuacuguccuuggauuug

SEQ ID NO: 1118706 - RNA, 19 nt, Artificial Sequence
  Description of Artificial Sequence: Synthetic oligonucleotide
caauaaaacuuagccaaga

SEQ ID NO: 1118707 - RNA, 19 nt, Artificial Sequence
  Description of Artificial Sequence: Synthetic oligonucleotide
gggaaaguugacagcauag

SEQ ID NO: 1118708 - RNA, 19 nt, Artificial Sequence
  Description of Artificial Sequence: Synthetic oligonucleotide
ucaccacuacuguccuugg

SEQ ID NO: 1118709 - RNA, 19 nt, Artificial Sequence
  Description of Artificial Sequence: Synthetic oligonucleotide
uguccauaggacucaucau

SEQ ID NO: 1118710 - RNA, 19 nt, Artificial Sequence
  Description of Artificial Sequence: Synthetic oligonucleotide
agcaacauuccgacgaccu

SEQ ID NO: 1118711 - RNA, 19 nt, Artificial Sequence
  Description of Artificial Sequence: Synthetic oligonucleotide
agugagauugaagcagcca

SEQ ID NO: 1118712 - RNA, 19 nt, Artificial Sequence
  Description of Artificial Sequence: Synthetic oligonucleotide
agccuaucaccagacagug

SEQ ID NO: 1118713 - RNA, 19 nt, Artificial Sequence
  Description of Artificial Sequence: Synthetic oligonucleotide
aauaucccucaaaucuccu

SEQ ID NO: 1118714 - RNA, 19 nt, Artificial Sequence
  Description of Artificial Sequence: Synthetic oligonucleotide
agugagucugcaccacacu

SEQ ID NO: 1118715 - RNA, 19 nt, Artificial Sequence
  Description of Artificial Sequence: Synthetic oligonucleotide
ggucuuaucgaucguagaa

SEQ ID NO: 1118716 - RNA, 19 nt, Artificial Sequence
  Description of Artificial Sequence: Synthetic oligonucleotide
cagugagucugcaccacac

SEQ ID NO: 1118717 - RNA, 19 nt, Artificial Sequence
  Description of Artificial Sequence: Synthetic oligonucleotide
caacguuucggauuguaua

SEQ ID NO: 1118718 - RNA, 19 nt, Artificial Sequence
  Description of Artificial Sequence: Synthetic oligonucleotide
ucuggucuuaucgaucgua

SEQ ID NO: 1118719 - RNA, 19 nt, Artificial Sequence
  Description of Artificial Sequence: Synthetic oligonucleotide
uggcaacauucgaagauuu

SEQ ID NO: 1118720 - RNA, 19 nt, Artificial Sequence
  Description of Artificial Sequence: Synthetic oligonucleotide
uucuggaaucgcuugcauu

SEQ ID NO: 1118721 - RNA, 19 nt, Artificial Sequence
  Description of Artificial Sequence: Synthetic oligonucleotide
uggcaaguacaauaucauu

SEQ ID NO: 1118722 - RNA, 19 nt, Artificial Sequence
  Description of Artificial Sequence: Synthetic oligonucleotide
ucccucaaaucuccuguuc

SEQ ID NO: 1118723 - RNA, 19 nt, Artificial Sequence
  Description of Artificial Sequence: Synthetic oligonucleotide
guuuguugccgguuuaacu

SEQ ID NO: 1118724 - RNA, 19 nt, Artificial Sequence
  Description of Artificial Sequence: Synthetic oligonucleotide
ucgcuugcauuugaacgcc

SEQ ID NO: 1118725 - RNA, 19 nt, Artificial Sequence
  Description of Artificial Sequence: Synthetic oligonucleotide
aggauggcaaguacaauau

SEQ ID NO: 1118726 - RNA, 19 nt, Artificial Sequence
  Description of Artificial Sequence: Synthetic oligonucleotide
caugccaaaacaguauaaa

SEQ ID NO: 1118727 - RNA, 19 nt, Artificial Sequence
  Description of Artificial Sequence: Synthetic oligonucleotide
auguggcaacauucgaaga

SEQ ID NO: 1118728 - RNA, 19 nt, Artificial Sequence
  Description of Artificial Sequence: Synthetic oligonucleotide
aacauuccgacgaccuccu

SEQ ID NO: 1118729 - RNA, 19 nt, Artificial Sequence
  Description of Artificial Sequence: Synthetic oligonucleotide
auggcaaguacaauaucau

SEQ ID NO: 1118730 - RNA, 19 nt, Artificial Sequence
  Description of Artificial Sequence: Synthetic oligonucleotide
cacgaucuguuguauaaaa

SEQ ID NO: 1118731 - RNA, 19 nt, Artificial Sequence
  Description of Artificial Sequence: Synthetic oligonucleotide
cucaaagaguccaucaaau

SEQ ID NO: 1118732 - RNA, 19 nt, Artificial Sequence
  Description of Artificial Sequence: Synthetic oligonucleotide
aucgaucguagaaauuuga

SEQ ID NO: 1118733 - RNA, 19 nt, Artificial Sequence
  Description of Artificial Sequence: Synthetic oligonucleotide
caguuugaaauccggucca

SEQ ID NO: 1118734 - RNA, 19 nt, Artificial Sequence
  Description of Artificial Sequence: Synthetic oligonucleotide
cuuuugagauuauaggcuu

SEQ ID NO: 1118735 - RNA, 19 nt, Artificial Sequence
  Description of Artificial Sequence: Synthetic oligonucleotide
uacuauacucagacauguu

SEQ ID NO: 1118736 - RNA, 19 nt, Artificial Sequence
  Description of Artificial Sequence: Synthetic oligonucleotide
gucuuaucgaucguagaaa

SEQ ID NO: 1118737 - RNA, 19 nt, Artificial Sequence
  Description of Artificial Sequence: Synthetic oligonucleotide
auauggcaacucauuagga

SEQ ID NO: 1118738 - RNA, 19 nt, Artificial Sequence
  Description of Artificial Sequence: Synthetic oligonucleotide
augcacgaaucgaaauccg

SEQ ID NO: 1118739 - RNA, 19 nt, Artificial Sequence
  Description of Artificial Sequence: Synthetic oligonucleotide
gaaucgaaauccgcuuguc

SEQ ID NO: 1118740 - RNA, 19 nt, Artificial Sequence
  Description of Artificial Sequence: Synthetic oligonucleotide
cccucaaaucuccuguucc

SEQ ID NO: 1118741 - RNA, 19 nt, Artificial Sequence
  Description of Artificial Sequence: Synthetic oligonucleotide
auccgguccaaaauacuca

SEQ ID NO: 1118742 - RNA, 19 nt, Artificial Sequence
  Description of Artificial Sequence: Synthetic oligonucleotide
caggaguccucagacauca

SEQ ID NO: 1118743 - RNA, 19 nt, Artificial Sequence
  Description of Artificial Sequence: Synthetic oligonucleotide
aaggacuaauaugcaguuu

SEQ ID NO: 1118744 - RNA, 19 nt, Artificial Sequence
  Description of Artificial Sequence: Synthetic oligonucleotide
aguauuccccauacuuaug

SEQ ID NO: 1118745 - RNA, 19 nt, Artificial Sequence
  Description of Artificial Sequence: Synthetic oligonucleotide
uauccgcuugucugaugca

SEQ ID NO: 1118746 - RNA, 19 nt, Artificial Sequence
  Description of Artificial Sequence: Synthetic oligonucleotide
ucacacgaucuguuguaua

SEQ ID NO: 1118747 - RNA, 19 nt, Artificial Sequence
  Description of Artificial Sequence: Synthetic oligonucleotide
cgucucacuuuucaggagg

SEQ ID NO: 1118748 - RNA, 19 nt, Artificial Sequence
  Description of Artificial Sequence: Synthetic oligonucleotide
gcuuguccggaucuucucc

SEQ ID NO: 1118749 - RNA, 19 nt, Artificial Sequence
  Description of Artificial Sequence: Synthetic oligonucleotide
cguuucggauuguauagcc

SEQ ID NO: 1118750 - RNA, 19 nt, Artificial Sequence
  Description of Artificial Sequence: Synthetic oligonucleotide
gaucuuuaaguuggggagu

SEQ ID NO: 1118751 - RNA, 19 nt, Artificial Sequence
  Description of Artificial Sequence: Synthetic oligonucleotide
guuucggauuguauagcca

SEQ ID NO: 1118752 - RNA, 19 nt, Artificial Sequence
  Description of Artificial Sequence: Synthetic oligonucleotide
cauuuagcaugaccuuuga

SEQ ID NO: 1118753 - RNA, 19 nt, Artificial Sequence
  Description of Artificial Sequence: Synthetic oligonucleotide
caucacacgaucuguugua

SEQ ID NO: 1118754 - RNA, 19 nt, Artificial Sequence
  Description of Artificial Sequence: Synthetic oligonucleotide
ucgccuucauccucagaau

SEQ ID NO: 1118755 - RNA, 19 nt, Artificial Sequence
  Description of Artificial Sequence: Synthetic oligonucleotide
cgagcaacguuucggauug

SEQ ID NO: 1118756 - RNA, 19 nt, Artificial Sequence
  Description of Artificial Sequence: Synthetic oligonucleotide
cagcaaguuaugagucauc

SEQ ID NO: 1118757 - RNA, 19 nt, Artificial Sequence
  Description of Artificial Sequence: Synthetic oligonucleotide
caucaucuauaccaucucu

SEQ ID NO: 1118758 - RNA, 19 nt, Artificial Sequence
  Description of Artificial Sequence: Synthetic oligonucleotide
caacaccgagcaacguuuc

SEQ ID NO: 1118759 - RNA, 19 nt, Artificial Sequence
  Description of Artificial Sequence: Synthetic oligonucleotide
gaggccuauauauuuccuu

SEQ ID NO: 1118760 - RNA, 19 nt, Artificial Sequence
  Description of Artificial Sequence: Synthetic oligonucleotide
ugaacgccaggugcaugug

SEQ ID NO: 1118761 - RNA, 19 nt, Artificial Sequence
  Description of Artificial Sequence: Synthetic oligonucleotide
cucauauguccaacaccga

SEQ ID NO: 1118762 - RNA, 19 nt, Artificial Sequence
  Description of Artificial Sequence: Synthetic oligonucleotide
aucacacgaucuguuguau

SEQ ID NO: 1118763 - RNA, 19 nt, Artificial Sequence
  Description of Artificial Sequence: Synthetic oligonucleotide
ccauaucaguuuguugccg

SEQ ID NO: 1118764 - RNA, 19 nt, Artificial Sequence
  Description of Artificial Sequence: Synthetic oligonucleotide
aguuugaaauccgguccaa

SEQ ID NO: 1118765 - RNA, 19 nt, Artificial Sequence
  Description of Artificial Sequence: Synthetic oligonucleotide
cagcaacauuccgacgacc

SEQ ID NO: 1118766 - RNA, 19 nt, Artificial Sequence
  Description of Artificial Sequence: Synthetic oligonucleotide
cgguuuaacuucacagccc

SEQ ID NO: 1118767 - RNA, 19 nt, Artificial Sequence
  Description of Artificial Sequence: Synthetic oligonucleotide
gucucacuuuucaggagga

SEQ ID NO: 1118768 - RNA, 19 nt, Artificial Sequence
  Description of Artificial Sequence: Synthetic oligonucleotide
uccgcuuguccggaucuuc

SEQ ID NO: 1118769 - RNA, 19 nt, Artificial Sequence
  Description of Artificial Sequence: Synthetic oligonucleotide
caacugcagucucauaugu

SEQ ID NO: 1118770 - RNA, 19 nt, Artificial Sequence
  Description of Artificial Sequence: Synthetic oligonucleotide
auuuguccauaggacucau

SEQ ID NO: 1118771 - RNA, 19 nt, Artificial Sequence
  Description of Artificial Sequence: Synthetic oligonucleotide
aucagcucagaaaggccaa

SEQ ID NO: 1118772 - RNA, 19 nt, Artificial Sequence
  Description of Artificial Sequence: Synthetic oligonucleotide
cccgcucucuucaugaaca

SEQ ID NO: 1118773 - RNA, 19 nt, Artificial Sequence
  Description of Artificial Sequence: Synthetic oligonucleotide
uuccgacgaccuccuucgc

SEQ ID NO: 1118774 - RNA, 19 nt, Artificial Sequence
  Description of Artificial Sequence: Synthetic oligonucleotide
aguggcuuuaugaggccua

SEQ ID NO: 1118775 - RNA, 19 nt, Artificial Sequence
  Description of Artificial Sequence: Synthetic oligonucleotide
ggacuaauaugcaguuuga

SEQ ID NO: 1118776 - RNA, 19 nt, Artificial Sequence
  Description of Artificial Sequence: Synthetic oligonucleotide
agcaacguuucggauugua

SEQ ID NO: 1118777 - RNA, 19 nt, Artificial Sequence
  Description of Artificial Sequence: Synthetic oligonucleotide
ccauacuuauggaaugaaa

SEQ ID NO: 1118778 - RNA, 19 nt, Artificial Sequence
  Description of Artificial Sequence: Synthetic oligonucleotide
uguaauccuccggcccagu

SEQ ID NO: 1118779 - RNA, 19 nt, Artificial Sequence
  Description of Artificial Sequence: Synthetic oligonucleotide
cugaugcacgaaucgaaau

SEQ ID NO: 1118780 - RNA, 19 nt, Artificial Sequence
  Description of Artificial Sequence: Synthetic oligonucleotide
cuccggcccaguugacagc

SEQ ID NO: 1118781 - RNA, 19 nt, Artificial Sequence
  Description of Artificial Sequence: Synthetic oligonucleotide
guuuaacuucacagcccca

SEQ ID NO: 1118782 - RNA, 19 nt, Artificial Sequence
  Description of Artificial Sequence: Synthetic oligonucleotide
gcaacauuccgacgaccuc

SEQ ID NO: 1118783 - RNA, 19 nt, Artificial Sequence
  Description of Artificial Sequence: Synthetic oligonucleotide
cacgaaucgaaauccgcuu

SEQ ID NO: 1118784 - RNA, 19 nt, Artificial Sequence
  Description of Artificial Sequence: Synthetic oligonucleotide
caucccauaucgucucacu

SEQ ID NO: 1118785 - RNA, 19 nt, Artificial Sequence
  Description of Artificial Sequence: Synthetic oligonucleotide
ggacaaucuucuccaacgu

SEQ ID NO: 1118786 - RNA, 19 nt, Artificial Sequence
  Description of Artificial Sequence: Synthetic oligonucleotide
gccaggugcauguggcaac

SEQ ID NO: 1118787 - RNA, 19 nt, Artificial Sequence
  Description of Artificial Sequence: Synthetic oligonucleotide
guugccgguuuaacuucac

SEQ ID NO: 1118788 - RNA, 19 nt, Artificial Sequence
  Description of Artificial Sequence: Synthetic oligonucleotide
uccccgcucucuucaugaa

SEQ ID NO: 1118789 - RNA, 19 nt, Artificial Sequence
  Description of Artificial Sequence: Synthetic oligonucleotide
cgguauaaaccauaauuua

SEQ ID NO: 1118790 - RNA, 19 nt, Artificial Sequence
  Description of Artificial Sequence: Synthetic oligonucleotide
cuuugacagugagauugaa

SEQ ID NO: 1118791 - RNA, 19 nt, Artificial Sequence
  Description of Artificial Sequence: Synthetic oligonucleotide
cuaucaccagacagugagu

SEQ ID NO: 1118792 - RNA, 19 nt, Artificial Sequence
  Description of Artificial Sequence: Synthetic oligonucleotide
agcuauccgcuugucugau

SEQ ID NO: 1118793 - RNA, 19 nt, Artificial Sequence
  Description of Artificial Sequence: Synthetic oligonucleotide
cgaucguagaaauuugaua

SEQ ID NO: 1118794 - RNA, 19 nt, Artificial Sequence
  Description of Artificial Sequence: Synthetic oligonucleotide
guuucucaucccauaucgu

SEQ ID NO: 1118795 - RNA, 19 nt, Artificial Sequence
  Description of Artificial Sequence: Synthetic oligonucleotide
cacaagcuauccgcuuguc

SEQ ID NO: 1118796 - RNA, 19 nt, Artificial Sequence
  Description of Artificial Sequence: Synthetic oligonucleotide
cacuacuguccuuggauuu

SEQ ID NO: 1118797 - RNA, 19 nt, Artificial Sequence
  Description of Artificial Sequence: Synthetic oligonucleotide
gcacgaaucgaaauccgcu

SEQ ID NO: 1118798 - RNA, 19 nt, Artificial Sequence
  Description of Artificial Sequence: Synthetic oligonucleotide
ccaugccaaaacaguauaa

SEQ ID NO: 1118799 - RNA, 19 nt, Artificial Sequence
  Description of Artificial Sequence: Synthetic oligonucleotide
ccucagacaucaaagguuu

SEQ ID NO: 1118800 - RNA, 19 nt, Artificial Sequence
  Description of Artificial Sequence: Synthetic oligonucleotide
gcuauccgcuugucugaug

SEQ ID NO: 1118801 - RNA, 19 nt, Artificial Sequence
  Description of Artificial Sequence: Synthetic oligonucleotide
cuacuguccuuggauuugu

SEQ ID NO: 1118802 - RNA, 19 nt, Artificial Sequence
  Description of Artificial Sequence: Synthetic oligonucleotide
ccauaucgucucacuuuuc

SEQ ID NO: 1118803 - RNA, 19 nt, Artificial Sequence
  Description of Artificial Sequence: Synthetic oligonucleotide
ccaacaccgagcaacguuu

SEQ ID NO: 1118804 - RNA, 19 nt, Artificial Sequence
  Description of Artificial Sequence: Synthetic oligonucleotide
ggccuauauauuuccuuuu

SEQ ID NO: 1118805 - RNA, 19 nt, Artificial Sequence
  Description of Artificial Sequence: Synthetic oligonucleotide
guaauccuccggcccaguu

SEQ ID NO: 1118806 - RNA, 19 nt, Artificial Sequence
  Description of Artificial Sequence: Synthetic oligonucleotide
cuucgccuucauccucaga

SEQ ID NO: 1118807 - RNA, 19 nt, Artificial Sequence
  Description of Artificial Sequence: Synthetic oligonucleotide
auccuccggcccaguugac

SEQ ID NO: 1118808 - RNA, 19 nt, Artificial Sequence
  Description of Artificial Sequence: Synthetic oligonucleotide
ccccgcucucuucaugaac

SEQ ID NO: 1118809 - RNA, 19 nt, Artificial Sequence
  Description of Artificial Sequence: Synthetic oligonucleotide
caucucucaugggaaaguu

SEQ ID NO: 1118810 - RNA, 19 nt, Artificial Sequence
  Description of Artificial Sequence: Synthetic oligonucleotide
acauuccgacgaccuccuu

SEQ ID NO: 1118811 - RNA, 19 nt, Artificial Sequence
  Description of Artificial Sequence: Synthetic oligonucleotide
gaccuuugacagugagauu

SEQ ID NO: 1118812 - RNA, 19 nt, Artificial Sequence
  Description of Artificial Sequence: Synthetic oligonucleotide
ggaugucuaugucgauaua

SEQ ID NO: 1118813 - RNA, 19 nt, Artificial Sequence
  Description of Artificial Sequence: Synthetic oligonucleotide
ccaccuccaccaagcauca

SEQ ID NO: 1118814 - RNA, 19 nt, Artificial Sequence
  Description of Artificial Sequence: Synthetic oligonucleotide
ccgacgaccuccuucgccu

SEQ ID NO: 1118815 - RNA, 19 nt, Artificial Sequence
  Description of Artificial Sequence: Synthetic oligonucleotide
gcaacguuucggauuguau

SEQ ID NO: 1118816 - RNA, 19 nt, Artificial Sequence
  Description of Artificial Sequence: Synthetic oligonucleotide
cccauacuuauggaaugaa

SEQ ID NO: 1118817 - RNA, 19 nt, Artificial Sequence
  Description of Artificial Sequence: Synthetic oligonucleotide
cgaaucgaaauccgcuugu

SEQ ID NO: 1118818 - RNA, 19 nt, Artificial Sequence
  Description of Artificial Sequence: Synthetic oligonucleotide
gccuaucaccagacaguga

SEQ ID NO: 1118819 - RNA, 19 nt, Artificial Sequence
  Description of Artificial Sequence: Synthetic oligonucleotide
cagcaccaauaucccucaa

SEQ ID NO: 1118820 - RNA, 19 nt, Artificial Sequence
  Description of Artificial Sequence: Synthetic oligonucleotide
ccgguccaaaauacucaaa

SEQ ID NO: 1118821 - RNA, 19 nt, Artificial Sequence
  Description of Artificial Sequence: Synthetic oligonucleotide
ggcaacauucgaagauuuu

SEQ ID NO: 1118822 - RNA, 19 nt, Artificial Sequence
  Description of Artificial Sequence: Synthetic oligonucleotide
cagcucagaaaggccaauu

SEQ ID NO: 1118823 - RNA, 19 nt, Artificial Sequence
  Description of Artificial Sequence: Synthetic oligonucleotide
ccgcuuguccggaucuucu

SEQ ID NO: 1118824 - RNA, 19 nt, Artificial Sequence
  Description of Artificial Sequence: Synthetic oligonucleotide
gagcaacguuucggauugu

SEQ ID NO: 1118825 - RNA, 19 nt, Artificial Sequence
  Description of Artificial Sequence: Synthetic oligonucleotide
caggugcauguggcaacau

SEQ ID NO: 1118826 - RNA, 19 nt, Artificial Sequence
  Description of Artificial Sequence: Synthetic oligonucleotide
cgacgaccuccuucgccuu

SEQ ID NO: 1118827 - RNA, 19 nt, Artificial Sequence
  Description of Artificial Sequence: Synthetic oligonucleotide
aacucgggaauguagaccg

SEQ ID NO: 1118828 - RNA, 19 nt, Artificial Sequence
  Description of Artificial Sequence: Synthetic oligonucleotide
acaagcauaaccccgaguc

SEQ ID NO: 1118829 - RNA, 19 nt, Artificial Sequence
  Description of Artificial Sequence: Synthetic oligonucleotide
aauaguuugccuccuugcg

SEQ ID NO: 1118830 - RNA, 19 nt, Artificial Sequence
  Description of Artificial Sequence: Synthetic oligonucleotide
ugagguauacucauccagg

SEQ ID NO: 1118831 - RNA, 19 nt, Artificial Sequence
  Description of Artificial Sequence: Synthetic oligonucleotide
ucucuuaugcugcaguggg

SEQ ID NO: 1118832 - RNA, 19 nt, Artificial Sequence
  Description of Artificial Sequence: Synthetic oligonucleotide
uuugauuuaagcaguggac

SEQ ID NO: 1118833 - RNA, 19 nt, Artificial Sequence
  Description of Artificial Sequence: Synthetic oligonucleotide
uugaucaccacacagugau

SEQ ID NO: 1118834 - RNA, 19 nt, Artificial Sequence
  Description of Artificial Sequence: Synthetic oligonucleotide
uauuugaucaccacacagu

SEQ ID NO: 1118835 - RNA, 19 nt, Artificial Sequence
  Description of Artificial Sequence: Synthetic oligonucleotide
uagggcacguauuugauca

SEQ ID NO: 1118836 - RNA, 19 nt, Artificial Sequence
  Description of Artificial Sequence: Synthetic oligonucleotide
agugacgagauaucccagc

SEQ ID NO: 1118837 - RNA, 19 nt, Artificial Sequence
  Description of Artificial Sequence: Synthetic oligonucleotide
aagcauaaccccgagucgg

SEQ ID NO: 1118838 - RNA, 19 nt, Artificial Sequence
  Description of Artificial Sequence: Synthetic oligonucleotide
guauuugaucaccacacag

SEQ ID NO: 1118839 - RNA, 19 nt, Artificial Sequence
  Description of Artificial Sequence: Synthetic oligonucleotide
uagaguauaugguugcucu

SEQ ID NO: 1118840 - RNA, 19 nt, Artificial Sequence
  Description of Artificial Sequence: Synthetic oligonucleotide
uacgaagcaaguuuucggc

SEQ ID NO: 1118841 - RNA, 19 nt, Artificial Sequence
  Description of Artificial Sequence: Synthetic oligonucleotide
uccacuacgcugcucuucg

SEQ ID NO: 1118842 - RNA, 19 nt, Artificial Sequence
  Description of Artificial Sequence: Synthetic oligonucleotide
uuggcagcgaugaacucgg

SEQ ID NO: 1118843 - RNA, 19 nt, Artificial Sequence
  Description of Artificial Sequence: Synthetic oligonucleotide
uugauuuaagcaguggaca

SEQ ID NO: 1118844 - RNA, 19 nt, Artificial Sequence
  Description of Artificial Sequence: Synthetic oligonucleotide
ucuugcaagccacagucca

SEQ ID NO: 1118845 - RNA, 19 nt, Artificial Sequence
  Description of Artificial Sequence: Synthetic oligonucleotide
aacaccucccggccguucc

SEQ ID NO: 1118846 - RNA, 19 nt, Artificial Sequence
  Description of Artificial Sequence: Synthetic oligonucleotide
guacgaagcaaguuuucgg

SEQ ID NO: 1118847 - RNA, 19 nt, Artificial Sequence
  Description of Artificial Sequence: Synthetic oligonucleotide
aagagcaugugguucugug

SEQ ID NO: 1118848 - RNA, 19 nt, Artificial Sequence
  Description of Artificial Sequence: Synthetic oligonucleotide
ucaacgagccguaauaguu

SEQ ID NO: 1118849 - RNA, 19 nt, Artificial Sequence
  Description of Artificial Sequence: Synthetic oligonucleotide
uucagugacgagauauccc

SEQ ID NO: 1118850 - RNA, 19 nt, Artificial Sequence
  Description of Artificial Sequence: Synthetic oligonucleotide
accuuguccaauccugcgc

SEQ ID NO: 1118851 - RNA, 19 nt, Artificial Sequence
  Description of Artificial Sequence: Synthetic oligonucleotide
aguacgaagcaaguuuucg

SEQ ID NO: 1118852 - RNA, 19 nt, Artificial Sequence
  Description of Artificial Sequence: Synthetic oligonucleotide
aacgagccguaauaguuug

SEQ ID NO: 1118853 - RNA, 19 nt, Artificial Sequence
  Description of Artificial Sequence: Synthetic oligonucleotide
ucucgaauguccuuucgga

SEQ ID NO: 1118854 - RNA, 19 nt, Artificial Sequence
  Description of Artificial Sequence: Synthetic oligonucleotide
aagugguuauagcucacga

SEQ ID NO: 1118855 - RNA, 19 nt, Artificial Sequence
  Description of Artificial Sequence: Synthetic oligonucleotide
uugaccuucgucugaccgg

SEQ ID NO: 1118856 - RNA, 19 nt, Artificial Sequence
  Description of Artificial Sequence: Synthetic oligonucleotide
uccgagucggugcagaagu

SEQ ID NO: 1118857 - RNA, 19 nt, Artificial Sequence
  Description of Artificial Sequence: Synthetic oligonucleotide
aauguagaccgagggccgc

SEQ ID NO: 1118858 - RNA, 19 nt, Artificial Sequence
  Description of Artificial Sequence: Synthetic oligonucleotide
gauaguacgaagcaaguuu

SEQ ID NO: 1118859 - RNA, 19 nt, Artificial Sequence
  Description of Artificial Sequence: Synthetic oligonucleotide
gguauacucauccagggca

SEQ ID NO: 1118860 - RNA, 19 nt, Artificial Sequence
  Description of Artificial Sequence: Synthetic oligonucleotide
accugugcgcgccucaucg

SEQ ID NO: 1118861 - RNA, 19 nt, Artificial Sequence
  Description of Artificial Sequence: Synthetic oligonucleotide
ggaucgaaagucucgaaug

SEQ ID NO: 1118862 - RNA, 19 nt, Artificial Sequence
  Description of Artificial Sequence: Synthetic oligonucleotide
uugaaaucguccccgccca

SEQ ID NO: 1118863 - RNA, 19 nt, Artificial Sequence
  Description of Artificial Sequence: Synthetic oligonucleotide
uucucgauacagcugcgcu

SEQ ID NO: 1118864 - RNA, 19 nt, Artificial Sequence
  Description of Artificial Sequence: Synthetic oligonucleotide
uuugaucaccacacaguga

SEQ ID NO: 1118865 - RNA, 19 nt, Artificial Sequence
  Description of Artificial Sequence: Synthetic oligonucleotide
uguuauggagcaccagggu

SEQ ID NO: 1118866 - RNA, 19 nt, Artificial Sequence
  Description of Artificial Sequence: Synthetic oligonucleotide
acuguugcgcgcgugugcc

SEQ ID NO: 1118867 - RNA, 19 nt, Artificial Sequence
  Description of Artificial Sequence: Synthetic oligonucleotide
uggaucgaaagucucgaau

SEQ ID NO: 1118868 - RNA, 19 nt, Artificial Sequence
  Description of Artificial Sequence: Synthetic oligonucleotide
gggugcguagaguauaugg

SEQ ID NO: 1118869 - RNA, 19 nt, Artificial Sequence
  Description of Artificial Sequence: Synthetic oligonucleotide
uauagcucacgauggacau

SEQ ID NO: 1118870 - RNA, 19 nt, Artificial Sequence
  Description of Artificial Sequence: Synthetic oligonucleotide
gucucgaauguccuuucgg

SEQ ID NO: 1118871 - RNA, 19 nt, Artificial Sequence
  Description of Artificial Sequence: Synthetic oligonucleotide
agccgacaagcauaacccc

SEQ ID NO: 1118872 - RNA, 19 nt, Artificial Sequence
  Description of Artificial Sequence: Synthetic oligonucleotide
caagcauaaccccgagucg

SEQ ID NO: 1118873 - RNA, 19 nt, Artificial Sequence
  Description of Artificial Sequence: Synthetic oligonucleotide
cugaccggacuugaaaucg

SEQ ID NO: 1118874 - RNA, 19 nt, Artificial Sequence
  Description of Artificial Sequence: Synthetic oligonucleotide
agcgaguccucacaggugu

SEQ ID NO: 1118875 - RNA, 19 nt, Artificial Sequence
  Description of Artificial Sequence: Synthetic oligonucleotide
auaugguugcucugcacca

SEQ ID NO: 1118876 - RNA, 19 nt, Artificial Sequence
  Description of Artificial Sequence: Synthetic oligonucleotide
uguagacuacguccgggcu

SEQ ID NO: 1118877 - RNA, 19 nt, Artificial Sequence
  Description of Artificial Sequence: Synthetic oligonucleotide
gauaucccagccgucaaac

SEQ ID NO: 1118878 - RNA, 19 nt, Artificial Sequence
  Description of Artificial Sequence: Synthetic oligonucleotide
gccgucaaacaccaggucg

SEQ ID NO: 1118879 - RNA, 19 nt, Artificial Sequence
  Description of Artificial Sequence: Synthetic oligonucleotide
cuguagacuacguccgggc

SEQ ID NO: 1118880 - RNA, 19 nt, Artificial Sequence
  Description of Artificial Sequence: Synthetic oligonucleotide
aaccgaguagccgugggcu

SEQ ID NO: 1118881 - RNA, 19 nt, Artificial Sequence
  Description of Artificial Sequence: Synthetic oligonucleotide
ugcgcuggaucgaaagucu

SEQ ID NO: 1118882 - RNA, 19 nt, Artificial Sequence
  Description of Artificial Sequence: Synthetic oligonucleotide
aguagccgugggcugcacc

SEQ ID NO: 1118883 - RNA, 19 nt, Artificial Sequence
  Description of Artificial Sequence: Synthetic oligonucleotide
agugguuauagcucacgau

SEQ ID NO: 1118884 - RNA, 19 nt, Artificial Sequence
  Description of Artificial Sequence: Synthetic oligonucleotide
uccugcgcuggaucgaaag

SEQ ID NO: 1118885 - RNA, 19 nt, Artificial Sequence
  Description of Artificial Sequence: Synthetic oligonucleotide
guagccgugggcugcaccc

SEQ ID NO: 1118886 - RNA, 19 nt, Artificial Sequence
  Description of Artificial Sequence: Synthetic oligonucleotide
agucucgaauguccuuucg

SEQ ID NO: 1118887 - RNA, 19 nt, Artificial Sequence
  Description of Artificial Sequence: Synthetic oligonucleotide
guagacuacguccgggcug

SEQ ID NO: 1118888 - RNA, 19 nt, Artificial Sequence
  Description of Artificial Sequence: Synthetic oligonucleotide
acuguagacuacguccggg

SEQ ID NO: 1118889 - RNA, 19 nt, Artificial Sequence
  Description of Artificial Sequence: Synthetic oligonucleotide
ucugaccggacuugaaauc

SEQ ID NO: 1118890 - RNA, 19 nt, Artificial Sequence
  Description of Artificial Sequence: Synthetic oligonucleotide
gacgagauaucccagccgu

SEQ ID NO: 1118891 - RNA, 19 nt, Artificial Sequence
  Description of Artificial Sequence: Synthetic oligonucleotide
accagcggugccuuaaaga

SEQ ID NO: 1118892 - RNA, 19 nt, Artificial Sequence
  Description of Artificial Sequence: Synthetic oligonucleotide
cauaaccccgagucggggc

SEQ ID NO: 1118893 - RNA, 19 nt, Artificial Sequence
  Description of Artificial Sequence: Synthetic oligonucleotide
caucgccucggccagauuc

SEQ ID NO: 1118894 - RNA, 19 nt, Artificial Sequence
  Description of Artificial Sequence: Synthetic oligonucleotide
ucuucgucaccuccuugga

SEQ ID NO: 1118895 - RNA, 19 nt, Artificial Sequence
  Description of Artificial Sequence: Synthetic oligonucleotide
guuauagcucacgauggac

SEQ ID NO: 1118896 - RNA, 19 nt, Artificial Sequence
  Description of Artificial Sequence: Synthetic oligonucleotide
auaaccccgagucggggca

SEQ ID NO: 1118897 - RNA, 19 nt, Artificial Sequence
  Description of Artificial Sequence: Synthetic oligonucleotide
acgaagcaaguuuucggcu

SEQ ID NO: 1118898 - RNA, 19 nt, Artificial Sequence
  Description of Artificial Sequence: Synthetic oligonucleotide
ccagcggugccuuaaagag

SEQ ID NO: 1118899 - RNA, 19 nt, Artificial Sequence
  Description of Artificial Sequence: Synthetic oligonucleotide
caacacgccgcccucgcgg

SEQ ID NO: 1118900 - RNA, 19 nt, Artificial Sequence
  Description of Artificial Sequence: Synthetic oligonucleotide
caagugguuauagcucacg

SEQ ID NO: 1118901 - RNA, 19 nt, Artificial Sequence
  Description of Artificial Sequence: Synthetic oligonucleotide
ucuggcgccucuccgggug

SEQ ID NO: 1118902 - RNA, 19 nt, Artificial Sequence
  Description of Artificial Sequence: Synthetic oligonucleotide
gugaccguuggcaucgccg

SEQ ID NO: 1118903 - RNA, 19 nt, Artificial Sequence
  Description of Artificial Sequence: Synthetic oligonucleotide
gaaccgaguagccgugggc

SEQ ID NO: 1118904 - RNA, 19 nt, Artificial Sequence
  Description of Artificial Sequence: Synthetic oligonucleotide
uucggcugugucauuucga

SEQ ID NO: 1118905 - RNA, 19 nt, Artificial Sequence
  Description of Artificial Sequence: Synthetic oligonucleotide
guacucauagcgagccucg

SEQ ID NO: 1118906 - RNA, 19 nt, Artificial Sequence
  Description of Artificial Sequence: Synthetic oligonucleotide
ugaccuucgucugaccgga

SEQ ID NO: 1118907 - RNA, 19 nt, Artificial Sequence
  Description of Artificial Sequence: Synthetic oligonucleotide
cucggccagauucagugac

SEQ ID NO: 1118908 - RNA, 19 nt, Artificial Sequence
  Description of Artificial Sequence: Synthetic oligonucleotide
caaugaccuuguccaaucc

SEQ ID NO: 1118909 - RNA, 19 nt, Artificial Sequence
  Description of Artificial Sequence: Synthetic oligonucleotide
uaguacgaagcaaguuuuc

SEQ ID NO: 1118910 - RNA, 19 nt, Artificial Sequence
  Description of Artificial Sequence: Synthetic oligonucleotide
cugacagagcucagugagc

SEQ ID NO: 1118911 - RNA, 19 nt, Artificial Sequence
  Description of Artificial Sequence: Synthetic oligonucleotide
uagacuacguccgggcugu

SEQ ID NO: 1118912 - RNA, 19 nt, Artificial Sequence
  Description of Artificial Sequence: Synthetic oligonucleotide
caccauggguagcagcgcg

SEQ ID NO: 1118913 - RNA, 19 nt, Artificial Sequence
  Description of Artificial Sequence: Synthetic oligonucleotide
uguccaauccugcgcugga

SEQ ID NO: 1118914 - RNA, 19 nt, Artificial Sequence
  Description of Artificial Sequence: Synthetic oligonucleotide
cagcggugccuuaaagagg

SEQ ID NO: 1118915 - RNA, 19 nt, Artificial Sequence
  Description of Artificial Sequence: Synthetic oligonucleotide
gccguaauaguuugccucc

SEQ ID NO: 1118916 - RNA, 19 nt, Artificial Sequence
  Description of Artificial Sequence: Synthetic oligonucleotide
ugaccggacuugaaaucgu

SEQ ID NO: 1118917 - RNA, 19 nt, Artificial Sequence
  Description of Artificial Sequence: Synthetic oligonucleotide
agccgucaaacaccagguc

SEQ ID NO: 1118918 - RNA, 19 nt, Artificial Sequence
  Description of Artificial Sequence: Synthetic oligonucleotide
ucauuucgaccugggacca

SEQ ID NO: 1118919 - RNA, 19 nt, Artificial Sequence
  Description of Artificial Sequence: Synthetic oligonucleotide
uuggcgguccacagcacaa

SEQ ID NO: 1118920 - RNA, 19 nt, Artificial Sequence
  Description of Artificial Sequence: Synthetic oligonucleotide
uagaccgagggccgcgggc

SEQ ID NO: 1118921 - RNA, 19 nt, Artificial Sequence
  Description of Artificial Sequence: Synthetic oligonucleotide
uguagaccgagggccgcgg

SEQ ID NO: 1118922 - RNA, 19 nt, Artificial Sequence
  Description of Artificial Sequence: Synthetic oligonucleotide
agagugcauucaccacugg

SEQ ID NO: 1118923 - RNA, 19 nt, Artificial Sequence
  Description of Artificial Sequence: Synthetic oligonucleotide
gacccaaguucacggugcc

SEQ ID NO: 1118924 - RNA, 19 nt, Artificial Sequence
  Description of Artificial Sequence: Synthetic oligonucleotide
cuccuugcgacccgugcgc

SEQ ID NO: 1118925 - RNA, 19 nt, Artificial Sequence
  Description of Artificial Sequence: Synthetic oligonucleotide
ccggacuugaaaucguccc

SEQ ID NO: 1118926 - RNA, 19 nt, Artificial Sequence
  Description of Artificial Sequence: Synthetic oligonucleotide
auuucgaccugggaccaca

SEQ ID NO: 1118927 - RNA, 19 nt, Artificial Sequence
  Description of Artificial Sequence: Synthetic oligonucleotide
agggcacguuugcugucgc

SEQ ID NO: 1118928 - RNA, 19 nt, Artificial Sequence
  Description of Artificial Sequence: Synthetic oligonucleotide
cagcauaaugggugcugcc

SEQ ID NO: 1118929 - RNA, 19 nt, Artificial Sequence
  Description of Artificial Sequence: Synthetic oligonucleotide
ugugaccguuggcaucgcc

SEQ ID NO: 1118930 - RNA, 19 nt, Artificial Sequence
  Description of Artificial Sequence: Synthetic oligonucleotide
cucgggaauguagaccgag

SEQ ID NO: 1118931 - RNA, 19 nt, Artificial Sequence
  Description of Artificial Sequence: Synthetic oligonucleotide
ugggucaacgagccguaau

SEQ ID NO: 1118932 - RNA, 19 nt, Artificial Sequence
  Description of Artificial Sequence: Synthetic oligonucleotide
caucguuguugcccaagug

SEQ ID NO: 1118933 - RNA, 19 nt, Artificial Sequence
  Description of Artificial Sequence: Synthetic oligonucleotide
ggcuccaucgcggcgagcg

SEQ ID NO: 1118934 - RNA, 19 nt, Artificial Sequence
  Description of Artificial Sequence: Synthetic oligonucleotide
caggagcgaguccucacag

SEQ ID NO: 1118935 - RNA, 19 nt, Artificial Sequence
  Description of Artificial Sequence: Synthetic oligonucleotide
cugugcgcgccucaucgcc

SEQ ID NO: 1118936 - RNA, 19 nt, Artificial Sequence
  Description of Artificial Sequence: Synthetic oligonucleotide
gcguagaguauaugguugc

SEQ ID NO: 1118937 - RNA, 19 nt, Artificial Sequence
  Description of Artificial Sequence: Synthetic oligonucleotide
agauaucccagccgucaaa

SEQ ID NO: 1118938 - RNA, 19 nt, Artificial Sequence
  Description of Artificial Sequence: Synthetic oligonucleotide
gagccguuguucccgcccc

SEQ ID NO: 1118939 - RNA, 19 nt, Artificial Sequence
  Description of Artificial Sequence: Synthetic oligonucleotide
agcauaaccccgagucggg

SEQ ID NO: 1118940 - RNA, 19 nt, Artificial Sequence
  Description of Artificial Sequence: Synthetic oligonucleotide
cagugacgagauaucccag

SEQ ID NO: 1118941 - RNA, 19 nt, Artificial Sequence
  Description of Artificial Sequence: Synthetic oligonucleotide
ggucaacgagccguaauag

SEQ ID NO: 1118942 - RNA, 19 nt, Artificial Sequence
  Description of Artificial Sequence: Synthetic oligonucleotide
ucgccgguacagccauugg

SEQ ID NO: 1118943 - RNA, 19 nt, Artificial Sequence
  Description of Artificial Sequence: Synthetic oligonucleotide
gccgacaagcauaaccccg

SEQ ID NO: 1118944 - RNA, 19 nt, Artificial Sequence
  Description of Artificial Sequence: Synthetic oligonucleotide
cacgaacacauggcgcugg

SEQ ID NO: 1118945 - RNA, 19 nt, Artificial Sequence
  Description of Artificial Sequence: Synthetic oligonucleotide
aucgccgguacagccauug

SEQ ID NO: 1118946 - RNA, 19 nt, Artificial Sequence
  Description of Artificial Sequence: Synthetic oligonucleotide
agcgacagcacugggugga

SEQ ID NO: 1118947 - RNA, 19 nt, Artificial Sequence
  Description of Artificial Sequence: Synthetic oligonucleotide
uucgucugaccggacuuga

SEQ ID NO: 1118948 - RNA, 19 nt, Artificial Sequence
  Description of Artificial Sequence: Synthetic oligonucleotide
guuggcgguccacagcaca

SEQ ID NO: 1118949 - RNA, 19 nt, Artificial Sequence
  Description of Artificial Sequence: Synthetic oligonucleotide
caguacuagguccagcaua

SEQ ID NO: 1118950 - RNA, 19 nt, Artificial Sequence
  Description of Artificial Sequence: Synthetic oligonucleotide
acgagccguaauaguuugc

SEQ ID NO: 1118951 - RNA, 19 nt, Artificial Sequence
  Description of Artificial Sequence: Synthetic oligonucleotide
aagcaaguuuucggcugug

SEQ ID NO: 1118952 - RNA, 19 nt, Artificial Sequence
  Description of Artificial Sequence: Synthetic oligonucleotide
gguuauagcucacgaugga

SEQ ID NO: 1118953 - RNA, 19 nt, Artificial Sequence
  Description of Artificial Sequence: Synthetic oligonucleotide
uccuugcgacccgugcgcg

SEQ ID NO: 1118954 - RNA, 19 nt, Artificial Sequence
  Description of Artificial Sequence: Synthetic oligonucleotide
uaagagcaugugguucugu

SEQ ID NO: 1118955 - RNA, 19 nt, Artificial Sequence
  Description of Artificial Sequence: Synthetic oligonucleotide
acguuugcugucgcccacg

SEQ ID NO: 1118956 - RNA, 19 nt, Artificial Sequence
  Description of Artificial Sequence: Synthetic oligonucleotide
uugcgacccgugcgcgugg

SEQ ID NO: 1118957 - RNA, 19 nt, Artificial Sequence
  Description of Artificial Sequence: Synthetic oligonucleotide
cuugcgacccgugcgcgug

SEQ ID NO: 1118958 - RNA, 19 nt, Artificial Sequence
  Description of Artificial Sequence: Synthetic oligonucleotide
guagaccgagggccgcggg

SEQ ID NO: 1118959 - RNA, 19 nt, Artificial Sequence
  Description of Artificial Sequence: Synthetic oligonucleotide
auagcucacgauggacaug

SEQ ID NO: 1118960 - RNA, 19 nt, Artificial Sequence
  Description of Artificial Sequence: Synthetic oligonucleotide
caccaggaucucgacggcg

SEQ ID NO: 1118961 - RNA, 19 nt, Artificial Sequence
  Description of Artificial Sequence: Synthetic oligonucleotide
cuucgucugaccggacuug

SEQ ID NO: 1118962 - RNA, 19 nt, Artificial Sequence
  Description of Artificial Sequence: Synthetic oligonucleotide
cuuggagcggaacugcagu

SEQ ID NO: 1118963 - RNA, 19 nt, Artificial Sequence
  Description of Artificial Sequence: Synthetic oligonucleotide
gucugaccggacuugaaau

SEQ ID NO: 1118964 - RNA, 19 nt, Artificial Sequence
  Description of Artificial Sequence: Synthetic oligonucleotide
uucgaccugggaccacauc

SEQ ID NO: 1118965 - RNA, 19 nt, Artificial Sequence
  Description of Artificial Sequence: Synthetic oligonucleotide
uccaacuguugcgcgcgug

SEQ ID NO: 1118966 - RNA, 19 nt, Artificial Sequence
  Description of Artificial Sequence: Synthetic oligonucleotide
acaucgcagaagcgcucug

SEQ ID NO: 1118967 - RNA, 19 nt, Artificial Sequence
  Description of Artificial Sequence: Synthetic oligonucleotide
uccgggugcguagaguaua

SEQ ID NO: 1118968 - RNA, 19 nt, Artificial Sequence
  Description of Artificial Sequence: Synthetic oligonucleotide
aaucguccccgcccacgaa

SEQ ID NO: 1118969 - RNA, 19 nt, Artificial Sequence
  Description of Artificial Sequence: Synthetic oligonucleotide
gucaacgagccguaauagu

SEQ ID NO: 1118970 - RNA, 19 nt, Artificial Sequence
  Description of Artificial Sequence: Synthetic oligonucleotide
gagcguggagccguuguuc

SEQ ID NO: 1118971 - RNA, 19 nt, Artificial Sequence
  Description of Artificial Sequence: Synthetic oligonucleotide
gagcgaguccucacaggug

SEQ ID NO: 1118972 - RNA, 19 nt, Artificial Sequence
  Description of Artificial Sequence: Synthetic oligonucleotide
cagcgcgcugaaaggcacg

SEQ ID NO: 1118973 - RNA, 19 nt, Artificial Sequence
  Description of Artificial Sequence: Synthetic oligonucleotide
ucgucugaccggacuugaa

SEQ ID NO: 1118974 - RNA, 19 nt, Artificial Sequence
  Description of Artificial Sequence: Synthetic oligonucleotide
caccagcggugccuuaaag

SEQ ID NO: 1118975 - RNA, 19 nt, Artificial Sequence
  Description of Artificial Sequence: Synthetic oligonucleotide
uacguccgggcuguccacc

SEQ ID NO: 1118976 - RNA, 19 nt, Artificial Sequence
  Description of Artificial Sequence: Synthetic oligonucleotide
gacaagcauaaccccgagu

SEQ ID NO: 1118977 - RNA, 19 nt, Artificial Sequence
  Description of Artificial Sequence: Synthetic oligonucleotide
cacguagggcacguauuug

SEQ ID NO: 1118978 - RNA, 19 nt, Artificial Sequence
  Description of Artificial Sequence: Synthetic oligonucleotide
gaccggacuugaaaucguc

SEQ ID NO: 1118979 - RNA, 19 nt, Artificial Sequence
  Description of Artificial Sequence: Synthetic oligonucleotide
ggagcgaguccucacaggu

SEQ ID NO: 1118980 - RNA, 19 nt, Artificial Sequence
  Description of Artificial Sequence: Synthetic oligonucleotide
gggucaacgagccguaaua

SEQ ID NO: 1118981 - RNA, 19 nt, Artificial Sequence
  Description of Artificial Sequence: Synthetic oligonucleotide
gugcguagaguauaugguu

SEQ ID NO: 1118982 - RNA, 19 nt, Artificial Sequence
  Description of Artificial Sequence: Synthetic oligonucleotide
cccgccugggucaacgagc

SEQ ID NO: 1118983 - RNA, 19 nt, Artificial Sequence
  Description of Artificial Sequence: Synthetic oligonucleotide
gcacguauuugaucaccac

SEQ ID NO: 1118984 - RNA, 19 nt, Artificial Sequence
  Description of Artificial Sequence: Synthetic oligonucleotide
cgagccguaauaguuugcc

SEQ ID NO: 1118985 - RNA, 19 nt, Artificial Sequence
  Description of Artificial Sequence: Synthetic oligonucleotide
gcuggaucgaaagucucga

SEQ ID NO: 1118986 - RNA, 19 nt, Artificial Sequence
  Description of Artificial Sequence: Synthetic oligonucleotide
guucuaagagcaugugguu

SEQ ID NO: 1118987 - RNA, 19 nt, Artificial Sequence
  Description of Artificial Sequence: Synthetic oligonucleotide
aucgccucggccagauuca

SEQ ID NO: 1118988 - RNA, 19 nt, Artificial Sequence
  Description of Artificial Sequence: Synthetic oligonucleotide
gccgcggugagcguggagc

SEQ ID NO: 1118989 - RNA, 19 nt, Artificial Sequence
  Description of Artificial Sequence: Synthetic oligonucleotide
ggugcguagaguauauggu

SEQ ID NO: 1118990 - RNA, 19 nt, Artificial Sequence
  Description of Artificial Sequence: Synthetic oligonucleotide
ggcacguauuugaucacca

SEQ ID NO: 1118991 - RNA, 19 nt, Artificial Sequence
  Description of Artificial Sequence: Synthetic oligonucleotide
agcgcgcugaaaggcacga

SEQ ID NO: 1118992 - RNA, 19 nt, Artificial Sequence
  Description of Artificial Sequence: Synthetic oligonucleotide
gacccgugcgcgugggcca

SEQ ID NO: 1118993 - RNA, 19 nt, Artificial Sequence
  Description of Artificial Sequence: Synthetic oligonucleotide
ugcgacccgugcgcguggg

SEQ ID NO: 1118994 - RNA, 19 nt, Artificial Sequence
  Description of Artificial Sequence: Synthetic oligonucleotide
ggugaaccgaguagccgug

SEQ ID NO: 1118995 - RNA, 19 nt, Artificial Sequence
  Description of Artificial Sequence: Synthetic oligonucleotide
gcauaaccccgagucgggg

SEQ ID NO: 1118996 - RNA, 19 nt, Artificial Sequence
  Description of Artificial Sequence: Synthetic oligonucleotide
cgucguccgguacucauag

SEQ ID NO: 1118997 - RNA, 19 nt, Artificial Sequence
  Description of Artificial Sequence: Synthetic oligonucleotide
caacgagccguaauaguuu

SEQ ID NO: 1118998 - RNA, 19 nt, Artificial Sequence
  Description of Artificial Sequence: Synthetic oligonucleotide
ccgcccacgaacacauggc

SEQ ID NO: 1118999 - RNA, 19 nt, Artificial Sequence
  Description of Artificial Sequence: Synthetic oligonucleotide
uucccgccccagccgacaa

SEQ ID NO: 1119000 - RNA, 19 nt, Artificial Sequence
  Description of Artificial Sequence: Synthetic oligonucleotide
cuggaucgaaagucucgaa

SEQ ID NO: 1119001 - RNA, 19 nt, Artificial Sequence
  Description of Artificial Sequence: Synthetic oligonucleotide
ggccagauucagugacgag

SEQ ID NO: 1119002 - RNA, 19 nt, Artificial Sequence
  Description of Artificial Sequence: Synthetic oligonucleotide
ccgacaagcauaaccccga

SEQ ID NO: 1119003 - RNA, 19 nt, Artificial Sequence
  Description of Artificial Sequence: Synthetic oligonucleotide
gacgcgcgucguccgguac

SEQ ID NO: 1119004 - RNA, 19 nt, Artificial Sequence
  Description of Artificial Sequence: Synthetic oligonucleotide
ccaagugguuauagcucac

SEQ ID NO: 1119005 - RNA, 19 nt, Artificial Sequence
  Description of Artificial Sequence: Synthetic oligonucleotide
caggguccgagucggugca

SEQ ID NO: 1119006 - RNA, 19 nt, Artificial Sequence
  Description of Artificial Sequence: Synthetic oligonucleotide
gaccgagggccgcgggcgc

SEQ ID NO: 1119007 - RNA, 19 nt, Artificial Sequence
  Description of Artificial Sequence: Synthetic oligonucleotide
gcaacacgccgcccucgcg

SEQ ID NO: 1119008 - RNA, 19 nt, Artificial Sequence
  Description of Artificial Sequence: Synthetic oligonucleotide
accguuggcaucgccggua

SEQ ID NO: 1119009 - RNA, 19 nt, Artificial Sequence
  Description of Artificial Sequence: Synthetic oligonucleotide
gaccugugcgcgccucauc

SEQ ID NO: 1119010 - RNA, 19 nt, Artificial Sequence
  Description of Artificial Sequence: Synthetic oligonucleotide
cgaccugggaccacaucgc

SEQ ID NO: 1119011 - RNA, 19 nt, Artificial Sequence
  Description of Artificial Sequence: Synthetic oligonucleotide
uaaccccgagucggggcac

SEQ ID NO: 1119012 - RNA, 19 nt, Artificial Sequence
  Description of Artificial Sequence: Synthetic oligonucleotide
aucucgacggcgggcucca

SEQ ID NO: 1119013 - RNA, 19 nt, Artificial Sequence
  Description of Artificial Sequence: Synthetic oligonucleotide
cacagguguuauggagcac

SEQ ID NO: 1119014 - RNA, 19 nt, Artificial Sequence
  Description of Artificial Sequence: Synthetic oligonucleotide
ugacgcgcgucguccggua

SEQ ID NO: 1119015 - RNA, 19 nt, Artificial Sequence
  Description of Artificial Sequence: Synthetic oligonucleotide
cgguacagccauugguggc

SEQ ID NO: 1119016 - RNA, 19 nt, Artificial Sequence
  Description of Artificial Sequence: Synthetic oligonucleotide
acccggcaccaguguguuc

SEQ ID NO: 1119017 - RNA, 19 nt, Artificial Sequence
  Description of Artificial Sequence: Synthetic oligonucleotide
gcuccaucgcggcgagcgg

SEQ ID NO: 1119018 - RNA, 19 nt, Artificial Sequence
  Description of Artificial Sequence: Synthetic oligonucleotide
cccacgaacacauggcgcu

SEQ ID NO: 1119019 - RNA, 19 nt, Artificial Sequence
  Description of Artificial Sequence: Synthetic oligonucleotide
gccaagcuggauaguacga

SEQ ID NO: 1119020 - RNA, 19 nt, Artificial Sequence
  Description of Artificial Sequence: Synthetic oligonucleotide
ccgucaaacaccaggucgu

SEQ ID NO: 1119021 - RNA, 19 nt, Artificial Sequence
  Description of Artificial Sequence: Synthetic oligonucleotide
cggugccuuaaagaggaag

SEQ ID NO: 1119022 - RNA, 19 nt, Artificial Sequence
  Description of Artificial Sequence: Synthetic oligonucleotide
ggcaucgccgguacagcca

SEQ ID NO: 1119023 - RNA, 19 nt, Artificial Sequence
  Description of Artificial Sequence: Synthetic oligonucleotide
ucccggccguucccaucca

SEQ ID NO: 1119024 - RNA, 19 nt, Artificial Sequence
  Description of Artificial Sequence: Synthetic oligonucleotide
ggauaguacgaagcaaguu

SEQ ID NO: 1119025 - RNA, 19 nt, Artificial Sequence
  Description of Artificial Sequence: Synthetic oligonucleotide
gcgguccacagcacaauga

SEQ ID NO: 1119026 - RNA, 19 nt, Artificial Sequence
  Description of Artificial Sequence: Synthetic oligonucleotide
ccaagcuggauaguacgaa

SEQ ID NO: 1119027 - RNA, 19 nt, Artificial Sequence
  Description of Artificial Sequence: Synthetic oligonucleotide
aggucaggcgcagccgguu

SEQ ID NO: 1119028 - RNA, 19 nt, Artificial Sequence
  Description of Artificial Sequence: Synthetic oligonucleotide
cacgcugacagagcucagu

SEQ ID NO: 1119029 - RNA, 19 nt, Artificial Sequence
  Description of Artificial Sequence: Synthetic oligonucleotide
cuguugcgcgcgugugcca

SEQ ID NO: 1119030 - RNA, 19 nt, Artificial Sequence
  Description of Artificial Sequence: Synthetic oligonucleotide
ccguuggcaucgccgguac

SEQ ID NO: 1119031 - RNA, 19 nt, Artificial Sequence
  Description of Artificial Sequence: Synthetic oligonucleotide
gaccuucgucugaccggac

SEQ ID NO: 1119032 - RNA, 19 nt, Artificial Sequence
  Description of Artificial Sequence: Synthetic oligonucleotide
cguccgguacucauagcga

SEQ ID NO: 1119033 - RNA, 19 nt, Artificial Sequence
  Description of Artificial Sequence: Synthetic oligonucleotide
gcgcgugugccagggauga

SEQ ID NO: 1119034 - RNA, 19 nt, Artificial Sequence
  Description of Artificial Sequence: Synthetic oligonucleotide
gcggaacugcaguggugca

SEQ ID NO: 1119035 - RNA, 19 nt, Artificial Sequence
  Description of Artificial Sequence: Synthetic oligonucleotide
gccccagccgacaagcaua

SEQ ID NO: 1119036 - RNA, 19 nt, Artificial Sequence
  Description of Artificial Sequence: Synthetic oligonucleotide
cgacccgugcgcgugggcc

SEQ ID NO: 1119037 - RNA, 19 nt, Artificial Sequence
  Description of Artificial Sequence: Synthetic oligonucleotide
gugugaccguuggcaucgc

SEQ ID NO: 1119038 - RNA, 19 nt, Artificial Sequence
  Description of Artificial Sequence: Synthetic oligonucleotide
ccaacuguugcgcgcgugu

SEQ ID NO: 1119039 - RNA, 19 nt, Artificial Sequence
  Description of Artificial Sequence: Synthetic oligonucleotide
cacccgcaacacgccgccc

SEQ ID NO: 1119040 - RNA, 19 nt, Artificial Sequence
  Description of Artificial Sequence: Synthetic oligonucleotide
gcaucgccgguacagccau

SEQ ID NO: 1119041 - RNA, 19 nt, Artificial Sequence
  Description of Artificial Sequence: Synthetic oligonucleotide
ggccucggcacuguagacu

SEQ ID NO: 1119042 - RNA, 19 nt, Artificial Sequence
  Description of Artificial Sequence: Synthetic oligonucleotide
ccggccguucccauccaga

SEQ ID NO: 1119043 - RNA, 19 nt, Artificial Sequence
  Description of Artificial Sequence: Synthetic oligonucleotide
gcggcugacgcgcgucguc

SEQ ID NO: 1119044 - RNA, 19 nt, Artificial Sequence
  Description of Artificial Sequence: Synthetic oligonucleotide
gcccacguagggcacguau

SEQ ID NO: 1119045 - RNA, 19 nt, Artificial Sequence
  Description of Artificial Sequence: Synthetic oligonucleotide
gcaccagcggugccuuaaa

SEQ ID NO: 1119046 - RNA, 19 nt, Artificial Sequence
  Description of Artificial Sequence: Synthetic oligonucleotide
ccgcaacacgccgcccucg

SEQ ID NO: 1119047 - RNA, 19 nt, Artificial Sequence
  Description of Artificial Sequence: Synthetic oligonucleotide
cuccgggugcguagaguau

SEQ ID NO: 1119048 - RNA, 19 nt, Artificial Sequence
  Description of Artificial Sequence: Synthetic oligonucleotide
cccgcaacacgccgcccuc

SEQ ID NO: 1119049 - RNA, 19 nt, Artificial Sequence
  Description of Artificial Sequence: Synthetic oligonucleotide
cugggucaacgagccguaa

SEQ ID NO: 1119050 - RNA, 19 nt, Artificial Sequence
  Description of Artificial Sequence: Synthetic oligonucleotide
ccugcgcuggaucgaaagu

SEQ ID NO: 1119051 - RNA, 19 nt, Artificial Sequence
  Description of Artificial Sequence: Synthetic oligonucleotide
ccuucgucugaccggacuu

SEQ ID NO: 1119052 - RNA, 19 nt, Artificial Sequence
  Description of Artificial Sequence: Synthetic oligonucleotide
cccggccguucccauccag

SEQ ID NO: 1119053 - RNA, 19 nt, Artificial Sequence
  Description of Artificial Sequence: Synthetic oligonucleotide
ccucccggccguucccauc

SEQ ID NO: 1119054 - RNA, 19 nt, Artificial Sequence
  Description of Artificial Sequence: Synthetic oligonucleotide
cccagccgucaaacaccag

SEQ ID NO: 1119055 - RNA, 19 nt, Artificial Sequence
  Description of Artificial Sequence: Synthetic oligonucleotide
gcacccggcaccagugugu

SEQ ID NO: 1119056 - RNA, 19 nt, Artificial Sequence
  Description of Artificial Sequence: Synthetic oligonucleotide
gcgacccgugcgcgugggc

SEQ ID NO: 1119057 - RNA, 19 nt, Artificial Sequence
  Description of Artificial Sequence: Synthetic oligonucleotide
cuccaacuguugcgcgcgu

SEQ ID NO: 1119058 - RNA, 19 nt, Artificial Sequence
  Description of Artificial Sequence: Synthetic oligonucleotide
ucucgacggcgggcuccau

SEQ ID NO: 1119059 - RNA, 19 nt, Artificial Sequence
  Description of Artificial Sequence: Synthetic oligonucleotide
gcgucguccgguacucaua

SEQ ID NO: 1119060 - RNA, 19 nt, Artificial Sequence
  Description of Artificial Sequence: Synthetic oligonucleotide
cccacguagggcacguauu

SEQ ID NO: 1119061 - RNA, 19 nt, Artificial Sequence
  Description of Artificial Sequence: Synthetic oligonucleotide
cguagaguauaugguugcu

SEQ ID NO: 1119062 - RNA, 19 nt, Artificial Sequence
  Description of Artificial Sequence: Synthetic oligonucleotide
cgggugcguagaguauaug

SEQ ID NO: 1119063 - RNA, 19 nt, Artificial Sequence
  Description of Artificial Sequence: Synthetic oligonucleotide
cacccggcaccaguguguu

SEQ ID NO: 1119064 - RNA, 19 nt, Artificial Sequence
  Description of Artificial Sequence: Synthetic oligonucleotide
ccgggugcguagaguauau

SEQ ID NO: 1119065 - RNA, 19 nt, Artificial Sequence
  Description of Artificial Sequence: Synthetic oligonucleotide
ccguaauaguuugccuccu

SEQ ID NO: 1119066 - RNA, 19 nt, Artificial Sequence
  Description of Artificial Sequence: Synthetic oligonucleotide
gcgcucuguguuggcgguc

SEQ ID NO: 1119067 - RNA, 19 nt, Artificial Sequence
  Description of Artificial Sequence: Synthetic oligonucleotide
gcccaucguuguugcccaa

SEQ ID NO: 1119068 - RNA, 19 nt, Artificial Sequence
  Description of Artificial Sequence: Synthetic oligonucleotide
ccccgagucggggcaccug

SEQ ID NO: 1119069 - RNA, 19 nt, Artificial Sequence
  Description of Artificial Sequence: Synthetic oligonucleotide
ccuugcgacccgugcgcgu

SEQ ID NO: 1119070 - RNA, 19 nt, Artificial Sequence
  Description of Artificial Sequence: Synthetic oligonucleotide
caucgccgguacagccauu

SEQ ID NO: 1119071 - RNA, 19 nt, Artificial Sequence
  Description of Artificial Sequence: Synthetic oligonucleotide
cgcgucguccgguacucau

SEQ ID NO: 1119072 - RNA, 19 nt, Artificial Sequence
  Description of Artificial Sequence: Synthetic oligonucleotide
ccacuacgcugcucuucgu

SEQ ID NO: 1119073 - RNA, 19 nt, Artificial Sequence
  Description of Artificial Sequence: Synthetic oligonucleotide
gcggugccuuaaagaggaa

SEQ ID NO: 1119074 - RNA, 19 nt, Artificial Sequence
  Description of Artificial Sequence: Synthetic oligonucleotide
cgugcgcgugggccagguc

SEQ ID NO: 1119075 - RNA, 19 nt, Artificial Sequence
  Description of Artificial Sequence: Synthetic oligonucleotide
ccgagucggugcagaaguu

SEQ ID NO: 1119076 - RNA, 19 nt, Artificial Sequence
  Description of Artificial Sequence: Synthetic oligonucleotide
gcgcgucguccgguacuca

SEQ ID NO: 1119077 - RNA, 19 nt, Artificial Sequence
  Description of Artificial Sequence: Synthetic oligonucleotide
cgguacucauagcgagccu

SEQ ID NO: 1119078 - RNA, 19 nt, Artificial Sequence
  Description of Artificial Sequence: Synthetic oligonucleotide
uuuaucaacacacugagag

SEQ ID NO: 1119079 - RNA, 19 nt, Artificial Sequence
  Description of Artificial Sequence: Synthetic oligonucleotide
aauaagaugaaccaaguca

SEQ ID NO: 1119080 - RNA, 19 nt, Artificial Sequence
  Description of Artificial Sequence: Synthetic oligonucleotide
  modified_base (4)..(4): a, c, u, g, unknown or other
acunaaagaauccaguugg

SEQ ID NO: 1119081 - RNA, 19 nt, Artificial Sequence
  Description of Artificial Sequence: Synthetic oligonucleotide
aauggagugaccuuagagg

SEQ ID NO: 1119082 - RNA, 19 nt, Artificial Sequence
  Description of Artificial Sequence: Synthetic oligonucleotide
agaacgaagaacuuucucc

SEQ ID NO: 1119083 - RNA, 19 nt, Artificial Sequence
  Description of Artificial Sequence: Synthetic oligonucleotide
uuaaaguuaacucauguuc

SEQ ID NO: 1119084 - RNA, 19 nt, Artificial Sequence
  Description of Artificial Sequence: Synthetic oligonucleotide
agauauacaaaacccaggg

SEQ ID NO: 1119085 - RNA, 19 nt, Artificial Sequence
  Description of Artificial Sequence: Synthetic oligonucleotide
aaagauccauaaaugaucc

SEQ ID NO: 1119086 - RNA, 19 nt, Artificial Sequence
  Description of Artificial Sequence: Synthetic oligonucleotide
  modified_base (8)..(8): a, c, u, g, unknown or other
uuaaacunaaagaauccag

SEQ ID NO: 1119087 - RNA, 19 nt, Artificial Sequence
  Description of Artificial Sequence: Synthetic oligonucleotide
  modified_base (7)..(7): a, c, u, g, unknown or other
uaaacunaaagaauccagu

SEQ ID NO: 1119088 - RNA, 19 nt, Artificial Sequence
  Description of Artificial Sequence: Synthetic oligonucleotide
aaacaaugcuacuagaaga

SEQ ID NO: 1119089 - RNA, 19 nt, Artificial Sequence
  Description of Artificial Sequence: Synthetic oligonucleotide
uaaauauccagaaaaugga

SEQ ID NO: 1119090 - RNA, 19 nt, Artificial Sequence
  Description of Artificial Sequence: Synthetic oligonucleotide
ugaauccaagguuauaugg

SEQ ID NO: 1119091 - RNA, 19 nt, Artificial Sequence
  Description of Artificial Sequence: Synthetic oligonucleotide
aaaacguugaccaugagaa

SEQ ID NO: 1119092 - RNA, 19 nt, Artificial Sequence
  Description of Artificial Sequence: Synthetic oligonucleotide
caggauauauccaacagcc

SEQ ID NO: 1119093 - RNA, 19 nt, Artificial Sequence
  Description of Artificial Sequence: Synthetic oligonucleotide
caugaagauauacaaaacc

SEQ ID NO: 1119094 - RNA, 19 nt, Artificial Sequence
  Description of Artificial Sequence: Synthetic oligonucleotide
  modified_base (15)..(15): a, c, u, g, unknown or other
agagggauuaaacunaaag

SEQ ID NO: 1119095 - RNA, 19 nt, Artificial Sequence
  Description of Artificial Sequence: Synthetic oligonucleotide
uguccugaaguccagacag

SEQ ID NO: 1119096 - RNA, 19 nt, Artificial Sequence
  Description of Artificial Sequence: Synthetic oligonucleotide
ucugcuuugcuuuaacagg

SEQ ID NO: 1119097 - RNA, 19 nt, Artificial Sequence
  Description of Artificial Sequence: Synthetic oligonucleotide
uuccuuauaagacaugaug

SEQ ID NO: 1119098 - RNA, 19 nt, Artificial Sequence
  Description of Artificial Sequence: Synthetic oligonucleotide
aauauccagaaaauggaac

SEQ ID NO: 1119099 - RNA, 19 nt, Artificial Sequence
  Description of Artificial Sequence: Synthetic oligonucleotide
  modified_base (10)..(10): a, c, u, g, unknown or other
gauuaaacunaaagaaucc

SEQ ID NO: 1119100 - RNA, 19 nt, Artificial Sequence
  Description of Artificial Sequence: Synthetic oligonucleotide
ucacauaccauggaaaggg

SEQ ID NO: 1119101 - RNA, 19 nt, Artificial Sequence
  Description of Artificial Sequence: Synthetic oligonucleotide
ucucacuucacuuucagac

SEQ ID NO: 1119102 - RNA, 19 nt, Artificial Sequence
  Description of Artificial Sequence: Synthetic oligonucleotide
guugccaaaaccuaugcag

SEQ ID NO: 1119103 - RNA, 19 nt, Artificial Sequence
  Description of Artificial Sequence: Synthetic oligonucleotide
aauguccugaaguccagac

SEQ ID NO: 1119104 - RNA, 19 nt, Artificial Sequence
  Description of Artificial Sequence: Synthetic oligonucleotide
uuagcagaaagaccguugg

SEQ ID NO: 1119105 - RNA, 19 nt, Artificial Sequence
  Description of Artificial Sequence: Synthetic oligonucleotide
uccuuauaagacaugaugu

SEQ ID NO: 1119106 - RNA, 19 nt, Artificial Sequence
  Description of Artificial Sequence: Synthetic oligonucleotide
  modified_base (14)..(14): a, c, u, g, unknown or other
gagggauuaaacunaaaga

SEQ ID NO: 1119107 - RNA, 19 nt, Artificial Sequence
  Description of Artificial Sequence: Synthetic oligonucleotide
aagaguugcauacauggca

SEQ ID NO: 1119108 - RNA, 19 nt, Artificial Sequence
  Description of Artificial Sequence: Synthetic oligonucleotide
agcagugcugaucaaaucg

SEQ ID NO: 1119109 - RNA, 19 nt, Artificial Sequence
  Description of Artificial Sequence: Synthetic oligonucleotide
uaaaguuaacucauguucu

SEQ ID NO: 1119110 - RNA, 19 nt, Artificial Sequence
  Description of Artificial Sequence: Synthetic oligonucleotide
acacaagguucuuauagcc

SEQ ID NO: 1119111 - RNA, 19 nt, Artificial Sequence
  Description of Artificial Sequence: Synthetic oligonucleotide
uagcaugugaauaaugagc

SEQ ID NO: 1119112 - RNA, 19 nt, Artificial Sequence
  Description of Artificial Sequence: Synthetic oligonucleotide
agaaauggaaagcugcuag

SEQ ID NO: 1119113 - RNA, 19 nt, Artificial Sequence
  Description of Artificial Sequence: Synthetic oligonucleotide
uaagugugaaagcaaaaca

SEQ ID NO: 1119114 - RNA, 19 nt, Artificial Sequence
  Description of Artificial Sequence: Synthetic oligonucleotide
guuuuaucaacacacugag

SEQ ID NO: 1119115 - RNA, 19 nt, Artificial Sequence
  Description of Artificial Sequence: Synthetic oligonucleotide
accaguagacgaaagaucc

SEQ ID NO: 1119116 - RNA, 19 nt, Artificial Sequence
  Description of Artificial Sequence: Synthetic oligonucleotide
aaguuaggcccagaaaugc

SEQ ID NO: 1119117 - RNA, 19 nt, Artificial Sequence
  Description of Artificial Sequence: Synthetic oligonucleotide
aguuaacucauguucuugg

SEQ ID NO: 1119118 - RNA, 19 nt, Artificial Sequence
  Description of Artificial Sequence: Synthetic oligonucleotide
aauguugugguacaaugau

SEQ ID NO: 1119119 - RNA, 19 nt, Artificial Sequence
  Description of Artificial Sequence: Synthetic oligonucleotide
gaagauauacaaaacccag

SEQ ID NO: 1119120 - RNA, 19 nt, Artificial Sequence
  Description of Artificial Sequence: Synthetic oligonucleotide
uugaccaugagaaauggaa

SEQ ID NO: 1119121 - RNA, 19 nt, Artificial Sequence
  Description of Artificial Sequence: Synthetic oligonucleotide
aaugcaaucugaaagaguu

SEQ ID NO: 1119122 - RNA, 19 nt, Artificial Sequence
  Description of Artificial Sequence: Synthetic oligonucleotide
ugguacaaugauuugacca

SEQ ID NO: 1119123 - RNA, 19 nt, Artificial Sequence
  Description of Artificial Sequence: Synthetic oligonucleotide
ugaauguugugguacaaug

SEQ ID NO: 1119124 - RNA, 19 nt, Artificial Sequence
  Description of Artificial Sequence: Synthetic oligonucleotide
uuuauccauaaucagugac

SEQ ID NO: 1119125 - RNA, 19 nt, Artificial Sequence
  Description of Artificial Sequence: Synthetic oligonucleotide
ugauuugaccaguagacga

SEQ ID NO: 1119126 - RNA, 19 nt, Artificial Sequence
  Description of Artificial Sequence: Synthetic oligonucleotide
auuuuauccauaaucagug

SEQ ID NO: 1119127 - RNA, 19 nt, Artificial Sequence
  Description of Artificial Sequence: Synthetic oligonucleotide
guacacaagguucuuauag

SEQ ID NO: 1119128 - RNA, 19 nt, Artificial Sequence
  Description of Artificial Sequence: Synthetic oligonucleotide
ugaauugaaguccaggaua

SEQ ID NO: 1119129 - RNA, 19 nt, Artificial Sequence
  Description of Artificial Sequence: Synthetic oligonucleotide
auauccagaaaauggaacu

SEQ ID NO: 1119130 - RNA, 19 nt, Artificial Sequence
  Description of Artificial Sequence: Synthetic oligonucleotide
aucaagagguguuucuccc

SEQ ID NO: 1119131 - RNA, 19 nt, Artificial Sequence
  Description of Artificial Sequence: Synthetic oligonucleotide
uguugugguacaaugauuu

SEQ ID NO: 1119132 - RNA, 19 nt, Artificial Sequence
  Description of Artificial Sequence: Synthetic oligonucleotide
aucaaaucgagccacacaa

SEQ ID NO: 1119133 - RNA, 19 nt, Artificial Sequence
  Description of Artificial Sequence: Synthetic oligonucleotide
aaagcuuaucaacugcacu

SEQ ID NO: 1119134 - RNA, 19 nt, Artificial Sequence
  Description of Artificial Sequence: Synthetic oligonucleotide
ugugguacaaugauuugac

SEQ ID NO: 1119135 - RNA, 19 nt, Artificial Sequence
  Description of Artificial Sequence: Synthetic oligonucleotide
ugaauaaugagcugguuuu

SEQ ID NO: 1119136 - RNA, 19 nt, Artificial Sequence
  Description of Artificial Sequence: Synthetic oligonucleotide
agagcucgcauuuauguag

SEQ ID NO: 1119137 - RNA, 19 nt, Artificial Sequence
  Description of Artificial Sequence: Synthetic oligonucleotide
aagauauacaaaacccagg

SEQ ID NO: 1119138 - RNA, 19 nt, Artificial Sequence
  Description of Artificial Sequence: Synthetic oligonucleotide
uacagaacgaagaacuuuc

SEQ ID NO: 1119139 - RNA, 19 nt, Artificial Sequence
  Description of Artificial Sequence: Synthetic oligonucleotide
agacgaaagauccauaaau

SEQ ID NO: 1119140 - RNA, 19 nt, Artificial Sequence
  Description of Artificial Sequence: Synthetic oligonucleotide
  modified_base (19)..(19): a, c, u, g, unknown or other
ugagagagggauuaaacun

SEQ ID NO: 1119141 - RNA, 19 nt, Artificial Sequence
  Description of Artificial Sequence: Synthetic oligonucleotide
uaugaugcugaaaaugaaa

SEQ ID NO: 1119142 - RNA, 19 nt, Artificial Sequence
  Description of Artificial Sequence: Synthetic oligonucleotide
aagcaaaauagaaagggcu

SEQ ID NO: 1119143 - RNA, 19 nt, Artificial Sequence
  Description of Artificial Sequence: Synthetic oligonucleotide
uucugugugaauccaaggu

SEQ ID NO: 1119144 - RNA, 19 nt, Artificial Sequence
  Description of Artificial Sequence: Synthetic oligonucleotide
aagguuauauggugucuuc

SEQ ID NO: 1119145 - RNA, 19 nt, Artificial Sequence
  Description of Artificial Sequence: Synthetic oligonucleotide
aaaagcuuaucaacugcac

SEQ ID NO: 1119146 - RNA, 19 nt, Artificial Sequence
  Description of Artificial Sequence: Synthetic oligonucleotide
ggaaagaauaagaugaacc

SEQ ID NO: 1119147 - RNA, 19 nt, Artificial Sequence
  Description of Artificial Sequence: Synthetic oligonucleotide
gugcugaucaaaucgagcc

SEQ ID NO: 1119148 - RNA, 19 nt, Artificial Sequence
  Description of Artificial Sequence: Synthetic oligonucleotide
ugauauuuccugcugcaac

SEQ ID NO: 1119149 - RNA, 19 nt, Artificial Sequence
  Description of Artificial Sequence: Synthetic oligonucleotide
uggggaaauauuuggaacu

SEQ ID NO: 1119150 - RNA, 19 nt, Artificial Sequence
  Description of Artificial Sequence: Synthetic oligonucleotide
uuguacagccauaucaaga

SEQ ID NO: 1119151 - RNA, 19 nt, Artificial Sequence
  Description of Artificial Sequence: Synthetic oligonucleotide
uuuugaacgguggugagcu

SEQ ID NO: 1119152 - RNA, 19 nt, Artificial Sequence
  Description of Artificial Sequence: Synthetic oligonucleotide
ugugcaaaauguccugaag

SEQ ID NO: 1119153 - RNA, 19 nt, Artificial Sequence
  Description of Artificial Sequence: Synthetic oligonucleotide
uuauauggugucuuccuga

SEQ ID NO: 1119154 - RNA, 19 nt, Artificial Sequence
  Description of Artificial Sequence: Synthetic oligonucleotide
uuauuaagugugaaagcaa

SEQ ID NO: 1119155 - RNA, 19 nt, Artificial Sequence
  Description of Artificial Sequence: Synthetic oligonucleotide
acgaaagauccauaaauga

SEQ ID NO: 1119156 - RNA, 19 nt, Artificial Sequence
  Description of Artificial Sequence: Synthetic oligonucleotide
uauauggugucuuccugag

SEQ ID NO: 1119157 - RNA, 19 nt, Artificial Sequence
  Description of Artificial Sequence: Synthetic oligonucleotide
agccaaagcagccacacug

SEQ ID NO: 1119158 - RNA, 19 nt, Artificial Sequence
  Description of Artificial Sequence: Synthetic oligonucleotide
uacacaagguucuuauagc

SEQ ID NO: 1119159 - RNA, 19 nt, Artificial Sequence
  Description of Artificial Sequence: Synthetic oligonucleotide
uggaacuuagcagaaagac

SEQ ID NO: 1119160 - RNA, 19 nt, Artificial Sequence
  Description of Artificial Sequence: Synthetic oligonucleotide
uugccaaaaccuaugcagc

SEQ ID NO: 1119161 - RNA, 19 nt, Artificial Sequence
  Description of Artificial Sequence: Synthetic oligonucleotide
aaagaccguugguaaguac

SEQ ID NO: 1119162 - RNA, 19 nt, Artificial Sequence
  Description of Artificial Sequence: Synthetic oligonucleotide
  modified_base (9)..(9): a, c, u, g, unknown or other
auuaaacunaaagaaucca

SEQ ID NO: 1119163 - RNA, 19 nt, Artificial Sequence
  Description of Artificial Sequence: Synthetic oligonucleotide
gucugcuuugcuuuaacag

SEQ ID NO: 1119164 - RNA, 19 nt, Artificial Sequence
  Description of Artificial Sequence: Synthetic oligonucleotide
aaagaauaagaugaaccaa

SEQ ID NO: 1119165 - RNA, 19 nt, Artificial Sequence
  Description of Artificial Sequence: Synthetic oligonucleotide
  modified_base (13)..(13): a, c, u, g, unknown or other
agggauuaaacunaaagaa

SEQ ID NO: 1119166 - RNA, 19 nt, Artificial Sequence
  Description of Artificial Sequence: Synthetic oligonucleotide
aaauggaaagcugcuagca

SEQ ID NO: 1119167 - RNA, 19 nt, Artificial Sequence
  Description of Artificial Sequence: Synthetic oligonucleotide
uuuguacagccauaucaag

SEQ ID NO: 1119168 - RNA, 19 nt, Artificial Sequence
  Description of Artificial Sequence: Synthetic oligonucleotide
ugccaaaaccuaugcagcg

SEQ ID NO: 1119169 - RNA, 19 nt, Artificial Sequence
  Description of Artificial Sequence: Synthetic oligonucleotide
guugcauacauggcaaugg

SEQ ID NO: 1119170 - RNA, 19 nt, Artificial Sequence
  Description of Artificial Sequence: Synthetic oligonucleotide
gacgaaagauccauaaaug

SEQ ID NO: 1119171 - RNA, 19 nt, Artificial Sequence
  Description of Artificial Sequence: Synthetic oligonucleotide
augcuacuagaagacaucc

SEQ ID NO: 1119172 - RNA, 19 nt, Artificial Sequence
  Description of Artificial Sequence: Synthetic oligonucleotide
uuagcauuucggaugucca

SEQ ID NO: 1119173 - RNA, 19 nt, Artificial Sequence
  Description of Artificial Sequence: Synthetic oligonucleotide
ugcaagggugacaauauuc

SEQ ID NO: 1119174 - RNA, 19 nt, Artificial Sequence
  Description of Artificial Sequence: Synthetic oligonucleotide
agaguugauuuauuaauaa

SEQ ID NO: 1119175 - RNA, 19 nt, Artificial Sequence
  Description of Artificial Sequence: Synthetic oligonucleotide
uguguuuuaucaacacacu

SEQ ID NO: 1119176 - RNA, 19 nt, Artificial Sequence
  Description of Artificial Sequence: Synthetic oligonucleotide
aacguugaccaugagaaau

SEQ ID NO: 1119177 - RNA, 19 nt, Artificial Sequence
  Description of Artificial Sequence: Synthetic oligonucleotide
uauuaugcagggcuucacu

SEQ ID NO: 1119178 - RNA, 19 nt, Artificial Sequence
  Description of Artificial Sequence: Synthetic oligonucleotide
agguguuucucccuuagca

SEQ ID NO: 1119179 - RNA, 19 nt, Artificial Sequence
  Description of Artificial Sequence: Synthetic oligonucleotide
acuuuguuaaaagaugccu

SEQ ID NO: 1119180 - RNA, 19 nt, Artificial Sequence
  Description of Artificial Sequence: Synthetic oligonucleotide
cucucucuaggucugacag

SEQ ID NO: 1119181 - RNA, 19 nt, Artificial Sequence
  Description of Artificial Sequence: Synthetic oligonucleotide
uugguaaguacacaagguu

SEQ ID NO: 1119182 - RNA, 19 nt, Artificial Sequence
  Description of Artificial Sequence: Synthetic oligonucleotide
aaaucgagccacacaagag

SEQ ID NO: 1119183 - RNA, 19 nt, Artificial Sequence
  Description of Artificial Sequence: Synthetic oligonucleotide
aauggaaagcugcuagcau

SEQ ID NO: 1119184 - RNA, 19 nt, Artificial Sequence
  Description of Artificial Sequence: Synthetic oligonucleotide
caauggagugaccuuagag

SEQ ID NO: 1119185 - RNA, 19 nt, Artificial Sequence
  Description of Artificial Sequence: Synthetic oligonucleotide
agcaugugaauaaugagcu

SEQ ID NO: 1119186 - RNA, 19 nt, Artificial Sequence
  Description of Artificial Sequence: Synthetic oligonucleotide
aaaguuaacucauguucuu

SEQ ID NO: 1119187 - RNA, 19 nt, Artificial Sequence
  Description of Artificial Sequence: Synthetic oligonucleotide
uuugaccaguagacgaaag

SEQ ID NO: 1119188 - RNA, 19 nt, Artificial Sequence
  Description of Artificial Sequence: Synthetic oligonucleotide
uugaccaguagacgaaaga

SEQ ID NO: 1119189 - RNA, 19 nt, Artificial Sequence
  Description of Artificial Sequence: Synthetic oligonucleotide
gaauaagaugaaccaaguc

SEQ ID NO: 1119190 - RNA, 19 nt, Artificial Sequence
  Description of Artificial Sequence: Synthetic oligonucleotide
ucugugugaauccaagguu

SEQ ID NO: 1119191 - RNA, 19 nt, Artificial Sequence
  Description of Artificial Sequence: Synthetic oligonucleotide
ugauguguuuuaucaacac

SEQ ID NO: 1119192 - RNA, 19 nt, Artificial Sequence
  Description of Artificial Sequence: Synthetic oligonucleotide
ucagauugcucgauaggcu

SEQ ID NO: 1119193 - RNA, 19 nt, Artificial Sequence
  Description of Artificial Sequence: Synthetic oligonucleotide
  modified_base (11)..(11): a, c, u, g, unknown or other
ggauuaaacunaaagaauc

SEQ ID NO: 1119194 - RNA, 19 nt, Artificial Sequence
  Description of Artificial Sequence: Synthetic oligonucleotide
cuuagcagaaagaccguug

SEQ ID NO: 1119195 - RNA, 19 nt, Artificial Sequence
  Description of Artificial Sequence: Synthetic oligonucleotide
agaacaggccacuaucuga

SEQ ID NO: 1119196 - RNA, 19 nt, Artificial Sequence
  Description of Artificial Sequence: Synthetic oligonucleotide
aaaccuaugcagcguccag

SEQ ID NO: 1119197 - RNA, 19 nt, Artificial Sequence
  Description of Artificial Sequence: Synthetic oligonucleotide
aagaccguugguaaguaca

SEQ ID NO: 1119198 - RNA, 19 nt, Artificial Sequence
  Description of Artificial Sequence: Synthetic oligonucleotide
uccauaaucagugacuauu

SEQ ID NO: 1119199 - RNA, 19 nt, Artificial Sequence
  Description of Artificial Sequence: Synthetic oligonucleotide
ucucccuuagcauuucgga

SEQ ID NO: 1119200 - RNA, 19 nt, Artificial Sequence
  Description of Artificial Sequence: Synthetic oligonucleotide
aagggugacaauauucacu

SEQ ID NO: 1119201 - RNA, 19 nt, Artificial Sequence
  Description of Artificial Sequence: Synthetic oligonucleotide
gauauauccaacagcccac

SEQ ID NO: 1119202 - RNA, 19 nt, Artificial Sequence
  Description of Artificial Sequence: Synthetic oligonucleotide
agguuauauggugucuucc

SEQ ID NO: 1119203 - RNA, 19 nt, Artificial Sequence
  Description of Artificial Sequence: Synthetic oligonucleotide
uuccugagggacaacgucu

SEQ ID NO: 1119204 - RNA, 19 nt, Artificial Sequence
  Description of Artificial Sequence: Synthetic oligonucleotide
gucagauugcucgauaggc

SEQ ID NO: 1119205 - RNA, 19 nt, Artificial Sequence
  Description of Artificial Sequence: Synthetic oligonucleotide
cauccuuuuaaaagccaag

SEQ ID NO: 1119206 - RNA, 19 nt, Artificial Sequence
  Description of Artificial Sequence: Synthetic oligonucleotide
gauggaaaaccauggagua

SEQ ID NO: 1119207 - RNA, 19 nt, Artificial Sequence
  Description of Artificial Sequence: Synthetic oligonucleotide
ggauguccaggcuagaacc

SEQ ID NO: 1119208 - RNA, 19 nt, Artificial Sequence
  Description of Artificial Sequence: Synthetic oligonucleotide
accuaugcagcguccaguc

SEQ ID NO: 1119209 - RNA, 19 nt, Artificial Sequence
  Description of Artificial Sequence: Synthetic oligonucleotide
uuuuaucaacacacugaga

SEQ ID NO: 1119210 - RNA, 19 nt, Artificial Sequence
  Description of Artificial Sequence: Synthetic oligonucleotide
guuauauggugucuuccug

SEQ ID NO: 1119211 - RNA, 19 nt, Artificial Sequence
  Description of Artificial Sequence: Synthetic oligonucleotide
augauuugaccaguagacg

SEQ ID NO: 1119212 - RNA, 19 nt, Artificial Sequence
  Description of Artificial Sequence: Synthetic oligonucleotide
uauaagacaugaugugcaa

SEQ ID NO: 1119213 - RNA, 19 nt, Artificial Sequence
  Description of Artificial Sequence: Synthetic oligonucleotide
gaaguuaggcccagaaaug

SEQ ID NO: 1119214 - RNA, 19 nt, Artificial Sequence
  Description of Artificial Sequence: Synthetic oligonucleotide
agcaccaacagaaacaaaa

SEQ ID NO: 1119215 - RNA, 19 nt, Artificial Sequence
  Description of Artificial Sequence: Synthetic oligonucleotide
gaggcuuccuuauaagaca

SEQ ID NO: 1119216 - RNA, 19 nt, Artificial Sequence
  Description of Artificial Sequence: Synthetic oligonucleotide
aaacagguacaucuauuua

SEQ ID NO: 1119217 - RNA, 19 nt, Artificial Sequence
  Description of Artificial Sequence: Synthetic oligonucleotide
agcaaaauagaaagggcug

SEQ ID NO: 1119218 - RNA, 19 nt, Artificial Sequence
  Description of Artificial Sequence: Synthetic oligonucleotide
caaucuauuaugcagggcu

SEQ ID NO: 1119219 - RNA, 19 nt, Artificial Sequence
  Description of Artificial Sequence: Synthetic oligonucleotide
guucugugugaauccaagg

SEQ ID NO: 1119220 - RNA, 19 nt, Artificial Sequence
  Description of Artificial Sequence: Synthetic oligonucleotide
cugagguagguccauaauc

SEQ ID NO: 1119221 - RNA, 19 nt, Artificial Sequence
  Description of Artificial Sequence: Synthetic oligonucleotide
gacaacgucuguuucaugu

SEQ ID NO: 1119222 - RNA, 19 nt, Artificial Sequence
  Description of Artificial Sequence: Synthetic oligonucleotide
uauauccaacagcccacag

SEQ ID NO: 1119223 - RNA, 19 nt, Artificial Sequence
  Description of Artificial Sequence: Synthetic oligonucleotide
aagaguugauuuauuaaua

SEQ ID NO: 1119224 - RNA, 19 nt, Artificial Sequence
  Description of Artificial Sequence: Synthetic oligonucleotide
gaagagcucgcauuuaugu

SEQ ID NO: 1119225 - RNA, 19 nt, Artificial Sequence
  Description of Artificial Sequence: Synthetic oligonucleotide
ugaccaguagacgaaagau

SEQ ID NO: 1119226 - RNA, 19 nt, Artificial Sequence
  Description of Artificial Sequence: Synthetic oligonucleotide
aaaaccuaugcagcgucca

SEQ ID NO: 1119227 - RNA, 19 nt, Artificial Sequence
  Description of Artificial Sequence: Synthetic oligonucleotide
caauauucacuuuccuuuc

SEQ ID NO: 1119228 - RNA, 19 nt, Artificial Sequence
  Description of Artificial Sequence: Synthetic oligonucleotide
uauccauaaucagugacua

SEQ ID NO: 1119229 - RNA, 19 nt, Artificial Sequence
  Description of Artificial Sequence: Synthetic oligonucleotide
uuaacaggcugauucucuc

SEQ ID NO: 1119230 - RNA, 19 nt, Artificial Sequence
  Description of Artificial Sequence: Synthetic oligonucleotide
guagacgaaagauccauaa

SEQ ID NO: 1119231 - RNA, 19 nt, Artificial Sequence
  Description of Artificial Sequence: Synthetic oligonucleotide
uacuagaagacauccuuuu

SEQ ID NO: 1119232 - RNA, 19 nt, Artificial Sequence
  Description of Artificial Sequence: Synthetic oligonucleotide
uguucugauguguuuuauc

SEQ ID NO: 1119233 - RNA, 19 nt, Artificial Sequence
  Description of Artificial Sequence: Synthetic oligonucleotide
aacgucuguuucauguguc

SEQ ID NO: 1119234 - RNA, 19 nt, Artificial Sequence
  Description of Artificial Sequence: Synthetic oligonucleotide
uguguucccacaguuuuga

SEQ ID NO: 1119235 - RNA, 19 nt, Artificial Sequence
  Description of Artificial Sequence: Synthetic oligonucleotide
uagcauuucggauguccag

SEQ ID NO: 1119236 - RNA, 19 nt, Artificial Sequence
  Description of Artificial Sequence: Synthetic oligonucleotide
uccaagguuauaugguguc

SEQ ID NO: 1119237 - RNA, 19 nt, Artificial Sequence
  Description of Artificial Sequence: Synthetic oligonucleotide
uagacgaaagauccauaaa

SEQ ID NO: 1119238 - RNA, 19 nt, Artificial Sequence
  Description of Artificial Sequence: Synthetic oligonucleotide
aaacaagucaagagugagu

SEQ ID NO: 1119239 - RNA, 19 nt, Artificial Sequence
  Description of Artificial Sequence: Synthetic oligonucleotide
accguugguaaguacacaa

SEQ ID NO: 1119240 - RNA, 19 nt, Artificial Sequence
  Description of Artificial Sequence: Synthetic oligonucleotide
uaugcagcguccaguccag

SEQ ID NO: 1119241 - RNA, 19 nt, Artificial Sequence
  Description of Artificial Sequence: Synthetic oligonucleotide
cacugauauuuccugcugc

SEQ ID NO: 1119242 - RNA, 19 nt, Artificial Sequence
  Description of Artificial Sequence: Synthetic oligonucleotide
agaaagaccguugguaagu

SEQ ID NO: 1119243 - RNA, 19 nt, Artificial Sequence
  Description of Artificial Sequence: Synthetic oligonucleotide
auuaugcagggcuucacua

SEQ ID NO: 1119244 - RNA, 19 nt, Artificial Sequence
  Description of Artificial Sequence: Synthetic oligonucleotide
acaguuuugaacgguggug

SEQ ID NO: 1119245 - RNA, 19 nt, Artificial Sequence
  Description of Artificial Sequence: Synthetic oligonucleotide
ccauaauccaucuuccuug

SEQ ID NO: 1119246 - RNA, 19 nt, Artificial Sequence
  Description of Artificial Sequence: Synthetic oligonucleotide
auggaaaaccauggaguac

SEQ ID NO: 1119247 - RNA, 19 nt, Artificial Sequence
  Description of Artificial Sequence: Synthetic oligonucleotide
acaacgucuguuucaugug

SEQ ID NO: 1119248 - RNA, 19 nt, Artificial Sequence
  Description of Artificial Sequence: Synthetic oligonucleotide
gaucaaaucgagccacaca

SEQ ID NO: 1119249 - RNA, 19 nt, Artificial Sequence
  Description of Artificial Sequence: Synthetic oligonucleotide
ucuauuaugcagggcuuca

SEQ ID NO: 1119250 - RNA, 19 nt, Artificial Sequence
  Description of Artificial Sequence: Synthetic oligonucleotide
ugaugguugccaaaaccua

SEQ ID NO: 1119251 - RNA, 19 nt, Artificial Sequence
  Description of Artificial Sequence: Synthetic oligonucleotide
gaacaggccacuaucugac

SEQ ID NO: 1119252 - RNA, 19 nt, Artificial Sequence
  Description of Artificial Sequence: Synthetic oligonucleotide
agggugaucacagacagua

SEQ ID NO: 1119253 - RNA, 19 nt, Artificial Sequence
  Description of Artificial Sequence: Synthetic oligonucleotide
uauuuuguacagccauauc

SEQ ID NO: 1119254 - RNA, 19 nt, Artificial Sequence
  Description of Artificial Sequence: Synthetic oligonucleotide
cagauugcucgauaggcuc

SEQ ID NO: 1119255 - RNA, 19 nt, Artificial Sequence
  Description of Artificial Sequence: Synthetic oligonucleotide
aagagcucgcauuuaugua

SEQ ID NO: 1119256 - RNA, 19 nt, Artificial Sequence
  Description of Artificial Sequence: Synthetic oligonucleotide
gaauguugugguacaauga

SEQ ID NO: 1119257 - RNA, 19 nt, Artificial Sequence
  Description of Artificial Sequence: Synthetic oligonucleotide
gucacauaccauggaaagg

SEQ ID NO: 1119258 - RNA, 19 nt, Artificial Sequence
  Description of Artificial Sequence: Synthetic oligonucleotide
aggauauauccaacagccc

SEQ ID NO: 1119259 - RNA, 19 nt, Artificial Sequence
  Description of Artificial Sequence: Synthetic oligonucleotide
agaaaggcuaugaugcuga

SEQ ID NO: 1119260 - RNA, 19 nt, Artificial Sequence
  Description of Artificial Sequence: Synthetic oligonucleotide
agaauaagaugaaccaagu

SEQ ID NO: 1119261 - RNA, 19 nt, Artificial Sequence
  Description of Artificial Sequence: Synthetic oligonucleotide
aucuauuaugcagggcuuc

SEQ ID NO: 1119262 - RNA, 19 nt, Artificial Sequence
  Description of Artificial Sequence: Synthetic oligonucleotide
ugugugaauccaagguuau

SEQ ID NO: 1119263 - RNA, 19 nt, Artificial Sequence
  Description of Artificial Sequence: Synthetic oligonucleotide
auauggugucuuccugagg

SEQ ID NO: 1119264 - RNA, 19 nt, Artificial Sequence
  Description of Artificial Sequence: Synthetic oligonucleotide
aagagguaaugaugauggu

SEQ ID NO: 1119265 - RNA, 19 nt, Artificial Sequence
  Description of Artificial Sequence: Synthetic oligonucleotide
  modified_base (18)..(18): a, c, u, g, unknown or other
gagagagggauuaaacuna

SEQ ID NO: 1119266 - RNA, 19 nt, Artificial Sequence
  Description of Artificial Sequence: Synthetic oligonucleotide
ccuuauaagacaugaugug

SEQ ID NO: 1119267 - RNA, 19 nt, Artificial Sequence
  Description of Artificial Sequence: Synthetic oligonucleotide
agaccguugguaaguacac

SEQ ID NO: 1119268 - RNA, 19 nt, Artificial Sequence
  Description of Artificial Sequence: Synthetic oligonucleotide
acacaagaguugcauacau

SEQ ID NO: 1119269 - RNA, 19 nt, Artificial Sequence
  Description of Artificial Sequence: Synthetic oligonucleotide
cuaugcagcguccagucca

SEQ ID NO: 1119270 - RNA, 19 nt, Artificial Sequence
  Description of Artificial Sequence: Synthetic oligonucleotide
agcucgcauuuauguagcc

SEQ ID NO: 1119271 - RNA, 19 nt, Artificial Sequence
  Description of Artificial Sequence: Synthetic oligonucleotide
caagggugacaauauucac

SEQ ID NO: 1119272 - RNA, 19 nt, Artificial Sequence
  Description of Artificial Sequence: Synthetic oligonucleotide
aguugcauacauggcaaug

SEQ ID NO: 1119273 - RNA, 19 nt, Artificial Sequence
  Description of Artificial Sequence: Synthetic oligonucleotide
auaggcucucucucuaggu

SEQ ID NO: 1119274 - RNA, 19 nt, Artificial Sequence
  Description of Artificial Sequence: Synthetic oligonucleotide
ggaaguuaggcccagaaau

SEQ ID NO: 1119275 - RNA, 19 nt, Artificial Sequence
  Description of Artificial Sequence: Synthetic oligonucleotide
aaacguugaccaugagaaa

SEQ ID NO: 1119276 - RNA, 19 nt, Artificial Sequence
  Description of Artificial Sequence: Synthetic oligonucleotide
cagggcuucacuaagccaa

SEQ ID NO: 1119277 - RNA, 19 nt, Artificial Sequence
  Description of Artificial Sequence: Synthetic oligonucleotide
ugagggacaacgucuguuu

SEQ ID NO: 1119278 - RNA, 19 nt, Artificial Sequence
  Description of Artificial Sequence: Synthetic oligonucleotide
aagaugccugucagauugc

SEQ ID NO: 1119279 - RNA, 19 nt, Artificial Sequence
  Description of Artificial Sequence: Synthetic oligonucleotide
uggaguacugggaggucca

SEQ ID NO: 1119280 - RNA, 19 nt, Artificial Sequence
  Description of Artificial Sequence: Synthetic oligonucleotide
cugcacugauauuuccugc

SEQ ID NO: 1119281 - RNA, 19 nt, Artificial Sequence
  Description of Artificial Sequence: Synthetic oligonucleotide
agggacaacgucuguuuca

SEQ ID NO: 1119282 - RNA, 19 nt, Artificial Sequence
  Description of Artificial Sequence: Synthetic oligonucleotide
acaaguuucaagaguacua

SEQ ID NO: 1119283 - RNA, 19 nt, Artificial Sequence
  Description of Artificial Sequence: Synthetic oligonucleotide
uuaggcccagaaaugcaau

SEQ ID NO: 1119284 - RNA, 19 nt, Artificial Sequence
  Description of Artificial Sequence: Synthetic oligonucleotide
ugaccuuagaggcuuccuu

SEQ ID NO: 1119285 - RNA, 19 nt, Artificial Sequence
  Description of Artificial Sequence: Synthetic oligonucleotide
aggcucucucucuaggucu

SEQ ID NO: 1119286 - RNA, 19 nt, Artificial Sequence
  Description of Artificial Sequence: Synthetic oligonucleotide
gaaccaagucauaaauauc

SEQ ID NO: 1119287 - RNA, 19 nt, Artificial Sequence
  Description of Artificial Sequence: Synthetic oligonucleotide
gagggugcgcacuugcuga

SEQ ID NO: 1119288 - RNA, 19 nt, Artificial Sequence
  Description of Artificial Sequence: Synthetic oligonucleotide
ugauccagucacauaccau

SEQ ID NO: 1119289 - RNA, 19 nt, Artificial Sequence
  Description of Artificial Sequence: Synthetic oligonucleotide
aaccuaugcagcguccagu

SEQ ID NO: 1119290 - RNA, 19 nt, Artificial Sequence
  Description of Artificial Sequence: Synthetic oligonucleotide
uggagugaccuuagaggcu

SEQ ID NO: 1119291 - RNA, 19 nt, Artificial Sequence
  Description of Artificial Sequence: Synthetic oligonucleotide
ggcuaugaugcugaaaaug

SEQ ID NO: 1119292 - RNA, 19 nt, Artificial Sequence
  Description of Artificial Sequence: Synthetic oligonucleotide
aggucugacagagggugcg

SEQ ID NO: 1119293 - RNA, 19 nt, Artificial Sequence
  Description of Artificial Sequence: Synthetic oligonucleotide
ugcuagcaugaagauauac

SEQ ID NO: 1119294 - RNA, 19 nt, Artificial Sequence
  Description of Artificial Sequence: Synthetic oligonucleotide
agaagccuuagugaagccu

SEQ ID NO: 1119295 - RNA, 19 nt, Artificial Sequence
  Description of Artificial Sequence: Synthetic oligonucleotide
uggaucaguugcccaaguc

SEQ ID NO: 1119296 - RNA, 19 nt, Artificial Sequence
  Description of Artificial Sequence: Synthetic oligonucleotide
acuagaagacauccuuuua

SEQ ID NO: 1119297 - RNA, 19 nt, Artificial Sequence
  Description of Artificial Sequence: Synthetic oligonucleotide
gcuagaaccagcuuccaaa

SEQ ID NO: 1119298 - RNA, 19 nt, Artificial Sequence
  Description of Artificial Sequence: Synthetic oligonucleotide
aaucuauuaugcagggcuu

SEQ ID NO: 1119299 - RNA, 19 nt, Artificial Sequence
  Description of Artificial Sequence: Synthetic oligonucleotide
uucaugugucugcuuugcu

SEQ ID NO: 1119300 - RNA, 19 nt, Artificial Sequence
  Description of Artificial Sequence: Synthetic oligonucleotide
gauuugaccaguagacgaa

SEQ ID NO: 1119301 - RNA, 19 nt, Artificial Sequence
  Description of Artificial Sequence: Synthetic oligonucleotide
gugguacaaugauuugacc

SEQ ID NO: 1119302 - RNA, 19 nt, Artificial Sequence
  Description of Artificial Sequence: Synthetic oligonucleotide
ugggagguccaaucuauua

SEQ ID NO: 1119303 - RNA, 19 nt, Artificial Sequence
  Description of Artificial Sequence: Synthetic oligonucleotide
ccacacaagaguugcauac

SEQ ID NO: 1119304 - RNA, 19 nt, Artificial Sequence
  Description of Artificial Sequence: Synthetic oligonucleotide
guuuugaacgguggugagc

SEQ ID NO: 1119305 - RNA, 19 nt, Artificial Sequence
  Description of Artificial Sequence: Synthetic oligonucleotide
gguucuuauagccaaccaa

SEQ ID NO: 1119306 - RNA, 19 nt, Artificial Sequence
  Description of Artificial Sequence: Synthetic oligonucleotide
agaguugcauacauggcaa

SEQ ID NO: 1119307 - RNA, 19 nt, Artificial Sequence
  Description of Artificial Sequence: Synthetic oligonucleotide
uaggucugacagagggugc

SEQ ID NO: 1119308 - RNA, 19 nt, Artificial Sequence
  Description of Artificial Sequence: Synthetic oligonucleotide
uugaauguugugguacaau

SEQ ID NO: 1119309 - RNA, 19 nt, Artificial Sequence
  Description of Artificial Sequence: Synthetic oligonucleotide
ucggcaucucacuucacuu

SEQ ID NO: 1119310 - RNA, 19 nt, Artificial Sequence
  Description of Artificial Sequence: Synthetic oligonucleotide
ugcgcacuugcugaggacu

SEQ ID NO: 1119311 - RNA, 19 nt, Artificial Sequence
  Description of Artificial Sequence: Synthetic oligonucleotide
gcuacaucaggaaagaaua

SEQ ID NO: 1119312 - RNA, 19 nt, Artificial Sequence
  Description of Artificial Sequence: Synthetic oligonucleotide
uagcagaaagaccguuggu

SEQ ID NO: 1119313 - RNA, 19 nt, Artificial Sequence
  Description of Artificial Sequence: Synthetic oligonucleotide
acgucuguuucaugugucu

SEQ ID NO: 1119314 - RNA, 19 nt, Artificial Sequence
  Description of Artificial Sequence: Synthetic oligonucleotide
gaauugaaguccaggauau

SEQ ID NO: 1119315 - RNA, 19 nt, Artificial Sequence
  Description of Artificial Sequence: Synthetic oligonucleotide
uacugggagguccaaucua

SEQ ID NO: 1119316 - RNA, 19 nt, Artificial Sequence
  Description of Artificial Sequence: Synthetic oligonucleotide
ucgauaggcucucucucua

SEQ ID NO: 1119317 - RNA, 19 nt, Artificial Sequence
  Description of Artificial Sequence: Synthetic oligonucleotide
ugccugcuacaucaggaaa

SEQ ID NO: 1119318 - RNA, 19 nt, Artificial Sequence
  Description of Artificial Sequence: Synthetic oligonucleotide
gagguguuucucccuuagc

SEQ ID NO: 1119319 - RNA, 19 nt, Artificial Sequence
  Description of Artificial Sequence: Synthetic oligonucleotide
gagcucgcauuuauguagc

SEQ ID NO: 1119320 - RNA, 19 nt, Artificial Sequence
  Description of Artificial Sequence: Synthetic oligonucleotide
gguucugugugaauccaag

SEQ ID NO: 1119321 - RNA, 19 nt, Artificial Sequence
  Description of Artificial Sequence: Synthetic oligonucleotide
auauauccaacagcccaca

SEQ ID NO: 1119322 - RNA, 19 nt, Artificial Sequence
  Description of Artificial Sequence: Synthetic oligonucleotide
acuaucugacugagguagg

SEQ ID NO: 1119323 - RNA, 19 nt, Artificial Sequence
  Description of Artificial Sequence: Synthetic oligonucleotide
augguugccaaaaccuaug

SEQ ID NO: 1119324 - RNA, 19 nt, Artificial Sequence
  Description of Artificial Sequence: Synthetic oligonucleotide
cuuaucaacugcacugaua

SEQ ID NO: 1119325 - RNA, 19 nt, Artificial Sequence
  Description of Artificial Sequence: Synthetic oligonucleotide
gguccauaauccaucuucc

SEQ ID NO: 1119326 - RNA, 19 nt, Artificial Sequence
  Description of Artificial Sequence: Synthetic oligonucleotide
gacugagguagguccauaa

SEQ ID NO: 1119327 - RNA, 19 nt, Artificial Sequence
  Description of Artificial Sequence: Synthetic oligonucleotide
acagccauaucaagaggug

SEQ ID NO: 1119328 - RNA, 19 nt, Artificial Sequence
  Description of Artificial Sequence: Synthetic oligonucleotide
gccacuaucugacugaggu

SEQ ID NO: 1119329 - RNA, 19 nt, Artificial Sequence
  Description of Artificial Sequence: Synthetic oligonucleotide
ucgcauuuauguagccauc

SEQ ID NO: 1119330 - RNA, 19 nt, Artificial Sequence
  Description of Artificial Sequence: Synthetic oligonucleotide
gcuagcaugaagauauaca

SEQ ID NO: 1119331 - RNA, 19 nt, Artificial Sequence
  Description of Artificial Sequence: Synthetic oligonucleotide
aaaagccaauacaguauuu

SEQ ID NO: 1119332 - RNA, 19 nt, Artificial Sequence
  Description of Artificial Sequence: Synthetic oligonucleotide
ccaggcuagaaccagcuuc

SEQ ID NO: 1119333 - RNA, 19 nt, Artificial Sequence
  Description of Artificial Sequence: Synthetic oligonucleotide
ccuuagugaagccuggauc

SEQ ID NO: 1119334 - RNA, 19 nt, Artificial Sequence
  Description of Artificial Sequence: Synthetic oligonucleotide
ugcagcguccaguccagaa

SEQ ID NO: 1119335 - RNA, 19 nt, Artificial Sequence
  Description of Artificial Sequence: Synthetic oligonucleotide
uacaaaacccagggagaac

SEQ ID NO: 1119336 - RNA, 19 nt, Artificial Sequence
  Description of Artificial Sequence: Synthetic oligonucleotide
gacauccuuuuaaaagcca

SEQ ID NO: 1119337 - RNA, 19 nt, Artificial Sequence
  Description of Artificial Sequence: Synthetic oligonucleotide
gcugcuagcaugaagauau

SEQ ID NO: 1119338 - RNA, 19 nt, Artificial Sequence
  Description of Artificial Sequence: Synthetic oligonucleotide
guugguaaguacacaaggu

SEQ ID NO: 1119339 - RNA, 19 nt, Artificial Sequence
  Description of Artificial Sequence: Synthetic oligonucleotide
cucgcauuuauguagccau

SEQ ID NO: 1119340 - RNA, 19 nt, Artificial Sequence
  Description of Artificial Sequence: Synthetic oligonucleotide
gcaagggugacaauauuca

SEQ ID NO: 1119341 - RNA, 19 nt, Artificial Sequence
  Description of Artificial Sequence: Synthetic oligonucleotide
aagagguguuucucccuua

SEQ ID NO: 1119342 - RNA, 19 nt, Artificial Sequence
  Description of Artificial Sequence: Synthetic oligonucleotide
gagggacaacgucuguuuc

SEQ ID NO: 1119343 - RNA, 19 nt, Artificial Sequence
  Description of Artificial Sequence: Synthetic oligonucleotide
gguaaugaugaugguugcc

SEQ ID NO: 1119344 - RNA, 19 nt, Artificial Sequence
  Description of Artificial Sequence: Synthetic oligonucleotide
agggagaacaggccacuau

SEQ ID NO: 1119345 - RNA, 19 nt, Artificial Sequence
  Description of Artificial Sequence: Synthetic oligonucleotide
agcaagaagaagagguaau

SEQ ID NO: 1119346 - RNA, 19 nt, Artificial Sequence
  Description of Artificial Sequence: Synthetic oligonucleotide
cuauuaugcagggcuucac

SEQ ID NO: 1119347 - RNA, 19 nt, Artificial Sequence
  Description of Artificial Sequence: Synthetic oligonucleotide
auuugaccaguagacgaaa

SEQ ID NO: 1119348 - RNA, 19 nt, Artificial Sequence
  Description of Artificial Sequence: Synthetic oligonucleotide
aguuaggcccagaaaugca

SEQ ID NO: 1119349 - RNA, 19 nt, Artificial Sequence
  Description of Artificial Sequence: Synthetic oligonucleotide
aaguccagacagccaguuu

SEQ ID NO: 1119350 - RNA, 19 nt, Artificial Sequence
  Description of Artificial Sequence: Synthetic oligonucleotide
augaaccaagucauaaaua

SEQ ID NO: 1119351 - RNA, 19 nt, Artificial Sequence
  Description of Artificial Sequence: Synthetic oligonucleotide
guuaggcccagaaaugcaa

SEQ ID NO: 1119352 - RNA, 19 nt, Artificial Sequence
  Description of Artificial Sequence: Synthetic oligonucleotide
uggcaggauggaaaaccau

SEQ ID NO: 1119353 - RNA, 19 nt, Artificial Sequence
  Description of Artificial Sequence: Synthetic oligonucleotide
uugcucgauaggcucucuc

SEQ ID NO: 1119354 - RNA, 19 nt, Artificial Sequence
  Description of Artificial Sequence: Synthetic oligonucleotide
uuccuugaauguuguggua

SEQ ID NO: 1119355 - RNA, 19 nt, Artificial Sequence
  Description of Artificial Sequence: Synthetic oligonucleotide
gguuauauggugucuuccu

SEQ ID NO: 1119356 - RNA, 19 nt, Artificial Sequence
  Description of Artificial Sequence: Synthetic oligonucleotide
gauugcucgauaggcucuc

SEQ ID NO: 1119357 - RNA, 19 nt, Artificial Sequence
  Description of Artificial Sequence: Synthetic oligonucleotide
agauugcucgauaggcucu

SEQ ID NO: 1119358 - RNA, 19 nt, Artificial Sequence
  Description of Artificial Sequence: Synthetic oligonucleotide
acaagucaagagugaguuu

SEQ ID NO: 1119359 - RNA, 19 nt, Artificial Sequence
  Description of Artificial Sequence: Synthetic oligonucleotide
gguaaguacacaagguucu

SEQ ID NO: 1119360 - RNA, 19 nt, Artificial Sequence
  Description of Artificial Sequence: Synthetic oligonucleotide
acauaccauggaaagggaa

SEQ ID NO: 1119361 - RNA, 19 nt, Artificial Sequence
  Description of Artificial Sequence: Synthetic oligonucleotide
uggcucucaucuuggcuuc

SEQ ID NO: 1119362 - RNA, 19 nt, Artificial Sequence
  Description of Artificial Sequence: Synthetic oligonucleotide
gaugguugccaaaaccuau

SEQ ID NO: 1119363 - RNA, 19 nt, Artificial Sequence
  Description of Artificial Sequence: Synthetic oligonucleotide
agggugcgcacuugcugag

SEQ ID NO: 1119364 - RNA, 19 nt, Artificial Sequence
  Description of Artificial Sequence: Synthetic oligonucleotide
agcaaaacagguacaucua

SEQ ID NO: 1119365 - RNA, 19 nt, Artificial Sequence
  Description of Artificial Sequence: Synthetic oligonucleotide
ucggauguccaggcuagaa

SEQ ID NO: 1119366 - RNA, 19 nt, Artificial Sequence
  Description of Artificial Sequence: Synthetic oligonucleotide
agccauaucaagagguguu

SEQ ID NO: 1119367 - RNA, 19 nt, Artificial Sequence
  Description of Artificial Sequence: Synthetic oligonucleotide
caggccacuaucugacuga

SEQ ID NO: 1119368 - RNA, 19 nt, Artificial Sequence
  Description of Artificial Sequence: Synthetic oligonucleotide
aucaguugcccaagucuug

SEQ ID NO: 1119369 - RNA, 19 nt, Artificial Sequence
  Description of Artificial Sequence: Synthetic oligonucleotide
ccaaaaccuaugcagcguc

SEQ ID NO: 1119370 - RNA, 19 nt, Artificial Sequence
  Description of Artificial Sequence: Synthetic oligonucleotide
ucagaccucacagcaccaa

SEQ ID NO: 1119371 - RNA, 19 nt, Artificial Sequence
  Description of Artificial Sequence: Synthetic oligonucleotide
guagguccauaauccaucu

SEQ ID NO: 1119372 - RNA, 19 nt, Artificial Sequence
  Description of Artificial Sequence: Synthetic oligonucleotide
cuaagccaaagcagccaca

SEQ ID NO: 1119373 - RNA, 19 nt, Artificial Sequence
  Description of Artificial Sequence: Synthetic oligonucleotide
cacauaccauggaaaggga

SEQ ID NO: 1119374 - RNA, 19 nt, Artificial Sequence
  Description of Artificial Sequence: Synthetic oligonucleotide
gcuacuagaagacauccuu

SEQ ID NO: 1119375 - RNA, 19 nt, Artificial Sequence
  Description of Artificial Sequence: Synthetic oligonucleotide
aucgagccacacaagaguu

SEQ ID NO: 1119376 - RNA, 19 nt, Artificial Sequence
  Description of Artificial Sequence: Synthetic oligonucleotide
aggccacuaucugacugag

SEQ ID NO: 1119377 - RNA, 19 nt, Artificial Sequence
  Description of Artificial Sequence: Synthetic oligonucleotide
cugaauugaaguccaggau

SEQ ID NO: 1119378 - RNA, 19 nt, Artificial Sequence
  Description of Artificial Sequence: Synthetic oligonucleotide
gaaagaccguugguaagua

SEQ ID NO: 1119379 - RNA, 19 nt, Artificial Sequence
  Description of Artificial Sequence: Synthetic oligonucleotide
uuugaacgguggugagcuc

SEQ ID NO: 1119380 - RNA, 19 nt, Artificial Sequence
  Description of Artificial Sequence: Synthetic oligonucleotide
cacacaagaguugcauaca

SEQ ID NO: 1119381 - RNA, 19 nt, Artificial Sequence
  Description of Artificial Sequence: Synthetic oligonucleotide
ccguugguaaguacacaag

SEQ ID NO: 1119382 - RNA, 19 nt, Artificial Sequence
  Description of Artificial Sequence: Synthetic oligonucleotide
ugcccaagucuuguagaaa

SEQ ID NO: 1119383 - RNA, 19 nt, Artificial Sequence
  Description of Artificial Sequence: Synthetic oligonucleotide
guugaccaugagaaaugga

SEQ ID NO: 1119384 - RNA, 19 nt, Artificial Sequence
  Description of Artificial Sequence: Synthetic oligonucleotide
aguagacgaaagauccaua

SEQ ID NO: 1119385 - RNA, 19 nt, Artificial Sequence
  Description of Artificial Sequence: Synthetic oligonucleotide
auguugugguacaaugauu

SEQ ID NO: 1119386 - RNA, 19 nt, Artificial Sequence
  Description of Artificial Sequence: Synthetic oligonucleotide
ggcaauggagugaccuuag

SEQ ID NO: 1119387 - RNA, 19 nt, Artificial Sequence
  Description of Artificial Sequence: Synthetic oligonucleotide
ucauguucuuggggaaaua

SEQ ID NO: 1119388 - RNA, 19 nt, Artificial Sequence
  Description of Artificial Sequence: Synthetic oligonucleotide
cuacuagaagacauccuuu

SEQ ID NO: 1119389 - RNA, 19 nt, Artificial Sequence
  Description of Artificial Sequence: Synthetic oligonucleotide
  modified_base (12)..(12): a, c, u, g, unknown or other
gggauuaaacunaaagaau

SEQ ID NO: 1119390 - RNA, 19 nt, Artificial Sequence
  Description of Artificial Sequence: Synthetic oligonucleotide
cauaaucagugacuauuau

SEQ ID NO: 1119391 - RNA, 19 nt, Artificial Sequence
  Description of Artificial Sequence: Synthetic oligonucleotide
ccaguuucugcaaggguga

SEQ ID NO: 1119392 - RNA, 19 nt, Artificial Sequence
  Description of Artificial Sequence: Synthetic oligonucleotide
acauggcaauggagugacc

SEQ ID NO: 1119393 - RNA, 19 nt, Artificial Sequence
  Description of Artificial Sequence: Synthetic oligonucleotide
cacaguuuugaacgguggu

SEQ ID NO: 1119394 - RNA, 19 nt, Artificial Sequence
  Description of Artificial Sequence: Synthetic oligonucleotide
ggugcgcacuugcugagga

SEQ ID NO: 1119395 - RNA, 19 nt, Artificial Sequence
  Description of Artificial Sequence: Synthetic oligonucleotide
cuugaauguugugguacaa

SEQ ID NO: 1119396 - RNA, 19 nt, Artificial Sequence
  Description of Artificial Sequence: Synthetic oligonucleotide
cgagccacacaagaguugc

SEQ ID NO: 1119397 - RNA, 19 nt, Artificial Sequence
  Description of Artificial Sequence: Synthetic oligonucleotide
caacgucuguuucaugugu

SEQ ID NO: 1119398 - RNA, 19 nt, Artificial Sequence
  Description of Artificial Sequence: Synthetic oligonucleotide
gaccguugguaaguacaca

SEQ ID NO: 1119399 - RNA, 19 nt, Artificial Sequence
  Description of Artificial Sequence: Synthetic oligonucleotide
guacaaugauuugaccagu

SEQ ID NO: 1119400 - RNA, 19 nt, Artificial Sequence
  Description of Artificial Sequence: Synthetic oligonucleotide
gguguuucucccuuagcau

SEQ ID NO: 1119401 - RNA, 19 nt, Artificial Sequence
  Description of Artificial Sequence: Synthetic oligonucleotide
agcugcuagcaugaagaua

SEQ ID NO: 1119402 - RNA, 19 nt, Artificial Sequence
  Description of Artificial Sequence: Synthetic oligonucleotide
gggaaguuaggcccagaaa

SEQ ID NO: 1119403 - RNA, 19 nt, Artificial Sequence
  Description of Artificial Sequence: Synthetic oligonucleotide
cuuccuuauaagacaugau

SEQ ID NO: 1119404 - RNA, 19 nt, Artificial Sequence
  Description of Artificial Sequence: Synthetic oligonucleotide
ccauaaucagugacuauua

SEQ ID NO: 1119405 - RNA, 19 nt, Artificial Sequence
  Description of Artificial Sequence: Synthetic oligonucleotide
cugauauuuccugcugcaa

SEQ ID NO: 1119406 - RNA, 19 nt, Artificial Sequence
  Description of Artificial Sequence: Synthetic oligonucleotide
cauguucuuggggaaauau

SEQ ID NO: 1119407 - RNA, 19 nt, Artificial Sequence
  Description of Artificial Sequence: Synthetic oligonucleotide
ccaaucuauuaugcagggc

SEQ ID NO: 1119408 - RNA, 19 nt, Artificial Sequence
  Description of Artificial Sequence: Synthetic oligonucleotide
cucccuuagcauuucggau

SEQ ID NO: 1119409 - RNA, 19 nt, Artificial Sequence
  Description of Artificial Sequence: Synthetic oligonucleotide
ugacugagguagguccaua

SEQ ID NO: 1119410 - RNA, 19 nt, Artificial Sequence
  Description of Artificial Sequence: Synthetic oligonucleotide
cauggaguacugggagguc

SEQ ID NO: 1119411 - RNA, 19 nt, Artificial Sequence
  Description of Artificial Sequence: Synthetic oligonucleotide
caguagacgaaagauccau

SEQ ID NO: 1119412 - RNA, 19 nt, Artificial Sequence
  Description of Artificial Sequence: Synthetic oligonucleotide
caguuucugcaagggugac

SEQ ID NO: 1119413 - RNA, 19 nt, Artificial Sequence
  Description of Artificial Sequence: Synthetic oligonucleotide
uucggauguccaggcuaga

SEQ ID NO: 1119414 - RNA, 19 nt, Artificial Sequence
  Description of Artificial Sequence: Synthetic oligonucleotide
auugcucgauaggcucucu

SEQ ID NO: 1119415 - RNA, 19 nt, Artificial Sequence
  Description of Artificial Sequence: Synthetic oligonucleotide
gaguugcauacauggcaau

SEQ ID NO: 1119416 - RNA, 19 nt, Artificial Sequence
  Description of Artificial Sequence: Synthetic oligonucleotide
ccauaucaagagguguuuc

SEQ ID NO: 1119417 - RNA, 19 nt, Artificial Sequence
  Description of Artificial Sequence: Synthetic oligonucleotide
gaacgguggugagcucggc

SEQ ID NO: 1119418 - RNA, 19 nt, Artificial Sequence
  Description of Artificial Sequence: Synthetic oligonucleotide
ccuaugcagcguccagucc

SEQ ID NO: 1119419 - RNA, 19 nt, Artificial Sequence
  Description of Artificial Sequence: Synthetic oligonucleotide
gugcgcacuugcugaggac

SEQ ID NO: 1119420 - RNA, 19 nt, Artificial Sequence
  Description of Artificial Sequence: Synthetic oligonucleotide
cuaucugacugagguaggu

SEQ ID NO: 1119421 - RNA, 19 nt, Artificial Sequence
  Description of Artificial Sequence: Synthetic oligonucleotide
caagguuauauggugucuu

SEQ ID NO: 1119422 - RNA, 19 nt, Artificial Sequence
  Description of Artificial Sequence: Synthetic oligonucleotide
cggauguccaggcuagaac

SEQ ID NO: 1119423 - RNA, 19 nt, Artificial Sequence
  Description of Artificial Sequence: Synthetic oligonucleotide
gcucgcauuuauguagcca

SEQ ID NO: 1119424 - RNA, 19 nt, Artificial Sequence
  Description of Artificial Sequence: Synthetic oligonucleotide
ggacaacgucuguuucaug

SEQ ID NO: 1119425 - RNA, 19 nt, Artificial Sequence
  Description of Artificial Sequence: Synthetic oligonucleotide
ccugcuacaucaggaaaga

SEQ ID NO: 1119426 - RNA, 19 nt, Artificial Sequence
  Description of Artificial Sequence: Synthetic oligonucleotide
gcguccaguccagaagcag

SEQ ID NO: 1119427 - RNA, 19 nt, Artificial Sequence
  Description of Artificial Sequence: Synthetic oligonucleotide
gcaauggagugaccuuaga

SEQ ID NO: 1119428 - RNA, 19 nt, Artificial Sequence
  Description of Artificial Sequence: Synthetic oligonucleotide
ccaguagacgaaagaucca

SEQ ID NO: 1119429 - RNA, 19 nt, Artificial Sequence
  Description of Artificial Sequence: Synthetic oligonucleotide
gagccacacaagaguugca

SEQ ID NO: 1119430 - RNA, 19 nt, Artificial Sequence
  Description of Artificial Sequence: Synthetic oligonucleotide
acacugagagagggauuaa

SEQ ID NO: 1119431 - RNA, 19 nt, Artificial Sequence
  Description of Artificial Sequence: Synthetic oligonucleotide
ggucugacagagggugcgc

SEQ ID NO: 1119432 - RNA, 19 nt, Artificial Sequence
  Description of Artificial Sequence: Synthetic oligonucleotide
cauuucggauguccaggcu

SEQ ID NO: 1119433 - RNA, 19 nt, Artificial Sequence
  Description of Artificial Sequence: Synthetic oligonucleotide
guaaguacacaagguucuu

SEQ ID NO: 1119434 - RNA, 19 nt, Artificial Sequence
  Description of Artificial Sequence: Synthetic oligonucleotide
gggcuucacuaagccaaag

SEQ ID NO: 1119435 - RNA, 19 nt, Artificial Sequence
  Description of Artificial Sequence: Synthetic oligonucleotide
ggccacuaucugacugagg

SEQ ID NO: 1119436 - RNA, 19 nt, Artificial Sequence
  Description of Artificial Sequence: Synthetic oligonucleotide
gagugaccuuagaggcuuc

SEQ ID NO: 1119437 - RNA, 19 nt, Artificial Sequence
  Description of Artificial Sequence: Synthetic oligonucleotide
gggugcgcacuugcugagg

SEQ ID NO: 1119438 - RNA, 19 nt, Artificial Sequence
  Description of Artificial Sequence: Synthetic oligonucleotide
gugaccuuagaggcuuccu

SEQ ID NO: 1119439 - RNA, 19 nt, Artificial Sequence
  Description of Artificial Sequence: Synthetic oligonucleotide
ccagcuuccaaaagcuuau

SEQ ID NO: 1119440 - RNA, 19 nt, Artificial Sequence
  Description of Artificial Sequence: Synthetic oligonucleotide
gccaagagucugaauugaa

SEQ ID NO: 1119441 - RNA, 19 nt, Artificial Sequence
  Description of Artificial Sequence: Synthetic oligonucleotide
cagagggugcgcacuugcu

SEQ ID NO: 1119442 - RNA, 19 nt, Artificial Sequence
  Description of Artificial Sequence: Synthetic oligonucleotide
gaguacugggagguccaau

SEQ ID NO: 1119443 - RNA, 19 nt, Artificial Sequence
  Description of Artificial Sequence: Synthetic oligonucleotide
cuggaucaguugcccaagu

SEQ ID NO: 1119444 - RNA, 19 nt, Artificial Sequence
  Description of Artificial Sequence: Synthetic oligonucleotide
ggggaaauauuuggaacuu

SEQ ID NO: 1119445 - RNA, 19 nt, Artificial Sequence
  Description of Artificial Sequence: Synthetic oligonucleotide
gggacaacgucuguuucau

SEQ ID NO: 1119446 - RNA, 19 nt, Artificial Sequence
  Description of Artificial Sequence: Synthetic oligonucleotide
gguggugagcucggcaucu

SEQ ID NO: 1119447 - RNA, 19 nt, Artificial Sequence
  Description of Artificial Sequence: Synthetic oligonucleotide
cugcuagcaugaagauaua

SEQ ID NO: 1119448 - RNA, 19 nt, Artificial Sequence
  Description of Artificial Sequence: Synthetic oligonucleotide
gccaaaaccuaugcagcgu

SEQ ID NO: 1119449 - RNA, 19 nt, Artificial Sequence
  Description of Artificial Sequence: Synthetic oligonucleotide
cugggagguccaaucuauu

SEQ ID NO: 1119450 - RNA, 19 nt, Artificial Sequence
  Description of Artificial Sequence: Synthetic oligonucleotide
cugacugagguagguccau

SEQ ID NO: 1119451 - RNA, 19 nt, Artificial Sequence
  Description of Artificial Sequence: Synthetic oligonucleotide
gccauaucaagagguguuu

SEQ ID NO: 1119452 - RNA, 19 nt, Artificial Sequence
  Description of Artificial Sequence: Synthetic oligonucleotide
ggaguacugggagguccaa

SEQ ID NO: 1119453 - RNA, 19 nt, Artificial Sequence
  Description of Artificial Sequence: Synthetic oligonucleotide
gggugaucacagacaguau

SEQ ID NO: 1119454 - RNA, 19 nt, Artificial Sequence
  Description of Artificial Sequence: Synthetic oligonucleotide
ccuuagcauuucggauguc

SEQ ID NO: 1119455 - RNA, 19 nt, Artificial Sequence
  Description of Artificial Sequence: Synthetic oligonucleotide
cggcaucucacuucacuuu

SEQ ID NO: 1119456 - RNA, 19 nt, Artificial Sequence
  Description of Artificial Sequence: Synthetic oligonucleotide
ucuacaauggagaagaucc

SEQ ID NO: 1119457 - RNA, 19 nt, Artificial Sequence
  Description of Artificial Sequence: Synthetic oligonucleotide
aaacauuccaucuaggaug

SEQ ID NO: 1119458 - RNA, 19 nt, Artificial Sequence
  Description of Artificial Sequence: Synthetic oligonucleotide
aaccuuaucuaguuugucc

SEQ ID NO: 1119459 - RNA, 19 nt, Artificial Sequence
  Description of Artificial Sequence: Synthetic oligonucleotide
aaugcgaucagccacuucu

SEQ ID NO: 1119460 - RNA, 19 nt, Artificial Sequence
  Description of Artificial Sequence: Synthetic oligonucleotide
ucaaauaaggccaauccug

SEQ ID NO: 1119461 - RNA, 19 nt, Artificial Sequence
  Description of Artificial Sequence: Synthetic oligonucleotide
uuuaccuugaccaggaagu

SEQ ID NO: 1119462 - RNA, 19 nt, Artificial Sequence
  Description of Artificial Sequence: Synthetic oligonucleotide
agaagauccgcucuacucc

SEQ ID NO: 1119463 - RNA, 19 nt, Artificial Sequence
  Description of Artificial Sequence: Synthetic oligonucleotide
ugagcuuugagucuucucc

SEQ ID NO: 1119464 - RNA, 19 nt, Artificial Sequence
  Description of Artificial Sequence: Synthetic oligonucleotide
auagaauucacgauaacgg

SEQ ID NO: 1119465 - RNA, 19 nt, Artificial Sequence
  Description of Artificial Sequence: Synthetic oligonucleotide
aaucaugggaucaaacugg

SEQ ID NO: 1119466 - RNA, 19 nt, Artificial Sequence
  Description of Artificial Sequence: Synthetic oligonucleotide
aauguuggucagcuuauuc

SEQ ID NO: 1119467 - RNA, 19 nt, Artificial Sequence
  Description of Artificial Sequence: Synthetic oligonucleotide
uaaucguugcucuacaaug

SEQ ID NO: 1119468 - RNA, 19 nt, Artificial Sequence
  Description of Artificial Sequence: Synthetic oligonucleotide
uuugagagaguuuaggauc

SEQ ID NO: 1119469 - RNA, 19 nt, Artificial Sequence
  Description of Artificial Sequence: Synthetic oligonucleotide
agagacaagcuuuagucuc

SEQ ID NO: 1119470 - RNA, 19 nt, Artificial Sequence
  Description of Artificial Sequence: Synthetic oligonucleotide
ucagagacaagcuuuaguc

SEQ ID NO: 1119471 - RNA, 19 nt, Artificial Sequence
  Description of Artificial Sequence: Synthetic oligonucleotide
caucccacaacucagagac

SEQ ID NO: 1119472 - RNA, 19 nt, Artificial Sequence
  Description of Artificial Sequence: Synthetic oligonucleotide
uuagauauucaaacagcag

SEQ ID NO: 1119473 - RNA, 19 nt, Artificial Sequence
  Description of Artificial Sequence: Synthetic oligonucleotide
cuugcuaucaggaacacca

SEQ ID NO: 1119474 - RNA, 19 nt, Artificial Sequence
  Description of Artificial Sequence: Synthetic oligonucleotide
aguuuuaggaguuucgcca

SEQ ID NO: 1119475 - RNA, 19 nt, Artificial Sequence
  Description of Artificial Sequence: Synthetic oligonucleotide
aguauaguaguccagcccu

SEQ ID NO: 1119476 - RNA, 19 nt, Artificial Sequence
  Description of Artificial Sequence: Synthetic oligonucleotide
uuuagcucgaacacaggag

SEQ ID NO: 1119477 - RNA, 19 nt, Artificial Sequence
  Description of Artificial Sequence: Synthetic oligonucleotide
uccaauacugagcccaacg

SEQ ID NO: 1119478 - RNA, 19 nt, Artificial Sequence
  Description of Artificial Sequence: Synthetic oligonucleotide
agugucaaucacuucugcc

SEQ ID NO: 1119479 - RNA, 19 nt, Artificial Sequence
  Description of Artificial Sequence: Synthetic oligonucleotide
agcacugccucauagauga

SEQ ID NO: 1119480 - RNA, 19 nt, Artificial Sequence
  Description of Artificial Sequence: Synthetic oligonucleotide
guucagcagacguagaggg

SEQ ID NO: 1119481 - RNA, 19 nt, Artificial Sequence
  Description of Artificial Sequence: Synthetic oligonucleotide
ugcucuacaauggagaaga

SEQ ID NO: 1119482 - RNA, 19 nt, Artificial Sequence
  Description of Artificial Sequence: Synthetic oligonucleotide
agugauagaauucacgaua

SEQ ID NO: 1119483 - RNA, 19 nt, Artificial Sequence
  Description of Artificial Sequence: Synthetic oligonucleotide
acuguagucucuugugccc

SEQ ID NO: 1119484 - RNA, 19 nt, Artificial Sequence
  Description of Artificial Sequence: Synthetic oligonucleotide
aggagugucaaucacuucu

SEQ ID NO: 1119485 - RNA, 19 nt, Artificial Sequence
  Description of Artificial Sequence: Synthetic oligonucleotide
uuuaaguacauaugcaguu

SEQ ID NO: 1119486 - RNA, 19 nt, Artificial Sequence
  Description of Artificial Sequence: Synthetic oligonucleotide
uuagcucgaacacaggagu

SEQ ID NO: 1119487 - RNA, 19 nt, Artificial Sequence
  Description of Artificial Sequence: Synthetic oligonucleotide
uagaauucacgauaacggc

SEQ ID NO: 1119488 - RNA, 19 nt, Artificial Sequence
  Description of Artificial Sequence: Synthetic oligonucleotide
aauggagaagauccgcucu

SEQ ID NO: 1119489 - RNA, 19 nt, Artificial Sequence
  Description of Artificial Sequence: Synthetic oligonucleotide
ugcaaacuauuuaaguaca

SEQ ID NO: 1119490 - RNA, 19 nt, Artificial Sequence
  Description of Artificial Sequence: Synthetic oligonucleotide
uuauucauugccagauacc

SEQ ID NO: 1119491 - RNA, 19 nt, Artificial Sequence
  Description of Artificial Sequence: Synthetic oligonucleotide
agccuguuuguuuugagag

SEQ ID NO: 1119492 - RNA, 19 nt, Artificial Sequence
  Description of Artificial Sequence: Synthetic oligonucleotide
aaucguugcucuacaaugg

SEQ ID NO: 1119493 - RNA, 19 nt, Artificial Sequence
  Description of Artificial Sequence: Synthetic oligonucleotide
uacaccuuugcuauguggu

SEQ ID NO: 1119494 - RNA, 19 nt, Artificial Sequence
  Description of Artificial Sequence: Synthetic oligonucleotide
ucuucggacauccaccucu

SEQ ID NO: 1119495 - RNA, 19 nt, Artificial Sequence
  Description of Artificial Sequence: Synthetic oligonucleotide
aacugguucaguaacuuug

SEQ ID NO: 1119496 - RNA, 19 nt, Artificial Sequence
  Description of Artificial Sequence: Synthetic oligonucleotide
agcgaugucaaaaucacag

SEQ ID NO: 1119497 - RNA, 19 nt, Artificial Sequence
  Description of Artificial Sequence: Synthetic oligonucleotide
ugucaaucacuucugcccc

SEQ ID NO: 1119498 - RNA, 19 nt, Artificial Sequence
  Description of Artificial Sequence: Synthetic oligonucleotide
gugcaaacuauuuaaguac

SEQ ID NO: 1119499 - RNA, 19 nt, Artificial Sequence
  Description of Artificial Sequence: Synthetic oligonucleotide
uucucuucggacauccacc

SEQ ID NO: 1119500 - RNA, 19 nt, Artificial Sequence
  Description of Artificial Sequence: Synthetic oligonucleotide
uuuaggucucccaagcccu

SEQ ID NO: 1119501 - RNA, 19 nt, Artificial Sequence
  Description of Artificial Sequence: Synthetic oligonucleotide
ugugguaacguuuaauguu

SEQ ID NO: 1119502 - RNA, 19 nt, Artificial Sequence
  Description of Artificial Sequence: Synthetic oligonucleotide
cacagugauagaauucacg

SEQ ID NO: 1119503 - RNA, 19 nt, Artificial Sequence
  Description of Artificial Sequence: Synthetic oligonucleotide
cauagcaggguuaucccgg

SEQ ID NO: 1119504 - RNA, 19 nt, Artificial Sequence
  Description of Artificial Sequence: Synthetic oligonucleotide
uacggaacuugcuaucagg

SEQ ID NO: 1119505 - RNA, 19 nt, Artificial Sequence
  Description of Artificial Sequence: Synthetic oligonucleotide
uccucugcuagucugcuug

SEQ ID NO: 1119506 - RNA, 19 nt, Artificial Sequence
  Description of Artificial Sequence: Synthetic oligonucleotide
uggacauaguccccaaugc

SEQ ID NO: 1119507 - RNA, 19 nt, Artificial Sequence
  Description of Artificial Sequence: Synthetic oligonucleotide
aacaccuuuucccgaacug

SEQ ID NO: 1119508 - RNA, 19 nt, Artificial Sequence
  Description of Artificial Sequence: Synthetic oligonucleotide
gauaccgugcaaaagggac

SEQ ID NO: 1119509 - RNA, 19 nt, Artificial Sequence
  Description of Artificial Sequence: Synthetic oligonucleotide
acgcauggcacuuugcguc

SEQ ID NO: 1119510 - RNA, 19 nt, Artificial Sequence
  Description of Artificial Sequence: Synthetic oligonucleotide
ucuaaagccucuaaucguu

SEQ ID NO: 1119511 - RNA, 19 nt, Artificial Sequence
  Description of Artificial Sequence: Synthetic oligonucleotide
acgauaacggccucugguc

SEQ ID NO: 1119512 - RNA, 19 nt, Artificial Sequence
  Description of Artificial Sequence: Synthetic oligonucleotide
ugguucagcagacguagag

SEQ ID NO: 1119513 - RNA, 19 nt, Artificial Sequence
  Description of Artificial Sequence: Synthetic oligonucleotide
ucugcuagccacugagcgg

SEQ ID NO: 1119514 - RNA, 19 nt, Artificial Sequence
  Description of Artificial Sequence: Synthetic oligonucleotide
ugucauuuaccuugaccag

SEQ ID NO: 1119515 - RNA, 19 nt, Artificial Sequence
  Description of Artificial Sequence: Synthetic oligonucleotide
gucaucaaugccaaacagg

SEQ ID NO: 1119516 - RNA, 19 nt, Artificial Sequence
  Description of Artificial Sequence: Synthetic oligonucleotide
aaagccucuaaucguugcu

SEQ ID NO: 1119517 - RNA, 19 nt, Artificial Sequence
  Description of Artificial Sequence: Synthetic oligonucleotide
ucaguuuuaggaguuucgc

SEQ ID NO: 1119518 - RNA, 19 nt, Artificial Sequence
  Description of Artificial Sequence: Synthetic oligonucleotide
caugggaucaaacuggcca

SEQ ID NO: 1119519 - RNA, 19 nt, Artificial Sequence
  Description of Artificial Sequence: Synthetic oligonucleotide
ggguuagauauucaaacag

SEQ ID NO: 1119520 - RNA, 19 nt, Artificial Sequence
  Description of Artificial Sequence: Synthetic oligonucleotide
cagauaccgugcaaaaggg

SEQ ID NO: 1119521 - RNA, 19 nt, Artificial Sequence
  Description of Artificial Sequence: Synthetic oligonucleotide
uuugcuaugugguaacguu

SEQ ID NO: 1119522 - RNA, 19 nt, Artificial Sequence
  Description of Artificial Sequence: Synthetic oligonucleotide
gaugaccccaguauaguag

SEQ ID NO: 1119523 - RNA, 19 nt, Artificial Sequence
  Description of Artificial Sequence: Synthetic oligonucleotide
aauacugagcccaacgcau

SEQ ID NO: 1119524 - RNA, 19 nt, Artificial Sequence
  Description of Artificial Sequence: Synthetic oligonucleotide
guuagauauucaaacagca

SEQ ID NO: 1119525 - RNA, 19 nt, Artificial Sequence
  Description of Artificial Sequence: Synthetic oligonucleotide
agauauucaaacagcagcu

SEQ ID NO: 1119526 - RNA, 19 nt, Artificial Sequence
  Description of Artificial Sequence: Synthetic oligonucleotide
ucagcagacguagaggggc

SEQ ID NO: 1119527 - RNA, 19 nt, Artificial Sequence
  Description of Artificial Sequence: Synthetic oligonucleotide
ucuaggaugcgccugucau

SEQ ID NO: 1119528 - RNA, 19 nt, Artificial Sequence
  Description of Artificial Sequence: Synthetic oligonucleotide
acaccuuuucccgaacugc

SEQ ID NO: 1119529 - RNA, 19 nt, Artificial Sequence
  Description of Artificial Sequence: Synthetic oligonucleotide
gaugucaaaaucacaguga

SEQ ID NO: 1119530 - RNA, 19 nt, Artificial Sequence
  Description of Artificial Sequence: Synthetic oligonucleotide
augucaaaaucacagugau

SEQ ID NO: 1119531 - RNA, 19 nt, Artificial Sequence
  Description of Artificial Sequence: Synthetic oligonucleotide
ccagauaccgugcaaaagg

SEQ ID NO: 1119532 - RNA, 19 nt, Artificial Sequence
  Description of Artificial Sequence: Synthetic oligonucleotide
auuuaaguacauaugcagu

SEQ ID NO: 1119533 - RNA, 19 nt, Artificial Sequence
  Description of Artificial Sequence: Synthetic oligonucleotide
gaaguugccuaucugaagu

SEQ ID NO: 1119534 - RNA, 19 nt, Artificial Sequence
  Description of Artificial Sequence: Synthetic oligonucleotide
aaaccuuaucuaguuuguc

SEQ ID NO: 1119535 - RNA, 19 nt, Artificial Sequence
  Description of Artificial Sequence: Synthetic oligonucleotide
cacuuugcguccuuugggg

SEQ ID NO: 1119536 - RNA, 19 nt, Artificial Sequence
  Description of Artificial Sequence: Synthetic oligonucleotide
caacgcauggcacuuugcg

SEQ ID NO: 1119537 - RNA, 19 nt, Artificial Sequence
  Description of Artificial Sequence: Synthetic oligonucleotide
uauaguaguccagcccucg

SEQ ID NO: 1119538 - RNA, 19 nt, Artificial Sequence
  Description of Artificial Sequence: Synthetic oligonucleotide
gagcacaaacuucuguuug

SEQ ID NO: 1119539 - RNA, 19 nt, Artificial Sequence
  Description of Artificial Sequence: Synthetic oligonucleotide
aggguuaucccggcgauac

SEQ ID NO: 1119540 - RNA, 19 nt, Artificial Sequence
  Description of Artificial Sequence: Synthetic oligonucleotide
caucauagcgcccuccagc

SEQ ID NO: 1119541 - RNA, 19 nt, Artificial Sequence
  Description of Artificial Sequence: Synthetic oligonucleotide
uguuugaggccccucacau

SEQ ID NO: 1119542 - RNA, 19 nt, Artificial Sequence
  Description of Artificial Sequence: Synthetic oligonucleotide
augugguaacguuuaaugu

SEQ ID NO: 1119543 - RNA, 19 nt, Artificial Sequence
  Description of Artificial Sequence: Synthetic oligonucleotide
aacgcauggcacuuugcgu

SEQ ID NO: 1119544 - RNA, 19 nt, Artificial Sequence
  Description of Artificial Sequence: Synthetic oligonucleotide
aggguuagauauucaaaca

SEQ ID NO: 1119545 - RNA, 19 nt, Artificial Sequence
  Description of Artificial Sequence: Synthetic oligonucleotide
auagcaggguuaucccggc

SEQ ID NO: 1119546 - RNA, 19 nt, Artificial Sequence
  Description of Artificial Sequence: Synthetic oligonucleotide
caguuuuaggaguuucgcc

SEQ ID NO: 1119547 - RNA, 19 nt, Artificial Sequence
  Description of Artificial Sequence: Synthetic oligonucleotide
cuacaauggagaagauccg

SEQ ID NO: 1119548 - RNA, 19 nt, Artificial Sequence
  Description of Artificial Sequence: Synthetic oligonucleotide
aaguugccuaucugaagug

SEQ ID NO: 1119549 - RNA, 19 nt, Artificial Sequence
  Description of Artificial Sequence: Synthetic oligonucleotide
uaaagccucuaaucguugc

SEQ ID NO: 1119550 - RNA, 19 nt, Artificial Sequence
  Description of Artificial Sequence: Synthetic oligonucleotide
uuaguucaaauaaggccaa

SEQ ID NO: 1119551 - RNA, 19 nt, Artificial Sequence
  Description of Artificial Sequence: Synthetic oligonucleotide
auagaugaccccaguauag

SEQ ID NO: 1119552 - RNA, 19 nt, Artificial Sequence
  Description of Artificial Sequence: Synthetic oligonucleotide
uucagcagacguagagggg

SEQ ID NO: 1119553 - RNA, 19 nt, Artificial Sequence
  Description of Artificial Sequence: Synthetic oligonucleotide
aauucacgauaacggccuc

SEQ ID NO: 1119554 - RNA, 19 nt, Artificial Sequence
  Description of Artificial Sequence: Synthetic oligonucleotide
ggaacuugcuaucaggaac

SEQ ID NO: 1119555 - RNA, 19 nt, Artificial Sequence
  Description of Artificial Sequence: Synthetic oligonucleotide
agcacgaucugccauccug

SEQ ID NO: 1119556 - RNA, 19 nt, Artificial Sequence
  Description of Artificial Sequence: Synthetic oligonucleotide
uguuuccucacaguacugc

SEQ ID NO: 1119557 - RNA, 19 nt, Artificial Sequence
  Description of Artificial Sequence: Synthetic oligonucleotide
acacaggagugucaaucac

SEQ ID NO: 1119558 - RNA, 19 nt, Artificial Sequence
  Description of Artificial Sequence: Synthetic oligonucleotide
caguauaguaguccagccc

SEQ ID NO: 1119559 - RNA, 19 nt, Artificial Sequence
  Description of Artificial Sequence: Synthetic oligonucleotide
cauaacgaagggacaguag

SEQ ID NO: 1119560 - RNA, 19 nt, Artificial Sequence
  Description of Artificial Sequence: Synthetic oligonucleotide
guaacguuuaauguugguc

SEQ ID NO: 1119561 - RNA, 19 nt, Artificial Sequence
  Description of Artificial Sequence: Synthetic oligonucleotide
cuggacauaguccccaaug

SEQ ID NO: 1119562 - RNA, 19 nt, Artificial Sequence
  Description of Artificial Sequence: Synthetic oligonucleotide
ucguugcucuacaauggag

SEQ ID NO: 1119563 - RNA, 19 nt, Artificial Sequence
  Description of Artificial Sequence: Synthetic oligonucleotide
uggaucagaaaugugcaaa

SEQ ID NO: 1119564 - RNA, 19 nt, Artificial Sequence
  Description of Artificial Sequence: Synthetic oligonucleotide
agugaacucaggaucucac

SEQ ID NO: 1119565 - RNA, 19 nt, Artificial Sequence
  Description of Artificial Sequence: Synthetic oligonucleotide
gaacuugcuaucaggaaca

SEQ ID NO: 1119566 - RNA, 19 nt, Artificial Sequence
  Description of Artificial Sequence: Synthetic oligonucleotide
cugugcagaugccacaagc

SEQ ID NO: 1119567 - RNA, 19 nt, Artificial Sequence
  Description of Artificial Sequence: Synthetic oligonucleotide
gaugguacggaacuugcua

SEQ ID NO: 1119568 - RNA, 19 nt, Artificial Sequence
  Description of Artificial Sequence: Synthetic oligonucleotide
uggagucgcaccaacuccu

SEQ ID NO: 1119569 - RNA, 19 nt, Artificial Sequence
  Description of Artificial Sequence: Synthetic oligonucleotide
aucauagcgcccuccagca

SEQ ID NO: 1119570 - RNA, 19 nt, Artificial Sequence
  Description of Artificial Sequence: Synthetic oligonucleotide
ucagcggaggcuuucugcu

SEQ ID NO: 1119571 - RNA, 19 nt, Artificial Sequence
  Description of Artificial Sequence: Synthetic oligonucleotide
cuuuagcucgaacacagga

SEQ ID NO: 1119572 - RNA, 19 nt, Artificial Sequence
  Description of Artificial Sequence: Synthetic oligonucleotide
cauuccaucuaggaugcgc

SEQ ID NO: 1119573 - RNA, 19 nt, Artificial Sequence
  Description of Artificial Sequence: Synthetic oligonucleotide
uucaguaacuuuggguucu

SEQ ID NO: 1119574 - RNA, 19 nt, Artificial Sequence
  Description of Artificial Sequence: Synthetic oligonucleotide
guuuuaggaguuucgccac

SEQ ID NO: 1119575 - RNA, 19 nt, Artificial Sequence
  Description of Artificial Sequence: Synthetic oligonucleotide
gacauaguccccaaugcga

SEQ ID NO: 1119576 - RNA, 19 nt, Artificial Sequence
  Description of Artificial Sequence: Synthetic oligonucleotide
caccuuuucccgaacugcc

SEQ ID NO: 1119577 - RNA, 19 nt, Artificial Sequence
  Description of Artificial Sequence: Synthetic oligonucleotide
ggacauaguccccaaugcg

SEQ ID NO: 1119578 - RNA, 19 nt, Artificial Sequence
  Description of Artificial Sequence: Synthetic oligonucleotide
ucucuucggacauccaccu

SEQ ID NO: 1119579 - RNA, 19 nt, Artificial Sequence
  Description of Artificial Sequence: Synthetic oligonucleotide
cagaugguacggaacuugc

SEQ ID NO: 1119580 - RNA, 19 nt, Artificial Sequence
  Description of Artificial Sequence: Synthetic oligonucleotide
uaccgugcaaaagggacag

SEQ ID NO: 1119581 - RNA, 19 nt, Artificial Sequence
  Description of Artificial Sequence: Synthetic oligonucleotide
gucauagaugagcuuugag

SEQ ID NO: 1119582 - RNA, 19 nt, Artificial Sequence
  Description of Artificial Sequence: Synthetic oligonucleotide
ugauagaauucacgauaac

SEQ ID NO: 1119583 - RNA, 19 nt, Artificial Sequence
  Description of Artificial Sequence: Synthetic oligonucleotide
aguuucgccaccuccuccu

SEQ ID NO: 1119584 - RNA, 19 nt, Artificial Sequence
  Description of Artificial Sequence: Synthetic oligonucleotide
uuucugcuguuugaggccc

SEQ ID NO: 1119585 - RNA, 19 nt, Artificial Sequence
  Description of Artificial Sequence: Synthetic oligonucleotide
uccucgaucuggucagcgg

SEQ ID NO: 1119586 - RNA, 19 nt, Artificial Sequence
  Description of Artificial Sequence: Synthetic oligonucleotide
augaccccaguauaguagu

SEQ ID NO: 1119587 - RNA, 19 nt, Artificial Sequence
  Description of Artificial Sequence: Synthetic oligonucleotide
gaagauccgcucuacucca

SEQ ID NO: 1119588 - RNA, 19 nt, Artificial Sequence
  Description of Artificial Sequence: Synthetic oligonucleotide
uucacgauaacggccucug

SEQ ID NO: 1119589 - RNA, 19 nt, Artificial Sequence
  Description of Artificial Sequence: Synthetic oligonucleotide
uuaucccggcgauacaccu

SEQ ID NO: 1119590 - RNA, 19 nt, Artificial Sequence
  Description of Artificial Sequence: Synthetic oligonucleotide
acguuuaauguuggucagc

SEQ ID NO: 1119591 - RNA, 19 nt, Artificial Sequence
  Description of Artificial Sequence: Synthetic oligonucleotide
ugccuaucugaagugaacu

SEQ ID NO: 1119592 - RNA, 19 nt, Artificial Sequence
  Description of Artificial Sequence: Synthetic oligonucleotide
ucccacaacucagagacaa

SEQ ID NO: 1119593 - RNA, 19 nt, Artificial Sequence
  Description of Artificial Sequence: Synthetic oligonucleotide
acggccucuggucauagca

SEQ ID NO: 1119594 - RNA, 19 nt, Artificial Sequence
  Description of Artificial Sequence: Synthetic oligonucleotide
uugccuaucugaagugaac

SEQ ID NO: 1119595 - RNA, 19 nt, Artificial Sequence
  Description of Artificial Sequence: Synthetic oligonucleotide
cuggagucgcaccaacucc

SEQ ID NO: 1119596 - RNA, 19 nt, Artificial Sequence
  Description of Artificial Sequence: Synthetic oligonucleotide
cuaaagccucuaaucguug

SEQ ID NO: 1119597 - RNA, 19 nt, Artificial Sequence
  Description of Artificial Sequence: Synthetic oligonucleotide
acuugcuaucaggaacacc

SEQ ID NO: 1119598 - RNA, 19 nt, Artificial Sequence
  Description of Artificial Sequence: Synthetic oligonucleotide
augguacggaacuugcuau

SEQ ID NO: 1119599 - RNA, 19 nt, Artificial Sequence
  Description of Artificial Sequence: Synthetic oligonucleotide
ucuaaucguugcucuacaa

SEQ ID NO: 1119600 - RNA, 19 nt, Artificial Sequence
  Description of Artificial Sequence: Synthetic oligonucleotide
aacggccucuggucauagc

SEQ ID NO: 1119601 - RNA, 19 nt, Artificial Sequence
  Description of Artificial Sequence: Synthetic oligonucleotide
uuuaggaguuucgccaccu

SEQ ID NO: 1119602 - RNA, 19 nt, Artificial Sequence
  Description of Artificial Sequence: Synthetic oligonucleotide
gauggcuaccagugggaug

SEQ ID NO: 1119603 - RNA, 19 nt, Artificial Sequence
  Description of Artificial Sequence: Synthetic oligonucleotide
gagugucaaucacuucugc

SEQ ID NO: 1119604 - RNA, 19 nt, Artificial Sequence
  Description of Artificial Sequence: Synthetic oligonucleotide
ucacgauaacggccucugg

SEQ ID NO: 1119605 - RNA, 19 nt, Artificial Sequence
  Description of Artificial Sequence: Synthetic oligonucleotide
ugccucauagaugacccca

SEQ ID NO: 1119606 - RNA, 19 nt, Artificial Sequence
  Description of Artificial Sequence: Synthetic oligonucleotide
uugcuaugugguaacguuu

SEQ ID NO: 1119607 - RNA, 19 nt, Artificial Sequence
  Description of Artificial Sequence: Synthetic oligonucleotide
uuugcguccuuugggguca

SEQ ID NO: 1119608 - RNA, 19 nt, Artificial Sequence
  Description of Artificial Sequence: Synthetic oligonucleotide
gaauucacgauaacggccu

SEQ ID NO: 1119609 - RNA, 19 nt, Artificial Sequence
  Description of Artificial Sequence: Synthetic oligonucleotide
aucguugcucuacaaugga

SEQ ID NO: 1119610 - RNA, 19 nt, Artificial Sequence
  Description of Artificial Sequence: Synthetic oligonucleotide
aggccaauccugcuuccuc

SEQ ID NO: 1119611 - RNA, 19 nt, Artificial Sequence
  Description of Artificial Sequence: Synthetic oligonucleotide
caauacugagcccaacgca

SEQ ID NO: 1119612 - RNA, 19 nt, Artificial Sequence
  Description of Artificial Sequence: Synthetic oligonucleotide
guucaguaacuuuggguuc

SEQ ID NO: 1119613 - RNA, 19 nt, Artificial Sequence
  Description of Artificial Sequence: Synthetic oligonucleotide
cuuugcguccuuugggguc

SEQ ID NO: 1119614 - RNA, 19 nt, Artificial Sequence
  Description of Artificial Sequence: Synthetic oligonucleotide
agaugccacaagcaccugu

SEQ ID NO: 1119615 - RNA, 19 nt, Artificial Sequence
  Description of Artificial Sequence: Synthetic oligonucleotide
gcgccugucauuuaccuug

SEQ ID NO: 1119616 - RNA, 19 nt, Artificial Sequence
  Description of Artificial Sequence: Synthetic oligonucleotide
gcaaacauuccaucuagga

SEQ ID NO: 1119617 - RNA, 19 nt, Artificial Sequence
  Description of Artificial Sequence: Synthetic oligonucleotide
gucagcggaggcuuucugc

SEQ ID NO: 1119618 - RNA, 19 nt, Artificial Sequence
  Description of Artificial Sequence: Synthetic oligonucleotide
cacacugcccacacccagg

SEQ ID NO: 1119619 - RNA, 19 nt, Artificial Sequence
  Description of Artificial Sequence: Synthetic oligonucleotide
ugagcccaacgcauggcac

SEQ ID NO: 1119620 - RNA, 19 nt, Artificial Sequence
  Description of Artificial Sequence: Synthetic oligonucleotide
gguucagcagacguagagg

SEQ ID NO: 1119621 - RNA, 19 nt, Artificial Sequence
  Description of Artificial Sequence: Synthetic oligonucleotide
uguuuccuuuagcucgaac

SEQ ID NO: 1119622 - RNA, 19 nt, Artificial Sequence
  Description of Artificial Sequence: Synthetic oligonucleotide
ugccaaacaggguuagaua

SEQ ID NO: 1119623 - RNA, 19 nt, Artificial Sequence
  Description of Artificial Sequence: Synthetic oligonucleotide
gguucaguaacuuuggguu

SEQ ID NO: 1119624 - RNA, 19 nt, Artificial Sequence
  Description of Artificial Sequence: Synthetic oligonucleotide
ucgaucuggucagcggagg

SEQ ID NO: 1119625 - RNA, 19 nt, Artificial Sequence
  Description of Artificial Sequence: Synthetic oligonucleotide
agccucuaaucguugcucu

SEQ ID NO: 1119626 - RNA, 19 nt, Artificial Sequence
  Description of Artificial Sequence: Synthetic oligonucleotide
guacggaacuugcuaucag

SEQ ID NO: 1119627 - RNA, 19 nt, Artificial Sequence
  Description of Artificial Sequence: Synthetic oligonucleotide
augccaaacaggguuagau

SEQ ID NO: 1119628 - RNA, 19 nt, Artificial Sequence
  Description of Artificial Sequence: Synthetic oligonucleotide
gaguuucgccaccuccucc

SEQ ID NO: 1119629 - RNA, 19 nt, Artificial Sequence
  Description of Artificial Sequence: Synthetic oligonucleotide
ccaauacugagcccaacgc

SEQ ID NO: 1119630 - RNA, 19 nt, Artificial Sequence
  Description of Artificial Sequence: Synthetic oligonucleotide
agugggaugccuguuuccu

SEQ ID NO: 1119631 - RNA, 19 nt, Artificial Sequence
  Description of Artificial Sequence: Synthetic oligonucleotide
uagaggggcugauuuguuc

SEQ ID NO: 1119632 - RNA, 19 nt, Artificial Sequence
  Description of Artificial Sequence: Synthetic oligonucleotide
cauucuuuacuuccuccca

SEQ ID NO: 1119633 - RNA, 19 nt, Artificial Sequence
  Description of Artificial Sequence: Synthetic oligonucleotide
agcggagcuugaugacacc

SEQ ID NO: 1119634 - RNA, 19 nt, Artificial Sequence
  Description of Artificial Sequence: Synthetic oligonucleotide
agacacaccccaccgugcu

SEQ ID NO: 1119635 - RNA, 19 nt, Artificial Sequence
  Description of Artificial Sequence: Synthetic oligonucleotide
cucgaucuggucagcggag

SEQ ID NO: 1119636 - RNA, 19 nt, Artificial Sequence
  Description of Artificial Sequence: Synthetic oligonucleotide
ucaggaaucaugggaucaa

SEQ ID NO: 1119637 - RNA, 19 nt, Artificial Sequence
  Description of Artificial Sequence: Synthetic oligonucleotide
gacaagcuuuagucucucc

SEQ ID NO: 1119638 - RNA, 19 nt, Artificial Sequence
  Description of Artificial Sequence: Synthetic oligonucleotide
cucuacaauggagaagauc

SEQ ID NO: 1119639 - RNA, 19 nt, Artificial Sequence
  Description of Artificial Sequence: Synthetic oligonucleotide
auagcgcccuccagcagcc

SEQ ID NO: 1119640 - RNA, 19 nt, Artificial Sequence
  Description of Artificial Sequence: Synthetic oligonucleotide
agcggaggcuuucugcugu

SEQ ID NO: 1119641 - RNA, 19 nt, Artificial Sequence
  Description of Artificial Sequence: Synthetic oligonucleotide
gaugcgccugucauuuacc

SEQ ID NO: 1119642 - RNA, 19 nt, Artificial Sequence
  Description of Artificial Sequence: Synthetic oligonucleotide
uugccagauaccgugcaaa

SEQ ID NO: 1119643 - RNA, 19 nt, Artificial Sequence
  Description of Artificial Sequence: Synthetic oligonucleotide
acguagaggggcugauuug

SEQ ID NO: 1119644 - RNA, 19 nt, Artificial Sequence
  Description of Artificial Sequence: Synthetic oligonucleotide
ugccagauaccgugcaaaa

SEQ ID NO: 1119645 - RNA, 19 nt, Artificial Sequence
  Description of Artificial Sequence: Synthetic oligonucleotide
auaguaguccagcccucga

SEQ ID NO: 1119646 - RNA, 19 nt, Artificial Sequence
  Description of Artificial Sequence: Synthetic oligonucleotide
uagcaggguuaucccggcg

SEQ ID NO: 1119647 - RNA, 19 nt, Artificial Sequence
  Description of Artificial Sequence: Synthetic oligonucleotide
ccagcgaugucaaaaucac

SEQ ID NO: 1119648 - RNA, 19 nt, Artificial Sequence
  Description of Artificial Sequence: Synthetic oligonucleotide
ucauagcgcccuccagcag

SEQ ID NO: 1119649 - RNA, 19 nt, Artificial Sequence
  Description of Artificial Sequence: Synthetic oligonucleotide
aguugccuaucugaaguga

SEQ ID NO: 1119650 - RNA, 19 nt, Artificial Sequence
  Description of Artificial Sequence: Synthetic oligonucleotide
acggaacuugcuaucagga

SEQ ID NO: 1119651 - RNA, 19 nt, Artificial Sequence
  Description of Artificial Sequence: Synthetic oligonucleotide
ugguacggaacuugcuauc

SEQ ID NO: 1119652 - RNA, 19 nt, Artificial Sequence
  Description of Artificial Sequence: Synthetic oligonucleotide
augcgccugucauuuaccu

SEQ ID NO: 1119653 - RNA, 19 nt, Artificial Sequence
  Description of Artificial Sequence: Synthetic oligonucleotide
guuugaggccccucacaug

SEQ ID NO: 1119654 - RNA, 19 nt, Artificial Sequence
  Description of Artificial Sequence: Synthetic oligonucleotide
guaguccagcccucgagca

SEQ ID NO: 1119655 - RNA, 19 nt, Artificial Sequence
  Description of Artificial Sequence: Synthetic oligonucleotide
ggccucuggucauagcagg

SEQ ID NO: 1119656 - RNA, 19 nt, Artificial Sequence
  Description of Artificial Sequence: Synthetic oligonucleotide
agacaagcuuuagucucuc

SEQ ID NO: 1119657 - RNA, 19 nt, Artificial Sequence
  Description of Artificial Sequence: Synthetic oligonucleotide
uuaggaguuucgccaccuc

SEQ ID NO: 1119658 - RNA, 19 nt, Artificial Sequence
  Description of Artificial Sequence: Synthetic oligonucleotide
uggccagcgaugucaaaau

SEQ ID NO: 1119659 - RNA, 19 nt, Artificial Sequence
  Description of Artificial Sequence: Synthetic oligonucleotide
aaacaggguuagauauuca

SEQ ID NO: 1119660 - RNA, 19 nt, Artificial Sequence
  Description of Artificial Sequence: Synthetic oligonucleotide
cuuuggggucaaacaugcc

SEQ ID NO: 1119661 - RNA, 19 nt, Artificial Sequence
  Description of Artificial Sequence: Synthetic oligonucleotide
cacgaucugccauccuggc

SEQ ID NO: 1119662 - RNA, 19 nt, Artificial Sequence
  Description of Artificial Sequence: Synthetic oligonucleotide
guuaucccggcgauacacc

SEQ ID NO: 1119663 - RNA, 19 nt, Artificial Sequence
  Description of Artificial Sequence: Synthetic oligonucleotide
auaccgugcaaaagggaca

SEQ ID NO: 1119664 - RNA, 19 nt, Artificial Sequence
  Description of Artificial Sequence: Synthetic oligonucleotide
gagcggagcuugaugacac

SEQ ID NO: 1119665 - RNA, 19 nt, Artificial Sequence
  Description of Artificial Sequence: Synthetic oligonucleotide
uccauacuuuccagucagu

SEQ ID NO: 1119666 - RNA, 19 nt, Artificial Sequence
  Description of Artificial Sequence: Synthetic oligonucleotide
gguuaucccggcgauacac

SEQ ID NO: 1119667 - RNA, 19 nt, Artificial Sequence
  Description of Artificial Sequence: Synthetic oligonucleotide
cagugggaugccuguuucc

SEQ ID NO: 1119668 - RNA, 19 nt, Artificial Sequence
  Description of Artificial Sequence: Synthetic oligonucleotide
cucuaaagccucuaaucgu

SEQ ID NO: 1119669 - RNA, 19 nt, Artificial Sequence
  Description of Artificial Sequence: Synthetic oligonucleotide
ugggaucaaacuggccagc

SEQ ID NO: 1119670 - RNA, 19 nt, Artificial Sequence
  Description of Artificial Sequence: Synthetic oligonucleotide
aucccggcgauacaccuuu

SEQ ID NO: 1119671 - RNA, 19 nt, Artificial Sequence
  Description of Artificial Sequence: Synthetic oligonucleotide
cacugagcggagcuugaug

SEQ ID NO: 1119672 - RNA, 19 nt, Artificial Sequence
  Description of Artificial Sequence: Synthetic oligonucleotide
acaccuuugcuauguggua

SEQ ID NO: 1119673 - RNA, 19 nt, Artificial Sequence
  Description of Artificial Sequence: Synthetic oligonucleotide
uaguccccaaugcgaucag

SEQ ID NO: 1119674 - RNA, 19 nt, Artificial Sequence
  Description of Artificial Sequence: Synthetic oligonucleotide
cgaacugccaucugccggg

SEQ ID NO: 1119675 - RNA, 19 nt, Artificial Sequence
  Description of Artificial Sequence: Synthetic oligonucleotide
cugagcggagcuugaugac

SEQ ID NO: 1119676 - RNA, 19 nt, Artificial Sequence
  Description of Artificial Sequence: Synthetic oligonucleotide
cucucccuggagucgcacc

SEQ ID NO: 1119677 - RNA, 19 nt, Artificial Sequence
  Description of Artificial Sequence: Synthetic oligonucleotide
acucagagacaagcuuuag

SEQ ID NO: 1119678 - RNA, 19 nt, Artificial Sequence
  Description of Artificial Sequence: Synthetic oligonucleotide
aggggcugauuuguucuuc

SEQ ID NO: 1119679 - RNA, 19 nt, Artificial Sequence
  Description of Artificial Sequence: Synthetic oligonucleotide
auucacgauaacggccucu

SEQ ID NO: 1119680 - RNA, 19 nt, Artificial Sequence
  Description of Artificial Sequence: Synthetic oligonucleotide
ggaugcgccugucauuuac

SEQ ID NO: 1119681 - RNA, 19 nt, Artificial Sequence
  Description of Artificial Sequence: Synthetic oligonucleotide
cauggcguuugaagcagca

SEQ ID NO: 1119682 - RNA, 19 nt, Artificial Sequence
  Description of Artificial Sequence: Synthetic oligonucleotide
gcuuuaggucucccaagcc

SEQ ID NO: 1119683 - RNA, 19 nt, Artificial Sequence
  Description of Artificial Sequence: Synthetic oligonucleotide
auacugagcccaacgcaug

SEQ ID NO: 1119684 - RNA, 19 nt, Artificial Sequence
  Description of Artificial Sequence: Synthetic oligonucleotide
cuuccccagccucgguugg

SEQ ID NO: 1119685 - RNA, 19 nt, Artificial Sequence
  Description of Artificial Sequence: Synthetic oligonucleotide
guacauaugcaguuuuguu

SEQ ID NO: 1119686 - RNA, 19 nt, Artificial Sequence
  Description of Artificial Sequence: Synthetic oligonucleotide
gggaucaaacuggccagcg

SEQ ID NO: 1119687 - RNA, 19 nt, Artificial Sequence
  Description of Artificial Sequence: Synthetic oligonucleotide
agauaccgugcaaaaggga

SEQ ID NO: 1119688 - RNA, 19 nt, Artificial Sequence
  Description of Artificial Sequence: Synthetic oligonucleotide
gccaaacaggguuagauau

SEQ ID NO: 1119689 - RNA, 19 nt, Artificial Sequence
  Description of Artificial Sequence: Synthetic oligonucleotide
cuaaucguugcucuacaau

SEQ ID NO: 1119690 - RNA, 19 nt, Artificial Sequence
  Description of Artificial Sequence: Synthetic oligonucleotide
agccacugagcggagcuug

SEQ ID NO: 1119691 - RNA, 19 nt, Artificial Sequence
  Description of Artificial Sequence: Synthetic oligonucleotide
gcacgaucugccauccugg

SEQ ID NO: 1119692 - RNA, 19 nt, Artificial Sequence
  Description of Artificial Sequence: Synthetic oligonucleotide
cagagacaagcuuuagucu

SEQ ID NO: 1119693 - RNA, 19 nt, Artificial Sequence
  Description of Artificial Sequence: Synthetic oligonucleotide
ggcgauacaccuuugcuau

SEQ ID NO: 1119694 - RNA, 19 nt, Artificial Sequence
  Description of Artificial Sequence: Synthetic oligonucleotide
ucccuggagucgcaccaac

SEQ ID NO: 1119695 - RNA, 19 nt, Artificial Sequence
  Description of Artificial Sequence: Synthetic oligonucleotide
uuaccuugaccaggaaguu

SEQ ID NO: 1119696 - RNA, 19 nt, Artificial Sequence
  Description of Artificial Sequence: Synthetic oligonucleotide
agcgcagcacgaucugcca

SEQ ID NO: 1119697 - RNA, 19 nt, Artificial Sequence
  Description of Artificial Sequence: Synthetic oligonucleotide
cacgauaacggccucuggu

SEQ ID NO: 1119698 - RNA, 19 nt, Artificial Sequence
  Description of Artificial Sequence: Synthetic oligonucleotide
guugccuaucugaagugaa

SEQ ID NO: 1119699 - RNA, 19 nt, Artificial Sequence
  Description of Artificial Sequence: Synthetic oligonucleotide
uaacggccucuggucauag

SEQ ID NO: 1119700 - RNA, 19 nt, Artificial Sequence
  Description of Artificial Sequence: Synthetic oligonucleotide
cguuugaagcagcagauga

SEQ ID NO: 1119701 - RNA, 19 nt, Artificial Sequence
  Description of Artificial Sequence: Synthetic oligonucleotide
ccgaacugccaucugccgg

SEQ ID NO: 1119702 - RNA, 19 nt, Artificial Sequence
  Description of Artificial Sequence: Synthetic oligonucleotide
cugagcccaacgcauggca

SEQ ID NO: 1119703 - RNA, 19 nt, Artificial Sequence
  Description of Artificial Sequence: Synthetic oligonucleotide
agaugguacggaacuugcu

SEQ ID NO: 1119704 - RNA, 19 nt, Artificial Sequence
  Description of Artificial Sequence: Synthetic oligonucleotide
ugagagaguuuaggauccu

SEQ ID NO: 1119705 - RNA, 19 nt, Artificial Sequence
  Description of Artificial Sequence: Synthetic oligonucleotide
ccuuaucuaguuuguccac

SEQ ID NO: 1119706 - RNA, 19 nt, Artificial Sequence
  Description of Artificial Sequence: Synthetic oligonucleotide
ccgcucuacuccaauacug

SEQ ID NO: 1119707 - RNA, 19 nt, Artificial Sequence
  Description of Artificial Sequence: Synthetic oligonucleotide
uaucccggcgauacaccuu

SEQ ID NO: 1119708 - RNA, 19 nt, Artificial Sequence
  Description of Artificial Sequence: Synthetic oligonucleotide
gccagcgaugucaaaauca

SEQ ID NO: 1119709 - RNA, 19 nt, Artificial Sequence
  Description of Artificial Sequence: Synthetic oligonucleotide
gauaacggccucuggucau

SEQ ID NO: 1119710 - RNA, 19 nt, Artificial Sequence
  Description of Artificial Sequence: Synthetic oligonucleotide
augccacaagcaccugugu

SEQ ID NO: 1119711 - RNA, 19 nt, Artificial Sequence
  Description of Artificial Sequence: Synthetic oligonucleotide
cacaggagugucaaucacu

SEQ ID NO: 1119712 - RNA, 19 nt, Artificial Sequence
  Description of Artificial Sequence: Synthetic oligonucleotide
gaacugccaucugccgggg

SEQ ID NO: 1119713 - RNA, 19 nt, Artificial Sequence
  Description of Artificial Sequence: Synthetic oligonucleotide
uguagucucuugugcccuu

SEQ ID NO: 1119714 - RNA, 19 nt, Artificial Sequence
  Description of Artificial Sequence: Synthetic oligonucleotide
ucugcuguuugaggccccu

SEQ ID NO: 1119715 - RNA, 19 nt, Artificial Sequence
  Description of Artificial Sequence: Synthetic oligonucleotide
cucgaacacaggaguguca

SEQ ID NO: 1119716 - RNA, 19 nt, Artificial Sequence
  Description of Artificial Sequence: Synthetic oligonucleotide
gguacggaacuugcuauca

SEQ ID NO: 1119717 - RNA, 19 nt, Artificial Sequence
  Description of Artificial Sequence: Synthetic oligonucleotide
cuggaucagaaaugugcaa

SEQ ID NO: 1119718 - RNA, 19 nt, Artificial Sequence
  Description of Artificial Sequence: Synthetic oligonucleotide
agaugagcuuugagucuuc

SEQ ID NO: 1119719 - RNA, 19 nt, Artificial Sequence
  Description of Artificial Sequence: Synthetic oligonucleotide
cuggccagcgaugucaaaa

SEQ ID NO: 1119720 - RNA, 19 nt, Artificial Sequence
  Description of Artificial Sequence: Synthetic oligonucleotide
ccuggagucgcaccaacuc

SEQ ID NO: 1119721 - RNA, 19 nt, Artificial Sequence
  Description of Artificial Sequence: Synthetic oligonucleotide
gccuaucugaagugaacuc

SEQ ID NO: 1119722 - RNA, 19 nt, Artificial Sequence
  Description of Artificial Sequence: Synthetic oligonucleotide
gcuaccagugggaugccug

SEQ ID NO: 1119723 - RNA, 19 nt, Artificial Sequence
  Description of Artificial Sequence: Synthetic oligonucleotide
aggcacucugcaucaggaa

SEQ ID NO: 1119724 - RNA, 19 nt, Artificial Sequence
  Description of Artificial Sequence: Synthetic oligonucleotide
ugcgccugucauuuaccuu

SEQ ID NO: 1119725 - RNA, 19 nt, Artificial Sequence
  Description of Artificial Sequence: Synthetic oligonucleotide
guauaguaguccagcccuc

SEQ ID NO: 1119726 - RNA, 19 nt, Artificial Sequence
  Description of Artificial Sequence: Synthetic oligonucleotide
aggucucccaagcccucca

SEQ ID NO: 1119727 - RNA, 19 nt, Artificial Sequence
  Description of Artificial Sequence: Synthetic oligonucleotide
gagcccaacgcauggcacu

SEQ ID NO: 1119728 - RNA, 19 nt, Artificial Sequence
  Description of Artificial Sequence: Synthetic oligonucleotide
cuagccacugagcggagcu

SEQ ID NO: 1119729 - RNA, 19 nt, Artificial Sequence
  Description of Artificial Sequence: Synthetic oligonucleotide
cucgagcaaggcucagguc

SEQ ID NO: 1119730 - RNA, 19 nt, Artificial Sequence
  Description of Artificial Sequence: Synthetic oligonucleotide
caucugccggggacuguag

SEQ ID NO: 1119731 - RNA, 19 nt, Artificial Sequence
  Description of Artificial Sequence: Synthetic oligonucleotide
caggagugucaaucacuuc

SEQ ID NO: 1119732 - RNA, 19 nt, Artificial Sequence
  Description of Artificial Sequence: Synthetic oligonucleotide
ccgugcaaaagggacagug

SEQ ID NO: 1119733 - RNA, 19 nt, Artificial Sequence
  Description of Artificial Sequence: Synthetic oligonucleotide
gccagauaccgugcaaaag

SEQ ID NO: 1119734 - RNA, 19 nt, Artificial Sequence
  Description of Artificial Sequence: Synthetic oligonucleotide
uaguucaaauaaggccaau

SEQ ID NO: 1119735 - RNA, 19 nt, Artificial Sequence
  Description of Artificial Sequence: Synthetic oligonucleotide
ccucuaaucguugcucuac

SEQ ID NO: 1119736 - RNA, 19 nt, Artificial Sequence
  Description of Artificial Sequence: Synthetic oligonucleotide
ggaucaaacuggccagcga

SEQ ID NO: 1119737 - RNA, 19 nt, Artificial Sequence
  Description of Artificial Sequence: Synthetic oligonucleotide
caccuuugcuaugugguaa

SEQ ID NO: 1119738 - RNA, 19 nt, Artificial Sequence
  Description of Artificial Sequence: Synthetic oligonucleotide
caaggcccuucucucccac

SEQ ID NO: 1119739 - RNA, 19 nt, Artificial Sequence
  Description of Artificial Sequence: Synthetic oligonucleotide
uucuggugcaaggcccuuc

SEQ ID NO: 1119740 - RNA, 19 nt, Artificial Sequence
  Description of Artificial Sequence: Synthetic oligonucleotide
uccccacccugaucuuuca

SEQ ID NO: 1119741 - RNA, 19 nt, Artificial Sequence
  Description of Artificial Sequence: Synthetic oligonucleotide
ucccagcaucccacaacuc

SEQ ID NO: 1119742 - RNA, 19 nt, Artificial Sequence
  Description of Artificial Sequence: Synthetic oligonucleotide
cagcggaggcuuucugcug

SEQ ID NO: 1119743 - RNA, 19 nt, Artificial Sequence
  Description of Artificial Sequence: Synthetic oligonucleotide
uggucagcggaggcuuucu

SEQ ID NO: 1119744 - RNA, 19 nt, Artificial Sequence
  Description of Artificial Sequence: Synthetic oligonucleotide
ggaguuucgccaccuccuc

SEQ ID NO: 1119745 - RNA, 19 nt, Artificial Sequence
  Description of Artificial Sequence: Synthetic oligonucleotide
cugaccacccuucagucuu

SEQ ID NO: 1119746 - RNA, 19 nt, Artificial Sequence
  Description of Artificial Sequence: Synthetic oligonucleotide
acauuccaucuaggaugcg

SEQ ID NO: 1119747 - RNA, 19 nt, Artificial Sequence
  Description of Artificial Sequence: Synthetic oligonucleotide
agcagacguagaggggcug

SEQ ID NO: 1119748 - RNA, 19 nt, Artificial Sequence
  Description of Artificial Sequence: Synthetic oligonucleotide
cuccaauacugagcccaac

SEQ ID NO: 1119749 - RNA, 19 nt, Artificial Sequence
  Description of Artificial Sequence: Synthetic oligonucleotide
ccuuugcuaugugguaacg

SEQ ID NO: 1119750 - RNA, 19 nt, Artificial Sequence
  Description of Artificial Sequence: Synthetic oligonucleotide
caaugcgaucagccacuuc

SEQ ID NO: 1119751 - RNA, 19 nt, Artificial Sequence
  Description of Artificial Sequence: Synthetic oligonucleotide
cccgaacugccaucugccg

SEQ ID NO: 1119752 - RNA, 19 nt, Artificial Sequence
  Description of Artificial Sequence: Synthetic oligonucleotide
gucauaacgaagggacagu

SEQ ID NO: 1119753 - RNA, 19 nt, Artificial Sequence
  Description of Artificial Sequence: Synthetic oligonucleotide
cacaguacugcaacugguu

SEQ ID NO: 1119754 - RNA, 19 nt, Artificial Sequence
  Description of Artificial Sequence: Synthetic oligonucleotide
gaccaggaaguugccuauc

SEQ ID NO: 1119755 - RNA, 19 nt, Artificial Sequence
  Description of Artificial Sequence: Synthetic oligonucleotide
aagauccgcucuacuccaa

SEQ ID NO: 1119756 - RNA, 19 nt, Artificial Sequence
  Description of Artificial Sequence: Synthetic oligonucleotide
gucucagugguccgaacuu

SEQ ID NO: 1119757 - RNA, 19 nt, Artificial Sequence
  Description of Artificial Sequence: Synthetic oligonucleotide
cucuucggacauccaccuc

SEQ ID NO: 1119758 - RNA, 19 nt, Artificial Sequence
  Description of Artificial Sequence: Synthetic oligonucleotide
cuaccagugggaugccugu

SEQ ID NO: 1119759 - RNA, 19 nt, Artificial Sequence
  Description of Artificial Sequence: Synthetic oligonucleotide
ccaacgcauggcacuuugc

SEQ ID NO: 1119760 - RNA, 19 nt, Artificial Sequence
  Description of Artificial Sequence: Synthetic oligonucleotide
auaacggccucuggucaua

SEQ ID NO: 1119761 - RNA, 19 nt, Artificial Sequence
  Description of Artificial Sequence: Synthetic oligonucleotide
ccucgaucuggucagcgga

SEQ ID NO: 1119762 - RNA, 19 nt, Artificial Sequence
  Description of Artificial Sequence: Synthetic oligonucleotide
ggucagcggaggcuuucug

SEQ ID NO: 1119763 - RNA, 19 nt, Artificial Sequence
  Description of Artificial Sequence: Synthetic oligonucleotide
ucccggcgauacaccuuug

SEQ ID NO: 1119764 - RNA, 19 nt, Artificial Sequence
  Description of Artificial Sequence: Synthetic oligonucleotide
cccaacgcauggcacuuug

SEQ ID NO: 1119765 - RNA, 19 nt, Artificial Sequence
  Description of Artificial Sequence: Synthetic oligonucleotide
ccccaguauaguaguccag

SEQ ID NO: 1119766 - RNA, 19 nt, Artificial Sequence
  Description of Artificial Sequence: Synthetic oligonucleotide
gcguuugaagcagcagaug

SEQ ID NO: 1119767 - RNA, 19 nt, Artificial Sequence
  Description of Artificial Sequence: Synthetic oligonucleotide
gcgaugucaaaaucacagu

SEQ ID NO: 1119768 - RNA, 19 nt, Artificial Sequence
  Description of Artificial Sequence: Synthetic oligonucleotide
caggaaucaugggaucaaa

SEQ ID NO: 1119769 - RNA, 19 nt, Artificial Sequence
  Description of Artificial Sequence: Synthetic oligonucleotide
uggucauagcaggguuauc

SEQ ID NO: 1119770 - RNA, 19 nt, Artificial Sequence
  Description of Artificial Sequence: Synthetic oligonucleotide
cccggcgauacaccuuugc

SEQ ID NO: 1119771 - RNA, 19 nt, Artificial Sequence
  Description of Artificial Sequence: Synthetic oligonucleotide
cauuuaccuugaccaggaa

SEQ ID NO: 1119772 - RNA, 19 nt, Artificial Sequence
  Description of Artificial Sequence: Synthetic oligonucleotide
agcccaacgcauggcacuu

SEQ ID NO: 1119773 - RNA, 19 nt, Artificial Sequence
  Description of Artificial Sequence: Synthetic oligonucleotide
cgcauggcacuuugcgucc

SEQ ID NO: 1119774 - RNA, 19 nt, Artificial Sequence
  Description of Artificial Sequence: Synthetic oligonucleotide
cacaagcaccugugucuca

SEQ ID NO: 1119775 - RNA, 19 nt, Artificial Sequence
  Description of Artificial Sequence: Synthetic oligonucleotide
ccauggcguuugaagcagc

SEQ ID NO: 1119776 - RNA, 19 nt, Artificial Sequence
  Description of Artificial Sequence: Synthetic oligonucleotide
agacguagaggggcugauu

SEQ ID NO: 1119777 - RNA, 19 nt, Artificial Sequence
  Description of Artificial Sequence: Synthetic oligonucleotide
gcucaggucaaaggagauc

SEQ ID NO: 1119778 - RNA, 19 nt, Artificial Sequence
  Description of Artificial Sequence: Synthetic oligonucleotide
ggagaagauccgcucuacu

SEQ ID NO: 1119779 - RNA, 19 nt, Artificial Sequence
  Description of Artificial Sequence: Synthetic oligonucleotide
uaccagugggaugccuguu

SEQ ID NO: 1119780 - RNA, 19 nt, Artificial Sequence
  Description of Artificial Sequence: Synthetic oligonucleotide
cgcucuacuccaauacuga

SEQ ID NO: 1119781 - RNA, 19 nt, Artificial Sequence
  Description of Artificial Sequence: Synthetic oligonucleotide
gcucaccaaugauggcuac

SEQ ID NO: 1119782 - RNA, 19 nt, Artificial Sequence
  Description of Artificial Sequence: Synthetic oligonucleotide
cgcagcacgaucugccauc

SEQ ID NO: 1119783 - RNA, 19 nt, Artificial Sequence
  Description of Artificial Sequence: Synthetic oligonucleotide
uagccacugagcggagcuu

SEQ ID NO: 1119784 - RNA, 19 nt, Artificial Sequence
  Description of Artificial Sequence: Synthetic oligonucleotide
cuguagucucuugugcccu

SEQ ID NO: 1119785 - RNA, 19 nt, Artificial Sequence
  Description of Artificial Sequence: Synthetic oligonucleotide
gaggggcugauuuguucuu

SEQ ID NO: 1119786 - RNA, 19 nt, Artificial Sequence
  Description of Artificial Sequence: Synthetic oligonucleotide
ggcguuugaagcagcagau

SEQ ID NO: 1119787 - RNA, 19 nt, Artificial Sequence
  Description of Artificial Sequence: Synthetic oligonucleotide
cgauaacggccucugguca

SEQ ID NO: 1119788 - RNA, 19 nt, Artificial Sequence
  Description of Artificial Sequence: Synthetic oligonucleotide
aucccacaacucagagaca

SEQ ID NO: 1119789 - RNA, 19 nt, Artificial Sequence
  Description of Artificial Sequence: Synthetic oligonucleotide
gcuugguucagcagacgua

SEQ ID NO: 1119790 - RNA, 19 nt, Artificial Sequence
  Description of Artificial Sequence: Synthetic oligonucleotide
gcagacguagaggggcuga

SEQ ID NO: 1119791 - RNA, 19 nt, Artificial Sequence
  Description of Artificial Sequence: Synthetic oligonucleotide
gcuagccacugagcggagc

SEQ ID NO: 1119792 - RNA, 19 nt, Artificial Sequence
  Description of Artificial Sequence: Synthetic oligonucleotide
gcaaacuauuuaaguacau

SEQ ID NO: 1119793 - RNA, 19 nt, Artificial Sequence
  Description of Artificial Sequence: Synthetic oligonucleotide
accgugcaaaagggacagu

SEQ ID NO: 1119794 - RNA, 19 nt, Artificial Sequence
  Description of Artificial Sequence: Synthetic oligonucleotide
cccaaugcgaucagccacu

SEQ ID NO: 1119795 - RNA, 19 nt, Artificial Sequence
  Description of Artificial Sequence: Synthetic oligonucleotide
ggagucgcaccaacuccuc

SEQ ID NO: 1119796 - RNA, 19 nt, Artificial Sequence
  Description of Artificial Sequence: Synthetic oligonucleotide
ccucgagcaaggcucaggu

SEQ ID NO: 1119797 - RNA, 19 nt, Artificial Sequence
  Description of Artificial Sequence: Synthetic oligonucleotide
ggguuaucccggcgauaca

SEQ ID NO: 1119798 - RNA, 19 nt, Artificial Sequence
  Description of Artificial Sequence: Synthetic oligonucleotide
gccucuaaucguugcucua

SEQ ID NO: 1119799 - RNA, 19 nt, Artificial Sequence
  Description of Artificial Sequence: Synthetic oligonucleotide
cggcgauacaccuuugcua

SEQ ID NO: 1119800 - RNA, 19 nt, Artificial Sequence
  Description of Artificial Sequence: Synthetic oligonucleotide
ccaucuaggaugcgccugu

SEQ ID NO: 1119801 - RNA, 19 nt, Artificial Sequence
  Description of Artificial Sequence: Synthetic oligonucleotide
gccugucauuuaccuugac

SEQ ID NO: 1119802 - RNA, 19 nt, Artificial Sequence
  Description of Artificial Sequence: Synthetic oligonucleotide
ccaaacaggguuagauauu

SEQ ID NO: 1119803 - RNA, 19 nt, Artificial Sequence
  Description of Artificial Sequence: Synthetic oligonucleotide
gcaggguuaucccggcgau

SEQ ID NO: 1119804 - RNA, 19 nt, Artificial Sequence
  Description of Artificial Sequence: Synthetic oligonucleotide
ccggcgauacaccuuugcu

SEQ ID NO: 1119805 - RNA, 19 nt, Artificial Sequence
  Description of Artificial Sequence: Synthetic oligonucleotide
uugcguccuuuggggucaa

SEQ ID NO: 1119806 - RNA, 19 nt, Artificial Sequence
  Description of Artificial Sequence: Synthetic oligonucleotide
uagcgcccuccagcagcca

SEQ ID NO: 1119807 - RNA, 19 nt, Artificial Sequence
  Description of Artificial Sequence: Synthetic oligonucleotide
cucccuggagucgcaccaa

SEQ ID NO: 1119808 - RNA, 19 nt, Artificial Sequence
  Description of Artificial Sequence: Synthetic oligonucleotide
caggguuaucccggcgaua

SEQ ID NO: 1119809 - RNA, 19 nt, Artificial Sequence
  Description of Artificial Sequence: Synthetic oligonucleotide
guacugcaacugguucagu

SEQ ID NO: 1119810 - RNA, 19 nt, Artificial Sequence
  Description of Artificial Sequence: Synthetic oligonucleotide
cagacguagaggggcugau

SEQ ID NO: 1119811 - RNA, 19 nt, Artificial Sequence
  Description of Artificial Sequence: Synthetic oligonucleotide
cauggcacuuugcguccuu

SEQ ID NO: 1119812 - RNA, 19 nt, Artificial Sequence
  Description of Artificial Sequence: Synthetic oligonucleotide
cugccccauggcguuugaa

SEQ ID NO: 1119813 - RNA, 19 nt, Artificial Sequence
  Description of Artificial Sequence: Synthetic oligonucleotide
caccgugcugcuggacaua

SEQ ID NO: 1119814 - RNA, 19 nt, Artificial Sequence
  Description of Artificial Sequence: Synthetic oligonucleotide
gcgcagcacgaucugccau

SEQ ID NO: 1119815 - RNA, 19 nt, Artificial Sequence
  Description of Artificial Sequence: Synthetic oligonucleotide
gcggaggcuuucugcuguu

SEQ ID NO: 1119816 - RNA, 19 nt, Artificial Sequence
  Description of Artificial Sequence: Synthetic oligonucleotide
ccaaugcgaucagccacuu

SEQ ID NO: 1119817 - RNA, 19 nt, Artificial Sequence
  Description of Artificial Sequence: Synthetic oligonucleotide
ccacugagcggagcuugau

SEQ ID NO: 1119818 - RNA, 19 nt, Artificial Sequence
  Description of Artificial Sequence: Synthetic oligonucleotide
gcccaacgcauggcacuuu

SEQ ID NO: 1119819 - RNA, 19 nt, Artificial Sequence
  Description of Artificial Sequence: Synthetic oligonucleotide
cggaggcuuucugcuguuu

SEQ ID NO: 1119820 - RNA, 19 nt, Artificial Sequence
  Description of Artificial Sequence: Synthetic oligonucleotide
ucaauaaaggacaagugcc

SEQ ID NO: 1119821 - RNA, 19 nt, Artificial Sequence
  Description of Artificial Sequence: Synthetic oligonucleotide
uuuacuauaaacaccugca

SEQ ID NO: 1119822 - RNA, 19 nt, Artificial Sequence
  Description of Artificial Sequence: Synthetic oligonucleotide
uuuuacuauaaacaccugc

SEQ ID NO: 1119823 - RNA, 19 nt, Artificial Sequence
  Description of Artificial Sequence: Synthetic oligonucleotide
aauggugaggucccgcugc

SEQ ID NO: 1119824 - RNA, 19 nt, Artificial Sequence
  Description of Artificial Sequence: Synthetic oligonucleotide
uacuauaaacaccugcagg

SEQ ID NO: 1119825 - RNA, 19 nt, Artificial Sequence
  Description of Artificial Sequence: Synthetic oligonucleotide
ugucacuuagcauucaaag

SEQ ID NO: 1119826 - RNA, 19 nt, Artificial Sequence
  Description of Artificial Sequence: Synthetic oligonucleotide
uagcauucaaagauggccg

SEQ ID NO: 1119827 - RNA, 19 nt, Artificial Sequence
  Description of Artificial Sequence: Synthetic oligonucleotide
uuagcauucaaagauggcc

SEQ ID NO: 1119828 - RNA, 19 nt, Artificial Sequence
  Description of Artificial Sequence: Synthetic oligonucleotide
  modified_base (3)..(3): a, c, u, g, unknown or other
aunagggugccucucacac

SEQ ID NO: 1119829 - RNA, 19 nt, Artificial Sequence
  Description of Artificial Sequence: Synthetic oligonucleotide
auacuugucccgcacacgc

SEQ ID NO: 1119830 - RNA, 19 nt, Artificial Sequence
  Description of Artificial Sequence: Synthetic oligonucleotide
gucaauaaaggacaagugc

SEQ ID NO: 1119831 - RNA, 19 nt, Artificial Sequence
  Description of Artificial Sequence: Synthetic oligonucleotide
gacaguaauguccugagca

SEQ ID NO: 1119832 - RNA, 19 nt, Artificial Sequence
  Description of Artificial Sequence: Synthetic oligonucleotide
uucucaguggcacucauga

SEQ ID NO: 1119833 - RNA, 19 nt, Artificial Sequence
  Description of Artificial Sequence: Synthetic oligonucleotide
uugaccagugccaugucgg

SEQ ID NO: 1119834 - RNA, 19 nt, Artificial Sequence
  Description of Artificial Sequence: Synthetic oligonucleotide
uggaugaccagcucgaucu

SEQ ID NO: 1119835 - RNA, 19 nt, Artificial Sequence
  Description of Artificial Sequence: Synthetic oligonucleotide
ucgauggaugaccagcucg

SEQ ID NO: 1119836 - RNA, 19 nt, Artificial Sequence
  Description of Artificial Sequence: Synthetic oligonucleotide
caauaaaggacaagugccg

SEQ ID NO: 1119837 - RNA, 19 nt, Artificial Sequence
  Description of Artificial Sequence: Synthetic oligonucleotide
auugauccacuucucacgg

SEQ ID NO: 1119838 - RNA, 19 nt, Artificial Sequence
  Description of Artificial Sequence: Synthetic oligonucleotide
cauugauccacuucucacg

SEQ ID NO: 1119839 - RNA, 19 nt, Artificial Sequence
  Description of Artificial Sequence: Synthetic oligonucleotide
caggguuugagucagaguc

SEQ ID NO: 1119840 - RNA, 19 nt, Artificial Sequence
  Description of Artificial Sequence: Synthetic oligonucleotide
gacaagugccguuggaugg

SEQ ID NO: 1119841 - RNA, 19 nt, Artificial Sequence
  Description of Artificial Sequence: Synthetic oligonucleotide
acaguaauguccugagcac

SEQ ID NO: 1119842 - RNA, 19 nt, Artificial Sequence
  Description of Artificial Sequence: Synthetic oligonucleotide
aaucagcuggucaauaaag

SEQ ID NO: 1119843 - RNA, 19 nt, Artificial Sequence
  Description of Artificial Sequence: Synthetic oligonucleotide
uuuuguuuucucauugauc

SEQ ID NO: 1119844 - RNA, 19 nt, Artificial Sequence
  Description of Artificial Sequence: Synthetic oligonucleotide
uggucaauaaaggacaagu

SEQ ID NO: 1119845 - RNA, 19 nt, Artificial Sequence
  Description of Artificial Sequence: Synthetic oligonucleotide
aacaccugcaggcaugcug

SEQ ID NO: 1119846 - RNA, 19 nt, Artificial Sequence
  Description of Artificial Sequence: Synthetic oligonucleotide
uuucacagcggccucgugc

SEQ ID NO: 1119847 - RNA, 19 nt, Artificial Sequence
  Description of Artificial Sequence: Synthetic oligonucleotide
uccgaugcaccucaucuag

SEQ ID NO: 1119848 - RNA, 19 nt, Artificial Sequence
  Description of Artificial Sequence: Synthetic oligonucleotide
  modified_base (12)..(12): a, c, u, g, unknown or other
ugggguuccaunagggugc

SEQ ID NO: 1119849 - RNA, 19 nt, Artificial Sequence
  Description of Artificial Sequence: Synthetic oligonucleotide
aaaggacaagugccguugg

SEQ ID NO: 1119850 - RNA, 19 nt, Artificial Sequence
  Description of Artificial Sequence: Synthetic oligonucleotide
cagaagcuccucuaggugg

SEQ ID NO: 1119851 - RNA, 19 nt, Artificial Sequence
  Description of Artificial Sequence: Synthetic oligonucleotide
acgucgaauggugaggucc

SEQ ID NO: 1119852 - RNA, 19 nt, Artificial Sequence
  Description of Artificial Sequence: Synthetic oligonucleotide
uaacuuauuuuacuauaaa

SEQ ID NO: 1119853 - RNA, 19 nt, Artificial Sequence
  Description of Artificial Sequence: Synthetic oligonucleotide
uguucagcauccaugcuuc

SEQ ID NO: 1119854 - RNA, 19 nt, Artificial Sequence
  Description of Artificial Sequence: Synthetic oligonucleotide
acuuagcauucaaagaugg

SEQ ID NO: 1119855 - RNA, 19 nt, Artificial Sequence
  Description of Artificial Sequence: Synthetic oligonucleotide
aauaaaggacaagugccgu

SEQ ID NO: 1119856 - RNA, 19 nt, Artificial Sequence
  Description of Artificial Sequence: Synthetic oligonucleotide
uuuccggagacuguucacg

SEQ ID NO: 1119857 - RNA, 19 nt, Artificial Sequence
  Description of Artificial Sequence: Synthetic oligonucleotide
auuguagagucgccgccgc

SEQ ID NO: 1119858 - RNA, 19 nt, Artificial Sequence
  Description of Artificial Sequence: Synthetic oligonucleotide
uggucugcccguuucacag

SEQ ID NO: 1119859 - RNA, 19 nt, Artificial Sequence
  Description of Artificial Sequence: Synthetic oligonucleotide
agugccguuggaugguggc

SEQ ID NO: 1119860 - RNA, 19 nt, Artificial Sequence
  Description of Artificial Sequence: Synthetic oligonucleotide
cuugacacgucgaauggug

SEQ ID NO: 1119861 - RNA, 19 nt, Artificial Sequence
  Description of Artificial Sequence: Synthetic oligonucleotide
aagauggccgucuguguug

SEQ ID NO: 1119862 - RNA, 19 nt, Artificial Sequence
  Description of Artificial Sequence: Synthetic oligonucleotide
acgccugucucucagcuuc

SEQ ID NO: 1119863 - RNA, 19 nt, Artificial Sequence
  Description of Artificial Sequence: Synthetic oligonucleotide
ucauacuugucccgcacac

SEQ ID NO: 1119864 - RNA, 19 nt, Artificial Sequence
  Description of Artificial Sequence: Synthetic oligonucleotide
ucgugcaggccccugagcc

SEQ ID NO: 1119865 - RNA, 19 nt, Artificial Sequence
  Description of Artificial Sequence: Synthetic oligonucleotide
uauaaacaccugcaggcau

SEQ ID NO: 1119866 - RNA, 19 nt, Artificial Sequence
  Description of Artificial Sequence: Synthetic oligonucleotide
cucauuguagagucgccgc

SEQ ID NO: 1119867 - RNA, 19 nt, Artificial Sequence
  Description of Artificial Sequence: Synthetic oligonucleotide
uucauccuaagggugaugu

SEQ ID NO: 1119868 - RNA, 19 nt, Artificial Sequence
  Description of Artificial Sequence: Synthetic oligonucleotide
  modified_base (13)..(13): a, c, u, g, unknown or other
cugggguuccaunagggug

SEQ ID NO: 1119869 - RNA, 19 nt, Artificial Sequence
  Description of Artificial Sequence: Synthetic oligonucleotide
ugauguuccugcuccaggu

SEQ ID NO: 1119870 - RNA, 19 nt, Artificial Sequence
  Description of Artificial Sequence: Synthetic oligonucleotide
ucccuguucagcauccaug

SEQ ID NO: 1119871 - RNA, 19 nt, Artificial Sequence
  Description of Artificial Sequence: Synthetic oligonucleotide
ucagcuaccacugccucgc

SEQ ID NO: 1119872 - RNA, 19 nt, Artificial Sequence
  Description of Artificial Sequence: Synthetic oligonucleotide
ugacacgucgaauggugag

SEQ ID NO: 1119873 - RNA, 19 nt, Artificial Sequence
  Description of Artificial Sequence: Synthetic oligonucleotide
cugacaguaauguccugag

SEQ ID NO: 1119874 - RNA, 19 nt, Artificial Sequence
  Description of Artificial Sequence: Synthetic oligonucleotide
uucuuaaucuccagcucgu

SEQ ID NO: 1119875 - RNA, 19 nt, Artificial Sequence
  Description of Artificial Sequence: Synthetic oligonucleotide
ugucggaccaccugggcca

SEQ ID NO: 1119876 - RNA, 19 nt, Artificial Sequence
  Description of Artificial Sequence: Synthetic oligonucleotide
uuccggagacuguucacgg

SEQ ID NO: 1119877 - RNA, 19 nt, Artificial Sequence
  Description of Artificial Sequence: Synthetic oligonucleotide
guuugagucagagucgcgc

SEQ ID NO: 1119878 - RNA, 19 nt, Artificial Sequence
  Description of Artificial Sequence: Synthetic oligonucleotide
ucugcaaacuccugucgga

SEQ ID NO: 1119879 - RNA, 19 nt, Artificial Sequence
  Description of Artificial Sequence: Synthetic oligonucleotide
caguuggucugcaaacucc

SEQ ID NO: 1119880 - RNA, 19 nt, Artificial Sequence
  Description of Artificial Sequence: Synthetic oligonucleotide
agcaagcuccgccuucacc

SEQ ID NO: 1119881 - RNA, 19 nt, Artificial Sequence
  Description of Artificial Sequence: Synthetic oligonucleotide
uccuucuuggcgagagccg

SEQ ID NO: 1119882 - RNA, 19 nt, Artificial Sequence
  Description of Artificial Sequence: Synthetic oligonucleotide
aaacucggcucucaggguu

SEQ ID NO: 1119883 - RNA, 19 nt, Artificial Sequence
  Description of Artificial Sequence: Synthetic oligonucleotide
uucacagcggccucgugcu

SEQ ID NO: 1119884 - RNA, 19 nt, Artificial Sequence
  Description of Artificial Sequence: Synthetic oligonucleotide
uauccuacccuuagcccug

SEQ ID NO: 1119885 - RNA, 19 nt, Artificial Sequence
  Description of Artificial Sequence: Synthetic oligonucleotide
gucacuuagcauucaaaga

SEQ ID NO: 1119886 - RNA, 19 nt, Artificial Sequence
  Description of Artificial Sequence: Synthetic oligonucleotide
uucauacuugucccgcaca

SEQ ID NO: 1119887 - RNA, 19 nt, Artificial Sequence
  Description of Artificial Sequence: Synthetic oligonucleotide
ugugcaccgcuccuggagc

SEQ ID NO: 1119888 - RNA, 19 nt, Artificial Sequence
  Description of Artificial Sequence: Synthetic oligonucleotide
uguuuggcaaugaguuucu

SEQ ID NO: 1119889 - RNA, 19 nt, Artificial Sequence
  Description of Artificial Sequence: Synthetic oligonucleotide
gacacgucgaauggugagg

SEQ ID NO: 1119890 - RNA, 19 nt, Artificial Sequence
  Description of Artificial Sequence: Synthetic oligonucleotide
  modified_base (6)..(6): a, c, u, g, unknown or other
uccaunagggugccucuca

SEQ ID NO: 1119891 - RNA, 19 nt, Artificial Sequence
  Description of Artificial Sequence: Synthetic oligonucleotide
gcacuucucacucagaauc

SEQ ID NO: 1119892 - RNA, 19 nt, Artificial Sequence
  Description of Artificial Sequence: Synthetic oligonucleotide
ucgcacuucucacucagaa

SEQ ID NO: 1119893 - RNA, 19 nt, Artificial Sequence
  Description of Artificial Sequence: Synthetic oligonucleotide
uuuucgcguucccuguuca

SEQ ID NO: 1119894 - RNA, 19 nt, Artificial Sequence
  Description of Artificial Sequence: Synthetic oligonucleotide
  modified_base (15)..(15): a, c, u, g, unknown or other
cacugggguuccaunaggg

SEQ ID NO: 1119895 - RNA, 19 nt, Artificial Sequence
  Description of Artificial Sequence: Synthetic oligonucleotide
ugacaguaauguccugagc

SEQ ID NO: 1119896 - RNA, 19 nt, Artificial Sequence
  Description of Artificial Sequence: Synthetic oligonucleotide
caggcuggcccucucaccg

SEQ ID NO: 1119897 - RNA, 19 nt, Artificial Sequence
  Description of Artificial Sequence: Synthetic oligonucleotide
uuagcccugugucuuggga

SEQ ID NO: 1119898 - RNA, 19 nt, Artificial Sequence
  Description of Artificial Sequence: Synthetic oligonucleotide
cuacccuuagcccuguguc

SEQ ID NO: 1119899 - RNA, 19 nt, Artificial Sequence
  Description of Artificial Sequence: Synthetic oligonucleotide
cuucacgcggcucucggcc

SEQ ID NO: 1119900 - RNA, 19 nt, Artificial Sequence
  Description of Artificial Sequence: Synthetic oligonucleotide
uccagucgauggaugacca

SEQ ID NO: 1119901 - RNA, 19 nt, Artificial Sequence
  Description of Artificial Sequence: Synthetic oligonucleotide
cugauguuccugcuccagg

SEQ ID NO: 1119902 - RNA, 19 nt, Artificial Sequence
  Description of Artificial Sequence: Synthetic oligonucleotide
uccaggugcugcucaaacc

SEQ ID NO: 1119903 - RNA, 19 nt, Artificial Sequence
  Description of Artificial Sequence: Synthetic oligonucleotide
uugacacgucgaaugguga

SEQ ID NO: 1119904 - RNA, 19 nt, Artificial Sequence
  Description of Artificial Sequence: Synthetic oligonucleotide
aguaauguccugagcacug

SEQ ID NO: 1119905 - RNA, 19 nt, Artificial Sequence
  Description of Artificial Sequence: Synthetic oligonucleotide
cauuguagagucgccgccg

SEQ ID NO: 1119906 - RNA, 19 nt, Artificial Sequence
  Description of Artificial Sequence: Synthetic oligonucleotide
caucuguguguucaccacc

SEQ ID NO: 1119907 - RNA, 19 nt, Artificial Sequence
  Description of Artificial Sequence: Synthetic oligonucleotide
uuucucaguggcacucaug

SEQ ID NO: 1119908 - RNA, 19 nt, Artificial Sequence
  Description of Artificial Sequence: Synthetic oligonucleotide
ugcaaacuccugucggacc

SEQ ID NO: 1119909 - RNA, 19 nt, Artificial Sequence
  Description of Artificial Sequence: Synthetic oligonucleotide
accagugccaugucggccu

SEQ ID NO: 1119910 - RNA, 19 nt, Artificial Sequence
  Description of Artificial Sequence: Synthetic oligonucleotide
uguagagucgccgccgcug

SEQ ID NO: 1119911 - RNA, 19 nt, Artificial Sequence
  Description of Artificial Sequence: Synthetic oligonucleotide
uaaacaccugcaggcaugc

SEQ ID NO: 1119912 - RNA, 19 nt, Artificial Sequence
  Description of Artificial Sequence: Synthetic oligonucleotide
ugagucagagucgcgcugc

SEQ ID NO: 1119913 - RNA, 19 nt, Artificial Sequence
  Description of Artificial Sequence: Synthetic oligonucleotide
cagucgauggaugaccagc

SEQ ID NO: 1119914 - RNA, 19 nt, Artificial Sequence
  Description of Artificial Sequence: Synthetic oligonucleotide
ucccgcacacgcuucacgc

SEQ ID NO: 1119915 - RNA, 19 nt, Artificial Sequence
  Description of Artificial Sequence: Synthetic oligonucleotide
agcauucaaagauggccgu

SEQ ID NO: 1119916 - RNA, 19 nt, Artificial Sequence
  Description of Artificial Sequence: Synthetic oligonucleotide
uccugucggaccaccuggg

SEQ ID NO: 1119917 - RNA, 19 nt, Artificial Sequence
  Description of Artificial Sequence: Synthetic oligonucleotide
ggugaugucacuuagcauu

SEQ ID NO: 1119918 - RNA, 19 nt, Artificial Sequence
  Description of Artificial Sequence: Synthetic oligonucleotide
aguggcacucaugaguucu

SEQ ID NO: 1119919 - RNA, 19 nt, Artificial Sequence
  Description of Artificial Sequence: Synthetic oligonucleotide
ucacgcuccugccuggcca

SEQ ID NO: 1119920 - RNA, 19 nt, Artificial Sequence
  Description of Artificial Sequence: Synthetic oligonucleotide
auaaacaccugcaggcaug

SEQ ID NO: 1119921 - RNA, 19 nt, Artificial Sequence
  Description of Artificial Sequence: Synthetic oligonucleotide
agauggccgucuguguugc

SEQ ID NO: 1119922 - RNA, 19 nt, Artificial Sequence
  Description of Artificial Sequence: Synthetic oligonucleotide
cauccuaagggugauguca

SEQ ID NO: 1119923 - RNA, 19 nt, Artificial Sequence
  Description of Artificial Sequence: Synthetic oligonucleotide
cucagcuaccacugccucg

SEQ ID NO: 1119924 - RNA, 19 nt, Artificial Sequence
  Description of Artificial Sequence: Synthetic oligonucleotide
cucaaaccucugcugggcg

SEQ ID NO: 1119925 - RNA, 19 nt, Artificial Sequence
  Description of Artificial Sequence: Synthetic oligonucleotide
  modified_base (2)..(2): a, c, u, g, unknown or other
unagggugccucucacacc

SEQ ID NO: 1119926 - RNA, 19 nt, Artificial Sequence
  Description of Artificial Sequence: Synthetic oligonucleotide
ucgcguucccuguucagca

SEQ ID NO: 1119927 - RNA, 19 nt, Artificial Sequence
  Description of Artificial Sequence: Synthetic oligonucleotide
ugcgccagagcucucugaa

SEQ ID NO: 1119928 - RNA, 19 nt, Artificial Sequence
  Description of Artificial Sequence: Synthetic oligonucleotide
cuccugacaccgcuggucc

SEQ ID NO: 1119929 - RNA, 19 nt, Artificial Sequence
  Description of Artificial Sequence: Synthetic oligonucleotide
caccucauuguagagucgc

SEQ ID NO: 1119930 - RNA, 19 nt, Artificial Sequence
  Description of Artificial Sequence: Synthetic oligonucleotide
ucacggcggauuuucucag

SEQ ID NO: 1119931 - RNA, 19 nt, Artificial Sequence
  Description of Artificial Sequence: Synthetic oligonucleotide
auaaaggacaagugccguu

SEQ ID NO: 1119932 - RNA, 19 nt, Artificial Sequence
  Description of Artificial Sequence: Synthetic oligonucleotide
cucaccgcacaucugugug

SEQ ID NO: 1119933 - RNA, 19 nt, Artificial Sequence
  Description of Artificial Sequence: Synthetic oligonucleotide
cugucggaccaccugggcc

SEQ ID NO: 1119934 - RNA, 19 nt, Artificial Sequence
  Description of Artificial Sequence: Synthetic oligonucleotide
uucgcguucccuguucagc

SEQ ID NO: 1119935 - RNA, 19 nt, Artificial Sequence
  Description of Artificial Sequence: Synthetic oligonucleotide
ucucaguggcacucaugag

SEQ ID NO: 1119936 - RNA, 19 nt, Artificial Sequence
  Description of Artificial Sequence: Synthetic oligonucleotide
aggguuugagucagagucg

SEQ ID NO: 1119937 - RNA, 19 nt, Artificial Sequence
  Description of Artificial Sequence: Synthetic oligonucleotide
guaauguccugagcacugg

SEQ ID NO: 1119938 - RNA, 19 nt, Artificial Sequence
  Description of Artificial Sequence: Synthetic oligonucleotide
ggcaaugaguuucuggauc

SEQ ID NO: 1119939 - RNA, 19 nt, Artificial Sequence
  Description of Artificial Sequence: Synthetic oligonucleotide
ucaggguuugagucagagu

SEQ ID NO: 1119940 - RNA, 19 nt, Artificial Sequence
  Description of Artificial Sequence: Synthetic oligonucleotide
uucacgcggcucucggccg

SEQ ID NO: 1119941 - RNA, 19 nt, Artificial Sequence
  Description of Artificial Sequence: Synthetic oligonucleotide
gcugcuauccuacccuuag

SEQ ID NO: 1119942 - RNA, 19 nt, Artificial Sequence
  Description of Artificial Sequence: Synthetic oligonucleotide
uggccgucuguguugcucc

SEQ ID NO: 1119943 - RNA, 19 nt, Artificial Sequence
  Description of Artificial Sequence: Synthetic oligonucleotide
uaccagggacugcaggcgc

SEQ ID NO: 1119944 - RNA, 19 nt, Artificial Sequence
  Description of Artificial Sequence: Synthetic oligonucleotide
cucacggcggauuuucuca

SEQ ID NO: 1119945 - RNA, 19 nt, Artificial Sequence
  Description of Artificial Sequence: Synthetic oligonucleotide
ggacaagugccguuggaug

SEQ ID NO: 1119946 - RNA, 19 nt, Artificial Sequence
  Description of Artificial Sequence: Synthetic oligonucleotide
uguguugcuccagaagcuc

SEQ ID NO: 1119947 - RNA, 19 nt, Artificial Sequence
  Description of Artificial Sequence: Synthetic oligonucleotide
guaccagggacugcaggcg

SEQ ID NO: 1119948 - RNA, 19 nt, Artificial Sequence
  Description of Artificial Sequence: Synthetic oligonucleotide
gauccacuucucacggcgg

SEQ ID NO: 1119949 - RNA, 19 nt, Artificial Sequence
  Description of Artificial Sequence: Synthetic oligonucleotide
agcuaccacugccucgcac

SEQ ID NO: 1119950 - RNA, 19 nt, Artificial Sequence
  Description of Artificial Sequence: Synthetic oligonucleotide
uuucgcguucccuguucag

SEQ ID NO: 1119951 - RNA, 19 nt, Artificial Sequence
  Description of Artificial Sequence: Synthetic oligonucleotide
uccuucucgcgcucuaggu

SEQ ID NO: 1119952 - RNA, 19 nt, Artificial Sequence
  Description of Artificial Sequence: Synthetic oligonucleotide
cugcucuuguuccucccgg

SEQ ID NO: 1119953 - RNA, 19 nt, Artificial Sequence
  Description of Artificial Sequence: Synthetic oligonucleotide
gucggccuccagucgaugg

SEQ ID NO: 1119954 - RNA, 19 nt, Artificial Sequence
  Description of Artificial Sequence: Synthetic oligonucleotide
ugcggccugcuccucacgc

SEQ ID NO: 1119955 - RNA, 19 nt, Artificial Sequence
  Description of Artificial Sequence: Synthetic oligonucleotide
cuauccuacccuuagcccu

SEQ ID NO: 1119956 - RNA, 19 nt, Artificial Sequence
  Description of Artificial Sequence: Synthetic oligonucleotide
cucacaccggcugcuaucc

SEQ ID NO: 1119957 - RNA, 19 nt, Artificial Sequence
  Description of Artificial Sequence: Synthetic oligonucleotide
agcggccucgugcuguuuc

SEQ ID NO: 1119958 - RNA, 19 nt, Artificial Sequence
  Description of Artificial Sequence: Synthetic oligonucleotide
uccggcuccagaccucuga

SEQ ID NO: 1119959 - RNA, 19 nt, Artificial Sequence
  Description of Artificial Sequence: Synthetic oligonucleotide
ucuugggauggaaccugga

SEQ ID NO: 1119960 - RNA, 19 nt, Artificial Sequence
  Description of Artificial Sequence: Synthetic oligonucleotide
ucugcccgcugccuggcug

SEQ ID NO: 1119961 - RNA, 19 nt, Artificial Sequence
  Description of Artificial Sequence: Synthetic oligonucleotide
uuuucauccuaagggugau

SEQ ID NO: 1119962 - RNA, 19 nt, Artificial Sequence
  Description of Artificial Sequence: Synthetic oligonucleotide
gcuauccuacccuuagccc

SEQ ID NO: 1119963 - RNA, 19 nt, Artificial Sequence
  Description of Artificial Sequence: Synthetic oligonucleotide
ucucacggcggauuuucuc

SEQ ID NO: 1119964 - RNA, 19 nt, Artificial Sequence
  Description of Artificial Sequence: Synthetic oligonucleotide
ccucacgucuuccaguucc

SEQ ID NO: 1119965 - RNA, 19 nt, Artificial Sequence
  Description of Artificial Sequence: Synthetic oligonucleotide
uugauccacuucucacggc

SEQ ID NO: 1119966 - RNA, 19 nt, Artificial Sequence
  Description of Artificial Sequence: Synthetic oligonucleotide
acaccggcugcuauccuac

SEQ ID NO: 1119967 - RNA, 19 nt, Artificial Sequence
  Description of Artificial Sequence: Synthetic oligonucleotide
ucggccuccagucgaugga

SEQ ID NO: 1119968 - RNA, 19 nt, Artificial Sequence
  Description of Artificial Sequence: Synthetic oligonucleotide
uucacccuccgaugcaccu

SEQ ID NO: 1119969 - RNA, 19 nt, Artificial Sequence
  Description of Artificial Sequence: Synthetic oligonucleotide
ucucacaccggcugcuauc

SEQ ID NO: 1119970 - RNA, 19 nt, Artificial Sequence
  Description of Artificial Sequence: Synthetic oligonucleotide
ucuucacccuccgaugcac

SEQ ID NO: 1119971 - RNA, 19 nt, Artificial Sequence
  Description of Artificial Sequence: Synthetic oligonucleotide
accucauuguagagucgcc

SEQ ID NO: 1119972 - RNA, 19 nt, Artificial Sequence
  Description of Artificial Sequence: Synthetic oligonucleotide
ucggcucucaggguuugag

SEQ ID NO: 1119973 - RNA, 19 nt, Artificial Sequence
  Description of Artificial Sequence: Synthetic oligonucleotide
guagagucgccgccgcugc

SEQ ID NO: 1119974 - RNA, 19 nt, Artificial Sequence
  Description of Artificial Sequence: Synthetic oligonucleotide
cucaguggcacucaugagu

SEQ ID NO: 1119975 - RNA, 19 nt, Artificial Sequence
  Description of Artificial Sequence: Synthetic oligonucleotide
ucugcccguuucacagcgg

SEQ ID NO: 1119976 - RNA, 19 nt, Artificial Sequence
  Description of Artificial Sequence: Synthetic oligonucleotide
cauccaugcuuccuccuuc

SEQ ID NO: 1119977 - RNA, 19 nt, Artificial Sequence
  Description of Artificial Sequence: Synthetic oligonucleotide
cuuagcccugugucuuggg

SEQ ID NO: 1119978 - RNA, 19 nt, Artificial Sequence
  Description of Artificial Sequence: Synthetic oligonucleotide
ucgugcuguuuccggagac

SEQ ID NO: 1119979 - RNA, 19 nt, Artificial Sequence
  Description of Artificial Sequence: Synthetic oligonucleotide
uccggagacuguucacggc

SEQ ID NO: 1119980 - RNA, 19 nt, Artificial Sequence
  Description of Artificial Sequence: Synthetic oligonucleotide
ucuguguguucaccacccu

SEQ ID NO: 1119981 - RNA, 19 nt, Artificial Sequence
  Description of Artificial Sequence: Synthetic oligonucleotide
ucaccgcacaucugugugu

SEQ ID NO: 1119982 - RNA, 19 nt, Artificial Sequence
  Description of Artificial Sequence: Synthetic oligonucleotide
  modified_base (18)..(18): a, c, u, g, unknown or other
gagcacugggguuccauna

SEQ ID NO: 1119983 - RNA, 19 nt, Artificial Sequence
  Description of Artificial Sequence: Synthetic oligonucleotide
uggcaaugaguuucuggau

SEQ ID NO: 1119984 - RNA, 19 nt, Artificial Sequence
  Description of Artificial Sequence: Synthetic oligonucleotide
acuugucccgcacacgcuu

SEQ ID NO: 1119985 - RNA, 19 nt, Artificial Sequence
  Description of Artificial Sequence: Synthetic oligonucleotide
cucggagagcuccaguuca

SEQ ID NO: 1119986 - RNA, 19 nt, Artificial Sequence
  Description of Artificial Sequence: Synthetic oligonucleotide
ggagagcuccaguucauac

SEQ ID NO: 1119987 - RNA, 19 nt, Artificial Sequence
  Description of Artificial Sequence: Synthetic oligonucleotide
  modified_base (4)..(4): a, c, u, g, unknown or other
caunagggugccucucaca

SEQ ID NO: 1119988 - RNA, 19 nt, Artificial Sequence
  Description of Artificial Sequence: Synthetic oligonucleotide
agugcuccuucugcugucg

SEQ ID NO: 1119989 - RNA, 19 nt, Artificial Sequence
  Description of Artificial Sequence: Synthetic oligonucleotide
  modified_base (9)..(9): a, c, u, g, unknown or other
gguuccaunagggugccuc

SEQ ID NO: 1119990 - RNA, 19 nt, Artificial Sequence
  Description of Artificial Sequence: Synthetic oligonucleotide
cuuuucgcguucccuguuc

SEQ ID NO: 1119991 - RNA, 19 nt, Artificial Sequence
  Description of Artificial Sequence: Synthetic oligonucleotide
cuguguguucaccacccuc

SEQ ID NO: 1119992 - RNA, 19 nt, Artificial Sequence
  Description of Artificial Sequence: Synthetic oligonucleotide
cucaugaguucuuugaguu

SEQ ID NO: 1119993 - RNA, 19 nt, Artificial Sequence
  Description of Artificial Sequence: Synthetic oligonucleotide
auuuuacuauaaacaccug

SEQ ID NO: 1119994 - RNA, 19 nt, Artificial Sequence
  Description of Artificial Sequence: Synthetic oligonucleotide
cucucggccgcccucucgc

SEQ ID NO: 1119995 - RNA, 19 nt, Artificial Sequence
  Description of Artificial Sequence: Synthetic oligonucleotide
ggcgcguucacgcuccugc

SEQ ID NO: 1119996 - RNA, 19 nt, Artificial Sequence
  Description of Artificial Sequence: Synthetic oligonucleotide
uucccuguucagcauccau

SEQ ID NO: 1119997 - RNA, 19 nt, Artificial Sequence
  Description of Artificial Sequence: Synthetic oligonucleotide
ucauccuaagggugauguc

SEQ ID NO: 1119998 - RNA, 19 nt, Artificial Sequence
  Description of Artificial Sequence: Synthetic oligonucleotide
agucgauggaugaccagcu

SEQ ID NO: 1119999 - RNA, 19 nt, Artificial Sequence
  Description of Artificial Sequence: Synthetic oligonucleotide
ucugucuccuugacacguc

SEQ ID NO: 1120000 - RNA, 19 nt, Artificial Sequence
  Description of Artificial Sequence: Synthetic oligonucleotide
gaaucuucuugucuucaau

SEQ ID NO: 1120001 - RNA, 19 nt, Artificial Sequence
  Description of Artificial Sequence: Synthetic oligonucleotide
caaucagcuggucaauaaa

SEQ ID NO: 1120002 - RNA, 19 nt, Artificial Sequence
  Description of Artificial Sequence: Synthetic oligonucleotide
ugccucucacaccggcugc

SEQ ID NO: 1120003 - RNA, 19 nt, Artificial Sequence
  Description of Artificial Sequence: Synthetic oligonucleotide
uucacgcuccugccuggcc

SEQ ID NO: 1120004 - RNA, 19 nt, Artificial Sequence
  Description of Artificial Sequence: Synthetic oligonucleotide
acacgucgaauggugaggu

SEQ ID NO: 1120005 - RNA, 19 nt, Artificial Sequence
  Description of Artificial Sequence: Synthetic oligonucleotide
ucgaauggugaggucccgc

SEQ ID NO: 1120006 - RNA, 19 nt, Artificial Sequence
  Description of Artificial Sequence: Synthetic oligonucleotide
cuaagggugaugucacuua

SEQ ID NO: 1120007 - RNA, 19 nt, Artificial Sequence
  Description of Artificial Sequence: Synthetic oligonucleotide
  modified_base (7)..(7): a, c, u, g, unknown or other
uuccaunagggugccucuc

SEQ ID NO: 1120008 - RNA, 19 nt, Artificial Sequence
  Description of Artificial Sequence: Synthetic oligonucleotide
gguggccucauagugcucc

SEQ ID NO: 1120009 - RNA, 19 nt, Artificial Sequence
  Description of Artificial Sequence: Synthetic oligonucleotide
cuuggcgagagccgucuuc

SEQ ID NO: 1120010 - RNA, 19 nt, Artificial Sequence
  Description of Artificial Sequence: Synthetic oligonucleotide
aagugccguuggauggugg

SEQ ID NO: 1120011 - RNA, 19 nt, Artificial Sequence
  Description of Artificial Sequence: Synthetic oligonucleotide
uugucccgcacacgcuuca

SEQ ID NO: 1120012 - RNA, 19 nt, Artificial Sequence
  Description of Artificial Sequence: Synthetic oligonucleotide
gugaugucacuuagcauuc

SEQ ID NO: 1120013 - RNA, 19 nt, Artificial Sequence
  Description of Artificial Sequence: Synthetic oligonucleotide
ccuggucucggccuuuucg

SEQ ID NO: 1120014 - RNA, 19 nt, Artificial Sequence
  Description of Artificial Sequence: Synthetic oligonucleotide
gacaccgcugguccccaug

SEQ ID NO: 1120015 - RNA, 19 nt, Artificial Sequence
  Description of Artificial Sequence: Synthetic oligonucleotide
ugcccguuucacagcggcc

SEQ ID NO: 1120016 - RNA, 19 nt, Artificial Sequence
  Description of Artificial Sequence: Synthetic oligonucleotide
cugcuauccuacccuuagc

SEQ ID NO: 1120017 - RNA, 19 nt, Artificial Sequence
  Description of Artificial Sequence: Synthetic oligonucleotide
aggcuggcccucucaccgc

SEQ ID NO: 1120018 - RNA, 19 nt, Artificial Sequence
  Description of Artificial Sequence: Synthetic oligonucleotide
gucccgcacacgcuucacg

SEQ ID NO: 1120019 - RNA, 19 nt, Artificial Sequence
  Description of Artificial Sequence: Synthetic oligonucleotide
ggccuuuucgcguucccug

SEQ ID NO: 1120020 - RNA, 19 nt, Artificial Sequence
  Description of Artificial Sequence: Synthetic oligonucleotide
ucuccuugacacgucgaau

SEQ ID NO: 1120021 - RNA, 19 nt, Artificial Sequence
  Description of Artificial Sequence: Synthetic oligonucleotide
cagagcucucugaaggaga

SEQ ID NO: 1120022 - RNA, 19 nt, Artificial Sequence
  Description of Artificial Sequence: Synthetic oligonucleotide
cguaccagggacugcaggc

SEQ ID NO: 1120023 - RNA, 19 nt, Artificial Sequence
  Description of Artificial Sequence: Synthetic oligonucleotide
ugugcggccugcuccucac

SEQ ID NO: 1120024 - RNA, 19 nt, Artificial Sequence
  Description of Artificial Sequence: Synthetic oligonucleotide
cucucaccgcacaucugug

SEQ ID NO: 1120025 - RNA, 19 nt, Artificial Sequence
  Description of Artificial Sequence: Synthetic oligonucleotide
ccggagacuguucacggcc

SEQ ID NO: 1120026 - RNA, 19 nt, Artificial Sequence
  Description of Artificial Sequence: Synthetic oligonucleotide
cuucucgcgcucuaggugu

SEQ ID NO: 1120027 - RNA, 19 nt, Artificial Sequence
  Description of Artificial Sequence: Synthetic oligonucleotide
acaagugccguuggauggu

SEQ ID NO: 1120028 - RNA, 19 nt, Artificial Sequence
  Description of Artificial Sequence: Synthetic oligonucleotide
agagucgcgcugcucuccu

SEQ ID NO: 1120029 - RNA, 19 nt, Artificial Sequence
  Description of Artificial Sequence: Synthetic oligonucleotide
ccucauuguagagucgccg

SEQ ID NO: 1120030 - RNA, 19 nt, Artificial Sequence
  Description of Artificial Sequence: Synthetic oligonucleotide
ugaugucacuuagcauuca

SEQ ID NO: 1120031 - RNA, 19 nt, Artificial Sequence
  Description of Artificial Sequence: Synthetic oligonucleotide
uccuaagggugaugucacu

SEQ ID NO: 1120032 - RNA, 19 nt, Artificial Sequence
  Description of Artificial Sequence: Synthetic oligonucleotide
ggguuugagucagagucgc

SEQ ID NO: 1120033 - RNA, 19 nt, Artificial Sequence
  Description of Artificial Sequence: Synthetic oligonucleotide
uuguagagucgccgccgcu

SEQ ID NO: 1120034 - RNA, 19 nt, Artificial Sequence
  Description of Artificial Sequence: Synthetic oligonucleotide
ggcacucaugaguucuuug

SEQ ID NO: 1120035 - RNA, 19 nt, Artificial Sequence
  Description of Artificial Sequence: Synthetic oligonucleotide
ucggccuuuucgcguuccc

SEQ ID NO: 1120036 - RNA, 19 nt, Artificial Sequence
  Description of Artificial Sequence: Synthetic oligonucleotide
agagcucucugaaggagaa

SEQ ID NO: 1120037 - RNA, 19 nt, Artificial Sequence
  Description of Artificial Sequence: Synthetic oligonucleotide
cuugucccgcacacgcuuc

SEQ ID NO: 1120038 - RNA, 19 nt, Artificial Sequence
  Description of Artificial Sequence: Synthetic oligonucleotide
gucuccuugacacgucgaa

SEQ ID NO: 1120039 - RNA, 19 nt, Artificial Sequence
  Description of Artificial Sequence: Synthetic oligonucleotide
cucggccuccccgaggcgg

SEQ ID NO: 1120040 - RNA, 19 nt, Artificial Sequence
  Description of Artificial Sequence: Synthetic oligonucleotide
aggcaugcugacaguaaug

SEQ ID NO: 1120041 - RNA, 19 nt, Artificial Sequence
  Description of Artificial Sequence: Synthetic oligonucleotide
ucggagagcuccaguucau

SEQ ID NO: 1120042 - RNA, 19 nt, Artificial Sequence
  Description of Artificial Sequence: Synthetic oligonucleotide
uccugacaccgcugguccc

SEQ ID NO: 1120043 - RNA, 19 nt, Artificial Sequence
  Description of Artificial Sequence: Synthetic oligonucleotide
ucacgcggcucucggccgc

SEQ ID NO: 1120044 - RNA, 19 nt, Artificial Sequence
  Description of Artificial Sequence: Synthetic oligonucleotide
ucugugcaccgcuccugga

SEQ ID NO: 1120045 - RNA, 19 nt, Artificial Sequence
  Description of Artificial Sequence: Synthetic oligonucleotide
cacgcuccugccuggccag

SEQ ID NO: 1120046 - RNA, 19 nt, Artificial Sequence
  Description of Artificial Sequence: Synthetic oligonucleotide
ccggcucuucucaaacucg

SEQ ID NO: 1120047 - RNA, 19 nt, Artificial Sequence
  Description of Artificial Sequence: Synthetic oligonucleotide
ugggccacgcgcuccugac

SEQ ID NO: 1120048 - RNA, 19 nt, Artificial Sequence
  Description of Artificial Sequence: Synthetic oligonucleotide
uagugcuccuucugcuguc

SEQ ID NO: 1120049 - RNA, 19 nt, Artificial Sequence
  Description of Artificial Sequence: Synthetic oligonucleotide
cuucuuggcgagagccguc

SEQ ID NO: 1120050 - RNA, 19 nt, Artificial Sequence
  Description of Artificial Sequence: Synthetic oligonucleotide
aacuccugucggaccaccu

SEQ ID NO: 1120051 - RNA, 19 nt, Artificial Sequence
  Description of Artificial Sequence: Synthetic oligonucleotide
gucgaauggugaggucccg

SEQ ID NO: 1120052 - RNA, 19 nt, Artificial Sequence
  Description of Artificial Sequence: Synthetic oligonucleotide
ucgcgcucuagguguuccc

SEQ ID NO: 1120053 - RNA, 19 nt, Artificial Sequence
  Description of Artificial Sequence: Synthetic oligonucleotide
cuguucagcauccaugcuu

SEQ ID NO: 1120054 - RNA, 19 nt, Artificial Sequence
  Description of Artificial Sequence: Synthetic oligonucleotide
cugccaguuggucugcaaa

SEQ ID NO: 1120055 - RNA, 19 nt, Artificial Sequence
  Description of Artificial Sequence: Synthetic oligonucleotide
gucgauggaugaccagcuc

SEQ ID NO: 1120056 - RNA, 19 nt, Artificial Sequence
  Description of Artificial Sequence: Synthetic oligonucleotide
caaugaguuucuggaucuc

SEQ ID NO: 1120057 - RNA, 19 nt, Artificial Sequence
  Description of Artificial Sequence: Synthetic oligonucleotide
ggccacgcgcuccugacac

SEQ ID NO: 1120058 - RNA, 19 nt, Artificial Sequence
  Description of Artificial Sequence: Synthetic oligonucleotide
acgcgcuccugacaccgcu

SEQ ID NO: 1120059 - RNA, 19 nt, Artificial Sequence
  Description of Artificial Sequence: Synthetic oligonucleotide
gcucaaaccucugcugggc

SEQ ID NO: 1120060 - RNA, 19 nt, Artificial Sequence
  Description of Artificial Sequence: Synthetic oligonucleotide
ggccucgugcuguuuccgg

SEQ ID NO: 1120061 - RNA, 19 nt, Artificial Sequence
  Description of Artificial Sequence: Synthetic oligonucleotide
  modified_base (8)..(8): a, c, u, g, unknown or other
guuccaunagggugccucu

SEQ ID NO: 1120062 - RNA, 19 nt, Artificial Sequence
  Description of Artificial Sequence: Synthetic oligonucleotide
ccgcacacgcuucacgcgg

SEQ ID NO: 1120063 - RNA, 19 nt, Artificial Sequence
  Description of Artificial Sequence: Synthetic oligonucleotide
ccaguuggucugcaaacuc

SEQ ID NO: 1120064 - RNA, 19 nt, Artificial Sequence
  Description of Artificial Sequence: Synthetic oligonucleotide
ccuucucgcgcucuaggug

SEQ ID NO: 1120065 - RNA, 19 nt, Artificial Sequence
  Description of Artificial Sequence: Synthetic oligonucleotide
cccgaggcggccuuucagc

SEQ ID NO: 1120066 - RNA, 19 nt, Artificial Sequence
  Description of Artificial Sequence: Synthetic oligonucleotide
gagagccgucuucacccuc

SEQ ID NO: 1120067 - RNA, 19 nt, Artificial Sequence
  Description of Artificial Sequence: Synthetic oligonucleotide
acccuuagcccugugucuu

SEQ ID NO: 1120068 - RNA, 19 nt, Artificial Sequence
  Description of Artificial Sequence: Synthetic oligonucleotide
cgucgaauggugagguccc

SEQ ID NO: 1120069 - RNA, 19 nt, Artificial Sequence
  Description of Artificial Sequence: Synthetic oligonucleotide
gugccguuggaugguggcc

SEQ ID NO: 1120070 - RNA, 19 nt, Artificial Sequence
  Description of Artificial Sequence: Synthetic oligonucleotide
guuucacagcggccucgug

SEQ ID NO: 1120071 - RNA, 19 nt, Artificial Sequence
  Description of Artificial Sequence: Synthetic oligonucleotide
uccacuucucacggcggau

SEQ ID NO: 1120072 - RNA, 19 nt, Artificial Sequence
  Description of Artificial Sequence: Synthetic oligonucleotide
uggcccagucgcuccuucu

SEQ ID NO: 1120073 - RNA, 19 nt, Artificial Sequence
  Description of Artificial Sequence: Synthetic oligonucleotide
gguuugagucagagucgcg

SEQ ID NO: 1120074 - RNA, 19 nt, Artificial Sequence
  Description of Artificial Sequence: Synthetic oligonucleotide
cacccuccgaugcaccuca

SEQ ID NO: 1120075 - RNA, 19 nt, Artificial Sequence
  Description of Artificial Sequence: Synthetic oligonucleotide
gcuaccacugccucgcacu

SEQ ID NO: 1120076 - RNA, 19 nt, Artificial Sequence
  Description of Artificial Sequence: Synthetic oligonucleotide
aucugaugccucugcucuu

SEQ ID NO: 1120077 - RNA, 19 nt, Artificial Sequence
  Description of Artificial Sequence: Synthetic oligonucleotide
uguucacggccuccuccuu

SEQ ID NO: 1120078 - RNA, 19 nt, Artificial Sequence
  Description of Artificial Sequence: Synthetic oligonucleotide
  modified_base (5)..(5): a, c, u, g, unknown or other
ccaunagggugccucucac

SEQ ID NO: 1120079 - RNA, 19 nt, Artificial Sequence
  Description of Artificial Sequence: Synthetic oligonucleotide
caaacuccugucggaccac

SEQ ID NO: 1120080 - RNA, 19 nt, Artificial Sequence
  Description of Artificial Sequence: Synthetic oligonucleotide
caagugccguuggauggug

SEQ ID NO: 1120081 - RNA, 19 nt, Artificial Sequence
  Description of Artificial Sequence: Synthetic oligonucleotide
ccucgugcuguuuccggag

SEQ ID NO: 1120082 - RNA, 19 nt, Artificial Sequence
  Description of Artificial Sequence: Synthetic oligonucleotide
cuucacccucugguuuucc

SEQ ID NO: 1120083 - RNA, 19 nt, Artificial Sequence
  Description of Artificial Sequence: Synthetic oligonucleotide
ucacccuccgaugcaccuc

SEQ ID NO: 1120084 - RNA, 19 nt, Artificial Sequence
  Description of Artificial Sequence: Synthetic oligonucleotide
aaaccucugcugggcgcgu

SEQ ID NO: 1120085 - RNA, 19 nt, Artificial Sequence
  Description of Artificial Sequence: Synthetic oligonucleotide
cagcgccuccuucucgcgc

SEQ ID NO: 1120086 - RNA, 19 nt, Artificial Sequence
  Description of Artificial Sequence: Synthetic oligonucleotide
uccccgaggcggccuuuca

SEQ ID NO: 1120087 - RNA, 19 nt, Artificial Sequence
  Description of Artificial Sequence: Synthetic oligonucleotide
uggcccucucaccgcacau

SEQ ID NO: 1120088 - RNA, 19 nt, Artificial Sequence
  Description of Artificial Sequence: Synthetic oligonucleotide
cuggagcuuccgcucugac

SEQ ID NO: 1120089 - RNA, 19 nt, Artificial Sequence
  Description of Artificial Sequence: Synthetic oligonucleotide
ucuagguggucugcccguu

SEQ ID NO: 1120090 - RNA, 19 nt, Artificial Sequence
  Description of Artificial Sequence: Synthetic oligonucleotide
uucucgcgcucuagguguu

SEQ ID NO: 1120091 - RNA, 19 nt, Artificial Sequence
  Description of Artificial Sequence: Synthetic oligonucleotide
uccuacccuuagcccugug

SEQ ID NO: 1120092 - RNA, 19 nt, Artificial Sequence
  Description of Artificial Sequence: Synthetic oligonucleotide
cacgucgaauggugagguc

SEQ ID NO: 1120093 - RNA, 19 nt, Artificial Sequence
  Description of Artificial Sequence: Synthetic oligonucleotide
cuccgaugcaccucaucua

SEQ ID NO: 1120094 - RNA, 19 nt, Artificial Sequence
  Description of Artificial Sequence: Synthetic oligonucleotide
cacaccggcugcuauccua

SEQ ID NO: 1120095 - RNA, 19 nt, Artificial Sequence
  Description of Artificial Sequence: Synthetic oligonucleotide
cucgugcuguuuccggaga

SEQ ID NO: 1120096 - RNA, 19 nt, Artificial Sequence
  Description of Artificial Sequence: Synthetic oligonucleotide
gccuccagucgauggauga

SEQ ID NO: 1120097 - RNA, 19 nt, Artificial Sequence
  Description of Artificial Sequence: Synthetic oligonucleotide
ucuuggcgagagccgucuu

SEQ ID NO: 1120098 - RNA, 19 nt, Artificial Sequence
  Description of Artificial Sequence: Synthetic oligonucleotide
gcucggagagcuccaguuc

SEQ ID NO: 1120099 - RNA, 19 nt, Artificial Sequence
  Description of Artificial Sequence: Synthetic oligonucleotide
ugucggccuccagucgaug

SEQ ID NO: 1120100 - RNA, 19 nt, Artificial Sequence
  Description of Artificial Sequence: Synthetic oligonucleotide
uggcacucaugaguucuuu

SEQ ID NO: 1120101 - RNA, 19 nt, Artificial Sequence
  Description of Artificial Sequence: Synthetic oligonucleotide
caguaauguccugagcacu

SEQ ID NO: 1120102 - RNA, 19 nt, Artificial Sequence
  Description of Artificial Sequence: Synthetic oligonucleotide
ccguaccagggacugcagg

SEQ ID NO: 1120103 - RNA, 19 nt, Artificial Sequence
  Description of Artificial Sequence: Synthetic oligonucleotide
caccggcugcuauccuacc

SEQ ID NO: 1120104 - RNA, 19 nt, Artificial Sequence
  Description of Artificial Sequence: Synthetic oligonucleotide
ccacgcgcuccugacaccg

SEQ ID NO: 1120105 - RNA, 19 nt, Artificial Sequence
  Description of Artificial Sequence: Synthetic oligonucleotide
ccaugucggccuccagucg

SEQ ID NO: 1120106 - RNA, 19 nt, Artificial Sequence
  Description of Artificial Sequence: Synthetic oligonucleotide
ucucggccgcccucucgcu

SEQ ID NO: 1120107 - RNA, 19 nt, Artificial Sequence
  Description of Artificial Sequence: Synthetic oligonucleotide
ccgaugcaccucaucuagc

SEQ ID NO: 1120108 - RNA, 19 nt, Artificial Sequence
  Description of Artificial Sequence: Synthetic oligonucleotide
gcuucacgcggcucucggc

SEQ ID NO: 1120109 - RNA, 19 nt, Artificial Sequence
  Description of Artificial Sequence: Synthetic oligonucleotide
gguggucugcccguuucac

SEQ ID NO: 1120110 - RNA, 19 nt, Artificial Sequence
  Description of Artificial Sequence: Synthetic oligonucleotide
ccuuagcccugugucuugg

SEQ ID NO: 1120111 - RNA, 19 nt, Artificial Sequence
  Description of Artificial Sequence: Synthetic oligonucleotide
gugcggccugcuccucacg

SEQ ID NO: 1120112 - RNA, 19 nt, Artificial Sequence
  Description of Artificial Sequence: Synthetic oligonucleotide
ccagucgauggaugaccag

SEQ ID NO: 1120113 - RNA, 19 nt, Artificial Sequence
  Description of Artificial Sequence: Synthetic oligonucleotide
cucgcacuucucacucaga

SEQ ID NO: 1120114 - RNA, 19 nt, Artificial Sequence
  Description of Artificial Sequence: Synthetic oligonucleotide
caggcaugcugacaguaau

SEQ ID NO: 1120115 - RNA, 19 nt, Artificial Sequence
  Description of Artificial Sequence: Synthetic oligonucleotide
gcauucaaagauggccguc

SEQ ID NO: 1120116 - RNA, 19 nt, Artificial Sequence
  Description of Artificial Sequence: Synthetic oligonucleotide
cgauggaugaccagcucga

SEQ ID NO: 1120117 - RNA, 19 nt, Artificial Sequence
  Description of Artificial Sequence: Synthetic oligonucleotide
cucuagguggucugcccgu

SEQ ID NO: 1120118 - RNA, 19 nt, Artificial Sequence
  Description of Artificial Sequence: Synthetic oligonucleotide
ugguggccucauagugcuc

SEQ ID NO: 1120119 - RNA, 19 nt, Artificial Sequence
  Description of Artificial Sequence: Synthetic oligonucleotide
gccgucuucacccuccgau

SEQ ID NO: 1120120 - RNA, 19 nt, Artificial Sequence
  Description of Artificial Sequence: Synthetic oligonucleotide
agccgucuucacccuccga

SEQ ID NO: 1120121 - RNA, 19 nt, Artificial Sequence
  Description of Artificial Sequence: Synthetic oligonucleotide
ccugucggaccaccugggc

SEQ ID NO: 1120122 - RNA, 19 nt, Artificial Sequence
  Description of Artificial Sequence: Synthetic oligonucleotide
gcggccucgugcuguuucc

SEQ ID NO: 1120123 - RNA, 19 nt, Artificial Sequence
  Description of Artificial Sequence: Synthetic oligonucleotide
cuggcccucucaccgcaca

SEQ ID NO: 1120124 - RNA, 19 nt, Artificial Sequence
  Description of Artificial Sequence: Synthetic oligonucleotide
gagucagagucgcgcugcu

SEQ ID NO: 1120125 - RNA, 19 nt, Artificial Sequence
  Description of Artificial Sequence: Synthetic oligonucleotide
gccucgugcuguuuccgga

SEQ ID NO: 1120126 - RNA, 19 nt, Artificial Sequence
  Description of Artificial Sequence: Synthetic oligonucleotide
cucacgucuuccaguuccu

SEQ ID NO: 1120127 - RNA, 19 nt, Artificial Sequence
  Description of Artificial Sequence: Synthetic oligonucleotide
cugcgccagagcucucuga

SEQ ID NO: 1120128 - RNA, 19 nt, Artificial Sequence
  Description of Artificial Sequence: Synthetic oligonucleotide
gucggaccaccugggccag

SEQ ID NO: 1120129 - RNA, 19 nt, Artificial Sequence
  Description of Artificial Sequence: Synthetic oligonucleotide
gagucgcgcugcucuccuc

SEQ ID NO: 1120130 - RNA, 19 nt, Artificial Sequence
  Description of Artificial Sequence: Synthetic oligonucleotide
gggauggaaccuggacacc

SEQ ID NO: 1120131 - RNA, 19 nt, Artificial Sequence
  Description of Artificial Sequence: Synthetic oligonucleotide
cacacgcuucacgcggcuc

SEQ ID NO: 1120132 - RNA, 19 nt, Artificial Sequence
  Description of Artificial Sequence: Synthetic oligonucleotide
cugugcggccugcuccuca

SEQ ID NO: 1120133 - RNA, 19 nt, Artificial Sequence
  Description of Artificial Sequence: Synthetic oligonucleotide
gcgcguucacgcuccugcc

SEQ ID NO: 1120134 - RNA, 19 nt, Artificial Sequence
  Description of Artificial Sequence: Synthetic oligonucleotide
caagcuccgccuucacccu

SEQ ID NO: 1120135 - RNA, 19 nt, Artificial Sequence
  Description of Artificial Sequence: Synthetic oligonucleotide
ucggaccaccugggccagg

SEQ ID NO: 1120136 - RNA, 19 nt, Artificial Sequence
  Description of Artificial Sequence: Synthetic oligonucleotide
gccccugagccuccucacc

SEQ ID NO: 1120137 - RNA, 19 nt, Artificial Sequence
  Description of Artificial Sequence: Synthetic oligonucleotide
ccguuucacagcggccucg

SEQ ID NO: 1120138 - RNA, 19 nt, Artificial Sequence
  Description of Artificial Sequence: Synthetic oligonucleotide
gcuccugccuggccagcgc

SEQ ID NO: 1120139 - RNA, 19 nt, Artificial Sequence
  Description of Artificial Sequence: Synthetic oligonucleotide
  modified_base (11)..(11): a, c, u, g, unknown or other
gggguuccaunagggugcc

SEQ ID NO: 1120140 - RNA, 19 nt, Artificial Sequence
  Description of Artificial Sequence: Synthetic oligonucleotide
ggucucggccuuuucgcgu

SEQ ID NO: 1120141 - RNA, 19 nt, Artificial Sequence
  Description of Artificial Sequence: Synthetic oligonucleotide
cuucaaucagcuggucaau

SEQ ID NO: 1120142 - RNA, 19 nt, Artificial Sequence
  Description of Artificial Sequence: Synthetic oligonucleotide
ccgcacaucuguguguuca

SEQ ID NO: 1120143 - RNA, 19 nt, Artificial Sequence
  Description of Artificial Sequence: Synthetic oligonucleotide
ggccccugagccuccucac

SEQ ID NO: 1120144 - RNA, 19 nt, Artificial Sequence
  Description of Artificial Sequence: Synthetic oligonucleotide
ugcaccgcuccuggagcuu

SEQ ID NO: 1120145 - RNA, 19 nt, Artificial Sequence
  Description of Artificial Sequence: Synthetic oligonucleotide
cagugccaugucggccucc

SEQ ID NO: 1120146 - RNA, 19 nt, Artificial Sequence
  Description of Artificial Sequence: Synthetic oligonucleotide
gugcaccgcuccuggagcu

SEQ ID NO: 1120147 - RNA, 19 nt, Artificial Sequence
  Description of Artificial Sequence: Synthetic oligonucleotide
ggcuggcccucucaccgca

SEQ ID NO: 1120148 - RNA, 19 nt, Artificial Sequence
  Description of Artificial Sequence: Synthetic oligonucleotide
cgcgcucuagguguucccg

SEQ ID NO: 1120149 - RNA, 19 nt, Artificial Sequence
  Description of Artificial Sequence: Synthetic oligonucleotide
cgcuucacgcggcucucgg

SEQ ID NO: 1120150 - RNA, 19 nt, Artificial Sequence
  Description of Artificial Sequence: Synthetic oligonucleotide
cccuuagcccugugucuug

SEQ ID NO: 1120151 - RNA, 19 nt, Artificial Sequence
  Description of Artificial Sequence: Synthetic oligonucleotide
gcaggcaugcugacaguaa

SEQ ID NO: 1120152 - RNA, 19 nt, Artificial Sequence
  Description of Artificial Sequence: Synthetic oligonucleotide
cuccggcuccagaccucug

SEQ ID NO: 1120153 - RNA, 19 nt, Artificial Sequence
  Description of Artificial Sequence: Synthetic oligonucleotide
gccuuuucgcguucccugu

SEQ ID NO: 1120154 - RNA, 19 nt, Artificial Sequence
  Description of Artificial Sequence: Synthetic oligonucleotide
ggcgcugugcggccugcuc

SEQ ID NO: 1120155 - RNA, 19 nt, Artificial Sequence
  Description of Artificial Sequence: Synthetic oligonucleotide
ccccgaggcggccuuucag

SEQ ID NO: 1120156 - RNA, 19 nt, Artificial Sequence
  Description of Artificial Sequence: Synthetic oligonucleotide
cacuucucacggcggauuu

SEQ ID NO: 1120157 - RNA, 19 nt, Artificial Sequence
  Description of Artificial Sequence: Synthetic oligonucleotide
agguguucccgcagcucuu

SEQ ID NO: 1120158 - RNA, 19 nt, Artificial Sequence
  Description of Artificial Sequence: Synthetic oligonucleotide
gccugauguuccugcucca

SEQ ID NO: 1120159 - RNA, 19 nt, Artificial Sequence
  Description of Artificial Sequence: Synthetic oligonucleotide
cacgcggcucucggccgcc

SEQ ID NO: 1120160 - RNA, 19 nt, Artificial Sequence
  Description of Artificial Sequence: Synthetic oligonucleotide
gcccguuucacagcggccu

SEQ ID NO: 1120161 - RNA, 19 nt, Artificial Sequence
  Description of Artificial Sequence: Synthetic oligonucleotide
cccugagccuccucaccuc

SEQ ID NO: 1120162 - RNA, 19 nt, Artificial Sequence
  Description of Artificial Sequence: Synthetic oligonucleotide
gccacgcgcuccugacacc

SEQ ID NO: 1120163 - RNA, 19 nt, Artificial Sequence
  Description of Artificial Sequence: Synthetic oligonucleotide
cuaccacugccucgcacuu

SEQ ID NO: 1120164 - RNA, 19 nt, Artificial Sequence
  Description of Artificial Sequence: Synthetic oligonucleotide
gccguuggaugguggccuc

SEQ ID NO: 1120165 - RNA, 19 nt, Artificial Sequence
  Description of Artificial Sequence: Synthetic oligonucleotide
cccguuucacagcggccuc

SEQ ID NO: 1120166 - RNA, 19 nt, Artificial Sequence
  Description of Artificial Sequence: Synthetic oligonucleotide
gaaccauggccugcuucuu

SEQ ID NO: 1120167 - RNA, 19 nt, Artificial Sequence
  Description of Artificial Sequence: Synthetic oligonucleotide
cacggcggauuuucucagu

SEQ ID NO: 1120168 - RNA, 19 nt, Artificial Sequence
  Description of Artificial Sequence: Synthetic oligonucleotide
ccuacccuuagcccugugu

SEQ ID NO: 1120169 - RNA, 19 nt, Artificial Sequence
  Description of Artificial Sequence: Synthetic oligonucleotide
uggcgcugugcggccugcu

SEQ ID NO: 1120170 - RNA, 19 nt, Artificial Sequence
  Description of Artificial Sequence: Synthetic oligonucleotide
gccguaccagggacugcag

SEQ ID NO: 1120171 - RNA, 19 nt, Artificial Sequence
  Description of Artificial Sequence: Synthetic oligonucleotide
ggccgucuguguugcucca

SEQ ID NO: 1120172 - RNA, 19 nt, Artificial Sequence
  Description of Artificial Sequence: Synthetic oligonucleotide
cgcucuagguguucccgca

SEQ ID NO: 1120173 - RNA, 19 nt, Artificial Sequence
  Description of Artificial Sequence: Synthetic oligonucleotide
gcugcagcgcugagcaucu

SEQ ID NO: 1120174 - RNA, 19 nt, Artificial Sequence
  Description of Artificial Sequence: Synthetic oligonucleotide
ccggcugcuauccuacccu

SEQ ID NO: 1120175 - RNA, 19 nt, Artificial Sequence
  Description of Artificial Sequence: Synthetic oligonucleotide
gcaccgcuccuggagcuuc

SEQ ID NO: 1120176 - RNA, 19 nt, Artificial Sequence
  Description of Artificial Sequence: Synthetic oligonucleotide
cgaauggugaggucccgcu

SEQ ID NO: 1120177 - RNA, 19 nt, Artificial Sequence
  Description of Artificial Sequence: Synthetic oligonucleotide
cccuccgaugcaccucauc

SEQ ID NO: 1120178 - RNA, 19 nt, Artificial Sequence
  Description of Artificial Sequence: Synthetic oligonucleotide
gggccacgcgcuccugaca

SEQ ID NO: 1120179 - RNA, 19 nt, Artificial Sequence
  Description of Artificial Sequence: Synthetic oligonucleotide
ggugccucucacaccggcu

SEQ ID NO: 1120180 - RNA, 19 nt, Artificial Sequence
  Description of Artificial Sequence: Synthetic oligonucleotide
cgaggcggccuuucagcuc

SEQ ID NO: 1120181 - RNA, 19 nt, Artificial Sequence
  Description of Artificial Sequence: Synthetic oligonucleotide
ccccaugcuucagcucagc

SEQ ID NO: 1120182 - RNA, 19 nt, Artificial Sequence
  Description of Artificial Sequence: Synthetic oligonucleotide
cuagguggucugcccguuu

SEQ ID NO: 1120183 - RNA, 19 nt, Artificial Sequence
  Description of Artificial Sequence: Synthetic oligonucleotide
cagcuaccacugccucgca

SEQ ID NO: 1120184 - RNA, 19 nt, Artificial Sequence
  Description of Artificial Sequence: Synthetic oligonucleotide
gcugucgcagcugccggcu

SEQ ID NO: 1120185 - RNA, 19 nt, Artificial Sequence
  Description of Artificial Sequence: Synthetic oligonucleotide
ggcugcuauccuacccuua

SEQ ID NO: 1120186 - RNA, 19 nt, Artificial Sequence
  Description of Artificial Sequence: Synthetic oligonucleotide
ccugagccuccucaccucu

SEQ ID NO: 1120187 - RNA, 19 nt, Artificial Sequence
  Description of Artificial Sequence: Synthetic oligonucleotide
cacgccugucucucagcuu

SEQ ID NO: 1120188 - RNA, 19 nt, Artificial Sequence
  Description of Artificial Sequence: Synthetic oligonucleotide
cugagccuccucaccucuu

SEQ ID NO: 1120189 - RNA, 19 nt, Artificial Sequence
  Description of Artificial Sequence: Synthetic oligonucleotide
ccgaggcggccuuucagcu

SEQ ID NO: 1120190 - RNA, 19 nt, Artificial Sequence
  Description of Artificial Sequence: Synthetic oligonucleotide
caccgcugguccccaugcu

SEQ ID NO: 1120191 - RNA, 19 nt, Artificial Sequence
  Description of Artificial Sequence: Synthetic oligonucleotide
ccgcugcugcgccagagcu

SEQ ID NO: 1120192 - RNA, 19 nt, Artificial Sequence
  Description of Artificial Sequence: Synthetic oligonucleotide
ggcucucggccgcccucuc

SEQ ID NO: 1120193 - RNA, 19 nt, Artificial Sequence
  Description of Artificial Sequence: Synthetic oligonucleotide
acccuccgaugcaccucau

SEQ ID NO: 1120194 - RNA, 19 nt, Artificial Sequence
  Description of Artificial Sequence: Synthetic oligonucleotide
cccugugucuugggaugga

SEQ ID NO: 1120195 - RNA, 19 nt, Artificial Sequence
  Description of Artificial Sequence: Synthetic oligonucleotide
  modified_base (10)..(10): a, c, u, g, unknown or other
ggguuccaunagggugccu

SEQ ID NO: 1120196 - RNA, 19 nt, Artificial Sequence
  Description of Artificial Sequence: Synthetic oligonucleotide
ccuuuucgcguucccuguu

SEQ ID NO: 1120197 - RNA, 19 nt, Artificial Sequence
  Description of Artificial Sequence: Synthetic oligonucleotide
ccacuucucacggcggauu

SEQ ID NO: 1120198 - RNA, 19 nt, Artificial Sequence
  Description of Artificial Sequence: Synthetic oligonucleotide
cuccuggucucggccuuuu

SEQ ID NO: 1120199 - RNA, 19 nt, Artificial Sequence
  Description of Artificial Sequence: Synthetic oligonucleotide
cgcguucacgcuccugccu

SEQ ID NO: 1120200 - RNA, 19 nt, Artificial Sequence
  Description of Artificial Sequence: Synthetic oligonucleotide
cgagagccgucuucacccu

SEQ ID NO: 1120201 - RNA, 19 nt, Artificial Sequence
  Description of Artificial Sequence: Synthetic oligonucleotide
cagccucgugcaggccccu

SEQ ID NO: 1120202 - RNA, 19 nt, Artificial Sequence
  Description of Artificial Sequence: Synthetic oligonucleotide
cgcguucccuguucagcau

SEQ ID NO: 1120203 - RNA, 19 nt, Artificial Sequence
  Description of Artificial Sequence: Synthetic oligonucleotide
cggcucucggccgcccucu

SEQ ID NO: 1120204 - RNA, 19 nt, Artificial Sequence
  Description of Artificial Sequence: Synthetic oligonucleotide
cgcggcucucggccgcccu

SEQ ID NO: 1120205 - RNA, 19 nt, Artificial Sequence
  Description of Artificial Sequence: Synthetic oligonucleotide
ccuccccgaggcggccuuu

SEQ ID NO: 1120206 - RNA, 19 nt, Artificial Sequence
  Description of Artificial Sequence: Synthetic oligonucleotide
auugauacucuccacaucc

SEQ ID NO: 1120207 - RNA, 19 nt, Artificial Sequence
  Description of Artificial Sequence: Synthetic oligonucleotide
uccuauagcauucaaacag

SEQ ID NO: 1120208 - RNA, 19 nt, Artificial Sequence
  Description of Artificial Sequence: Synthetic oligonucleotide
aauagaguggguugcacac

SEQ ID NO: 1120209 - RNA, 19 nt, Artificial Sequence
  Description of Artificial Sequence: Synthetic oligonucleotide
ucuaagacggguaaaaugu

SEQ ID NO: 1120210 - RNA, 19 nt, Artificial Sequence
  Description of Artificial Sequence: Synthetic oligonucleotide
aagaauuuucugcuuggcc

SEQ ID NO: 1120211 - RNA, 19 nt, Artificial Sequence
  Description of Artificial Sequence: Synthetic oligonucleotide
caaaacuaugggaugaucg

SEQ ID NO: 1120212 - RNA, 19 nt, Artificial Sequence
  Description of Artificial Sequence: Synthetic oligonucleotide
aaaauaaucuccggggcac

SEQ ID NO: 1120213 - RNA, 19 nt, Artificial Sequence
  Description of Artificial Sequence: Synthetic oligonucleotide
uaugggaugaucgacacag

SEQ ID NO: 1120214 - RNA, 19 nt, Artificial Sequence
  Description of Artificial Sequence: Synthetic oligonucleotide
gagaaaucuagucaguagc

SEQ ID NO: 1120215 - RNA, 19 nt, Artificial Sequence
  Description of Artificial Sequence: Synthetic oligonucleotide
uacuacaucuacuucgagg

SEQ ID NO: 1120216 - RNA, 19 nt, Artificial Sequence
  Description of Artificial Sequence: Synthetic oligonucleotide
uuaaacacgggcuggacug

SEQ ID NO: 1120217 - RNA, 19 nt, Artificial Sequence
  Description of Artificial Sequence: Synthetic oligonucleotide
aaaacuaugggaugaucga

SEQ ID NO: 1120218 - RNA, 19 nt, Artificial Sequence
  Description of Artificial Sequence: Synthetic oligonucleotide
uccgacaucauuuggcggg

SEQ ID NO: 1120219 - RNA, 19 nt, Artificial Sequence
  Description of Artificial Sequence: Synthetic oligonucleotide
aaagcugcguccccucugc

SEQ ID NO: 1120220 - RNA, 19 nt, Artificial Sequence
  Description of Artificial Sequence: Synthetic oligonucleotide
acaauguuccuugagguac

SEQ ID NO: 1120221 - RNA, 19 nt, Artificial Sequence
  Description of Artificial Sequence: Synthetic oligonucleotide
ucuaggugauccaaggccc

SEQ ID NO: 1120222 - RNA, 19 nt, Artificial Sequence
  Description of Artificial Sequence: Synthetic oligonucleotide
uucuaagacggguaaaaug

SEQ ID NO: 1120223 - RNA, 19 nt, Artificial Sequence
  Description of Artificial Sequence: Synthetic oligonucleotide
cucgaaaucauugauacuc

SEQ ID NO: 1120224 - RNA, 19 nt, Artificial Sequence
  Description of Artificial Sequence: Synthetic oligonucleotide
cuggaaaauaaucuccggg

SEQ ID NO: 1120225 - RNA, 19 nt, Artificial Sequence
  Description of Artificial Sequence: Synthetic oligonucleotide
gacuaucuaucccauaggc

SEQ ID NO: 1120226 - RNA, 19 nt, Artificial Sequence
  Description of Artificial Sequence: Synthetic oligonucleotide
aaacuaugggaugaucgac

SEQ ID NO: 1120227 - RNA, 19 nt, Artificial Sequence
  Description of Artificial Sequence: Synthetic oligonucleotide
uacgcugccaaguuaaaca

SEQ ID NO: 1120228 - RNA, 19 nt, Artificial Sequence
  Description of Artificial Sequence: Synthetic oligonucleotide
uccacuucuagucuccacc

SEQ ID NO: 1120229 - RNA, 19 nt, Artificial Sequence
  Description of Artificial Sequence: Synthetic oligonucleotide
uccuaugagagacggcugg

SEQ ID NO: 1120230 - RNA, 19 nt, Artificial Sequence
  Description of Artificial Sequence: Synthetic oligonucleotide
aaaucuagucaguagccaa

SEQ ID NO: 1120231 - RNA, 19 nt, Artificial Sequence
  Description of Artificial Sequence: Synthetic oligonucleotide
ucuacuacaucuacuucga

SEQ ID NO: 1120232 - RNA, 19 nt, Artificial Sequence
  Description of Artificial Sequence: Synthetic oligonucleotide
uuuggcgggaauagagugg

SEQ ID NO: 1120233 - RNA, 19 nt, Artificial Sequence
  Description of Artificial Sequence: Synthetic oligonucleotide
uagccuuccuucuaagacg

SEQ ID NO: 1120234 - RNA, 19 nt, Artificial Sequence
  Description of Artificial Sequence: Synthetic oligonucleotide
uagaguggguugcacacgg

SEQ ID NO: 1120235 - RNA, 19 nt, Artificial Sequence
  Description of Artificial Sequence: Synthetic oligonucleotide
gaugaaaugaugaggccgc

SEQ ID NO: 1120236 - RNA, 19 nt, Artificial Sequence
  Description of Artificial Sequence: Synthetic oligonucleotide
ugcuccucuccuaugagag

SEQ ID NO: 1120237 - RNA, 19 nt, Artificial Sequence
  Description of Artificial Sequence: Synthetic oligonucleotide
caggacguaaugaagaguc

SEQ ID NO: 1120238 - RNA, 19 nt, Artificial Sequence
  Description of Artificial Sequence: Synthetic oligonucleotide
ugguauuccaugccagagg

SEQ ID NO: 1120239 - RNA, 19 nt, Artificial Sequence
  Description of Artificial Sequence: Synthetic oligonucleotide
auaguaaucagggcaccgc

SEQ ID NO: 1120240 - RNA, 19 nt, Artificial Sequence
  Description of Artificial Sequence: Synthetic oligonucleotide
uuugaggcaagcugaaccu

SEQ ID NO: 1120241 - RNA, 19 nt, Artificial Sequence
  Description of Artificial Sequence: Synthetic oligonucleotide
cuaucuaucccauaggcaa

SEQ ID NO: 1120242 - RNA, 19 nt, Artificial Sequence
  Description of Artificial Sequence: Synthetic oligonucleotide
cuggccauccucuaggagc

SEQ ID NO: 1120243 - RNA, 19 nt, Artificial Sequence
  Description of Artificial Sequence: Synthetic oligonucleotide
ucuccuaugagagacggcu

SEQ ID NO: 1120244 - RNA, 19 nt, Artificial Sequence
  Description of Artificial Sequence: Synthetic oligonucleotide
ugauacgcugccaaguuaa

SEQ ID NO: 1120245 - RNA, 19 nt, Artificial Sequence
  Description of Artificial Sequence: Synthetic oligonucleotide
agauugaugcguuugcagu

SEQ ID NO: 1120246 - RNA, 19 nt, Artificial Sequence
  Description of Artificial Sequence: Synthetic oligonucleotide
gagauugaugcguuugcag

SEQ ID NO: 1120247 - RNA, 19 nt, Artificial Sequence
  Description of Artificial Sequence: Synthetic oligonucleotide
cugaagagacuaucuaucc

SEQ ID NO: 1120248 - RNA, 19 nt, Artificial Sequence
  Description of Artificial Sequence: Synthetic oligonucleotide
caaacagcugaugauacgc

SEQ ID NO: 1120249 - RNA, 19 nt, Artificial Sequence
  Description of Artificial Sequence: Synthetic oligonucleotide
aacagcugaugauacgcug

SEQ ID NO: 1120250 - RNA, 19 nt, Artificial Sequence
  Description of Artificial Sequence: Synthetic oligonucleotide
aucgacacagcccugcgag

SEQ ID NO: 1120251 - RNA, 19 nt, Artificial Sequence
  Description of Artificial Sequence: Synthetic oligonucleotide
auuuggcgggaauagagug

SEQ ID NO: 1120252 - RNA, 19 nt, Artificial Sequence
  Description of Artificial Sequence: Synthetic oligonucleotide
acggcuggaaaauaaucuc

SEQ ID NO: 1120253 - RNA, 19 nt, Artificial Sequence
  Description of Artificial Sequence: Synthetic oligonucleotide
auguguguacacugguagc

SEQ ID NO: 1120254 - RNA, 19 nt, Artificial Sequence
  Description of Artificial Sequence: Synthetic oligonucleotide
ugggaugaucgacacagcc

SEQ ID NO: 1120255 - RNA, 19 nt, Artificial Sequence
  Description of Artificial Sequence: Synthetic oligonucleotide
uucugucccaacaaacagc

SEQ ID NO: 1120256 - RNA, 19 nt, Artificial Sequence
  Description of Artificial Sequence: Synthetic oligonucleotide
uucaugcccggauacauca

SEQ ID NO: 1120257 - RNA, 19 nt, Artificial Sequence
  Description of Artificial Sequence: Synthetic oligonucleotide
acugaaagggccucaucuc

SEQ ID NO: 1120258 - RNA, 19 nt, Artificial Sequence
  Description of Artificial Sequence: Synthetic oligonucleotide
cauguucagcucuaugagg

SEQ ID NO: 1120259 - RNA, 19 nt, Artificial Sequence
  Description of Artificial Sequence: Synthetic oligonucleotide
uccgcuugaagaauuuucu

SEQ ID NO: 1120260 - RNA, 19 nt, Artificial Sequence
  Description of Artificial Sequence: Synthetic oligonucleotide
uguguguacacugguagcc

SEQ ID NO: 1120261 - RNA, 19 nt, Artificial Sequence
  Description of Artificial Sequence: Synthetic oligonucleotide
cuagccuuccuucuaagac

SEQ ID NO: 1120262 - RNA, 19 nt, Artificial Sequence
  Description of Artificial Sequence: Synthetic oligonucleotide
uaguccuccgcaauguagc

SEQ ID NO: 1120263 - RNA, 19 nt, Artificial Sequence
  Description of Artificial Sequence: Synthetic oligonucleotide
uaagacggguaaaaugugu

SEQ ID NO: 1120264 - RNA, 19 nt, Artificial Sequence
  Description of Artificial Sequence: Synthetic oligonucleotide
uaguaaucagggcaccgcc

SEQ ID NO: 1120265 - RNA, 19 nt, Artificial Sequence
  Description of Artificial Sequence: Synthetic oligonucleotide
uggguaccuguccaggacg

SEQ ID NO: 1120266 - RNA, 19 nt, Artificial Sequence
  Description of Artificial Sequence: Synthetic oligonucleotide
acaaacagcugaugauacg

SEQ ID NO: 1120267 - RNA, 19 nt, Artificial Sequence
  Description of Artificial Sequence: Synthetic oligonucleotide
acgcugccaaguuaaacac

SEQ ID NO: 1120268 - RNA, 19 nt, Artificial Sequence
  Description of Artificial Sequence: Synthetic oligonucleotide
agacuaucuaucccauagg

SEQ ID NO: 1120269 - RNA, 19 nt, Artificial Sequence
  Description of Artificial Sequence: Synthetic oligonucleotide
uagccggaugaaaugauga

SEQ ID NO: 1120270 - RNA, 19 nt, Artificial Sequence
  Description of Artificial Sequence: Synthetic oligonucleotide
ucauugauacucuccacau

SEQ ID NO: 1120271 - RNA, 19 nt, Artificial Sequence
  Description of Artificial Sequence: Synthetic oligonucleotide
uguuggaggcacaauguuc

SEQ ID NO: 1120272 - RNA, 19 nt, Artificial Sequence
  Description of Artificial Sequence: Synthetic oligonucleotide
ucgaaaucauugauacucu

SEQ ID NO: 1120273 - RNA, 19 nt, Artificial Sequence
  Description of Artificial Sequence: Synthetic oligonucleotide
gagcuuguuagagaauggg

SEQ ID NO: 1120274 - RNA, 19 nt, Artificial Sequence
  Description of Artificial Sequence: Synthetic oligonucleotide
aucuccggggcacgaaucc

SEQ ID NO: 1120275 - RNA, 19 nt, Artificial Sequence
  Description of Artificial Sequence: Synthetic oligonucleotide
gguauuccaugccagaggc

SEQ ID NO: 1120276 - RNA, 19 nt, Artificial Sequence
  Description of Artificial Sequence: Synthetic oligonucleotide
uccaggacguaaugaagag

SEQ ID NO: 1120277 - RNA, 19 nt, Artificial Sequence
  Description of Artificial Sequence: Synthetic oligonucleotide
acagcugaugauacgcugc

SEQ ID NO: 1120278 - RNA, 19 nt, Artificial Sequence
  Description of Artificial Sequence: Synthetic oligonucleotide
aucuaucccauaggcaacc

SEQ ID NO: 1120279 - RNA, 19 nt, Artificial Sequence
  Description of Artificial Sequence: Synthetic oligonucleotide
aagacggguaaaaugugug

SEQ ID NO: 1120280 - RNA, 19 nt, Artificial Sequence
  Description of Artificial Sequence: Synthetic oligonucleotide
cacgaauccuuucuguccc

SEQ ID NO: 1120281 - RNA, 19 nt, Artificial Sequence
  Description of Artificial Sequence: Synthetic oligonucleotide
cuugagcuggagaagccgc

SEQ ID NO: 1120282 - RNA, 19 nt, Artificial Sequence
  Description of Artificial Sequence: Synthetic oligonucleotide
ucacgagcgccauaccagg

SEQ ID NO: 1120283 - RNA, 19 nt, Artificial Sequence
  Description of Artificial Sequence: Synthetic oligonucleotide
ggaaaauaaucuccggggc

SEQ ID NO: 1120284 - RNA, 19 nt, Artificial Sequence
  Description of Artificial Sequence: Synthetic oligonucleotide
agccuuuggguaccugucc

SEQ ID NO: 1120285 - RNA, 19 nt, Artificial Sequence
  Description of Artificial Sequence: Synthetic oligonucleotide
uccuccgcaauguagcugu

SEQ ID NO: 1120286 - RNA, 19 nt, Artificial Sequence
  Description of Artificial Sequence: Synthetic oligonucleotide
gaauagaguggguugcaca

SEQ ID NO: 1120287 - RNA, 19 nt, Artificial Sequence
  Description of Artificial Sequence: Synthetic oligonucleotide
uaugagagacggcuggaaa

SEQ ID NO: 1120288 - RNA, 19 nt, Artificial Sequence
  Description of Artificial Sequence: Synthetic oligonucleotide
caagggcucgaaaucauug

SEQ ID NO: 1120289 - RNA, 19 nt, Artificial Sequence
  Description of Artificial Sequence: Synthetic oligonucleotide
aggcagaucaccugcuguc

SEQ ID NO: 1120290 - RNA, 19 nt, Artificial Sequence
  Description of Artificial Sequence: Synthetic oligonucleotide
uuccgcuugaagaauuuuc

SEQ ID NO: 1120291 - RNA, 19 nt, Artificial Sequence
  Description of Artificial Sequence: Synthetic oligonucleotide
ggcucgaaaucauugauac

SEQ ID NO: 1120292 - RNA, 19 nt, Artificial Sequence
  Description of Artificial Sequence: Synthetic oligonucleotide
agcuccgacaucauuuggc

SEQ ID NO: 1120293 - RNA, 19 nt, Artificial Sequence
  Description of Artificial Sequence: Synthetic oligonucleotide
aacuaugggaugaucgaca

SEQ ID NO: 1120294 - RNA, 19 nt, Artificial Sequence
  Description of Artificial Sequence: Synthetic oligonucleotide
augaucgacacagcccugc

SEQ ID NO: 1120295 - RNA, 19 nt, Artificial Sequence
  Description of Artificial Sequence: Synthetic oligonucleotide
ggauacaucacguucccac

SEQ ID NO: 1120296 - RNA, 19 nt, Artificial Sequence
  Description of Artificial Sequence: Synthetic oligonucleotide
uacaucacguucccaccag

SEQ ID NO: 1120297 - RNA, 19 nt, Artificial Sequence
  Description of Artificial Sequence: Synthetic oligonucleotide
caaguuaaacacgggcugg

SEQ ID NO: 1120298 - RNA, 19 nt, Artificial Sequence
  Description of Artificial Sequence: Synthetic oligonucleotide
cugcacauagagcagccgc

SEQ ID NO: 1120299 - RNA, 19 nt, Artificial Sequence
  Description of Artificial Sequence: Synthetic oligonucleotide
ugaucgacacagcccugcg

SEQ ID NO: 1120300 - RNA, 19 nt, Artificial Sequence
  Description of Artificial Sequence: Synthetic oligonucleotide
ccggaugaaaugaugaggc

SEQ ID NO: 1120301 - RNA, 19 nt, Artificial Sequence
  Description of Artificial Sequence: Synthetic oligonucleotide
uaucuaucccauaggcaac

SEQ ID NO: 1120302 - RNA, 19 nt, Artificial Sequence
  Description of Artificial Sequence: Synthetic oligonucleotide
agcgccauaccaggcaucc

SEQ ID NO: 1120303 - RNA, 19 nt, Artificial Sequence
  Description of Artificial Sequence: Synthetic oligonucleotide
uggauacuugagcuggaga

SEQ ID NO: 1120304 - RNA, 19 nt, Artificial Sequence
  Description of Artificial Sequence: Synthetic oligonucleotide
ccaggagaaaucuagucag

SEQ ID NO: 1120305 - RNA, 19 nt, Artificial Sequence
  Description of Artificial Sequence: Synthetic oligonucleotide
acgugaggccugcuuaggc

SEQ ID NO: 1120306 - RNA, 19 nt, Artificial Sequence
  Description of Artificial Sequence: Synthetic oligonucleotide
aucuagucaguagccaaac

SEQ ID NO: 1120307 - RNA, 19 nt, Artificial Sequence
  Description of Artificial Sequence: Synthetic oligonucleotide
ugcaauucugccccauagu

SEQ ID NO: 1120308 - RNA, 19 nt, Artificial Sequence
  Description of Artificial Sequence: Synthetic oligonucleotide
cuucuagucuccaccaguc

SEQ ID NO: 1120309 - RNA, 19 nt, Artificial Sequence
  Description of Artificial Sequence: Synthetic oligonucleotide
cuaagacggguaaaaugug

SEQ ID NO: 1120310 - RNA, 19 nt, Artificial Sequence
  Description of Artificial Sequence: Synthetic oligonucleotide
ugaugauacgcugccaagu

SEQ ID NO: 1120311 - RNA, 19 nt, Artificial Sequence
  Description of Artificial Sequence: Synthetic oligonucleotide
caaggcccagucacgagcg

SEQ ID NO: 1120312 - RNA, 19 nt, Artificial Sequence
  Description of Artificial Sequence: Synthetic oligonucleotide
ucuagucaguagccaaaca

SEQ ID NO: 1120313 - RNA, 19 nt, Artificial Sequence
  Description of Artificial Sequence: Synthetic oligonucleotide
ccuauagcauucaaacagg

SEQ ID NO: 1120314 - RNA, 19 nt, Artificial Sequence
  Description of Artificial Sequence: Synthetic oligonucleotide
auccuauagcauucaaaca

SEQ ID NO: 1120315 - RNA, 19 nt, Artificial Sequence
  Description of Artificial Sequence: Synthetic oligonucleotide
gcugccaaguuaaacacgg

SEQ ID NO: 1120316 - RNA, 19 nt, Artificial Sequence
  Description of Artificial Sequence: Synthetic oligonucleotide
cauaguaaucagggcaccg

SEQ ID NO: 1120317 - RNA, 19 nt, Artificial Sequence
  Description of Artificial Sequence: Synthetic oligonucleotide
ucuagccuuccuucuaaga

SEQ ID NO: 1120318 - RNA, 19 nt, Artificial Sequence
  Description of Artificial Sequence: Synthetic oligonucleotide
caugcccggauacaucacg

SEQ ID NO: 1120319 - RNA, 19 nt, Artificial Sequence
  Description of Artificial Sequence: Synthetic oligonucleotide
aaacaggagcuccgacauc

SEQ ID NO: 1120320 - RNA, 19 nt, Artificial Sequence
  Description of Artificial Sequence: Synthetic oligonucleotide
guuagagaaugggagcugc

SEQ ID NO: 1120321 - RNA, 19 nt, Artificial Sequence
  Description of Artificial Sequence: Synthetic oligonucleotide
uggauauaggacugcaguu

SEQ ID NO: 1120322 - RNA, 19 nt, Artificial Sequence
  Description of Artificial Sequence: Synthetic oligonucleotide
gauauaggacugcaguucu

SEQ ID NO: 1120323 - RNA, 19 nt, Artificial Sequence
  Description of Artificial Sequence: Synthetic oligonucleotide
caucauuuggcgggaauag

SEQ ID NO: 1120324 - RNA, 19 nt, Artificial Sequence
  Description of Artificial Sequence: Synthetic oligonucleotide
uguugugauagaagcugaa

SEQ ID NO: 1120325 - RNA, 19 nt, Artificial Sequence
  Description of Artificial Sequence: Synthetic oligonucleotide
auacaucacguucccacca

SEQ ID NO: 1120326 - RNA, 19 nt, Artificial Sequence
  Description of Artificial Sequence: Synthetic oligonucleotide
acgcccaggugcuggaagc

SEQ ID NO: 1120327 - RNA, 19 nt, Artificial Sequence
  Description of Artificial Sequence: Synthetic oligonucleotide
cucuaugagggcuuuguga

SEQ ID NO: 1120328 - RNA, 19 nt, Artificial Sequence
  Description of Artificial Sequence: Synthetic oligonucleotide
cuugggcauguugugauag

SEQ ID NO: 1120329 - RNA, 19 nt, Artificial Sequence
  Description of Artificial Sequence: Synthetic oligonucleotide
agccggaugaaaugaugag

SEQ ID NO: 1120330 - RNA, 19 nt, Artificial Sequence
  Description of Artificial Sequence: Synthetic oligonucleotide
ggcuucuccacuucaggcg

SEQ ID NO: 1120331 - RNA, 19 nt, Artificial Sequence
  Description of Artificial Sequence: Synthetic oligonucleotide
gaaaucuagucaguagcca

SEQ ID NO: 1120332 - RNA, 19 nt, Artificial Sequence
  Description of Artificial Sequence: Synthetic oligonucleotide
gggacguagguguuggagg

SEQ ID NO: 1120333 - RNA, 19 nt, Artificial Sequence
  Description of Artificial Sequence: Synthetic oligonucleotide
guaaucagggcaccgccac

SEQ ID NO: 1120334 - RNA, 19 nt, Artificial Sequence
  Description of Artificial Sequence: Synthetic oligonucleotide
uccgagauugaugcguuug

SEQ ID NO: 1120335 - RNA, 19 nt, Artificial Sequence
  Description of Artificial Sequence: Synthetic oligonucleotide
auacgcugccaaguuaaac

SEQ ID NO: 1120336 - RNA, 19 nt, Artificial Sequence
  Description of Artificial Sequence: Synthetic oligonucleotide
gaaugggagcugcaucuug

SEQ ID NO: 1120337 - RNA, 19 nt, Artificial Sequence
  Description of Artificial Sequence: Synthetic oligonucleotide
guaggaucuccuccaugcg

SEQ ID NO: 1120338 - RNA, 19 nt, Artificial Sequence
  Description of Artificial Sequence: Synthetic oligonucleotide
cucugucaaaacuauggga

SEQ ID NO: 1120339 - RNA, 19 nt, Artificial Sequence
  Description of Artificial Sequence: Synthetic oligonucleotide
agacggguaaaaugugugu

SEQ ID NO: 1120340 - RNA, 19 nt, Artificial Sequence
  Description of Artificial Sequence: Synthetic oligonucleotide
gagaacaagggcucgaaau

SEQ ID NO: 1120341 - RNA, 19 nt, Artificial Sequence
  Description of Artificial Sequence: Synthetic oligonucleotide
uuccuucuaagacggguaa

SEQ ID NO: 1120342 - RNA, 19 nt, Artificial Sequence
  Description of Artificial Sequence: Synthetic oligonucleotide
aaguuaaacacgggcugga

SEQ ID NO: 1120343 - RNA, 19 nt, Artificial Sequence
  Description of Artificial Sequence: Synthetic oligonucleotide
aguuaaacacgggcuggac

SEQ ID NO: 1120344 - RNA, 19 nt, Artificial Sequence
  Description of Artificial Sequence: Synthetic oligonucleotide
ucaccugcuguccucugcu

SEQ ID NO: 1120345 - RNA, 19 nt, Artificial Sequence
  Description of Artificial Sequence: Synthetic oligonucleotide
uccucuccuaugagagacg

SEQ ID NO: 1120346 - RNA, 19 nt, Artificial Sequence
  Description of Artificial Sequence: Synthetic oligonucleotide
ugaacagccuuuggguacc

SEQ ID NO: 1120347 - RNA, 19 nt, Artificial Sequence
  Description of Artificial Sequence: Synthetic oligonucleotide
cugaugauacgcugccaag

SEQ ID NO: 1120348 - RNA, 19 nt, Artificial Sequence
  Description of Artificial Sequence: Synthetic oligonucleotide
aaucuagucaguagccaaa

SEQ ID NO: 1120349 - RNA, 19 nt, Artificial Sequence
  Description of Artificial Sequence: Synthetic oligonucleotide
aauaaucuccggggcacga

SEQ ID NO: 1120350 - RNA, 19 nt, Artificial Sequence
  Description of Artificial Sequence: Synthetic oligonucleotide
agacggcuggaaaauaauc

SEQ ID NO: 1120351 - RNA, 19 nt, Artificial Sequence
  Description of Artificial Sequence: Synthetic oligonucleotide
uggggauccuauagcauuc

SEQ ID NO: 1120352 - RNA, 19 nt, Artificial Sequence
  Description of Artificial Sequence: Synthetic oligonucleotide
uguuagagaaugggagcug

SEQ ID NO: 1120353 - RNA, 19 nt, Artificial Sequence
  Description of Artificial Sequence: Synthetic oligonucleotide
uccuugagguacucgcccc

SEQ ID NO: 1120354 - RNA, 19 nt, Artificial Sequence
  Description of Artificial Sequence: Synthetic oligonucleotide
cacguucccaccagugagg

SEQ ID NO: 1120355 - RNA, 19 nt, Artificial Sequence
  Description of Artificial Sequence: Synthetic oligonucleotide
aaacagcugaugauacgcu

SEQ ID NO: 1120356 - RNA, 19 nt, Artificial Sequence
  Description of Artificial Sequence: Synthetic oligonucleotide
uggagaagccgcugcaggu

SEQ ID NO: 1120357 - RNA, 19 nt, Artificial Sequence
  Description of Artificial Sequence: Synthetic oligonucleotide
ugguagccggaugaaauga

SEQ ID NO: 1120358 - RNA, 19 nt, Artificial Sequence
  Description of Artificial Sequence: Synthetic oligonucleotide
acuaucuaucccauaggca

SEQ ID NO: 1120359 - RNA, 19 nt, Artificial Sequence
  Description of Artificial Sequence: Synthetic oligonucleotide
uucuagucuccaccagucu

SEQ ID NO: 1120360 - RNA, 19 nt, Artificial Sequence
  Description of Artificial Sequence: Synthetic oligonucleotide
cugguagccggaugaaaug

SEQ ID NO: 1120361 - RNA, 19 nt, Artificial Sequence
  Description of Artificial Sequence: Synthetic oligonucleotide
ugagagacggcuggaaaau

SEQ ID NO: 1120362 - RNA, 19 nt, Artificial Sequence
  Description of Artificial Sequence: Synthetic oligonucleotide
caucacguucccaccagug

SEQ ID NO: 1120363 - RNA, 19 nt, Artificial Sequence
  Description of Artificial Sequence: Synthetic oligonucleotide
gugguauuccaugccagag

SEQ ID NO: 1120364 - RNA, 19 nt, Artificial Sequence
  Description of Artificial Sequence: Synthetic oligonucleotide
gucacgagcgccauaccag

SEQ ID NO: 1120365 - RNA, 19 nt, Artificial Sequence
  Description of Artificial Sequence: Synthetic oligonucleotide
gugauagaagcugaagaga

SEQ ID NO: 1120366 - RNA, 19 nt, Artificial Sequence
  Description of Artificial Sequence: Synthetic oligonucleotide
gcaauucugccccauaguc

SEQ ID NO: 1120367 - RNA, 19 nt, Artificial Sequence
  Description of Artificial Sequence: Synthetic oligonucleotide
ucaaaacuaugggaugauc

SEQ ID NO: 1120368 - RNA, 19 nt, Artificial Sequence
  Description of Artificial Sequence: Synthetic oligonucleotide
uggcaucuagccuuccuuc

SEQ ID NO: 1120369 - RNA, 19 nt, Artificial Sequence
  Description of Artificial Sequence: Synthetic oligonucleotide
ccaggcauccagcacaggg

SEQ ID NO: 1120370 - RNA, 19 nt, Artificial Sequence
  Description of Artificial Sequence: Synthetic oligonucleotide
augcggcugagggugaugg

SEQ ID NO: 1120371 - RNA, 19 nt, Artificial Sequence
  Description of Artificial Sequence: Synthetic oligonucleotide
ggacguagguguuggaggc

SEQ ID NO: 1120372 - RNA, 19 nt, Artificial Sequence
  Description of Artificial Sequence: Synthetic oligonucleotide
cuccaugcggcugagggug

SEQ ID NO: 1120373 - RNA, 19 nt, Artificial Sequence
  Description of Artificial Sequence: Synthetic oligonucleotide
cuccgacaucauuuggcgg

SEQ ID NO: 1120374 - RNA, 19 nt, Artificial Sequence
  Description of Artificial Sequence: Synthetic oligonucleotide
acguaaugaagagucucug

SEQ ID NO: 1120375 - RNA, 19 nt, Artificial Sequence
  Description of Artificial Sequence: Synthetic oligonucleotide
cuggcuugcugucuacuac

SEQ ID NO: 1120376 - RNA, 19 nt, Artificial Sequence
  Description of Artificial Sequence: Synthetic oligonucleotide
cacauagagcagccgcucc

SEQ ID NO: 1120377 - RNA, 19 nt, Artificial Sequence
  Description of Artificial Sequence: Synthetic oligonucleotide
aucuagccuuccuucuaag

SEQ ID NO: 1120378 - RNA, 19 nt, Artificial Sequence
  Description of Artificial Sequence: Synthetic oligonucleotide
cauugauacucuccacauc

SEQ ID NO: 1120379 - RNA, 19 nt, Artificial Sequence
  Description of Artificial Sequence: Synthetic oligonucleotide
gacggcuggaaaauaaucu

SEQ ID NO: 1120380 - RNA, 19 nt, Artificial Sequence
  Description of Artificial Sequence: Synthetic oligonucleotide
gaagucgucgcagcugcug

SEQ ID NO: 1120381 - RNA, 19 nt, Artificial Sequence
  Description of Artificial Sequence: Synthetic oligonucleotide
agcuuguuagagaauggga

SEQ ID NO: 1120382 - RNA, 19 nt, Artificial Sequence
  Description of Artificial Sequence: Synthetic oligonucleotide
cuucucucacugcugagga

SEQ ID NO: 1120383 - RNA, 19 nt, Artificial Sequence
  Description of Artificial Sequence: Synthetic oligonucleotide
gcacgaauccuuucugucc

SEQ ID NO: 1120384 - RNA, 19 nt, Artificial Sequence
  Description of Artificial Sequence: Synthetic oligonucleotide
aaucagggcaccgccacuu

SEQ ID NO: 1120385 - RNA, 19 nt, Artificial Sequence
  Description of Artificial Sequence: Synthetic oligonucleotide
caccagucuucucucacug

SEQ ID NO: 1120386 - RNA, 19 nt, Artificial Sequence
  Description of Artificial Sequence: Synthetic oligonucleotide
aaagggcauucuugggcau

SEQ ID NO: 1120387 - RNA, 19 nt, Artificial Sequence
  Description of Artificial Sequence: Synthetic oligonucleotide
uucagcucuaugagggcuu

SEQ ID NO: 1120388 - RNA, 19 nt, Artificial Sequence
  Description of Artificial Sequence: Synthetic oligonucleotide
gacgcccaggugcuggaag

SEQ ID NO: 1120389 - RNA, 19 nt, Artificial Sequence
  Description of Artificial Sequence: Synthetic oligonucleotide
ugcuaggccuguucaccag

SEQ ID NO: 1120390 - RNA, 19 nt, Artificial Sequence
  Description of Artificial Sequence: Synthetic oligonucleotide
gccggaugaaaugaugagg

SEQ ID NO: 1120391 - RNA, 19 nt, Artificial Sequence
  Description of Artificial Sequence: Synthetic oligonucleotide
gaaagcagugccacagcuc

SEQ ID NO: 1120392 - RNA, 19 nt, Artificial Sequence
  Description of Artificial Sequence: Synthetic oligonucleotide
guauccugaacagccuuug

SEQ ID NO: 1120393 - RNA, 19 nt, Artificial Sequence
  Description of Artificial Sequence: Synthetic oligonucleotide
aagggcauucuugggcaug

SEQ ID NO: 1120394 - RNA, 19 nt, Artificial Sequence
  Description of Artificial Sequence: Synthetic oligonucleotide
cccggauacaucacguucc

SEQ ID NO: 1120395 - RNA, 19 nt, Artificial Sequence
  Description of Artificial Sequence: Synthetic oligonucleotide
ggaugaucgacacagcccu

SEQ ID NO: 1120396 - RNA, 19 nt, Artificial Sequence
  Description of Artificial Sequence: Synthetic oligonucleotide
ucuuguggacauuguucuc

SEQ ID NO: 1120397 - RNA, 19 nt, Artificial Sequence
  Description of Artificial Sequence: Synthetic oligonucleotide
cugccaaguuaaacacggg

SEQ ID NO: 1120398 - RNA, 19 nt, Artificial Sequence
  Description of Artificial Sequence: Synthetic oligonucleotide
cuucaugcccggauacauc

SEQ ID NO: 1120399 - RNA, 19 nt, Artificial Sequence
  Description of Artificial Sequence: Synthetic oligonucleotide
agagucucugcaaucccug

SEQ ID NO: 1120400 - RNA, 19 nt, Artificial Sequence
  Description of Artificial Sequence: Synthetic oligonucleotide
guuaaacacgggcuggacu

SEQ ID NO: 1120401 - RNA, 19 nt, Artificial Sequence
  Description of Artificial Sequence: Synthetic oligonucleotide
guagccggaugaaaugaug

SEQ ID NO: 1120402 - RNA, 19 nt, Artificial Sequence
  Description of Artificial Sequence: Synthetic oligonucleotide
acgagcgccauaccaggca

SEQ ID NO: 1120403 - RNA, 19 nt, Artificial Sequence
  Description of Artificial Sequence: Synthetic oligonucleotide
acaucauuuggcgggaaua

SEQ ID NO: 1120404 - RNA, 19 nt, Artificial Sequence
  Description of Artificial Sequence: Synthetic oligonucleotide
ucgagguuggcuuccgcuu

SEQ ID NO: 1120405 - RNA, 19 nt, Artificial Sequence
  Description of Artificial Sequence: Synthetic oligonucleotide
caacaaacagcugaugaua

SEQ ID NO: 1120406 - RNA, 19 nt, Artificial Sequence
  Description of Artificial Sequence: Synthetic oligonucleotide
gaugauacgcugccaaguu

SEQ ID NO: 1120407 - RNA, 19 nt, Artificial Sequence
  Description of Artificial Sequence: Synthetic oligonucleotide
ccaaacaaagcugcguccc

SEQ ID NO: 1120408 - RNA, 19 nt, Artificial Sequence
  Description of Artificial Sequence: Synthetic oligonucleotide
ugaggccgcuggaaagggc

SEQ ID NO: 1120409 - RNA, 19 nt, Artificial Sequence
  Description of Artificial Sequence: Synthetic oligonucleotide
cuccuaugagagacggcug

SEQ ID NO: 1120410 - RNA, 19 nt, Artificial Sequence
  Description of Artificial Sequence: Synthetic oligonucleotide
ggagcuuguuagagaaugg

SEQ ID NO: 1120411 - RNA, 19 nt, Artificial Sequence
  Description of Artificial Sequence: Synthetic oligonucleotide
gacguaaugaagagucucu

SEQ ID NO: 1120412 - RNA, 19 nt, Artificial Sequence
  Description of Artificial Sequence: Synthetic oligonucleotide
auguugugauagaagcuga

SEQ ID NO: 1120413 - RNA, 19 nt, Artificial Sequence
  Description of Artificial Sequence: Synthetic oligonucleotide
uacuucgagguuggcuucc

SEQ ID NO: 1120414 - RNA, 19 nt, Artificial Sequence
  Description of Artificial Sequence: Synthetic oligonucleotide
augauacgcugccaaguua

SEQ ID NO: 1120415 - RNA, 19 nt, Artificial Sequence
  Description of Artificial Sequence: Synthetic oligonucleotide
agagacggcuggaaaauaa

SEQ ID NO: 1120416 - RNA, 19 nt, Artificial Sequence
  Description of Artificial Sequence: Synthetic oligonucleotide
gggaugaucgacacagccc

SEQ ID NO: 1120417 - RNA, 19 nt, Artificial Sequence
  Description of Artificial Sequence: Synthetic oligonucleotide
aucagggcaccgccacuuc

SEQ ID NO: 1120418 - RNA, 19 nt, Artificial Sequence
  Description of Artificial Sequence: Synthetic oligonucleotide
aguaaucagggcaccgcca

SEQ ID NO: 1120419 - RNA, 19 nt, Artificial Sequence
  Description of Artificial Sequence: Synthetic oligonucleotide
cguaaugaagagucucugc

SEQ ID NO: 1120420 - RNA, 19 nt, Artificial Sequence
  Description of Artificial Sequence: Synthetic oligonucleotide
cacuucuagucuccaccag

SEQ ID NO: 1120421 - RNA, 19 nt, Artificial Sequence
  Description of Artificial Sequence: Synthetic oligonucleotide
aucauuuggcgggaauaga

SEQ ID NO: 1120422 - RNA, 19 nt, Artificial Sequence
  Description of Artificial Sequence: Synthetic oligonucleotide
gugcuggaagcuguagucc

SEQ ID NO: 1120423 - RNA, 19 nt, Artificial Sequence
  Description of Artificial Sequence: Synthetic oligonucleotide
acaucacguucccaccagu

SEQ ID NO: 1120424 - RNA, 19 nt, Artificial Sequence
  Description of Artificial Sequence: Synthetic oligonucleotide
cuacuucgagguuggcuuc

SEQ ID NO: 1120425 - RNA, 19 nt, Artificial Sequence
  Description of Artificial Sequence: Synthetic oligonucleotide
ucaugcccggauacaucac

SEQ ID NO: 1120426 - RNA, 19 nt, Artificial Sequence
  Description of Artificial Sequence: Synthetic oligonucleotide
cuggauacuugagcuggag

SEQ ID NO: 1120427 - RNA, 19 nt, Artificial Sequence
  Description of Artificial Sequence: Synthetic oligonucleotide
gcgggaauagaguggguug

SEQ ID NO: 1120428 - RNA, 19 nt, Artificial Sequence
  Description of Artificial Sequence: Synthetic oligonucleotide
cuuccacuggccccggauc

SEQ ID NO: 1120429 - RNA, 19 nt, Artificial Sequence
  Description of Artificial Sequence: Synthetic oligonucleotide
acacguucuggaccagggu

SEQ ID NO: 1120430 - RNA, 19 nt, Artificial Sequence
  Description of Artificial Sequence: Synthetic oligonucleotide
gaucgacacagcccugcga

SEQ ID NO: 1120431 - RNA, 19 nt, Artificial Sequence
  Description of Artificial Sequence: Synthetic oligonucleotide
cagccuuuggguaccuguc

SEQ ID NO: 1120432 - RNA, 19 nt, Artificial Sequence
  Description of Artificial Sequence: Synthetic oligonucleotide
ucuccauucuggccuucau

SEQ ID NO: 1120433 - RNA, 19 nt, Artificial Sequence
  Description of Artificial Sequence: Synthetic oligonucleotide
cagcccugcgaggagacgc

SEQ ID NO: 1120434 - RNA, 19 nt, Artificial Sequence
  Description of Artificial Sequence: Synthetic oligonucleotide
uguacacugguagccggau

SEQ ID NO: 1120435 - RNA, 19 nt, Artificial Sequence
  Description of Artificial Sequence: Synthetic oligonucleotide
auuccaugccagaggccac

SEQ ID NO: 1120436 - RNA, 19 nt, Artificial Sequence
  Description of Artificial Sequence: Synthetic oligonucleotide
cucuccuaugagagacggc

SEQ ID NO: 1120437 - RNA, 19 nt, Artificial Sequence
  Description of Artificial Sequence: Synthetic oligonucleotide
ggugagcuucuggauauag

SEQ ID NO: 1120438 - RNA, 19 nt, Artificial Sequence
  Description of Artificial Sequence: Synthetic oligonucleotide
gcugaugauacgcugccaa

SEQ ID NO: 1120439 - RNA, 19 nt, Artificial Sequence
  Description of Artificial Sequence: Synthetic oligonucleotide
ggcacgaauccuuucuguc

SEQ ID NO: 1120440 - RNA, 19 nt, Artificial Sequence
  Description of Artificial Sequence: Synthetic oligonucleotide
gauagaagcugaagagacu

SEQ ID NO: 1120441 - RNA, 19 nt, Artificial Sequence
  Description of Artificial Sequence: Synthetic oligonucleotide
cagaucaccugcuguccuc

SEQ ID NO: 1120442 - RNA, 19 nt, Artificial Sequence
  Description of Artificial Sequence: Synthetic oligonucleotide
agcucgcccgugguauucc

SEQ ID NO: 1120443 - RNA, 19 nt, Artificial Sequence
  Description of Artificial Sequence: Synthetic oligonucleotide
ggacguaaugaagagucuc

SEQ ID NO: 1120444 - RNA, 19 nt, Artificial Sequence
  Description of Artificial Sequence: Synthetic oligonucleotide
acuucgagguuggcuuccg

SEQ ID NO: 1120445 - RNA, 19 nt, Artificial Sequence
  Description of Artificial Sequence: Synthetic oligonucleotide
cacgagcgccauaccaggc

SEQ ID NO: 1120446 - RNA, 19 nt, Artificial Sequence
  Description of Artificial Sequence: Synthetic oligonucleotide
cacguucuggaccagggua

SEQ ID NO: 1120447 - RNA, 19 nt, Artificial Sequence
  Description of Artificial Sequence: Synthetic oligonucleotide
uucucucacugcugaggaa

SEQ ID NO: 1120448 - RNA, 19 nt, Artificial Sequence
  Description of Artificial Sequence: Synthetic oligonucleotide
acacggccucugucaaaac

SEQ ID NO: 1120449 - RNA, 19 nt, Artificial Sequence
  Description of Artificial Sequence: Synthetic oligonucleotide
gaggcagaucaccugcugu

SEQ ID NO: 1120450 - RNA, 19 nt, Artificial Sequence
  Description of Artificial Sequence: Synthetic oligonucleotide
agccgucagugugcuaccc

SEQ ID NO: 1120451 - RNA, 19 nt, Artificial Sequence
  Description of Artificial Sequence: Synthetic oligonucleotide
ugaagucgucgcagcugcu

SEQ ID NO: 1120452 - RNA, 19 nt, Artificial Sequence
  Description of Artificial Sequence: Synthetic oligonucleotide
gaugaucgacacagcccug

SEQ ID NO: 1120453 - RNA, 19 nt, Artificial Sequence
  Description of Artificial Sequence: Synthetic oligonucleotide
ugaggcacgugaggccugc

SEQ ID NO: 1120454 - RNA, 19 nt, Artificial Sequence
  Description of Artificial Sequence: Synthetic oligonucleotide
cauuuggcgggaauagagu

SEQ ID NO: 1120455 - RNA, 19 nt, Artificial Sequence
  Description of Artificial Sequence: Synthetic oligonucleotide
cccaggagaaaucuaguca

SEQ ID NO: 1120456 - RNA, 19 nt, Artificial Sequence
  Description of Artificial Sequence: Synthetic oligonucleotide
cugaaagggccucaucucu

SEQ ID NO: 1120457 - RNA, 19 nt, Artificial Sequence
  Description of Artificial Sequence: Synthetic oligonucleotide
gcacaauguuccuugaggu

SEQ ID NO: 1120458 - RNA, 19 nt, Artificial Sequence
  Description of Artificial Sequence: Synthetic oligonucleotide
ccgagauugaugcguuugc

SEQ ID NO: 1120459 - RNA, 19 nt, Artificial Sequence
  Description of Artificial Sequence: Synthetic oligonucleotide
uucuggccuucaugcccgg

SEQ ID NO: 1120460 - RNA, 19 nt, Artificial Sequence
  Description of Artificial Sequence: Synthetic oligonucleotide
ggggacguagguguuggag

SEQ ID NO: 1120461 - RNA, 19 nt, Artificial Sequence
  Description of Artificial Sequence: Synthetic oligonucleotide
ccagucacgagcgccauac

SEQ ID NO: 1120462 - RNA, 19 nt, Artificial Sequence
  Description of Artificial Sequence: Synthetic oligonucleotide
acggccucugucaaaacua

SEQ ID NO: 1120463 - RNA, 19 nt, Artificial Sequence
  Description of Artificial Sequence: Synthetic oligonucleotide
cugcuaggccuguucacca

SEQ ID NO: 1120464 - RNA, 19 nt, Artificial Sequence
  Description of Artificial Sequence: Synthetic oligonucleotide
ccucuccuaugagagacgg

SEQ ID NO: 1120465 - RNA, 19 nt, Artificial Sequence
  Description of Artificial Sequence: Synthetic oligonucleotide
ccgucagugugcuacccag

SEQ ID NO: 1120466 - RNA, 19 nt, Artificial Sequence
  Description of Artificial Sequence: Synthetic oligonucleotide
acguucuggaccaggguau

SEQ ID NO: 1120467 - RNA, 19 nt, Artificial Sequence
  Description of Artificial Sequence: Synthetic oligonucleotide
ugacuuccuccgagauuga

SEQ ID NO: 1120468 - RNA, 19 nt, Artificial Sequence
  Description of Artificial Sequence: Synthetic oligonucleotide
uccaucuggccauccucua

SEQ ID NO: 1120469 - RNA, 19 nt, Artificial Sequence
  Description of Artificial Sequence: Synthetic oligonucleotide
guaccuguccaggacguaa

SEQ ID NO: 1120470 - RNA, 19 nt, Artificial Sequence
  Description of Artificial Sequence: Synthetic oligonucleotide
gcuaggccuguucaccagc

SEQ ID NO: 1120471 - RNA, 19 nt, Artificial Sequence
  Description of Artificial Sequence: Synthetic oligonucleotide
gcacgugaggccugcuuag

SEQ ID NO: 1120472 - RNA, 19 nt, Artificial Sequence
  Description of Artificial Sequence: Synthetic oligonucleotide
aggacguaaugaagagucu

SEQ ID NO: 1120473 - RNA, 19 nt, Artificial Sequence
  Description of Artificial Sequence: Synthetic oligonucleotide
guccacuucuagucuccac

SEQ ID NO: 1120474 - RNA, 19 nt, Artificial Sequence
  Description of Artificial Sequence: Synthetic oligonucleotide
uguggacauuguucucaua

SEQ ID NO: 1120475 - RNA, 19 nt, Artificial Sequence
  Description of Artificial Sequence: Synthetic oligonucleotide
cuucauaguccuuccuggu

SEQ ID NO: 1120476 - RNA, 19 nt, Artificial Sequence
  Description of Artificial Sequence: Synthetic oligonucleotide
ugcguccccucugcuaggc

SEQ ID NO: 1120477 - RNA, 19 nt, Artificial Sequence
  Description of Artificial Sequence: Synthetic oligonucleotide
ggauccuauagcauucaaa

SEQ ID NO: 1120478 - RNA, 19 nt, Artificial Sequence
  Description of Artificial Sequence: Synthetic oligonucleotide
guagguguuggaggcacaa

SEQ ID NO: 1120479 - RNA, 19 nt, Artificial Sequence
  Description of Artificial Sequence: Synthetic oligonucleotide
auaaucuccggggcacgaa

SEQ ID NO: 1120480 - RNA, 19 nt, Artificial Sequence
  Description of Artificial Sequence: Synthetic oligonucleotide
uccggggcacgaauccuuu

SEQ ID NO: 1120481 - RNA, 19 nt, Artificial Sequence
  Description of Artificial Sequence: Synthetic oligonucleotide
cagccgucagugugcuacc

SEQ ID NO: 1120482 - RNA, 19 nt, Artificial Sequence
  Description of Artificial Sequence: Synthetic oligonucleotide
caggcggauggggacguag

SEQ ID NO: 1120483 - RNA, 19 nt, Artificial Sequence
  Description of Artificial Sequence: Synthetic oligonucleotide
augcccggauacaucacgu

SEQ ID NO: 1120484 - RNA, 19 nt, Artificial Sequence
  Description of Artificial Sequence: Synthetic oligonucleotide
ccgcuugaagaauuuucug

SEQ ID NO: 1120485 - RNA, 19 nt, Artificial Sequence
  Description of Artificial Sequence: Synthetic oligonucleotide
gcccggauacaucacguuc

SEQ ID NO: 1120486 - RNA, 19 nt, Artificial Sequence
  Description of Artificial Sequence: Synthetic oligonucleotide
cguugagcuccugaagucg

SEQ ID NO: 1120487 - RNA, 19 nt, Artificial Sequence
  Description of Artificial Sequence: Synthetic oligonucleotide
ugcccggauacaucacguu

SEQ ID NO: 1120488 - RNA, 19 nt, Artificial Sequence
  Description of Artificial Sequence: Synthetic oligonucleotide
aggguauccugaacagccu

SEQ ID NO: 1120489 - RNA, 19 nt, Artificial Sequence
  Description of Artificial Sequence: Synthetic oligonucleotide
cacgggcuggacuguggug

SEQ ID NO: 1120490 - RNA, 19 nt, Artificial Sequence
  Description of Artificial Sequence: Synthetic oligonucleotide
ccgugguauuccaugccag

SEQ ID NO: 1120491 - RNA, 19 nt, Artificial Sequence
  Description of Artificial Sequence: Synthetic oligonucleotide
ccggauacaucacguuccc

SEQ ID NO: 1120492 - RNA, 19 nt, Artificial Sequence
  Description of Artificial Sequence: Synthetic oligonucleotide
caauguuccuugagguacu

SEQ ID NO: 1120493 - RNA, 19 nt, Artificial Sequence
  Description of Artificial Sequence: Synthetic oligonucleotide
uggguugcacacggccucu

SEQ ID NO: 1120494 - RNA, 19 nt, Artificial Sequence
  Description of Artificial Sequence: Synthetic oligonucleotide
agcugaugauacgcugcca

SEQ ID NO: 1120495 - RNA, 19 nt, Artificial Sequence
  Description of Artificial Sequence: Synthetic oligonucleotide
cggaugaaaugaugaggcc

SEQ ID NO: 1120496 - RNA, 19 nt, Artificial Sequence
  Description of Artificial Sequence: Synthetic oligonucleotide
cugaggcacgugaggccug

SEQ ID NO: 1120497 - RNA, 19 nt, Artificial Sequence
  Description of Artificial Sequence: Synthetic oligonucleotide
cugcguccccucugcuagg

SEQ ID NO: 1120498 - RNA, 19 nt, Artificial Sequence
  Description of Artificial Sequence: Synthetic oligonucleotide
cagucacgagcgccauacc

SEQ ID NO: 1120499 - RNA, 19 nt, Artificial Sequence
  Description of Artificial Sequence: Synthetic oligonucleotide
gcguugagcuccugaaguc

SEQ ID NO: 1120500 - RNA, 19 nt, Artificial Sequence
  Description of Artificial Sequence: Synthetic oligonucleotide
caccugcuguccucugcug

SEQ ID NO: 1120501 - RNA, 19 nt, Artificial Sequence
  Description of Artificial Sequence: Synthetic oligonucleotide
uggcuuccgcuugaagaau

SEQ ID NO: 1120502 - RNA, 19 nt, Artificial Sequence
  Description of Artificial Sequence: Synthetic oligonucleotide
guguacacugguagccgga

SEQ ID NO: 1120503 - RNA, 19 nt, Artificial Sequence
  Description of Artificial Sequence: Synthetic oligonucleotide
cugagaacaagggcucgaa

SEQ ID NO: 1120504 - RNA, 19 nt, Artificial Sequence
  Description of Artificial Sequence: Synthetic oligonucleotide
gagacggcuggaaaauaau

SEQ ID NO: 1120505 - RNA, 19 nt, Artificial Sequence
  Description of Artificial Sequence: Synthetic oligonucleotide
ccaccagugaggaacacgu

SEQ ID NO: 1120506 - RNA, 19 nt, Artificial Sequence
  Description of Artificial Sequence: Synthetic oligonucleotide
uggggacguagguguugga

SEQ ID NO: 1120507 - RNA, 19 nt, Artificial Sequence
  Description of Artificial Sequence: Synthetic oligonucleotide
ccacuucuagucuccacca

SEQ ID NO: 1120508 - RNA, 19 nt, Artificial Sequence
  Description of Artificial Sequence: Synthetic oligonucleotide
cccaccagugaggaacacg

SEQ ID NO: 1120509 - RNA, 19 nt, Artificial Sequence
  Description of Artificial Sequence: Synthetic oligonucleotide
cuaggccuguucaccagcu

SEQ ID NO: 1120510 - RNA, 19 nt, Artificial Sequence
  Description of Artificial Sequence: Synthetic oligonucleotide
ccuucuaagacggguaaaa

SEQ ID NO: 1120511 - RNA, 19 nt, Artificial Sequence
  Description of Artificial Sequence: Synthetic oligonucleotide
aggcacgugaggccugcuu

SEQ ID NO: 1120512 - RNA, 19 nt, Artificial Sequence
  Description of Artificial Sequence: Synthetic oligonucleotide
cacggccucugucaaaacu

SEQ ID NO: 1120513 - RNA, 19 nt, Artificial Sequence
  Description of Artificial Sequence: Synthetic oligonucleotide
gagagacggcuggaaaaua

SEQ ID NO: 1120514 - RNA, 19 nt, Artificial Sequence
  Description of Artificial Sequence: Synthetic oligonucleotide
cgggaauagaguggguugc

SEQ ID NO: 1120515 - RNA, 19 nt, Artificial Sequence
  Description of Artificial Sequence: Synthetic oligonucleotide
caucuacuucgagguuggc

SEQ ID NO: 1120516 - RNA, 19 nt, Artificial Sequence
  Description of Artificial Sequence: Synthetic oligonucleotide
cuucuaagacggguaaaau

SEQ ID NO: 1120517 - RNA, 19 nt, Artificial Sequence
  Description of Artificial Sequence: Synthetic oligonucleotide
gucaaaacuaugggaugau

SEQ ID NO: 1120518 - RNA, 19 nt, Artificial Sequence
  Description of Artificial Sequence: Synthetic oligonucleotide
gcccgugguauuccaugcc

SEQ ID NO: 1120519 - RNA, 19 nt, Artificial Sequence
  Description of Artificial Sequence: Synthetic oligonucleotide
ccucuaggagcuccugcac

SEQ ID NO: 1120520 - RNA, 19 nt, Artificial Sequence
  Description of Artificial Sequence: Synthetic oligonucleotide
ggcaucuagccuuccuucu

SEQ ID NO: 1120521 - RNA, 19 nt, Artificial Sequence
  Description of Artificial Sequence: Synthetic oligonucleotide
cuuccuggugacccaggcu

SEQ ID NO: 1120522 - RNA, 19 nt, Artificial Sequence
  Description of Artificial Sequence: Synthetic oligonucleotide
gcauguugugauagaagcu

SEQ ID NO: 1120523 - RNA, 19 nt, Artificial Sequence
  Description of Artificial Sequence: Synthetic oligonucleotide
cuggugacccaggcuccac

SEQ ID NO: 1120524 - RNA, 19 nt, Artificial Sequence
  Description of Artificial Sequence: Synthetic oligonucleotide
gagcgccauaccaggcauc

SEQ ID NO: 1120525 - RNA, 19 nt, Artificial Sequence
  Description of Artificial Sequence: Synthetic oligonucleotide
ccgccugacuuccuccgag

SEQ ID NO: 1120526 - RNA, 19 nt, Artificial Sequence
  Description of Artificial Sequence: Synthetic oligonucleotide
cgcccgugguauuccaugc

SEQ ID NO: 1120527 - RNA, 19 nt, Artificial Sequence
  Description of Artificial Sequence: Synthetic oligonucleotide
cagcucgcccgugguauuc

SEQ ID NO: 1120528 - RNA, 19 nt, Artificial Sequence
  Description of Artificial Sequence: Synthetic oligonucleotide
ggagaagccgcugcaggua

SEQ ID NO: 1120529 - RNA, 19 nt, Artificial Sequence
  Description of Artificial Sequence: Synthetic oligonucleotide
ccgcaauguagcugugcuc

SEQ ID NO: 1120530 - RNA, 19 nt, Artificial Sequence
  Description of Artificial Sequence: Synthetic oligonucleotide
gccgucagugugcuaccca

SEQ ID NO: 1120531 - RNA, 19 nt, Artificial Sequence
  Description of Artificial Sequence: Synthetic oligonucleotide
gggcacgaauccuuucugu

SEQ ID NO: 1120532 - RNA, 19 nt, Artificial Sequence
  Description of Artificial Sequence: Synthetic oligonucleotide
cgugguauuccaugccaga

SEQ ID NO: 1120533 - RNA, 19 nt, Artificial Sequence
  Description of Artificial Sequence: Synthetic oligonucleotide
gccgcuggaaagggcauuc

SEQ ID NO: 1120534 - RNA, 19 nt, Artificial Sequence
  Description of Artificial Sequence: Synthetic oligonucleotide
gcucgaaaucauugauacu

SEQ ID NO: 1120535 - RNA, 19 nt, Artificial Sequence
  Description of Artificial Sequence: Synthetic oligonucleotide
ggcccagucacgagcgcca

SEQ ID NO: 1120536 - RNA, 19 nt, Artificial Sequence
  Description of Artificial Sequence: Synthetic oligonucleotide
cuaggagcuccugcacaua

SEQ ID NO: 1120537 - RNA, 19 nt, Artificial Sequence
  Description of Artificial Sequence: Synthetic oligonucleotide
cgagauugaugcguuugca

SEQ ID NO: 1120538 - RNA, 19 nt, Artificial Sequence
  Description of Artificial Sequence: Synthetic oligonucleotide
ggcgggaauagaguggguu

SEQ ID NO: 1120539 - RNA, 19 nt, Artificial Sequence
  Description of Artificial Sequence: Synthetic oligonucleotide
aggugagcuucuggauaua

SEQ ID NO: 1120540 - RNA, 19 nt, Artificial Sequence
  Description of Artificial Sequence: Synthetic oligonucleotide
gguauccugaacagccuuu

SEQ ID NO: 1120541 - RNA, 19 nt, Artificial Sequence
  Description of Artificial Sequence: Synthetic oligonucleotide
gguagccggaugaaaugau

SEQ ID NO: 1120542 - RNA, 19 nt, Artificial Sequence
  Description of Artificial Sequence: Synthetic oligonucleotide
agacgcccaggugcuggaa

SEQ ID NO: 1120543 - RNA, 19 nt, Artificial Sequence
  Description of Artificial Sequence: Synthetic oligonucleotide
aggccgcuggaaagggcau

SEQ ID NO: 1120544 - RNA, 19 nt, Artificial Sequence
  Description of Artificial Sequence: Synthetic oligonucleotide
gcguccccucugcuaggcc

SEQ ID NO: 1120545 - RNA, 19 nt, Artificial Sequence
  Description of Artificial Sequence: Synthetic oligonucleotide
gggcaccgccacuucugca

SEQ ID NO: 1120546 - RNA, 19 nt, Artificial Sequence
  Description of Artificial Sequence: Synthetic oligonucleotide
gcucgcccgugguauucca

SEQ ID NO: 1120547 - RNA, 19 nt, Artificial Sequence
  Description of Artificial Sequence: Synthetic oligonucleotide
ggguaccuguccaggacgu

SEQ ID NO: 1120548 - RNA, 19 nt, Artificial Sequence
  Description of Artificial Sequence: Synthetic oligonucleotide
ggguugcacacggccucug

SEQ ID NO: 1120549 - RNA, 19 nt, Artificial Sequence
  Description of Artificial Sequence: Synthetic oligonucleotide
cgggcguugagcuccugaa

SEQ ID NO: 1120550 - RNA, 19 nt, Artificial Sequence
  Description of Artificial Sequence: Synthetic oligonucleotide
ccgacaucauuuggcggga

SEQ ID NO: 1120551 - RNA, 19 nt, Artificial Sequence
  Description of Artificial Sequence: Synthetic oligonucleotide
ccggggcacgaauccuuuc

SEQ ID NO: 1120552 - RNA, 19 nt, Artificial Sequence
  Description of Artificial Sequence: Synthetic oligonucleotide
gcacacggccucugucaaa

SEQ ID NO: 1120553 - RNA, 19 nt, Artificial Sequence
  Description of Artificial Sequence: Synthetic oligonucleotide
cucgcccgugguauuccau

SEQ ID NO: 1120554 - RNA, 19 nt, Artificial Sequence
  Description of Artificial Sequence: Synthetic oligonucleotide
cguucuggaccaggguauc

SEQ ID NO: 1120555 - RNA, 19 nt, Artificial Sequence
  Description of Artificial Sequence: Synthetic oligonucleotide
ggcaaccuuggggauccua

SEQ ID NO: 1120556 - RNA, 19 nt, Artificial Sequence
  Description of Artificial Sequence: Synthetic oligonucleotide
cugggucucugaggcacgu

SEQ ID NO: 1120557 - RNA, 19 nt, Artificial Sequence
  Description of Artificial Sequence: Synthetic oligonucleotide
ccgggcguugagcuccuga

SEQ ID NO: 1120558 - RNA, 19 nt, Artificial Sequence
  Description of Artificial Sequence: Synthetic oligonucleotide
gcccugcgaggagacgccc

SEQ ID NO: 1120559 - RNA, 19 nt, Artificial Sequence
  Description of Artificial Sequence: Synthetic oligonucleotide
ccaggacguaaugaagagu

SEQ ID NO: 1120560 - RNA, 19 nt, Artificial Sequence
  Description of Artificial Sequence: Synthetic oligonucleotide
gguagccagccgccugacu

SEQ ID NO: 1120561 - RNA, 19 nt, Artificial Sequence
  Description of Artificial Sequence: Synthetic oligonucleotide
cuccgagauugaugcguuu

SEQ ID NO: 1120562 - RNA, 19 nt, Artificial Sequence
  Description of Artificial Sequence: Synthetic oligonucleotide
gguaccuguccaggacgua

SEQ ID NO: 1120563 - RNA, 19 nt, Artificial Sequence
  Description of Artificial Sequence: Synthetic oligonucleotide
cccggauccucucccggaa

SEQ ID NO: 1120564 - RNA, 19 nt, Artificial Sequence
  Description of Artificial Sequence: Synthetic oligonucleotide
gccgccgggcguugagcuc

SEQ ID NO: 1120565 - RNA, 19 nt, Artificial Sequence
  Description of Artificial Sequence: Synthetic oligonucleotide
cguccccucugcuaggccu

SEQ ID NO: 1120566 - RNA, 19 nt, Artificial Sequence
  Description of Artificial Sequence: Synthetic oligonucleotide
cggggcacgaauccuuucu

SEQ ID NO: 1120567 - RNA, 19 nt, Artificial Sequence
  Description of Artificial Sequence: Synthetic oligonucleotide
aggcaaccuuggggauccu

SEQ ID NO: 1120568 - RNA, 19 nt, Artificial Sequence
  Description of Artificial Sequence: Synthetic oligonucleotide
ccuccgagauugaugcguu

SEQ ID NO: 1120569 - RNA, 19 nt, Artificial Sequence
  Description of Artificial Sequence: Synthetic oligonucleotide
gaggcacgugaggccugcu

SEQ ID NO: 1120570 - RNA, 19 nt, Artificial Sequence
  Description of Artificial Sequence: Synthetic oligonucleotide
caccgccacuucugcaauu

SEQ ID NO: 1120571 - RNA, 19 nt, Artificial Sequence
  Description of Artificial Sequence: Synthetic oligonucleotide
ccugcuuaggcaggcggau

SEQ ID NO: 1120572 - RNA, 19 nt, Artificial Sequence
  Description of Artificial Sequence: Synthetic oligonucleotide
cucccgccgccgggcguug

SEQ ID NO: 1120573 - RNA, 19 nt, Artificial Sequence
  Description of Artificial Sequence: Synthetic oligonucleotide
ccacagcucgcccguggua

SEQ ID NO: 1120574 - RNA, 19 nt, Artificial Sequence
  Description of Artificial Sequence: Synthetic oligonucleotide
cgagcgccauaccaggcau

SEQ ID NO: 1120575 - RNA, 19 nt, Artificial Sequence
  Description of Artificial Sequence: Synthetic oligonucleotide
ccucagccgucagugugcu

SEQ ID NO: 1120576 - RNA, 19 nt, Artificial Sequence
  Description of Artificial Sequence: Synthetic oligonucleotide
ccgccacuucugcaauucu

SEQ ID NO: 1120577 - RNA, 19 nt, Artificial Sequence
  Description of Artificial Sequence: Synthetic oligonucleotide
ggccgcuggaaagggcauu

SEQ ID NO: 1120578 - RNA, 19 nt, Artificial Sequence
  Description of Artificial Sequence: Synthetic oligonucleotide
cgacaucauuuggcgggaa

SEQ ID NO: 1120579 - RNA, 19 nt, Artificial Sequence
  Description of Artificial Sequence: Synthetic oligonucleotide
gccgggcguugagcuccug

SEQ ID NO: 1120580 - RNA, 19 nt, Artificial Sequence
  Description of Artificial Sequence: Synthetic oligonucleotide
gcccagucacgagcgccau

SEQ ID NO: 1120581 - RNA, 19 nt, Artificial Sequence
  Description of Artificial Sequence: Synthetic oligonucleotide
cccggaagucugggucucu

SEQ ID NO: 1120582 - RNA, 19 nt, Artificial Sequence
  Description of Artificial Sequence: Synthetic oligonucleotide
acauaauugaccuagaaac

SEQ ID NO: 1120583 - RNA, 19 nt, Artificial Sequence
  Description of Artificial Sequence: Synthetic oligonucleotide
ugugucaucagcuagaggg

SEQ ID NO: 1120584 - RNA, 19 nt, Artificial Sequence
  Description of Artificial Sequence: Synthetic oligonucleotide
auuauaaaugcacauagug

SEQ ID NO: 1120585 - RNA, 19 nt, Artificial Sequence
  Description of Artificial Sequence: Synthetic oligonucleotide
uguuauuuuacucuagagc

SEQ ID NO: 1120586 - RNA, 19 nt, Artificial Sequence
  Description of Artificial Sequence: Synthetic oligonucleotide
uguaugguuaaacacuugg

SEQ ID NO: 1120587 - RNA, 19 nt, Artificial Sequence
  Description of Artificial Sequence: Synthetic oligonucleotide
ucaauuuagguuuugacac

SEQ ID NO: 1120588 - RNA, 19 nt, Artificial Sequence
  Description of Artificial Sequence: Synthetic oligonucleotide
uacguuguuaaacaaaugc

SEQ ID NO: 1120589 - RNA, 19 nt, Artificial Sequence
  Description of Artificial Sequence: Synthetic oligonucleotide
aauuacacacaccuuaaug

SEQ ID NO: 1120590 - RNA, 19 nt, Artificial Sequence
  Description of Artificial Sequence: Synthetic oligonucleotide
aguacuaucacccaucccu

SEQ ID NO: 1120591 - RNA, 19 nt, Artificial Sequence
  Description of Artificial Sequence: Synthetic oligonucleotide
auuuagucaacauacauaa

SEQ ID NO: 1120592 - RNA, 19 nt, Artificial Sequence
  Description of Artificial Sequence: Synthetic oligonucleotide
auaacuuguuauuuuacuc

SEQ ID NO: 1120593 - RNA, 19 nt, Artificial Sequence
  Description of Artificial Sequence: Synthetic oligonucleotide
uauaaaugcacauagugua

SEQ ID NO: 1120594 - RNA, 19 nt, Artificial Sequence
  Description of Artificial Sequence: Synthetic oligonucleotide
uuauaaaugcacauagugu

SEQ ID NO: 1120595 - RNA, 19 nt, Artificial Sequence
  Description of Artificial Sequence: Synthetic oligonucleotide
acaguaaccagguguaacc

SEQ ID NO: 1120596 - RNA, 19 nt, Artificial Sequence
  Description of Artificial Sequence: Synthetic oligonucleotide
uucaauuuagguuuugaca

SEQ ID NO: 1120597 - RNA, 19 nt, Artificial Sequence
  Description of Artificial Sequence: Synthetic oligonucleotide
ugguuaaacacuuggauca

SEQ ID NO: 1120598 - RNA, 19 nt, Artificial Sequence
  Description of Artificial Sequence: Synthetic oligonucleotide
uauuuguaaauuuagucaa

SEQ ID NO: 1120599 - RNA, 19 nt, Artificial Sequence
  Description of Artificial Sequence: Synthetic oligonucleotide
aguaccuuaauagcuaccc

SEQ ID NO: 1120600 - RNA, 19 nt, Artificial Sequence
  Description of Artificial Sequence: Synthetic oligonucleotide
ucaaucuaggcauaagacc

SEQ ID NO: 1120601 - RNA, 19 nt, Artificial Sequence
  Description of Artificial Sequence: Synthetic oligonucleotide
uguaaauuuagucaacaua

SEQ ID NO: 1120602 - RNA, 19 nt, Artificial Sequence
  Description of Artificial Sequence: Synthetic oligonucleotide
aaugacuuaaguacaaaug

SEQ ID NO: 1120603 - RNA, 19 nt, Artificial Sequence
  Description of Artificial Sequence: Synthetic oligonucleotide
gaagcaaguacuaucaccc

SEQ ID NO: 1120604 - RNA, 19 nt, Artificial Sequence
  Description of Artificial Sequence: Synthetic oligonucleotide
agcccuuauaaauaaaauc

SEQ ID NO: 1120605 - RNA, 19 nt, Artificial Sequence
  Description of Artificial Sequence: Synthetic oligonucleotide
uucaauaggauacuuuuaa

SEQ ID NO: 1120606 - RNA, 19 nt, Artificial Sequence
  Description of Artificial Sequence: Synthetic oligonucleotide
uguaucuucaaccuuugaa

SEQ ID NO: 1120607 - RNA, 19 nt, Artificial Sequence
  Description of Artificial Sequence: Synthetic oligonucleotide
aaauguucaacacuacaau

SEQ ID NO: 1120608 - RNA, 19 nt, Artificial Sequence
  Description of Artificial Sequence: Synthetic oligonucleotide
uaguguauucuauagcugc

SEQ ID NO: 1120609 - RNA, 19 nt, Artificial Sequence
  Description of Artificial Sequence: Synthetic oligonucleotide
caccuuaaugacaagacgc

SEQ ID NO: 1120610 - RNA, 19 nt, Artificial Sequence
  Description of Artificial Sequence: Synthetic oligonucleotide
guuucauacauacgcauag

SEQ ID NO: 1120611 - RNA, 19 nt, Artificial Sequence
  Description of Artificial Sequence: Synthetic oligonucleotide
ucuacguuguuaaacaaau

SEQ ID NO: 1120612 - RNA, 19 nt, Artificial Sequence
  Description of Artificial Sequence: Synthetic oligonucleotide
uguuaaacaaaugcagucc

SEQ ID NO: 1120613 - RNA, 19 nt, Artificial Sequence
  Description of Artificial Sequence: Synthetic oligonucleotide
uaugguuaaacacuuggau

SEQ ID NO: 1120614 - RNA, 19 nt, Artificial Sequence
  Description of Artificial Sequence: Synthetic oligonucleotide
uccguuuugaaauccuggg

SEQ ID NO: 1120615 - RNA, 19 nt, Artificial Sequence
  Description of Artificial Sequence: Synthetic oligonucleotide
aaccaaaguauuuuacaga

SEQ ID NO: 1120616 - RNA, 19 nt, Artificial Sequence
  Description of Artificial Sequence: Synthetic oligonucleotide
ucucuuagagccacggucc

SEQ ID NO: 1120617 - RNA, 19 nt, Artificial Sequence
  Description of Artificial Sequence: Synthetic oligonucleotide
gaacggaagaucuuccucc

SEQ ID NO: 1120618 - RNA, 19 nt, Artificial Sequence
  Description of Artificial Sequence: Synthetic oligonucleotide
uguaaccuaacccaucuuc

SEQ ID NO: 1120619 - RNA, 19 nt, Artificial Sequence
  Description of Artificial Sequence: Synthetic oligonucleotide
uuauuuuacucuagagccc

SEQ ID NO: 1120620 - RNA, 19 nt, Artificial Sequence
  Description of Artificial Sequence: Synthetic oligonucleotide
acaaauuaaaccaaaguau

SEQ ID NO: 1120621 - RNA, 19 nt, Artificial Sequence
  Description of Artificial Sequence: Synthetic oligonucleotide
auagcuacccaacaaguca

SEQ ID NO: 1120622 - RNA, 19 nt, Artificial Sequence
  Description of Artificial Sequence: Synthetic oligonucleotide
uauccggcgagccaacugg

SEQ ID NO: 1120623 - RNA, 19 nt, Artificial Sequence
  Description of Artificial Sequence: Synthetic oligonucleotide
aacuggacuaaauuacaca

SEQ ID NO: 1120624 - RNA, 19 nt, Artificial Sequence
  Description of Artificial Sequence: Synthetic oligonucleotide
uauucuauagcugccaggu

SEQ ID NO: 1120625 - RNA, 19 nt, Artificial Sequence
  Description of Artificial Sequence: Synthetic oligonucleotide
uguauucuauagcugccag

SEQ ID NO: 1120626 - RNA, 19 nt, Artificial Sequence
  Description of Artificial Sequence: Synthetic oligonucleotide
uaauagcuacccaacaagu

SEQ ID NO: 1120627 - RNA, 19 nt, Artificial Sequence
  Description of Artificial Sequence: Synthetic oligonucleotide
caacgaacgaccaaaccgc

SEQ ID NO: 1120628 - RNA, 19 nt, Artificial Sequence
  Description of Artificial Sequence: Synthetic oligonucleotide
cucaaucuaggcauaagac

SEQ ID NO: 1120629 - RNA, 19 nt, Artificial Sequence
  Description of Artificial Sequence: Synthetic oligonucleotide
uuggaucaagucauaacca

SEQ ID NO: 1120630 - RNA, 19 nt, Artificial Sequence
  Description of Artificial Sequence: Synthetic oligonucleotide
uuaaugacaagacgcccca

SEQ ID NO: 1120631 - RNA, 19 nt, Artificial Sequence
  Description of Artificial Sequence: Synthetic oligonucleotide
uguuuagacuccacaagga

SEQ ID NO: 1120632 - RNA, 19 nt, Artificial Sequence
  Description of Artificial Sequence: Synthetic oligonucleotide
aaaccgccuugacuuaagc

SEQ ID NO: 1120633 - RNA, 19 nt, Artificial Sequence
  Description of Artificial Sequence: Synthetic oligonucleotide
aacacuuggaucaagucau

SEQ ID NO: 1120634 - RNA, 19 nt, Artificial Sequence
  Description of Artificial Sequence: Synthetic oligonucleotide
uagaggguuaacauguggu

SEQ ID NO: 1120635 - RNA, 19 nt, Artificial Sequence
  Description of Artificial Sequence: Synthetic oligonucleotide
acuuaaguacaaaugcaac

SEQ ID NO: 1120636 - RNA, 19 nt, Artificial Sequence
  Description of Artificial Sequence: Synthetic oligonucleotide
cacaaauuaaaccaaagua

SEQ ID NO: 1120637 - RNA, 19 nt, Artificial Sequence
  Description of Artificial Sequence: Synthetic oligonucleotide
uuacacacaccuuaaugac

SEQ ID NO: 1120638 - RNA, 19 nt, Artificial Sequence
  Description of Artificial Sequence: Synthetic oligonucleotide
aaguacuaucacccauccc

SEQ ID NO: 1120639 - RNA, 19 nt, Artificial Sequence
  Description of Artificial Sequence: Synthetic oligonucleotide
acugaacucaaucuaggca

SEQ ID NO: 1120640 - RNA, 19 nt, Artificial Sequence
  Description of Artificial Sequence: Synthetic oligonucleotide
ucuaguaccuuaauagcua

SEQ ID NO: 1120641 - RNA, 19 nt, Artificial Sequence
  Description of Artificial Sequence: Synthetic oligonucleotide
aauuuagucaacauacaua

SEQ ID NO: 1120642 - RNA, 19 nt, Artificial Sequence
  Description of Artificial Sequence: Synthetic oligonucleotide
uaacaugugguagaaugag

SEQ ID NO: 1120643 - RNA, 19 nt, Artificial Sequence
  Description of Artificial Sequence: Synthetic oligonucleotide
acucaaucuaggcauaaga

SEQ ID NO: 1120644 - RNA, 19 nt, Artificial Sequence
  Description of Artificial Sequence: Synthetic oligonucleotide
cauguuuagacuccacaag

SEQ ID NO: 1120645 - RNA, 19 nt, Artificial Sequence
  Description of Artificial Sequence: Synthetic oligonucleotide
accuuaaugacaagacgcc

SEQ ID NO: 1120646 - RNA, 19 nt, Artificial Sequence
  Description of Artificial Sequence: Synthetic oligonucleotide
uauuuuacucuagagcccu

SEQ ID NO: 1120647 - RNA, 19 nt, Artificial Sequence
  Description of Artificial Sequence: Synthetic oligonucleotide
aagaucuuccuccaacgaa

SEQ ID NO: 1120648 - RNA, 19 nt, Artificial Sequence
  Description of Artificial Sequence: Synthetic oligonucleotide
aaacaaaccuuguacuguu

SEQ ID NO: 1120649 - RNA, 19 nt, Artificial Sequence
  Description of Artificial Sequence: Synthetic oligonucleotide
ccaacgaacgaccaaaccg

SEQ ID NO: 1120650 - RNA, 19 nt, Artificial Sequence
  Description of Artificial Sequence: Synthetic oligonucleotide
uaccuuaauagcuacccaa

SEQ ID NO: 1120651 - RNA, 19 nt, Artificial Sequence
  Description of Artificial Sequence: Synthetic oligonucleotide
guacauuuaucaauucuag

SEQ ID NO: 1120652 - RNA, 19 nt, Artificial Sequence
  Description of Artificial Sequence: Synthetic oligonucleotide
ucgaacaacagccgcaauc

SEQ ID NO: 1120653 - RNA, 19 nt, Artificial Sequence
  Description of Artificial Sequence: Synthetic oligonucleotide
cacaccuuaaugacaagac

SEQ ID NO: 1120654 - RNA, 19 nt, Artificial Sequence
  Description of Artificial Sequence: Synthetic oligonucleotide
ucgacuucugguagcgacg

SEQ ID NO: 1120655 - RNA, 19 nt, Artificial Sequence
  Description of Artificial Sequence: Synthetic oligonucleotide
ucugcauaucagcaacuug

SEQ ID NO: 1120656 - RNA, 19 nt, Artificial Sequence
  Description of Artificial Sequence: Synthetic oligonucleotide
aacaugugguagaaugagg

SEQ ID NO: 1120657 - RNA, 19 nt, Artificial Sequence
  Description of Artificial Sequence: Synthetic oligonucleotide
uacauuuaucaauucuagu

SEQ ID NO: 1120658 - RNA, 19 nt, Artificial Sequence
  Description of Artificial Sequence: Synthetic oligonucleotide
ucagcaacuugucacuccu

SEQ ID NO: 1120659 - RNA, 19 nt, Artificial Sequence
  Description of Artificial Sequence: Synthetic oligonucleotide
cagauuggugucuucaaac

SEQ ID NO: 1120660 - RNA, 19 nt, Artificial Sequence
  Description of Artificial Sequence: Synthetic oligonucleotide
aguguauucuauagcugcc

SEQ ID NO: 1120661 - RNA, 19 nt, Artificial Sequence
  Description of Artificial Sequence: Synthetic oligonucleotide
auaucagcaacuugucacu

SEQ ID NO: 1120662 - RNA, 19 nt, Artificial Sequence
  Description of Artificial Sequence: Synthetic oligonucleotide
uucuacguuguuaaacaaa

SEQ ID NO: 1120663 - RNA, 19 nt, Artificial Sequence
  Description of Artificial Sequence: Synthetic oligonucleotide
gaucaguaacaggugaugc

SEQ ID NO: 1120664 - RNA, 19 nt, Artificial Sequence
  Description of Artificial Sequence: Synthetic oligonucleotide
agauggaaugacuuaagua

SEQ ID NO: 1120665 - RNA, 19 nt, Artificial Sequence
  Description of Artificial Sequence: Synthetic oligonucleotide
cuuccuagcggucugcuug

SEQ ID NO: 1120666 - RNA, 19 nt, Artificial Sequence
  Description of Artificial Sequence: Synthetic oligonucleotide
auuuguaaauuuagucaac

SEQ ID NO: 1120667 - RNA, 19 nt, Artificial Sequence
  Description of Artificial Sequence: Synthetic oligonucleotide
guauucuauagcugccagg

SEQ ID NO: 1120668 - RNA, 19 nt, Artificial Sequence
  Description of Artificial Sequence: Synthetic oligonucleotide
cuuccuccaacgaacgacc

SEQ ID NO: 1120669 - RNA, 19 nt, Artificial Sequence
  Description of Artificial Sequence: Synthetic oligonucleotide
ugcacucugaaaccucaag

SEQ ID NO: 1120670 - RNA, 19 nt, Artificial Sequence
  Description of Artificial Sequence: Synthetic oligonucleotide
acuaacuagaucaguaaca

SEQ ID NO: 1120671 - RNA, 19 nt, Artificial Sequence
  Description of Artificial Sequence: Synthetic oligonucleotide
cuagaggguuaacaugugg

SEQ ID NO: 1120672 - RNA, 19 nt, Artificial Sequence
  Description of Artificial Sequence: Synthetic oligonucleotide
aagaagcaccaacuggacu

SEQ ID NO: 1120673 - RNA, 19 nt, Artificial Sequence
  Description of Artificial Sequence: Synthetic oligonucleotide
uauguauuaaaagcuuuau

SEQ ID NO: 1120674 - RNA, 19 nt, Artificial Sequence
  Description of Artificial Sequence: Synthetic oligonucleotide
aauugaccuagaaacuuca

SEQ ID NO: 1120675 - RNA, 19 nt, Artificial Sequence
  Description of Artificial Sequence: Synthetic oligonucleotide
agcuauuauaaaugcacau

SEQ ID NO: 1120676 - RNA, 19 nt, Artificial Sequence
  Description of Artificial Sequence: Synthetic oligonucleotide
auuuacuacaaaaugccau

SEQ ID NO: 1120677 - RNA, 19 nt, Artificial Sequence
  Description of Artificial Sequence: Synthetic oligonucleotide
agaccaaacaacacaauga

SEQ ID NO: 1120678 - RNA, 19 nt, Artificial Sequence
  Description of Artificial Sequence: Synthetic oligonucleotide
aacaaccccaccagguacg

SEQ ID NO: 1120679 - RNA, 19 nt, Artificial Sequence
  Description of Artificial Sequence: Synthetic oligonucleotide
gucaacauacauaauugac

SEQ ID NO: 1120680 - RNA, 19 nt, Artificial Sequence
  Description of Artificial Sequence: Synthetic oligonucleotide
agguuuugacacuucguug

SEQ ID NO: 1120681 - RNA, 19 nt, Artificial Sequence
  Description of Artificial Sequence: Synthetic oligonucleotide
cuaucacagugauguaugg

SEQ ID NO: 1120682 - RNA, 19 nt, Artificial Sequence
  Description of Artificial Sequence: Synthetic oligonucleotide
aacgaccaaaccgcucugc

SEQ ID NO: 1120683 - RNA, 19 nt, Artificial Sequence
  Description of Artificial Sequence: Synthetic oligonucleotide
accagguacgcuucacugg

SEQ ID NO: 1120684 - RNA, 19 nt, Artificial Sequence
  Description of Artificial Sequence: Synthetic oligonucleotide
aaaacugcacuaacuagau

SEQ ID NO: 1120685 - RNA, 19 nt, Artificial Sequence
  Description of Artificial Sequence: Synthetic oligonucleotide
uuguaaauuuagucaacau

SEQ ID NO: 1120686 - RNA, 19 nt, Artificial Sequence
  Description of Artificial Sequence: Synthetic oligonucleotide
cuaggcauaagaccaaaca

SEQ ID NO: 1120687 - RNA, 19 nt, Artificial Sequence
  Description of Artificial Sequence: Synthetic oligonucleotide
cacuaacuagaucaguaac

SEQ ID NO: 1120688 - RNA, 19 nt, Artificial Sequence
  Description of Artificial Sequence: Synthetic oligonucleotide
caaguacuaucacccaucc

SEQ ID NO: 1120689 - RNA, 19 nt, Artificial Sequence
  Description of Artificial Sequence: Synthetic oligonucleotide
cuaguaccuuaauagcuac

SEQ ID NO: 1120690 - RNA, 19 nt, Artificial Sequence
  Description of Artificial Sequence: Synthetic oligonucleotide
cuagcggucugcuugguuc

SEQ ID NO: 1120691 - RNA, 19 nt, Artificial Sequence
  Description of Artificial Sequence: Synthetic oligonucleotide
uucuucaccccgccgguag

SEQ ID NO: 1120692 - RNA, 19 nt, Artificial Sequence
  Description of Artificial Sequence: Synthetic oligonucleotide
uccaacgaacgaccaaacc

SEQ ID NO: 1120693 - RNA, 19 nt, Artificial Sequence
  Description of Artificial Sequence: Synthetic oligonucleotide
uggaaugacuuaaguacaa

SEQ ID NO: 1120694 - RNA, 19 nt, Artificial Sequence
  Description of Artificial Sequence: Synthetic oligonucleotide
accuuaauagcuacccaac

SEQ ID NO: 1120695 - RNA, 19 nt, Artificial Sequence
  Description of Artificial Sequence: Synthetic oligonucleotide
acaugugguagaaugagga

SEQ ID NO: 1120696 - RNA, 19 nt, Artificial Sequence
  Description of Artificial Sequence: Synthetic oligonucleotide
aggguuaacaugugguaga

SEQ ID NO: 1120697 - RNA, 19 nt, Artificial Sequence
  Description of Artificial Sequence: Synthetic oligonucleotide
ucuauagcugccagguuua

SEQ ID NO: 1120698 - RNA, 19 nt, Artificial Sequence
  Description of Artificial Sequence: Synthetic oligonucleotide
auaauugaccuagaaacuu

SEQ ID NO: 1120699 - RNA, 19 nt, Artificial Sequence
  Description of Artificial Sequence: Synthetic oligonucleotide
caacuggacuaaauuacac

SEQ ID NO: 1120700 - RNA, 19 nt, Artificial Sequence
  Description of Artificial Sequence: Synthetic oligonucleotide
gacggaucucucuuagagc

SEQ ID NO: 1120701 - RNA, 19 nt, Artificial Sequence
  Description of Artificial Sequence: Synthetic oligonucleotide
cuuagagccacggucccgg

SEQ ID NO: 1120702 - RNA, 19 nt, Artificial Sequence
  Description of Artificial Sequence: Synthetic oligonucleotide
cuuaauagcuacccaacaa

SEQ ID NO: 1120703 - RNA, 19 nt, Artificial Sequence
  Description of Artificial Sequence: Synthetic oligonucleotide
acgaccaaaccgcucugcg

SEQ ID NO: 1120704 - RNA, 19 nt, Artificial Sequence
  Description of Artificial Sequence: Synthetic oligonucleotide
gaucuuccuccaacgaacg

SEQ ID NO: 1120705 - RNA, 19 nt, Artificial Sequence
  Description of Artificial Sequence: Synthetic oligonucleotide
acuaucacccaucccuucu

SEQ ID NO: 1120706 - RNA, 19 nt, Artificial Sequence
  Description of Artificial Sequence: Synthetic oligonucleotide
cuucguugaauaaacaagu

SEQ ID NO: 1120707 - RNA, 19 nt, Artificial Sequence
  Description of Artificial Sequence: Synthetic oligonucleotide
ucuaggcauaagaccaaac

SEQ ID NO: 1120708 - RNA, 19 nt, Artificial Sequence
  Description of Artificial Sequence: Synthetic oligonucleotide
aacucaaucuaggcauaag

SEQ ID NO: 1120709 - RNA, 19 nt, Artificial Sequence
  Description of Artificial Sequence: Synthetic oligonucleotide
uuucuacguuguuaaacaa

SEQ ID NO: 1120710 - RNA, 19 nt, Artificial Sequence
  Description of Artificial Sequence: Synthetic oligonucleotide
acguuguuaaacaaaugca

SEQ ID NO: 1120711 - RNA, 19 nt, Artificial Sequence
  Description of Artificial Sequence: Synthetic oligonucleotide
ucacagugauguaugguua

SEQ ID NO: 1120712 - RNA, 19 nt, Artificial Sequence
  Description of Artificial Sequence: Synthetic oligonucleotide
uuuacucuagagcccuuau

SEQ ID NO: 1120713 - RNA, 19 nt, Artificial Sequence
  Description of Artificial Sequence: Synthetic oligonucleotide
gauuggugucuucaaacaa

SEQ ID NO: 1120714 - RNA, 19 nt, Artificial Sequence
  Description of Artificial Sequence: Synthetic oligonucleotide
uaguaccuuaauagcuacc

SEQ ID NO: 1120715 - RNA, 19 nt, Artificial Sequence
  Description of Artificial Sequence: Synthetic oligonucleotide
guuuugaaauccugggcga

SEQ ID NO: 1120716 - RNA, 19 nt, Artificial Sequence
  Description of Artificial Sequence: Synthetic oligonucleotide
uuccuagcggucugcuugg

SEQ ID NO: 1120717 - RNA, 19 nt, Artificial Sequence
  Description of Artificial Sequence: Synthetic oligonucleotide
gaaugacuuaaguacaaau

SEQ ID NO: 1120718 - RNA, 19 nt, Artificial Sequence
  Description of Artificial Sequence: Synthetic oligonucleotide
uuuucacccaaagccgaag

SEQ ID NO: 1120719 - RNA, 19 nt, Artificial Sequence
  Description of Artificial Sequence: Synthetic oligonucleotide
aaccuaacccaucuucauu

SEQ ID NO: 1120720 - RNA, 19 nt, Artificial Sequence
  Description of Artificial Sequence: Synthetic oligonucleotide
uccccguuaguguaugugu

SEQ ID NO: 1120721 - RNA, 19 nt, Artificial Sequence
  Description of Artificial Sequence: Synthetic oligonucleotide
uagcuacccaacaagucau

SEQ ID NO: 1120722 - RNA, 19 nt, Artificial Sequence
  Description of Artificial Sequence: Synthetic oligonucleotide
guccguuuugaaauccugg

SEQ ID NO: 1120723 - RNA, 19 nt, Artificial Sequence
  Description of Artificial Sequence: Synthetic oligonucleotide
gagggcgcgcuuuuccugg

SEQ ID NO: 1120724 - RNA, 19 nt, Artificial Sequence
  Description of Artificial Sequence: Synthetic oligonucleotide
agaucaguaacaggugaug

SEQ ID NO: 1120725 - RNA, 19 nt, Artificial Sequence
  Description of Artificial Sequence: Synthetic oligonucleotide
uuacuacaaaaugccauaa

SEQ ID NO: 1120726 - RNA, 19 nt, Artificial Sequence
  Description of Artificial Sequence: Synthetic oligonucleotide
aucagcuagaggguuaaca

SEQ ID NO: 1120727 - RNA, 19 nt, Artificial Sequence
  Description of Artificial Sequence: Synthetic oligonucleotide
gacaguaaccagguguaac

SEQ ID NO: 1120728 - RNA, 19 nt, Artificial Sequence
  Description of Artificial Sequence: Synthetic oligonucleotide
gcaaucgccgaguggaacg

SEQ ID NO: 1120729 - RNA, 19 nt, Artificial Sequence
  Description of Artificial Sequence: Synthetic oligonucleotide
gucgacuucugguagcgac

SEQ ID NO: 1120730 - RNA, 19 nt, Artificial Sequence
  Description of Artificial Sequence: Synthetic oligonucleotide
uuuagucaacauacauaau

SEQ ID NO: 1120731 - RNA, 19 nt, Artificial Sequence
  Description of Artificial Sequence: Synthetic oligonucleotide
guuuagacuccacaaggaa

SEQ ID NO: 1120732 - RNA, 19 nt, Artificial Sequence
  Description of Artificial Sequence: Synthetic oligonucleotide
aagacgccccaccacuugu

SEQ ID NO: 1120733 - RNA, 19 nt, Artificial Sequence
  Description of Artificial Sequence: Synthetic oligonucleotide
auaguguauucuauagcug

SEQ ID NO: 1120734 - RNA, 19 nt, Artificial Sequence
  Description of Artificial Sequence: Synthetic oligonucleotide
ucaaguccguuuugaaauc

SEQ ID NO: 1120735 - RNA, 19 nt, Artificial Sequence
  Description of Artificial Sequence: Synthetic oligonucleotide
cauaaccaguuuuauugca

SEQ ID NO: 1120736 - RNA, 19 nt, Artificial Sequence
  Description of Artificial Sequence: Synthetic oligonucleotide
cuacguuguuaaacaaaug

SEQ ID NO: 1120737 - RNA, 19 nt, Artificial Sequence
  Description of Artificial Sequence: Synthetic oligonucleotide
agaggguuaacauguggua

SEQ ID NO: 1120738 - RNA, 19 nt, Artificial Sequence
  Description of Artificial Sequence: Synthetic oligonucleotide
uaaccuaacccaucuucau

SEQ ID NO: 1120739 - RNA, 19 nt, Artificial Sequence
  Description of Artificial Sequence: Synthetic oligonucleotide
aacagccgcaaucgccgag

SEQ ID NO: 1120740 - RNA, 19 nt, Artificial Sequence
  Description of Artificial Sequence: Synthetic oligonucleotide
ugaaaccucaaguccguuu

SEQ ID NO: 1120741 - RNA, 19 nt, Artificial Sequence
  Description of Artificial Sequence: Synthetic oligonucleotide
cacuucguugaauaaacaa

SEQ ID NO: 1120742 - RNA, 19 nt, Artificial Sequence
  Description of Artificial Sequence: Synthetic oligonucleotide
acuagaucaguaacaggug

SEQ ID NO: 1120743 - RNA, 19 nt, Artificial Sequence
  Description of Artificial Sequence: Synthetic oligonucleotide
cauacauacgcauagcauu

SEQ ID NO: 1120744 - RNA, 19 nt, Artificial Sequence
  Description of Artificial Sequence: Synthetic oligonucleotide
agcgacggaucucucuuag

SEQ ID NO: 1120745 - RNA, 19 nt, Artificial Sequence
  Description of Artificial Sequence: Synthetic oligonucleotide
ggacccuguacauuuauca

SEQ ID NO: 1120746 - RNA, 19 nt, Artificial Sequence
  Description of Artificial Sequence: Synthetic oligonucleotide
uaucacagugauguauggu

SEQ ID NO: 1120747 - RNA, 19 nt, Artificial Sequence
  Description of Artificial Sequence: Synthetic oligonucleotide
agagcccuuauaaauaaaa

SEQ ID NO: 1120748 - RNA, 19 nt, Artificial Sequence
  Description of Artificial Sequence: Synthetic oligonucleotide
cauaauugaccuagaaacu

SEQ ID NO: 1120749 - RNA, 19 nt, Artificial Sequence
  Description of Artificial Sequence: Synthetic oligonucleotide
aaaaccgccuugacuuaag

SEQ ID NO: 1120750 - RNA, 19 nt, Artificial Sequence
  Description of Artificial Sequence: Synthetic oligonucleotide
cacccaaagccgaagucug

SEQ ID NO: 1120751 - RNA, 19 nt, Artificial Sequence
  Description of Artificial Sequence: Synthetic oligonucleotide
aaggacccuguacauuuau

SEQ ID NO: 1120752 - RNA, 19 nt, Artificial Sequence
  Description of Artificial Sequence: Synthetic oligonucleotide
ugaacucaaucuaggcaua

SEQ ID NO: 1120753 - RNA, 19 nt, Artificial Sequence
  Description of Artificial Sequence: Synthetic oligonucleotide
guaaccuaacccaucuuca

SEQ ID NO: 1120754 - RNA, 19 nt, Artificial Sequence
  Description of Artificial Sequence: Synthetic oligonucleotide
ugacaagacgccccaccac

SEQ ID NO: 1120755 - RNA, 19 nt, Artificial Sequence
  Description of Artificial Sequence: Synthetic oligonucleotide
aaauccccguuaguguaug

SEQ ID NO: 1120756 - RNA, 19 nt, Artificial Sequence
  Description of Artificial Sequence: Synthetic oligonucleotide
caaguccguuuugaaaucc

SEQ ID NO: 1120757 - RNA, 19 nt, Artificial Sequence
  Description of Artificial Sequence: Synthetic oligonucleotide
acugcacuaacuagaucag

SEQ ID NO: 1120758 - RNA, 19 nt, Artificial Sequence
  Description of Artificial Sequence: Synthetic oligonucleotide
acccguggacuuccuagcg

SEQ ID NO: 1120759 - RNA, 19 nt, Artificial Sequence
  Description of Artificial Sequence: Synthetic oligonucleotide
guaugguuaaacacuugga

SEQ ID NO: 1120760 - RNA, 19 nt, Artificial Sequence
  Description of Artificial Sequence: Synthetic oligonucleotide
acucuagagcccuuauaaa

SEQ ID NO: 1120761 - RNA, 19 nt, Artificial Sequence
  Description of Artificial Sequence: Synthetic oligonucleotide
ucucucuuagagccacggu

SEQ ID NO: 1120762 - RNA, 19 nt, Artificial Sequence
  Description of Artificial Sequence: Synthetic oligonucleotide
ggugugaauaacuuguuau

SEQ ID NO: 1120763 - RNA, 19 nt, Artificial Sequence
  Description of Artificial Sequence: Synthetic oligonucleotide
gacaagacgccccaccacu

SEQ ID NO: 1120764 - RNA, 19 nt, Artificial Sequence
  Description of Artificial Sequence: Synthetic oligonucleotide
agguacgcuucacuggccu

SEQ ID NO: 1120765 - RNA, 19 nt, Artificial Sequence
  Description of Artificial Sequence: Synthetic oligonucleotide
ucgccgaguggaacggaag

SEQ ID NO: 1120766 - RNA, 19 nt, Artificial Sequence
  Description of Artificial Sequence: Synthetic oligonucleotide
aguaaccagguguaaccua

SEQ ID NO: 1120767 - RNA, 19 nt, Artificial Sequence
  Description of Artificial Sequence: Synthetic oligonucleotide
cuaucacccaucccuucug

SEQ ID NO: 1120768 - RNA, 19 nt, Artificial Sequence
  Description of Artificial Sequence: Synthetic oligonucleotide
auacauacgcauagcauuu

SEQ ID NO: 1120769 - RNA, 19 nt, Artificial Sequence
  Description of Artificial Sequence: Synthetic oligonucleotide
aaaauccccguuaguguau

SEQ ID NO: 1120770 - RNA, 19 nt, Artificial Sequence
  Description of Artificial Sequence: Synthetic oligonucleotide
aaguccguuuugaaauccu

SEQ ID NO: 1120771 - RNA, 19 nt, Artificial Sequence
  Description of Artificial Sequence: Synthetic oligonucleotide
guuagcgcucgaacaacag

SEQ ID NO: 1120772 - RNA, 19 nt, Artificial Sequence
  Description of Artificial Sequence: Synthetic oligonucleotide
ggaaacuguuacacugugg

SEQ ID NO: 1120773 - RNA, 19 nt, Artificial Sequence
  Description of Artificial Sequence: Synthetic oligonucleotide
uagagggcgcgcuuuuccu

SEQ ID NO: 1120774 - RNA, 19 nt, Artificial Sequence
  Description of Artificial Sequence: Synthetic oligonucleotide
gauguaugguuaaacacuu

SEQ ID NO: 1120775 - RNA, 19 nt, Artificial Sequence
  Description of Artificial Sequence: Synthetic oligonucleotide
uagagcccuuauaaauaaa

SEQ ID NO: 1120776 - RNA, 19 nt, Artificial Sequence
  Description of Artificial Sequence: Synthetic oligonucleotide
cucuagagcccuuauaaau

SEQ ID NO: 1120777 - RNA, 19 nt, Artificial Sequence
  Description of Artificial Sequence: Synthetic oligonucleotide
cagucgacuucugguagcg

SEQ ID NO: 1120778 - RNA, 19 nt, Artificial Sequence
  Description of Artificial Sequence: Synthetic oligonucleotide
aacgaacgaccaaaccgcu

SEQ ID NO: 1120779 - RNA, 19 nt, Artificial Sequence
  Description of Artificial Sequence: Synthetic oligonucleotide
guauccggcgagccaacug

SEQ ID NO: 1120780 - RNA, 19 nt, Artificial Sequence
  Description of Artificial Sequence: Synthetic oligonucleotide
aauccccguuaguguaugu

SEQ ID NO: 1120781 - RNA, 19 nt, Artificial Sequence
  Description of Artificial Sequence: Synthetic oligonucleotide
ccagguacgcuucacuggc

SEQ ID NO: 1120782 - RNA, 19 nt, Artificial Sequence
  Description of Artificial Sequence: Synthetic oligonucleotide
cacccguggacuuccuagc

SEQ ID NO: 1120783 - RNA, 19 nt, Artificial Sequence
  Description of Artificial Sequence: Synthetic oligonucleotide
caaucgccgaguggaacgg

SEQ ID NO: 1120784 - RNA, 19 nt, Artificial Sequence
  Description of Artificial Sequence: Synthetic oligonucleotide
agagggcgcgcuuuuccug

SEQ ID NO: 1120785 - RNA, 19 nt, Artificial Sequence
  Description of Artificial Sequence: Synthetic oligonucleotide
cuccaacgaacgaccaaac

SEQ ID NO: 1120786 - RNA, 19 nt, Artificial Sequence
  Description of Artificial Sequence: Synthetic oligonucleotide
gaacgaccaaaccgcucug

SEQ ID NO: 1120787 - RNA, 19 nt, Artificial Sequence
  Description of Artificial Sequence: Synthetic oligonucleotide
aguccguuuugaaauccug

SEQ ID NO: 1120788 - RNA, 19 nt, Artificial Sequence
  Description of Artificial Sequence: Synthetic oligonucleotide
uuuugacacuucguugaau

SEQ ID NO: 1120789 - RNA, 19 nt, Artificial Sequence
  Description of Artificial Sequence: Synthetic oligonucleotide
agguguaaccuaacccauc

SEQ ID NO: 1120790 - RNA, 19 nt, Artificial Sequence
  Description of Artificial Sequence: Synthetic oligonucleotide
ucuucaccccgccgguaga

SEQ ID NO: 1120791 - RNA, 19 nt, Artificial Sequence
  Description of Artificial Sequence: Synthetic oligonucleotide
aggacaguaaccaggugua

SEQ ID NO: 1120792 - RNA, 19 nt, Artificial Sequence
  Description of Artificial Sequence: Synthetic oligonucleotide
accgccgcgccgcuguuag

SEQ ID NO: 1120793 - RNA, 19 nt, Artificial Sequence
  Description of Artificial Sequence: Synthetic oligonucleotide
gcaacuugucacuccugag

SEQ ID NO: 1120794 - RNA, 19 nt, Artificial Sequence
  Description of Artificial Sequence: Synthetic oligonucleotide
ccguuuugaaauccugggc

SEQ ID NO: 1120795 - RNA, 19 nt, Artificial Sequence
  Description of Artificial Sequence: Synthetic oligonucleotide
cacagugauguaugguuaa

SEQ ID NO: 1120796 - RNA, 19 nt, Artificial Sequence
  Description of Artificial Sequence: Synthetic oligonucleotide
caagacgccccaccacuug

SEQ ID NO: 1120797 - RNA, 19 nt, Artificial Sequence
  Description of Artificial Sequence: Synthetic oligonucleotide
ccuuaaugacaagacgccc

SEQ ID NO: 1120798 - RNA, 19 nt, Artificial Sequence
  Description of Artificial Sequence: Synthetic oligonucleotide
gugcucacgucacugaggu

SEQ ID NO: 1120799 - RNA, 19 nt, Artificial Sequence
  Description of Artificial Sequence: Synthetic oligonucleotide
gcuguuagcgcucgaacaa

SEQ ID NO: 1120800 - RNA, 19 nt, Artificial Sequence
  Description of Artificial Sequence: Synthetic oligonucleotide
caaacaaccccaccaggua

SEQ ID NO: 1120801 - RNA, 19 nt, Artificial Sequence
  Description of Artificial Sequence: Synthetic oligonucleotide
agccgcaaucgccgagugg

SEQ ID NO: 1120802 - RNA, 19 nt, Artificial Sequence
  Description of Artificial Sequence: Synthetic oligonucleotide
cuguuagcgcucgaacaac

SEQ ID NO: 1120803 - RNA, 19 nt, Artificial Sequence
  Description of Artificial Sequence: Synthetic oligonucleotide
agggcgcgcuuuuccuggc

SEQ ID NO: 1120804 - RNA, 19 nt, Artificial Sequence
  Description of Artificial Sequence: Synthetic oligonucleotide
ggugaugcuggugugaaua

SEQ ID NO: 1120805 - RNA, 19 nt, Artificial Sequence
  Description of Artificial Sequence: Synthetic oligonucleotide
auucuauagcugccagguu

SEQ ID NO: 1120806 - RNA, 19 nt, Artificial Sequence
  Description of Artificial Sequence: Synthetic oligonucleotide
gcaaguacuaucacccauc

SEQ ID NO: 1120807 - RNA, 19 nt, Artificial Sequence
  Description of Artificial Sequence: Synthetic oligonucleotide
acgaacgaccaaaccgcuc

SEQ ID NO: 1120808 - RNA, 19 nt, Artificial Sequence
  Description of Artificial Sequence: Synthetic oligonucleotide
auucuaucacagugaugua

SEQ ID NO: 1120809 - RNA, 19 nt, Artificial Sequence
  Description of Artificial Sequence: Synthetic oligonucleotide
acauucuaucacagugaug

SEQ ID NO: 1120810 - RNA, 19 nt, Artificial Sequence
  Description of Artificial Sequence: Synthetic oligonucleotide
uucccacccguggacuucc

SEQ ID NO: 1120811 - RNA, 19 nt, Artificial Sequence
  Description of Artificial Sequence: Synthetic oligonucleotide
ccacccguggacuuccuag

SEQ ID NO: 1120812 - RNA, 19 nt, Artificial Sequence
  Description of Artificial Sequence: Synthetic oligonucleotide
gcauaagaccaaacaacac

SEQ ID NO: 1120813 - RNA, 19 nt, Artificial Sequence
  Description of Artificial Sequence: Synthetic oligonucleotide
uaaugacaagacgccccac

SEQ ID NO: 1120814 - RNA, 19 nt, Artificial Sequence
  Description of Artificial Sequence: Synthetic oligonucleotide
gugaugcuggugugaauaa

SEQ ID NO: 1120815 - RNA, 19 nt, Artificial Sequence
  Description of Artificial Sequence: Synthetic oligonucleotide
ggacuaaauuacacacacc

SEQ ID NO: 1120816 - RNA, 19 nt, Artificial Sequence
  Description of Artificial Sequence: Synthetic oligonucleotide
acagccgcaaucgccgagu

SEQ ID NO: 1120817 - RNA, 19 nt, Artificial Sequence
  Description of Artificial Sequence: Synthetic oligonucleotide
gccgcaaucgccgagugga

SEQ ID NO: 1120818 - RNA, 19 nt, Artificial Sequence
  Description of Artificial Sequence: Synthetic oligonucleotide
acacuucguugaauaaaca

SEQ ID NO: 1120819 - RNA, 19 nt, Artificial Sequence
  Description of Artificial Sequence: Synthetic oligonucleotide
cccgucaagaagcaccaac

SEQ ID NO: 1120820 - RNA, 19 nt, Artificial Sequence
  Description of Artificial Sequence: Synthetic oligonucleotide
aucuaggcauaagaccaaa

SEQ ID NO: 1120821 - RNA, 19 nt, Artificial Sequence
  Description of Artificial Sequence: Synthetic oligonucleotide
gacgccccaccacuuguga

SEQ ID NO: 1120822 - RNA, 19 nt, Artificial Sequence
  Description of Artificial Sequence: Synthetic oligonucleotide
agcaccaacuggacuaaau

SEQ ID NO: 1120823 - RNA, 19 nt, Artificial Sequence
  Description of Artificial Sequence: Synthetic oligonucleotide
uacauacgcauagcauuuu

SEQ ID NO: 1120824 - RNA, 19 nt, Artificial Sequence
  Description of Artificial Sequence: Synthetic oligonucleotide
gagcccuuauaaauaaaau

SEQ ID NO: 1120825 - RNA, 19 nt, Artificial Sequence
  Description of Artificial Sequence: Synthetic oligonucleotide
accccgccgguagagggcg

SEQ ID NO: 1120826 - RNA, 19 nt, Artificial Sequence
  Description of Artificial Sequence: Synthetic oligonucleotide
aaucgccgaguggaacgga

SEQ ID NO: 1120827 - RNA, 19 nt, Artificial Sequence
  Description of Artificial Sequence: Synthetic oligonucleotide
guagcgacggaucucucuu

SEQ ID NO: 1120828 - RNA, 19 nt, Artificial Sequence
  Description of Artificial Sequence: Synthetic oligonucleotide
gcacauaguguauucuaua

SEQ ID NO: 1120829 - RNA, 19 nt, Artificial Sequence
  Description of Artificial Sequence: Synthetic oligonucleotide
cuauagcugccagguuuac

SEQ ID NO: 1120830 - RNA, 19 nt, Artificial Sequence
  Description of Artificial Sequence: Synthetic oligonucleotide
uccggcgagccaacuggau

SEQ ID NO: 1120831 - RNA, 19 nt, Artificial Sequence
  Description of Artificial Sequence: Synthetic oligonucleotide
acggaagaucuuccuccaa

SEQ ID NO: 1120832 - RNA, 19 nt, Artificial Sequence
  Description of Artificial Sequence: Synthetic oligonucleotide
uagcgacggaucucucuua

SEQ ID NO: 1120833 - RNA, 19 nt, Artificial Sequence
  Description of Artificial Sequence: Synthetic oligonucleotide
gcgaucucccucaccaacc

SEQ ID NO: 1120834 - RNA, 19 nt, Artificial Sequence
  Description of Artificial Sequence: Synthetic oligonucleotide
cgucaagaagcaccaacug

SEQ ID NO: 1120835 - RNA, 19 nt, Artificial Sequence
  Description of Artificial Sequence: Synthetic oligonucleotide
gcucagucgacuucuggua

SEQ ID NO: 1120836 - RNA, 19 nt, Artificial Sequence
  Description of Artificial Sequence: Synthetic oligonucleotide
cacuuggaucaagucauaa

SEQ ID NO: 1120837 - RNA, 19 nt, Artificial Sequence
  Description of Artificial Sequence: Synthetic oligonucleotide
uuucuucaccccgccggua

SEQ ID NO: 1120838 - RNA, 19 nt, Artificial Sequence
  Description of Artificial Sequence: Synthetic oligonucleotide
ccccguuaguguauguguc

SEQ ID NO: 1120839 - RNA, 19 nt, Artificial Sequence
  Description of Artificial Sequence: Synthetic oligonucleotide
ggcgcgcuuuuccuggcug

SEQ ID NO: 1120840 - RNA, 19 nt, Artificial Sequence
  Description of Artificial Sequence: Synthetic oligonucleotide
acgccccaccacuugugaa

SEQ ID NO: 1120841 - RNA, 19 nt, Artificial Sequence
  Description of Artificial Sequence: Synthetic oligonucleotide
agacgccccaccacuugug

SEQ ID NO: 1120842 - RNA, 19 nt, Artificial Sequence
  Description of Artificial Sequence: Synthetic oligonucleotide
gcuagaggguuaacaugug

SEQ ID NO: 1120843 - RNA, 19 nt, Artificial Sequence
  Description of Artificial Sequence: Synthetic oligonucleotide
aucgccgaguggaacggaa

SEQ ID NO: 1120844 - RNA, 19 nt, Artificial Sequence
  Description of Artificial Sequence: Synthetic oligonucleotide
cagccgcaaucgccgagug

SEQ ID NO: 1120845 - RNA, 19 nt, Artificial Sequence
  Description of Artificial Sequence: Synthetic oligonucleotide
cccguuaguguauguguca

SEQ ID NO: 1120846 - RNA, 19 nt, Artificial Sequence
  Description of Artificial Sequence: Synthetic oligonucleotide
ccgaguggaacggaagauc

SEQ ID NO: 1120847 - RNA, 19 nt, Artificial Sequence
  Description of Artificial Sequence: Synthetic oligonucleotide
agucgacuucugguagcga

SEQ ID NO: 1120848 - RNA, 19 nt, Artificial Sequence
  Description of Artificial Sequence: Synthetic oligonucleotide
cugcaagguuucauacaua

SEQ ID NO: 1120849 - RNA, 19 nt, Artificial Sequence
  Description of Artificial Sequence: Synthetic oligonucleotide
ggguuaacaugugguagaa

SEQ ID NO: 1120850 - RNA, 19 nt, Artificial Sequence
  Description of Artificial Sequence: Synthetic oligonucleotide
acaagacgccccaccacuu

SEQ ID NO: 1120851 - RNA, 19 nt, Artificial Sequence
  Description of Artificial Sequence: Synthetic oligonucleotide
ccuccaacgaacgaccaaa

SEQ ID NO: 1120852 - RNA, 19 nt, Artificial Sequence
  Description of Artificial Sequence: Synthetic oligonucleotide
gcaccaacuggacuaaauu

SEQ ID NO: 1120853 - RNA, 19 nt, Artificial Sequence
  Description of Artificial Sequence: Synthetic oligonucleotide
gcugggaccgccgcgccgc

SEQ ID NO: 1120854 - RNA, 19 nt, Artificial Sequence
  Description of Artificial Sequence: Synthetic oligonucleotide
ccgucaagaagcaccaacu

SEQ ID NO: 1120855 - RNA, 19 nt, Artificial Sequence
  Description of Artificial Sequence: Synthetic oligonucleotide
gcgcgcuuuuccuggcugc

SEQ ID NO: 1120856 - RNA, 19 nt, Artificial Sequence
  Description of Artificial Sequence: Synthetic oligonucleotide
caacagccgcaaucgccga

SEQ ID NO: 1120857 - RNA, 19 nt, Artificial Sequence
  Description of Artificial Sequence: Synthetic oligonucleotide
auuuuacucuagagcccuu

SEQ ID NO: 1120858 - RNA, 19 nt, Artificial Sequence
  Description of Artificial Sequence: Synthetic oligonucleotide
auccggcgagccaacugga

SEQ ID NO: 1120859 - RNA, 19 nt, Artificial Sequence
  Description of Artificial Sequence: Synthetic oligonucleotide
cgaacgaccaaaccgcucu

SEQ ID NO: 1120860 - RNA, 19 nt, Artificial Sequence
  Description of Artificial Sequence: Synthetic oligonucleotide
ccaaaccgcucugcgcucc

SEQ ID NO: 1120861 - RNA, 19 nt, Artificial Sequence
  Description of Artificial Sequence: Synthetic oligonucleotide
gcuacccaacaagucauua

SEQ ID NO: 1120862 - RNA, 19 nt, Artificial Sequence
  Description of Artificial Sequence: Synthetic oligonucleotide
cagucccgucaagaagcac

SEQ ID NO: 1120863 - RNA, 19 nt, Artificial Sequence
  Description of Artificial Sequence: Synthetic oligonucleotide
ccaauggcugcacucugaa

SEQ ID NO: 1120864 - RNA, 19 nt, Artificial Sequence
  Description of Artificial Sequence: Synthetic oligonucleotide
acgcuucacuggccuccug

SEQ ID NO: 1120865 - RNA, 19 nt, Artificial Sequence
  Description of Artificial Sequence: Synthetic oligonucleotide
uccuagcggucugcuuggu

SEQ ID NO: 1120866 - RNA, 19 nt, Artificial Sequence
  Description of Artificial Sequence: Synthetic oligonucleotide
agcuacccaacaagucauu

SEQ ID NO: 1120867 - RNA, 19 nt, Artificial Sequence
  Description of Artificial Sequence: Synthetic oligonucleotide
ccaccacuugugaauguaa

SEQ ID NO: 1120868 - RNA, 19 nt, Artificial Sequence
  Description of Artificial Sequence: Synthetic oligonucleotide
ucccgucaagaagcaccaa

SEQ ID NO: 1120869 - RNA, 19 nt, Artificial Sequence
  Description of Artificial Sequence: Synthetic oligonucleotide
cugcacuaacuagaucagu

SEQ ID NO: 1120870 - RNA, 19 nt, Artificial Sequence
  Description of Artificial Sequence: Synthetic oligonucleotide
ccccauguuuagacuccac

SEQ ID NO: 1120871 - RNA, 19 nt, Artificial Sequence
  Description of Artificial Sequence: Synthetic oligonucleotide
cgccgcgccgcuguuagcg

SEQ ID NO: 1120872 - RNA, 19 nt, Artificial Sequence
  Description of Artificial Sequence: Synthetic oligonucleotide
ccgccuugacuuaagcucu

SEQ ID NO: 1120873 - RNA, 19 nt, Artificial Sequence
  Description of Artificial Sequence: Synthetic oligonucleotide
gcgacggaucucucuuaga

SEQ ID NO: 1120874 - RNA, 19 nt, Artificial Sequence
  Description of Artificial Sequence: Synthetic oligonucleotide
agccgaagucugaggcccu

SEQ ID NO: 1120875 - RNA, 19 nt, Artificial Sequence
  Description of Artificial Sequence: Synthetic oligonucleotide
ggacaguaaccagguguaa

SEQ ID NO: 1120876 - RNA, 19 nt, Artificial Sequence
  Description of Artificial Sequence: Synthetic oligonucleotide
gcagucccgucaagaagca

SEQ ID NO: 1120877 - RNA, 19 nt, Artificial Sequence
  Description of Artificial Sequence: Synthetic oligonucleotide
gggauuuucccaggacagu

SEQ ID NO: 1120878 - RNA, 19 nt, Artificial Sequence
  Description of Artificial Sequence: Synthetic oligonucleotide
cccguauccggcgagccaa

SEQ ID NO: 1120879 - RNA, 19 nt, Artificial Sequence
  Description of Artificial Sequence: Synthetic oligonucleotide
cgcaaucgccgaguggaac

SEQ ID NO: 1120880 - RNA, 19 nt, Artificial Sequence
  Description of Artificial Sequence: Synthetic oligonucleotide
ccguauccggcgagccaac

SEQ ID NO: 1120881 - RNA, 19 nt, Artificial Sequence
  Description of Artificial Sequence: Synthetic oligonucleotide
cgcgcuuuuccuggcugcc

SEQ ID NO: 1120882 - RNA, 19 nt, Artificial Sequence
  Description of Artificial Sequence: Synthetic oligonucleotide
cccgccgguagagggcgcg

SEQ ID NO: 1120883 - RNA, 19 nt, Artificial Sequence
  Description of Artificial Sequence: Synthetic oligonucleotide
cucgaacaacagccgcaau

SEQ ID NO: 1120884 - RNA, 19 nt, Artificial Sequence
  Description of Artificial Sequence: Synthetic oligonucleotide
cggaucucucuuagagcca

SEQ ID NO: 1120885 - RNA, 19 nt, Artificial Sequence
  Description of Artificial Sequence: Synthetic oligonucleotide
ccguuaguguaugugucau

SEQ ID NO: 1120886 - RNA, 19 nt, Artificial Sequence
  Description of Artificial Sequence: Synthetic oligonucleotide
gccuugacuuaagcucucu

SEQ ID NO: 1120887 - RNA, 19 nt, Artificial Sequence
  Description of Artificial Sequence: Synthetic oligonucleotide
ccccguauccggcgagcca

SEQ ID NO: 1120888 - RNA, 19 nt, Artificial Sequence
  Description of Artificial Sequence: Synthetic oligonucleotide
ccgcaaucgccgaguggaa

SEQ ID NO: 1120889 - RNA, 19 nt, Artificial Sequence
  Description of Artificial Sequence: Synthetic oligonucleotide
gcgagccaacuggaugucu

SEQ ID NO: 1120890 - RNA, 19 nt, Artificial Sequence
  Description of Artificial Sequence: Synthetic oligonucleotide
ccgccgguagagggcgcgc

SEQ ID NO: 1120891 - RNA, 19 nt, Artificial Sequence
  Description of Artificial Sequence: Synthetic oligonucleotide
gggcgcgcuuuuccuggcu

SEQ ID NO: 1120892 - RNA, 19 nt, Artificial Sequence
  Description of Artificial Sequence: Synthetic oligonucleotide
gcgcuuuuccuggcugccu

SEQ ID NO: 1120893 - RNA, 19 nt, Artificial Sequence
  Description of Artificial Sequence: Synthetic oligonucleotide
ccccgccgguagagggcgc

SEQ ID NO: 1120894 - RNA, 19 nt, Artificial Sequence
  Description of Artificial Sequence: Synthetic oligonucleotide
ccgccgcgccgcuguuagc

SEQ ID NO: 1120895 - RNA, 19 nt, Artificial Sequence
  Description of Artificial Sequence: Synthetic oligonucleotide
ccuagcggucugcuugguu

SEQ ID NO: 1120896 - RNA, 19 nt, Artificial Sequence
  Description of Artificial Sequence: Synthetic oligonucleotide
cccacccguggacuuccua

SEQ ID NO: 1120897 - RNA, 19 nt, Artificial Sequence
  Description of Artificial Sequence: Synthetic oligonucleotide
cugggaccgccgcgccgcu

SEQ ID NO: 1120898 - RNA, 19 nt, Artificial Sequence
  Description of Artificial Sequence: Synthetic oligonucleotide
cguauccggcgagccaacu

SEQ ID NO: 1120899 - RNA, 19 nt, Artificial Sequence
  Description of Artificial Sequence: Synthetic oligonucleotide
cgccgguagagggcgcgcu

SEQ ID NO: 1120900 - RNA, 19 nt, Artificial Sequence
  Description of Artificial Sequence: Synthetic oligonucleotide
aggugaaugaaccagacac

SEQ ID NO: 1120901 - RNA, 19 nt, Artificial Sequence
  Description of Artificial Sequence: Synthetic oligonucleotide
aaauauggcauccuagcac

SEQ ID NO: 1120902 - RNA, 19 nt, Artificial Sequence
  Description of Artificial Sequence: Synthetic oligonucleotide
aaguagaugagccccacgc

SEQ ID NO: 1120903 - RNA, 19 nt, Artificial Sequence
  Description of Artificial Sequence: Synthetic oligonucleotide
gauaguccaacacaggacg

SEQ ID NO: 1120904 - RNA, 19 nt, Artificial Sequence
  Description of Artificial Sequence: Synthetic oligonucleotide
uaggauucaugucaggucg

SEQ ID NO: 1120905 - RNA, 19 nt, Artificial Sequence
  Description of Artificial Sequence: Synthetic oligonucleotide
aaaauuccgaaaugcauug

SEQ ID NO: 1120906 - RNA, 19 nt, Artificial Sequence
  Description of Artificial Sequence: Synthetic oligonucleotide
aauauggcauccuagcacu

SEQ ID NO: 1120907 - RNA, 19 nt, Artificial Sequence
  Description of Artificial Sequence: Synthetic oligonucleotide
aaagaaaggacauccuccu

SEQ ID NO: 1120908 - RNA, 19 nt, Artificial Sequence
  Description of Artificial Sequence: Synthetic oligonucleotide
  modified_base (18)..(18): a, c, u, g, unknown or other
cauaguauggcucgaagng

SEQ ID NO: 1120909 - RNA, 19 nt, Artificial Sequence
  Description of Artificial Sequence: Synthetic oligonucleotide
aauucgcugguugaagugc

SEQ ID NO: 1120910 - RNA, 19 nt, Artificial Sequence
  Description of Artificial Sequence: Synthetic oligonucleotide
uguaugaacagcucuugag

SEQ ID NO: 1120911 - RNA, 19 nt, Artificial Sequence
  Description of Artificial Sequence: Synthetic oligonucleotide
uucaucucuaaccugacaa

SEQ ID NO: 1120912 - RNA, 19 nt, Artificial Sequence
  Description of Artificial Sequence: Synthetic oligonucleotide
aaugauccaagauucugca

SEQ ID NO: 1120913 - RNA, 19 nt, Artificial Sequence
  Description of Artificial Sequence: Synthetic oligonucleotide
  modified_base (7)..(7): a, c, u, g, unknown or other
ucgaagngcucacuggagg

SEQ ID NO: 1120914 - RNA, 19 nt, Artificial Sequence
  Description of Artificial Sequence: Synthetic oligonucleotide
uguaguagcagguaugaaa

SEQ ID NO: 1120915 - RNA, 19 nt, Artificial Sequence
  Description of Artificial Sequence: Synthetic oligonucleotide
guuaggagcuggcagaagg

SEQ ID NO: 1120916 - RNA, 19 nt, Artificial Sequence
  Description of Artificial Sequence: Synthetic oligonucleotide
uuguagaagaacuucuucu

SEQ ID NO: 1120917 - RNA, 19 nt, Artificial Sequence
  Description of Artificial Sequence: Synthetic oligonucleotide
gugugaagaggucaaaagg

SEQ ID NO: 1120918 - RNA, 19 nt, Artificial Sequence
  Description of Artificial Sequence: Synthetic oligonucleotide
uuccgaaaugcauugaugu

SEQ ID NO: 1120919 - RNA, 19 nt, Artificial Sequence
  Description of Artificial Sequence: Synthetic oligonucleotide
cugcaagacacacugauag

SEQ ID NO: 1120920 - RNA, 19 nt, Artificial Sequence
  Description of Artificial Sequence: Synthetic oligonucleotide
auaggauucaugucagguc

SEQ ID NO: 1120921 - RNA, 19 nt, Artificial Sequence
  Description of Artificial Sequence: Synthetic oligonucleotide
agaacgucccuccaguuuc

SEQ ID NO: 1120922 - RNA, 19 nt, Artificial Sequence
  Description of Artificial Sequence: Synthetic oligonucleotide
uaugaaacggggcaaugga

SEQ ID NO: 1120923 - RNA, 19 nt, Artificial Sequence
  Description of Artificial Sequence: Synthetic oligonucleotide
uuggaaaccgccuucacaa

SEQ ID NO: 1120924 - RNA, 19 nt, Artificial Sequence
  Description of Artificial Sequence: Synthetic oligonucleotide
auguggauugcacugaucu

SEQ ID NO: 1120925 - RNA, 19 nt, Artificial Sequence
  Description of Artificial Sequence: Synthetic oligonucleotide
guccugacaauguagaggc

SEQ ID NO: 1120926 - RNA, 19 nt, Artificial Sequence
  Description of Artificial Sequence: Synthetic oligonucleotide
  modified_base (16)..(16): a, c, u, g, unknown or other
uaguauggcucgaagngcu

SEQ ID NO: 1120927 - RNA, 19 nt, Artificial Sequence
  Description of Artificial Sequence: Synthetic oligonucleotide
cucaccauaguauggcucg

SEQ ID NO: 1120928 - RNA, 19 nt, Artificial Sequence
  Description of Artificial Sequence: Synthetic oligonucleotide
cuaagauccuccaggauug

SEQ ID NO: 1120929 - RNA, 19 nt, Artificial Sequence
  Description of Artificial Sequence: Synthetic oligonucleotide
uuaaugauccaagauucug

SEQ ID NO: 1120930 - RNA, 19 nt, Artificial Sequence
  Description of Artificial Sequence: Synthetic oligonucleotide
aaaugcauugauguuuucu

SEQ ID NO: 1120931 - RNA, 19 nt, Artificial Sequence
  Description of Artificial Sequence: Synthetic oligonucleotide
uuguuguagaagaacuucu

SEQ ID NO: 1120932 - RNA, 19 nt, Artificial Sequence
  Description of Artificial Sequence: Synthetic oligonucleotide
cauauggaagccaucuccc

SEQ ID NO: 1120933 - RNA, 19 nt, Artificial Sequence
  Description of Artificial Sequence: Synthetic oligonucleotide
  modified_base (17)..(17): a, c, u, g, unknown or other
auaguauggcucgaagngc

SEQ ID NO: 1120934 - RNA, 19 nt, Artificial Sequence
  Description of Artificial Sequence: Synthetic oligonucleotide
acaucgaggauguggauug

SEQ ID NO: 1120935 - RNA, 19 nt, Artificial Sequence
  Description of Artificial Sequence: Synthetic oligonucleotide
aacuggguggaaauauggc

SEQ ID NO: 1120936 - RNA, 19 nt, Artificial Sequence
  Description of Artificial Sequence: Synthetic oligonucleotide
auauguuuaaugauccaag

SEQ ID NO: 1120937 - RNA, 19 nt, Artificial Sequence
  Description of Artificial Sequence: Synthetic oligonucleotide
ugaaugaaccagacacagg

SEQ ID NO: 1120938 - RNA, 19 nt, Artificial Sequence
  Description of Artificial Sequence: Synthetic oligonucleotide
augaggaacugacauaaca

SEQ ID NO: 1120939 - RNA, 19 nt, Artificial Sequence
  Description of Artificial Sequence: Synthetic oligonucleotide
acacagagcaguguguccc

SEQ ID NO: 1120940 - RNA, 19 nt, Artificial Sequence
  Description of Artificial Sequence: Synthetic oligonucleotide
ucuauggaaaccagccuga

SEQ ID NO: 1120941 - RNA, 19 nt, Artificial Sequence
  Description of Artificial Sequence: Synthetic oligonucleotide
gaaaccagccugaugcugg

SEQ ID NO: 1120942 - RNA, 19 nt, Artificial Sequence
  Description of Artificial Sequence: Synthetic oligonucleotide
gucgcugccauucagcacc

SEQ ID NO: 1120943 - RNA, 19 nt, Artificial Sequence
  Description of Artificial Sequence: Synthetic oligonucleotide
aaaccagccugaugcuggc

SEQ ID NO: 1120944 - RNA, 19 nt, Artificial Sequence
  Description of Artificial Sequence: Synthetic oligonucleotide
ugcccuaucucuauggaaa

SEQ ID NO: 1120945 - RNA, 19 nt, Artificial Sequence
  Description of Artificial Sequence: Synthetic oligonucleotide
uagcagguaugaaacgggg

SEQ ID NO: 1120946 - RNA, 19 nt, Artificial Sequence
  Description of Artificial Sequence: Synthetic oligonucleotide
ggaaauauggcauccuagc

SEQ ID NO: 1120947 - RNA, 19 nt, Artificial Sequence
  Description of Artificial Sequence: Synthetic oligonucleotide
gauugcacugaucuuccgc

SEQ ID NO: 1120948 - RNA, 19 nt, Artificial Sequence
  Description of Artificial Sequence: Synthetic oligonucleotide
uaucucuauggaaaccagc

SEQ ID NO: 1120949 - RNA, 19 nt, Artificial Sequence
  Description of Artificial Sequence: Synthetic oligonucleotide
ugacauaacagcagcugcu

SEQ ID NO: 1120950 - RNA, 19 nt, Artificial Sequence
  Description of Artificial Sequence: Synthetic oligonucleotide
ugaacagcucuugagaggu

SEQ ID NO: 1120951 - RNA, 19 nt, Artificial Sequence
  Description of Artificial Sequence: Synthetic oligonucleotide
uucaugucaggucgacugg

SEQ ID NO: 1120952 - RNA, 19 nt, Artificial Sequence
  Description of Artificial Sequence: Synthetic oligonucleotide
gaacuggguggaaauaugg

SEQ ID NO: 1120953 - RNA, 19 nt, Artificial Sequence
  Description of Artificial Sequence: Synthetic oligonucleotide
aagagccggcuguaguagc

SEQ ID NO: 1120954 - RNA, 19 nt, Artificial Sequence
  Description of Artificial Sequence: Synthetic oligonucleotide
uucugcaagacacacugau

SEQ ID NO: 1120955 - RNA, 19 nt, Artificial Sequence
  Description of Artificial Sequence: Synthetic oligonucleotide
guaguagcagguaugaaac

SEQ ID NO: 1120956 - RNA, 19 nt, Artificial Sequence
  Description of Artificial Sequence: Synthetic oligonucleotide
uggaugaaagaaaggacau

SEQ ID NO: 1120957 - RNA, 19 nt, Artificial Sequence
  Description of Artificial Sequence: Synthetic oligonucleotide
ugaaacggggcaauggaau

SEQ ID NO: 1120958 - RNA, 19 nt, Artificial Sequence
  Description of Artificial Sequence: Synthetic oligonucleotide
augaacagcucuugagagg

SEQ ID NO: 1120959 - RNA, 19 nt, Artificial Sequence
  Description of Artificial Sequence: Synthetic oligonucleotide
gaaauauggcauccuagca

SEQ ID NO: 1120960 - RNA, 19 nt, Artificial Sequence
  Description of Artificial Sequence: Synthetic oligonucleotide
acccugauaggauucaugu

SEQ ID NO: 1120961 - RNA, 19 nt, Artificial Sequence
  Description of Artificial Sequence: Synthetic oligonucleotide
cugacauaacagcagcugc

SEQ ID NO: 1120962 - RNA, 19 nt, Artificial Sequence
  Description of Artificial Sequence: Synthetic oligonucleotide
ucuggggcgagugauaucu

SEQ ID NO: 1120963 - RNA, 19 nt, Artificial Sequence
  Description of Artificial Sequence: Synthetic oligonucleotide
caccaugcaacgauagucc

SEQ ID NO: 1120964 - RNA, 19 nt, Artificial Sequence
  Description of Artificial Sequence: Synthetic oligonucleotide
ugcaacgauaguccaacac

SEQ ID NO: 1120965 - RNA, 19 nt, Artificial Sequence
  Description of Artificial Sequence: Synthetic oligonucleotide
ugaugggcuuugaagagac

SEQ ID NO: 1120966 - RNA, 19 nt, Artificial Sequence
  Description of Artificial Sequence: Synthetic oligonucleotide
  modified_base (4)..(4): a, c, u, g, unknown or other
aagngcucacuggaggcgg

SEQ ID NO: 1120967 - RNA, 19 nt, Artificial Sequence
  Description of Artificial Sequence: Synthetic oligonucleotide
ugaauucgcugguugaagu

SEQ ID NO: 1120968 - RNA, 19 nt, Artificial Sequence
  Description of Artificial Sequence: Synthetic oligonucleotide
uccaggacaaaauuccgaa

SEQ ID NO: 1120969 - RNA, 19 nt, Artificial Sequence
  Description of Artificial Sequence: Synthetic oligonucleotide
acacugauaggcccagaac

SEQ ID NO: 1120970 - RNA, 19 nt, Artificial Sequence
  Description of Artificial Sequence: Synthetic oligonucleotide
aguuuuggcaguaagcagu

SEQ ID NO: 1120971 - RNA, 19 nt, Artificial Sequence
  Description of Artificial Sequence: Synthetic oligonucleotide
aguagaacgucccuccagu

SEQ ID NO: 1120972 - RNA, 19 nt, Artificial Sequence
  Description of Artificial Sequence: Synthetic oligonucleotide
guaugaacagcucuugaga

SEQ ID NO: 1120973 - RNA, 19 nt, Artificial Sequence
  Description of Artificial Sequence: Synthetic oligonucleotide
cuagggaccuguaugaaca

SEQ ID NO: 1120974 - RNA, 19 nt, Artificial Sequence
  Description of Artificial Sequence: Synthetic oligonucleotide
cuugcgaucuguguugucc

SEQ ID NO: 1120975 - RNA, 19 nt, Artificial Sequence
  Description of Artificial Sequence: Synthetic oligonucleotide
guccggacaacagacagcg

SEQ ID NO: 1120976 - RNA, 19 nt, Artificial Sequence
  Description of Artificial Sequence: Synthetic oligonucleotide
caagaggugaaugaaccag

SEQ ID NO: 1120977 - RNA, 19 nt, Artificial Sequence
  Description of Artificial Sequence: Synthetic oligonucleotide
acacguucaaagcagcagu

SEQ ID NO: 1120978 - RNA, 19 nt, Artificial Sequence
  Description of Artificial Sequence: Synthetic oligonucleotide
gaauucgcugguugaagug

SEQ ID NO: 1120979 - RNA, 19 nt, Artificial Sequence
  Description of Artificial Sequence: Synthetic oligonucleotide
aaguggacacccuugcgau

SEQ ID NO: 1120980 - RNA, 19 nt, Artificial Sequence
  Description of Artificial Sequence: Synthetic oligonucleotide
guaugaaacggggcaaugg

SEQ ID NO: 1120981 - RNA, 19 nt, Artificial Sequence
  Description of Artificial Sequence: Synthetic oligonucleotide
cuuguuguagaagaacuuc

SEQ ID NO: 1120982 - RNA, 19 nt, Artificial Sequence
  Description of Artificial Sequence: Synthetic oligonucleotide
gagucacgcauauggaagc

SEQ ID NO: 1120983 - RNA, 19 nt, Artificial Sequence
  Description of Artificial Sequence: Synthetic oligonucleotide
uaguagcagguaugaaacg

SEQ ID NO: 1120984 - RNA, 19 nt, Artificial Sequence
  Description of Artificial Sequence: Synthetic oligonucleotide
ugccagacaccaugcaacg

SEQ ID NO: 1120985 - RNA, 19 nt, Artificial Sequence
  Description of Artificial Sequence: Synthetic oligonucleotide
uuuugcagaugaaguggcc

SEQ ID NO: 1120986 - RNA, 19 nt, Artificial Sequence
  Description of Artificial Sequence: Synthetic oligonucleotide
ggugugaagaggucaaaag

SEQ ID NO: 1120987 - RNA, 19 nt, Artificial Sequence
  Description of Artificial Sequence: Synthetic oligonucleotide
ugaaugccaugguccaugg

SEQ ID NO: 1120988 - RNA, 19 nt, Artificial Sequence
  Description of Artificial Sequence: Synthetic oligonucleotide
cuuuccaagaggugaauga

SEQ ID NO: 1120989 - RNA, 19 nt, Artificial Sequence
  Description of Artificial Sequence: Synthetic oligonucleotide
  modified_base (5)..(5): a, c, u, g, unknown or other
gaagngcucacuggaggcg

SEQ ID NO: 1120990 - RNA, 19 nt, Artificial Sequence
  Description of Artificial Sequence: Synthetic oligonucleotide
aggauguguccucugaaga

SEQ ID NO: 1120991 - RNA, 19 nt, Artificial Sequence
  Description of Artificial Sequence: Synthetic oligonucleotide
acaaagugccggucauccc

SEQ ID NO: 1120992 - RNA, 19 nt, Artificial Sequence
  Description of Artificial Sequence: Synthetic oligonucleotide
caugcaacgauaguccaac

SEQ ID NO: 1120993 - RNA, 19 nt, Artificial Sequence
  Description of Artificial Sequence: Synthetic oligonucleotide
agcgccaugaggaacugac

SEQ ID NO: 1120994 - RNA, 19 nt, Artificial Sequence
  Description of Artificial Sequence: Synthetic oligonucleotide
ugauaggauucaugucagg

SEQ ID NO: 1120995 - RNA, 19 nt, Artificial Sequence
  Description of Artificial Sequence: Synthetic oligonucleotide
ugccaugagaaaguggaca

SEQ ID NO: 1120996 - RNA, 19 nt, Artificial Sequence
  Description of Artificial Sequence: Synthetic oligonucleotide
cacaaagugccggucaucc

SEQ ID NO: 1120997 - RNA, 19 nt, Artificial Sequence
  Description of Artificial Sequence: Synthetic oligonucleotide
ugugccaccggaacccuug

SEQ ID NO: 1120998 - RNA, 19 nt, Artificial Sequence
  Description of Artificial Sequence: Synthetic oligonucleotide
uccgaccccacccucacca

SEQ ID NO: 1120999 - RNA, 19 nt, Artificial Sequence
  Description of Artificial Sequence: Synthetic oligonucleotide
accauaguauggcucgaag

SEQ ID NO: 1121000 - RNA, 19 nt, Artificial Sequence
  Description of Artificial Sequence: Synthetic oligonucleotide
aucauucccagguccuuuc

SEQ ID NO: 1121001 - RNA, 19 nt, Artificial Sequence
  Description of Artificial Sequence: Synthetic oligonucleotide
aacaaccacaggugcccuc

SEQ ID NO: 1121002 - RNA, 19 nt, Artificial Sequence
  Description of Artificial Sequence: Synthetic oligonucleotide
acccucaccauaguauggc

SEQ ID NO: 1121003 - RNA, 19 nt, Artificial Sequence
  Description of Artificial Sequence: Synthetic oligonucleotide
cucuggaugaaagaaagga

SEQ ID NO: 1121004 - RNA, 19 nt, Artificial Sequence
  Description of Artificial Sequence: Synthetic oligonucleotide
ucaugucaggucgacuggg

SEQ ID NO: 1121005 - RNA, 19 nt, Artificial Sequence
  Description of Artificial Sequence: Synthetic oligonucleotide
gauccaagauucugcaaga

SEQ ID NO: 1121006 - RNA, 19 nt, Artificial Sequence
  Description of Artificial Sequence: Synthetic oligonucleotide
gaguagaacgucccuccag

SEQ ID NO: 1121007 - RNA, 19 nt, Artificial Sequence
  Description of Artificial Sequence: Synthetic oligonucleotide
guagaucugggacuucccc

SEQ ID NO: 1121008 - RNA, 19 nt, Artificial Sequence
  Description of Artificial Sequence: Synthetic oligonucleotide
uuggugugccaccggaacc

SEQ ID NO: 1121009 - RNA, 19 nt, Artificial Sequence
  Description of Artificial Sequence: Synthetic oligonucleotide
ggucaaaagguuuugcaga

SEQ ID NO: 1121010 - RNA, 19 nt, Artificial Sequence
  Description of Artificial Sequence: Synthetic oligonucleotide
gaaacggggcaauggaauc

SEQ ID NO: 1121011 - RNA, 19 nt, Artificial Sequence
  Description of Artificial Sequence: Synthetic oligonucleotide
cuguccggacaacagacag

SEQ ID NO: 1121012 - RNA, 19 nt, Artificial Sequence
  Description of Artificial Sequence: Synthetic oligonucleotide
guuuugcagaugaaguggc

SEQ ID NO: 1121013 - RNA, 19 nt, Artificial Sequence
  Description of Artificial Sequence: Synthetic oligonucleotide
ucgaggauguggauugcac

SEQ ID NO: 1121014 - RNA, 19 nt, Artificial Sequence
  Description of Artificial Sequence: Synthetic oligonucleotide
agugccggucaucccgucc

SEQ ID NO: 1121015 - RNA, 19 nt, Artificial Sequence
  Description of Artificial Sequence: Synthetic oligonucleotide
agucacgcauauggaagcc

SEQ ID NO: 1121016 - RNA, 19 nt, Artificial Sequence
  Description of Artificial Sequence: Synthetic oligonucleotide
gaaacccuaagauccucca

SEQ ID NO: 1121017 - RNA, 19 nt, Artificial Sequence
  Description of Artificial Sequence: Synthetic oligonucleotide
agcagguaugaaacggggc

SEQ ID NO: 1121018 - RNA, 19 nt, Artificial Sequence
  Description of Artificial Sequence: Synthetic oligonucleotide
aacaucauucccagguccu

SEQ ID NO: 1121019 - RNA, 19 nt, Artificial Sequence
  Description of Artificial Sequence: Synthetic oligonucleotide
aaacggggcaauggaaucu

SEQ ID NO: 1121020 - RNA, 19 nt, Artificial Sequence
  Description of Artificial Sequence: Synthetic oligonucleotide
ccugauaggauucauguca

SEQ ID NO: 1121021 - RNA, 19 nt, Artificial Sequence
  Description of Artificial Sequence: Synthetic oligonucleotide
ucacgcauauggaagccau

SEQ ID NO: 1121022 - RNA, 19 nt, Artificial Sequence
  Description of Artificial Sequence: Synthetic oligonucleotide
gauaggauucaugucaggu

SEQ ID NO: 1121023 - RNA, 19 nt, Artificial Sequence
  Description of Artificial Sequence: Synthetic oligonucleotide
guagcugagcuuuggugug

SEQ ID NO: 1121024 - RNA, 19 nt, Artificial Sequence
  Description of Artificial Sequence: Synthetic oligonucleotide
  modified_base (13)..(13): a, c, u, g, unknown or other
uauggcucgaagngcucac

SEQ ID NO: 1121025 - RNA, 19 nt, Artificial Sequence
  Description of Artificial Sequence: Synthetic oligonucleotide
gucgacugggcuuggaaac

SEQ ID NO: 1121026 - RNA, 19 nt, Artificial Sequence
  Description of Artificial Sequence: Synthetic oligonucleotide
aaaccgccuucacaaauuu

SEQ ID NO: 1121027 - RNA, 19 nt, Artificial Sequence
  Description of Artificial Sequence: Synthetic oligonucleotide
gcaagacacacugauaggc

SEQ ID NO: 1121028 - RNA, 19 nt, Artificial Sequence
  Description of Artificial Sequence: Synthetic oligonucleotide
ugggaauggagaggaaccc

SEQ ID NO: 1121029 - RNA, 19 nt, Artificial Sequence
  Description of Artificial Sequence: Synthetic oligonucleotide
acguucaaagcagcaguac

SEQ ID NO: 1121030 - RNA, 19 nt, Artificial Sequence
  Description of Artificial Sequence: Synthetic oligonucleotide
ucugcaagacacacugaua

SEQ ID NO: 1121031 - RNA, 19 nt, Artificial Sequence
  Description of Artificial Sequence: Synthetic oligonucleotide
gcaacgauaguccaacaca

SEQ ID NO: 1121032 - RNA, 19 nt, Artificial Sequence
  Description of Artificial Sequence: Synthetic oligonucleotide
aagguagagugcuggguuu

SEQ ID NO: 1121033 - RNA, 19 nt, Artificial Sequence
  Description of Artificial Sequence: Synthetic oligonucleotide
acugauaggcccagaacug

SEQ ID NO: 1121034 - RNA, 19 nt, Artificial Sequence
  Description of Artificial Sequence: Synthetic oligonucleotide
uggggcgagugauaucucc

SEQ ID NO: 1121035 - RNA, 19 nt, Artificial Sequence
  Description of Artificial Sequence: Synthetic oligonucleotide
agaucugggacuuccccaa

SEQ ID NO: 1121036 - RNA, 19 nt, Artificial Sequence
  Description of Artificial Sequence: Synthetic oligonucleotide
ccaaggagaacaucauucc

SEQ ID NO: 1121037 - RNA, 19 nt, Artificial Sequence
  Description of Artificial Sequence: Synthetic oligonucleotide
uugcgaucuguguugucca

SEQ ID NO: 1121038 - RNA, 19 nt, Artificial Sequence
  Description of Artificial Sequence: Synthetic oligonucleotide
uccacacagagcagugugu

SEQ ID NO: 1121039 - RNA, 19 nt, Artificial Sequence
  Description of Artificial Sequence: Synthetic oligonucleotide
ggagucacgcauauggaag

SEQ ID NO: 1121040 - RNA, 19 nt, Artificial Sequence
  Description of Artificial Sequence: Synthetic oligonucleotide
ugggagucacgcauaugga

SEQ ID NO: 1121041 - RNA, 19 nt, Artificial Sequence
  Description of Artificial Sequence: Synthetic oligonucleotide
aacggggcaauggaaucug

SEQ ID NO: 1121042 - RNA, 19 nt, Artificial Sequence
  Description of Artificial Sequence: Synthetic oligonucleotide
uggugugccaccggaaccc

SEQ ID NO: 1121043 - RNA, 19 nt, Artificial Sequence
  Description of Artificial Sequence: Synthetic oligonucleotide
  modified_base (8)..(8): a, c, u, g, unknown or other
cucgaagngcucacuggag

SEQ ID NO: 1121044 - RNA, 19 nt, Artificial Sequence
  Description of Artificial Sequence: Synthetic oligonucleotide
auccaagauucugcaagac

SEQ ID NO: 1121045 - RNA, 19 nt, Artificial Sequence
  Description of Artificial Sequence: Synthetic oligonucleotide
cacacguucaaagcagcag

SEQ ID NO: 1121046 - RNA, 19 nt, Artificial Sequence
  Description of Artificial Sequence: Synthetic oligonucleotide
aucccauguguagaucugg

SEQ ID NO: 1121047 - RNA, 19 nt, Artificial Sequence
  Description of Artificial Sequence: Synthetic oligonucleotide
ggacggaucuucuccagag

SEQ ID NO: 1121048 - RNA, 19 nt, Artificial Sequence
  Description of Artificial Sequence: Synthetic oligonucleotide
auaguccaacacaggacgg

SEQ ID NO: 1121049 - RNA, 19 nt, Artificial Sequence
  Description of Artificial Sequence: Synthetic oligonucleotide
agccuguacaccuccuuca

SEQ ID NO: 1121050 - RNA, 19 nt, Artificial Sequence
  Description of Artificial Sequence: Synthetic oligonucleotide
uagaacgucccuccaguuu

SEQ ID NO: 1121051 - RNA, 19 nt, Artificial Sequence
  Description of Artificial Sequence: Synthetic oligonucleotide
cacugauaggcccagaacu

SEQ ID NO: 1121052 - RNA, 19 nt, Artificial Sequence
  Description of Artificial Sequence: Synthetic oligonucleotide
cucaugcacaauuuccaca

SEQ ID NO: 1121053 - RNA, 19 nt, Artificial Sequence
  Description of Artificial Sequence: Synthetic oligonucleotide
gcagguaugaaacggggca

SEQ ID NO: 1121054 - RNA, 19 nt, Artificial Sequence
  Description of Artificial Sequence: Synthetic oligonucleotide
cugaaugccaugguccaug

SEQ ID NO: 1121055 - RNA, 19 nt, Artificial Sequence
  Description of Artificial Sequence: Synthetic oligonucleotide
acuggcgaccaucccaugu

SEQ ID NO: 1121056 - RNA, 19 nt, Artificial Sequence
  Description of Artificial Sequence: Synthetic oligonucleotide
ccggacaacagacagcgcc

SEQ ID NO: 1121057 - RNA, 19 nt, Artificial Sequence
  Description of Artificial Sequence: Synthetic oligonucleotide
cuuggaaaccgccuucaca

SEQ ID NO: 1121058 - RNA, 19 nt, Artificial Sequence
  Description of Artificial Sequence: Synthetic oligonucleotide
ucugacuggcgaccauccc

SEQ ID NO: 1121059 - RNA, 19 nt, Artificial Sequence
  Description of Artificial Sequence: Synthetic oligonucleotide
uagggaccuguaugaacag

SEQ ID NO: 1121060 - RNA, 19 nt, Artificial Sequence
  Description of Artificial Sequence: Synthetic oligonucleotide
agugcccuaucucuaugga

SEQ ID NO: 1121061 - RNA, 19 nt, Artificial Sequence
  Description of Artificial Sequence: Synthetic oligonucleotide
agcucaugcacaauuucca

SEQ ID NO: 1121062 - RNA, 19 nt, Artificial Sequence
  Description of Artificial Sequence: Synthetic oligonucleotide
uggguggaaauauggcauc

SEQ ID NO: 1121063 - RNA, 19 nt, Artificial Sequence
  Description of Artificial Sequence: Synthetic oligonucleotide
accaugcaacgauagucca

SEQ ID NO: 1121064 - RNA, 19 nt, Artificial Sequence
  Description of Artificial Sequence: Synthetic oligonucleotide
ugaagggugugaagagguc

SEQ ID NO: 1121065 - RNA, 19 nt, Artificial Sequence
  Description of Artificial Sequence: Synthetic oligonucleotide
auucccagguccuuuccaa

SEQ ID NO: 1121066 - RNA, 19 nt, Artificial Sequence
  Description of Artificial Sequence: Synthetic oligonucleotide
uccgaaaugcauugauguu

SEQ ID NO: 1121067 - RNA, 19 nt, Artificial Sequence
  Description of Artificial Sequence: Synthetic oligonucleotide
agcaguacagcaaguagau

SEQ ID NO: 1121068 - RNA, 19 nt, Artificial Sequence
  Description of Artificial Sequence: Synthetic oligonucleotide
uuuucuggggcgagugaua

SEQ ID NO: 1121069 - RNA, 19 nt, Artificial Sequence
  Description of Artificial Sequence: Synthetic oligonucleotide
gaggaacccaucucccuca

SEQ ID NO: 1121070 - RNA, 19 nt, Artificial Sequence
  Description of Artificial Sequence: Synthetic oligonucleotide
cacagagcagugugucccg

SEQ ID NO: 1121071 - RNA, 19 nt, Artificial Sequence
  Description of Artificial Sequence: Synthetic oligonucleotide
ccuacaguggagucaauuc

SEQ ID NO: 1121072 - RNA, 19 nt, Artificial Sequence
  Description of Artificial Sequence: Synthetic oligonucleotide
aacacaggacggaucuucu

SEQ ID NO: 1121073 - RNA, 19 nt, Artificial Sequence
  Description of Artificial Sequence: Synthetic oligonucleotide
agaacuggguggaaauaug

SEQ ID NO: 1121074 - RNA, 19 nt, Artificial Sequence
  Description of Artificial Sequence: Synthetic oligonucleotide
caagauucugcaagacaca

SEQ ID NO: 1121075 - RNA, 19 nt, Artificial Sequence
  Description of Artificial Sequence: Synthetic oligonucleotide
uaguccaacacaggacgga

SEQ ID NO: 1121076 - RNA, 19 nt, Artificial Sequence
  Description of Artificial Sequence: Synthetic oligonucleotide
ugucaggucgacugggcuu

SEQ ID NO: 1121077 - RNA, 19 nt, Artificial Sequence
  Description of Artificial Sequence: Synthetic oligonucleotide
agacaccaugcaacgauag

SEQ ID NO: 1121078 - RNA, 19 nt, Artificial Sequence
  Description of Artificial Sequence: Synthetic oligonucleotide
ugugucccgcggcagcucu

SEQ ID NO: 1121079 - RNA, 19 nt, Artificial Sequence
  Description of Artificial Sequence: Synthetic oligonucleotide
aaccgccuucacaaauuuc

SEQ ID NO: 1121080 - RNA, 19 nt, Artificial Sequence
  Description of Artificial Sequence: Synthetic oligonucleotide
ucgacugggcuuggaaacc

SEQ ID NO: 1121081 - RNA, 19 nt, Artificial Sequence
  Description of Artificial Sequence: Synthetic oligonucleotide
ggacagcuugucuggaucc

SEQ ID NO: 1121082 - RNA, 19 nt, Artificial Sequence
  Description of Artificial Sequence: Synthetic oligonucleotide
uucugggagucacgcauau

SEQ ID NO: 1121083 - RNA, 19 nt, Artificial Sequence
  Description of Artificial Sequence: Synthetic oligonucleotide
uuucugcucgcugccagac

SEQ ID NO: 1121084 - RNA, 19 nt, Artificial Sequence
  Description of Artificial Sequence: Synthetic oligonucleotide
uguggauugcacugaucuu

SEQ ID NO: 1121085 - RNA, 19 nt, Artificial Sequence
  Description of Artificial Sequence: Synthetic oligonucleotide
gacacaggucccugccuug

SEQ ID NO: 1121086 - RNA, 19 nt, Artificial Sequence
  Description of Artificial Sequence: Synthetic oligonucleotide
gacgucgcugccauucagc

SEQ ID NO: 1121087 - RNA, 19 nt, Artificial Sequence
  Description of Artificial Sequence: Synthetic oligonucleotide
ucgcugguugaagugcugc

SEQ ID NO: 1121088 - RNA, 19 nt, Artificial Sequence
  Description of Artificial Sequence: Synthetic oligonucleotide
gaccuguaugaacagcucu

SEQ ID NO: 1121089 - RNA, 19 nt, Artificial Sequence
  Description of Artificial Sequence: Synthetic oligonucleotide
uggaggcggaguagaacgu

SEQ ID NO: 1121090 - RNA, 19 nt, Artificial Sequence
  Description of Artificial Sequence: Synthetic oligonucleotide
uucacccugauaggauuca

SEQ ID NO: 1121091 - RNA, 19 nt, Artificial Sequence
  Description of Artificial Sequence: Synthetic oligonucleotide
aaagugccggucaucccgu

SEQ ID NO: 1121092 - RNA, 19 nt, Artificial Sequence
  Description of Artificial Sequence: Synthetic oligonucleotide
guacaccuccuucacccug

SEQ ID NO: 1121093 - RNA, 19 nt, Artificial Sequence
  Description of Artificial Sequence: Synthetic oligonucleotide
ucggacgucgcugccauuc

SEQ ID NO: 1121094 - RNA, 19 nt, Artificial Sequence
  Description of Artificial Sequence: Synthetic oligonucleotide
  modified_base (14)..(14): a, c, u, g, unknown or other
guauggcucgaagngcuca

SEQ ID NO: 1121095 - RNA, 19 nt, Artificial Sequence
  Description of Artificial Sequence: Synthetic oligonucleotide
ucucggacgucgcugccau

SEQ ID NO: 1121096 - RNA, 19 nt, Artificial Sequence
  Description of Artificial Sequence: Synthetic oligonucleotide
caggacaaaauuccgaaau

SEQ ID NO: 1121097 - RNA, 19 nt, Artificial Sequence
  Description of Artificial Sequence: Synthetic oligonucleotide
uucgcugguugaagugcug

SEQ ID NO: 1121098 - RNA, 19 nt, Artificial Sequence
  Description of Artificial Sequence: Synthetic oligonucleotide
aggcggaguagaacguccc

SEQ ID NO: 1121099 - RNA, 19 nt, Artificial Sequence
  Description of Artificial Sequence: Synthetic oligonucleotide
uccugacaauguagaggcc

SEQ ID NO: 1121100 - RNA, 19 nt, Artificial Sequence
  Description of Artificial Sequence: Synthetic oligonucleotide
cacgcugaagggugugaag

SEQ ID NO: 1121101 - RNA, 19 nt, Artificial Sequence
  Description of Artificial Sequence: Synthetic oligonucleotide
agcuuuggugugccaccgg

SEQ ID NO: 1121102 - RNA, 19 nt, Artificial Sequence
  Description of Artificial Sequence: Synthetic oligonucleotide
gaacgucccuccaguuucg

SEQ ID NO: 1121103 - RNA, 19 nt, Artificial Sequence
  Description of Artificial Sequence: Synthetic oligonucleotide
cacccagcggucugacugg

SEQ ID NO: 1121104 - RNA, 19 nt, Artificial Sequence
  Description of Artificial Sequence: Synthetic oligonucleotide
gaaaugcauugauguuuuc

SEQ ID NO: 1121105 - RNA, 19 nt, Artificial Sequence
  Description of Artificial Sequence: Synthetic oligonucleotide
accaccuacaguggaguca

SEQ ID NO: 1121106 - RNA, 19 nt, Artificial Sequence
  Description of Artificial Sequence: Synthetic oligonucleotide
ucccguccuguguagcuga

SEQ ID NO: 1121107 - RNA, 19 nt, Artificial Sequence
  Description of Artificial Sequence: Synthetic oligonucleotide
gcgaccaucccauguguag

SEQ ID NO: 1121108 - RNA, 19 nt, Artificial Sequence
  Description of Artificial Sequence: Synthetic oligonucleotide
ggaaucugcagggaguuga

SEQ ID NO: 1121109 - RNA, 19 nt, Artificial Sequence
  Description of Artificial Sequence: Synthetic oligonucleotide
aagugccggucaucccguc

SEQ ID NO: 1121110 - RNA, 19 nt, Artificial Sequence
  Description of Artificial Sequence: Synthetic oligonucleotide
augauccaagauucugcaa

SEQ ID NO: 1121111 - RNA, 19 nt, Artificial Sequence
  Description of Artificial Sequence: Synthetic oligonucleotide
ugcuucuggcuuaggguua

SEQ ID NO: 1121112 - RNA, 19 nt, Artificial Sequence
  Description of Artificial Sequence: Synthetic oligonucleotide
uggcgaccaucccaugugu

SEQ ID NO: 1121113 - RNA, 19 nt, Artificial Sequence
  Description of Artificial Sequence: Synthetic oligonucleotide
ggcccuagggaccuguaug

SEQ ID NO: 1121114 - RNA, 19 nt, Artificial Sequence
  Description of Artificial Sequence: Synthetic oligonucleotide
aggacggaucuucuccaga

SEQ ID NO: 1121115 - RNA, 19 nt, Artificial Sequence
  Description of Artificial Sequence: Synthetic oligonucleotide
agggaccaccuacagugga

SEQ ID NO: 1121116 - RNA, 19 nt, Artificial Sequence
  Description of Artificial Sequence: Synthetic oligonucleotide
uuccaaccucacaggugcc

SEQ ID NO: 1121117 - RNA, 19 nt, Artificial Sequence
  Description of Artificial Sequence: Synthetic oligonucleotide
ggaacccuugauaagcuuc

SEQ ID NO: 1121118 - RNA, 19 nt, Artificial Sequence
  Description of Artificial Sequence: Synthetic oligonucleotide
caucucuaaccugacaaaa

SEQ ID NO: 1121119 - RNA, 19 nt, Artificial Sequence
  Description of Artificial Sequence: Synthetic oligonucleotide
ggagucaauuccaaccuca

SEQ ID NO: 1121120 - RNA, 19 nt, Artificial Sequence
  Description of Artificial Sequence: Synthetic oligonucleotide
aggauguggauugcacuga

SEQ ID NO: 1121121 - RNA, 19 nt, Artificial Sequence
  Description of Artificial Sequence: Synthetic oligonucleotide
cuguaugaacagcucuuga

SEQ ID NO: 1121122 - RNA, 19 nt, Artificial Sequence
  Description of Artificial Sequence: Synthetic oligonucleotide
gucugacuggcgaccaucc

SEQ ID NO: 1121123 - RNA, 19 nt, Artificial Sequence
  Description of Artificial Sequence: Synthetic oligonucleotide
ccagaguuuuggcaguaag

SEQ ID NO: 1121124 - RNA, 19 nt, Artificial Sequence
  Description of Artificial Sequence: Synthetic oligonucleotide
  modified_base (9)..(9): a, c, u, g, unknown or other
gcucgaagngcucacugga

SEQ ID NO: 1121125 - RNA, 19 nt, Artificial Sequence
  Description of Artificial Sequence: Synthetic oligonucleotide
cuggguggaaauauggcau

SEQ ID NO: 1121126 - RNA, 19 nt, Artificial Sequence
  Description of Artificial Sequence: Synthetic oligonucleotide
caccggaacccuugauaag

SEQ ID NO: 1121127 - RNA, 19 nt, Artificial Sequence
  Description of Artificial Sequence: Synthetic oligonucleotide
auucgcugguugaagugcu

SEQ ID NO: 1121128 - RNA, 19 nt, Artificial Sequence
  Description of Artificial Sequence: Synthetic oligonucleotide
  modified_base (6)..(6): a, c, u, g, unknown or other
cgaagngcucacuggaggc

SEQ ID NO: 1121129 - RNA, 19 nt, Artificial Sequence
  Description of Artificial Sequence: Synthetic oligonucleotide
uggaaacccuaagauccuc

SEQ ID NO: 1121130 - RNA, 19 nt, Artificial Sequence
  Description of Artificial Sequence: Synthetic oligonucleotide
cuuccagccuguacaccuc

SEQ ID NO: 1121131 - RNA, 19 nt, Artificial Sequence
  Description of Artificial Sequence: Synthetic oligonucleotide
augaaacggggcaauggaa

SEQ ID NO: 1121132 - RNA, 19 nt, Artificial Sequence
  Description of Artificial Sequence: Synthetic oligonucleotide
cuucaucucuaaccugaca

SEQ ID NO: 1121133 - RNA, 19 nt, Artificial Sequence
  Description of Artificial Sequence: Synthetic oligonucleotide
ucccgcggcagcucugucu

SEQ ID NO: 1121134 - RNA, 19 nt, Artificial Sequence
  Description of Artificial Sequence: Synthetic oligonucleotide
guccaggacaaaauuccga

SEQ ID NO: 1121135 - RNA, 19 nt, Artificial Sequence
  Description of Artificial Sequence: Synthetic oligonucleotide
ccuagggaccuguaugaac

SEQ ID NO: 1121136 - RNA, 19 nt, Artificial Sequence
  Description of Artificial Sequence: Synthetic oligonucleotide
ugcccucaguucucaggug

SEQ ID NO: 1121137 - RNA, 19 nt, Artificial Sequence
  Description of Artificial Sequence: Synthetic oligonucleotide
cgauaguccaacacaggac

SEQ ID NO: 1121138 - RNA, 19 nt, Artificial Sequence
  Description of Artificial Sequence: Synthetic oligonucleotide
ucaccauaguauggcucga

SEQ ID NO: 1121139 - RNA, 19 nt, Artificial Sequence
  Description of Artificial Sequence: Synthetic oligonucleotide
uggaaucugcagggaguug

SEQ ID NO: 1121140 - RNA, 19 nt, Artificial Sequence
  Description of Artificial Sequence: Synthetic oligonucleotide
augcaacgauaguccaaca

SEQ ID NO: 1121141 - RNA, 19 nt, Artificial Sequence
  Description of Artificial Sequence: Synthetic oligonucleotide
gguaugaaacggggcaaug

SEQ ID NO: 1121142 - RNA, 19 nt, Artificial Sequence
  Description of Artificial Sequence: Synthetic oligonucleotide
aggccugugggcacaaagu

SEQ ID NO: 1121143 - RNA, 19 nt, Artificial Sequence
  Description of Artificial Sequence: Synthetic oligonucleotide
ucugggagucacgcauaug

SEQ ID NO: 1121144 - RNA, 19 nt, Artificial Sequence
  Description of Artificial Sequence: Synthetic oligonucleotide
cacgcauauggaagccauc

SEQ ID NO: 1121145 - RNA, 19 nt, Artificial Sequence
  Description of Artificial Sequence: Synthetic oligonucleotide
cauccgaccccacccucac

SEQ ID NO: 1121146 - RNA, 19 nt, Artificial Sequence
  Description of Artificial Sequence: Synthetic oligonucleotide
gccugaugcuggcaugggg

SEQ ID NO: 1121147 - RNA, 19 nt, Artificial Sequence
  Description of Artificial Sequence: Synthetic oligonucleotide
cccuguccggacaacagac

SEQ ID NO: 1121148 - RNA, 19 nt, Artificial Sequence
  Description of Artificial Sequence: Synthetic oligonucleotide
gcgagugauaucuccaucu

SEQ ID NO: 1121149 - RNA, 19 nt, Artificial Sequence
  Description of Artificial Sequence: Synthetic oligonucleotide
cggaguagaacgucccucc

SEQ ID NO: 1121150 - RNA, 19 nt, Artificial Sequence
  Description of Artificial Sequence: Synthetic oligonucleotide
gggagucacgcauauggaa

SEQ ID NO: 1121151 - RNA, 19 nt, Artificial Sequence
  Description of Artificial Sequence: Synthetic oligonucleotide
cacguucaaagcagcagua

SEQ ID NO: 1121152 - RNA, 19 nt, Artificial Sequence
  Description of Artificial Sequence: Synthetic oligonucleotide
uaagauccuccaggauugu

SEQ ID NO: 1121153 - RNA, 19 nt, Artificial Sequence
  Description of Artificial Sequence: Synthetic oligonucleotide
uccggacaacagacagcgc

SEQ ID NO: 1121154 - RNA, 19 nt, Artificial Sequence
  Description of Artificial Sequence: Synthetic oligonucleotide
acggggcaauggaaucugc

SEQ ID NO: 1121155 - RNA, 19 nt, Artificial Sequence
  Description of Artificial Sequence: Synthetic oligonucleotide
uuucacccagcggucugac

SEQ ID NO: 1121156 - RNA, 19 nt, Artificial Sequence
  Description of Artificial Sequence: Synthetic oligonucleotide
augagaaaguggacacccu

SEQ ID NO: 1121157 - RNA, 19 nt, Artificial Sequence
  Description of Artificial Sequence: Synthetic oligonucleotide
  modified_base (2)..(2): a, c, u, g, unknown or other
gngcucacuggaggcggag

SEQ ID NO: 1121158 - RNA, 19 nt, Artificial Sequence
  Description of Artificial Sequence: Synthetic oligonucleotide
acaguggagucaauuccaa

SEQ ID NO: 1121159 - RNA, 19 nt, Artificial Sequence
  Description of Artificial Sequence: Synthetic oligonucleotide
ucgcugccauucagcacca

SEQ ID NO: 1121160 - RNA, 19 nt, Artificial Sequence
  Description of Artificial Sequence: Synthetic oligonucleotide
acccagcggucugacuggc

SEQ ID NO: 1121161 - RNA, 19 nt, Artificial Sequence
  Description of Artificial Sequence: Synthetic oligonucleotide
auauggcauccuagcacug

SEQ ID NO: 1121162 - RNA, 19 nt, Artificial Sequence
  Description of Artificial Sequence: Synthetic oligonucleotide
uucacccagcggucugacu

SEQ ID NO: 1121163 - RNA, 19 nt, Artificial Sequence
  Description of Artificial Sequence: Synthetic oligonucleotide
uggacacccuugcgaucug

SEQ ID NO: 1121164 - RNA, 19 nt, Artificial Sequence
  Description of Artificial Sequence: Synthetic oligonucleotide
ccucaccauaguauggcuc

SEQ ID NO: 1121165 - RNA, 19 nt, Artificial Sequence
  Description of Artificial Sequence: Synthetic oligonucleotide
aucccguccuguguagcug

SEQ ID NO: 1121166 - RNA, 19 nt, Artificial Sequence
  Description of Artificial Sequence: Synthetic oligonucleotide
gaaaccgccuucacaaauu

SEQ ID NO: 1121167 - RNA, 19 nt, Artificial Sequence
  Description of Artificial Sequence: Synthetic oligonucleotide
ccuguaugaacagcucuug

SEQ ID NO: 1121168 - RNA, 19 nt, Artificial Sequence
  Description of Artificial Sequence: Synthetic oligonucleotide
gucacgcauauggaagcca

SEQ ID NO: 1121169 - RNA, 19 nt, Artificial Sequence
  Description of Artificial Sequence: Synthetic oligonucleotide
cugcucucggacgucgcug

SEQ ID NO: 1121170 - RNA, 19 nt, Artificial Sequence
  Description of Artificial Sequence: Synthetic oligonucleotide
gauucaugucaggucgacu

SEQ ID NO: 1121171 - RNA, 19 nt, Artificial Sequence
  Description of Artificial Sequence: Synthetic oligonucleotide
ccuguacaccuccuucacc

SEQ ID NO: 1121172 - RNA, 19 nt, Artificial Sequence
  Description of Artificial Sequence: Synthetic oligonucleotide
aggauucaugucaggucga

SEQ ID NO: 1121173 - RNA, 19 nt, Artificial Sequence
  Description of Artificial Sequence: Synthetic oligonucleotide
gcccuagggaccuguauga

SEQ ID NO: 1121174 - RNA, 19 nt, Artificial Sequence
  Description of Artificial Sequence: Synthetic oligonucleotide
aacgucccuccaguuucga

SEQ ID NO: 1121175 - RNA, 19 nt, Artificial Sequence
  Description of Artificial Sequence: Synthetic oligonucleotide
uaagcagugugggcuugua

SEQ ID NO: 1121176 - RNA, 19 nt, Artificial Sequence
  Description of Artificial Sequence: Synthetic oligonucleotide
gaccaucccauguguagau

SEQ ID NO: 1121177 - RNA, 19 nt, Artificial Sequence
  Description of Artificial Sequence: Synthetic oligonucleotide
cugcuucuggcuuaggguu

SEQ ID NO: 1121178 - RNA, 19 nt, Artificial Sequence
  Description of Artificial Sequence: Synthetic oligonucleotide
uccuuuccaagaggugaau

SEQ ID NO: 1121179 - RNA, 19 nt, Artificial Sequence
  Description of Artificial Sequence: Synthetic oligonucleotide
cagcggucugacuggcgac

SEQ ID NO: 1121180 - RNA, 19 nt, Artificial Sequence
  Description of Artificial Sequence: Synthetic oligonucleotide
caucgaggauguggauugc

SEQ ID NO: 1121181 - RNA, 19 nt, Artificial Sequence
  Description of Artificial Sequence: Synthetic oligonucleotide
gccugugggcacaaagugc

SEQ ID NO: 1121182 - RNA, 19 nt, Artificial Sequence
  Description of Artificial Sequence: Synthetic oligonucleotide
uucuggggcgagugauauc

SEQ ID NO: 1121183 - RNA, 19 nt, Artificial Sequence
  Description of Artificial Sequence: Synthetic oligonucleotide
agguccuuuccaagaggug

SEQ ID NO: 1121184 - RNA, 19 nt, Artificial Sequence
  Description of Artificial Sequence: Synthetic oligonucleotide
ucacccugauaggauucau

SEQ ID NO: 1121185 - RNA, 19 nt, Artificial Sequence
  Description of Artificial Sequence: Synthetic oligonucleotide
guuucacccagcggucuga

SEQ ID NO: 1121186 - RNA, 19 nt, Artificial Sequence
  Description of Artificial Sequence: Synthetic oligonucleotide
cguucaaagcagcaguaca

SEQ ID NO: 1121187 - RNA, 19 nt, Artificial Sequence
  Description of Artificial Sequence: Synthetic oligonucleotide
ccuaagauccuccaggauu

SEQ ID NO: 1121188 - RNA, 19 nt, Artificial Sequence
  Description of Artificial Sequence: Synthetic oligonucleotide
ccaagaggugaaugaacca

SEQ ID NO: 1121189 - RNA, 19 nt, Artificial Sequence
  Description of Artificial Sequence: Synthetic oligonucleotide
gggcacaaagugccgguca

SEQ ID NO: 1121190 - RNA, 19 nt, Artificial Sequence
  Description of Artificial Sequence: Synthetic oligonucleotide
ggcgagugauaucuccauc

SEQ ID NO: 1121191 - RNA, 19 nt, Artificial Sequence
  Description of Artificial Sequence: Synthetic oligonucleotide
cagguaugaaacggggcaa

SEQ ID NO: 1121192 - RNA, 19 nt, Artificial Sequence
  Description of Artificial Sequence: Synthetic oligonucleotide
ggaguagaacgucccucca

SEQ ID NO: 1121193 - RNA, 19 nt, Artificial Sequence
  Description of Artificial Sequence: Synthetic oligonucleotide
  modified_base (12)..(12): a, c, u, g, unknown or other
auggcucgaagngcucacu

SEQ ID NO: 1121194 - RNA, 19 nt, Artificial Sequence
  Description of Artificial Sequence: Synthetic oligonucleotide
agguagagugcuggguuuu

SEQ ID NO: 1121195 - RNA, 19 nt, Artificial Sequence
  Description of Artificial Sequence: Synthetic oligonucleotide
cagacagcgccaugaggaa

SEQ ID NO: 1121196 - RNA, 19 nt, Artificial Sequence
  Description of Artificial Sequence: Synthetic oligonucleotide
cuucugggagucacgcaua

SEQ ID NO: 1121197 - RNA, 19 nt, Artificial Sequence
  Description of Artificial Sequence: Synthetic oligonucleotide
gccucagugcccuaucucu

SEQ ID NO: 1121198 - RNA, 19 nt, Artificial Sequence
  Description of Artificial Sequence: Synthetic oligonucleotide
cccugauaggauucauguc

SEQ ID NO: 1121199 - RNA, 19 nt, Artificial Sequence
  Description of Artificial Sequence: Synthetic oligonucleotide
gggaauggagaggaaccca

SEQ ID NO: 1121200 - RNA, 19 nt, Artificial Sequence
  Description of Artificial Sequence: Synthetic oligonucleotide
guagaggccugugggcaca

SEQ ID NO: 1121201 - RNA, 19 nt, Artificial Sequence
  Description of Artificial Sequence: Synthetic oligonucleotide
ggaaaccgccuucacaaau

SEQ ID NO: 1121202 - RNA, 19 nt, Artificial Sequence
  Description of Artificial Sequence: Synthetic oligonucleotide
cccuaucucuauggaaacc

SEQ ID NO: 1121203 - RNA, 19 nt, Artificial Sequence
  Description of Artificial Sequence: Synthetic oligonucleotide
cuuugggaauggagaggaa

SEQ ID NO: 1121204 - RNA, 19 nt, Artificial Sequence
  Description of Artificial Sequence: Synthetic oligonucleotide
ggucugacuggcgaccauc

SEQ ID NO: 1121205 - RNA, 19 nt, Artificial Sequence
  Description of Artificial Sequence: Synthetic oligonucleotide
gcugaauucgcugguugaa

SEQ ID NO: 1121206 - RNA, 19 nt, Artificial Sequence
  Description of Artificial Sequence: Synthetic oligonucleotide
gccaugaggaacugacaua

SEQ ID NO: 1121207 - RNA, 19 nt, Artificial Sequence
  Description of Artificial Sequence: Synthetic oligonucleotide
cuggggcgagugauaucuc

SEQ ID NO: 1121208 - RNA, 19 nt, Artificial Sequence
  Description of Artificial Sequence: Synthetic oligonucleotide
cgagugauaucuccaucuc

SEQ ID NO: 1121209 - RNA, 19 nt, Artificial Sequence
  Description of Artificial Sequence: Synthetic oligonucleotide
  modified_base (3)..(3): a, c, u, g, unknown or other
agngcucacuggaggcgga

SEQ ID NO: 1121210 - RNA, 19 nt, Artificial Sequence
  Description of Artificial Sequence: Synthetic oligonucleotide
caucccguccuguguagcu

SEQ ID NO: 1121211 - RNA, 19 nt, Artificial Sequence
  Description of Artificial Sequence: Synthetic oligonucleotide
uggggcccuagggaccugu

SEQ ID NO: 1121212 - RNA, 19 nt, Artificial Sequence
  Description of Artificial Sequence: Synthetic oligonucleotide
ggugccucagugcccuauc

SEQ ID NO: 1121213 - RNA, 19 nt, Artificial Sequence
  Description of Artificial Sequence: Synthetic oligonucleotide
gcggaguagaacgucccuc

SEQ ID NO: 1121214 - RNA, 19 nt, Artificial Sequence
  Description of Artificial Sequence: Synthetic oligonucleotide
ggggcgagugauaucucca

SEQ ID NO: 1121215 - RNA, 19 nt, Artificial Sequence
  Description of Artificial Sequence: Synthetic oligonucleotide
ccagcggucugacuggcga

SEQ ID NO: 1121216 - RNA, 19 nt, Artificial Sequence
  Description of Artificial Sequence: Synthetic oligonucleotide
ccugacaauguagaggccu

SEQ ID NO: 1121217 - RNA, 19 nt, Artificial Sequence
  Description of Artificial Sequence: Synthetic oligonucleotide
ggaggcggaguagaacguc

SEQ ID NO: 1121218 - RNA, 19 nt, Artificial Sequence
  Description of Artificial Sequence: Synthetic oligonucleotide
guagaacgucccuccaguu

SEQ ID NO: 1121219 - RNA, 19 nt, Artificial Sequence
  Description of Artificial Sequence: Synthetic oligonucleotide
gucccugccuugggaauga

SEQ ID NO: 1121220 - RNA, 19 nt, Artificial Sequence
  Description of Artificial Sequence: Synthetic oligonucleotide
cuguaguagcagguaugaa

SEQ ID NO: 1121221 - RNA, 19 nt, Artificial Sequence
  Description of Artificial Sequence: Synthetic oligonucleotide
gcauggggcccuagggacc

SEQ ID NO: 1121222 - RNA, 19 nt, Artificial Sequence
  Description of Artificial Sequence: Synthetic oligonucleotide
ccggucaucccguccugug

SEQ ID NO: 1121223 - RNA, 19 nt, Artificial Sequence
  Description of Artificial Sequence: Synthetic oligonucleotide
gguggaaauauggcauccu

SEQ ID NO: 1121224 - RNA, 19 nt, Artificial Sequence
  Description of Artificial Sequence: Synthetic oligonucleotide
ccaugcaacgauaguccaa

SEQ ID NO: 1121225 - RNA, 19 nt, Artificial Sequence
  Description of Artificial Sequence: Synthetic oligonucleotide
ccaaccucacaggugccuc

SEQ ID NO: 1121226 - RNA, 19 nt, Artificial Sequence
  Description of Artificial Sequence: Synthetic oligonucleotide
gguugagcucuuugggaau

SEQ ID NO: 1121227 - RNA, 19 nt, Artificial Sequence
  Description of Artificial Sequence: Synthetic oligonucleotide
ggaggaauuucugcucgcu

SEQ ID NO: 1121228 - RNA, 19 nt, Artificial Sequence
  Description of Artificial Sequence: Synthetic oligonucleotide
cggacaacagacagcgcca

SEQ ID NO: 1121229 - RNA, 19 nt, Artificial Sequence
  Description of Artificial Sequence: Synthetic oligonucleotide
ccaccuacaguggagucaa

SEQ ID NO: 1121230 - RNA, 19 nt, Artificial Sequence
  Description of Artificial Sequence: Synthetic oligonucleotide
ggauguggauugcacugau

SEQ ID NO: 1121231 - RNA, 19 nt, Artificial Sequence
  Description of Artificial Sequence: Synthetic oligonucleotide
ggcacaaagugccggucau

SEQ ID NO: 1121232 - RNA, 19 nt, Artificial Sequence
  Description of Artificial Sequence: Synthetic oligonucleotide
ccuguccggacaacagaca

SEQ ID NO: 1121233 - RNA, 19 nt, Artificial Sequence
  Description of Artificial Sequence: Synthetic oligonucleotide
ggguuaggagcuggcagaa

SEQ ID NO: 1121234 - RNA, 19 nt, Artificial Sequence
  Description of Artificial Sequence: Synthetic oligonucleotide
ccgaaaugcauugauguuu

SEQ ID NO: 1121235 - RNA, 19 nt, Artificial Sequence
  Description of Artificial Sequence: Synthetic oligonucleotide
cauggggcccuagggaccu

SEQ ID NO: 1121236 - RNA, 19 nt, Artificial Sequence
  Description of Artificial Sequence: Synthetic oligonucleotide
cuccauccgaccccacccu

SEQ ID NO: 1121237 - RNA, 19 nt, Artificial Sequence
  Description of Artificial Sequence: Synthetic oligonucleotide
gcucucggacgucgcugcc

SEQ ID NO: 1121238 - RNA, 19 nt, Artificial Sequence
  Description of Artificial Sequence: Synthetic oligonucleotide
cccagcggucugacuggcg

SEQ ID NO: 1121239 - RNA, 19 nt, Artificial Sequence
  Description of Artificial Sequence: Synthetic oligonucleotide
cuauggaaaccagccugau

SEQ ID NO: 1121240 - RNA, 19 nt, Artificial Sequence
  Description of Artificial Sequence: Synthetic oligonucleotide
ggcggaguagaacgucccu

SEQ ID NO: 1121241 - RNA, 19 nt, Artificial Sequence
  Description of Artificial Sequence: Synthetic oligonucleotide
gggcgagugauaucuccau

SEQ ID NO: 1121242 - RNA, 19 nt, Artificial Sequence
  Description of Artificial Sequence: Synthetic oligonucleotide
caagcugaauucgcugguu

SEQ ID NO: 1121243 - RNA, 19 nt, Artificial Sequence
  Description of Artificial Sequence: Synthetic oligonucleotide
cgucgcugccauucagcac

SEQ ID NO: 1121244 - RNA, 19 nt, Artificial Sequence
  Description of Artificial Sequence: Synthetic oligonucleotide
cccguccuguguagcugag

SEQ ID NO: 1121245 - RNA, 19 nt, Artificial Sequence
  Description of Artificial Sequence: Synthetic oligonucleotide
ccuugcgaucuguguuguc

SEQ ID NO: 1121246 - RNA, 19 nt, Artificial Sequence
  Description of Artificial Sequence: Synthetic oligonucleotide
gcugcucucggacgucgcu

SEQ ID NO: 1121247 - RNA, 19 nt, Artificial Sequence
  Description of Artificial Sequence: Synthetic oligonucleotide
gcgccaugaggaacugaca

SEQ ID NO: 1121248 - RNA, 19 nt, Artificial Sequence
  Description of Artificial Sequence: Synthetic oligonucleotide
ccggaacccuugauaagcu

SEQ ID NO: 1121249 - RNA, 19 nt, Artificial Sequence
  Description of Artificial Sequence: Synthetic oligonucleotide
ggacaucgaggauguggau

SEQ ID NO: 1121250 - RNA, 19 nt, Artificial Sequence
  Description of Artificial Sequence: Synthetic oligonucleotide
ggcgaccaucccaugugua

SEQ ID NO: 1121251 - RNA, 19 nt, Artificial Sequence
  Description of Artificial Sequence: Synthetic oligonucleotide
caggucgacugggcuugga

SEQ ID NO: 1121252 - RNA, 19 nt, Artificial Sequence
  Description of Artificial Sequence: Synthetic oligonucleotide
cccucaccauaguauggcu

SEQ ID NO: 1121253 - RNA, 19 nt, Artificial Sequence
  Description of Artificial Sequence: Synthetic oligonucleotide
ccacgcugaagggugugaa

SEQ ID NO: 1121254 - RNA, 19 nt, Artificial Sequence
  Description of Artificial Sequence: Synthetic oligonucleotide
ggugugccaccggaacccu

SEQ ID NO: 1121255 - RNA, 19 nt, Artificial Sequence
  Description of Artificial Sequence: Synthetic oligonucleotide
cccacgcugaaggguguga

SEQ ID NO: 1121256 - RNA, 19 nt, Artificial Sequence
  Description of Artificial Sequence: Synthetic oligonucleotide
cccuagggaccuguaugaa

SEQ ID NO: 1121257 - RNA, 19 nt, Artificial Sequence
  Description of Artificial Sequence: Synthetic oligonucleotide
cccgcggcagcucugucuu

SEQ ID NO: 1121258 - RNA, 19 nt, Artificial Sequence
  Description of Artificial Sequence: Synthetic oligonucleotide
gugugccaccggaacccuu

SEQ ID NO: 1121259 - RNA, 19 nt, Artificial Sequence
  Description of Artificial Sequence: Synthetic oligonucleotide
cccuugcgaucuguguugu

SEQ ID NO: 1121260 - RNA, 19 nt, Artificial Sequence
  Description of Artificial Sequence: Synthetic oligonucleotide
ggggcccuagggaccugua

SEQ ID NO: 1121261 - RNA, 19 nt, Artificial Sequence
  Description of Artificial Sequence: Synthetic oligonucleotide
cucggacgucgcugccauu

SEQ ID NO: 1121262 - RNA, 19 nt, Artificial Sequence
  Description of Artificial Sequence: Synthetic oligonucleotide
cggaacccuugauaagcuu

SEQ ID NO: 1121263 - RNA, 19 nt, Artificial Sequence
  Description of Artificial Sequence: Synthetic oligonucleotide
gauauaaacaaucagaagu

SEQ ID NO: 1121264 - RNA, 19 nt, Artificial Sequence
  Description of Artificial Sequence: Synthetic oligonucleotide
aauagacaagacccaaucg

SEQ ID NO: 1121265 - RNA, 19 nt, Artificial Sequence
  Description of Artificial Sequence: Synthetic oligonucleotide
caaucagaagucuaaaagg

SEQ ID NO: 1121266 - RNA, 19 nt, Artificial Sequence
  Description of Artificial Sequence: Synthetic oligonucleotide
auuucuacagacaagaaug

SEQ ID NO: 1121267 - RNA, 19 nt, Artificial Sequence
  Description of Artificial Sequence: Synthetic oligonucleotide
aaaaggguaauagcugccc

SEQ ID NO: 1121268 - RNA, 19 nt, Artificial Sequence
  Description of Artificial Sequence: Synthetic oligonucleotide
aaggcuuuaaagcuccgag

SEQ ID NO: 1121269 - RNA, 19 nt, Artificial Sequence
  Description of Artificial Sequence: Synthetic oligonucleotide
gaccaaaguggacagaccg

SEQ ID NO: 1121270 - RNA, 19 nt, Artificial Sequence
  Description of Artificial Sequence: Synthetic oligonucleotide
gaaggaauagagcagcagc

SEQ ID NO: 1121271 - RNA, 19 nt, Artificial Sequence
  Description of Artificial Sequence: Synthetic oligonucleotide
uguauucuaggccugagaa

SEQ ID NO: 1121272 - RNA, 19 nt, Artificial Sequence
  Description of Artificial Sequence: Synthetic oligonucleotide
cuacagacaagaaugcucc

SEQ ID NO: 1121273 - RNA, 19 nt, Artificial Sequence
  Description of Artificial Sequence: Synthetic oligonucleotide
auauaaacaaucagaaguc

SEQ ID NO: 1121274 - RNA, 19 nt, Artificial Sequence
  Description of Artificial Sequence: Synthetic oligonucleotide
acagcaacauuacugggcg

SEQ ID NO: 1121275 - RNA, 19 nt, Artificial Sequence
  Description of Artificial Sequence: Synthetic oligonucleotide
uuuauuuggugauucagaa

SEQ ID NO: 1121276 - RNA, 19 nt, Artificial Sequence
  Description of Artificial Sequence: Synthetic oligonucleotide
gacagauauaaacaaucag

SEQ ID NO: 1121277 - RNA, 19 nt, Artificial Sequence
  Description of Artificial Sequence: Synthetic oligonucleotide
auagacaagacccaaucga

SEQ ID NO: 1121278 - RNA, 19 nt, Artificial Sequence
  Description of Artificial Sequence: Synthetic oligonucleotide
aaggcugagccaaugagac

SEQ ID NO: 1121279 - RNA, 19 nt, Artificial Sequence
  Description of Artificial Sequence: Synthetic oligonucleotide
agucuaaaaggcuuuggag

SEQ ID NO: 1121280 - RNA, 19 nt, Artificial Sequence
  Description of Artificial Sequence: Synthetic oligonucleotide
ucuacagacaagaaugcuc

SEQ ID NO: 1121281 - RNA, 19 nt, Artificial Sequence
  Description of Artificial Sequence: Synthetic oligonucleotide
aagucuaaaaggcuuugga

SEQ ID NO: 1121282 - RNA, 19 nt, Artificial Sequence
  Description of Artificial Sequence: Synthetic oligonucleotide
uggugauucagaaggauga

SEQ ID NO: 1121283 - RNA, 19 nt, Artificial Sequence
  Description of Artificial Sequence: Synthetic oligonucleotide
uguaccuuuucucggcugg

SEQ ID NO: 1121284 - RNA, 19 nt, Artificial Sequence
  Description of Artificial Sequence: Synthetic oligonucleotide
aaagaguaagcugauccag

SEQ ID NO: 1121285 - RNA, 19 nt, Artificial Sequence
  Description of Artificial Sequence: Synthetic oligonucleotide
ugggaugccauacagggga

SEQ ID NO: 1121286 - RNA, 19 nt, Artificial Sequence
  Description of Artificial Sequence: Synthetic oligonucleotide
acagauauaaacaaucaga

SEQ ID NO: 1121287 - RNA, 19 nt, Artificial Sequence
  Description of Artificial Sequence: Synthetic oligonucleotide
aaaccagucuaccccgcgc

SEQ ID NO: 1121288 - RNA, 19 nt, Artificial Sequence
  Description of Artificial Sequence: Synthetic oligonucleotide
agaaggaugacagauauaa

SEQ ID NO: 1121289 - RNA, 19 nt, Artificial Sequence
  Description of Artificial Sequence: Synthetic oligonucleotide
ugacagauauaaacaauca

SEQ ID NO: 1121290 - RNA, 19 nt, Artificial Sequence
  Description of Artificial Sequence: Synthetic oligonucleotide
uugaccuggagaaccauag

SEQ ID NO: 1121291 - RNA, 19 nt, Artificial Sequence
  Description of Artificial Sequence: Synthetic oligonucleotide
acuccgaugacugccaugc

SEQ ID NO: 1121292 - RNA, 19 nt, Artificial Sequence
  Description of Artificial Sequence: Synthetic oligonucleotide
agcuacuccuccuugaaag

SEQ ID NO: 1121293 - RNA, 19 nt, Artificial Sequence
  Description of Artificial Sequence: Synthetic oligonucleotide
augguggaagcuccgaccc

SEQ ID NO: 1121294 - RNA, 19 nt, Artificial Sequence
  Description of Artificial Sequence: Synthetic oligonucleotide
auaccugucaggcacagca

SEQ ID NO: 1121295 - RNA, 19 nt, Artificial Sequence
  Description of Artificial Sequence: Synthetic oligonucleotide
agaguaagcugauccaggg

SEQ ID NO: 1121296 - RNA, 19 nt, Artificial Sequence
  Description of Artificial Sequence: Synthetic oligonucleotide
cauacugcauaggaaaugg

SEQ ID NO: 1121297 - RNA, 19 nt, Artificial Sequence
  Description of Artificial Sequence: Synthetic oligonucleotide
aaaguggacagaccgggca

SEQ ID NO: 1121298 - RNA, 19 nt, Artificial Sequence
  Description of Artificial Sequence: Synthetic oligonucleotide
agcaacauuacugggcgcc

SEQ ID NO: 1121299 - RNA, 19 nt, Artificial Sequence
  Description of Artificial Sequence: Synthetic oligonucleotide
agaaccauagcuggagacc

SEQ ID NO: 1121300 - RNA, 19 nt, Artificial Sequence
  Description of Artificial Sequence: Synthetic oligonucleotide
aaggguaauagcugcccag

SEQ ID NO: 1121301 - RNA, 19 nt, Artificial Sequence
  Description of Artificial Sequence: Synthetic oligonucleotide
gaugccuccuaucacccgg

SEQ ID NO: 1121302 - RNA, 19 nt, Artificial Sequence
  Description of Artificial Sequence: Synthetic oligonucleotide
cuaggagcaacauugccug

SEQ ID NO: 1121303 - RNA, 19 nt, Artificial Sequence
  Description of Artificial Sequence: Synthetic oligonucleotide
gaaugcuccgagcaugggg

SEQ ID NO: 1121304 - RNA, 19 nt, Artificial Sequence
  Description of Artificial Sequence: Synthetic oligonucleotide
uggcaaaccagucuacccc

SEQ ID NO: 1121305 - RNA, 19 nt, Artificial Sequence
  Description of Artificial Sequence: Synthetic oligonucleotide
aagaguaagcugauccagg

SEQ ID NO: 1121306 - RNA, 19 nt, Artificial Sequence
  Description of Artificial Sequence: Synthetic oligonucleotide
ugcuggaugccucagguuc

SEQ ID NO: 1121307 - RNA, 19 nt, Artificial Sequence
  Description of Artificial Sequence: Synthetic oligonucleotide
cagagaagaacugaaggag

SEQ ID NO: 1121308 - RNA, 19 nt, Artificial Sequence
  Description of Artificial Sequence: Synthetic oligonucleotide
aguaugcccaugauugugc

SEQ ID NO: 1121309 - RNA, 19 nt, Artificial Sequence
  Description of Artificial Sequence: Synthetic oligonucleotide
cuaccuagggcaccgaggc

SEQ ID NO: 1121310 - RNA, 19 nt, Artificial Sequence
  Description of Artificial Sequence: Synthetic oligonucleotide
aaaggguaauagcugccca

SEQ ID NO: 1121311 - RNA, 19 nt, Artificial Sequence
  Description of Artificial Sequence: Synthetic oligonucleotide
aggccgaggucguauaggc

SEQ ID NO: 1121312 - RNA, 19 nt, Artificial Sequence
  Description of Artificial Sequence: Synthetic oligonucleotide
guagcaacagcgugaaggc

SEQ ID NO: 1121313 - RNA, 19 nt, Artificial Sequence
  Description of Artificial Sequence: Synthetic oligonucleotide
aaggcuacuccgaugacug

SEQ ID NO: 1121314 - RNA, 19 nt, Artificial Sequence
  Description of Artificial Sequence: Synthetic oligonucleotide
ggcacuaggagcaacauug

SEQ ID NO: 1121315 - RNA, 19 nt, Artificial Sequence
  Description of Artificial Sequence: Synthetic oligonucleotide
aggaauagagcagcagccc

SEQ ID NO: 1121316 - RNA, 19 nt, Artificial Sequence
  Description of Artificial Sequence: Synthetic oligonucleotide
aauagcugcccaggcuucc

SEQ ID NO: 1121317 - RNA, 19 nt, Artificial Sequence
  Description of Artificial Sequence: Synthetic oligonucleotide
ugcaacuuccuugccaggg

SEQ ID NO: 1121318 - RNA, 19 nt, Artificial Sequence
  Description of Artificial Sequence: Synthetic oligonucleotide
caggaggucgaguagcagg

SEQ ID NO: 1121319 - RNA, 19 nt, Artificial Sequence
  Description of Artificial Sequence: Synthetic oligonucleotide
aucgacguaggcuucugag

SEQ ID NO: 1121320 - RNA, 19 nt, Artificial Sequence
  Description of Artificial Sequence: Synthetic oligonucleotide
gucccaaugcccuaccuag

SEQ ID NO: 1121321 - RNA, 19 nt, Artificial Sequence
  Description of Artificial Sequence: Synthetic oligonucleotide
gaagucuaaaaggcuuugg

SEQ ID NO: 1121322 - RNA, 19 nt, Artificial Sequence
  Description of Artificial Sequence: Synthetic oligonucleotide
uaggugcccuguauggugg

SEQ ID NO: 1121323 - RNA, 19 nt, Artificial Sequence
  Description of Artificial Sequence: Synthetic oligonucleotide
accgcaaagaguaagcuga

SEQ ID NO: 1121324 - RNA, 19 nt, Artificial Sequence
  Description of Artificial Sequence: Synthetic oligonucleotide
gucuuguucgcgcccaugg

SEQ ID NO: 1121325 - RNA, 19 nt, Artificial Sequence
  Description of Artificial Sequence: Synthetic oligonucleotide
gcugccaggagccauagag

SEQ ID NO: 1121326 - RNA, 19 nt, Artificial Sequence
  Description of Artificial Sequence: Synthetic oligonucleotide
gaggucgaguagcaggccg

SEQ ID NO: 1121327 - RNA, 19 nt, Artificial Sequence
  Description of Artificial Sequence: Synthetic oligonucleotide
uaccauuucuacagacaag

SEQ ID NO: 1121328 - RNA, 19 nt, Artificial Sequence
  Description of Artificial Sequence: Synthetic oligonucleotide
agacccaaucgacguaggc

SEQ ID NO: 1121329 - RNA, 19 nt, Artificial Sequence
  Description of Artificial Sequence: Synthetic oligonucleotide
guagaggaaauagacaaga

SEQ ID NO: 1121330 - RNA, 19 nt, Artificial Sequence
  Description of Artificial Sequence: Synthetic oligonucleotide
caugguggaagcuccgacc

SEQ ID NO: 1121331 - RNA, 19 nt, Artificial Sequence
  Description of Artificial Sequence: Synthetic oligonucleotide
gagaccaaaguggacagac

SEQ ID NO: 1121332 - RNA, 19 nt, Artificial Sequence
  Description of Artificial Sequence: Synthetic oligonucleotide
auccgucgggcguaggugc

SEQ ID NO: 1121333 - RNA, 19 nt, Artificial Sequence
  Description of Artificial Sequence: Synthetic oligonucleotide
cagacaagaaugcuccgag

SEQ ID NO: 1121334 - RNA, 19 nt, Artificial Sequence
  Description of Artificial Sequence: Synthetic oligonucleotide
uuuaaagcuccgagaggca

SEQ ID NO: 1121335 - RNA, 19 nt, Artificial Sequence
  Description of Artificial Sequence: Synthetic oligonucleotide
gagaaccauagcuggagac

SEQ ID NO: 1121336 - RNA, 19 nt, Artificial Sequence
  Description of Artificial Sequence: Synthetic oligonucleotide
agccaguacacugaggcag

SEQ ID NO: 1121337 - RNA, 19 nt, Artificial Sequence
  Description of Artificial Sequence: Synthetic oligonucleotide
uggagaggcuaacauuccc

SEQ ID NO: 1121338 - RNA, 19 nt, Artificial Sequence
  Description of Artificial Sequence: Synthetic oligonucleotide
aggaggucgaguagcaggc

SEQ ID NO: 1121339 - RNA, 19 nt, Artificial Sequence
  Description of Artificial Sequence: Synthetic oligonucleotide
ucagcgacgauggcugugg

SEQ ID NO: 1121340 - RNA, 19 nt, Artificial Sequence
  Description of Artificial Sequence: Synthetic oligonucleotide
aaccagucuaccccgcgcu

SEQ ID NO: 1121341 - RNA, 19 nt, Artificial Sequence
  Description of Artificial Sequence: Synthetic oligonucleotide
auggcaagccuuccuggac

SEQ ID NO: 1121342 - RNA, 19 nt, Artificial Sequence
  Description of Artificial Sequence: Synthetic oligonucleotide
gaccgcaaagaguaagcug

SEQ ID NO: 1121343 - RNA, 19 nt, Artificial Sequence
  Description of Artificial Sequence: Synthetic oligonucleotide
agccccaagcccaacaugg

SEQ ID NO: 1121344 - RNA, 19 nt, Artificial Sequence
  Description of Artificial Sequence: Synthetic oligonucleotide
uauggcaagccuuccugga

SEQ ID NO: 1121345 - RNA, 19 nt, Artificial Sequence
  Description of Artificial Sequence: Synthetic oligonucleotide
uacagacaagaaugcuccg

SEQ ID NO: 1121346 - RNA, 19 nt, Artificial Sequence
  Description of Artificial Sequence: Synthetic oligonucleotide
cauacaggggagugugggg

SEQ ID NO: 1121347 - RNA, 19 nt, Artificial Sequence
  Description of Artificial Sequence: Synthetic oligonucleotide
gaguguguauucuaggccu

SEQ ID NO: 1121348 - RNA, 19 nt, Artificial Sequence
  Description of Artificial Sequence: Synthetic oligonucleotide
uccaggguaccauuucuac

SEQ ID NO: 1121349 - RNA, 19 nt, Artificial Sequence
  Description of Artificial Sequence: Synthetic oligonucleotide
uuguucgcgcccaugguuc

SEQ ID NO: 1121350 - RNA, 19 nt, Artificial Sequence
  Description of Artificial Sequence: Synthetic oligonucleotide
ugcggguuggaggugagcc

SEQ ID NO: 1121351 - RNA, 19 nt, Artificial Sequence
  Description of Artificial Sequence: Synthetic oligonucleotide
agacaagacccaaucgacg

SEQ ID NO: 1121352 - RNA, 19 nt, Artificial Sequence
  Description of Artificial Sequence: Synthetic oligonucleotide
gccgaggucguauaggcgg

SEQ ID NO: 1121353 - RNA, 19 nt, Artificial Sequence
  Description of Artificial Sequence: Synthetic oligonucleotide
ccaaccaaugaagagaaag

SEQ ID NO: 1121354 - RNA, 19 nt, Artificial Sequence
  Description of Artificial Sequence: Synthetic oligonucleotide
caaagaguaagcugaucca

SEQ ID NO: 1121355 - RNA, 19 nt, Artificial Sequence
  Description of Artificial Sequence: Synthetic oligonucleotide
uguggcaaaccagucuacc

SEQ ID NO: 1121356 - RNA, 19 nt, Artificial Sequence
  Description of Artificial Sequence: Synthetic oligonucleotide
aggguaauagcugcccagg

SEQ ID NO: 1121357 - RNA, 19 nt, Artificial Sequence
  Description of Artificial Sequence: Synthetic oligonucleotide
gacaagacccaaucgacgu

SEQ ID NO: 1121358 - RNA, 19 nt, Artificial Sequence
  Description of Artificial Sequence: Synthetic oligonucleotide
caagaaugcuccgagcaug

SEQ ID NO: 1121359 - RNA, 19 nt, Artificial Sequence
  Description of Artificial Sequence: Synthetic oligonucleotide
cugaugccuccuaucaccc

SEQ ID NO: 1121360 - RNA, 19 nt, Artificial Sequence
  Description of Artificial Sequence: Synthetic oligonucleotide
ccuccuaucacccgggagg

SEQ ID NO: 1121361 - RNA, 19 nt, Artificial Sequence
  Description of Artificial Sequence: Synthetic oligonucleotide
acccaaucgacguaggcuu

SEQ ID NO: 1121362 - RNA, 19 nt, Artificial Sequence
  Description of Artificial Sequence: Synthetic oligonucleotide
uuugaccuggagaaccaua

SEQ ID NO: 1121363 - RNA, 19 nt, Artificial Sequence
  Description of Artificial Sequence: Synthetic oligonucleotide
ggcaaaccagucuaccccg

SEQ ID NO: 1121364 - RNA, 19 nt, Artificial Sequence
  Description of Artificial Sequence: Synthetic oligonucleotide
ucccaaugcccuaccuagg

SEQ ID NO: 1121365 - RNA, 19 nt, Artificial Sequence
  Description of Artificial Sequence: Synthetic oligonucleotide
ucgacguaggcuucugagu

SEQ ID NO: 1121366 - RNA, 19 nt, Artificial Sequence
  Description of Artificial Sequence: Synthetic oligonucleotide
aucccaugguggaagcucc

SEQ ID NO: 1121367 - RNA, 19 nt, Artificial Sequence
  Description of Artificial Sequence: Synthetic oligonucleotide
gaugacugccaugccuugg

SEQ ID NO: 1121368 - RNA, 19 nt, Artificial Sequence
  Description of Artificial Sequence: Synthetic oligonucleotide
gguauggcaagccuuccug

SEQ ID NO: 1121369 - RNA, 19 nt, Artificial Sequence
  Description of Artificial Sequence: Synthetic oligonucleotide
gaccuggagaaccauagcu

SEQ ID NO: 1121370 - RNA, 19 nt, Artificial Sequence
  Description of Artificial Sequence: Synthetic oligonucleotide
ugagccaaugagaccucca

SEQ ID NO: 1121371 - RNA, 19 nt, Artificial Sequence
  Description of Artificial Sequence: Synthetic oligonucleotide
aaucgacguaggcuucuga

SEQ ID NO: 1121372 - RNA, 19 nt, Artificial Sequence
  Description of Artificial Sequence: Synthetic oligonucleotide
ugaccuggagaaccauagc

SEQ ID NO: 1121373 - RNA, 19 nt, Artificial Sequence
  Description of Artificial Sequence: Synthetic oligonucleotide
ugauccgucgggcguaggu

SEQ ID NO: 1121374 - RNA, 19 nt, Artificial Sequence
  Description of Artificial Sequence: Synthetic oligonucleotide
uguguauucuaggccugag

SEQ ID NO: 1121375 - RNA, 19 nt, Artificial Sequence
  Description of Artificial Sequence: Synthetic oligonucleotide
gucguauaggcggacgcgg

SEQ ID NO: 1121376 - RNA, 19 nt, Artificial Sequence
  Description of Artificial Sequence: Synthetic oligonucleotide
caaugcccuaccuagggca

SEQ ID NO: 1121377 - RNA, 19 nt, Artificial Sequence
  Description of Artificial Sequence: Synthetic oligonucleotide
accaugggucccaaugccc

SEQ ID NO: 1121378 - RNA, 19 nt, Artificial Sequence
  Description of Artificial Sequence: Synthetic oligonucleotide
ucguauaggcggacgcggc

SEQ ID NO: 1121379 - RNA, 19 nt, Artificial Sequence
  Description of Artificial Sequence: Synthetic oligonucleotide
ugaugccuccuaucacccg

SEQ ID NO: 1121380 - RNA, 19 nt, Artificial Sequence
  Description of Artificial Sequence: Synthetic oligonucleotide
agaagucuaaaaggcuuug

SEQ ID NO: 1121381 - RNA, 19 nt, Artificial Sequence
  Description of Artificial Sequence: Synthetic oligonucleotide
caaaccagucuaccccgcg

SEQ ID NO: 1121382 - RNA, 19 nt, Artificial Sequence
  Description of Artificial Sequence: Synthetic oligonucleotide
agcggcgaaggaauagagc

SEQ ID NO: 1121383 - RNA, 19 nt, Artificial Sequence
  Description of Artificial Sequence: Synthetic oligonucleotide
gagguagaggaaauagaca

SEQ ID NO: 1121384 - RNA, 19 nt, Artificial Sequence
  Description of Artificial Sequence: Synthetic oligonucleotide
agggcugauccgucgggcg

SEQ ID NO: 1121385 - RNA, 19 nt, Artificial Sequence
  Description of Artificial Sequence: Synthetic oligonucleotide
ucuuguucgcgcccauggu

SEQ ID NO: 1121386 - RNA, 19 nt, Artificial Sequence
  Description of Artificial Sequence: Synthetic oligonucleotide
cuggagaccaaaguggaca

SEQ ID NO: 1121387 - RNA, 19 nt, Artificial Sequence
  Description of Artificial Sequence: Synthetic oligonucleotide
acagacaagaaugcuccga

SEQ ID NO: 1121388 - RNA, 19 nt, Artificial Sequence
  Description of Artificial Sequence: Synthetic oligonucleotide
uauaggcggacgcggcgug

SEQ ID NO: 1121389 - RNA, 19 nt, Artificial Sequence
  Description of Artificial Sequence: Synthetic oligonucleotide
uaagcugauccaggguacc

SEQ ID NO: 1121390 - RNA, 19 nt, Artificial Sequence
  Description of Artificial Sequence: Synthetic oligonucleotide
uggugcagagaagaacuga

SEQ ID NO: 1121391 - RNA, 19 nt, Artificial Sequence
  Description of Artificial Sequence: Synthetic oligonucleotide
aggaaauagacaagaccca

SEQ ID NO: 1121392 - RNA, 19 nt, Artificial Sequence
  Description of Artificial Sequence: Synthetic oligonucleotide
aagcugaguguguauucua

SEQ ID NO: 1121393 - RNA, 19 nt, Artificial Sequence
  Description of Artificial Sequence: Synthetic oligonucleotide
gaggcuccgcaguaugccc

SEQ ID NO: 1121394 - RNA, 19 nt, Artificial Sequence
  Description of Artificial Sequence: Synthetic oligonucleotide
uccagcgcacacagugaag

SEQ ID NO: 1121395 - RNA, 19 nt, Artificial Sequence
  Description of Artificial Sequence: Synthetic oligonucleotide
aggcggauccugauggugg

SEQ ID NO: 1121396 - RNA, 19 nt, Artificial Sequence
  Description of Artificial Sequence: Synthetic oligonucleotide
agugaguguccccaaccaa

SEQ ID NO: 1121397 - RNA, 19 nt, Artificial Sequence
  Description of Artificial Sequence: Synthetic oligonucleotide
aagacccaaucgacguagg

SEQ ID NO: 1121398 - RNA, 19 nt, Artificial Sequence
  Description of Artificial Sequence: Synthetic oligonucleotide
agcgugaaggccaggaggu

SEQ ID NO: 1121399 - RNA, 19 nt, Artificial Sequence
  Description of Artificial Sequence: Synthetic oligonucleotide
gaggucguauaggcggacg

SEQ ID NO: 1121400 - RNA, 19 nt, Artificial Sequence
  Description of Artificial Sequence: Synthetic oligonucleotide
uggggcccacaguaaaggc

SEQ ID NO: 1121401 - RNA, 19 nt, Artificial Sequence
  Description of Artificial Sequence: Synthetic oligonucleotide
caaucagaggcagcuccgg

SEQ ID NO: 1121402 - RNA, 19 nt, Artificial Sequence
  Description of Artificial Sequence: Synthetic oligonucleotide
ugcccuaccuagggcaccg

SEQ ID NO: 1121403 - RNA, 19 nt, Artificial Sequence
  Description of Artificial Sequence: Synthetic oligonucleotide
cauuucuacagacaagaau

SEQ ID NO: 1121404 - RNA, 19 nt, Artificial Sequence
  Description of Artificial Sequence: Synthetic oligonucleotide
gauccgucgggcguaggug

SEQ ID NO: 1121405 - RNA, 19 nt, Artificial Sequence
  Description of Artificial Sequence: Synthetic oligonucleotide
agcgcugguguacaaggaa

SEQ ID NO: 1121406 - RNA, 19 nt, Artificial Sequence
  Description of Artificial Sequence: Synthetic oligonucleotide
uuccccuugcugaugccuc

SEQ ID NO: 1121407 - RNA, 19 nt, Artificial Sequence
  Description of Artificial Sequence: Synthetic oligonucleotide
guaagcugauccaggguac

SEQ ID NO: 1121408 - RNA, 19 nt, Artificial Sequence
  Description of Artificial Sequence: Synthetic oligonucleotide
caguaugcccaugauugug

SEQ ID NO: 1121409 - RNA, 19 nt, Artificial Sequence
  Description of Artificial Sequence: Synthetic oligonucleotide
agcgacgauggcuguggag

SEQ ID NO: 1121410 - RNA, 19 nt, Artificial Sequence
  Description of Artificial Sequence: Synthetic oligonucleotide
aggagcaacauugccugcu

SEQ ID NO: 1121411 - RNA, 19 nt, Artificial Sequence
  Description of Artificial Sequence: Synthetic oligonucleotide
augggucccaaugcccuac

SEQ ID NO: 1121412 - RNA, 19 nt, Artificial Sequence
  Description of Artificial Sequence: Synthetic oligonucleotide
acagaccgggcaccacaac

SEQ ID NO: 1121413 - RNA, 19 nt, Artificial Sequence
  Description of Artificial Sequence: Synthetic oligonucleotide
agaccgcaaagaguaagcu

SEQ ID NO: 1121414 - RNA, 19 nt, Artificial Sequence
  Description of Artificial Sequence: Synthetic oligonucleotide
ucuaccccgcgcugccagg

SEQ ID NO: 1121415 - RNA, 19 nt, Artificial Sequence
  Description of Artificial Sequence: Synthetic oligonucleotide
caucccaugguggaagcuc

SEQ ID NO: 1121416 - RNA, 19 nt, Artificial Sequence
  Description of Artificial Sequence: Synthetic oligonucleotide
ggcaccacaacagcagcgg

SEQ ID NO: 1121417 - RNA, 19 nt, Artificial Sequence
  Description of Artificial Sequence: Synthetic oligonucleotide
gaaggcuuuaaagcuccga

SEQ ID NO: 1121418 - RNA, 19 nt, Artificial Sequence
  Description of Artificial Sequence: Synthetic oligonucleotide
gacgauggcuguggagagg

SEQ ID NO: 1121419 - RNA, 19 nt, Artificial Sequence
  Description of Artificial Sequence: Synthetic oligonucleotide
agaucacggugaccacgcg

SEQ ID NO: 1121420 - RNA, 19 nt, Artificial Sequence
  Description of Artificial Sequence: Synthetic oligonucleotide
ucggacacaggccgagguc

SEQ ID NO: 1121421 - RNA, 19 nt, Artificial Sequence
  Description of Artificial Sequence: Synthetic oligonucleotide
ccuaccuagggcaccgagg

SEQ ID NO: 1121422 - RNA, 19 nt, Artificial Sequence
  Description of Artificial Sequence: Synthetic oligonucleotide
ucacccgggaggccaagaa

SEQ ID NO: 1121423 - RNA, 19 nt, Artificial Sequence
  Description of Artificial Sequence: Synthetic oligonucleotide
accgaggcuccgcaguaug

SEQ ID NO: 1121424 - RNA, 19 nt, Artificial Sequence
  Description of Artificial Sequence: Synthetic oligonucleotide
cagcccauacugcauagga

SEQ ID NO: 1121425 - RNA, 19 nt, Artificial Sequence
  Description of Artificial Sequence: Synthetic oligonucleotide
aguguguauucuaggccug

SEQ ID NO: 1121426 - RNA, 19 nt, Artificial Sequence
  Description of Artificial Sequence: Synthetic oligonucleotide
cugugcuggaugccucagg

SEQ ID NO: 1121427 - RNA, 19 nt, Artificial Sequence
  Description of Artificial Sequence: Synthetic oligonucleotide
uccccuugcugaugccucc

SEQ ID NO: 1121428 - RNA, 19 nt, Artificial Sequence
  Description of Artificial Sequence: Synthetic oligonucleotide
gaagcugaguguguauucu

SEQ ID NO: 1121429 - RNA, 19 nt, Artificial Sequence
  Description of Artificial Sequence: Synthetic oligonucleotide
gguaccauuucuacagaca

SEQ ID NO: 1121430 - RNA, 19 nt, Artificial Sequence
  Description of Artificial Sequence: Synthetic oligonucleotide
acguaggcuucugagucug

SEQ ID NO: 1121431 - RNA, 19 nt, Artificial Sequence
  Description of Artificial Sequence: Synthetic oligonucleotide
uucgcgcccaugguucucc

SEQ ID NO: 1121432 - RNA, 19 nt, Artificial Sequence
  Description of Artificial Sequence: Synthetic oligonucleotide
uaccuuuucucggcuggca

SEQ ID NO: 1121433 - RNA, 19 nt, Artificial Sequence
  Description of Artificial Sequence: Synthetic oligonucleotide
gacccaaucgacguaggcu

SEQ ID NO: 1121434 - RNA, 19 nt, Artificial Sequence
  Description of Artificial Sequence: Synthetic oligonucleotide
acaagacccaaucgacgua

SEQ ID NO: 1121435 - RNA, 19 nt, Artificial Sequence
  Description of Artificial Sequence: Synthetic oligonucleotide
agaaugcuccgagcauggg

SEQ ID NO: 1121436 - RNA, 19 nt, Artificial Sequence
  Description of Artificial Sequence: Synthetic oligonucleotide
uccgcaguaugcccaugau

SEQ ID NO: 1121437 - RNA, 19 nt, Artificial Sequence
  Description of Artificial Sequence: Synthetic oligonucleotide
ggucguauaggcggacgcg

SEQ ID NO: 1121438 - RNA, 19 nt, Artificial Sequence
  Description of Artificial Sequence: Synthetic oligonucleotide
gucuaccccgcgcugccag

SEQ ID NO: 1121439 - RNA, 19 nt, Artificial Sequence
  Description of Artificial Sequence: Synthetic oligonucleotide
guuccgcaggagaaagaag

SEQ ID NO: 1121440 - RNA, 19 nt, Artificial Sequence
  Description of Artificial Sequence: Synthetic oligonucleotide
cuguggcaaaccagucuac

SEQ ID NO: 1121441 - RNA, 19 nt, Artificial Sequence
  Description of Artificial Sequence: Synthetic oligonucleotide
gaaggcuacuccgaugacu

SEQ ID NO: 1121442 - RNA, 19 nt, Artificial Sequence
  Description of Artificial Sequence: Synthetic oligonucleotide
ccauacaggggaguguggg

SEQ ID NO: 1121443 - RNA, 19 nt, Artificial Sequence
  Description of Artificial Sequence: Synthetic oligonucleotide
uuuugaccuggagaaccau

SEQ ID NO: 1121444 - RNA, 19 nt, Artificial Sequence
  Description of Artificial Sequence: Synthetic oligonucleotide
auaggcggacgcggcgugc

SEQ ID NO: 1121445 - RNA, 19 nt, Artificial Sequence
  Description of Artificial Sequence: Synthetic oligonucleotide
augcccuaccuagggcacc

SEQ ID NO: 1121446 - RNA, 19 nt, Artificial Sequence
  Description of Artificial Sequence: Synthetic oligonucleotide
ggguaauagcugcccaggc

SEQ ID NO: 1121447 - RNA, 19 nt, Artificial Sequence
  Description of Artificial Sequence: Synthetic oligonucleotide
cagucuaccccgcgcugcc

SEQ ID NO: 1121448 - RNA, 19 nt, Artificial Sequence
  Description of Artificial Sequence: Synthetic oligonucleotide
gcaacuuccuugccagggc

SEQ ID NO: 1121449 - RNA, 19 nt, Artificial Sequence
  Description of Artificial Sequence: Synthetic oligonucleotide
ggcggauccugaugguggg

SEQ ID NO: 1121450 - RNA, 19 nt, Artificial Sequence
  Description of Artificial Sequence: Synthetic oligonucleotide
cagugaguguccccaacca

SEQ ID NO: 1121451 - RNA, 19 nt, Artificial Sequence
  Description of Artificial Sequence: Synthetic oligonucleotide
gaccacgcggcgcucggac

SEQ ID NO: 1121452 - RNA, 19 nt, Artificial Sequence
  Description of Artificial Sequence: Synthetic oligonucleotide
cuggaugccucagguuccg

SEQ ID NO: 1121453 - RNA, 19 nt, Artificial Sequence
  Description of Artificial Sequence: Synthetic oligonucleotide
accagucuaccccgcgcug

SEQ ID NO: 1121454 - RNA, 19 nt, Artificial Sequence
  Description of Artificial Sequence: Synthetic oligonucleotide
agaggcuaacauuccccuu

SEQ ID NO: 1121455 - RNA, 19 nt, Artificial Sequence
  Description of Artificial Sequence: Synthetic oligonucleotide
cagcaacauuacugggcgc

SEQ ID NO: 1121456 - RNA, 19 nt, Artificial Sequence
  Description of Artificial Sequence: Synthetic oligonucleotide
cugagccaaugagaccucc

SEQ ID NO: 1121457 - RNA, 19 nt, Artificial Sequence
  Description of Artificial Sequence: Synthetic oligonucleotide
ggcccagguuuccacuugg

SEQ ID NO: 1121458 - RNA, 19 nt, Artificial Sequence
  Description of Artificial Sequence: Synthetic oligonucleotide
cauuccccuugcugaugcc

SEQ ID NO: 1121459 - RNA, 19 nt, Artificial Sequence
  Description of Artificial Sequence: Synthetic oligonucleotide
gcgacgauggcuguggaga

SEQ ID NO: 1121460 - RNA, 19 nt, Artificial Sequence
  Description of Artificial Sequence: Synthetic oligonucleotide
uaccuagggcaccgaggcu

SEQ ID NO: 1121461 - RNA, 19 nt, Artificial Sequence
  Description of Artificial Sequence: Synthetic oligonucleotide
aagcuccgagaggcagccc

SEQ ID NO: 1121462 - RNA, 19 nt, Artificial Sequence
  Description of Artificial Sequence: Synthetic oligonucleotide
guaccuuuucucggcuggc

SEQ ID NO: 1121463 - RNA, 19 nt, Artificial Sequence
  Description of Artificial Sequence: Synthetic oligonucleotide
guggugcagagaagaacug

SEQ ID NO: 1121464 - RNA, 19 nt, Artificial Sequence
  Description of Artificial Sequence: Synthetic oligonucleotide
guccagcgcacacagugaa

SEQ ID NO: 1121465 - RNA, 19 nt, Artificial Sequence
  Description of Artificial Sequence: Synthetic oligonucleotide
gacguaggcuucugagucu

SEQ ID NO: 1121466 - RNA, 19 nt, Artificial Sequence
  Description of Artificial Sequence: Synthetic oligonucleotide
guuguaccuuuucucggcu

SEQ ID NO: 1121467 - RNA, 19 nt, Artificial Sequence
  Description of Artificial Sequence: Synthetic oligonucleotide
ggagaaccauagcuggaga

SEQ ID NO: 1121468 - RNA, 19 nt, Artificial Sequence
  Description of Artificial Sequence: Synthetic oligonucleotide
gguuccgcaggagaaagaa

SEQ ID NO: 1121469 - RNA, 19 nt, Artificial Sequence
  Description of Artificial Sequence: Synthetic oligonucleotide
ccauacugcauaggaaaug

SEQ ID NO: 1121470 - RNA, 19 nt, Artificial Sequence
  Description of Artificial Sequence: Synthetic oligonucleotide
agcugauccaggguaccau

SEQ ID NO: 1121471 - RNA, 19 nt, Artificial Sequence
  Description of Artificial Sequence: Synthetic oligonucleotide
cgacguaggcuucugaguc

SEQ ID NO: 1121472 - RNA, 19 nt, Artificial Sequence
  Description of Artificial Sequence: Synthetic oligonucleotide
ugccuccuaucacccggga

SEQ ID NO: 1121473 - RNA, 19 nt, Artificial Sequence
  Description of Artificial Sequence: Synthetic oligonucleotide
aguccagcgcacacaguga

SEQ ID NO: 1121474 - RNA, 19 nt, Artificial Sequence
  Description of Artificial Sequence: Synthetic oligonucleotide
ggcaucccgaugacugugg

SEQ ID NO: 1121475 - RNA, 19 nt, Artificial Sequence
  Description of Artificial Sequence: Synthetic oligonucleotide
caguaaaggccagggagaa

SEQ ID NO: 1121476 - RNA, 19 nt, Artificial Sequence
  Description of Artificial Sequence: Synthetic oligonucleotide
caacauuacugggcgccuc

SEQ ID NO: 1121477 - RNA, 19 nt, Artificial Sequence
  Description of Artificial Sequence: Synthetic oligonucleotide
ggaaauggccauaccuguc

SEQ ID NO: 1121478 - RNA, 19 nt, Artificial Sequence
  Description of Artificial Sequence: Synthetic oligonucleotide
uaggcggacgcggcgugca

SEQ ID NO: 1121479 - RNA, 19 nt, Artificial Sequence
  Description of Artificial Sequence: Synthetic oligonucleotide
uggaagcgcugguguacaa

SEQ ID NO: 1121480 - RNA, 19 nt, Artificial Sequence
  Description of Artificial Sequence: Synthetic oligonucleotide
aaccauagcuggagaccaa

SEQ ID NO: 1121481 - RNA, 19 nt, Artificial Sequence
  Description of Artificial Sequence: Synthetic oligonucleotide
gcaacagcgugaaggccag

SEQ ID NO: 1121482 - RNA, 19 nt, Artificial Sequence
  Description of Artificial Sequence: Synthetic oligonucleotide
ccgagcauggggcccacag

SEQ ID NO: 1121483 - RNA, 19 nt, Artificial Sequence
  Description of Artificial Sequence: Synthetic oligonucleotide
cugcugaacuggaagcgcu

SEQ ID NO: 1121484 - RNA, 19 nt, Artificial Sequence
  Description of Artificial Sequence: Synthetic oligonucleotide
gucagcgacgauggcugug

SEQ ID NO: 1121485 - RNA, 19 nt, Artificial Sequence
  Description of Artificial Sequence: Synthetic oligonucleotide
cuccgaugacugccaugcc

SEQ ID NO: 1121486 - RNA, 19 nt, Artificial Sequence
  Description of Artificial Sequence: Synthetic oligonucleotide
cucggcuggcaucccgaug

SEQ ID NO: 1121487 - RNA, 19 nt, Artificial Sequence
  Description of Artificial Sequence: Synthetic oligonucleotide
cguauaggcggacgcggcg

SEQ ID NO: 1121488 - RNA, 19 nt, Artificial Sequence
  Description of Artificial Sequence: Synthetic oligonucleotide
ucgggcguaggugcccugu

SEQ ID NO: 1121489 - RNA, 19 nt, Artificial Sequence
  Description of Artificial Sequence: Synthetic oligonucleotide
uccuaucacccgggaggcc

SEQ ID NO: 1121490 - RNA, 19 nt, Artificial Sequence
  Description of Artificial Sequence: Synthetic oligonucleotide
ggugaccacgcggcgcucg

SEQ ID NO: 1121491 - RNA, 19 nt, Artificial Sequence
  Description of Artificial Sequence: Synthetic oligonucleotide
gcggcgugcagccuguauc

SEQ ID NO: 1121492 - RNA, 19 nt, Artificial Sequence
  Description of Artificial Sequence: Synthetic oligonucleotide
accacgcggcgcucggaca

SEQ ID NO: 1121493 - RNA, 19 nt, Artificial Sequence
  Description of Artificial Sequence: Synthetic oligonucleotide
gccuccuaucacccgggag

SEQ ID NO: 1121494 - RNA, 19 nt, Artificial Sequence
  Description of Artificial Sequence: Synthetic oligonucleotide
gcaccacaacagcagcggc

SEQ ID NO: 1121495 - RNA, 19 nt, Artificial Sequence
  Description of Artificial Sequence: Synthetic oligonucleotide
ccccaaccaaugaagagaa

SEQ ID NO: 1121496 - RNA, 19 nt, Artificial Sequence
  Description of Artificial Sequence: Synthetic oligonucleotide
ucccgaugacuguggcaaa

SEQ ID NO: 1121497 - RNA, 19 nt, Artificial Sequence
  Description of Artificial Sequence: Synthetic oligonucleotide
cuuguucgcgcccaugguu

SEQ ID NO: 1121498 - RNA, 19 nt, Artificial Sequence
  Description of Artificial Sequence: Synthetic oligonucleotide
gcaucccgaugacuguggc

SEQ ID NO: 1121499 - RNA, 19 nt, Artificial Sequence
  Description of Artificial Sequence: Synthetic oligonucleotide
caacuuccuugccagggcu

SEQ ID NO: 1121500 - RNA, 19 nt, Artificial Sequence
  Description of Artificial Sequence: Synthetic oligonucleotide
gcggguuggaggugagccc

SEQ ID NO: 1121501 - RNA, 19 nt, Artificial Sequence
  Description of Artificial Sequence: Synthetic oligonucleotide
ggucccaaugcccuaccua

SEQ ID NO: 1121502 - RNA, 19 nt, Artificial Sequence
  Description of Artificial Sequence: Synthetic oligonucleotide
gcccaacaugggcagugag

SEQ ID NO: 1121503 - RNA, 19 nt, Artificial Sequence
  Description of Artificial Sequence: Synthetic oligonucleotide
gccaguacacugaggcagc

SEQ ID NO: 1121504 - RNA, 19 nt, Artificial Sequence
  Description of Artificial Sequence: Synthetic oligonucleotide
gaagcagacccgggcucca

SEQ ID NO: 1121505 - RNA, 19 nt, Artificial Sequence
  Description of Artificial Sequence: Synthetic oligonucleotide
gcggacgcggcgugcagcc

SEQ ID NO: 1121506 - RNA, 19 nt, Artificial Sequence
  Description of Artificial Sequence: Synthetic oligonucleotide
uggaugccucagguuccgc

SEQ ID NO: 1121507 - RNA, 19 nt, Artificial Sequence
  Description of Artificial Sequence: Synthetic oligonucleotide
uggcuguggagaggcuaac

SEQ ID NO: 1121508 - RNA, 19 nt, Artificial Sequence
  Description of Artificial Sequence: Synthetic oligonucleotide
agcccaacaugggcaguga

SEQ ID NO: 1121509 - RNA, 19 nt, Artificial Sequence
  Description of Artificial Sequence: Synthetic oligonucleotide
ggccgaggucguauaggcg

SEQ ID NO: 1121510 - RNA, 19 nt, Artificial Sequence
  Description of Artificial Sequence: Synthetic oligonucleotide
guauaggcggacgcggcgu

SEQ ID NO: 1121511 - RNA, 19 nt, Artificial Sequence
  Description of Artificial Sequence: Synthetic oligonucleotide
caggucagcgacgauggcu

SEQ ID NO: 1121512 - RNA, 19 nt, Artificial Sequence
  Description of Artificial Sequence: Synthetic oligonucleotide
ccuaucacccgggaggcca

SEQ ID NO: 1121513 - RNA, 19 nt, Artificial Sequence
  Description of Artificial Sequence: Synthetic oligonucleotide
agcauggggcccacaguaa

SEQ ID NO: 1121514 - RNA, 19 nt, Artificial Sequence
  Description of Artificial Sequence: Synthetic oligonucleotide
ccagucuaccccgcgcugc

SEQ ID NO: 1121515 - RNA, 19 nt, Artificial Sequence
  Description of Artificial Sequence: Synthetic oligonucleotide
gccaugccuuggcugcggg

SEQ ID NO: 1121516 - RNA, 19 nt, Artificial Sequence
  Description of Artificial Sequence: Synthetic oligonucleotide
cuaucacccgggaggccaa

SEQ ID NO: 1121517 - RNA, 19 nt, Artificial Sequence
  Description of Artificial Sequence: Synthetic oligonucleotide
ccgaggcuccgcaguaugc

SEQ ID NO: 1121518 - RNA, 19 nt, Artificial Sequence
  Description of Artificial Sequence: Synthetic oligonucleotide
cucggacacaggccgaggu

SEQ ID NO: 1121519 - RNA, 19 nt, Artificial Sequence
  Description of Artificial Sequence: Synthetic oligonucleotide
ccuugccagggcugauccg

SEQ ID NO: 1121520 - RNA, 19 nt, Artificial Sequence
  Description of Artificial Sequence: Synthetic oligonucleotide
gcaaaccagucuaccccgc

SEQ ID NO: 1121521 - RNA, 19 nt, Artificial Sequence
  Description of Artificial Sequence: Synthetic oligonucleotide
cgacgauggcuguggagag

SEQ ID NO: 1121522 - RNA, 19 nt, Artificial Sequence
  Description of Artificial Sequence: Synthetic oligonucleotide
gccccaagcccaacauggg

SEQ ID NO: 1121523 - RNA, 19 nt, Artificial Sequence
  Description of Artificial Sequence: Synthetic oligonucleotide
caguacacugaggcagcca

SEQ ID NO: 1121524 - RNA, 19 nt, Artificial Sequence
  Description of Artificial Sequence: Synthetic oligonucleotide
ggaggucgaguagcaggcc

SEQ ID NO: 1121525 - RNA, 19 nt, Artificial Sequence
  Description of Artificial Sequence: Synthetic oligonucleotide
cuagggcaccgaggcuccg

SEQ ID NO: 1121526 - RNA, 19 nt, Artificial Sequence
  Description of Artificial Sequence: Synthetic oligonucleotide
caugggucccaaugcccua

SEQ ID NO: 1121527 - RNA, 19 nt, Artificial Sequence
  Description of Artificial Sequence: Synthetic oligonucleotide
cccuaccuagggcaccgag

SEQ ID NO: 1121528 - RNA, 19 nt, Artificial Sequence
  Description of Artificial Sequence: Synthetic oligonucleotide
ugaccacgcggcgcucgga

SEQ ID NO: 1121529 - RNA, 19 nt, Artificial Sequence
  Description of Artificial Sequence: Synthetic oligonucleotide
caacagcgugaaggccagg

SEQ ID NO: 1121530 - RNA, 19 nt, Artificial Sequence
  Description of Artificial Sequence: Synthetic oligonucleotide
caugccuuggcugcggguu

SEQ ID NO: 1121531 - RNA, 19 nt, Artificial Sequence
  Description of Artificial Sequence: Synthetic oligonucleotide
ggucuuguucgcgcccaug

SEQ ID NO: 1121532 - RNA, 19 nt, Artificial Sequence
  Description of Artificial Sequence: Synthetic oligonucleotide
ggugcccuguaugguggcc

SEQ ID NO: 1121533 - RNA, 19 nt, Artificial Sequence
  Description of Artificial Sequence: Synthetic oligonucleotide
ccauaccugucaggcacag

SEQ ID NO: 1121534 - RNA, 19 nt, Artificial Sequence
  Description of Artificial Sequence: Synthetic oligonucleotide
cccgaugacuguggcaaac

SEQ ID NO: 1121535 - RNA, 19 nt, Artificial Sequence
  Description of Artificial Sequence: Synthetic oligonucleotide
agucuaccccgcgcugcca

SEQ ID NO: 1121536 - RNA, 19 nt, Artificial Sequence
  Description of Artificial Sequence: Synthetic oligonucleotide
cccaaucgacguaggcuuc

SEQ ID NO: 1121537 - RNA, 19 nt, Artificial Sequence
  Description of Artificial Sequence: Synthetic oligonucleotide
gcaguaugcccaugauugu

SEQ ID NO: 1121538 - RNA, 19 nt, Artificial Sequence
  Description of Artificial Sequence: Synthetic oligonucleotide
cacaggccgaggucguaua

SEQ ID NO: 1121539 - RNA, 19 nt, Artificial Sequence
  Description of Artificial Sequence: Synthetic oligonucleotide
cauccagagugugguagcu

SEQ ID NO: 1121540 - RNA, 19 nt, Artificial Sequence
  Description of Artificial Sequence: Synthetic oligonucleotide
acgcggcgcucggacacag

SEQ ID NO: 1121541 - RNA, 19 nt, Artificial Sequence
  Description of Artificial Sequence: Synthetic oligonucleotide
cugauccgucgggcguagg

SEQ ID NO: 1121542 - RNA, 19 nt, Artificial Sequence
  Description of Artificial Sequence: Synthetic oligonucleotide
cuaccccgcgcugccagga

SEQ ID NO: 1121543 - RNA, 19 nt, Artificial Sequence
  Description of Artificial Sequence: Synthetic oligonucleotide
ccaugggucccaaugcccu

SEQ ID NO: 1121544 - RNA, 19 nt, Artificial Sequence
  Description of Artificial Sequence: Synthetic oligonucleotide
cccaacaugggcagugagu

SEQ ID NO: 1121545 - RNA, 19 nt, Artificial Sequence
  Description of Artificial Sequence: Synthetic oligonucleotide
gcugauccgucgggcguag

SEQ ID NO: 1121546 - RNA, 19 nt, Artificial Sequence
  Description of Artificial Sequence: Synthetic oligonucleotide
gucgggcguaggugcccug

SEQ ID NO: 1121547 - RNA, 19 nt, Artificial Sequence
  Description of Artificial Sequence: Synthetic oligonucleotide
ggcugcggguuggagguga

SEQ ID NO: 1121548 - RNA, 19 nt, Artificial Sequence
  Description of Artificial Sequence: Synthetic oligonucleotide
guucgcgcccaugguucuc

SEQ ID NO: 1121549 - RNA, 19 nt, Artificial Sequence
  Description of Artificial Sequence: Synthetic oligonucleotide
ccgaggucguauaggcgga

SEQ ID NO: 1121550 - RNA, 19 nt, Artificial Sequence
  Description of Artificial Sequence: Synthetic oligonucleotide
ccgaugacugccaugccuu

SEQ ID NO: 1121551 - RNA, 19 nt, Artificial Sequence
  Description of Artificial Sequence: Synthetic oligonucleotide
cagcgacgauggcugugga

SEQ ID NO: 1121552 - RNA, 19 nt, Artificial Sequence
  Description of Artificial Sequence: Synthetic oligonucleotide
gggcugauccgucgggcgu

SEQ ID NO: 1121553 - RNA, 19 nt, Artificial Sequence
  Description of Artificial Sequence: Synthetic oligonucleotide
gcaacauuacugggcgccu

SEQ ID NO: 1121554 - RNA, 19 nt, Artificial Sequence
  Description of Artificial Sequence: Synthetic oligonucleotide
cuacuccgaugacugccau

SEQ ID NO: 1121555 - RNA, 19 nt, Artificial Sequence
  Description of Artificial Sequence: Synthetic oligonucleotide
gacgcggcgugcagccugu

SEQ ID NO: 1121556 - RNA, 19 nt, Artificial Sequence
  Description of Artificial Sequence: Synthetic oligonucleotide
cgcucggacacaggccgag

SEQ ID NO: 1121557 - RNA, 19 nt, Artificial Sequence
  Description of Artificial Sequence: Synthetic oligonucleotide
cccaaccaaugaagagaaa

SEQ ID NO: 1121558 - RNA, 19 nt, Artificial Sequence
  Description of Artificial Sequence: Synthetic oligonucleotide
gcuccgcaguaugcccaug

SEQ ID NO: 1121559 - RNA, 19 nt, Artificial Sequence
  Description of Artificial Sequence: Synthetic oligonucleotide
ccaaucgacguaggcuucu

SEQ ID NO: 1121560 - RNA, 19 nt, Artificial Sequence
  Description of Artificial Sequence: Synthetic oligonucleotide
ggacacaggccgaggucgu

SEQ ID NO: 1121561 - RNA, 19 nt, Artificial Sequence
  Description of Artificial Sequence: Synthetic oligonucleotide
ggagugggcuaggaugguu

SEQ ID NO: 1121562 - RNA, 19 nt, Artificial Sequence
  Description of Artificial Sequence: Synthetic oligonucleotide
ccgcaguaugcccaugauu

SEQ ID NO: 1121563 - RNA, 19 nt, Artificial Sequence
  Description of Artificial Sequence: Synthetic oligonucleotide
ccgcaaagaguaagcugau

SEQ ID NO: 1121564 - RNA, 19 nt, Artificial Sequence
  Description of Artificial Sequence: Synthetic oligonucleotide
gggaggccaagaaggcuuu

SEQ ID NO: 1121565 - RNA, 19 nt, Artificial Sequence
  Description of Artificial Sequence: Synthetic oligonucleotide
ggacacuguuguaccuuuu

SEQ ID NO: 1121566 - RNA, 19 nt, Artificial Sequence
  Description of Artificial Sequence: Synthetic oligonucleotide
caccgaggcuccgcaguau

SEQ ID NO: 1121567 - RNA, 19 nt, Artificial Sequence
  Description of Artificial Sequence: Synthetic oligonucleotide
gcgcucggacacaggccga

SEQ ID NO: 1121568 - RNA, 19 nt, Artificial Sequence
  Description of Artificial Sequence: Synthetic oligonucleotide
gcuccgagaggcagcccau

SEQ ID NO: 1121569 - RNA, 19 nt, Artificial Sequence
  Description of Artificial Sequence: Synthetic oligonucleotide
gcggauccugauggugggu

SEQ ID NO: 1121570 - RNA, 19 nt, Artificial Sequence
  Description of Artificial Sequence: Synthetic oligonucleotide
gcccuaccuagggcaccga

SEQ ID NO: 1121571 - RNA, 19 nt, Artificial Sequence
  Description of Artificial Sequence: Synthetic oligonucleotide
gggcgccuccccaggcaau

SEQ ID NO: 1121572 - RNA, 19 nt, Artificial Sequence
  Description of Artificial Sequence: Synthetic oligonucleotide
cgucgggcguaggugcccu

SEQ ID NO: 1121573 - RNA, 19 nt, Artificial Sequence
  Description of Artificial Sequence: Synthetic oligonucleotide
cggugaccacgcggcgcuc

SEQ ID NO: 1121574 - RNA, 19 nt, Artificial Sequence
  Description of Artificial Sequence: Synthetic oligonucleotide
cgcggcgugcagccuguau

SEQ ID NO: 1121575 - RNA, 19 nt, Artificial Sequence
  Description of Artificial Sequence: Synthetic oligonucleotide
aauguaagcauuuagauac

SEQ ID NO: 1121576 - RNA, 19 nt, Artificial Sequence
  Description of Artificial Sequence: Synthetic oligonucleotide
aguaucugauccuagagcc

SEQ ID NO: 1121577 - RNA, 19 nt, Artificial Sequence
  Description of Artificial Sequence: Synthetic oligonucleotide
aaaucccucacaaugaggc

SEQ ID NO: 1121578 - RNA, 19 nt, Artificial Sequence
  Description of Artificial Sequence: Synthetic oligonucleotide
ucugauacaguaauguaag

SEQ ID NO: 1121579 - RNA, 19 nt, Artificial Sequence
  Description of Artificial Sequence: Synthetic oligonucleotide
uuauugaucacgauuaggu

SEQ ID NO: 1121580 - RNA, 19 nt, Artificial Sequence
  Description of Artificial Sequence: Synthetic oligonucleotide
cuuuuagcauauuugaugc

SEQ ID NO: 1121581 - RNA, 19 nt, Artificial Sequence
  Description of Artificial Sequence: Synthetic oligonucleotide
gaaaaugucauccugggca

SEQ ID NO: 1121582 - RNA, 19 nt, Artificial Sequence
  Description of Artificial Sequence: Synthetic oligonucleotide
auauuugaugcacaugucg

SEQ ID NO: 1121583 - RNA, 19 nt, Artificial Sequence
  Description of Artificial Sequence: Synthetic oligonucleotide
gaaacuaagccauaacuug

SEQ ID NO: 1121584 - RNA, 19 nt, Artificial Sequence
  Description of Artificial Sequence: Synthetic oligonucleotide
ucaaaucuugccauauucg

SEQ ID NO: 1121585 - RNA, 19 nt, Artificial Sequence
  Description of Artificial Sequence: Synthetic oligonucleotide
acuacuguagcauuguaag

SEQ ID NO: 1121586 - RNA, 19 nt, Artificial Sequence
  Description of Artificial Sequence: Synthetic oligonucleotide
aucuaaauuuguuuucccc

SEQ ID NO: 1121587 - RNA, 19 nt, Artificial Sequence
  Description of Artificial Sequence: Synthetic oligonucleotide
ugaacugcaguccuauugg

SEQ ID NO: 1121588 - RNA, 19 nt, Artificial Sequence
  Description of Artificial Sequence: Synthetic oligonucleotide
auagagagacauuucuugc

SEQ ID NO: 1121589 - RNA, 19 nt, Artificial Sequence
  Description of Artificial Sequence: Synthetic oligonucleotide
acucaaagaggucagcagc

SEQ ID NO: 1121590 - RNA, 19 nt, Artificial Sequence
  Description of Artificial Sequence: Synthetic oligonucleotide
gacgaaauaauucucauaa

SEQ ID NO: 1121591 - RNA, 19 nt, Artificial Sequence
  Description of Artificial Sequence: Synthetic oligonucleotide
aucaaaucuugccauauuc

SEQ ID NO: 1121592 - RNA, 19 nt, Artificial Sequence
  Description of Artificial Sequence: Synthetic oligonucleotide
auaauccucggguucagcc

SEQ ID NO: 1121593 - RNA, 19 nt, Artificial Sequence
  Description of Artificial Sequence: Synthetic oligonucleotide
ucuaaauuuguuuucccca

SEQ ID NO: 1121594 - RNA, 19 nt, Artificial Sequence
  Description of Artificial Sequence: Synthetic oligonucleotide
cuuuccguuuucaagaacc

SEQ ID NO: 1121595 - RNA, 19 nt, Artificial Sequence
  Description of Artificial Sequence: Synthetic oligonucleotide
uugaucacgauuagguuag

SEQ ID NO: 1121596 - RNA, 19 nt, Artificial Sequence
  Description of Artificial Sequence: Synthetic oligonucleotide
gaagauuccuggcacaucc

SEQ ID NO: 1121597 - RNA, 19 nt, Artificial Sequence
  Description of Artificial Sequence: Synthetic oligonucleotide
uugguuugaaaccaacaag

SEQ ID NO: 1121598 - RNA, 19 nt, Artificial Sequence
  Description of Artificial Sequence: Synthetic oligonucleotide
ucauggguagcuuaauagg

SEQ ID NO: 1121599 - RNA, 19 nt, Artificial Sequence
  Description of Artificial Sequence: Synthetic oligonucleotide
uugaugaacuccaaguaug

SEQ ID NO: 1121600 - RNA, 19 nt, Artificial Sequence
  Description of Artificial Sequence: Synthetic oligonucleotide
gaaaccaacaagcccacag

SEQ ID NO: 1121601 - RNA, 19 nt, Artificial Sequence
  Description of Artificial Sequence: Synthetic oligonucleotide
ucacgauuagguuagagaa

SEQ ID NO: 1121602 - RNA, 19 nt, Artificial Sequence
  Description of Artificial Sequence: Synthetic oligonucleotide
cuugggaccagagagaccg

SEQ ID NO: 1121603 - RNA, 19 nt, Artificial Sequence
  Description of Artificial Sequence: Synthetic oligonucleotide
aaaugcacguccaaugaac

SEQ ID NO: 1121604 - RNA, 19 nt, Artificial Sequence
  Description of Artificial Sequence: Synthetic oligonucleotide
uugaauaguaggaaacugu

SEQ ID NO: 1121605 - RNA, 19 nt, Artificial Sequence
  Description of Artificial Sequence: Synthetic oligonucleotide
cauauucgaagcuacuucc

SEQ ID NO: 1121606 - RNA, 19 nt, Artificial Sequence
  Description of Artificial Sequence: Synthetic oligonucleotide
aaacuaagccauaacuugg

SEQ ID NO: 1121607 - RNA, 19 nt, Artificial Sequence
  Description of Artificial Sequence: Synthetic oligonucleotide
gagucaaaagcauucauga

SEQ ID NO: 1121608 - RNA, 19 nt, Artificial Sequence
  Description of Artificial Sequence: Synthetic oligonucleotide
aucauggguagcuuaauag

SEQ ID NO: 1121609 - RNA, 19 nt, Artificial Sequence
  Description of Artificial Sequence: Synthetic oligonucleotide
aagccggccauauuuacag

SEQ ID NO: 1121610 - RNA, 19 nt, Artificial Sequence
  Description of Artificial Sequence: Synthetic oligonucleotide
ugauuuauugaucacgauu

SEQ ID NO: 1121611 - RNA, 19 nt, Artificial Sequence
  Description of Artificial Sequence: Synthetic oligonucleotide
ugaacuccaaguauggcac

SEQ ID NO: 1121612 - RNA, 19 nt, Artificial Sequence
  Description of Artificial Sequence: Synthetic oligonucleotide
acgauuagguuagagaaac

SEQ ID NO: 1121613 - RNA, 19 nt, Artificial Sequence
  Description of Artificial Sequence: Synthetic oligonucleotide
aauugaguagcaugugugu

SEQ ID NO: 1121614 - RNA, 19 nt, Artificial Sequence
  Description of Artificial Sequence: Synthetic oligonucleotide
uguacacagcacaugguag

SEQ ID NO: 1121615 - RNA, 19 nt, Artificial Sequence
  Description of Artificial Sequence: Synthetic oligonucleotide
aauccucggguucagcccg

SEQ ID NO: 1121616 - RNA, 19 nt, Artificial Sequence
  Description of Artificial Sequence: Synthetic oligonucleotide
acaaaaugcacguccaaug

SEQ ID NO: 1121617 - RNA, 19 nt, Artificial Sequence
  Description of Artificial Sequence: Synthetic oligonucleotide
ugauacaguaauguaagca

SEQ ID NO: 1121618 - RNA, 19 nt, Artificial Sequence
  Description of Artificial Sequence: Synthetic oligonucleotide
uuuucuccgauucuucagc

SEQ ID NO: 1121619 - RNA, 19 nt, Artificial Sequence
  Description of Artificial Sequence: Synthetic oligonucleotide
uuugaugaacuccaaguau

SEQ ID NO: 1121620 - RNA, 19 nt, Artificial Sequence
  Description of Artificial Sequence: Synthetic oligonucleotide
aguguuggauuccuggcac

SEQ ID NO: 1121621 - RNA, 19 nt, Artificial Sequence
  Description of Artificial Sequence: Synthetic oligonucleotide
aaguggcugaccuuguuug

SEQ ID NO: 1121622 - RNA, 19 nt, Artificial Sequence
  Description of Artificial Sequence: Synthetic oligonucleotide
aacucaucuaaauuuguuu

SEQ ID NO: 1121623 - RNA, 19 nt, Artificial Sequence
  Description of Artificial Sequence: Synthetic oligonucleotide
aaacagaaguuaacuuucc

SEQ ID NO: 1121624 - RNA, 19 nt, Artificial Sequence
  Description of Artificial Sequence: Synthetic oligonucleotide
uaccagauauuccuuuggg

SEQ ID NO: 1121625 - RNA, 19 nt, Artificial Sequence
  Description of Artificial Sequence: Synthetic oligonucleotide
acuuucugcgccuugacga

SEQ ID NO: 1121626 - RNA, 19 nt, Artificial Sequence
  Description of Artificial Sequence: Synthetic oligonucleotide
aaacuucucggagaguccg

SEQ ID NO: 1121627 - RNA, 19 nt, Artificial Sequence
  Description of Artificial Sequence: Synthetic oligonucleotide
augaacuccaaguauggca

SEQ ID NO: 1121628 - RNA, 19 nt, Artificial Sequence
  Description of Artificial Sequence: Synthetic oligonucleotide
auugguaacccuugguuug

SEQ ID NO: 1121629 - RNA, 19 nt, Artificial Sequence
  Description of Artificial Sequence: Synthetic oligonucleotide
aacccuugguuugaaaggg

SEQ ID NO: 1121630 - RNA, 19 nt, Artificial Sequence
  Description of Artificial Sequence: Synthetic oligonucleotide
acagaaguuaacuuuccgu

SEQ ID NO: 1121631 - RNA, 19 nt, Artificial Sequence
  Description of Artificial Sequence: Synthetic oligonucleotide
auugaucacgauuagguua

SEQ ID NO: 1121632 - RNA, 19 nt, Artificial Sequence
  Description of Artificial Sequence: Synthetic oligonucleotide
uguaucauccacacaucug

SEQ ID NO: 1121633 - RNA, 19 nt, Artificial Sequence
  Description of Artificial Sequence: Synthetic oligonucleotide
uccaucuaaaucuccaagu

SEQ ID NO: 1121634 - RNA, 19 nt, Artificial Sequence
  Description of Artificial Sequence: Synthetic oligonucleotide
guagcagacaauugaguag

SEQ ID NO: 1121635 - RNA, 19 nt, Artificial Sequence
  Description of Artificial Sequence: Synthetic oligonucleotide
acugaaguugucuuugaca

SEQ ID NO: 1121636 - RNA, 19 nt, Artificial Sequence
  Description of Artificial Sequence: Synthetic oligonucleotide
ucacuaucagccaauugcu

SEQ ID NO: 1121637 - RNA, 19 nt, Artificial Sequence
  Description of Artificial Sequence: Synthetic oligonucleotide
uagguuagagaaacagaag

SEQ ID NO: 1121638 - RNA, 19 nt, Artificial Sequence
  Description of Artificial Sequence: Synthetic oligonucleotide
aacccuucuugucugguug

SEQ ID NO: 1121639 - RNA, 19 nt, Artificial Sequence
  Description of Artificial Sequence: Synthetic oligonucleotide
ucuugcaguugaauaguag

SEQ ID NO: 1121640 - RNA, 19 nt, Artificial Sequence
  Description of Artificial Sequence: Synthetic oligonucleotide
aucacgauuagguuagaga

SEQ ID NO: 1121641 - RNA, 19 nt, Artificial Sequence
  Description of Artificial Sequence: Synthetic oligonucleotide
ggagacuucaaucacuuug

SEQ ID NO: 1121642 - RNA, 19 nt, Artificial Sequence
  Description of Artificial Sequence: Synthetic oligonucleotide
accauuuagcaacugucag

SEQ ID NO: 1121643 - RNA, 19 nt, Artificial Sequence
  Description of Artificial Sequence: Synthetic oligonucleotide
gguauauaaccuuuuagca

SEQ ID NO: 1121644 - RNA, 19 nt, Artificial Sequence
  Description of Artificial Sequence: Synthetic oligonucleotide
cuacuuccgauguacacag

SEQ ID NO: 1121645 - RNA, 19 nt, Artificial Sequence
  Description of Artificial Sequence: Synthetic oligonucleotide
ccaguuaucagccaauggg

SEQ ID NO: 1121646 - RNA, 19 nt, Artificial Sequence
  Description of Artificial Sequence: Synthetic oligonucleotide
uguagcauuguaagguggu

SEQ ID NO: 1121647 - RNA, 19 nt, Artificial Sequence
  Description of Artificial Sequence: Synthetic oligonucleotide
cagaacauccacaccagag

SEQ ID NO: 1121648 - RNA, 19 nt, Artificial Sequence
  Description of Artificial Sequence: Synthetic oligonucleotide
aaaaugcacguccaaugaa

SEQ ID NO: 1121649 - RNA, 19 nt, Artificial Sequence
  Description of Artificial Sequence: Synthetic oligonucleotide
agagagaccguauuucacu

SEQ ID NO: 1121650 - RNA, 19 nt, Artificial Sequence
  Description of Artificial Sequence: Synthetic oligonucleotide
aguugcuggucacaaaaug

SEQ ID NO: 1121651 - RNA, 19 nt, Artificial Sequence
  Description of Artificial Sequence: Synthetic oligonucleotide
acaauugaguagcaugugu

SEQ ID NO: 1121652 - RNA, 19 nt, Artificial Sequence
  Description of Artificial Sequence: Synthetic oligonucleotide
uauucgaagcuacuuccga

SEQ ID NO: 1121653 - RNA, 19 nt, Artificial Sequence
  Description of Artificial Sequence: Synthetic oligonucleotide
uuuacagcuugugugaaaa

SEQ ID NO: 1121654 - RNA, 19 nt, Artificial Sequence
  Description of Artificial Sequence: Synthetic oligonucleotide
uagagagacauuucuugca

SEQ ID NO: 1121655 - RNA, 19 nt, Artificial Sequence
  Description of Artificial Sequence: Synthetic oligonucleotide
agaccuaugaccauauugu

SEQ ID NO: 1121656 - RNA, 19 nt, Artificial Sequence
  Description of Artificial Sequence: Synthetic oligonucleotide
caugucgucucaaugccag

SEQ ID NO: 1121657 - RNA, 19 nt, Artificial Sequence
  Description of Artificial Sequence: Synthetic oligonucleotide
uguacgcugccacugcugc

SEQ ID NO: 1121658 - RNA, 19 nt, Artificial Sequence
  Description of Artificial Sequence: Synthetic oligonucleotide
agcuacuuccgauguacac

SEQ ID NO: 1121659 - RNA, 19 nt, Artificial Sequence
  Description of Artificial Sequence: Synthetic oligonucleotide
uucgaagcuacuuccgaug

SEQ ID NO: 1121660 - RNA, 19 nt, Artificial Sequence
  Description of Artificial Sequence: Synthetic oligonucleotide
auccauugaauucaccaga

SEQ ID NO: 1121661 - RNA, 19 nt, Artificial Sequence
  Description of Artificial Sequence: Synthetic oligonucleotide
cuuaauagggucuuguacu

SEQ ID NO: 1121662 - RNA, 19 nt, Artificial Sequence
  Description of Artificial Sequence: Synthetic oligonucleotide
ugaauucaccagaggaaug

SEQ ID NO: 1121663 - RNA, 19 nt, Artificial Sequence
  Description of Artificial Sequence: Synthetic oligonucleotide
cuugacgaaauaauucuca

SEQ ID NO: 1121664 - RNA, 19 nt, Artificial Sequence
  Description of Artificial Sequence: Synthetic oligonucleotide
caucucaccaagaaucaug

SEQ ID NO: 1121665 - RNA, 19 nt, Artificial Sequence
  Description of Artificial Sequence: Synthetic oligonucleotide
gaagcuacuuccgauguac

SEQ ID NO: 1121666 - RNA, 19 nt, Artificial Sequence
  Description of Artificial Sequence: Synthetic oligonucleotide
uaucugauccuagagccgc

SEQ ID NO: 1121667 - RNA, 19 nt, Artificial Sequence
  Description of Artificial Sequence: Synthetic oligonucleotide
uagcccaucaaaucuugcc

SEQ ID NO: 1121668 - RNA, 19 nt, Artificial Sequence
  Description of Artificial Sequence: Synthetic oligonucleotide
uguauugcuuugaguaacu

SEQ ID NO: 1121669 - RNA, 19 nt, Artificial Sequence
  Description of Artificial Sequence: Synthetic oligonucleotide
uccuauugguaacccuugg

SEQ ID NO: 1121670 - RNA, 19 nt, Artificial Sequence
  Description of Artificial Sequence: Synthetic oligonucleotide
guugcuggucacaaaaugc

SEQ ID NO: 1121671 - RNA, 19 nt, Artificial Sequence
  Description of Artificial Sequence: Synthetic oligonucleotide
caaagcacguguacgcugc

SEQ ID NO: 1121672 - RNA, 19 nt, Artificial Sequence
  Description of Artificial Sequence: Synthetic oligonucleotide
gcuuugaguaacuccaggg

SEQ ID NO: 1121673 - RNA, 19 nt, Artificial Sequence
  Description of Artificial Sequence: Synthetic oligonucleotide
cuacuguagcauuguaagg

SEQ ID NO: 1121674 - RNA, 19 nt, Artificial Sequence
  Description of Artificial Sequence: Synthetic oligonucleotide
caggaauuccaucuaaauc

SEQ ID NO: 1121675 - RNA, 19 nt, Artificial Sequence
  Description of Artificial Sequence: Synthetic oligonucleotide
uuuagugcugcagaaacuu

SEQ ID NO: 1121676 - RNA, 19 nt, Artificial Sequence
  Description of Artificial Sequence: Synthetic oligonucleotide
caugguagcagacaauuga

SEQ ID NO: 1121677 - RNA, 19 nt, Artificial Sequence
  Description of Artificial Sequence: Synthetic oligonucleotide
uuuccguuuucaagaacca

SEQ ID NO: 1121678 - RNA, 19 nt, Artificial Sequence
  Description of Artificial Sequence: Synthetic oligonucleotide
acucugguaccagauauuc

SEQ ID NO: 1121679 - RNA, 19 nt, Artificial Sequence
  Description of Artificial Sequence: Synthetic oligonucleotide
uaauccucggguucagccc

SEQ ID NO: 1121680 - RNA, 19 nt, Artificial Sequence
  Description of Artificial Sequence: Synthetic oligonucleotide
aaucauggguagcuuaaua

SEQ ID NO: 1121681 - RNA, 19 nt, Artificial Sequence
  Description of Artificial Sequence: Synthetic oligonucleotide
gagagaccguauuucacug

SEQ ID NO: 1121682 - RNA, 19 nt, Artificial Sequence
  Description of Artificial Sequence: Synthetic oligonucleotide
uuuccccaugaguagagcu

SEQ ID NO: 1121683 - RNA, 19 nt, Artificial Sequence
  Description of Artificial Sequence: Synthetic oligonucleotide
aaccauuuagcaacuguca

SEQ ID NO: 1121684 - RNA, 19 nt, Artificial Sequence
  Description of Artificial Sequence: Synthetic oligonucleotide
cuguagcauuguaaggugg

SEQ ID NO: 1121685 - RNA, 19 nt, Artificial Sequence
  Description of Artificial Sequence: Synthetic oligonucleotide
ugguccaaacacaccaucu

SEQ ID NO: 1121686 - RNA, 19 nt, Artificial Sequence
  Description of Artificial Sequence: Synthetic oligonucleotide
uuuagauacuugguuuucu

SEQ ID NO: 1121687 - RNA, 19 nt, Artificial Sequence
  Description of Artificial Sequence: Synthetic oligonucleotide
gaaaucccucacaaugagg

SEQ ID NO: 1121688 - RNA, 19 nt, Artificial Sequence
  Description of Artificial Sequence: Synthetic oligonucleotide
agacaauugaguagcaugu

SEQ ID NO: 1121689 - RNA, 19 nt, Artificial Sequence
  Description of Artificial Sequence: Synthetic oligonucleotide
caaaucuugccauauucga

SEQ ID NO: 1121690 - RNA, 19 nt, Artificial Sequence
  Description of Artificial Sequence: Synthetic oligonucleotide
ccuagagccgcaaagcacg

SEQ ID NO: 1121691 - RNA, 19 nt, Artificial Sequence
  Description of Artificial Sequence: Synthetic oligonucleotide
agagccgcaaagcacgugu

SEQ ID NO: 1121692 - RNA, 19 nt, Artificial Sequence
  Description of Artificial Sequence: Synthetic oligonucleotide
agcaacugucagaaguugc

SEQ ID NO: 1121693 - RNA, 19 nt, Artificial Sequence
  Description of Artificial Sequence: Synthetic oligonucleotide
aaugcacguccaaugaacu

SEQ ID NO: 1121694 - RNA, 19 nt, Artificial Sequence
  Description of Artificial Sequence: Synthetic oligonucleotide
ucucaaugccagauguacu

SEQ ID NO: 1121695 - RNA, 19 nt, Artificial Sequence
  Description of Artificial Sequence: Synthetic oligonucleotide
gaccguauuucacuggaca

SEQ ID NO: 1121696 - RNA, 19 nt, Artificial Sequence
  Description of Artificial Sequence: Synthetic oligonucleotide
ugcgccuugacgaaauaau

SEQ ID NO: 1121697 - RNA, 19 nt, Artificial Sequence
  Description of Artificial Sequence: Synthetic oligonucleotide
ucgaagcuacuuccgaugu

SEQ ID NO: 1121698 - RNA, 19 nt, Artificial Sequence
  Description of Artificial Sequence: Synthetic oligonucleotide
acugaacccuucuugucug

SEQ ID NO: 1121699 - RNA, 19 nt, Artificial Sequence
  Description of Artificial Sequence: Synthetic oligonucleotide
agcacaugguagcagacaa

SEQ ID NO: 1121700 - RNA, 19 nt, Artificial Sequence
  Description of Artificial Sequence: Synthetic oligonucleotide
aacuuuccguuuucaagaa

SEQ ID NO: 1121701 - RNA, 19 nt, Artificial Sequence
  Description of Artificial Sequence: Synthetic oligonucleotide
agucugcuuacauccaucu

SEQ ID NO: 1121702 - RNA, 19 nt, Artificial Sequence
  Description of Artificial Sequence: Synthetic oligonucleotide
gaaagggccacagggacac

SEQ ID NO: 1121703 - RNA, 19 nt, Artificial Sequence
  Description of Artificial Sequence: Synthetic oligonucleotide
uaccucuucugauacagua

SEQ ID NO: 1121704 - RNA, 19 nt, Artificial Sequence
  Description of Artificial Sequence: Synthetic oligonucleotide
aagccugaggcccaguguu

SEQ ID NO: 1121705 - RNA, 19 nt, Artificial Sequence
  Description of Artificial Sequence: Synthetic oligonucleotide
ugaguagcauguguguggc

SEQ ID NO: 1121706 - RNA, 19 nt, Artificial Sequence
  Description of Artificial Sequence: Synthetic oligonucleotide
aaaucuugccauauucgaa

SEQ ID NO: 1121707 - RNA, 19 nt, Artificial Sequence
  Description of Artificial Sequence: Synthetic oligonucleotide
ugaaguugucuuugacagc

SEQ ID NO: 1121708 - RNA, 19 nt, Artificial Sequence
  Description of Artificial Sequence: Synthetic oligonucleotide
uccuagagccgcaaagcac

SEQ ID NO: 1121709 - RNA, 19 nt, Artificial Sequence
  Description of Artificial Sequence: Synthetic oligonucleotide
agaaguuaacuuuccguuu

SEQ ID NO: 1121710 - RNA, 19 nt, Artificial Sequence
  Description of Artificial Sequence: Synthetic oligonucleotide
auauucgaagcuacuuccg

SEQ ID NO: 1121711 - RNA, 19 nt, Artificial Sequence
  Description of Artificial Sequence: Synthetic oligonucleotide
ugguagcagacaauugagu

SEQ ID NO: 1121712 - RNA, 19 nt, Artificial Sequence
  Description of Artificial Sequence: Synthetic oligonucleotide
uuugugucuuuucuccgau

SEQ ID NO: 1121713 - RNA, 19 nt, Artificial Sequence
  Description of Artificial Sequence: Synthetic oligonucleotide
caaaaugcacguccaauga

SEQ ID NO: 1121714 - RNA, 19 nt, Artificial Sequence
  Description of Artificial Sequence: Synthetic oligonucleotide
gagaccguauuucacugga

SEQ ID NO: 1121715 - RNA, 19 nt, Artificial Sequence
  Description of Artificial Sequence: Synthetic oligonucleotide
gcacaugucgucucaaugc

SEQ ID NO: 1121716 - RNA, 19 nt, Artificial Sequence
  Description of Artificial Sequence: Synthetic oligonucleotide
uggggucauguccagccag

SEQ ID NO: 1121717 - RNA, 19 nt, Artificial Sequence
  Description of Artificial Sequence: Synthetic oligonucleotide
ugacgaaauaauucucaua

SEQ ID NO: 1121718 - RNA, 19 nt, Artificial Sequence
  Description of Artificial Sequence: Synthetic oligonucleotide
accuaugaccauauuguag

SEQ ID NO: 1121719 - RNA, 19 nt, Artificial Sequence
  Description of Artificial Sequence: Synthetic oligonucleotide
uuccuauacacagucugcu

SEQ ID NO: 1121720 - RNA, 19 nt, Artificial Sequence
  Description of Artificial Sequence: Synthetic oligonucleotide
caguuaucagccaauggga

SEQ ID NO: 1121721 - RNA, 19 nt, Artificial Sequence
  Description of Artificial Sequence: Synthetic oligonucleotide
cauauuugaugcacauguc

SEQ ID NO: 1121722 - RNA, 19 nt, Artificial Sequence
  Description of Artificial Sequence: Synthetic oligonucleotide
gcuuaauagggucuuguac

SEQ ID NO: 1121723 - RNA, 19 nt, Artificial Sequence
  Description of Artificial Sequence: Synthetic oligonucleotide
cugcuuacauccaucucac

SEQ ID NO: 1121724 - RNA, 19 nt, Artificial Sequence
  Description of Artificial Sequence: Synthetic oligonucleotide
ucggguucagcccgguacc

SEQ ID NO: 1121725 - RNA, 19 nt, Artificial Sequence
  Description of Artificial Sequence: Synthetic oligonucleotide
caccaugcucaucaugccg

SEQ ID NO: 1121726 - RNA, 19 nt, Artificial Sequence
  Description of Artificial Sequence: Synthetic oligonucleotide
ugaugcacaugucgucuca

SEQ ID NO: 1121727 - RNA, 19 nt, Artificial Sequence
  Description of Artificial Sequence: Synthetic oligonucleotide
uucccagaccccacuagca

SEQ ID NO: 1121728 - RNA, 19 nt, Artificial Sequence
  Description of Artificial Sequence: Synthetic oligonucleotide
cuguauugcuuugaguaac

SEQ ID NO: 1121729 - RNA, 19 nt, Artificial Sequence
  Description of Artificial Sequence: Synthetic oligonucleotide
uuccccaugaguagagcuc

SEQ ID NO: 1121730 - RNA, 19 nt, Artificial Sequence
  Description of Artificial Sequence: Synthetic oligonucleotide
cuaucagccaauugcuuga

SEQ ID NO: 1121731 - RNA, 19 nt, Artificial Sequence
  Description of Artificial Sequence: Synthetic oligonucleotide
uuccucguaccacaucacu

SEQ ID NO: 1121732 - RNA, 19 nt, Artificial Sequence
  Description of Artificial Sequence: Synthetic oligonucleotide
acguguacgcugccacugc

SEQ ID NO: 1121733 - RNA, 19 nt, Artificial Sequence
  Description of Artificial Sequence: Synthetic oligonucleotide
gaucacgauuagguuagag

SEQ ID NO: 1121734 - RNA, 19 nt, Artificial Sequence
  Description of Artificial Sequence: Synthetic oligonucleotide
acaaugaggcgccucacuu

SEQ ID NO: 1121735 - RNA, 19 nt, Artificial Sequence
  Description of Artificial Sequence: Synthetic oligonucleotide
gaggucuugcaguugaaua

SEQ ID NO: 1121736 - RNA, 19 nt, Artificial Sequence
  Description of Artificial Sequence: Synthetic oligonucleotide
auucgaagcuacuuccgau

SEQ ID NO: 1121737 - RNA, 19 nt, Artificial Sequence
  Description of Artificial Sequence: Synthetic oligonucleotide
acaucaaugccagaccuau

SEQ ID NO: 1121738 - RNA, 19 nt, Artificial Sequence
  Description of Artificial Sequence: Synthetic oligonucleotide
accguauuucacuggacaa

SEQ ID NO: 1121739 - RNA, 19 nt, Artificial Sequence
  Description of Artificial Sequence: Synthetic oligonucleotide
gaaacuucucggagagucc

SEQ ID NO: 1121740 - RNA, 19 nt, Artificial Sequence
  Description of Artificial Sequence: Synthetic oligonucleotide
caccaagaaucauggguag

SEQ ID NO: 1121741 - RNA, 19 nt, Artificial Sequence
  Description of Artificial Sequence: Synthetic oligonucleotide
uguuuuagugcugcagaaa

SEQ ID NO: 1121742 - RNA, 19 nt, Artificial Sequence
  Description of Artificial Sequence: Synthetic oligonucleotide
cucugguaccagauauucc

SEQ ID NO: 1121743 - RNA, 19 nt, Artificial Sequence
  Description of Artificial Sequence: Synthetic oligonucleotide
cacuuucugcgccuugacg

SEQ ID NO: 1121744 - RNA, 19 nt, Artificial Sequence
  Description of Artificial Sequence: Synthetic oligonucleotide
uugucugguugcagcauac

SEQ ID NO: 1121745 - RNA, 19 nt, Artificial Sequence
  Description of Artificial Sequence: Synthetic oligonucleotide
agaccccacuagcaaacuc

SEQ ID NO: 1121746 - RNA, 19 nt, Artificial Sequence
  Description of Artificial Sequence: Synthetic oligonucleotide
gacaauugaguagcaugug

SEQ ID NO: 1121747 - RNA, 19 nt, Artificial Sequence
  Description of Artificial Sequence: Synthetic oligonucleotide
uguacugugguggaaucuu

SEQ ID NO: 1121748 - RNA, 19 nt, Artificial Sequence
  Description of Artificial Sequence: Synthetic oligonucleotide
caugaguagagcucccuga

SEQ ID NO: 1121749 - RNA, 19 nt, Artificial Sequence
  Description of Artificial Sequence: Synthetic oligonucleotide
guaucugauccuagagccg

SEQ ID NO: 1121750 - RNA, 19 nt, Artificial Sequence
  Description of Artificial Sequence: Synthetic oligonucleotide
agcccgguaccagaugugc

SEQ ID NO: 1121751 - RNA, 19 nt, Artificial Sequence
  Description of Artificial Sequence: Synthetic oligonucleotide
uugauuuauugaucacgau

SEQ ID NO: 1121752 - RNA, 19 nt, Artificial Sequence
  Description of Artificial Sequence: Synthetic oligonucleotide
gguuugaaaccaacaagcc

SEQ ID NO: 1121753 - RNA, 19 nt, Artificial Sequence
  Description of Artificial Sequence: Synthetic oligonucleotide
cgauguacacagcacaugg

SEQ ID NO: 1121754 - RNA, 19 nt, Artificial Sequence
  Description of Artificial Sequence: Synthetic oligonucleotide
ugcaguccuauugguaacc

SEQ ID NO: 1121755 - RNA, 19 nt, Artificial Sequence
  Description of Artificial Sequence: Synthetic oligonucleotide
aacaggaauuccaucuaaa

SEQ ID NO: 1121756 - RNA, 19 nt, Artificial Sequence
  Description of Artificial Sequence: Synthetic oligonucleotide
augaguagagcucccugau

SEQ ID NO: 1121757 - RNA, 19 nt, Artificial Sequence
  Description of Artificial Sequence: Synthetic oligonucleotide
guuugugucuuuucuccga

SEQ ID NO: 1121758 - RNA, 19 nt, Artificial Sequence
  Description of Artificial Sequence: Synthetic oligonucleotide
uagcuuaauagggucuugu

SEQ ID NO: 1121759 - RNA, 19 nt, Artificial Sequence
  Description of Artificial Sequence: Synthetic oligonucleotide
cuuguacugugguggaauc

SEQ ID NO: 1121760 - RNA, 19 nt, Artificial Sequence
  Description of Artificial Sequence: Synthetic oligonucleotide
uguuggauuccuggcaccu

SEQ ID NO: 1121761 - RNA, 19 nt, Artificial Sequence
  Description of Artificial Sequence: Synthetic oligonucleotide
agcauaauccucggguuca

SEQ ID NO: 1121762 - RNA, 19 nt, Artificial Sequence
  Description of Artificial Sequence: Synthetic oligonucleotide
gguagcagacaauugagua

SEQ ID NO: 1121763 - RNA, 19 nt, Artificial Sequence
  Description of Artificial Sequence: Synthetic oligonucleotide
cagccaguacaccuaacac

SEQ ID NO: 1121764 - RNA, 19 nt, Artificial Sequence
  Description of Artificial Sequence: Synthetic oligonucleotide
acgaaauaauucucauaau

SEQ ID NO: 1121765 - RNA, 19 nt, Artificial Sequence
  Description of Artificial Sequence: Synthetic oligonucleotide
gaccccacuagcaaacuca

SEQ ID NO: 1121766 - RNA, 19 nt, Artificial Sequence
  Description of Artificial Sequence: Synthetic oligonucleotide
ucagaaguugcuggucaca

SEQ ID NO: 1121767 - RNA, 19 nt, Artificial Sequence
  Description of Artificial Sequence: Synthetic oligonucleotide
ugggaguuagcagaacauc

SEQ ID NO: 1121768 - RNA, 19 nt, Artificial Sequence
  Description of Artificial Sequence: Synthetic oligonucleotide
augcacguccaaugaacug

SEQ ID NO: 1121769 - RNA, 19 nt, Artificial Sequence
  Description of Artificial Sequence: Synthetic oligonucleotide
agauuccuggcacauccau

SEQ ID NO: 1121770 - RNA, 19 nt, Artificial Sequence
  Description of Artificial Sequence: Synthetic oligonucleotide
uguguggcaaggagacuuc

SEQ ID NO: 1121771 - RNA, 19 nt, Artificial Sequence
  Description of Artificial Sequence: Synthetic oligonucleotide
gagagacauuucuugcaga

SEQ ID NO: 1121772 - RNA, 19 nt, Artificial Sequence
  Description of Artificial Sequence: Synthetic oligonucleotide
cuaacacaacugcuguauc

SEQ ID NO: 1121773 - RNA, 19 nt, Artificial Sequence
  Description of Artificial Sequence: Synthetic oligonucleotide
gauguacugaaguugucuu

SEQ ID NO: 1121774 - RNA, 19 nt, Artificial Sequence
  Description of Artificial Sequence: Synthetic oligonucleotide
guccaaugaacugcagucc

SEQ ID NO: 1121775 - RNA, 19 nt, Artificial Sequence
  Description of Artificial Sequence: Synthetic oligonucleotide
uagcaacugucagaaguug

SEQ ID NO: 1121776 - RNA, 19 nt, Artificial Sequence
  Description of Artificial Sequence: Synthetic oligonucleotide
ucucggagaguccggccca

SEQ ID NO: 1121777 - RNA, 19 nt, Artificial Sequence
  Description of Artificial Sequence: Synthetic oligonucleotide
aacuucucggagaguccgg

SEQ ID NO: 1121778 - RNA, 19 nt, Artificial Sequence
  Description of Artificial Sequence: Synthetic oligonucleotide
uggacaacucugguaccag

SEQ ID NO: 1121779 - RNA, 19 nt, Artificial Sequence
  Description of Artificial Sequence: Synthetic oligonucleotide
cucacaaugaggcgccuca

SEQ ID NO: 1121780 - RNA, 19 nt, Artificial Sequence
  Description of Artificial Sequence: Synthetic oligonucleotide
cuccgauucuucagcuugc

SEQ ID NO: 1121781 - RNA, 19 nt, Artificial Sequence
  Description of Artificial Sequence: Synthetic oligonucleotide
agcucuguuggugugacuu

SEQ ID NO: 1121782 - RNA, 19 nt, Artificial Sequence
  Description of Artificial Sequence: Synthetic oligonucleotide
uugaugcacaugucgucuc

SEQ ID NO: 1121783 - RNA, 19 nt, Artificial Sequence
  Description of Artificial Sequence: Synthetic oligonucleotide
agccggccauauuuacagc

SEQ ID NO: 1121784 - RNA, 19 nt, Artificial Sequence
  Description of Artificial Sequence: Synthetic oligonucleotide
ugucgucucaaugccagau

SEQ ID NO: 1121785 - RNA, 19 nt, Artificial Sequence
  Description of Artificial Sequence: Synthetic oligonucleotide
aguccuauugguaacccuu

SEQ ID NO: 1121786 - RNA, 19 nt, Artificial Sequence
  Description of Artificial Sequence: Synthetic oligonucleotide
gauacuugguuuucuugau

SEQ ID NO: 1121787 - RNA, 19 nt, Artificial Sequence
  Description of Artificial Sequence: Synthetic oligonucleotide
agcuuaauagggucuugua

SEQ ID NO: 1121788 - RNA, 19 nt, Artificial Sequence
  Description of Artificial Sequence: Synthetic oligonucleotide
ugguaccagauauuccuuu

SEQ ID NO: 1121789 - RNA, 19 nt, Artificial Sequence
  Description of Artificial Sequence: Synthetic oligonucleotide
acuagcaaacucaucuaaa

SEQ ID NO: 1121790 - RNA, 19 nt, Artificial Sequence
  Description of Artificial Sequence: Synthetic oligonucleotide
ccguuuucaagaaccaaug

SEQ ID NO: 1121791 - RNA, 19 nt, Artificial Sequence
  Description of Artificial Sequence: Synthetic oligonucleotide
gucgucucaaugccagaug

SEQ ID NO: 1121792 - RNA, 19 nt, Artificial Sequence
  Description of Artificial Sequence: Synthetic oligonucleotide
ccauauucgaagcuacuuc

SEQ ID NO: 1121793 - RNA, 19 nt, Artificial Sequence
  Description of Artificial Sequence: Synthetic oligonucleotide
uugguaacccuugguuuga

SEQ ID NO: 1121794 - RNA, 19 nt, Artificial Sequence
  Description of Artificial Sequence: Synthetic oligonucleotide
auggguagcuuaauagggu

SEQ ID NO: 1121795 - RNA, 19 nt, Artificial Sequence
  Description of Artificial Sequence: Synthetic oligonucleotide
cagcauaauccucggguuc

SEQ ID NO: 1121796 - RNA, 19 nt, Artificial Sequence
  Description of Artificial Sequence: Synthetic oligonucleotide
cuaaauuuguuuuccccau

SEQ ID NO: 1121797 - RNA, 19 nt, Artificial Sequence
  Description of Artificial Sequence: Synthetic oligonucleotide
aguggcugaccuuguuugu

SEQ ID NO: 1121798 - RNA, 19 nt, Artificial Sequence
  Description of Artificial Sequence: Synthetic oligonucleotide
uccuggcaccucacuauca

SEQ ID NO: 1121799 - RNA, 19 nt, Artificial Sequence
  Description of Artificial Sequence: Synthetic oligonucleotide
uccuauacacagucugcuu

SEQ ID NO: 1121800 - RNA, 19 nt, Artificial Sequence
  Description of Artificial Sequence: Synthetic oligonucleotide
cugguccaaacacaccauc

SEQ ID NO: 1121801 - RNA, 19 nt, Artificial Sequence
  Description of Artificial Sequence: Synthetic oligonucleotide
gaccuaugaccauauugua

SEQ ID NO: 1121802 - RNA, 19 nt, Artificial Sequence
  Description of Artificial Sequence: Synthetic oligonucleotide
caacugucagaaguugcug

SEQ ID NO: 1121803 - RNA, 19 nt, Artificial Sequence
  Description of Artificial Sequence: Synthetic oligonucleotide
uuacagcuugugugaaaau

SEQ ID NO: 1121804 - RNA, 19 nt, Artificial Sequence
  Description of Artificial Sequence: Synthetic oligonucleotide
cguccaaugaacugcaguc

SEQ ID NO: 1121805 - RNA, 19 nt, Artificial Sequence
  Description of Artificial Sequence: Synthetic oligonucleotide
cuguuuuagugcugcagaa

SEQ ID NO: 1121806 - RNA, 19 nt, Artificial Sequence
  Description of Artificial Sequence: Synthetic oligonucleotide
ugaggucuugcaguugaau

SEQ ID NO: 1121807 - RNA, 19 nt, Artificial Sequence
  Description of Artificial Sequence: Synthetic oligonucleotide
acuucguguccuguugucu

SEQ ID NO: 1121808 - RNA, 19 nt, Artificial Sequence
  Description of Artificial Sequence: Synthetic oligonucleotide
uccggcccagcauaauccu

SEQ ID NO: 1121809 - RNA, 19 nt, Artificial Sequence
  Description of Artificial Sequence: Synthetic oligonucleotide
cugcaguccuauugguaac

SEQ ID NO: 1121810 - RNA, 19 nt, Artificial Sequence
  Description of Artificial Sequence: Synthetic oligonucleotide
ugcuuacauccaucucacc

SEQ ID NO: 1121811 - RNA, 19 nt, Artificial Sequence
  Description of Artificial Sequence: Synthetic oligonucleotide
guguuggauuccuggcacc

SEQ ID NO: 1121812 - RNA, 19 nt, Artificial Sequence
  Description of Artificial Sequence: Synthetic oligonucleotide
aguauggcacugccucacu

SEQ ID NO: 1121813 - RNA, 19 nt, Artificial Sequence
  Description of Artificial Sequence: Synthetic oligonucleotide
agaccguauuucacuggac

SEQ ID NO: 1121814 - RNA, 19 nt, Artificial Sequence
  Description of Artificial Sequence: Synthetic oligonucleotide
uuccguuuucaagaaccaa

SEQ ID NO: 1121815 - RNA, 19 nt, Artificial Sequence
  Description of Artificial Sequence: Synthetic oligonucleotide
guccuauugguaacccuug

SEQ ID NO: 1121816 - RNA, 19 nt, Artificial Sequence
  Description of Artificial Sequence: Synthetic oligonucleotide
cacgauuagguuagagaaa

SEQ ID NO: 1121817 - RNA, 19 nt, Artificial Sequence
  Description of Artificial Sequence: Synthetic oligonucleotide
cuauugguaacccuugguu

SEQ ID NO: 1121818 - RNA, 19 nt, Artificial Sequence
  Description of Artificial Sequence: Synthetic oligonucleotide
cauuuagauacuugguuuu

SEQ ID NO: 1121819 - RNA, 19 nt, Artificial Sequence
  Description of Artificial Sequence: Synthetic oligonucleotide
guaccagaugugcccggag

SEQ ID NO: 1121820 - RNA, 19 nt, Artificial Sequence
  Description of Artificial Sequence: Synthetic oligonucleotide
gaccauauuguagcccauc

SEQ ID NO: 1121821 - RNA, 19 nt, Artificial Sequence
  Description of Artificial Sequence: Synthetic oligonucleotide
caucaaugccagaccuaug

SEQ ID NO: 1121822 - RNA, 19 nt, Artificial Sequence
  Description of Artificial Sequence: Synthetic oligonucleotide
aagccauaacuugguuuga

SEQ ID NO: 1121823 - RNA, 19 nt, Artificial Sequence
  Description of Artificial Sequence: Synthetic oligonucleotide
cacguguacgcugccacug

SEQ ID NO: 1121824 - RNA, 19 nt, Artificial Sequence
  Description of Artificial Sequence: Synthetic oligonucleotide
gccuugacgaaauaauucu

SEQ ID NO: 1121825 - RNA, 19 nt, Artificial Sequence
  Description of Artificial Sequence: Synthetic oligonucleotide
agcaggguuucugguggac

SEQ ID NO: 1121826 - RNA, 19 nt, Artificial Sequence
  Description of Artificial Sequence: Synthetic oligonucleotide
ugacagcaacaggaauucc

SEQ ID NO: 1121827 - RNA, 19 nt, Artificial Sequence
  Description of Artificial Sequence: Synthetic oligonucleotide
caagccggccauauuuaca

SEQ ID NO: 1121828 - RNA, 19 nt, Artificial Sequence
  Description of Artificial Sequence: Synthetic oligonucleotide
gcuacuuccgauguacaca

SEQ ID NO: 1121829 - RNA, 19 nt, Artificial Sequence
  Description of Artificial Sequence: Synthetic oligonucleotide
cauaauccucggguucagc

SEQ ID NO: 1121830 - RNA, 19 nt, Artificial Sequence
  Description of Artificial Sequence: Synthetic oligonucleotide
ugaggcccaguguuggauu

SEQ ID NO: 1121831 - RNA, 19 nt, Artificial Sequence
  Description of Artificial Sequence: Synthetic oligonucleotide
gguggaaucuuugggguca

SEQ ID NO: 1121832 - RNA, 19 nt, Artificial Sequence
  Description of Artificial Sequence: Synthetic oligonucleotide
cagauguacugaaguuguc

SEQ ID NO: 1121833 - RNA, 19 nt, Artificial Sequence
  Description of Artificial Sequence: Synthetic oligonucleotide
guagcuuaauagggucuug

SEQ ID NO: 1121834 - RNA, 19 nt, Artificial Sequence
  Description of Artificial Sequence: Synthetic oligonucleotide
ugucugguugcagcauaca

SEQ ID NO: 1121835 - RNA, 19 nt, Artificial Sequence
  Description of Artificial Sequence: Synthetic oligonucleotide
ccuugacgaaauaauucuc

SEQ ID NO: 1121836 - RNA, 19 nt, Artificial Sequence
  Description of Artificial Sequence: Synthetic oligonucleotide
cccacuagcaaacucaucu

SEQ ID NO: 1121837 - RNA, 19 nt, Artificial Sequence
  Description of Artificial Sequence: Synthetic oligonucleotide
cccgguaccagaugugccc

SEQ ID NO: 1121838 - RNA, 19 nt, Artificial Sequence
  Description of Artificial Sequence: Synthetic oligonucleotide
caacucugguaccagauau

SEQ ID NO: 1121839 - RNA, 19 nt, Artificial Sequence
  Description of Artificial Sequence: Synthetic oligonucleotide
caucaugccgcugccuuuc

SEQ ID NO: 1121840 - RNA, 19 nt, Artificial Sequence
  Description of Artificial Sequence: Synthetic oligonucleotide
ccgcaaagcacguguacgc

SEQ ID NO: 1121841 - RNA, 19 nt, Artificial Sequence
  Description of Artificial Sequence: Synthetic oligonucleotide
gcauuuagauacuugguuu

SEQ ID NO: 1121842 - RNA, 19 nt, Artificial Sequence
  Description of Artificial Sequence: Synthetic oligonucleotide
ggugguauauaaccuuuua

SEQ ID NO: 1121843 - RNA, 19 nt, Artificial Sequence
  Description of Artificial Sequence: Synthetic oligonucleotide
accuaacacaacugcugua

SEQ ID NO: 1121844 - RNA, 19 nt, Artificial Sequence
  Description of Artificial Sequence: Synthetic oligonucleotide
ccauuuagcaacugucaga

SEQ ID NO: 1121845 - RNA, 19 nt, Artificial Sequence
  Description of Artificial Sequence: Synthetic oligonucleotide
guuucugguggacccucca

SEQ ID NO: 1121846 - RNA, 19 nt, Artificial Sequence
  Description of Artificial Sequence: Synthetic oligonucleotide
ugaaaccaacaagcccaca

SEQ ID NO: 1121847 - RNA, 19 nt, Artificial Sequence
  Description of Artificial Sequence: Synthetic oligonucleotide
uucuccgauucuucagcuu

SEQ ID NO: 1121848 - RNA, 19 nt, Artificial Sequence
  Description of Artificial Sequence: Synthetic oligonucleotide
cuuucugcgccuugacgaa

SEQ ID NO: 1121849 - RNA, 19 nt, Artificial Sequence
  Description of Artificial Sequence: Synthetic oligonucleotide
ggaaacuaagccauaacuu

SEQ ID NO: 1121850 - RNA, 19 nt, Artificial Sequence
  Description of Artificial Sequence: Synthetic oligonucleotide
ccagaccccacuagcaaac

SEQ ID NO: 1121851 - RNA, 19 nt, Artificial Sequence
  Description of Artificial Sequence: Synthetic oligonucleotide
ggucauguccagccaguac

SEQ ID NO: 1121852 - RNA, 19 nt, Artificial Sequence
  Description of Artificial Sequence: Synthetic oligonucleotide
ugcccggagcggaggaaga

SEQ ID NO: 1121853 - RNA, 19 nt, Artificial Sequence
  Description of Artificial Sequence: Synthetic oligonucleotide
gucugcuuacauccaucuc

SEQ ID NO: 1121854 - RNA, 19 nt, Artificial Sequence
  Description of Artificial Sequence: Synthetic oligonucleotide
ccuggcaccucacuaucag

SEQ ID NO: 1121855 - RNA, 19 nt, Artificial Sequence
  Description of Artificial Sequence: Synthetic oligonucleotide
gauguacacagcacauggu

SEQ ID NO: 1121856 - RNA, 19 nt, Artificial Sequence
  Description of Artificial Sequence: Synthetic oligonucleotide
uugugucuuuucuccgauu

SEQ ID NO: 1121857 - RNA, 19 nt, Artificial Sequence
  Description of Artificial Sequence: Synthetic oligonucleotide
augucgucucaaugccaga

SEQ ID NO: 1121858 - RNA, 19 nt, Artificial Sequence
  Description of Artificial Sequence: Synthetic oligonucleotide
uggcccuguuuuagugcug

SEQ ID NO: 1121859 - RNA, 19 nt, Artificial Sequence
  Description of Artificial Sequence: Synthetic oligonucleotide
ucaugccgcugccuuucuc

SEQ ID NO: 1121860 - RNA, 19 nt, Artificial Sequence
  Description of Artificial Sequence: Synthetic oligonucleotide
acaugucgucucaaugcca

SEQ ID NO: 1121861 - RNA, 19 nt, Artificial Sequence
  Description of Artificial Sequence: Synthetic oligonucleotide
cgccuugacgaaauaauuc

SEQ ID NO: 1121862 - RNA, 19 nt, Artificial Sequence
  Description of Artificial Sequence: Synthetic oligonucleotide
ugaggccauggcgggaaac

SEQ ID NO: 1121863 - RNA, 19 nt, Artificial Sequence
  Description of Artificial Sequence: Synthetic oligonucleotide
gguucagcccgguaccaga

SEQ ID NO: 1121864 - RNA, 19 nt, Artificial Sequence
  Description of Artificial Sequence: Synthetic oligonucleotide
uuucugcgccuugacgaaa

SEQ ID NO: 1121865 - RNA, 19 nt, Artificial Sequence
  Description of Artificial Sequence: Synthetic oligonucleotide
cacguccaaugaacugcag

SEQ ID NO: 1121866 - RNA, 19 nt, Artificial Sequence
  Description of Artificial Sequence: Synthetic oligonucleotide
gcacccucagacucaaaga

SEQ ID NO: 1121867 - RNA, 19 nt, Artificial Sequence
  Description of Artificial Sequence: Synthetic oligonucleotide
gccauggcgggaaacuaag

SEQ ID NO: 1121868 - RNA, 19 nt, Artificial Sequence
  Description of Artificial Sequence: Synthetic oligonucleotide
gcuuuaaggcuaccucuuc

SEQ ID NO: 1121869 - RNA, 19 nt, Artificial Sequence
  Description of Artificial Sequence: Synthetic oligonucleotide
uagagccgcaaagcacgug

SEQ ID NO: 1121870 - RNA, 19 nt, Artificial Sequence
  Description of Artificial Sequence: Synthetic oligonucleotide
ggaaucuuuggggucaugu

SEQ ID NO: 1121871 - RNA, 19 nt, Artificial Sequence
  Description of Artificial Sequence: Synthetic oligonucleotide
ccaugaguagagcucccug

SEQ ID NO: 1121872 - RNA, 19 nt, Artificial Sequence
  Description of Artificial Sequence: Synthetic oligonucleotide
cacucacugcuggcaagcc

SEQ ID NO: 1121873 - RNA, 19 nt, Artificial Sequence
  Description of Artificial Sequence: Synthetic oligonucleotide
cacaucaaugccagaccua

SEQ ID NO: 1121874 - RNA, 19 nt, Artificial Sequence
  Description of Artificial Sequence: Synthetic oligonucleotide
gugcccggagcggaggaag

SEQ ID NO: 1121875 - RNA, 19 nt, Artificial Sequence
  Description of Artificial Sequence: Synthetic oligonucleotide
ccagccaguacaccuaaca

SEQ ID NO: 1121876 - RNA, 19 nt, Artificial Sequence
  Description of Artificial Sequence: Synthetic oligonucleotide
ccguauuucacuggacaac

SEQ ID NO: 1121877 - RNA, 19 nt, Artificial Sequence
  Description of Artificial Sequence: Synthetic oligonucleotide
gcaagccggccauauuuac

SEQ ID NO: 1121878 - RNA, 19 nt, Artificial Sequence
  Description of Artificial Sequence: Synthetic oligonucleotide
aucagccaauugcuugauu

SEQ ID NO: 1121879 - RNA, 19 nt, Artificial Sequence
  Description of Artificial Sequence: Synthetic oligonucleotide
cacaugguagcagacaauu

SEQ ID NO: 1121880 - RNA, 19 nt, Artificial Sequence
  Description of Artificial Sequence: Synthetic oligonucleotide
uugggaccagagagaccgu

SEQ ID NO: 1121881 - RNA, 19 nt, Artificial Sequence
  Description of Artificial Sequence: Synthetic oligonucleotide
gaguagcauguguguggca

SEQ ID NO: 1121882 - RNA, 19 nt, Artificial Sequence
  Description of Artificial Sequence: Synthetic oligonucleotide
aucaugccgcugccuuucu

SEQ ID NO: 1121883 - RNA, 19 nt, Artificial Sequence
  Description of Artificial Sequence: Synthetic oligonucleotide
guguguggcaaggagacuu

SEQ ID NO: 1121884 - RNA, 19 nt, Artificial Sequence
  Description of Artificial Sequence: Synthetic oligonucleotide
ggacaacucugguaccaga

SEQ ID NO: 1121885 - RNA, 19 nt, Artificial Sequence
  Description of Artificial Sequence: Synthetic oligonucleotide
ugaucacgauuagguuaga

SEQ ID NO: 1121886 - RNA, 19 nt, Artificial Sequence
  Description of Artificial Sequence: Synthetic oligonucleotide
gcaguccuauugguaaccc

SEQ ID NO: 1121887 - RNA, 19 nt, Artificial Sequence
  Description of Artificial Sequence: Synthetic oligonucleotide
guagcauuguaagguggua

SEQ ID NO: 1121888 - RNA, 19 nt, Artificial Sequence
  Description of Artificial Sequence: Synthetic oligonucleotide
gcaggguuucugguggacc

SEQ ID NO: 1121889 - RNA, 19 nt, Artificial Sequence
  Description of Artificial Sequence: Synthetic oligonucleotide
uggaaucuuuggggucaug

SEQ ID NO: 1121890 - RNA, 19 nt, Artificial Sequence
  Description of Artificial Sequence: Synthetic oligonucleotide
caaugaacugcaguccuau

SEQ ID NO: 1121891 - RNA, 19 nt, Artificial Sequence
  Description of Artificial Sequence: Synthetic oligonucleotide
ccauggcgggaaacuaagc

SEQ ID NO: 1121892 - RNA, 19 nt, Artificial Sequence
  Description of Artificial Sequence: Synthetic oligonucleotide
cuucguguccuguugucuu

SEQ ID NO: 1121893 - RNA, 19 nt, Artificial Sequence
  Description of Artificial Sequence: Synthetic oligonucleotide
accccacuagcaaacucau

SEQ ID NO: 1121894 - RNA, 19 nt, Artificial Sequence
  Description of Artificial Sequence: Synthetic oligonucleotide
ugguaacccuugguuugaa

SEQ ID NO: 1121895 - RNA, 19 nt, Artificial Sequence
  Description of Artificial Sequence: Synthetic oligonucleotide
ccauauuuacagcuugugu

SEQ ID NO: 1121896 - RNA, 19 nt, Artificial Sequence
  Description of Artificial Sequence: Synthetic oligonucleotide
gcaacugucagaaguugcu

SEQ ID NO: 1121897 - RNA, 19 nt, Artificial Sequence
  Description of Artificial Sequence: Synthetic oligonucleotide
gaaucauggguagcuuaau

SEQ ID NO: 1121898 - RNA, 19 nt, Artificial Sequence
  Description of Artificial Sequence: Synthetic oligonucleotide
cccagcauaauccucgggu

SEQ ID NO: 1121899 - RNA, 19 nt, Artificial Sequence
  Description of Artificial Sequence: Synthetic oligonucleotide
ccucacuaucagccaauug

SEQ ID NO: 1121900 - RNA, 19 nt, Artificial Sequence
  Description of Artificial Sequence: Synthetic oligonucleotide
gccggccauauuuacagcu

SEQ ID NO: 1121901 - RNA, 19 nt, Artificial Sequence
  Description of Artificial Sequence: Synthetic oligonucleotide
gaacccuucuugucugguu

SEQ ID NO: 1121902 - RNA, 19 nt, Artificial Sequence
  Description of Artificial Sequence: Synthetic oligonucleotide
gcgccucacuuucugcgcc

SEQ ID NO: 1121903 - RNA, 19 nt, Artificial Sequence
  Description of Artificial Sequence: Synthetic oligonucleotide
guggugggaguuagcagaa

SEQ ID NO: 1121904 - RNA, 19 nt, Artificial Sequence
  Description of Artificial Sequence: Synthetic oligonucleotide
cacaaugaggcgccucacu

SEQ ID NO: 1121905 - RNA, 19 nt, Artificial Sequence
  Description of Artificial Sequence: Synthetic oligonucleotide
gauuccuggcacauccauu

SEQ ID NO: 1121906 - RNA, 19 nt, Artificial Sequence
  Description of Artificial Sequence: Synthetic oligonucleotide
gugggaguuagcagaacau

SEQ ID NO: 1121907 - RNA, 19 nt, Artificial Sequence
  Description of Artificial Sequence: Synthetic oligonucleotide
gcauaauccucggguucag

SEQ ID NO: 1121908 - RNA, 19 nt, Artificial Sequence
  Description of Artificial Sequence: Synthetic oligonucleotide
gguuucugguggacccucc

SEQ ID NO: 1121909 - RNA, 19 nt, Artificial Sequence
  Description of Artificial Sequence: Synthetic oligonucleotide
cacugcuggcaagccggcc

SEQ ID NO: 1121910 - RNA, 19 nt, Artificial Sequence
  Description of Artificial Sequence: Synthetic oligonucleotide
cucggagaguccggcccag

SEQ ID NO: 1121911 - RNA, 19 nt, Artificial Sequence
  Description of Artificial Sequence: Synthetic oligonucleotide
cugcgccuugacgaaauaa

SEQ ID NO: 1121912 - RNA, 19 nt, Artificial Sequence
  Description of Artificial Sequence: Synthetic oligonucleotide
ccgauguacacagcacaug

SEQ ID NO: 1121913 - RNA, 19 nt, Artificial Sequence
  Description of Artificial Sequence: Synthetic oligonucleotide
cggccauauuuacagcuug

SEQ ID NO: 1121914 - RNA, 19 nt, Artificial Sequence
  Description of Artificial Sequence: Synthetic oligonucleotide
caguccuauugguaacccu

SEQ ID NO: 1121915 - RNA, 19 nt, Artificial Sequence
  Description of Artificial Sequence: Synthetic oligonucleotide
agaguccggcccagcauaa

SEQ ID NO: 1121916 - RNA, 19 nt, Artificial Sequence
  Description of Artificial Sequence: Synthetic oligonucleotide
cacagugcgcagcaggguu

SEQ ID NO: 1121917 - RNA, 19 nt, Artificial Sequence
  Description of Artificial Sequence: Synthetic oligonucleotide
cuagagccgcaaagcacgu

SEQ ID NO: 1121918 - RNA, 19 nt, Artificial Sequence
  Description of Artificial Sequence: Synthetic oligonucleotide
gcacguccaaugaacugca

SEQ ID NO: 1121919 - RNA, 19 nt, Artificial Sequence
  Description of Artificial Sequence: Synthetic oligonucleotide
ggguucagcccgguaccag

SEQ ID NO: 1121920 - RNA, 19 nt, Artificial Sequence
  Description of Artificial Sequence: Synthetic oligonucleotide
gguagcuuaauagggucuu

SEQ ID NO: 1121921 - RNA, 19 nt, Artificial Sequence
  Description of Artificial Sequence: Synthetic oligonucleotide
cacuaucagccaauugcuu

SEQ ID NO: 1121922 - RNA, 19 nt, Artificial Sequence
  Description of Artificial Sequence: Synthetic oligonucleotide
gcgggaaacuaagccauaa

SEQ ID NO: 1121923 - RNA, 19 nt, Artificial Sequence
  Description of Artificial Sequence: Synthetic oligonucleotide
cugguaccagauauuccuu

SEQ ID NO: 1121924 - RNA, 19 nt, Artificial Sequence
  Description of Artificial Sequence: Synthetic oligonucleotide
ccuauugguaacccuuggu

SEQ ID NO: 1121925 - RNA, 19 nt, Artificial Sequence
  Description of Artificial Sequence: Synthetic oligonucleotide
gagccgcaaagcacgugua

SEQ ID NO: 1121926 - RNA, 19 nt, Artificial Sequence
  Description of Artificial Sequence: Synthetic oligonucleotide
ggguagcuuaauagggucu

SEQ ID NO: 1121927 - RNA, 19 nt, Artificial Sequence
  Description of Artificial Sequence: Synthetic oligonucleotide
cccggagcggaggaagaag

SEQ ID NO: 1121928 - RNA, 19 nt, Artificial Sequence
  Description of Artificial Sequence: Synthetic oligonucleotide
gcccgguaccagaugugcc

SEQ ID NO: 1121929 - RNA, 19 nt, Artificial Sequence
  Description of Artificial Sequence: Synthetic oligonucleotide
ggaccagagagaccguauu

SEQ ID NO: 1121930 - RNA, 19 nt, Artificial Sequence
  Description of Artificial Sequence: Synthetic oligonucleotide
gcacuucguguccuguugu

SEQ ID NO: 1121931 - RNA, 19 nt, Artificial Sequence
  Description of Artificial Sequence: Synthetic oligonucleotide
ggcaagccggccauauuua

SEQ ID NO: 1121932 - RNA, 19 nt, Artificial Sequence
  Description of Artificial Sequence: Synthetic oligonucleotide
ggucagcagcuugggacca

SEQ ID NO: 1121933 - RNA, 19 nt, Artificial Sequence
  Description of Artificial Sequence: Synthetic oligonucleotide
ggauuccuggcaccucacu

SEQ ID NO: 1121934 - RNA, 19 nt, Artificial Sequence
  Description of Artificial Sequence: Synthetic oligonucleotide
guucagcccgguaccagau

SEQ ID NO: 1121935 - RNA, 19 nt, Artificial Sequence
  Description of Artificial Sequence: Synthetic oligonucleotide
cgauuagguuagagaaaca

SEQ ID NO: 1121936 - RNA, 19 nt, Artificial Sequence
  Description of Artificial Sequence: Synthetic oligonucleotide
guacugugguggaaucuuu

SEQ ID NO: 1121937 - RNA, 19 nt, Artificial Sequence
  Description of Artificial Sequence: Synthetic oligonucleotide
ccagcauaauccucggguu

SEQ ID NO: 1121938 - RNA, 19 nt, Artificial Sequence
  Description of Artificial Sequence: Synthetic oligonucleotide
ccggagcggaggaagaagu

SEQ ID NO: 1121939 - RNA, 19 nt, Artificial Sequence
  Description of Artificial Sequence: Synthetic oligonucleotide
ccucacaaugaggcgccuc

SEQ ID NO: 1121940 - RNA, 19 nt, Artificial Sequence
  Description of Artificial Sequence: Synthetic oligonucleotide
cgguaccagaugugcccgg

SEQ ID NO: 1121941 - RNA, 19 nt, Artificial Sequence
  Description of Artificial Sequence: Synthetic oligonucleotide
gcagacaauugaguagcau

SEQ ID NO: 1121942 - RNA, 19 nt, Artificial Sequence
  Description of Artificial Sequence: Synthetic oligonucleotide
gcccuguuuuagugcugca

SEQ ID NO: 1121943 - RNA, 19 nt, Artificial Sequence
  Description of Artificial Sequence: Synthetic oligonucleotide
gcacguguacgcugccacu

SEQ ID NO: 1121944 - RNA, 19 nt, Artificial Sequence
  Description of Artificial Sequence: Synthetic oligonucleotide
cugcuggcaagccggccau

SEQ ID NO: 1121945 - RNA, 19 nt, Artificial Sequence
  Description of Artificial Sequence: Synthetic oligonucleotide
gcgccuugacgaaauaauu

SEQ ID NO: 1121946 - RNA, 19 nt, Artificial Sequence
  Description of Artificial Sequence: Synthetic oligonucleotide
cgucucaaugccagaugua

SEQ ID NO: 1121947 - RNA, 19 nt, Artificial Sequence
  Description of Artificial Sequence: Synthetic oligonucleotide
ggcgggaaacuaagccaua

SEQ ID NO: 1121948 - RNA, 19 nt, Artificial Sequence
  Description of Artificial Sequence: Synthetic oligonucleotide
ccggccauauuuacagcuu

SEQ ID NO: 1121949 - RNA, 19 nt, Artificial Sequence
  Description of Artificial Sequence: Synthetic oligonucleotide
cgaagcuacuuccgaugua

SEQ ID NO: 1121950 - RNA, 19 nt, Artificial Sequence
  Description of Artificial Sequence: Synthetic oligonucleotide
cguguacgcugccacugcu

SEQ ID NO: 1121951 - RNA, 19 nt, Artificial Sequence
  Description of Artificial Sequence: Synthetic oligonucleotide
cggguucagcccgguacca

SEQ ID NO: 1121952 - RNA, 19 nt, Artificial Sequence
  Description of Artificial Sequence: Synthetic oligonucleotide
ccagaccuaugaccauauu

SEQ ID NO: 1121953 - RNA, 19 nt, Artificial Sequence
  Description of Artificial Sequence: Synthetic oligonucleotide
cgcugccuuucucuguauu

SEQ ID NO: 1121954 - RNA, 19 nt, Artificial Sequence
  Description of Artificial Sequence: Synthetic oligonucleotide
cguguccuguugucuucuu

SEQ ID NO: 1121955 - RNA, 19 nt, Artificial Sequence
  Description of Artificial Sequence: Synthetic oligonucleotide
cccucacaaugaggcgccu

SEQ ID NO: 1121956 - RNA, 19 nt, Artificial Sequence
  Description of Artificial Sequence: Synthetic oligonucleotide
aauaaagucguucuuagag

SEQ ID NO: 1121957 - RNA, 19 nt, Artificial Sequence
  Description of Artificial Sequence: Synthetic oligonucleotide
aaaaguguaaccaugguag

SEQ ID NO: 1121958 - RNA, 19 nt, Artificial Sequence
  Description of Artificial Sequence: Synthetic oligonucleotide
uagaaaagaaucuuagacg

SEQ ID NO: 1121959 - RNA, 19 nt, Artificial Sequence
  Description of Artificial Sequence: Synthetic oligonucleotide
agaaaagaaucuuagacgu

SEQ ID NO: 1121960 - RNA, 19 nt, Artificial Sequence
  Description of Artificial Sequence: Synthetic oligonucleotide
ugauucuugaagcagccgg

SEQ ID NO: 1121961 - RNA, 19 nt, Artificial Sequence
  Description of Artificial Sequence: Synthetic oligonucleotide
aaaugaccaugucagagag

SEQ ID NO: 1121962 - RNA, 19 nt, Artificial Sequence
  Description of Artificial Sequence: Synthetic oligonucleotide
ucuacuacaaagcggacga

SEQ ID NO: 1121963 - RNA, 19 nt, Artificial Sequence
  Description of Artificial Sequence: Synthetic oligonucleotide
aagagucuguucuucuacc

SEQ ID NO: 1121964 - RNA, 19 nt, Artificial Sequence
  Description of Artificial Sequence: Synthetic oligonucleotide
gaugauggguuccugauug

SEQ ID NO: 1121965 - RNA, 19 nt, Artificial Sequence
  Description of Artificial Sequence: Synthetic oligonucleotide
aaagugacuagcuucucca

SEQ ID NO: 1121966 - RNA, 19 nt, Artificial Sequence
  Description of Artificial Sequence: Synthetic oligonucleotide
ugauaacaaguacaugagg

SEQ ID NO: 1121967 - RNA, 19 nt, Artificial Sequence
  Description of Artificial Sequence: Synthetic oligonucleotide
uccucuacuacaaagcgga

SEQ ID NO: 1121968 - RNA, 19 nt, Artificial Sequence
  Description of Artificial Sequence: Synthetic oligonucleotide
ucguagaaaagaaucuuag

SEQ ID NO: 1121969 - RNA, 19 nt, Artificial Sequence
  Description of Artificial Sequence: Synthetic oligonucleotide
gauaacaaguacaugagga

SEQ ID NO: 1121970 - RNA, 19 nt, Artificial Sequence
  Description of Artificial Sequence: Synthetic oligonucleotide
uuauugguaaugacugcgg

SEQ ID NO: 1121971 - RNA, 19 nt, Artificial Sequence
  Description of Artificial Sequence: Synthetic oligonucleotide
agucuguucuucuaccagc

SEQ ID NO: 1121972 - RNA, 19 nt, Artificial Sequence
  Description of Artificial Sequence: Synthetic oligonucleotide
uaaagucguucuuagagga

SEQ ID NO: 1121973 - RNA, 19 nt, Artificial Sequence
  Description of Artificial Sequence: Synthetic oligonucleotide
aaccuuugcacagagcccg

SEQ ID NO: 1121974 - RNA, 19 nt, Artificial Sequence
  Description of Artificial Sequence: Synthetic oligonucleotide
uuagacaagagguggacgu

SEQ ID NO: 1121975 - RNA, 19 nt, Artificial Sequence
  Description of Artificial Sequence: Synthetic oligonucleotide
uccguucuuagacaagagg

SEQ ID NO: 1121976 - RNA, 19 nt, Artificial Sequence
  Description of Artificial Sequence: Synthetic oligonucleotide
aagucguucuuagaggagg

SEQ ID NO: 1121977 - RNA, 19 nt, Artificial Sequence
  Description of Artificial Sequence: Synthetic oligonucleotide
aguccucuacuacaaagcg

SEQ ID NO: 1121978 - RNA, 19 nt, Artificial Sequence
  Description of Artificial Sequence: Synthetic oligonucleotide
ucggcugauaacaaguaca

SEQ ID NO: 1121979 - RNA, 19 nt, Artificial Sequence
  Description of Artificial Sequence: Synthetic oligonucleotide
gaauucuuacucuuguuga

SEQ ID NO: 1121980 - RNA, 19 nt, Artificial Sequence
  Description of Artificial Sequence: Synthetic oligonucleotide
ucuucuaccagcuggguau

SEQ ID NO: 1121981 - RNA, 19 nt, Artificial Sequence
  Description of Artificial Sequence: Synthetic oligonucleotide
guaaaugaccaugucagag

SEQ ID NO: 1121982 - RNA, 19 nt, Artificial Sequence
  Description of Artificial Sequence: Synthetic oligonucleotide
uagacguaaaaguguaacc

SEQ ID NO: 1121983 - RNA, 19 nt, Artificial Sequence
  Description of Artificial Sequence: Synthetic oligonucleotide
uuagacguaaaaguguaac

SEQ ID NO: 1121984 - RNA, 19 nt, Artificial Sequence
  Description of Artificial Sequence: Synthetic oligonucleotide
guucuaagcagcgacaacc

SEQ ID NO: 1121985 - RNA, 19 nt, Artificial Sequence
  Description of Artificial Sequence: Synthetic oligonucleotide
cuaaguaguggcugagugg

SEQ ID NO: 1121986 - RNA, 19 nt, Artificial Sequence
  Description of Artificial Sequence: Synthetic oligonucleotide
ucuuagacguaaaagugua

SEQ ID NO: 1121987 - RNA, 19 nt, Artificial Sequence
  Description of Artificial Sequence: Synthetic oligonucleotide
acucuugcaguaaaugacc

SEQ ID NO: 1121988 - RNA, 19 nt, Artificial Sequence
  Description of Artificial Sequence: Synthetic oligonucleotide
uguugugggaagacgacac

SEQ ID NO: 1121989 - RNA, 19 nt, Artificial Sequence
  Description of Artificial Sequence: Synthetic oligonucleotide
aaggcguagucgcggaugg

SEQ ID NO: 1121990 - RNA, 19 nt, Artificial Sequence
  Description of Artificial Sequence: Synthetic oligonucleotide
cuuucaacaggaucuugcc

SEQ ID NO: 1121991 - RNA, 19 nt, Artificial Sequence
  Description of Artificial Sequence: Synthetic oligonucleotide
cuaggauuggagaagccac

SEQ ID NO: 1121992 - RNA, 19 nt, Artificial Sequence
  Description of Artificial Sequence: Synthetic oligonucleotide
cacgucguagaaaagaauc

SEQ ID NO: 1121993 - RNA, 19 nt, Artificial Sequence
  Description of Artificial Sequence: Synthetic oligonucleotide
cacgauugaauucuuacuc

SEQ ID NO: 1121994 - RNA, 19 nt, Artificial Sequence
  Description of Artificial Sequence: Synthetic oligonucleotide
uccacgauugaauucuuac

SEQ ID NO: 1121995 - RNA, 19 nt, Artificial Sequence
  Description of Artificial Sequence: Synthetic oligonucleotide
aagugacuagcuucuccac

SEQ ID NO: 1121996 - RNA, 19 nt, Artificial Sequence
  Description of Artificial Sequence: Synthetic oligonucleotide
uuucaacaggaucuugccc

SEQ ID NO: 1121997 - RNA, 19 nt, Artificial Sequence
  Description of Artificial Sequence: Synthetic oligonucleotide
augaccaugucagagagcu

SEQ ID NO: 1121998 - RNA, 19 nt, Artificial Sequence
  Description of Artificial Sequence: Synthetic oligonucleotide
aauccccaggcuuaguccu

SEQ ID NO: 1121999 - RNA, 19 nt, Artificial Sequence
  Description of Artificial Sequence: Synthetic oligonucleotide
agcacauacccgcaggcuc

SEQ ID NO: 1122000 - RNA, 19 nt, Artificial Sequence
  Description of Artificial Sequence: Synthetic oligonucleotide
aagccaccgaaguggacac

SEQ ID NO: 1122001 - RNA, 19 nt, Artificial Sequence
  Description of Artificial Sequence: Synthetic oligonucleotide
agacguaaaaguguaacca

SEQ ID NO: 1122002 - RNA, 19 nt, Artificial Sequence
  Description of Artificial Sequence: Synthetic oligonucleotide
aaaguguaaccaugguaga

SEQ ID NO: 1122003 - RNA, 19 nt, Artificial Sequence
  Description of Artificial Sequence: Synthetic oligonucleotide
ucgcggauggcccugagca

SEQ ID NO: 1122004 - RNA, 19 nt, Artificial Sequence
  Description of Artificial Sequence: Synthetic oligonucleotide
guaaccaugguagaugaug

SEQ ID NO: 1122005 - RNA, 19 nt, Artificial Sequence
  Description of Artificial Sequence: Synthetic oligonucleotide
cacucuugcaguaaaugac

SEQ ID NO: 1122006 - RNA, 19 nt, Artificial Sequence
  Description of Artificial Sequence: Synthetic oligonucleotide
auaacaaguacaugaggaa

SEQ ID NO: 1122007 - RNA, 19 nt, Artificial Sequence
  Description of Artificial Sequence: Synthetic oligonucleotide
uagaaugccugcccagagg

SEQ ID NO: 1122008 - RNA, 19 nt, Artificial Sequence
  Description of Artificial Sequence: Synthetic oligonucleotide
cugauugggaccaucccag

SEQ ID NO: 1122009 - RNA, 19 nt, Artificial Sequence
  Description of Artificial Sequence: Synthetic oligonucleotide
augacugcggucugacggc

SEQ ID NO: 1122010 - RNA, 19 nt, Artificial Sequence
  Description of Artificial Sequence: Synthetic oligonucleotide
gaagagucuguucuucuac

SEQ ID NO: 1122011 - RNA, 19 nt, Artificial Sequence
  Description of Artificial Sequence: Synthetic oligonucleotide
ucgucggacacaucgguag

SEQ ID NO: 1122012 - RNA, 19 nt, Artificial Sequence
  Description of Artificial Sequence: Synthetic oligonucleotide
uagcuuauccuccuuggac

SEQ ID NO: 1122013 - RNA, 19 nt, Artificial Sequence
  Description of Artificial Sequence: Synthetic oligonucleotide
aucggcugauaacaaguac

SEQ ID NO: 1122014 - RNA, 19 nt, Artificial Sequence
  Description of Artificial Sequence: Synthetic oligonucleotide
uggaucucacccaaucccc

SEQ ID NO: 1122015 - RNA, 19 nt, Artificial Sequence
  Description of Artificial Sequence: Synthetic oligonucleotide
acacucuugcaguaaauga

SEQ ID NO: 1122016 - RNA, 19 nt, Artificial Sequence
  Description of Artificial Sequence: Synthetic oligonucleotide
uucuugaagcagccggagg

SEQ ID NO: 1122017 - RNA, 19 nt, Artificial Sequence
  Description of Artificial Sequence: Synthetic oligonucleotide
agagaugacccggacacgg

SEQ ID NO: 1122018 - RNA, 19 nt, Artificial Sequence
  Description of Artificial Sequence: Synthetic oligonucleotide
gguuucagcacauacccgc

SEQ ID NO: 1122019 - RNA, 19 nt, Artificial Sequence
  Description of Artificial Sequence: Synthetic oligonucleotide
ugucagagagcuccggcgc

SEQ ID NO: 1122020 - RNA, 19 nt, Artificial Sequence
  Description of Artificial Sequence: Synthetic oligonucleotide
guggaucucacccaauccc

SEQ ID NO: 1122021 - RNA, 19 nt, Artificial Sequence
  Description of Artificial Sequence: Synthetic oligonucleotide
ugcuguccagagaugaccc

SEQ ID NO: 1122022 - RNA, 19 nt, Artificial Sequence
  Description of Artificial Sequence: Synthetic oligonucleotide
ugccucugagccuuggcgg

SEQ ID NO: 1122023 - RNA, 19 nt, Artificial Sequence
  Description of Artificial Sequence: Synthetic oligonucleotide
ucucguagaaugccugccc

SEQ ID NO: 1122024 - RNA, 19 nt, Artificial Sequence
  Description of Artificial Sequence: Synthetic oligonucleotide
cauuauugguaaugacugc

SEQ ID NO: 1122025 - RNA, 19 nt, Artificial Sequence
  Description of Artificial Sequence: Synthetic oligonucleotide
acgauugaauucuuacucu

SEQ ID NO: 1122026 - RNA, 19 nt, Artificial Sequence
  Description of Artificial Sequence: Synthetic oligonucleotide
uucuaagcagcgacaaccu

SEQ ID NO: 1122027 - RNA, 19 nt, Artificial Sequence
  Description of Artificial Sequence: Synthetic oligonucleotide
aguucuaagcagcgacaac

SEQ ID NO: 1122028 - RNA, 19 nt, Artificial Sequence
  Description of Artificial Sequence: Synthetic oligonucleotide
uaggauuggagaagccacc

SEQ ID NO: 1122029 - RNA, 19 nt, Artificial Sequence
  Description of Artificial Sequence: Synthetic oligonucleotide
ugggaagacgacacuaagu

SEQ ID NO: 1122030 - RNA, 19 nt, Artificial Sequence
  Description of Artificial Sequence: Synthetic oligonucleotide
gacacaucgguagucucgg

SEQ ID NO: 1122031 - RNA, 19 nt, Artificial Sequence
  Description of Artificial Sequence: Synthetic oligonucleotide
guagcgcucaaugagggag

SEQ ID NO: 1122032 - RNA, 19 nt, Artificial Sequence
  Description of Artificial Sequence: Synthetic oligonucleotide
agcgacaaccuuugcacag

SEQ ID NO: 1122033 - RNA, 19 nt, Artificial Sequence
  Description of Artificial Sequence: Synthetic oligonucleotide
auguaggccucugugcugc

SEQ ID NO: 1122034 - RNA, 19 nt, Artificial Sequence
  Description of Artificial Sequence: Synthetic oligonucleotide
cuuuagcuuauccuccuug

SEQ ID NO: 1122035 - RNA, 19 nt, Artificial Sequence
  Description of Artificial Sequence: Synthetic oligonucleotide
gauuggagaagccaccgaa

SEQ ID NO: 1122036 - RNA, 19 nt, Artificial Sequence
  Description of Artificial Sequence: Synthetic oligonucleotide
cucuacuacaaagcggacg

SEQ ID NO: 1122037 - RNA, 19 nt, Artificial Sequence
  Description of Artificial Sequence: Synthetic oligonucleotide
uccggcgccagcuuuagcu

SEQ ID NO: 1122038 - RNA, 19 nt, Artificial Sequence
  Description of Artificial Sequence: Synthetic oligonucleotide
cugacggcuggcuacgucc

SEQ ID NO: 1122039 - RNA, 19 nt, Artificial Sequence
  Description of Artificial Sequence: Synthetic oligonucleotide
gacacucuugcaguaaaug

SEQ ID NO: 1122040 - RNA, 19 nt, Artificial Sequence
  Description of Artificial Sequence: Synthetic oligonucleotide
cagucgaguucuaagcagc

SEQ ID NO: 1122041 - RNA, 19 nt, Artificial Sequence
  Description of Artificial Sequence: Synthetic oligonucleotide
cuggucuccguucuuagac

SEQ ID NO: 1122042 - RNA, 19 nt, Artificial Sequence
  Description of Artificial Sequence: Synthetic oligonucleotide
aucucguagaaugccugcc

SEQ ID NO: 1122043 - RNA, 19 nt, Artificial Sequence
  Description of Artificial Sequence: Synthetic oligonucleotide
cuuagacaagagguggacg

SEQ ID NO: 1122044 - RNA, 19 nt, Artificial Sequence
  Description of Artificial Sequence: Synthetic oligonucleotide
ugugggaagacgacacuaa

SEQ ID NO: 1122045 - RNA, 19 nt, Artificial Sequence
  Description of Artificial Sequence: Synthetic oligonucleotide
aaagcggacgagggcaagg

SEQ ID NO: 1122046 - RNA, 19 nt, Artificial Sequence
  Description of Artificial Sequence: Synthetic oligonucleotide
uucggcggccucaucuucg

SEQ ID NO: 1122047 - RNA, 19 nt, Artificial Sequence
  Description of Artificial Sequence: Synthetic oligonucleotide
agacaagagguggacgugg

SEQ ID NO: 1122048 - RNA, 19 nt, Artificial Sequence
  Description of Artificial Sequence: Synthetic oligonucleotide
agcagucgaguucuaagca

SEQ ID NO: 1122049 - RNA, 19 nt, Artificial Sequence
  Description of Artificial Sequence: Synthetic oligonucleotide
cagcuugacccacucaggg

SEQ ID NO: 1122050 - RNA, 19 nt, Artificial Sequence
  Description of Artificial Sequence: Synthetic oligonucleotide
agcagcgacaaccuuugca

SEQ ID NO: 1122051 - RNA, 19 nt, Artificial Sequence
  Description of Artificial Sequence: Synthetic oligonucleotide
uuacucuuguugacuuuug

SEQ ID NO: 1122052 - RNA, 19 nt, Artificial Sequence
  Description of Artificial Sequence: Synthetic oligonucleotide
caauccccaggcuuagucc

SEQ ID NO: 1122053 - RNA, 19 nt, Artificial Sequence
  Description of Artificial Sequence: Synthetic oligonucleotide
gaagccaccgaaguggaca

SEQ ID NO: 1122054 - RNA, 19 nt, Artificial Sequence
  Description of Artificial Sequence: Synthetic oligonucleotide
guugaaggcggugucgggg

SEQ ID NO: 1122055 - RNA, 19 nt, Artificial Sequence
  Description of Artificial Sequence: Synthetic oligonucleotide
ucggggucucucaggaagg

SEQ ID NO: 1122056 - RNA, 19 nt, Artificial Sequence
  Description of Artificial Sequence: Synthetic oligonucleotide
agaugacccggacacggag

SEQ ID NO: 1122057 - RNA, 19 nt, Artificial Sequence
  Description of Artificial Sequence: Synthetic oligonucleotide
agccaucucguagaaugcc

SEQ ID NO: 1122058 - RNA, 19 nt, Artificial Sequence
  Description of Artificial Sequence: Synthetic oligonucleotide
gacuguaguuggaagaguc

SEQ ID NO: 1122059 - RNA, 19 nt, Artificial Sequence
  Description of Artificial Sequence: Synthetic oligonucleotide
ucuuagacaagagguggac

SEQ ID NO: 1122060 - RNA, 19 nt, Artificial Sequence
  Description of Artificial Sequence: Synthetic oligonucleotide
uucuuacucuuguugacuu

SEQ ID NO: 1122061 - RNA, 19 nt, Artificial Sequence
  Description of Artificial Sequence: Synthetic oligonucleotide
aaagucguucuuagaggag

SEQ ID NO: 1122062 - RNA, 19 nt, Artificial Sequence
  Description of Artificial Sequence: Synthetic oligonucleotide
aggauuggagaagccaccg

SEQ ID NO: 1122063 - RNA, 19 nt, Artificial Sequence
  Description of Artificial Sequence: Synthetic oligonucleotide
guagaaugccugcccagag

SEQ ID NO: 1122064 - RNA, 19 nt, Artificial Sequence
  Description of Artificial Sequence: Synthetic oligonucleotide
ccaauaaagucguucuuag

SEQ ID NO: 1122065 - RNA, 19 nt, Artificial Sequence
  Description of Artificial Sequence: Synthetic oligonucleotide
gguacacauccauuucugg

SEQ ID NO: 1122066 - RNA, 19 nt, Artificial Sequence
  Description of Artificial Sequence: Synthetic oligonucleotide
ggcggacaaaauuauuucc

SEQ ID NO: 1122067 - RNA, 19 nt, Artificial Sequence
  Description of Artificial Sequence: Synthetic oligonucleotide
ucaucuucgucggacacau

SEQ ID NO: 1122068 - RNA, 19 nt, Artificial Sequence
  Description of Artificial Sequence: Synthetic oligonucleotide
guagacacggcggugugcc

SEQ ID NO: 1122069 - RNA, 19 nt, Artificial Sequence
  Description of Artificial Sequence: Synthetic oligonucleotide
agagcccggauguaggccu

SEQ ID NO: 1122070 - RNA, 19 nt, Artificial Sequence
  Description of Artificial Sequence: Synthetic oligonucleotide
cuacaaagcggacgagggc

SEQ ID NO: 1122071 - RNA, 19 nt, Artificial Sequence
  Description of Artificial Sequence: Synthetic oligonucleotide
gauugggaccaucccagca

SEQ ID NO: 1122072 - RNA, 19 nt, Artificial Sequence
  Description of Artificial Sequence: Synthetic oligonucleotide
guaguggcugaguggcugg

SEQ ID NO: 1122073 - RNA, 19 nt, Artificial Sequence
  Description of Artificial Sequence: Synthetic oligonucleotide
augauggguuccugauugg

SEQ ID NO: 1122074 - RNA, 19 nt, Artificial Sequence
  Description of Artificial Sequence: Synthetic oligonucleotide
ucguucuuagaggaggcgu

SEQ ID NO: 1122075 - RNA, 19 nt, Artificial Sequence
  Description of Artificial Sequence: Synthetic oligonucleotide
uuagaggaggcgucauagu

SEQ ID NO: 1122076 - RNA, 19 nt, Artificial Sequence
  Description of Artificial Sequence: Synthetic oligonucleotide
gugggaagacgacacuaag

SEQ ID NO: 1122077 - RNA, 19 nt, Artificial Sequence
  Description of Artificial Sequence: Synthetic oligonucleotide
caaagacacggucaaucuc

SEQ ID NO: 1122078 - RNA, 19 nt, Artificial Sequence
  Description of Artificial Sequence: Synthetic oligonucleotide
cuguccagagaugacccgg

SEQ ID NO: 1122079 - RNA, 19 nt, Artificial Sequence
  Description of Artificial Sequence: Synthetic oligonucleotide
uagucucggguccauuuuc

SEQ ID NO: 1122080 - RNA, 19 nt, Artificial Sequence
  Description of Artificial Sequence: Synthetic oligonucleotide
gggaagacgacacuaagua

SEQ ID NO: 1122081 - RNA, 19 nt, Artificial Sequence
  Description of Artificial Sequence: Synthetic oligonucleotide
uuguggcggacaaaauuau

SEQ ID NO: 1122082 - RNA, 19 nt, Artificial Sequence
  Description of Artificial Sequence: Synthetic oligonucleotide
guuguggcggacaaaauua

SEQ ID NO: 1122083 - RNA, 19 nt, Artificial Sequence
  Description of Artificial Sequence: Synthetic oligonucleotide
caucgguagucucgggucc

SEQ ID NO: 1122084 - RNA, 19 nt, Artificial Sequence
  Description of Artificial Sequence: Synthetic oligonucleotide
aaagaaucuuagacguaaa

SEQ ID NO: 1122085 - RNA, 19 nt, Artificial Sequence
  Description of Artificial Sequence: Synthetic oligonucleotide
uggucuccguucuuagaca

SEQ ID NO: 1122086 - RNA, 19 nt, Artificial Sequence
  Description of Artificial Sequence: Synthetic oligonucleotide
ugacuagcuucuccacuga

SEQ ID NO: 1122087 - RNA, 19 nt, Artificial Sequence
  Description of Artificial Sequence: Synthetic oligonucleotide
agcuggguauauccugcuc

SEQ ID NO: 1122088 - RNA, 19 nt, Artificial Sequence
  Description of Artificial Sequence: Synthetic oligonucleotide
acaaagaggguagcugaug

SEQ ID NO: 1122089 - RNA, 19 nt, Artificial Sequence
  Description of Artificial Sequence: Synthetic oligonucleotide
ugacgcgccaucacugggu

SEQ ID NO: 1122090 - RNA, 19 nt, Artificial Sequence
  Description of Artificial Sequence: Synthetic oligonucleotide
ucugcugcacuuggcuccg

SEQ ID NO: 1122091 - RNA, 19 nt, Artificial Sequence
  Description of Artificial Sequence: Synthetic oligonucleotide
agucgaguucuaagcagcg

SEQ ID NO: 1122092 - RNA, 19 nt, Artificial Sequence
  Description of Artificial Sequence: Synthetic oligonucleotide
caaguacaugaggaagccg

SEQ ID NO: 1122093 - RNA, 19 nt, Artificial Sequence
  Description of Artificial Sequence: Synthetic oligonucleotide
gacguaaaaguguaaccau

SEQ ID NO: 1122094 - RNA, 19 nt, Artificial Sequence
  Description of Artificial Sequence: Synthetic oligonucleotide
gguggaucucacccaaucc

SEQ ID NO: 1122095 - RNA, 19 nt, Artificial Sequence
  Description of Artificial Sequence: Synthetic oligonucleotide
ugauugggaccaucccagc

SEQ ID NO: 1122096 - RNA, 19 nt, Artificial Sequence
  Description of Artificial Sequence: Synthetic oligonucleotide
gcagucgaguucuaagcag

SEQ ID NO: 1122097 - RNA, 19 nt, Artificial Sequence
  Description of Artificial Sequence: Synthetic oligonucleotide
guggcucacguuguggcgg

SEQ ID NO: 1122098 - RNA, 19 nt, Artificial Sequence
  Description of Artificial Sequence: Synthetic oligonucleotide
gaugacccggacacggagc

SEQ ID NO: 1122099 - RNA, 19 nt, Artificial Sequence
  Description of Artificial Sequence: Synthetic oligonucleotide
uagcgcucaaugagggaga

SEQ ID NO: 1122100 - RNA, 19 nt, Artificial Sequence
  Description of Artificial Sequence: Synthetic oligonucleotide
acgucguagaaaagaaucu

SEQ ID NO: 1122101 - RNA, 19 nt, Artificial Sequence
  Description of Artificial Sequence: Synthetic oligonucleotide
gacacggcggugugccagg

SEQ ID NO: 1122102 - RNA, 19 nt, Artificial Sequence
  Description of Artificial Sequence: Synthetic oligonucleotide
guacacauccauuucuggu

SEQ ID NO: 1122103 - RNA, 19 nt, Artificial Sequence
  Description of Artificial Sequence: Synthetic oligonucleotide
uggucaccccauccagggg

SEQ ID NO: 1122104 - RNA, 19 nt, Artificial Sequence
  Description of Artificial Sequence: Synthetic oligonucleotide
guaaugacugcggucugac

SEQ ID NO: 1122105 - RNA, 19 nt, Artificial Sequence
  Description of Artificial Sequence: Synthetic oligonucleotide
guacaugaggaagccgucc

SEQ ID NO: 1122106 - RNA, 19 nt, Artificial Sequence
  Description of Artificial Sequence: Synthetic oligonucleotide
gagggcaaggucgggcacg

SEQ ID NO: 1122107 - RNA, 19 nt, Artificial Sequence
  Description of Artificial Sequence: Synthetic oligonucleotide
cucaggggaggguaggcuc

SEQ ID NO: 1122108 - RNA, 19 nt, Artificial Sequence
  Description of Artificial Sequence: Synthetic oligonucleotide
acccacucaggguggaucu

SEQ ID NO: 1122109 - RNA, 19 nt, Artificial Sequence
  Description of Artificial Sequence: Synthetic oligonucleotide
agguguugugggaagacga

SEQ ID NO: 1122110 - RNA, 19 nt, Artificial Sequence
  Description of Artificial Sequence: Synthetic oligonucleotide
ggguuuggaaguucagagc

SEQ ID NO: 1122111 - RNA, 19 nt, Artificial Sequence
  Description of Artificial Sequence: Synthetic oligonucleotide
augagggagagagccagug

SEQ ID NO: 1122112 - RNA, 19 nt, Artificial Sequence
  Description of Artificial Sequence: Synthetic oligonucleotide
aagccguccuuggucaucu

SEQ ID NO: 1122113 - RNA, 19 nt, Artificial Sequence
  Description of Artificial Sequence: Synthetic oligonucleotide
uguggcggacaaaauuauu

SEQ ID NO: 1122114 - RNA, 19 nt, Artificial Sequence
  Description of Artificial Sequence: Synthetic oligonucleotide
ccauuccacaucuccacgg

SEQ ID NO: 1122115 - RNA, 19 nt, Artificial Sequence
  Description of Artificial Sequence: Synthetic oligonucleotide
gacuagcuucuccacugac

SEQ ID NO: 1122116 - RNA, 19 nt, Artificial Sequence
  Description of Artificial Sequence: Synthetic oligonucleotide
ugguaaugacugcggucug

SEQ ID NO: 1122117 - RNA, 19 nt, Artificial Sequence
  Description of Artificial Sequence: Synthetic oligonucleotide
gguagcugauggaugcugg

SEQ ID NO: 1122118 - RNA, 19 nt, Artificial Sequence
  Description of Artificial Sequence: Synthetic oligonucleotide
cuccguucuuagacaagag

SEQ ID NO: 1122119 - RNA, 19 nt, Artificial Sequence
  Description of Artificial Sequence: Synthetic oligonucleotide
caauaaagucguucuuaga

SEQ ID NO: 1122120 - RNA, 19 nt, Artificial Sequence
  Description of Artificial Sequence: Synthetic oligonucleotide
cugauucuugaagcagccg

SEQ ID NO: 1122121 - RNA, 19 nt, Artificial Sequence
  Description of Artificial Sequence: Synthetic oligonucleotide
ggcuccguuguccuggaag

SEQ ID NO: 1122122 - RNA, 19 nt, Artificial Sequence
  Description of Artificial Sequence: Synthetic oligonucleotide
uaguuggaagagucuguuc

SEQ ID NO: 1122123 - RNA, 19 nt, Artificial Sequence
  Description of Artificial Sequence: Synthetic oligonucleotide
ucuaagcagcgacaaccuu

SEQ ID NO: 1122124 - RNA, 19 nt, Artificial Sequence
  Description of Artificial Sequence: Synthetic oligonucleotide
ccugauucuugaagcagcc

SEQ ID NO: 1122125 - RNA, 19 nt, Artificial Sequence
  Description of Artificial Sequence: Synthetic oligonucleotide
gggacuguaguuggaagag

SEQ ID NO: 1122126 - RNA, 19 nt, Artificial Sequence
  Description of Artificial Sequence: Synthetic oligonucleotide
gacaagagguggacguggc

SEQ ID NO: 1122127 - RNA, 19 nt, Artificial Sequence
  Description of Artificial Sequence: Synthetic oligonucleotide
gcuggguauauccugcuca

SEQ ID NO: 1122128 - RNA, 19 nt, Artificial Sequence
  Description of Artificial Sequence: Synthetic oligonucleotide
guccugguagacacggcgg

SEQ ID NO: 1122129 - RNA, 19 nt, Artificial Sequence
  Description of Artificial Sequence: Synthetic oligonucleotide
gcuccguuguccuggaagc

SEQ ID NO: 1122130 - RNA, 19 nt, Artificial Sequence
  Description of Artificial Sequence: Synthetic oligonucleotide
gguaggcucauggucaccc

SEQ ID NO: 1122131 - RNA, 19 nt, Artificial Sequence
  Description of Artificial Sequence: Synthetic oligonucleotide
ggcaaggucgggcacggcc

SEQ ID NO: 1122132 - RNA, 19 nt, Artificial Sequence
  Description of Artificial Sequence: Synthetic oligonucleotide
gaguucuaagcagcgacaa

SEQ ID NO: 1122133 - RNA, 19 nt, Artificial Sequence
  Description of Artificial Sequence: Synthetic oligonucleotide
ggugacgcgccaucacugg

SEQ ID NO: 1122134 - RNA, 19 nt, Artificial Sequence
  Description of Artificial Sequence: Synthetic oligonucleotide
uucgucggacacaucggua

SEQ ID NO: 1122135 - RNA, 19 nt, Artificial Sequence
  Description of Artificial Sequence: Synthetic oligonucleotide
gaggaggcgucauaguccu

SEQ ID NO: 1122136 - RNA, 19 nt, Artificial Sequence
  Description of Artificial Sequence: Synthetic oligonucleotide
gcggacgagggcaaggucg

SEQ ID NO: 1122137 - RNA, 19 nt, Artificial Sequence
  Description of Artificial Sequence: Synthetic oligonucleotide
ucuuacucuuguugacuuu

SEQ ID NO: 1122138 - RNA, 19 nt, Artificial Sequence
  Description of Artificial Sequence: Synthetic oligonucleotide
cugccaucggcugauaaca

SEQ ID NO: 1122139 - RNA, 19 nt, Artificial Sequence
  Description of Artificial Sequence: Synthetic oligonucleotide
ugacggcuggcuacguccu

SEQ ID NO: 1122140 - RNA, 19 nt, Artificial Sequence
  Description of Artificial Sequence: Synthetic oligonucleotide
aagcggacgagggcaaggu

SEQ ID NO: 1122141 - RNA, 19 nt, Artificial Sequence
  Description of Artificial Sequence: Synthetic oligonucleotide
ccgaaguggacacucuugc

SEQ ID NO: 1122142 - RNA, 19 nt, Artificial Sequence
  Description of Artificial Sequence: Synthetic oligonucleotide
gucguucuuagaggaggcg

SEQ ID NO: 1122143 - RNA, 19 nt, Artificial Sequence
  Description of Artificial Sequence: Synthetic oligonucleotide
ugcugcacuuggcuccgca

SEQ ID NO: 1122144 - RNA, 19 nt, Artificial Sequence
  Description of Artificial Sequence: Synthetic oligonucleotide
gguggcucacguuguggcg

SEQ ID NO: 1122145 - RNA, 19 nt, Artificial Sequence
  Description of Artificial Sequence: Synthetic oligonucleotide
accgaaguggacacucuug

SEQ ID NO: 1122146 - RNA, 19 nt, Artificial Sequence
  Description of Artificial Sequence: Synthetic oligonucleotide
agcggacgagggcaagguc

SEQ ID NO: 1122147 - RNA, 19 nt, Artificial Sequence
  Description of Artificial Sequence: Synthetic oligonucleotide
gucguagaaaagaaucuua

SEQ ID NO: 1122148 - RNA, 19 nt, Artificial Sequence
  Description of Artificial Sequence: Synthetic oligonucleotide
ucugacggcuggcuacguc

SEQ ID NO: 1122149 - RNA, 19 nt, Artificial Sequence
  Description of Artificial Sequence: Synthetic oligonucleotide
ugaggcuguuccaggggau

SEQ ID NO: 1122150 - RNA, 19 nt, Artificial Sequence
  Description of Artificial Sequence: Synthetic oligonucleotide
auuucggcggccucaucuu

SEQ ID NO: 1122151 - RNA, 19 nt, Artificial Sequence
  Description of Artificial Sequence: Synthetic oligonucleotide
cuuggcggucucacugggc

SEQ ID NO: 1122152 - RNA, 19 nt, Artificial Sequence
  Description of Artificial Sequence: Synthetic oligonucleotide
guagguguugugggaagac

SEQ ID NO: 1122153 - RNA, 19 nt, Artificial Sequence
  Description of Artificial Sequence: Synthetic oligonucleotide
uuucggcggccucaucuuc

SEQ ID NO: 1122154 - RNA, 19 nt, Artificial Sequence
  Description of Artificial Sequence: Synthetic oligonucleotide
acacaucgguagucucggg

SEQ ID NO: 1122155 - RNA, 19 nt, Artificial Sequence
  Description of Artificial Sequence: Synthetic oligonucleotide
gggaccaucccagcagucg

SEQ ID NO: 1122156 - RNA, 19 nt, Artificial Sequence
  Description of Artificial Sequence: Synthetic oligonucleotide
cuggcuacguccuggccca

SEQ ID NO: 1122157 - RNA, 19 nt, Artificial Sequence
  Description of Artificial Sequence: Synthetic oligonucleotide
ugaagccauuauugguaau

SEQ ID NO: 1122158 - RNA, 19 nt, Artificial Sequence
  Description of Artificial Sequence: Synthetic oligonucleotide
cauuucggcggccucaucu

SEQ ID NO: 1122159 - RNA, 19 nt, Artificial Sequence
  Description of Artificial Sequence: Synthetic oligonucleotide
gacaaccuuugcacagagc

SEQ ID NO: 1122160 - RNA, 19 nt, Artificial Sequence
  Description of Artificial Sequence: Synthetic oligonucleotide
gugucggggucucucagga

SEQ ID NO: 1122161 - RNA, 19 nt, Artificial Sequence
  Description of Artificial Sequence: Synthetic oligonucleotide
ggcuuaguccuggagggag

SEQ ID NO: 1122162 - RNA, 19 nt, Artificial Sequence
  Description of Artificial Sequence: Synthetic oligonucleotide
uggcccacgccguggaccu

SEQ ID NO: 1122163 - RNA, 19 nt, Artificial Sequence
  Description of Artificial Sequence: Synthetic oligonucleotide
cacguuguggcggacaaaa

SEQ ID NO: 1122164 - RNA, 19 nt, Artificial Sequence
  Description of Artificial Sequence: Synthetic oligonucleotide
acgacacuaaguaguggcu

SEQ ID NO: 1122165 - RNA, 19 nt, Artificial Sequence
  Description of Artificial Sequence: Synthetic oligonucleotide
ggauccacgauugaauucu

SEQ ID NO: 1122166 - RNA, 19 nt, Artificial Sequence
  Description of Artificial Sequence: Synthetic oligonucleotide
cagggucccugagucaggg

SEQ ID NO: 1122167 - RNA, 19 nt, Artificial Sequence
  Description of Artificial Sequence: Synthetic oligonucleotide
agggcaaggucgggcacgg

SEQ ID NO: 1122168 - RNA, 19 nt, Artificial Sequence
  Description of Artificial Sequence: Synthetic oligonucleotide
agcgcucaaugagggagag

SEQ ID NO: 1122169 - RNA, 19 nt, Artificial Sequence
  Description of Artificial Sequence: Synthetic oligonucleotide
gcucauggucaccccaucc

SEQ ID NO: 1122170 - RNA, 19 nt, Artificial Sequence
  Description of Artificial Sequence: Synthetic oligonucleotide
cuccguuguccuggaagcg

SEQ ID NO: 1122171 - RNA, 19 nt, Artificial Sequence
  Description of Artificial Sequence: Synthetic oligonucleotide
gggcucguagcgcucaaug

SEQ ID NO: 1122172 - RNA, 19 nt, Artificial Sequence
  Description of Artificial Sequence: Synthetic oligonucleotide
ggcguagucgcggauggcc

SEQ ID NO: 1122173 - RNA, 19 nt, Artificial Sequence
  Description of Artificial Sequence: Synthetic oligonucleotide
gacccacucaggguggauc

SEQ ID NO: 1122174 - RNA, 19 nt, Artificial Sequence
  Description of Artificial Sequence: Synthetic oligonucleotide
ccguucuuagacaagaggu

SEQ ID NO: 1122175 - RNA, 19 nt, Artificial Sequence
  Description of Artificial Sequence: Synthetic oligonucleotide
agucucggguccauuuucu

SEQ ID NO: 1122176 - RNA, 19 nt, Artificial Sequence
  Description of Artificial Sequence: Synthetic oligonucleotide
ccuugaaggcguagucgcg

SEQ ID NO: 1122177 - RNA, 19 nt, Artificial Sequence
  Description of Artificial Sequence: Synthetic oligonucleotide
cagguacacauccauuucu

SEQ ID NO: 1122178 - RNA, 19 nt, Artificial Sequence
  Description of Artificial Sequence: Synthetic oligonucleotide
uucuuagaggaggcgucau

SEQ ID NO: 1122179 - RNA, 19 nt, Artificial Sequence
  Description of Artificial Sequence: Synthetic oligonucleotide
uggcucacguuguggcgga

SEQ ID NO: 1122180 - RNA, 19 nt, Artificial Sequence
  Description of Artificial Sequence: Synthetic oligonucleotide
ggcacggccacuucaaacu

SEQ ID NO: 1122181 - RNA, 19 nt, Artificial Sequence
  Description of Artificial Sequence: Synthetic oligonucleotide
gcggccucaucuucgucgg

SEQ ID NO: 1122182 - RNA, 19 nt, Artificial Sequence
  Description of Artificial Sequence: Synthetic oligonucleotide
cagagaugacccggacacg

SEQ ID NO: 1122183 - RNA, 19 nt, Artificial Sequence
  Description of Artificial Sequence: Synthetic oligonucleotide
gaaugccugcccagaggug

SEQ ID NO: 1122184 - RNA, 19 nt, Artificial Sequence
  Description of Artificial Sequence: Synthetic oligonucleotide
ggguggaucucacccaauc

SEQ ID NO: 1122185 - RNA, 19 nt, Artificial Sequence
  Description of Artificial Sequence: Synthetic oligonucleotide
auauccugcucagguggcu

SEQ ID NO: 1122186 - RNA, 19 nt, Artificial Sequence
  Description of Artificial Sequence: Synthetic oligonucleotide
guggcggacaaaauuauuu

SEQ ID NO: 1122187 - RNA, 19 nt, Artificial Sequence
  Description of Artificial Sequence: Synthetic oligonucleotide
cucacguuguggcggacaa

SEQ ID NO: 1122188 - RNA, 19 nt, Artificial Sequence
  Description of Artificial Sequence: Synthetic oligonucleotide
aaguaguggcugaguggcu

SEQ ID NO: 1122189 - RNA, 19 nt, Artificial Sequence
  Description of Artificial Sequence: Synthetic oligonucleotide
ccaauccccaggcuuaguc

SEQ ID NO: 1122190 - RNA, 19 nt, Artificial Sequence
  Description of Artificial Sequence: Synthetic oligonucleotide
cccauuccacaucuccacg

SEQ ID NO: 1122191 - RNA, 19 nt, Artificial Sequence
  Description of Artificial Sequence: Synthetic oligonucleotide
ggucugacggcuggcuacg

SEQ ID NO: 1122192 - RNA, 19 nt, Artificial Sequence
  Description of Artificial Sequence: Synthetic oligonucleotide
uccauuucggcggccucau

SEQ ID NO: 1122193 - RNA, 19 nt, Artificial Sequence
  Description of Artificial Sequence: Synthetic oligonucleotide
cacauacccgcaggcuccg

SEQ ID NO: 1122194 - RNA, 19 nt, Artificial Sequence
  Description of Artificial Sequence: Synthetic oligonucleotide
ggaccaucccagcagucga

SEQ ID NO: 1122195 - RNA, 19 nt, Artificial Sequence
  Description of Artificial Sequence: Synthetic oligonucleotide
ucggcggccucaucuucgu

SEQ ID NO: 1122196 - RNA, 19 nt, Artificial Sequence
  Description of Artificial Sequence: Synthetic oligonucleotide
cuccacuaucaccuuggga

SEQ ID NO: 1122197 - RNA, 19 nt, Artificial Sequence
  Description of Artificial Sequence: Synthetic oligonucleotide
gaaggcgcugccaucggcu

SEQ ID NO: 1122198 - RNA, 19 nt, Artificial Sequence
  Description of Artificial Sequence: Synthetic oligonucleotide
auuucuggucccgggguuu

SEQ ID NO: 1122199 - RNA, 19 nt, Artificial Sequence
  Description of Artificial Sequence: Synthetic oligonucleotide
cacgguucucagagaagga

SEQ ID NO: 1122200 - RNA, 19 nt, Artificial Sequence
  Description of Artificial Sequence: Synthetic oligonucleotide
cuacguccuggcccacgcc

SEQ ID NO: 1122201 - RNA, 19 nt, Artificial Sequence
  Description of Artificial Sequence: Synthetic oligonucleotide
acugggcucguagcgcuca

SEQ ID NO: 1122202 - RNA, 19 nt, Artificial Sequence
  Description of Artificial Sequence: Synthetic oligonucleotide
cagcgacaaccuuugcaca

SEQ ID NO: 1122203 - RNA, 19 nt, Artificial Sequence
  Description of Artificial Sequence: Synthetic oligonucleotide
gucgggcacggccacuuca

SEQ ID NO: 1122204 - RNA, 19 nt, Artificial Sequence
  Description of Artificial Sequence: Synthetic oligonucleotide
guagcugauggaugcuggu

SEQ ID NO: 1122205 - RNA, 19 nt, Artificial Sequence
  Description of Artificial Sequence: Synthetic oligonucleotide
aucgguagucucgggucca

SEQ ID NO: 1122206 - RNA, 19 nt, Artificial Sequence
  Description of Artificial Sequence: Synthetic oligonucleotide
caaagcggacgagggcaag

SEQ ID NO: 1122207 - RNA, 19 nt, Artificial Sequence
  Description of Artificial Sequence: Synthetic oligonucleotide
gagaugacccggacacgga

SEQ ID NO: 1122208 - RNA, 19 nt, Artificial Sequence
  Description of Artificial Sequence: Synthetic oligonucleotide
aggcguagucgcggauggc

SEQ ID NO: 1122209 - RNA, 19 nt, Artificial Sequence
  Description of Artificial Sequence: Synthetic oligonucleotide
cuuacucuuguugacuuuu

SEQ ID NO: 1122210 - RNA, 19 nt, Artificial Sequence
  Description of Artificial Sequence: Synthetic oligonucleotide
gucggacacaucgguaguc

SEQ ID NO: 1122211 - RNA, 19 nt, Artificial Sequence
  Description of Artificial Sequence: Synthetic oligonucleotide
ggcugauaacaaguacaug

SEQ ID NO: 1122212 - RNA, 19 nt, Artificial Sequence
  Description of Artificial Sequence: Synthetic oligonucleotide
cacaucgguagucucgggu

SEQ ID NO: 1122213 - RNA, 19 nt, Artificial Sequence
  Description of Artificial Sequence: Synthetic oligonucleotide
gacgcgccaucacugggua

SEQ ID NO: 1122214 - RNA, 19 nt, Artificial Sequence
  Description of Artificial Sequence: Synthetic oligonucleotide
uagacacggcggugugcca

SEQ ID NO: 1122215 - RNA, 19 nt, Artificial Sequence
  Description of Artificial Sequence: Synthetic oligonucleotide
ugucggggucucucaggaa

SEQ ID NO: 1122216 - RNA, 19 nt, Artificial Sequence
  Description of Artificial Sequence: Synthetic oligonucleotide
guagucgcggauggcccug

SEQ ID NO: 1122217 - RNA, 19 nt, Artificial Sequence
  Description of Artificial Sequence: Synthetic oligonucleotide
gguaaugacugcggucuga

SEQ ID NO: 1122218 - RNA, 19 nt, Artificial Sequence
  Description of Artificial Sequence: Synthetic oligonucleotide
ggauuggagaagccaccga

SEQ ID NO: 1122219 - RNA, 19 nt, Artificial Sequence
  Description of Artificial Sequence: Synthetic oligonucleotide
gacgccuugaaggcguagu

SEQ ID NO: 1122220 - RNA, 19 nt, Artificial Sequence
  Description of Artificial Sequence: Synthetic oligonucleotide
gcggacaaaauuauuuccu

SEQ ID NO: 1122221 - RNA, 19 nt, Artificial Sequence
  Description of Artificial Sequence: Synthetic oligonucleotide
caggguggaucucacccaa

SEQ ID NO: 1122222 - RNA, 19 nt, Artificial Sequence
  Description of Artificial Sequence: Synthetic oligonucleotide
cauggguugaagccauuau

SEQ ID NO: 1122223 - RNA, 19 nt, Artificial Sequence
  Description of Artificial Sequence: Synthetic oligonucleotide
agucgcggauggcccugag

SEQ ID NO: 1122224 - RNA, 19 nt, Artificial Sequence
  Description of Artificial Sequence: Synthetic oligonucleotide
acgcgccaucacuggguag

SEQ ID NO: 1122225 - RNA, 19 nt, Artificial Sequence
  Description of Artificial Sequence: Synthetic oligonucleotide
cuccauuucggcggccuca

SEQ ID NO: 1122226 - RNA, 19 nt, Artificial Sequence
  Description of Artificial Sequence: Synthetic oligonucleotide
cgcgccaucacuggguagg

SEQ ID NO: 1122227 - RNA, 19 nt, Artificial Sequence
  Description of Artificial Sequence: Synthetic oligonucleotide
gguagacacggcggugugc

SEQ ID NO: 1122228 - RNA, 19 nt, Artificial Sequence
  Description of Artificial Sequence: Synthetic oligonucleotide
aggguagcugauggaugcu

SEQ ID NO: 1122229 - RNA, 19 nt, Artificial Sequence
  Description of Artificial Sequence: Synthetic oligonucleotide
cggacgagggcaaggucgg

SEQ ID NO: 1122230 - RNA, 19 nt, Artificial Sequence
  Description of Artificial Sequence: Synthetic oligonucleotide
uggcggucucacugggcuc

SEQ ID NO: 1122231 - RNA, 19 nt, Artificial Sequence
  Description of Artificial Sequence: Synthetic oligonucleotide
gcugcacuuggcuccgcac

SEQ ID NO: 1122232 - RNA, 19 nt, Artificial Sequence
  Description of Artificial Sequence: Synthetic oligonucleotide
gcgucauaguccucuacua

SEQ ID NO: 1122233 - RNA, 19 nt, Artificial Sequence
  Description of Artificial Sequence: Synthetic oligonucleotide
gccaccgaaguggacacuc

SEQ ID NO: 1122234 - RNA, 19 nt, Artificial Sequence
  Description of Artificial Sequence: Synthetic oligonucleotide
ucacguuguggcggacaaa

SEQ ID NO: 1122235 - RNA, 19 nt, Artificial Sequence
  Description of Artificial Sequence: Synthetic oligonucleotide
guagucucggguccauuuu

SEQ ID NO: 1122236 - RNA, 19 nt, Artificial Sequence
  Description of Artificial Sequence: Synthetic oligonucleotide
gacugcggucugacggcug

SEQ ID NO: 1122237 - RNA, 19 nt, Artificial Sequence
  Description of Artificial Sequence: Synthetic oligonucleotide
ggaucucacccaaucccca

SEQ ID NO: 1122238 - RNA, 19 nt, Artificial Sequence
  Description of Artificial Sequence: Synthetic oligonucleotide
ccguggaccuccacuauca

SEQ ID NO: 1122239 - RNA, 19 nt, Artificial Sequence
  Description of Artificial Sequence: Synthetic oligonucleotide
gguagucucggguccauuu

SEQ ID NO: 1122240 - RNA, 19 nt, Artificial Sequence
  Description of Artificial Sequence: Synthetic oligonucleotide
guggacacucuugcaguaa

SEQ ID NO: 1122241 - RNA, 19 nt, Artificial Sequence
  Description of Artificial Sequence: Synthetic oligonucleotide
cacgggacuguaguuggaa

SEQ ID NO: 1122242 - RNA, 19 nt, Artificial Sequence
  Description of Artificial Sequence: Synthetic oligonucleotide
gcguagucgcggauggccc

SEQ ID NO: 1122243 - RNA, 19 nt, Artificial Sequence
  Description of Artificial Sequence: Synthetic oligonucleotide
ccacgauugaauucuuacu

SEQ ID NO: 1122244 - RNA, 19 nt, Artificial Sequence
  Description of Artificial Sequence: Synthetic oligonucleotide
ggucccgggguuuggaagu

SEQ ID NO: 1122245 - RNA, 19 nt, Artificial Sequence
  Description of Artificial Sequence: Synthetic oligonucleotide
auccacgauugaauucuua

SEQ ID NO: 1122246 - RNA, 19 nt, Artificial Sequence
  Description of Artificial Sequence: Synthetic oligonucleotide
uagucgcggauggcccuga

SEQ ID NO: 1122247 - RNA, 19 nt, Artificial Sequence
  Description of Artificial Sequence: Synthetic oligonucleotide
gccguggaccuccacuauc

SEQ ID NO: 1122248 - RNA, 19 nt, Artificial Sequence
  Description of Artificial Sequence: Synthetic oligonucleotide
ugacccggacacggagccu

SEQ ID NO: 1122249 - RNA, 19 nt, Artificial Sequence
  Description of Artificial Sequence: Synthetic oligonucleotide
ggaagcggcccagguacac

SEQ ID NO: 1122250 - RNA, 19 nt, Artificial Sequence
  Description of Artificial Sequence: Synthetic oligonucleotide
cgaguucuaagcagcgaca

SEQ ID NO: 1122251 - RNA, 19 nt, Artificial Sequence
  Description of Artificial Sequence: Synthetic oligonucleotide
cuggucccgggguuuggaa

SEQ ID NO: 1122252 - RNA, 19 nt, Artificial Sequence
  Description of Artificial Sequence: Synthetic oligonucleotide
cuuaguccuggagggagau

SEQ ID NO: 1122253 - RNA, 19 nt, Artificial Sequence
  Description of Artificial Sequence: Synthetic oligonucleotide
ugacccacucaggguggau

SEQ ID NO: 1122254 - RNA, 19 nt, Artificial Sequence
  Description of Artificial Sequence: Synthetic oligonucleotide
aggucgggcacggccacuu

SEQ ID NO: 1122255 - RNA, 19 nt, Artificial Sequence
  Description of Artificial Sequence: Synthetic oligonucleotide
ggcucauggucaccccauc

SEQ ID NO: 1122256 - RNA, 19 nt, Artificial Sequence
  Description of Artificial Sequence: Synthetic oligonucleotide
acguccuggcccacgccgu

SEQ ID NO: 1122257 - RNA, 19 nt, Artificial Sequence
  Description of Artificial Sequence: Synthetic oligonucleotide
gcaggaaagugacuagcuu

SEQ ID NO: 1122258 - RNA, 19 nt, Artificial Sequence
  Description of Artificial Sequence: Synthetic oligonucleotide
ugggcucguagcgcucaau

SEQ ID NO: 1122259 - RNA, 19 nt, Artificial Sequence
  Description of Artificial Sequence: Synthetic oligonucleotide
acguuguggcggacaaaau

SEQ ID NO: 1122260 - RNA, 19 nt, Artificial Sequence
  Description of Artificial Sequence: Synthetic oligonucleotide
cugcggucugacggcuggc

SEQ ID NO: 1122261 - RNA, 19 nt, Artificial Sequence
  Description of Artificial Sequence: Synthetic oligonucleotide
gcuuaguccuggagggaga

SEQ ID NO: 1122262 - RNA, 19 nt, Artificial Sequence
  Description of Artificial Sequence: Synthetic oligonucleotide
ccaugguagaugauggguu

SEQ ID NO: 1122263 - RNA, 19 nt, Artificial Sequence
  Description of Artificial Sequence: Synthetic oligonucleotide
cuccggcgccagcuuuagc

SEQ ID NO: 1122264 - RNA, 19 nt, Artificial Sequence
  Description of Artificial Sequence: Synthetic oligonucleotide
cacuaaguaguggcugagu

SEQ ID NO: 1122265 - RNA, 19 nt, Artificial Sequence
  Description of Artificial Sequence: Synthetic oligonucleotide
cauuucuggucccgggguu

SEQ ID NO: 1122266 - RNA, 19 nt, Artificial Sequence
  Description of Artificial Sequence: Synthetic oligonucleotide
gcacuuggcuccgcacugc

SEQ ID NO: 1122267 - RNA, 19 nt, Artificial Sequence
  Description of Artificial Sequence: Synthetic oligonucleotide
ccugguagacacggcggug

SEQ ID NO: 1122268 - RNA, 19 nt, Artificial Sequence
  Description of Artificial Sequence: Synthetic oligonucleotide
gcgccaucacuggguaggg

SEQ ID NO: 1122269 - RNA, 19 nt, Artificial Sequence
  Description of Artificial Sequence: Synthetic oligonucleotide
cuucuaccagcuggguaua

SEQ ID NO: 1122270 - RNA, 19 nt, Artificial Sequence
  Description of Artificial Sequence: Synthetic oligonucleotide
aggaggcgucauaguccuc

SEQ ID NO: 1122271 - RNA, 19 nt, Artificial Sequence
  Description of Artificial Sequence: Synthetic oligonucleotide
ccugcucagguggcucacg

SEQ ID NO: 1122272 - RNA, 19 nt, Artificial Sequence
  Description of Artificial Sequence: Synthetic oligonucleotide
agccaccgaaguggacacu

SEQ ID NO: 1122273 - RNA, 19 nt, Artificial Sequence
  Description of Artificial Sequence: Synthetic oligonucleotide
agcccggauguaggccucu

SEQ ID NO: 1122274 - RNA, 19 nt, Artificial Sequence
  Description of Artificial Sequence: Synthetic oligonucleotide
ggacgagggcaaggucggg

SEQ ID NO: 1122275 - RNA, 19 nt, Artificial Sequence
  Description of Artificial Sequence: Synthetic oligonucleotide
cugggcccaccaggguccc

SEQ ID NO: 1122276 - RNA, 19 nt, Artificial Sequence
  Description of Artificial Sequence: Synthetic oligonucleotide
ggacgccuugaaggcguag

SEQ ID NO: 1122277 - RNA, 19 nt, Artificial Sequence
  Description of Artificial Sequence: Synthetic oligonucleotide
gauccacgauugaauucuu

SEQ ID NO: 1122278 - RNA, 19 nt, Artificial Sequence
  Description of Artificial Sequence: Synthetic oligonucleotide
ccggacacggagccucuuc

SEQ ID NO: 1122279 - RNA, 19 nt, Artificial Sequence
  Description of Artificial Sequence: Synthetic oligonucleotide
gcucacguuguggcggaca

SEQ ID NO: 1122280 - RNA, 19 nt, Artificial Sequence
  Description of Artificial Sequence: Synthetic oligonucleotide
aggguggaucucacccaau

SEQ ID NO: 1122281 - RNA, 19 nt, Artificial Sequence
  Description of Artificial Sequence: Synthetic oligonucleotide
cauacccgcaggcuccguu

SEQ ID NO: 1122282 - RNA, 19 nt, Artificial Sequence
  Description of Artificial Sequence: Synthetic oligonucleotide
ggacuguaguuggaagagu

SEQ ID NO: 1122283 - RNA, 19 nt, Artificial Sequence
  Description of Artificial Sequence: Synthetic oligonucleotide
caccgaaguggacacucuu

SEQ ID NO: 1122284 - RNA, 19 nt, Artificial Sequence
  Description of Artificial Sequence: Synthetic oligonucleotide
ggguaggcucauggucacc

SEQ ID NO: 1122285 - RNA, 19 nt, Artificial Sequence
  Description of Artificial Sequence: Synthetic oligonucleotide
cguccuccauuucggcggc

SEQ ID NO: 1122286 - RNA, 19 nt, Artificial Sequence
  Description of Artificial Sequence: Synthetic oligonucleotide
ggggacgccuugaaggcgu

SEQ ID NO: 1122287 - RNA, 19 nt, Artificial Sequence
  Description of Artificial Sequence: Synthetic oligonucleotide
cgauugaauucuuacucuu

SEQ ID NO: 1122288 - RNA, 19 nt, Artificial Sequence
  Description of Artificial Sequence: Synthetic oligonucleotide
agcagccggagggcacggu

SEQ ID NO: 1122289 - RNA, 19 nt, Artificial Sequence
  Description of Artificial Sequence: Synthetic oligonucleotide
guccuccauuucggcggcc

SEQ ID NO: 1122290 - RNA, 19 nt, Artificial Sequence
  Description of Artificial Sequence: Synthetic oligonucleotide
aggcuccguuguccuggaa

SEQ ID NO: 1122291 - RNA, 19 nt, Artificial Sequence
  Description of Artificial Sequence: Synthetic oligonucleotide
acccggacacggagccucu

SEQ ID NO: 1122292 - RNA, 19 nt, Artificial Sequence
  Description of Artificial Sequence: Synthetic oligonucleotide
cggcugauaacaaguacau

SEQ ID NO: 1122293 - RNA, 19 nt, Artificial Sequence
  Description of Artificial Sequence: Synthetic oligonucleotide
cugcugcacuuggcuccgc

SEQ ID NO: 1122294 - RNA, 19 nt, Artificial Sequence
  Description of Artificial Sequence: Synthetic oligonucleotide
ggacacucuugcaguaaau

SEQ ID NO: 1122295 - RNA, 19 nt, Artificial Sequence
  Description of Artificial Sequence: Synthetic oligonucleotide
gcggucugacggcuggcua

SEQ ID NO: 1122296 - RNA, 19 nt, Artificial Sequence
  Description of Artificial Sequence: Synthetic oligonucleotide
uggcuacguccuggcccac

SEQ ID NO: 1122297 - RNA, 19 nt, Artificial Sequence
  Description of Artificial Sequence: Synthetic oligonucleotide
ccgcugggucagcaucuug

SEQ ID NO: 1122298 - RNA, 19 nt, Artificial Sequence
  Description of Artificial Sequence: Synthetic oligonucleotide
ccucugagccuuggcgguc

SEQ ID NO: 1122299 - RNA, 19 nt, Artificial Sequence
  Description of Artificial Sequence: Synthetic oligonucleotide
ccacgggacuguaguugga

SEQ ID NO: 1122300 - RNA, 19 nt, Artificial Sequence
  Description of Artificial Sequence: Synthetic oligonucleotide
ccuuugcacagagcccgga

SEQ ID NO: 1122301 - RNA, 19 nt, Artificial Sequence
  Description of Artificial Sequence: Synthetic oligonucleotide
gcccggauguaggccucug

SEQ ID NO: 1122302 - RNA, 19 nt, Artificial Sequence
  Description of Artificial Sequence: Synthetic oligonucleotide
cugcaaagacacggucaau

SEQ ID NO: 1122303 - RNA, 19 nt, Artificial Sequence
  Description of Artificial Sequence: Synthetic oligonucleotide
ccauuucggcggccucauc

SEQ ID NO: 1122304 - RNA, 19 nt, Artificial Sequence
  Description of Artificial Sequence: Synthetic oligonucleotide
cgcaggcuccguuguccug

SEQ ID NO: 1122305 - RNA, 19 nt, Artificial Sequence
  Description of Artificial Sequence: Synthetic oligonucleotide
cacggcggugugccaggcu

SEQ ID NO: 1122306 - RNA, 19 nt, Artificial Sequence
  Description of Artificial Sequence: Synthetic oligonucleotide
ccaccgaaguggacacucu

SEQ ID NO: 1122307 - RNA, 19 nt, Artificial Sequence
  Description of Artificial Sequence: Synthetic oligonucleotide
ggauggcccugagcacguc

SEQ ID NO: 1122308 - RNA, 19 nt, Artificial Sequence
  Description of Artificial Sequence: Synthetic oligonucleotide
ggcucacguuguggcggac

SEQ ID NO: 1122309 - RNA, 19 nt, Artificial Sequence
  Description of Artificial Sequence: Synthetic oligonucleotide
cguagucgcggauggcccu

SEQ ID NO: 1122310 - RNA, 19 nt, Artificial Sequence
  Description of Artificial Sequence: Synthetic oligonucleotide
gcgccagcuuuagcuuauc

SEQ ID NO: 1122311 - RNA, 19 nt, Artificial Sequence
  Description of Artificial Sequence: Synthetic oligonucleotide
gucccgggguuuggaaguu

SEQ ID NO: 1122312 - RNA, 19 nt, Artificial Sequence
  Description of Artificial Sequence: Synthetic oligonucleotide
cgcugccaucggcugauaa

SEQ ID NO: 1122313 - RNA, 19 nt, Artificial Sequence
  Description of Artificial Sequence: Synthetic oligonucleotide
cggcgccagcuuuagcuua

SEQ ID NO: 1122314 - RNA, 19 nt, Artificial Sequence
  Description of Artificial Sequence: Synthetic oligonucleotide
gggacgccuugaaggcgua

SEQ ID NO: 1122315 - RNA, 19 nt, Artificial Sequence
  Description of Artificial Sequence: Synthetic oligonucleotide
ccggcgccagcuuuagcuu

SEQ ID NO: 1122316 - RNA, 19 nt, Artificial Sequence
  Description of Artificial Sequence: Synthetic oligonucleotide
cggucaaucuccgcccgcu

SEQ ID NO: 1122317 - RNA, 19 nt, Artificial Sequence
  Description of Artificial Sequence: Synthetic oligonucleotide
cggcggccucaucuucguc

SEQ ID NO: 1122318 - RNA, 19 nt, Artificial Sequence
  Description of Artificial Sequence: Synthetic oligonucleotide
cccaauccccaggcuuagu

SEQ ID NO: 1122319 - RNA, 19 nt, Artificial Sequence
  Description of Artificial Sequence: Synthetic oligonucleotide
cgccguggaccuccacuau

SEQ ID NO: 1122320 - RNA, 19 nt, Artificial Sequence
  Description of Artificial Sequence: Synthetic oligonucleotide
ccgcccgcugggucagcau

SEQ ID NO: 1122321 - RNA, 19 nt, Artificial Sequence
  Description of Artificial Sequence: Synthetic oligonucleotide
cccgcugggucagcaucuu

SEQ ID NO: 1122322 - RNA, 19 nt, Artificial Sequence
  Description of Artificial Sequence: Synthetic oligonucleotide
cccggacacggagccucuu

SEQ ID NO: 1122323 - RNA, 19 nt, Artificial Sequence
  Description of Artificial Sequence: Synthetic oligonucleotide
aauacuuguacauaaaagg

SEQ ID NO: 1122324 - RNA, 19 nt, Artificial Sequence
  Description of Artificial Sequence: Synthetic oligonucleotide
aguacuuacuuuuagaacc

SEQ ID NO: 1122325 - RNA, 19 nt, Artificial Sequence
  Description of Artificial Sequence: Synthetic oligonucleotide
uaauaaaccaauuagguag

SEQ ID NO: 1122326 - RNA, 19 nt, Artificial Sequence
  Description of Artificial Sequence: Synthetic oligonucleotide
aauggauagauacaccugc

SEQ ID NO: 1122327 - RNA, 19 nt, Artificial Sequence
  Description of Artificial Sequence: Synthetic oligonucleotide
aauaacucauccuugguac

SEQ ID NO: 1122328 - RNA, 19 nt, Artificial Sequence
  Description of Artificial Sequence: Synthetic oligonucleotide
uuaauugcuacaaaagagg

SEQ ID NO: 1122329 - RNA, 19 nt, Artificial Sequence
  Description of Artificial Sequence: Synthetic oligonucleotide
auugagauaauaaagacac

SEQ ID NO: 1122330 - RNA, 19 nt, Artificial Sequence
  Description of Artificial Sequence: Synthetic oligonucleotide
acaucaaauggauagauac

SEQ ID NO: 1122331 - RNA, 19 nt, Artificial Sequence
  Description of Artificial Sequence: Synthetic oligonucleotide
aaaggaugaaaacagacug

SEQ ID NO: 1122332 - RNA, 19 nt, Artificial Sequence
  Description of Artificial Sequence: Synthetic oligonucleotide
ugaauauacauuaucaaca

SEQ ID NO: 1122333 - RNA, 19 nt, Artificial Sequence
  Description of Artificial Sequence: Synthetic oligonucleotide
uguaauauuaauaaaccaa

SEQ ID NO: 1122334 - RNA, 19 nt, Artificial Sequence
  Description of Artificial Sequence: Synthetic oligonucleotide
aauguaguuaaugagaugu

SEQ ID NO: 1122335 - RNA, 19 nt, Artificial Sequence
  Description of Artificial Sequence: Synthetic oligonucleotide
acaccaauaugauacaggc

SEQ ID NO: 1122336 - RNA, 19 nt, Artificial Sequence
  Description of Artificial Sequence: Synthetic oligonucleotide
uuaaauaacucauccuugg

SEQ ID NO: 1122337 - RNA, 19 nt, Artificial Sequence
  Description of Artificial Sequence: Synthetic oligonucleotide
aaaacuauacgcuucgagu

SEQ ID NO: 1122338 - RNA, 19 nt, Artificial Sequence
  Description of Artificial Sequence: Synthetic oligonucleotide
aauacuguaaaaccuagaa

SEQ ID NO: 1122339 - RNA, 19 nt, Artificial Sequence
  Description of Artificial Sequence: Synthetic oligonucleotide
cuuaauugcuacaaaagag

SEQ ID NO: 1122340 - RNA, 19 nt, Artificial Sequence
  Description of Artificial Sequence: Synthetic oligonucleotide
uuucaaaacaucaaaugga

SEQ ID NO: 1122341 - RNA, 19 nt, Artificial Sequence
  Description of Artificial Sequence: Synthetic oligonucleotide
aguauaaggagugacauuc

SEQ ID NO: 1122342 - RNA, 19 nt, Artificial Sequence
  Description of Artificial Sequence: Synthetic oligonucleotide
uggaagaguagccagaugc

SEQ ID NO: 1122343 - RNA, 19 nt, Artificial Sequence
  Description of Artificial Sequence: Synthetic oligonucleotide
uaauugcuacaaaagaggg

SEQ ID NO: 1122344 - RNA, 19 nt, Artificial Sequence
  Description of Artificial Sequence: Synthetic oligonucleotide
auuaucaacaccaauauga

SEQ ID NO: 1122345 - RNA, 19 nt, Artificial Sequence
  Description of Artificial Sequence: Synthetic oligonucleotide
aaugagauguucucuauga

SEQ ID NO: 1122346 - RNA, 19 nt, Artificial Sequence
  Description of Artificial Sequence: Synthetic oligonucleotide
gaagagaugauuucaaaac

SEQ ID NO: 1122347 - RNA, 19 nt, Artificial Sequence
  Description of Artificial Sequence: Synthetic oligonucleotide
gauguaauauuaauaaacc

SEQ ID NO: 1122348 - RNA, 19 nt, Artificial Sequence
  Description of Artificial Sequence: Synthetic oligonucleotide
auuuguauacaacaggucu

SEQ ID NO: 1122349 - RNA, 19 nt, Artificial Sequence
  Description of Artificial Sequence: Synthetic oligonucleotide
augaugaugaugaugaugg

SEQ ID NO: 1122350 - RNA, 19 nt, Artificial Sequence
  Description of Artificial Sequence: Synthetic oligonucleotide
auauguaugguggaaauac

SEQ ID NO: 1122351 - RNA, 19 nt, Artificial Sequence
  Description of Artificial Sequence: Synthetic oligonucleotide
aaauauuauuaucugaaua

SEQ ID NO: 1122352 - RNA, 19 nt, Artificial Sequence
  Description of Artificial Sequence: Synthetic oligonucleotide
aaguauuuaguuugugguc

SEQ ID NO: 1122353 - RNA, 19 nt, Artificial Sequence
  Description of Artificial Sequence: Synthetic oligonucleotide
aguauacugagaaauaugg

SEQ ID NO: 1122354 - RNA, 19 nt, Artificial Sequence
  Description of Artificial Sequence: Synthetic oligonucleotide
ugagauguucucuaugacg

SEQ ID NO: 1122355 - RNA, 19 nt, Artificial Sequence
  Description of Artificial Sequence: Synthetic oligonucleotide
uuuagaaccccauugagau

SEQ ID NO: 1122356 - RNA, 19 nt, Artificial Sequence
  Description of Artificial Sequence: Synthetic oligonucleotide
ucagaauaaauacugaguu

SEQ ID NO: 1122357 - RNA, 19 nt, Artificial Sequence
  Description of Artificial Sequence: Synthetic oligonucleotide
auugcuacaaaagagggag

SEQ ID NO: 1122358 - RNA, 19 nt, Artificial Sequence
  Description of Artificial Sequence: Synthetic oligonucleotide
aauggacaccaguauaagg

SEQ ID NO: 1122359 - RNA, 19 nt, Artificial Sequence
  Description of Artificial Sequence: Synthetic oligonucleotide
uauuugauuucacuguacc

SEQ ID NO: 1122360 - RNA, 19 nt, Artificial Sequence
  Description of Artificial Sequence: Synthetic oligonucleotide
accaauaugauacaggcau

SEQ ID NO: 1122361 - RNA, 19 nt, Artificial Sequence
  Description of Artificial Sequence: Synthetic oligonucleotide
uaaggagugacauucuugc

SEQ ID NO: 1122362 - RNA, 19 nt, Artificial Sequence
  Description of Artificial Sequence: Synthetic oligonucleotide
aaauauggaaccuggaaua

SEQ ID NO: 1122363 - RNA, 19 nt, Artificial Sequence
  Description of Artificial Sequence: Synthetic oligonucleotide
uucucuaugacgcucuacc

SEQ ID NO: 1122364 - RNA, 19 nt, Artificial Sequence
  Description of Artificial Sequence: Synthetic oligonucleotide
aacuauacgcuucgaguac

SEQ ID NO: 1122365 - RNA, 19 nt, Artificial Sequence
  Description of Artificial Sequence: Synthetic oligonucleotide
auauacauuaucaacacca

SEQ ID NO: 1122366 - RNA, 19 nt, Artificial Sequence
  Description of Artificial Sequence: Synthetic oligonucleotide
accaauuagguagaaaugg

SEQ ID NO: 1122367 - RNA, 19 nt, Artificial Sequence
  Description of Artificial Sequence: Synthetic oligonucleotide
cugaauauacauuaucaac

SEQ ID NO: 1122368 - RNA, 19 nt, Artificial Sequence
  Description of Artificial Sequence: Synthetic oligonucleotide
guugugaccauuuuacugc

SEQ ID NO: 1122369 - RNA, 19 nt, Artificial Sequence
  Description of Artificial Sequence: Synthetic oligonucleotide
aacuaaauaggagagcaug

SEQ ID NO: 1122370 - RNA, 19 nt, Artificial Sequence
  Description of Artificial Sequence: Synthetic oligonucleotide
caaggaauaaggcuagugg

SEQ ID NO: 1122371 - RNA, 19 nt, Artificial Sequence
  Description of Artificial Sequence: Synthetic oligonucleotide
ucagacuaauccaugauaa

SEQ ID NO: 1122372 - RNA, 19 nt, Artificial Sequence
  Description of Artificial Sequence: Synthetic oligonucleotide
uacuuguacauaaaaggug

SEQ ID NO: 1122373 - RNA, 19 nt, Artificial Sequence
  Description of Artificial Sequence: Synthetic oligonucleotide
uuuuagaaccccauugaga

SEQ ID NO: 1122374 - RNA, 19 nt, Artificial Sequence
  Description of Artificial Sequence: Synthetic oligonucleotide
aauuagguagaaauggugu

SEQ ID NO: 1122375 - RNA, 19 nt, Artificial Sequence
  Description of Artificial Sequence: Synthetic oligonucleotide
uuucaguauaaaauaauua

SEQ ID NO: 1122376 - RNA, 19 nt, Artificial Sequence
  Description of Artificial Sequence: Synthetic oligonucleotide
uaauucucauuuuauauau

SEQ ID NO: 1122377 - RNA, 19 nt, Artificial Sequence
  Description of Artificial Sequence: Synthetic oligonucleotide
ucuuccaacuaaauaggag

SEQ ID NO: 1122378 - RNA, 19 nt, Artificial Sequence
  Description of Artificial Sequence: Synthetic oligonucleotide
gucucaaguauuuaguuug

SEQ ID NO: 1122379 - RNA, 19 nt, Artificial Sequence
  Description of Artificial Sequence: Synthetic oligonucleotide
uguugugaccauuuuacug

SEQ ID NO: 1122380 - RNA, 19 nt, Artificial Sequence
  Description of Artificial Sequence: Synthetic oligonucleotide
gagaugaugaugaugauga

SEQ ID NO: 1122381 - RNA, 19 nt, Artificial Sequence
  Description of Artificial Sequence: Synthetic oligonucleotide
aggaugaaaacagacuggc

SEQ ID NO: 1122382 - RNA, 19 nt, Artificial Sequence
  Description of Artificial Sequence: Synthetic oligonucleotide
ucuuggaaccuucauauuc

SEQ ID NO: 1122383 - RNA, 19 nt, Artificial Sequence
  Description of Artificial Sequence: Synthetic oligonucleotide
uuugucucaaguauuuagu

SEQ ID NO: 1122384 - RNA, 19 nt, Artificial Sequence
  Description of Artificial Sequence: Synthetic oligonucleotide
aaacuauacgcuucgagua

SEQ ID NO: 1122385 - RNA, 19 nt, Artificial Sequence
  Description of Artificial Sequence: Synthetic oligonucleotide
uuccaacuaaauaggagag

SEQ ID NO: 1122386 - RNA, 19 nt, Artificial Sequence
  Description of Artificial Sequence: Synthetic oligonucleotide
caucagaauaaauacugag

SEQ ID NO: 1122387 - RNA, 19 nt, Artificial Sequence
  Description of Artificial Sequence: Synthetic oligonucleotide
cuuaaauaacucauccuug

SEQ ID NO: 1122388 - RNA, 19 nt, Artificial Sequence
  Description of Artificial Sequence: Synthetic oligonucleotide
aggugcaacaccuagaaaa

SEQ ID NO: 1122389 - RNA, 19 nt, Artificial Sequence
  Description of Artificial Sequence: Synthetic oligonucleotide
uuaauaaaccaauuaggua

SEQ ID NO: 1122390 - RNA, 19 nt, Artificial Sequence
  Description of Artificial Sequence: Synthetic oligonucleotide
uguagcaaaauaagccacc

SEQ ID NO: 1122391 - RNA, 19 nt, Artificial Sequence
  Description of Artificial Sequence: Synthetic oligonucleotide
ugagauaauaaagacacua

SEQ ID NO: 1122392 - RNA, 19 nt, Artificial Sequence
  Description of Artificial Sequence: Synthetic oligonucleotide
aaauaacucauccuuggua

SEQ ID NO: 1122393 - RNA, 19 nt, Artificial Sequence
  Description of Artificial Sequence: Synthetic oligonucleotide
uuuauauauguauggugga

SEQ ID NO: 1122394 - RNA, 19 nt, Artificial Sequence
  Description of Artificial Sequence: Synthetic oligonucleotide
uguaugguggaaauacugu

SEQ ID NO: 1122395 - RNA, 19 nt, Artificial Sequence
  Description of Artificial Sequence: Synthetic oligonucleotide
uaguggaaaaggauaaaga

SEQ ID NO: 1122396 - RNA, 19 nt, Artificial Sequence
  Description of Artificial Sequence: Synthetic oligonucleotide
uuaguuuguggucugaauu

SEQ ID NO: 1122397 - RNA, 19 nt, Artificial Sequence
  Description of Artificial Sequence: Synthetic oligonucleotide
aaaguauacugagaaauau

SEQ ID NO: 1122398 - RNA, 19 nt, Artificial Sequence
  Description of Artificial Sequence: Synthetic oligonucleotide
auacgcuucgaguacuuac

SEQ ID NO: 1122399 - RNA, 19 nt, Artificial Sequence
  Description of Artificial Sequence: Synthetic oligonucleotide
auaaaagguguccuuauau

SEQ ID NO: 1122400 - RNA, 19 nt, Artificial Sequence
  Description of Artificial Sequence: Synthetic oligonucleotide
uuaucagacuaauccauga

SEQ ID NO: 1122401 - RNA, 19 nt, Artificial Sequence
  Description of Artificial Sequence: Synthetic oligonucleotide
ucuaugacgcucuaccugu

SEQ ID NO: 1122402 - RNA, 19 nt, Artificial Sequence
  Description of Artificial Sequence: Synthetic oligonucleotide
aaaccccgaaaguauacug

SEQ ID NO: 1122403 - RNA, 19 nt, Artificial Sequence
  Description of Artificial Sequence: Synthetic oligonucleotide
cuuccaacuaaauaggaga

SEQ ID NO: 1122404 - RNA, 19 nt, Artificial Sequence
  Description of Artificial Sequence: Synthetic oligonucleotide
uggugguaaacaaaacccc

SEQ ID NO: 1122405 - RNA, 19 nt, Artificial Sequence
  Description of Artificial Sequence: Synthetic oligonucleotide
gauacagaguuguuccugc

SEQ ID NO: 1122406 - RNA, 19 nt, Artificial Sequence
  Description of Artificial Sequence: Synthetic oligonucleotide
auagauacaccugcuaauc

SEQ ID NO: 1122407 - RNA, 19 nt, Artificial Sequence
  Description of Artificial Sequence: Synthetic oligonucleotide
aaggaugaaaacagacugg

SEQ ID NO: 1122408 - RNA, 19 nt, Artificial Sequence
  Description of Artificial Sequence: Synthetic oligonucleotide
acauuaucaacaccaauau

SEQ ID NO: 1122409 - RNA, 19 nt, Artificial Sequence
  Description of Artificial Sequence: Synthetic oligonucleotide
aguauuuaguuuguggucu

SEQ ID NO: 1122410 - RNA, 19 nt, Artificial Sequence
  Description of Artificial Sequence: Synthetic oligonucleotide
uuuaucacaggagauguaa

SEQ ID NO: 1122411 - RNA, 19 nt, Artificial Sequence
  Description of Artificial Sequence: Synthetic oligonucleotide
acuuuuagaaccccauuga

SEQ ID NO: 1122412 - RNA, 19 nt, Artificial Sequence
  Description of Artificial Sequence: Synthetic oligonucleotide
uucgaguacuuacuuuuag

SEQ ID NO: 1122413 - RNA, 19 nt, Artificial Sequence
  Description of Artificial Sequence: Synthetic oligonucleotide
uuaucaacaccaauaugau

SEQ ID NO: 1122414 - RNA, 19 nt, Artificial Sequence
  Description of Artificial Sequence: Synthetic oligonucleotide
gaugaugaugaugaugaug

SEQ ID NO: 1122415 - RNA, 19 nt, Artificial Sequence
  Description of Artificial Sequence: Synthetic oligonucleotide
uaaugagauguucucuaug

SEQ ID NO: 1122416 - RNA, 19 nt, Artificial Sequence
  Description of Artificial Sequence: Synthetic oligonucleotide
agaagcugcacauaagaaa

SEQ ID NO: 1122417 - RNA, 19 nt, Artificial Sequence
  Description of Artificial Sequence: Synthetic oligonucleotide
ucuguuagguauuuguaua

SEQ ID NO: 1122418 - RNA, 19 nt, Artificial Sequence
  Description of Artificial Sequence: Synthetic oligonucleotide
uuuguauacaacaggucuu

SEQ ID NO: 1122419 - RNA, 19 nt, Artificial Sequence
  Description of Artificial Sequence: Synthetic oligonucleotide
ucucaaauccuuccuccag

SEQ ID NO: 1122420 - RNA, 19 nt, Artificial Sequence
  Description of Artificial Sequence: Synthetic oligonucleotide
uuacuuuaauacagggugu

SEQ ID NO: 1122421 - RNA, 19 nt, Artificial Sequence
  Description of Artificial Sequence: Synthetic oligonucleotide
agauaauaaagacacuaua

SEQ ID NO: 1122422 - RNA, 19 nt, Artificial Sequence
  Description of Artificial Sequence: Synthetic oligonucleotide
cauaagaaaauggacacca

SEQ ID NO: 1122423 - RNA, 19 nt, Artificial Sequence
  Description of Artificial Sequence: Synthetic oligonucleotide
uauuuguauacaacagguc

SEQ ID NO: 1122424 - RNA, 19 nt, Artificial Sequence
  Description of Artificial Sequence: Synthetic oligonucleotide
cuuuuagaaccccauugag

SEQ ID NO: 1122425 - RNA, 19 nt, Artificial Sequence
  Description of Artificial Sequence: Synthetic oligonucleotide
aaguauacugagaaauaug

SEQ ID NO: 1122426 - RNA, 19 nt, Artificial Sequence
  Description of Artificial Sequence: Synthetic oligonucleotide
aauaaaccaauuagguaga

SEQ ID NO: 1122427 - RNA, 19 nt, Artificial Sequence
  Description of Artificial Sequence: Synthetic oligonucleotide
aagaucgcucaguggugcc

SEQ ID NO: 1122428 - RNA, 19 nt, Artificial Sequence
  Description of Artificial Sequence: Synthetic oligonucleotide
agauacaccugcuaauccu

SEQ ID NO: 1122429 - RNA, 19 nt, Artificial Sequence
  Description of Artificial Sequence: Synthetic oligonucleotide
uagaaccccauugagauaa

SEQ ID NO: 1122430 - RNA, 19 nt, Artificial Sequence
  Description of Artificial Sequence: Synthetic oligonucleotide
uauauauguaugguggaaa

SEQ ID NO: 1122431 - RNA, 19 nt, Artificial Sequence
  Description of Artificial Sequence: Synthetic oligonucleotide
gcugauacagaguuguucc

SEQ ID NO: 1122432 - RNA, 19 nt, Artificial Sequence
  Description of Artificial Sequence: Synthetic oligonucleotide
uccuaccaacaccaggacg

SEQ ID NO: 1122433 - RNA, 19 nt, Artificial Sequence
  Description of Artificial Sequence: Synthetic oligonucleotide
gguggugguaaacaaaacc

SEQ ID NO: 1122434 - RNA, 19 nt, Artificial Sequence
  Description of Artificial Sequence: Synthetic oligonucleotide
aaccacgcguccccguugc

SEQ ID NO: 1122435 - RNA, 19 nt, Artificial Sequence
  Description of Artificial Sequence: Synthetic oligonucleotide
aaauggacaccaguauaag

SEQ ID NO: 1122436 - RNA, 19 nt, Artificial Sequence
  Description of Artificial Sequence: Synthetic oligonucleotide
auacuuguacauaaaaggu

SEQ ID NO: 1122437 - RNA, 19 nt, Artificial Sequence
  Description of Artificial Sequence: Synthetic oligonucleotide
gaagcugcacauaagaaaa

SEQ ID NO: 1122438 - RNA, 19 nt, Artificial Sequence
  Description of Artificial Sequence: Synthetic oligonucleotide
gaaauauggaaccuggaau

SEQ ID NO: 1122439 - RNA, 19 nt, Artificial Sequence
  Description of Artificial Sequence: Synthetic oligonucleotide
auauauguaugguggaaau

SEQ ID NO: 1122440 - RNA, 19 nt, Artificial Sequence
  Description of Artificial Sequence: Synthetic oligonucleotide
ugccuuaauugcuacaaaa

SEQ ID NO: 1122441 - RNA, 19 nt, Artificial Sequence
  Description of Artificial Sequence: Synthetic oligonucleotide
gacaccaguauaaggagug

SEQ ID NO: 1122442 - RNA, 19 nt, Artificial Sequence
  Description of Artificial Sequence: Synthetic oligonucleotide
uauguaugguggaaauacu

SEQ ID NO: 1122443 - RNA, 19 nt, Artificial Sequence
  Description of Artificial Sequence: Synthetic oligonucleotide
auaauguaguuaaugagau

SEQ ID NO: 1122444 - RNA, 19 nt, Artificial Sequence
  Description of Artificial Sequence: Synthetic oligonucleotide
ccuaccaacaccaggacgc

SEQ ID NO: 1122445 - RNA, 19 nt, Artificial Sequence
  Description of Artificial Sequence: Synthetic oligonucleotide
ucgaguacuuacuuuuaga

SEQ ID NO: 1122446 - RNA, 19 nt, Artificial Sequence
  Description of Artificial Sequence: Synthetic oligonucleotide
aucagaauaaauacugagu

SEQ ID NO: 1122447 - RNA, 19 nt, Artificial Sequence
  Description of Artificial Sequence: Synthetic oligonucleotide
uaauccugagaugaugaug

SEQ ID NO: 1122448 - RNA, 19 nt, Artificial Sequence
  Description of Artificial Sequence: Synthetic oligonucleotide
acugaauuccucucgcagu

SEQ ID NO: 1122449 - RNA, 19 nt, Artificial Sequence
  Description of Artificial Sequence: Synthetic oligonucleotide
cuguuguaagcugauacag

SEQ ID NO: 1122450 - RNA, 19 nt, Artificial Sequence
  Description of Artificial Sequence: Synthetic oligonucleotide
uacgcuucgaguacuuacu

SEQ ID NO: 1122451 - RNA, 19 nt, Artificial Sequence
  Description of Artificial Sequence: Synthetic oligonucleotide
uaauguaguuaaugagaug

SEQ ID NO: 1122452 - RNA, 19 nt, Artificial Sequence
  Description of Artificial Sequence: Synthetic oligonucleotide
uucugcacaugguuugucc

SEQ ID NO: 1122453 - RNA, 19 nt, Artificial Sequence
  Description of Artificial Sequence: Synthetic oligonucleotide
augaugguaguaacggugg

SEQ ID NO: 1122454 - RNA, 19 nt, Artificial Sequence
  Description of Artificial Sequence: Synthetic oligonucleotide
ugaggcaccaaguccagaa

SEQ ID NO: 1122455 - RNA, 19 nt, Artificial Sequence
  Description of Artificial Sequence: Synthetic oligonucleotide
augauacaggcauauaauu

SEQ ID NO: 1122456 - RNA, 19 nt, Artificial Sequence
  Description of Artificial Sequence: Synthetic oligonucleotide
uuuaauacaggguguuauu

SEQ ID NO: 1122457 - RNA, 19 nt, Artificial Sequence
  Description of Artificial Sequence: Synthetic oligonucleotide
cauccauaucucuuggaac

SEQ ID NO: 1122458 - RNA, 19 nt, Artificial Sequence
  Description of Artificial Sequence: Synthetic oligonucleotide
ccagaauuuaaauuaucag

SEQ ID NO: 1122459 - RNA, 19 nt, Artificial Sequence
  Description of Artificial Sequence: Synthetic oligonucleotide
uuauauauguaugguggaa

SEQ ID NO: 1122460 - RNA, 19 nt, Artificial Sequence
  Description of Artificial Sequence: Synthetic oligonucleotide
aauugcuacaaaagaggga

SEQ ID NO: 1122461 - RNA, 19 nt, Artificial Sequence
  Description of Artificial Sequence: Synthetic oligonucleotide
cuggccagaauuuaaauua

SEQ ID NO: 1122462 - RNA, 19 nt, Artificial Sequence
  Description of Artificial Sequence: Synthetic oligonucleotide
uagccuauggaaagugcug

SEQ ID NO: 1122463 - RNA, 19 nt, Artificial Sequence
  Description of Artificial Sequence: Synthetic oligonucleotide
acauaacagaagcugcaca

SEQ ID NO: 1122464 - RNA, 19 nt, Artificial Sequence
  Description of Artificial Sequence: Synthetic oligonucleotide
aagaguagccagaugcucu

SEQ ID NO: 1122465 - RNA, 19 nt, Artificial Sequence
  Description of Artificial Sequence: Synthetic oligonucleotide
guuaaugagauguucucua

SEQ ID NO: 1122466 - RNA, 19 nt, Artificial Sequence
  Description of Artificial Sequence: Synthetic oligonucleotide
aauaagccaccaauacuug

SEQ ID NO: 1122467 - RNA, 19 nt, Artificial Sequence
  Description of Artificial Sequence: Synthetic oligonucleotide
agguauuuguauacaacag

SEQ ID NO: 1122468 - RNA, 19 nt, Artificial Sequence
  Description of Artificial Sequence: Synthetic oligonucleotide
accccgaaaguauacugag

SEQ ID NO: 1122469 - RNA, 19 nt, Artificial Sequence
  Description of Artificial Sequence: Synthetic oligonucleotide
cuuggaaccuucauauuca

SEQ ID NO: 1122470 - RNA, 19 nt, Artificial Sequence
  Description of Artificial Sequence: Synthetic oligonucleotide
uuaaugagauguucucuau

SEQ ID NO: 1122471 - RNA, 19 nt, Artificial Sequence
  Description of Artificial Sequence: Synthetic oligonucleotide
ugauacagaguuguuccug

SEQ ID NO: 1122472 - RNA, 19 nt, Artificial Sequence
  Description of Artificial Sequence: Synthetic oligonucleotide
uauaaggagugacauucuu

SEQ ID NO: 1122473 - RNA, 19 nt, Artificial Sequence
  Description of Artificial Sequence: Synthetic oligonucleotide
ucaacaccaauaugauaca

SEQ ID NO: 1122474 - RNA, 19 nt, Artificial Sequence
  Description of Artificial Sequence: Synthetic oligonucleotide
acaggguguuauuuuaacu

SEQ ID NO: 1122475 - RNA, 19 nt, Artificial Sequence
  Description of Artificial Sequence: Synthetic oligonucleotide
aguuaaugagauguucucu

SEQ ID NO: 1122476 - RNA, 19 nt, Artificial Sequence
  Description of Artificial Sequence: Synthetic oligonucleotide
ucucaaguauuuaguuugu

SEQ ID NO: 1122477 - RNA, 19 nt, Artificial Sequence
  Description of Artificial Sequence: Synthetic oligonucleotide
ugguacauucacuagccua

SEQ ID NO: 1122478 - RNA, 19 nt, Artificial Sequence
  Description of Artificial Sequence: Synthetic oligonucleotide
ugucucaaguauuuaguuu

SEQ ID NO: 1122479 - RNA, 19 nt, Artificial Sequence
  Description of Artificial Sequence: Synthetic oligonucleotide
ucugcguucgcucggcgac

SEQ ID NO: 1122480 - RNA, 19 nt, Artificial Sequence
  Description of Artificial Sequence: Synthetic oligonucleotide
aacaccaggacgcgcggca

SEQ ID NO: 1122481 - RNA, 19 nt, Artificial Sequence
  Description of Artificial Sequence: Synthetic oligonucleotide
uuaauacaggguguuauuu

SEQ ID NO: 1122482 - RNA, 19 nt, Artificial Sequence
  Description of Artificial Sequence: Synthetic oligonucleotide
uaauacaggguguuauuuu

SEQ ID NO: 1122483 - RNA, 19 nt, Artificial Sequence
  Description of Artificial Sequence: Synthetic oligonucleotide
uguuagguauuuguauaca

SEQ ID NO: 1122484 - RNA, 19 nt, Artificial Sequence
  Description of Artificial Sequence: Synthetic oligonucleotide
caggaguggaggaaccacg

SEQ ID NO: 1122485 - RNA, 19 nt, Artificial Sequence
  Description of Artificial Sequence: Synthetic oligonucleotide
acuagccuauggaaagugc

SEQ ID NO: 1122486 - RNA, 19 nt, Artificial Sequence
  Description of Artificial Sequence: Synthetic oligonucleotide
aaggauaaagaaaccccga

SEQ ID NO: 1122487 - RNA, 19 nt, Artificial Sequence
  Description of Artificial Sequence: Synthetic oligonucleotide
accccauugagauaauaaa

SEQ ID NO: 1122488 - RNA, 19 nt, Artificial Sequence
  Description of Artificial Sequence: Synthetic oligonucleotide
cucggaacuggaguuauag

SEQ ID NO: 1122489 - RNA, 19 nt, Artificial Sequence
  Description of Artificial Sequence: Synthetic oligonucleotide
guuagguauuuguauacaa

SEQ ID NO: 1122490 - RNA, 19 nt, Artificial Sequence
  Description of Artificial Sequence: Synthetic oligonucleotide
auaaggagugacauucuug

SEQ ID NO: 1122491 - RNA, 19 nt, Artificial Sequence
  Description of Artificial Sequence: Synthetic oligonucleotide
acuaaauaggagagcaugu

SEQ ID NO: 1122492 - RNA, 19 nt, Artificial Sequence
  Description of Artificial Sequence: Synthetic oligonucleotide
auuaucagacuaauccaug

SEQ ID NO: 1122493 - RNA, 19 nt, Artificial Sequence
  Description of Artificial Sequence: Synthetic oligonucleotide
auaagccaccaauacuugu

SEQ ID NO: 1122494 - RNA, 19 nt, Artificial Sequence
  Description of Artificial Sequence: Synthetic oligonucleotide
augguggaaauacuguaaa

SEQ ID NO: 1122495 - RNA, 19 nt, Artificial Sequence
  Description of Artificial Sequence: Synthetic oligonucleotide
uccaguuacugaagagaug

SEQ ID NO: 1122496 - RNA, 19 nt, Artificial Sequence
  Description of Artificial Sequence: Synthetic oligonucleotide
auguaugguggaaauacug

SEQ ID NO: 1122497 - RNA, 19 nt, Artificial Sequence
  Description of Artificial Sequence: Synthetic oligonucleotide
gaagaucgcucaguggugc

SEQ ID NO: 1122498 - RNA, 19 nt, Artificial Sequence
  Description of Artificial Sequence: Synthetic oligonucleotide
acaaggaauaaggcuagug

SEQ ID NO: 1122499 - RNA, 19 nt, Artificial Sequence
  Description of Artificial Sequence: Synthetic oligonucleotide
agggaggugcaacaccuag

SEQ ID NO: 1122500 - RNA, 19 nt, Artificial Sequence
  Description of Artificial Sequence: Synthetic oligonucleotide
cagaaugaggcaccaaguc

SEQ ID NO: 1122501 - RNA, 19 nt, Artificial Sequence
  Description of Artificial Sequence: Synthetic oligonucleotide
aguaacgguggugguaaac

SEQ ID NO: 1122502 - RNA, 19 nt, Artificial Sequence
  Description of Artificial Sequence: Synthetic oligonucleotide
uccaacuaaauaggagagc

SEQ ID NO: 1122503 - RNA, 19 nt, Artificial Sequence
  Description of Artificial Sequence: Synthetic oligonucleotide
guacuuacuuuuagaaccc

SEQ ID NO: 1122504 - RNA, 19 nt, Artificial Sequence
  Description of Artificial Sequence: Synthetic oligonucleotide
aaauggugugauucucaaa

SEQ ID NO: 1122505 - RNA, 19 nt, Artificial Sequence
  Description of Artificial Sequence: Synthetic oligonucleotide
gcagaauagaaagaagagc

SEQ ID NO: 1122506 - RNA, 19 nt, Artificial Sequence
  Description of Artificial Sequence: Synthetic oligonucleotide
ccauugagauaauaaagac

SEQ ID NO: 1122507 - RNA, 19 nt, Artificial Sequence
  Description of Artificial Sequence: Synthetic oligonucleotide
caugguuuguccuucaggu

SEQ ID NO: 1122508 - RNA, 19 nt, Artificial Sequence
  Description of Artificial Sequence: Synthetic oligonucleotide
uacugcuuucucuguuagg

SEQ ID NO: 1122509 - RNA, 19 nt, Artificial Sequence
  Description of Artificial Sequence: Synthetic oligonucleotide
agcugcacauaagaaaaug

SEQ ID NO: 1122510 - RNA, 19 nt, Artificial Sequence
  Description of Artificial Sequence: Synthetic oligonucleotide
cuagaaaagugccaauaaa

SEQ ID NO: 1122511 - RNA, 19 nt, Artificial Sequence
  Description of Artificial Sequence: Synthetic oligonucleotide
guauuuaguuuguggucug

SEQ ID NO: 1122512 - RNA, 19 nt, Artificial Sequence
  Description of Artificial Sequence: Synthetic oligonucleotide
ucgcaguuuccuaccaaca

SEQ ID NO: 1122513 - RNA, 19 nt, Artificial Sequence
  Description of Artificial Sequence: Synthetic oligonucleotide
cacuauaacaaaauauuau

SEQ ID NO: 1122514 - RNA, 19 nt, Artificial Sequence
  Description of Artificial Sequence: Synthetic oligonucleotide
aguggaggaaccacgcguc

SEQ ID NO: 1122515 - RNA, 19 nt, Artificial Sequence
  Description of Artificial Sequence: Synthetic oligonucleotide
cauucacuagccuauggaa

SEQ ID NO: 1122516 - RNA, 19 nt, Artificial Sequence
  Description of Artificial Sequence: Synthetic oligonucleotide
guguuauuuuaacugucuc

SEQ ID NO: 1122517 - RNA, 19 nt, Artificial Sequence
  Description of Artificial Sequence: Synthetic oligonucleotide
ccccauugagauaauaaag

SEQ ID NO: 1122518 - RNA, 19 nt, Artificial Sequence
  Description of Artificial Sequence: Synthetic oligonucleotide
acgcucuaccuguugugac

SEQ ID NO: 1122519 - RNA, 19 nt, Artificial Sequence
  Description of Artificial Sequence: Synthetic oligonucleotide
augacgcucuaccuguugu

SEQ ID NO: 1122520 - RNA, 19 nt, Artificial Sequence
  Description of Artificial Sequence: Synthetic oligonucleotide
uauauguaugguggaaaua

SEQ ID NO: 1122521 - RNA, 19 nt, Artificial Sequence
  Description of Artificial Sequence: Synthetic oligonucleotide
ugguggaaauacuguaaaa

SEQ ID NO: 1122522 - RNA, 19 nt, Artificial Sequence
  Description of Artificial Sequence: Synthetic oligonucleotide
acacuauaacaaaauauua

SEQ ID NO: 1122523 - RNA, 19 nt, Artificial Sequence
  Description of Artificial Sequence: Synthetic oligonucleotide
gcaguuuccuaccaacacc

SEQ ID NO: 1122524 - RNA, 19 nt, Artificial Sequence
  Description of Artificial Sequence: Synthetic oligonucleotide
uaacgguggugguaaacaa

SEQ ID NO: 1122525 - RNA, 19 nt, Artificial Sequence
  Description of Artificial Sequence: Synthetic oligonucleotide
gaagaguagccagaugcuc

SEQ ID NO: 1122526 - RNA, 19 nt, Artificial Sequence
  Description of Artificial Sequence: Synthetic oligonucleotide
ucggccuuucgccauggcu

SEQ ID NO: 1122527 - RNA, 19 nt, Artificial Sequence
  Description of Artificial Sequence: Synthetic oligonucleotide
guaacgguggugguaaaca

SEQ ID NO: 1122528 - RNA, 19 nt, Artificial Sequence
  Description of Artificial Sequence: Synthetic oligonucleotide
acaccuagaaaagugccaa

SEQ ID NO: 1122529 - RNA, 19 nt, Artificial Sequence
  Description of Artificial Sequence: Synthetic oligonucleotide
guaugguggaaauacugua

SEQ ID NO: 1122530 - RNA, 19 nt, Artificial Sequence
  Description of Artificial Sequence: Synthetic oligonucleotide
ugacgcucuaccuguugug

SEQ ID NO: 1122531 - RNA, 19 nt, Artificial Sequence
  Description of Artificial Sequence: Synthetic oligonucleotide
ggauagauacaccugcuaa

SEQ ID NO: 1122532 - RNA, 19 nt, Artificial Sequence
  Description of Artificial Sequence: Synthetic oligonucleotide
uacuuuaauacaggguguu

SEQ ID NO: 1122533 - RNA, 19 nt, Artificial Sequence
  Description of Artificial Sequence: Synthetic oligonucleotide
cccauugagauaauaaaga

SEQ ID NO: 1122534 - RNA, 19 nt, Artificial Sequence
  Description of Artificial Sequence: Synthetic oligonucleotide
guaguuaaugagauguucu

SEQ ID NO: 1122535 - RNA, 19 nt, Artificial Sequence
  Description of Artificial Sequence: Synthetic oligonucleotide
agagggaggugcaacaccu

SEQ ID NO: 1122536 - RNA, 19 nt, Artificial Sequence
  Description of Artificial Sequence: Synthetic oligonucleotide
ccuuaauugcuacaaaaga

SEQ ID NO: 1122537 - RNA, 19 nt, Artificial Sequence
  Description of Artificial Sequence: Synthetic oligonucleotide
accaguauaaggagugaca

SEQ ID NO: 1122538 - RNA, 19 nt, Artificial Sequence
  Description of Artificial Sequence: Synthetic oligonucleotide
guaguaacgguggugguaa

SEQ ID NO: 1122539 - RNA, 19 nt, Artificial Sequence
  Description of Artificial Sequence: Synthetic oligonucleotide
guagaaauggugugauucu

SEQ ID NO: 1122540 - RNA, 19 nt, Artificial Sequence
  Description of Artificial Sequence: Synthetic oligonucleotide
cacgcguccccguugcccg

SEQ ID NO: 1122541 - RNA, 19 nt, Artificial Sequence
  Description of Artificial Sequence: Synthetic oligonucleotide
uuccccugcuguuguaagc

SEQ ID NO: 1122542 - RNA, 19 nt, Artificial Sequence
  Description of Artificial Sequence: Synthetic oligonucleotide
uccuagagcuuuggcauca

SEQ ID NO: 1122543 - RNA, 19 nt, Artificial Sequence
  Description of Artificial Sequence: Synthetic oligonucleotide
uuccuaccaacaccaggac

SEQ ID NO: 1122544 - RNA, 19 nt, Artificial Sequence
  Description of Artificial Sequence: Synthetic oligonucleotide
ugaugaugaugaugauggu

SEQ ID NO: 1122545 - RNA, 19 nt, Artificial Sequence
  Description of Artificial Sequence: Synthetic oligonucleotide
acuauacgcuucgaguacu

SEQ ID NO: 1122546 - RNA, 19 nt, Artificial Sequence
  Description of Artificial Sequence: Synthetic oligonucleotide
gccagaauuuaaauuauca

SEQ ID NO: 1122547 - RNA, 19 nt, Artificial Sequence
  Description of Artificial Sequence: Synthetic oligonucleotide
acuuacuuuuagaacccca

SEQ ID NO: 1122548 - RNA, 19 nt, Artificial Sequence
  Description of Artificial Sequence: Synthetic oligonucleotide
aggucgagugcaacgcccc

SEQ ID NO: 1122549 - RNA, 19 nt, Artificial Sequence
  Description of Artificial Sequence: Synthetic oligonucleotide
gaggucgagugcaacgccc

SEQ ID NO: 1122550 - RNA, 19 nt, Artificial Sequence
  Description of Artificial Sequence: Synthetic oligonucleotide
uccccugcuguuguaagcu

SEQ ID NO: 1122551 - RNA, 19 nt, Artificial Sequence
  Description of Artificial Sequence: Synthetic oligonucleotide
uccauaucucuuggaaccu

SEQ ID NO: 1122552 - RNA, 19 nt, Artificial Sequence
  Description of Artificial Sequence: Synthetic oligonucleotide
gcaacaccuagaaaagugc

SEQ ID NO: 1122553 - RNA, 19 nt, Artificial Sequence
  Description of Artificial Sequence: Synthetic oligonucleotide
aagaaaccccgaaaguaua

SEQ ID NO: 1122554 - RNA, 19 nt, Artificial Sequence
  Description of Artificial Sequence: Synthetic oligonucleotide
agaucgcucaguggugccg

SEQ ID NO: 1122555 - RNA, 19 nt, Artificial Sequence
  Description of Artificial Sequence: Synthetic oligonucleotide
gaguggaggaaccacgcgu

SEQ ID NO: 1122556 - RNA, 19 nt, Artificial Sequence
  Description of Artificial Sequence: Synthetic oligonucleotide
ccaacuaaauaggagagca

SEQ ID NO: 1122557 - RNA, 19 nt, Artificial Sequence
  Description of Artificial Sequence: Synthetic oligonucleotide
cuuccccugcuguuguaag

SEQ ID NO: 1122558 - RNA, 19 nt, Artificial Sequence
  Description of Artificial Sequence: Synthetic oligonucleotide
cauuuaucacaggagaugu

SEQ ID NO: 1122559 - RNA, 19 nt, Artificial Sequence
  Description of Artificial Sequence: Synthetic oligonucleotide
cuuacuuuuagaaccccau

SEQ ID NO: 1122560 - RNA, 19 nt, Artificial Sequence
  Description of Artificial Sequence: Synthetic oligonucleotide
guagccagaugcucuuaac

SEQ ID NO: 1122561 - RNA, 19 nt, Artificial Sequence
  Description of Artificial Sequence: Synthetic oligonucleotide
cuagccuauggaaagugcu

SEQ ID NO: 1122562 - RNA, 19 nt, Artificial Sequence
  Description of Artificial Sequence: Synthetic oligonucleotide
auggcacauuuaucacagg

SEQ ID NO: 1122563 - RNA, 19 nt, Artificial Sequence
  Description of Artificial Sequence: Synthetic oligonucleotide
cuuucgccauggcugcugc

SEQ ID NO: 1122564 - RNA, 19 nt, Artificial Sequence
  Description of Artificial Sequence: Synthetic oligonucleotide
gagaaauauggaaccugga

SEQ ID NO: 1122565 - RNA, 19 nt, Artificial Sequence
  Description of Artificial Sequence: Synthetic oligonucleotide
agaguagccagaugcucuu

SEQ ID NO: 1122566 - RNA, 19 nt, Artificial Sequence
  Description of Artificial Sequence: Synthetic oligonucleotide
uucgcucggcgacucggcc

SEQ ID NO: 1122567 - RNA, 19 nt, Artificial Sequence
  Description of Artificial Sequence: Synthetic oligonucleotide
ggaaauacuguaaaaccua

SEQ ID NO: 1122568 - RNA, 19 nt, Artificial Sequence
  Description of Artificial Sequence: Synthetic oligonucleotide
acgguggugguaaacaaaa

SEQ ID NO: 1122569 - RNA, 19 nt, Artificial Sequence
  Description of Artificial Sequence: Synthetic oligonucleotide
ucggcgacucggccuuucg

SEQ ID NO: 1122570 - RNA, 19 nt, Artificial Sequence
  Description of Artificial Sequence: Synthetic oligonucleotide
gaucgcucaguggugccgc

SEQ ID NO: 1122571 - RNA, 19 nt, Artificial Sequence
  Description of Artificial Sequence: Synthetic oligonucleotide
gcuguuguaagcugauaca

SEQ ID NO: 1122572 - RNA, 19 nt, Artificial Sequence
  Description of Artificial Sequence: Synthetic oligonucleotide
ccugcuaauccugagauga

SEQ ID NO: 1122573 - RNA, 19 nt, Artificial Sequence
  Description of Artificial Sequence: Synthetic oligonucleotide
acuaagcuguggaaaauuu

SEQ ID NO: 1122574 - RNA, 19 nt, Artificial Sequence
  Description of Artificial Sequence: Synthetic oligonucleotide
uuagaaccccauugagaua

SEQ ID NO: 1122575 - RNA, 19 nt, Artificial Sequence
  Description of Artificial Sequence: Synthetic oligonucleotide
uggaggaaccacgcguccc

SEQ ID NO: 1122576 - RNA, 19 nt, Artificial Sequence
  Description of Artificial Sequence: Synthetic oligonucleotide
aacaaggaauaaggcuagu

SEQ ID NO: 1122577 - RNA, 19 nt, Artificial Sequence
  Description of Artificial Sequence: Synthetic oligonucleotide
accugcuaauccugagaug

SEQ ID NO: 1122578 - RNA, 19 nt, Artificial Sequence
  Description of Artificial Sequence: Synthetic oligonucleotide
ggugguaaacaaaacccca

SEQ ID NO: 1122579 - RNA, 19 nt, Artificial Sequence
  Description of Artificial Sequence: Synthetic oligonucleotide
ggcgacucggccuuucgcc

SEQ ID NO: 1122580 - RNA, 19 nt, Artificial Sequence
  Description of Artificial Sequence: Synthetic oligonucleotide
ucacuagccuauggaaagu

SEQ ID NO: 1122581 - RNA, 19 nt, Artificial Sequence
  Description of Artificial Sequence: Synthetic oligonucleotide
gcuaauccugagaugauga

SEQ ID NO: 1122582 - RNA, 19 nt, Artificial Sequence
  Description of Artificial Sequence: Synthetic oligonucleotide
cuaccaacaccaggacgcg

SEQ ID NO: 1122583 - RNA, 19 nt, Artificial Sequence
  Description of Artificial Sequence: Synthetic oligonucleotide
cuaaauaggagagcaugua

SEQ ID NO: 1122584 - RNA, 19 nt, Artificial Sequence
  Description of Artificial Sequence: Synthetic oligonucleotide
caccaaguccagaacacaa

SEQ ID NO: 1122585 - RNA, 19 nt, Artificial Sequence
  Description of Artificial Sequence: Synthetic oligonucleotide
cacuagccuauggaaagug

SEQ ID NO: 1122586 - RNA, 19 nt, Artificial Sequence
  Description of Artificial Sequence: Synthetic oligonucleotide
ggaguggaggaaccacgcg

SEQ ID NO: 1122587 - RNA, 19 nt, Artificial Sequence
  Description of Artificial Sequence: Synthetic oligonucleotide
gcgaagaucgcucaguggu

SEQ ID NO: 1122588 - RNA, 19 nt, Artificial Sequence
  Description of Artificial Sequence: Synthetic oligonucleotide
ggaggaaccacgcgucccc

SEQ ID NO: 1122589 - RNA, 19 nt, Artificial Sequence
  Description of Artificial Sequence: Synthetic oligonucleotide
ucacuaagcuguggaaaau

SEQ ID NO: 1122590 - RNA, 19 nt, Artificial Sequence
  Description of Artificial Sequence: Synthetic oligonucleotide
agaugaugaugaugaugau

SEQ ID NO: 1122591 - RNA, 19 nt, Artificial Sequence
  Description of Artificial Sequence: Synthetic oligonucleotide
gccgaggucgagugcaacg

SEQ ID NO: 1122592 - RNA, 19 nt, Artificial Sequence
  Description of Artificial Sequence: Synthetic oligonucleotide
gacgcucuaccuguuguga

SEQ ID NO: 1122593 - RNA, 19 nt, Artificial Sequence
  Description of Artificial Sequence: Synthetic oligonucleotide
gaaccacgcguccccguug

SEQ ID NO: 1122594 - RNA, 19 nt, Artificial Sequence
  Description of Artificial Sequence: Synthetic oligonucleotide
caccaauaugauacaggca

SEQ ID NO: 1122595 - RNA, 19 nt, Artificial Sequence
  Description of Artificial Sequence: Synthetic oligonucleotide
cucuguuagguauuuguau

SEQ ID NO: 1122596 - RNA, 19 nt, Artificial Sequence
  Description of Artificial Sequence: Synthetic oligonucleotide
aggcuaguggaaaaggaua

SEQ ID NO: 1122597 - RNA, 19 nt, Artificial Sequence
  Description of Artificial Sequence: Synthetic oligonucleotide
cccgaaaguauacugagaa

SEQ ID NO: 1122598 - RNA, 19 nt, Artificial Sequence
  Description of Artificial Sequence: Synthetic oligonucleotide
gauccccucggaacuggag

SEQ ID NO: 1122599 - RNA, 19 nt, Artificial Sequence
  Description of Artificial Sequence: Synthetic oligonucleotide
uccccucggaacuggaguu

SEQ ID NO: 1122600 - RNA, 19 nt, Artificial Sequence
  Description of Artificial Sequence: Synthetic oligonucleotide
aacucauccuugguacauu

SEQ ID NO: 1122601 - RNA, 19 nt, Artificial Sequence
  Description of Artificial Sequence: Synthetic oligonucleotide
accuggaauagcaaauguu

SEQ ID NO: 1122602 - RNA, 19 nt, Artificial Sequence
  Description of Artificial Sequence: Synthetic oligonucleotide
guggaggaaccacgcgucc

SEQ ID NO: 1122603 - RNA, 19 nt, Artificial Sequence
  Description of Artificial Sequence: Synthetic oligonucleotide
acuuuaauacaggguguua

SEQ ID NO: 1122604 - RNA, 19 nt, Artificial Sequence
  Description of Artificial Sequence: Synthetic oligonucleotide
gcaaaauaagccaccaaua

SEQ ID NO: 1122605 - RNA, 19 nt, Artificial Sequence
  Description of Artificial Sequence: Synthetic oligonucleotide
guacauucacuagccuaug

SEQ ID NO: 1122606 - RNA, 19 nt, Artificial Sequence
  Description of Artificial Sequence: Synthetic oligonucleotide
cagacuaauccaugauaaa

SEQ ID NO: 1122607 - RNA, 19 nt, Artificial Sequence
  Description of Artificial Sequence: Synthetic oligonucleotide
uauacgcuucgaguacuua

SEQ ID NO: 1122608 - RNA, 19 nt, Artificial Sequence
  Description of Artificial Sequence: Synthetic oligonucleotide
gaaaccccgaaaguauacu

SEQ ID NO: 1122609 - RNA, 19 nt, Artificial Sequence
  Description of Artificial Sequence: Synthetic oligonucleotide
auacaggguguuauuuuaa

SEQ ID NO: 1122610 - RNA, 19 nt, Artificial Sequence
  Description of Artificial Sequence: Synthetic oligonucleotide
uaccuguugugaccauuuu

SEQ ID NO: 1122611 - RNA, 19 nt, Artificial Sequence
  Description of Artificial Sequence: Synthetic oligonucleotide
ccuagaaaagugccaauaa

SEQ ID NO: 1122612 - RNA, 19 nt, Artificial Sequence
  Description of Artificial Sequence: Synthetic oligonucleotide
cagauccccucggaacugg

SEQ ID NO: 1122613 - RNA, 19 nt, Artificial Sequence
  Description of Artificial Sequence: Synthetic oligonucleotide
gauuucacuguaccuuauu

SEQ ID NO: 1122614 - RNA, 19 nt, Artificial Sequence
  Description of Artificial Sequence: Synthetic oligonucleotide
guccuuauauuuggagaga

SEQ ID NO: 1122615 - RNA, 19 nt, Artificial Sequence
  Description of Artificial Sequence: Synthetic oligonucleotide
acaccaggacgcgcggcac

SEQ ID NO: 1122616 - RNA, 19 nt, Artificial Sequence
  Description of Artificial Sequence: Synthetic oligonucleotide
cauucuugcugacccagcu

SEQ ID NO: 1122617 - RNA, 19 nt, Artificial Sequence
  Description of Artificial Sequence: Synthetic oligonucleotide
cuucgaguacuuacuuuua

SEQ ID NO: 1122618 - RNA, 19 nt, Artificial Sequence
  Description of Artificial Sequence: Synthetic oligonucleotide
acgcuucgaguacuuacuu

SEQ ID NO: 1122619 - RNA, 19 nt, Artificial Sequence
  Description of Artificial Sequence: Synthetic oligonucleotide
gguacauucacuagccuau

SEQ ID NO: 1122620 - RNA, 19 nt, Artificial Sequence
  Description of Artificial Sequence: Synthetic oligonucleotide
gcuucgaguacuuacuuuu

SEQ ID NO: 1122621 - RNA, 19 nt, Artificial Sequence
  Description of Artificial Sequence: Synthetic oligonucleotide
guccccguugcccggugcc

SEQ ID NO: 1122622 - RNA, 19 nt, Artificial Sequence
  Description of Artificial Sequence: Synthetic oligonucleotide
cuaagcuguggaaaauuuu

SEQ ID NO: 1122623 - RNA, 19 nt, Artificial Sequence
  Description of Artificial Sequence: Synthetic oligonucleotide
ggccuuucgccauggcugc

SEQ ID NO: 1122624 - RNA, 19 nt, Artificial Sequence
  Description of Artificial Sequence: Synthetic oligonucleotide
auguaguuaaugagauguu

SEQ ID NO: 1122625 - RNA, 19 nt, Artificial Sequence
  Description of Artificial Sequence: Synthetic oligonucleotide
gaggugcaacaccuagaaa

SEQ ID NO: 1122626 - RNA, 19 nt, Artificial Sequence
  Description of Artificial Sequence: Synthetic oligonucleotide
cggccuuucgccauggcug

SEQ ID NO: 1122627 - RNA, 19 nt, Artificial Sequence
  Description of Artificial Sequence: Synthetic oligonucleotide
ugcccggugccccgccgag

SEQ ID NO: 1122628 - RNA, 19 nt, Artificial Sequence
  Description of Artificial Sequence: Synthetic oligonucleotide
uugcccggugccccgccga

SEQ ID NO: 1122629 - RNA, 19 nt, Artificial Sequence
  Description of Artificial Sequence: Synthetic oligonucleotide
guugcccggugccccgccg

SEQ ID NO: 1122630 - RNA, 19 nt, Artificial Sequence
  Description of Artificial Sequence: Synthetic oligonucleotide
accuucauauucacucuuu

SEQ ID NO: 1122631 - RNA, 19 nt, Artificial Sequence
  Description of Artificial Sequence: Synthetic oligonucleotide
caccugcuaauccugagau

SEQ ID NO: 1122632 - RNA, 19 nt, Artificial Sequence
  Description of Artificial Sequence: Synthetic oligonucleotide
gucugcguucgcucggcga

SEQ ID NO: 1122633 - RNA, 19 nt, Artificial Sequence
  Description of Artificial Sequence: Synthetic oligonucleotide
aggaaccacgcguccccgu

SEQ ID NO: 1122634 - RNA, 19 nt, Artificial Sequence
  Description of Artificial Sequence: Synthetic oligonucleotide
cugaauuccucucgcaguu

SEQ ID NO: 1122635 - RNA, 19 nt, Artificial Sequence
  Description of Artificial Sequence: Synthetic oligonucleotide
ccucucgcaguuuccuacc

SEQ ID NO: 1122636 - RNA, 19 nt, Artificial Sequence
  Description of Artificial Sequence: Synthetic oligonucleotide
cuaauccugagaugaugau

SEQ ID NO: 1122637 - RNA, 19 nt, Artificial Sequence
  Description of Artificial Sequence: Synthetic oligonucleotide
uaguaacgguggugguaaa

SEQ ID NO: 1122638 - RNA, 19 nt, Artificial Sequence
  Description of Artificial Sequence: Synthetic oligonucleotide
cuguugugaccauuuuacu

SEQ ID NO: 1122639 - RNA, 19 nt, Artificial Sequence
  Description of Artificial Sequence: Synthetic oligonucleotide
cgcucuaccuguugugacc

SEQ ID NO: 1122640 - RNA, 19 nt, Artificial Sequence
  Description of Artificial Sequence: Synthetic oligonucleotide
guauaaggagugacauucu

SEQ ID NO: 1122641 - RNA, 19 nt, Artificial Sequence
  Description of Artificial Sequence: Synthetic oligonucleotide
ccaauuagguagaaauggu

SEQ ID NO: 1122642 - RNA, 19 nt, Artificial Sequence
  Description of Artificial Sequence: Synthetic oligonucleotide
cgaaaguauacugagaaau

SEQ ID NO: 1122643 - RNA, 19 nt, Artificial Sequence
  Description of Artificial Sequence: Synthetic oligonucleotide
guucgcucggcgacucggc

SEQ ID NO: 1122644 - RNA, 19 nt, Artificial Sequence
  Description of Artificial Sequence: Synthetic oligonucleotide
caacuaaauaggagagcau

SEQ ID NO: 1122645 - RNA, 19 nt, Artificial Sequence
  Description of Artificial Sequence: Synthetic oligonucleotide
ccgaggucgagugcaacgc

SEQ ID NO: 1122646 - RNA, 19 nt, Artificial Sequence
  Description of Artificial Sequence: Synthetic oligonucleotide
cucucgcaguuuccuacca

SEQ ID NO: 1122647 - RNA, 19 nt, Artificial Sequence
  Description of Artificial Sequence: Synthetic oligonucleotide
gaaccccauugagauaaua

SEQ ID NO: 1122648 - RNA, 19 nt, Artificial Sequence
  Description of Artificial Sequence: Synthetic oligonucleotide
ggccagaauuuaaauuauc

SEQ ID NO: 1122649 - RNA, 19 nt, Artificial Sequence
  Description of Artificial Sequence: Synthetic oligonucleotide
cugccuuaauugcuacaaa

SEQ ID NO: 1122650 - RNA, 19 nt, Artificial Sequence
  Description of Artificial Sequence: Synthetic oligonucleotide
ucgcucaguggugccgcgc

SEQ ID NO: 1122651 - RNA, 19 nt, Artificial Sequence
  Description of Artificial Sequence: Synthetic oligonucleotide
ggaaccuggaauagcaaau

SEQ ID NO: 1122652 - RNA, 19 nt, Artificial Sequence
  Description of Artificial Sequence: Synthetic oligonucleotide
uccccguugcccggugccc

SEQ ID NO: 1122653 - RNA, 19 nt, Artificial Sequence
  Description of Artificial Sequence: Synthetic oligonucleotide
ccugccuuaauugcuacaa

SEQ ID NO: 1122654 - RNA, 19 nt, Artificial Sequence
  Description of Artificial Sequence: Synthetic oligonucleotide
gccuauggaaagugcuguc

SEQ ID NO: 1122655 - RNA, 19 nt, Artificial Sequence
  Description of Artificial Sequence: Synthetic oligonucleotide
ugcguucgcucggcgacuc

SEQ ID NO: 1122656 - RNA, 19 nt, Artificial Sequence
  Description of Artificial Sequence: Synthetic oligonucleotide
acgcguccccguugcccgg

SEQ ID NO: 1122657 - RNA, 19 nt, Artificial Sequence
  Description of Artificial Sequence: Synthetic oligonucleotide
cgcgaagaucgcucagugg

SEQ ID NO: 1122658 - RNA, 19 nt, Artificial Sequence
  Description of Artificial Sequence: Synthetic oligonucleotide
ccgcgaagaucgcucagug

SEQ ID NO: 1122659 - RNA, 19 nt, Artificial Sequence
  Description of Artificial Sequence: Synthetic oligonucleotide
ugccccgccgaggucgagu

SEQ ID NO: 1122660 - RNA, 19 nt, Artificial Sequence
  Description of Artificial Sequence: Synthetic oligonucleotide
ggcauauaauucucauuuu

SEQ ID NO: 1122661 - RNA, 19 nt, Artificial Sequence
  Description of Artificial Sequence: Synthetic oligonucleotide
ccagaugcucuuaacugcu

SEQ ID NO: 1122662 - RNA, 19 nt, Artificial Sequence
  Description of Artificial Sequence: Synthetic oligonucleotide
ccgaaaguauacugagaaa

SEQ ID NO: 1122663 - RNA, 19 nt, Artificial Sequence
  Description of Artificial Sequence: Synthetic oligonucleotide
gcgacucggccuuucgcca

SEQ ID NO: 1122664 - RNA, 19 nt, Artificial Sequence
  Description of Artificial Sequence: Synthetic oligonucleotide
ccccgucugcguucgcucg

SEQ ID NO: 1122665 - RNA, 19 nt, Artificial Sequence
  Description of Artificial Sequence: Synthetic oligonucleotide
agauccccucggaacugga

SEQ ID NO: 1122666 - RNA, 19 nt, Artificial Sequence
  Description of Artificial Sequence: Synthetic oligonucleotide
gcaccaaguccagaacaca

SEQ ID NO: 1122667 - RNA, 19 nt, Artificial Sequence
  Description of Artificial Sequence: Synthetic oligonucleotide
cuauacgcuucgaguacuu

SEQ ID NO: 1122668 - RNA, 19 nt, Artificial Sequence
  Description of Artificial Sequence: Synthetic oligonucleotide
ggccgcgaagaucgcucag

SEQ ID NO: 1122669 - RNA, 19 nt, Artificial Sequence
  Description of Artificial Sequence: Synthetic oligonucleotide
cgaggucgagugcaacgcc

SEQ ID NO: 1122670 - RNA, 19 nt, Artificial Sequence
  Description of Artificial Sequence: Synthetic oligonucleotide
cccgucugcguucgcucgg

SEQ ID NO: 1122671 - RNA, 19 nt, Artificial Sequence
  Description of Artificial Sequence: Synthetic oligonucleotide
gaguagccagaugcucuua

SEQ ID NO: 1122672 - RNA, 19 nt, Artificial Sequence
  Description of Artificial Sequence: Synthetic oligonucleotide
cguucgcucggcgacucgg

SEQ ID NO: 1122673 - RNA, 19 nt, Artificial Sequence
  Description of Artificial Sequence: Synthetic oligonucleotide
ggggccgcgaagaucgcuc

SEQ ID NO: 1122674 - RNA, 19 nt, Artificial Sequence
  Description of Artificial Sequence: Synthetic oligonucleotide
caguuacugaagagaugau

SEQ ID NO: 1122675 - RNA, 19 nt, Artificial Sequence
  Description of Artificial Sequence: Synthetic oligonucleotide
gagggaggugcaacaccua

SEQ ID NO: 1122676 - RNA, 19 nt, Artificial Sequence
  Description of Artificial Sequence: Synthetic oligonucleotide
cugcuaauccugagaugau

SEQ ID NO: 1122677 - RNA, 19 nt, Artificial Sequence
  Description of Artificial Sequence: Synthetic oligonucleotide
ccccgaaaguauacugaga

SEQ ID NO: 1122678 - RNA, 19 nt, Artificial Sequence
  Description of Artificial Sequence: Synthetic oligonucleotide
caccuagaaaagugccaau

SEQ ID NO: 1122679 - RNA, 19 nt, Artificial Sequence
  Description of Artificial Sequence: Synthetic oligonucleotide
agaaccccauugagauaau

SEQ ID NO: 1122680 - RNA, 19 nt, Artificial Sequence
  Description of Artificial Sequence: Synthetic oligonucleotide
ccuauggaaagugcugucu

SEQ ID NO: 1122681 - RNA, 19 nt, Artificial Sequence
  Description of Artificial Sequence: Synthetic oligonucleotide
ccccuuuugucucaaguau

SEQ ID NO: 1122682 - RNA, 19 nt, Artificial Sequence
  Description of Artificial Sequence: Synthetic oligonucleotide
aggacgcgcggcacagcca

SEQ ID NO: 1122683 - RNA, 19 nt, Artificial Sequence
  Description of Artificial Sequence: Synthetic oligonucleotide
acgcgcggcacagccacuu

SEQ ID NO: 1122684 - RNA, 19 nt, Artificial Sequence
  Description of Artificial Sequence: Synthetic oligonucleotide
gggccgcgaagaucgcuca

SEQ ID NO: 1122685 - RNA, 19 nt, Artificial Sequence
  Description of Artificial Sequence: Synthetic oligonucleotide
cccguugcccggugccccg

SEQ ID NO: 1122686 - RNA, 19 nt, Artificial Sequence
  Description of Artificial Sequence: Synthetic oligonucleotide
cucggcgacucggccuuuc

SEQ ID NO: 1122687 - RNA, 19 nt, Artificial Sequence
  Description of Artificial Sequence: Synthetic oligonucleotide
cggugccccgccgaggucg

SEQ ID NO: 1122688 - RNA, 19 nt, Artificial Sequence
  Description of Artificial Sequence: Synthetic oligonucleotide
gcguucgcucggcgacucg

SEQ ID NO: 1122689 - RNA, 19 nt, Artificial Sequence
  Description of Artificial Sequence: Synthetic oligonucleotide
cuaugacgcucuaccuguu

SEQ ID NO: 1122690 - RNA, 19 nt, Artificial Sequence
  Description of Artificial Sequence: Synthetic oligonucleotide
ccggcgcgaccccuggccc

SEQ ID NO: 1122691 - RNA, 19 nt, Artificial Sequence
  Description of Artificial Sequence: Synthetic oligonucleotide
cccgccgaggucgagugca

SEQ ID NO: 1122692 - RNA, 19 nt, Artificial Sequence
  Description of Artificial Sequence: Synthetic oligonucleotide
cagccacuuccggcgcgac

SEQ ID NO: 1122693 - RNA, 19 nt, Artificial Sequence
  Description of Artificial Sequence: Synthetic oligonucleotide
ccgucugcguucgcucggc

SEQ ID NO: 1122694 - RNA, 19 nt, Artificial Sequence
  Description of Artificial Sequence: Synthetic oligonucleotide
ccacuuccggcgcgacccc

SEQ ID NO: 1122695 - RNA, 19 nt, Artificial Sequence
  Description of Artificial Sequence: Synthetic oligonucleotide
cggcgacucggccuuucgc

SEQ ID NO: 1122696 - RNA, 19 nt, Artificial Sequence
  Description of Artificial Sequence: Synthetic oligonucleotide
gccgcgaagaucgcucagu

SEQ ID NO: 1122697 - RNA, 19 nt, Artificial Sequence
  Description of Artificial Sequence: Synthetic oligonucleotide
cucuaccuguugugaccau

SEQ ID NO: 1122698 - RNA, 19 nt, Artificial Sequence
  Description of Artificial Sequence: Synthetic oligonucleotide
cggcgcgaccccuggcccg

SEQ ID NO: 1122699 - RNA, 19 nt, Artificial Sequence
  Description of Artificial Sequence: Synthetic oligonucleotide
gcccggugccccgccgagg

SEQ ID NO: 1122700 - RNA, 19 nt, Artificial Sequence
  Description of Artificial Sequence: Synthetic oligonucleotide
cguccccguugcccggugc

SEQ ID NO: 1122701 - RNA, 19 nt, Artificial Sequence
  Description of Artificial Sequence: Synthetic oligonucleotide
cugcguucgcucggcgacu

SEQ ID NO: 1122702 - RNA, 19 nt, Artificial Sequence
  Description of Artificial Sequence: Synthetic oligonucleotide
gcguccccguugcccggug

SEQ ID NO: 1122703 - RNA, 19 nt, Artificial Sequence
  Description of Artificial Sequence: Synthetic oligonucleotide
cguugcccggugccccgcc

SEQ ID NO: 1122704 - RNA, 19 nt, Artificial Sequence
  Description of Artificial Sequence: Synthetic oligonucleotide
ggugccccgccgaggucga

SEQ ID NO: 1122705 - RNA, 19 nt, Artificial Sequence
  Description of Artificial Sequence: Synthetic oligonucleotide
ccccgccgaggucgagugc

SEQ ID NO: 1122706 - RNA, 19 nt, Artificial Sequence
  Description of Artificial Sequence: Synthetic oligonucleotide
gugccccgccgaggucgag

SEQ ID NO: 1122707 - RNA, 19 nt, Artificial Sequence
  Description of Artificial Sequence: Synthetic oligonucleotide
cacuuccggcgcgaccccu

SEQ ID NO: 1122708 - RNA, 19 nt, Artificial Sequence
  Description of Artificial Sequence: Synthetic oligonucleotide
ccauaucucuuggaaccuu

SEQ ID NO: 1122709 - RNA, 19 nt, Artificial Sequence
  Description of Artificial Sequence: Synthetic oligonucleotide
cgcuucgaguacuuacuuu

SEQ ID NO: 1122710 - RNA, 19 nt, Artificial Sequence
  Description of Artificial Sequence: Synthetic oligonucleotide
cgccgaggucgagugcaac

SEQ ID NO: 1122711 - RNA, 19 nt, Artificial Sequence
  Description of Artificial Sequence: Synthetic oligonucleotide
cccucggaacuggaguuau

SEQ ID NO: 1122712 - RNA, 19 nt, Artificial Sequence
  Description of Artificial Sequence: Synthetic oligonucleotide
ccgccgaggucgagugcaa

SEQ ID NO: 1122713 - RNA, 19 nt, Artificial Sequence
  Description of Artificial Sequence: Synthetic oligonucleotide
gccuuucgccauggcugcu

SEQ ID NO: 1122714 - RNA, 19 nt, Artificial Sequence
  Description of Artificial Sequence: Synthetic oligonucleotide
gcgcgaccccuggcccgag

SEQ ID NO: 1122715 - RNA, 19 nt, Artificial Sequence
  Description of Artificial Sequence: Synthetic oligonucleotide
cgcguccccguugcccggu

SEQ ID NO: 1122716 - RNA, 19 nt, Artificial Sequence
  Description of Artificial Sequence: Synthetic oligonucleotide
aagauuauaaauaacuggg

SEQ ID NO: 1122717 - RNA, 19 nt, Artificial Sequence
  Description of Artificial Sequence: Synthetic oligonucleotide
acuuguaugaagcucaacc

SEQ ID NO: 1122718 - RNA, 19 nt, Artificial Sequence
  Description of Artificial Sequence: Synthetic oligonucleotide
uuauacaauuuuaaggugg

SEQ ID NO: 1122719 - RNA, 19 nt, Artificial Sequence
  Description of Artificial Sequence: Synthetic oligonucleotide
aucacuguuacacucaagc

SEQ ID NO: 1122720 - RNA, 19 nt, Artificial Sequence
  Description of Artificial Sequence: Synthetic oligonucleotide
agugugaucauuuauuuuc

SEQ ID NO: 1122721 - RNA, 19 nt, Artificial Sequence
  Description of Artificial Sequence: Synthetic oligonucleotide
aaauauagcacuagauugc

SEQ ID NO: 1122722 - RNA, 19 nt, Artificial Sequence
  Description of Artificial Sequence: Synthetic oligonucleotide
aagcuuaagguucuggugg

SEQ ID NO: 1122723 - RNA, 19 nt, Artificial Sequence
  Description of Artificial Sequence: Synthetic oligonucleotide
ucuaauauauagucaaugc

SEQ ID NO: 1122724 - RNA, 19 nt, Artificial Sequence
  Description of Artificial Sequence: Synthetic oligonucleotide
aguguguccuacuagaagg

SEQ ID NO: 1122725 - RNA, 19 nt, Artificial Sequence
  Description of Artificial Sequence: Synthetic oligonucleotide
uuacacucaagcuaauugg

SEQ ID NO: 1122726 - RNA, 19 nt, Artificial Sequence
  Description of Artificial Sequence: Synthetic oligonucleotide
uuuucacuugauuacaaag

SEQ ID NO: 1122727 - RNA, 19 nt, Artificial Sequence
  Description of Artificial Sequence: Synthetic oligonucleotide
uuauguauucuuaugagau

SEQ ID NO: 1122728 - RNA, 19 nt, Artificial Sequence
  Description of Artificial Sequence: Synthetic oligonucleotide
auucuagucaauuugaaaa

SEQ ID NO: 1122729 - RNA, 19 nt, Artificial Sequence
  Description of Artificial Sequence: Synthetic oligonucleotide
cuaauauauagucaaugcc

SEQ ID NO: 1122730 - RNA, 19 nt, Artificial Sequence
  Description of Artificial Sequence: Synthetic oligonucleotide
aacaagguuucguagagca

SEQ ID NO: 1122731 - RNA, 19 nt, Artificial Sequence
  Description of Artificial Sequence: Synthetic oligonucleotide
guaaauucuagucaauuug

SEQ ID NO: 1122732 - RNA, 19 nt, Artificial Sequence
  Description of Artificial Sequence: Synthetic oligonucleotide
ucaauuugaaaauuucgca

SEQ ID NO: 1122733 - RNA, 19 nt, Artificial Sequence
  Description of Artificial Sequence: Synthetic oligonucleotide
aaaucguuuucuccucugc

SEQ ID NO: 1122734 - RNA, 19 nt, Artificial Sequence
  Description of Artificial Sequence: Synthetic oligonucleotide
aauucguauggcgugaagg

SEQ ID NO: 1122735 - RNA, 19 nt, Artificial Sequence
  Description of Artificial Sequence: Synthetic oligonucleotide
uuucgcauggcaaucauca

SEQ ID NO: 1122736 - RNA, 19 nt, Artificial Sequence
  Description of Artificial Sequence: Synthetic oligonucleotide
cuuuguauguaugacaagg

SEQ ID NO: 1122737 - RNA, 19 nt, Artificial Sequence
  Description of Artificial Sequence: Synthetic oligonucleotide
uaaauucuagucaauuuga

SEQ ID NO: 1122738 - RNA, 19 nt, Artificial Sequence
  Description of Artificial Sequence: Synthetic oligonucleotide
gauuauaaauaacuggguc

SEQ ID NO: 1122739 - RNA, 19 nt, Artificial Sequence
  Description of Artificial Sequence: Synthetic oligonucleotide
acgaaaucgauacucacag

SEQ ID NO: 1122740 - RNA, 19 nt, Artificial Sequence
  Description of Artificial Sequence: Synthetic oligonucleotide
uuauaaauaacugggucgc

SEQ ID NO: 1122741 - RNA, 19 nt, Artificial Sequence
  Description of Artificial Sequence: Synthetic oligonucleotide
caguauaugagguaaaauc

SEQ ID NO: 1122742 - RNA, 19 nt, Artificial Sequence
  Description of Artificial Sequence: Synthetic oligonucleotide
gaagggaccagcuccaagg

SEQ ID NO: 1122743 - RNA, 19 nt, Artificial Sequence
  Description of Artificial Sequence: Synthetic oligonucleotide
guugauagugucuucgggg

SEQ ID NO: 1122744 - RNA, 19 nt, Artificial Sequence
  Description of Artificial Sequence: Synthetic oligonucleotide
uuuauguauucuuaugaga

SEQ ID NO: 1122745 - RNA, 19 nt, Artificial Sequence
  Description of Artificial Sequence: Synthetic oligonucleotide
aaucgauacucacaguuca

SEQ ID NO: 1122746 - RNA, 19 nt, Artificial Sequence
  Description of Artificial Sequence: Synthetic oligonucleotide
uggaauguacaguauauga

SEQ ID NO: 1122747 - RNA, 19 nt, Artificial Sequence
  Description of Artificial Sequence: Synthetic oligonucleotide
uguaaauauucccauguaa

SEQ ID NO: 1122748 - RNA, 19 nt, Artificial Sequence
  Description of Artificial Sequence: Synthetic oligonucleotide
auucguauucuguacauug

SEQ ID NO: 1122749 - RNA, 19 nt, Artificial Sequence
  Description of Artificial Sequence: Synthetic oligonucleotide
uugaaaauuucgcauggca

SEQ ID NO: 1122750 - RNA, 19 nt, Artificial Sequence
  Description of Artificial Sequence: Synthetic oligonucleotide
uuuguauguaugacaaggc

SEQ ID NO: 1122751 - RNA, 19 nt, Artificial Sequence
  Description of Artificial Sequence: Synthetic oligonucleotide
acuagauugcuuucacagc

SEQ ID NO: 1122752 - RNA, 19 nt, Artificial Sequence
  Description of Artificial Sequence: Synthetic oligonucleotide
uauucaaggcuugaauucg

SEQ ID NO: 1122753 - RNA, 19 nt, Artificial Sequence
  Description of Artificial Sequence: Synthetic oligonucleotide
auucguauggcgugaaggg

SEQ ID NO: 1122754 - RNA, 19 nt, Artificial Sequence
  Description of Artificial Sequence: Synthetic oligonucleotide
uguggcuuaauucuccuga

SEQ ID NO: 1122755 - RNA, 19 nt, Artificial Sequence
  Description of Artificial Sequence: Synthetic oligonucleotide
agaaauauagcacuagauu

SEQ ID NO: 1122756 - RNA, 19 nt, Artificial Sequence
  Description of Artificial Sequence: Synthetic oligonucleotide
acagcaucggacuugaaca

SEQ ID NO: 1122757 - RNA, 19 nt, Artificial Sequence
  Description of Artificial Sequence: Synthetic oligonucleotide
guuacacucaagcuaauug

SEQ ID NO: 1122758 - RNA, 19 nt, Artificial Sequence
  Description of Artificial Sequence: Synthetic oligonucleotide
aaaauuucgcauggcaauc

SEQ ID NO: 1122759 - RNA, 19 nt, Artificial Sequence
  Description of Artificial Sequence: Synthetic oligonucleotide
ugaaaacauacucuuggga

SEQ ID NO: 1122760 - RNA, 19 nt, Artificial Sequence
  Description of Artificial Sequence: Synthetic oligonucleotide
ugaaaauuucgcauggcaa

SEQ ID NO: 1122761 - RNA, 19 nt, Artificial Sequence
  Description of Artificial Sequence: Synthetic oligonucleotide
uacacacacacacacacac

SEQ ID NO: 1122762 - RNA, 19 nt, Artificial Sequence
  Description of Artificial Sequence: Synthetic oligonucleotide
uguugauagugucuucggg

SEQ ID NO: 1122763 - RNA, 19 nt, Artificial Sequence
  Description of Artificial Sequence: Synthetic oligonucleotide
uauccgguuggcaaacucg

SEQ ID NO: 1122764 - RNA, 19 nt, Artificial Sequence
  Description of Artificial Sequence: Synthetic oligonucleotide
aguauaugagguaaaauca

SEQ ID NO: 1122765 - RNA, 19 nt, Artificial Sequence
  Description of Artificial Sequence: Synthetic oligonucleotide
uauacaauuuuaagguggu

SEQ ID NO: 1122766 - RNA, 19 nt, Artificial Sequence
  Description of Artificial Sequence: Synthetic oligonucleotide
uucuaauauauagucaaug

SEQ ID NO: 1122767 - RNA, 19 nt, Artificial Sequence
  Description of Artificial Sequence: Synthetic oligonucleotide
agcaaauaacaccaggaug

SEQ ID NO: 1122768 - RNA, 19 nt, Artificial Sequence
  Description of Artificial Sequence: Synthetic oligonucleotide
uuaagcuuaagguucuggu

SEQ ID NO: 1122769 - RNA, 19 nt, Artificial Sequence
  Description of Artificial Sequence: Synthetic oligonucleotide
ucugcacuaacuuugcagu

SEQ ID NO: 1122770 - RNA, 19 nt, Artificial Sequence
  Description of Artificial Sequence: Synthetic oligonucleotide
acuaacuuugcagugugcg

SEQ ID NO: 1122771 - RNA, 19 nt, Artificial Sequence
  Description of Artificial Sequence: Synthetic oligonucleotide
aaguguguccuacuagaag

SEQ ID NO: 1122772 - RNA, 19 nt, Artificial Sequence
  Description of Artificial Sequence: Synthetic oligonucleotide
aaugccggaaugaaguauc

SEQ ID NO: 1122773 - RNA, 19 nt, Artificial Sequence
  Description of Artificial Sequence: Synthetic oligonucleotide
uauagcacuagauugcuuu

SEQ ID NO: 1122774 - RNA, 19 nt, Artificial Sequence
  Description of Artificial Sequence: Synthetic oligonucleotide
uacagagagacaaaccuuc

SEQ ID NO: 1122775 - RNA, 19 nt, Artificial Sequence
  Description of Artificial Sequence: Synthetic oligonucleotide
aaacauacucuugggagag

SEQ ID NO: 1122776 - RNA, 19 nt, Artificial Sequence
  Description of Artificial Sequence: Synthetic oligonucleotide
agauacuuuugcuacauau

SEQ ID NO: 1122777 - RNA, 19 nt, Artificial Sequence
  Description of Artificial Sequence: Synthetic oligonucleotide
aaaucgauacucacaguuc

SEQ ID NO: 1122778 - RNA, 19 nt, Artificial Sequence
  Description of Artificial Sequence: Synthetic oligonucleotide
auucuuaugagauuauauu

SEQ ID NO: 1122779 - RNA, 19 nt, Artificial Sequence
  Description of Artificial Sequence: Synthetic oligonucleotide
aucuuuucccaccauaacu

SEQ ID NO: 1122780 - RNA, 19 nt, Artificial Sequence
  Description of Artificial Sequence: Synthetic oligonucleotide
auacucacaguucagcuga

SEQ ID NO: 1122781 - RNA, 19 nt, Artificial Sequence
  Description of Artificial Sequence: Synthetic oligonucleotide
ccuacuagaaggcauaucc

SEQ ID NO: 1122782 - RNA, 19 nt, Artificial Sequence
  Description of Artificial Sequence: Synthetic oligonucleotide
uuaguacauagacaaaaua

SEQ ID NO: 1122783 - RNA, 19 nt, Artificial Sequence
  Description of Artificial Sequence: Synthetic oligonucleotide
cuaauuggucaaaacaauc

SEQ ID NO: 1122784 - RNA, 19 nt, Artificial Sequence
  Description of Artificial Sequence: Synthetic oligonucleotide
aauguacaguauaugaggu

SEQ ID NO: 1122785 - RNA, 19 nt, Artificial Sequence
  Description of Artificial Sequence: Synthetic oligonucleotide
gauacucacaguucagcug

SEQ ID NO: 1122786 - RNA, 19 nt, Artificial Sequence
  Description of Artificial Sequence: Synthetic oligonucleotide
aacuugaagauuauaaaua

SEQ ID NO: 1122787 - RNA, 19 nt, Artificial Sequence
  Description of Artificial Sequence: Synthetic oligonucleotide
guuucguagagcauguuag

SEQ ID NO: 1122788 - RNA, 19 nt, Artificial Sequence
  Description of Artificial Sequence: Synthetic oligonucleotide
aaaaucguuuucuccucug

SEQ ID NO: 1122789 - RNA, 19 nt, Artificial Sequence
  Description of Artificial Sequence: Synthetic oligonucleotide
uacaauuuuaaggugguau

SEQ ID NO: 1122790 - RNA, 19 nt, Artificial Sequence
  Description of Artificial Sequence: Synthetic oligonucleotide
uguaugaagcucaaccuua

SEQ ID NO: 1122791 - RNA, 19 nt, Artificial Sequence
  Description of Artificial Sequence: Synthetic oligonucleotide
auuggcgaauggcacacac

SEQ ID NO: 1122792 - RNA, 19 nt, Artificial Sequence
  Description of Artificial Sequence: Synthetic oligonucleotide
ugguaguguaucuauaauc

SEQ ID NO: 1122793 - RNA, 19 nt, Artificial Sequence
  Description of Artificial Sequence: Synthetic oligonucleotide
uggcgaauggcacacacac

SEQ ID NO: 1122794 - RNA, 19 nt, Artificial Sequence
  Description of Artificial Sequence: Synthetic oligonucleotide
uguaaaucugucugaaaau

SEQ ID NO: 1122795 - RNA, 19 nt, Artificial Sequence
  Description of Artificial Sequence: Synthetic oligonucleotide
acucacugagccuuugcac

SEQ ID NO: 1122796 - RNA, 19 nt, Artificial Sequence
  Description of Artificial Sequence: Synthetic oligonucleotide
uguuaguguaaauucuagu

SEQ ID NO: 1122797 - RNA, 19 nt, Artificial Sequence
  Description of Artificial Sequence: Synthetic oligonucleotide
uugaauucguauucuguac

SEQ ID NO: 1122798 - RNA, 19 nt, Artificial Sequence
  Description of Artificial Sequence: Synthetic oligonucleotide
uuuuggaguggugaaaaca

SEQ ID NO: 1122799 - RNA, 19 nt, Artificial Sequence
  Description of Artificial Sequence: Synthetic oligonucleotide
guacauuguauccgguugg

SEQ ID NO: 1122800 - RNA, 19 nt, Artificial Sequence
  Description of Artificial Sequence: Synthetic oligonucleotide
gggcuuucaaggcagaugg

SEQ ID NO: 1122801 - RNA, 19 nt, Artificial Sequence
  Description of Artificial Sequence: Synthetic oligonucleotide
gauugcuuucacagcaucg

SEQ ID NO: 1122802 - RNA, 19 nt, Artificial Sequence
  Description of Artificial Sequence: Synthetic oligonucleotide
acugggucgccuuucauug

SEQ ID NO: 1122803 - RNA, 19 nt, Artificial Sequence
  Description of Artificial Sequence: Synthetic oligonucleotide
cuaacuuugcagugugcgg

SEQ ID NO: 1122804 - RNA, 19 nt, Artificial Sequence
  Description of Artificial Sequence: Synthetic oligonucleotide
acacgaaaucgauacucac

SEQ ID NO: 1122805 - RNA, 19 nt, Artificial Sequence
  Description of Artificial Sequence: Synthetic oligonucleotide
uguaugacaaggcccucug

SEQ ID NO: 1122806 - RNA, 19 nt, Artificial Sequence
  Description of Artificial Sequence: Synthetic oligonucleotide
uucacaagugugaucauuu

SEQ ID NO: 1122807 - RNA, 19 nt, Artificial Sequence
  Description of Artificial Sequence: Synthetic oligonucleotide
auuacaagcuugaaugcag

SEQ ID NO: 1122808 - RNA, 19 nt, Artificial Sequence
  Description of Artificial Sequence: Synthetic oligonucleotide
agcacuagauugcuuucac

SEQ ID NO: 1122809 - RNA, 19 nt, Artificial Sequence
  Description of Artificial Sequence: Synthetic oligonucleotide
gaaugaaguaucagggccc

SEQ ID NO: 1122810 - RNA, 19 nt, Artificial Sequence
  Description of Artificial Sequence: Synthetic oligonucleotide
uucuagucaauuugaaaau

SEQ ID NO: 1122811 - RNA, 19 nt, Artificial Sequence
  Description of Artificial Sequence: Synthetic oligonucleotide
uucccauguaauuucacaa

SEQ ID NO: 1122812 - RNA, 19 nt, Artificial Sequence
  Description of Artificial Sequence: Synthetic oligonucleotide
ucauugaaacaaacagaug

SEQ ID NO: 1122813 - RNA, 19 nt, Artificial Sequence
  Description of Artificial Sequence: Synthetic oligonucleotide
uauguuugguaguguaucu

SEQ ID NO: 1122814 - RNA, 19 nt, Artificial Sequence
  Description of Artificial Sequence: Synthetic oligonucleotide
cacacacacacacacacac

SEQ ID NO: 1122815 - RNA, 19 nt, Artificial Sequence
  Description of Artificial Sequence: Synthetic oligonucleotide
agagagacaaaccuuccau

SEQ ID NO: 1122816 - RNA, 19 nt, Artificial Sequence
  Description of Artificial Sequence: Synthetic oligonucleotide
aacagcaucuguugauagu

SEQ ID NO: 1122817 - RNA, 19 nt, Artificial Sequence
  Description of Artificial Sequence: Synthetic oligonucleotide
auagcacuagauugcuuuc

SEQ ID NO: 1122818 - RNA, 19 nt, Artificial Sequence
  Description of Artificial Sequence: Synthetic oligonucleotide
auucccauguaauuucaca

SEQ ID NO: 1122819 - RNA, 19 nt, Artificial Sequence
  Description of Artificial Sequence: Synthetic oligonucleotide
ucuguacagagagacaaac

SEQ ID NO: 1122820 - RNA, 19 nt, Artificial Sequence
  Description of Artificial Sequence: Synthetic oligonucleotide
uuuaauucguauggcguga

SEQ ID NO: 1122821 - RNA, 19 nt, Artificial Sequence
  Description of Artificial Sequence: Synthetic oligonucleotide
ugaaucuuuucccaccaua

SEQ ID NO: 1122822 - RNA, 19 nt, Artificial Sequence
  Description of Artificial Sequence: Synthetic oligonucleotide
uguuugguaguguaucuau

SEQ ID NO: 1122823 - RNA, 19 nt, Artificial Sequence
  Description of Artificial Sequence: Synthetic oligonucleotide
gaagcucaaccuuauacaa

SEQ ID NO: 1122824 - RNA, 19 nt, Artificial Sequence
  Description of Artificial Sequence: Synthetic oligonucleotide
acaaucauaaaugcugccu

SEQ ID NO: 1122825 - RNA, 19 nt, Artificial Sequence
  Description of Artificial Sequence: Synthetic oligonucleotide
ugggacagauuuuggagug

SEQ ID NO: 1122826 - RNA, 19 nt, Artificial Sequence
  Description of Artificial Sequence: Synthetic oligonucleotide
gguacacacacacacacac

SEQ ID NO: 1122827 - RNA, 19 nt, Artificial Sequence
  Description of Artificial Sequence: Synthetic oligonucleotide
ucguauggcgugaagggac

SEQ ID NO: 1122828 - RNA, 19 nt, Artificial Sequence
  Description of Artificial Sequence: Synthetic oligonucleotide
gaaaucgauacucacaguu

SEQ ID NO: 1122829 - RNA, 19 nt, Artificial Sequence
  Description of Artificial Sequence: Synthetic oligonucleotide
agcucaaccuuauacaauu

SEQ ID NO: 1122830 - RNA, 19 nt, Artificial Sequence
  Description of Artificial Sequence: Synthetic oligonucleotide
ucaucacuaagagugcggc

SEQ ID NO: 1122831 - RNA, 19 nt, Artificial Sequence
  Description of Artificial Sequence: Synthetic oligonucleotide
aacucguccuaugauauaa

SEQ ID NO: 1122832 - RNA, 19 nt, Artificial Sequence
  Description of Artificial Sequence: Synthetic oligonucleotide
uucguauucuguacauugu

SEQ ID NO: 1122833 - RNA, 19 nt, Artificial Sequence
  Description of Artificial Sequence: Synthetic oligonucleotide
gccggaaugaaguaucagg

SEQ ID NO: 1122834 - RNA, 19 nt, Artificial Sequence
  Description of Artificial Sequence: Synthetic oligonucleotide
aaauuucgcauggcaauca

SEQ ID NO: 1122835 - RNA, 19 nt, Artificial Sequence
  Description of Artificial Sequence: Synthetic oligonucleotide
caagcuaauuggucaaaac

SEQ ID NO: 1122836 - RNA, 19 nt, Artificial Sequence
  Description of Artificial Sequence: Synthetic oligonucleotide
auaaauaacugggucgccu

SEQ ID NO: 1122837 - RNA, 19 nt, Artificial Sequence
  Description of Artificial Sequence: Synthetic oligonucleotide
ccauuuaagcuuaagguuc

SEQ ID NO: 1122838 - RNA, 19 nt, Artificial Sequence
  Description of Artificial Sequence: Synthetic oligonucleotide
aaugaaguaucagggcccu

SEQ ID NO: 1122839 - RNA, 19 nt, Artificial Sequence
  Description of Artificial Sequence: Synthetic oligonucleotide
gggguuaucacuguuacac

SEQ ID NO: 1122840 - RNA, 19 nt, Artificial Sequence
  Description of Artificial Sequence: Synthetic oligonucleotide
ugcuaagcccuccaguuau

SEQ ID NO: 1122841 - RNA, 19 nt, Artificial Sequence
  Description of Artificial Sequence: Synthetic oligonucleotide
acuguuacacucaagcuaa

SEQ ID NO: 1122842 - RNA, 19 nt, Artificial Sequence
  Description of Artificial Sequence: Synthetic oligonucleotide
cacacacacacacacuuug

SEQ ID NO: 1122843 - RNA, 19 nt, Artificial Sequence
  Description of Artificial Sequence: Synthetic oligonucleotide
cacuuuguauguaugacaa

SEQ ID NO: 1122844 - RNA, 19 nt, Artificial Sequence
  Description of Artificial Sequence: Synthetic oligonucleotide
auguauucuuaugagauua

SEQ ID NO: 1122845 - RNA, 19 nt, Artificial Sequence
  Description of Artificial Sequence: Synthetic oligonucleotide
ucuucgggguuccuucucc

SEQ ID NO: 1122846 - RNA, 19 nt, Artificial Sequence
  Description of Artificial Sequence: Synthetic oligonucleotide
ugugaacucacugagccuu

SEQ ID NO: 1122847 - RNA, 19 nt, Artificial Sequence
  Description of Artificial Sequence: Synthetic oligonucleotide
aauuucgcauggcaaucau

SEQ ID NO: 1122848 - RNA, 19 nt, Artificial Sequence
  Description of Artificial Sequence: Synthetic oligonucleotide
uuccaaccgagguggaucc

SEQ ID NO: 1122849 - RNA, 19 nt, Artificial Sequence
  Description of Artificial Sequence: Synthetic oligonucleotide
uucauuggcuguaaauauu

SEQ ID NO: 1122850 - RNA, 19 nt, Artificial Sequence
  Description of Artificial Sequence: Synthetic oligonucleotide
ucguauucuguacauugua

SEQ ID NO: 1122851 - RNA, 19 nt, Artificial Sequence
  Description of Artificial Sequence: Synthetic oligonucleotide
ugcacuuuguauguaugac

SEQ ID NO: 1122852 - RNA, 19 nt, Artificial Sequence
  Description of Artificial Sequence: Synthetic oligonucleotide
auuguauccgguuggcaaa

SEQ ID NO: 1122853 - RNA, 19 nt, Artificial Sequence
  Description of Artificial Sequence: Synthetic oligonucleotide
agauuauaaauaacugggu

SEQ ID NO: 1122854 - RNA, 19 nt, Artificial Sequence
  Description of Artificial Sequence: Synthetic oligonucleotide
uccuaugauauaacuuguc

SEQ ID NO: 1122855 - RNA, 19 nt, Artificial Sequence
  Description of Artificial Sequence: Synthetic oligonucleotide
uugguaguguaucuauaau

SEQ ID NO: 1122856 - RNA, 19 nt, Artificial Sequence
  Description of Artificial Sequence: Synthetic oligonucleotide
ccauggauuuuacagauac

SEQ ID NO: 1122857 - RNA, 19 nt, Artificial Sequence
  Description of Artificial Sequence: Synthetic oligonucleotide
aaauucuagucaauuugaa

SEQ ID NO: 1122858 - RNA, 19 nt, Artificial Sequence
  Description of Artificial Sequence: Synthetic oligonucleotide
uaauucguauggcgugaag

SEQ ID NO: 1122859 - RNA, 19 nt, Artificial Sequence
  Description of Artificial Sequence: Synthetic oligonucleotide
uagucaaugccagugcuaa

SEQ ID NO: 1122860 - RNA, 19 nt, Artificial Sequence
  Description of Artificial Sequence: Synthetic oligonucleotide
gugcgguacacacacacac

SEQ ID NO: 1122861 - RNA, 19 nt, Artificial Sequence
  Description of Artificial Sequence: Synthetic oligonucleotide
ucguccuaugauauaacuu

SEQ ID NO: 1122862 - RNA, 19 nt, Artificial Sequence
  Description of Artificial Sequence: Synthetic oligonucleotide
cagccuuuguccaacaaca

SEQ ID NO: 1122863 - RNA, 19 nt, Artificial Sequence
  Description of Artificial Sequence: Synthetic oligonucleotide
cacugcucaucacuaagag

SEQ ID NO: 1122864 - RNA, 19 nt, Artificial Sequence
  Description of Artificial Sequence: Synthetic oligonucleotide
aagaaugauacaacuuuua

SEQ ID NO: 1122865 - RNA, 19 nt, Artificial Sequence
  Description of Artificial Sequence: Synthetic oligonucleotide
guauguuugguaguguauc

SEQ ID NO: 1122866 - RNA, 19 nt, Artificial Sequence
  Description of Artificial Sequence: Synthetic oligonucleotide
cguccuaugauauaacuug

SEQ ID NO: 1122867 - RNA, 19 nt, Artificial Sequence
  Description of Artificial Sequence: Synthetic oligonucleotide
uauaaauaacugggucgcc

SEQ ID NO: 1122868 - RNA, 19 nt, Artificial Sequence
  Description of Artificial Sequence: Synthetic oligonucleotide
caucacuaagagugcggcg

SEQ ID NO: 1122869 - RNA, 19 nt, Artificial Sequence
  Description of Artificial Sequence: Synthetic oligonucleotide
ucuagucaauuugaaaauu

SEQ ID NO: 1122870 - RNA, 19 nt, Artificial Sequence
  Description of Artificial Sequence: Synthetic oligonucleotide
cuaagagugcggcgggucc

SEQ ID NO: 1122871 - RNA, 19 nt, Artificial Sequence
  Description of Artificial Sequence: Synthetic oligonucleotide
agugcggcggguccgcacg

SEQ ID NO: 1122872 - RNA, 19 nt, Artificial Sequence
  Description of Artificial Sequence: Synthetic oligonucleotide
ugguauguuugguagugua

SEQ ID NO: 1122873 - RNA, 19 nt, Artificial Sequence
  Description of Artificial Sequence: Synthetic oligonucleotide
acacacacacacacuuugc

SEQ ID NO: 1122874 - RNA, 19 nt, Artificial Sequence
  Description of Artificial Sequence: Synthetic oligonucleotide
uagagcauguuaguguaaa

SEQ ID NO: 1122875 - RNA, 19 nt, Artificial Sequence
  Description of Artificial Sequence: Synthetic oligonucleotide
cacgaaaucgauacucaca

SEQ ID NO: 1122876 - RNA, 19 nt, Artificial Sequence
  Description of Artificial Sequence: Synthetic oligonucleotide
uaagagugcggcggguccg

SEQ ID NO: 1122877 - RNA, 19 nt, Artificial Sequence
  Description of Artificial Sequence: Synthetic oligonucleotide
cuuguaugaagcucaaccu

SEQ ID NO: 1122878 - RNA, 19 nt, Artificial Sequence
  Description of Artificial Sequence: Synthetic oligonucleotide
uggcauuggcgaauggcac

SEQ ID NO: 1122879 - RNA, 19 nt, Artificial Sequence
  Description of Artificial Sequence: Synthetic oligonucleotide
ugcgguacacacacacaca

SEQ ID NO: 1122880 - RNA, 19 nt, Artificial Sequence
  Description of Artificial Sequence: Synthetic oligonucleotide
ucaagcuaauuggucaaaa

SEQ ID NO: 1122881 - RNA, 19 nt, Artificial Sequence
  Description of Artificial Sequence: Synthetic oligonucleotide
auggcgugaagggaccagc

SEQ ID NO: 1122882 - RNA, 19 nt, Artificial Sequence
  Description of Artificial Sequence: Synthetic oligonucleotide
ucgcauggcaaucaucauu

SEQ ID NO: 1122883 - RNA, 19 nt, Artificial Sequence
  Description of Artificial Sequence: Synthetic oligonucleotide
uacauuguauccgguuggc

SEQ ID NO: 1122884 - RNA, 19 nt, Artificial Sequence
  Description of Artificial Sequence: Synthetic oligonucleotide
acuaagagugcggcggguc

SEQ ID NO: 1122885 - RNA, 19 nt, Artificial Sequence
  Description of Artificial Sequence: Synthetic oligonucleotide
guauaugagguaaaaucaa

SEQ ID NO: 1122886 - RNA, 19 nt, Artificial Sequence
  Description of Artificial Sequence: Synthetic oligonucleotide
aagagugcggcggguccgc

SEQ ID NO: 1122887 - RNA, 19 nt, Artificial Sequence
  Description of Artificial Sequence: Synthetic oligonucleotide
aucuguugauagugucuuc

SEQ ID NO: 1122888 - RNA, 19 nt, Artificial Sequence
  Description of Artificial Sequence: Synthetic oligonucleotide
uucacagcaucggacuuga

SEQ ID NO: 1122889 - RNA, 19 nt, Artificial Sequence
  Description of Artificial Sequence: Synthetic oligonucleotide
uuggcgaauggcacacaca

SEQ ID NO: 1122890 - RNA, 19 nt, Artificial Sequence
  Description of Artificial Sequence: Synthetic oligonucleotide
aagguuucguagagcaugu

SEQ ID NO: 1122891 - RNA, 19 nt, Artificial Sequence
  Description of Artificial Sequence: Synthetic oligonucleotide
uggcuguaaauauucccau

SEQ ID NO: 1122892 - RNA, 19 nt, Artificial Sequence
  Description of Artificial Sequence: Synthetic oligonucleotide
cacuguuacacucaagcua

SEQ ID NO: 1122893 - RNA, 19 nt, Artificial Sequence
  Description of Artificial Sequence: Synthetic oligonucleotide
uggucaaaacaaucauaaa

SEQ ID NO: 1122894 - RNA, 19 nt, Artificial Sequence
  Description of Artificial Sequence: Synthetic oligonucleotide
gguaguguaucuauaaucu

SEQ ID NO: 1122895 - RNA, 19 nt, Artificial Sequence
  Description of Artificial Sequence: Synthetic oligonucleotide
uucguauggcgugaaggga

SEQ ID NO: 1122896 - RNA, 19 nt, Artificial Sequence
  Description of Artificial Sequence: Synthetic oligonucleotide
acaguauaugagguaaaau

SEQ ID NO: 1122897 - RNA, 19 nt, Artificial Sequence
  Description of Artificial Sequence: Synthetic oligonucleotide
ucgggguuccuucucccca

SEQ ID NO: 1122898 - RNA, 19 nt, Artificial Sequence
  Description of Artificial Sequence: Synthetic oligonucleotide
uguguccuacuagaaggca

SEQ ID NO: 1122899 - RNA, 19 nt, Artificial Sequence
  Description of Artificial Sequence: Synthetic oligonucleotide
cauuacaagcuugaaugca

SEQ ID NO: 1122900 - RNA, 19 nt, Artificial Sequence
  Description of Artificial Sequence: Synthetic oligonucleotide
aaggcuauucaaggcuuga

SEQ ID NO: 1122901 - RNA, 19 nt, Artificial Sequence
  Description of Artificial Sequence: Synthetic oligonucleotide
aacuuugcagugugcggua

SEQ ID NO: 1122902 - RNA, 19 nt, Artificial Sequence
  Description of Artificial Sequence: Synthetic oligonucleotide
acagauacuuuugcuacau

SEQ ID NO: 1122903 - RNA, 19 nt, Artificial Sequence
  Description of Artificial Sequence: Synthetic oligonucleotide
uuguacugaacagcaucug

SEQ ID NO: 1122904 - RNA, 19 nt, Artificial Sequence
  Description of Artificial Sequence: Synthetic oligonucleotide
acacacacacacuuugcua

SEQ ID NO: 1122905 - RNA, 19 nt, Artificial Sequence
  Description of Artificial Sequence: Synthetic oligonucleotide
cacacgaaaucgauacuca

SEQ ID NO: 1122906 - RNA, 19 nt, Artificial Sequence
  Description of Artificial Sequence: Synthetic oligonucleotide
uucaaggcuugaauucgua

SEQ ID NO: 1122907 - RNA, 19 nt, Artificial Sequence
  Description of Artificial Sequence: Synthetic oligonucleotide
caaacagaugggguuauca

SEQ ID NO: 1122908 - RNA, 19 nt, Artificial Sequence
  Description of Artificial Sequence: Synthetic oligonucleotide
aaggcauaucccuccccaa

SEQ ID NO: 1122909 - RNA, 19 nt, Artificial Sequence
  Description of Artificial Sequence: Synthetic oligonucleotide
uagcacuagauugcuuuca

SEQ ID NO: 1122910 - RNA, 19 nt, Artificial Sequence
  Description of Artificial Sequence: Synthetic oligonucleotide
caaggcuauucaaggcuug

SEQ ID NO: 1122911 - RNA, 19 nt, Artificial Sequence
  Description of Artificial Sequence: Synthetic oligonucleotide
gcgugaagggaccagcucc

SEQ ID NO: 1122912 - RNA, 19 nt, Artificial Sequence
  Description of Artificial Sequence: Synthetic oligonucleotide
uaugaagcucaaccuuaua

SEQ ID NO: 1122913 - RNA, 19 nt, Artificial Sequence
  Description of Artificial Sequence: Synthetic oligonucleotide
aauguuucuguggcuuaau

SEQ ID NO: 1122914 - RNA, 19 nt, Artificial Sequence
  Description of Artificial Sequence: Synthetic oligonucleotide
aaacucguccuaugauaua

SEQ ID NO: 1122915 - RNA, 19 nt, Artificial Sequence
  Description of Artificial Sequence: Synthetic oligonucleotide
gcuguaaauauucccaugu

SEQ ID NO: 1122916 - RNA, 19 nt, Artificial Sequence
  Description of Artificial Sequence: Synthetic oligonucleotide
ccuaugauauaacuuguca

SEQ ID NO: 1122917 - RNA, 19 nt, Artificial Sequence
  Description of Artificial Sequence: Synthetic oligonucleotide
cuugaaugcagaacuugua

SEQ ID NO: 1122918 - RNA, 19 nt, Artificial Sequence
  Description of Artificial Sequence: Synthetic oligonucleotide
gcaucggacuugaacaagg

SEQ ID NO: 1122919 - RNA, 19 nt, Artificial Sequence
  Description of Artificial Sequence: Synthetic oligonucleotide
cgcauggcaaucaucauug

SEQ ID NO: 1122920 - RNA, 19 nt, Artificial Sequence
  Description of Artificial Sequence: Synthetic oligonucleotide
uucgggguuccuucucccc

SEQ ID NO: 1122921 - RNA, 19 nt, Artificial Sequence
  Description of Artificial Sequence: Synthetic oligonucleotide
uuaauucguauggcgugaa

SEQ ID NO: 1122922 - RNA, 19 nt, Artificial Sequence
  Description of Artificial Sequence: Synthetic oligonucleotide
uugcuaagcccuccaguua

SEQ ID NO: 1122923 - RNA, 19 nt, Artificial Sequence
  Description of Artificial Sequence: Synthetic oligonucleotide
cacuaacuuugcagugugc

SEQ ID NO: 1122924 - RNA, 19 nt, Artificial Sequence
  Description of Artificial Sequence: Synthetic oligonucleotide
acuuugcagugugcgguac

SEQ ID NO: 1122925 - RNA, 19 nt, Artificial Sequence
  Description of Artificial Sequence: Synthetic oligonucleotide
acucguccuaugauauaac

SEQ ID NO: 1122926 - RNA, 19 nt, Artificial Sequence
  Description of Artificial Sequence: Synthetic oligonucleotide
uguuacacucaagcuaauu

SEQ ID NO: 1122927 - RNA, 19 nt, Artificial Sequence
  Description of Artificial Sequence: Synthetic oligonucleotide
cuucgggguuccuucuccc

SEQ ID NO: 1122928 - RNA, 19 nt, Artificial Sequence
  Description of Artificial Sequence: Synthetic oligonucleotide
uagggaccuaccagguccu

SEQ ID NO: 1122929 - RNA, 19 nt, Artificial Sequence
  Description of Artificial Sequence: Synthetic oligonucleotide
ugggguuaucacuguuaca

SEQ ID NO: 1122930 - RNA, 19 nt, Artificial Sequence
  Description of Artificial Sequence: Synthetic oligonucleotide
agcaucggacuugaacaag

SEQ ID NO: 1122931 - RNA, 19 nt, Artificial Sequence
  Description of Artificial Sequence: Synthetic oligonucleotide
gcacuuuguauguaugaca

SEQ ID NO: 1122932 - RNA, 19 nt, Artificial Sequence
  Description of Artificial Sequence: Synthetic oligonucleotide
agauuuuggaguggugaaa

SEQ ID NO: 1122933 - RNA, 19 nt, Artificial Sequence
  Description of Artificial Sequence: Synthetic oligonucleotide
aucgauacucacaguucag

SEQ ID NO: 1122934 - RNA, 19 nt, Artificial Sequence
  Description of Artificial Sequence: Synthetic oligonucleotide
uggcgugaagggaccagcu

SEQ ID NO: 1122935 - RNA, 19 nt, Artificial Sequence
  Description of Artificial Sequence: Synthetic oligonucleotide
guguguccuacuagaaggc

SEQ ID NO: 1122936 - RNA, 19 nt, Artificial Sequence
  Description of Artificial Sequence: Synthetic oligonucleotide
auguaugacaaggcccucu

SEQ ID NO: 1122937 - RNA, 19 nt, Artificial Sequence
  Description of Artificial Sequence: Synthetic oligonucleotide
ggcuguaaauauucccaug

SEQ ID NO: 1122938 - RNA, 19 nt, Artificial Sequence
  Description of Artificial Sequence: Synthetic oligonucleotide
gcgguacacacacacacac

SEQ ID NO: 1122939 - RNA, 19 nt, Artificial Sequence
  Description of Artificial Sequence: Synthetic oligonucleotide
uuguauccgguuggcaaac

SEQ ID NO: 1122940 - RNA, 19 nt, Artificial Sequence
  Description of Artificial Sequence: Synthetic oligonucleotide
gucuuuguuggugcuggcc

SEQ ID NO: 1122941 - RNA, 19 nt, Artificial Sequence
  Description of Artificial Sequence: Synthetic oligonucleotide
ugccggaaugaaguaucag

SEQ ID NO: 1122942 - RNA, 19 nt, Artificial Sequence
  Description of Artificial Sequence: Synthetic oligonucleotide
cuucauuacaagcuugaau

SEQ ID NO: 1122943 - RNA, 19 nt, Artificial Sequence
  Description of Artificial Sequence: Synthetic oligonucleotide
aaguaucagggcccuugua

SEQ ID NO: 1122944 - RNA, 19 nt, Artificial Sequence
  Description of Artificial Sequence: Synthetic oligonucleotide
caaacucguccuaugauau

SEQ ID NO: 1122945 - RNA, 19 nt, Artificial Sequence
  Description of Artificial Sequence: Synthetic oligonucleotide
guauccgguuggcaaacuc

SEQ ID NO: 1122946 - RNA, 19 nt, Artificial Sequence
  Description of Artificial Sequence: Synthetic oligonucleotide
aggcauaucccuccccaaa

SEQ ID NO: 1122947 - RNA, 19 nt, Artificial Sequence
  Description of Artificial Sequence: Synthetic oligonucleotide
gacagauuuuggaguggug

SEQ ID NO: 1122948 - RNA, 19 nt, Artificial Sequence
  Description of Artificial Sequence: Synthetic oligonucleotide
gcacuaacuuugcagugug

SEQ ID NO: 1122949 - RNA, 19 nt, Artificial Sequence
  Description of Artificial Sequence: Synthetic oligonucleotide
aucggacuugaacaagguu

SEQ ID NO: 1122950 - RNA, 19 nt, Artificial Sequence
  Description of Artificial Sequence: Synthetic oligonucleotide
cagagagacaaaccuucca

SEQ ID NO: 1122951 - RNA, 19 nt, Artificial Sequence
  Description of Artificial Sequence: Synthetic oligonucleotide
cagaacuuguaggauguga

SEQ ID NO: 1122952 - RNA, 19 nt, Artificial Sequence
  Description of Artificial Sequence: Synthetic oligonucleotide
cuguggcuuaauucuccug

SEQ ID NO: 1122953 - RNA, 19 nt, Artificial Sequence
  Description of Artificial Sequence: Synthetic oligonucleotide
gcaaacucguccuaugaua

SEQ ID NO: 1122954 - RNA, 19 nt, Artificial Sequence
  Description of Artificial Sequence: Synthetic oligonucleotide
aguguaaauucuagucaau

SEQ ID NO: 1122955 - RNA, 19 nt, Artificial Sequence
  Description of Artificial Sequence: Synthetic oligonucleotide
gguuucguagagcauguua

SEQ ID NO: 1122956 - RNA, 19 nt, Artificial Sequence
  Description of Artificial Sequence: Synthetic oligonucleotide
cacauggucuuggcauugg

SEQ ID NO: 1122957 - RNA, 19 nt, Artificial Sequence
  Description of Artificial Sequence: Synthetic oligonucleotide
gaaguaucagggcccuugu

SEQ ID NO: 1122958 - RNA, 19 nt, Artificial Sequence
  Description of Artificial Sequence: Synthetic oligonucleotide
gacuugaacaagguuucgu

SEQ ID NO: 1122959 - RNA, 19 nt, Artificial Sequence
  Description of Artificial Sequence: Synthetic oligonucleotide
gagagacaaaccuuccauu

SEQ ID NO: 1122960 - RNA, 19 nt, Artificial Sequence
  Description of Artificial Sequence: Synthetic oligonucleotide
acauuguauccgguuggca

SEQ ID NO: 1122961 - RNA, 19 nt, Artificial Sequence
  Description of Artificial Sequence: Synthetic oligonucleotide
cuuugcacuuuguauguau

SEQ ID NO: 1122962 - RNA, 19 nt, Artificial Sequence
  Description of Artificial Sequence: Synthetic oligonucleotide
cucguccuaugauauaacu

SEQ ID NO: 1122963 - RNA, 19 nt, Artificial Sequence
  Description of Artificial Sequence: Synthetic oligonucleotide
gaccuaccagguccuggug

SEQ ID NO: 1122964 - RNA, 19 nt, Artificial Sequence
  Description of Artificial Sequence: Synthetic oligonucleotide
cuuaagguucuggugguua

SEQ ID NO: 1122965 - RNA, 19 nt, Artificial Sequence
  Description of Artificial Sequence: Synthetic oligonucleotide
guggcuuaauucuccugaa

SEQ ID NO: 1122966 - RNA, 19 nt, Artificial Sequence
  Description of Artificial Sequence: Synthetic oligonucleotide
auguuugguaguguaucua

SEQ ID NO: 1122967 - RNA, 19 nt, Artificial Sequence
  Description of Artificial Sequence: Synthetic oligonucleotide
ccccauuuaagcuuaaggu

SEQ ID NO: 1122968 - RNA, 19 nt, Artificial Sequence
  Description of Artificial Sequence: Synthetic oligonucleotide
cacacacacacacacacuu

SEQ ID NO: 1122969 - RNA, 19 nt, Artificial Sequence
  Description of Artificial Sequence: Synthetic oligonucleotide
uguccuccaucugaagguu

SEQ ID NO: 1122970 - RNA, 19 nt, Artificial Sequence
  Description of Artificial Sequence: Synthetic oligonucleotide
ggcauuggcgaauggcaca

SEQ ID NO: 1122971 - RNA, 19 nt, Artificial Sequence
  Description of Artificial Sequence: Synthetic oligonucleotide
uguauccgguuggcaaacu

SEQ ID NO: 1122972 - RNA, 19 nt, Artificial Sequence
  Description of Artificial Sequence: Synthetic oligonucleotide
ggugcuguagggaccuacc

SEQ ID NO: 1122973 - RNA, 19 nt, Artificial Sequence
  Description of Artificial Sequence: Synthetic oligonucleotide
cacacacacacacuuugcu

SEQ ID NO: 1122974 - RNA, 19 nt, Artificial Sequence
  Description of Artificial Sequence: Synthetic oligonucleotide
agucaaugccagugcuaaa

SEQ ID NO: 1122975 - RNA, 19 nt, Artificial Sequence
  Description of Artificial Sequence: Synthetic oligonucleotide
guacacacacacacacaca

SEQ ID NO: 1122976 - RNA, 19 nt, Artificial Sequence
  Description of Artificial Sequence: Synthetic oligonucleotide
guguaaauucuagucaauu

SEQ ID NO: 1122977 - RNA, 19 nt, Artificial Sequence
  Description of Artificial Sequence: Synthetic oligonucleotide
acacacacacacacacaca

SEQ ID NO: 1122978 - RNA, 19 nt, Artificial Sequence
  Description of Artificial Sequence: Synthetic oligonucleotide
acacacacacacacacacu

SEQ ID NO: 1122979 - RNA, 19 nt, Artificial Sequence
  Description of Artificial Sequence: Synthetic oligonucleotide
auacaauuuuaagguggua

SEQ ID NO: 1122980 - RNA, 19 nt, Artificial Sequence
  Description of Artificial Sequence: Synthetic oligonucleotide
gggacagauuuuggagugg

SEQ ID NO: 1122981 - RNA, 19 nt, Artificial Sequence
  Description of Artificial Sequence: Synthetic oligonucleotide
gaaugccggaaugaaguau

SEQ ID NO: 1122982 - RNA, 19 nt, Artificial Sequence
  Description of Artificial Sequence: Synthetic oligonucleotide
cagcaucggacuugaacaa

SEQ ID NO: 1122983 - RNA, 19 nt, Artificial Sequence
  Description of Artificial Sequence: Synthetic oligonucleotide
ccgagguggauccgggagg

SEQ ID NO: 1122984 - RNA, 19 nt, Artificial Sequence
  Description of Artificial Sequence: Synthetic oligonucleotide
ggcgaauggcacacacacg

SEQ ID NO: 1122985 - RNA, 19 nt, Artificial Sequence
  Description of Artificial Sequence: Synthetic oligonucleotide
gggaccuaccagguccugg

SEQ ID NO: 1122986 - RNA, 19 nt, Artificial Sequence
  Description of Artificial Sequence: Synthetic oligonucleotide
gcauuggcgaauggcacac

SEQ ID NO: 1122987 - RNA, 19 nt, Artificial Sequence
  Description of Artificial Sequence: Synthetic oligonucleotide
aggcuauucaaggcuugaa

SEQ ID NO: 1122988 - RNA, 19 nt, Artificial Sequence
  Description of Artificial Sequence: Synthetic oligonucleotide
guccuaugauauaacuugu

SEQ ID NO: 1122989 - RNA, 19 nt, Artificial Sequence
  Description of Artificial Sequence: Synthetic oligonucleotide
ccaaccgagguggauccgg

SEQ ID NO: 1122990 - RNA, 19 nt, Artificial Sequence
  Description of Artificial Sequence: Synthetic oligonucleotide
cccaccauaacuugaagau

SEQ ID NO: 1122991 - RNA, 19 nt, Artificial Sequence
  Description of Artificial Sequence: Synthetic oligonucleotide
augccggaaugaaguauca

SEQ ID NO: 1122992 - RNA, 19 nt, Artificial Sequence
  Description of Artificial Sequence: Synthetic oligonucleotide
ucuccccauuuaagcuuaa

SEQ ID NO: 1122993 - RNA, 19 nt, Artificial Sequence
  Description of Artificial Sequence: Synthetic oligonucleotide
cguauggcgugaagggacc

SEQ ID NO: 1122994 - RNA, 19 nt, Artificial Sequence
  Description of Artificial Sequence: Synthetic oligonucleotide
gucgccuuucauuggcugu

SEQ ID NO: 1122995 - RNA, 19 nt, Artificial Sequence
  Description of Artificial Sequence: Synthetic oligonucleotide
auauagcacuagauugcuu

SEQ ID NO: 1122996 - RNA, 19 nt, Artificial Sequence
  Description of Artificial Sequence: Synthetic oligonucleotide
gagugcggcggguccgcac

SEQ ID NO: 1122997 - RNA, 19 nt, Artificial Sequence
  Description of Artificial Sequence: Synthetic oligonucleotide
cccauuuaagcuuaagguu

SEQ ID NO: 1122998 - RNA, 19 nt, Artificial Sequence
  Description of Artificial Sequence: Synthetic oligonucleotide
caucuguugauagugucuu

SEQ ID NO: 1122999 - RNA, 19 nt, Artificial Sequence
  Description of Artificial Sequence: Synthetic oligonucleotide
caucggacuugaacaaggu

SEQ ID NO: 1123000 - RNA, 19 nt, Artificial Sequence
  Description of Artificial Sequence: Synthetic oligonucleotide
gcuaauuggucaaaacaau

SEQ ID NO: 1123001 - RNA, 19 nt, Artificial Sequence
  Description of Artificial Sequence: Synthetic oligonucleotide
ccgcacgccguccacagug

SEQ ID NO: 1123002 - RNA, 19 nt, Artificial Sequence
  Description of Artificial Sequence: Synthetic oligonucleotide
uggauccgggagggagggg

SEQ ID NO: 1123003 - RNA, 19 nt, Artificial Sequence
  Description of Artificial Sequence: Synthetic oligonucleotide
acacacacacacacacuuu

SEQ ID NO: 1123004 - RNA, 19 nt, Artificial Sequence
  Description of Artificial Sequence: Synthetic oligonucleotide
cauaucccuccccaaacuu

SEQ ID NO: 1123005 - RNA, 19 nt, Artificial Sequence
  Description of Artificial Sequence: Synthetic oligonucleotide
guagagcauguuaguguaa

SEQ ID NO: 1123006 - RNA, 19 nt, Artificial Sequence
  Description of Artificial Sequence: Synthetic oligonucleotide
guaugaagcucaaccuuau

SEQ ID NO: 1123007 - RNA, 19 nt, Artificial Sequence
  Description of Artificial Sequence: Synthetic oligonucleotide
cucaagcuaauuggucaaa

SEQ ID NO: 1123008 - RNA, 19 nt, Artificial Sequence
  Description of Artificial Sequence: Synthetic oligonucleotide
uccgcacgccguccacagu

SEQ ID NO: 1123009 - RNA, 19 nt, Artificial Sequence
  Description of Artificial Sequence: Synthetic oligonucleotide
guauggcgugaagggacca

SEQ ID NO: 1123010 - RNA, 19 nt, Artificial Sequence
  Description of Artificial Sequence: Synthetic oligonucleotide
cugggagaugaagagcacu

SEQ ID NO: 1123011 - RNA, 19 nt, Artificial Sequence
  Description of Artificial Sequence: Synthetic oligonucleotide
gguauguuugguaguguau

SEQ ID NO: 1123012 - RNA, 19 nt, Artificial Sequence
  Description of Artificial Sequence: Synthetic oligonucleotide
gcauaucccuccccaaacu

SEQ ID NO: 1123013 - RNA, 19 nt, Artificial Sequence
  Description of Artificial Sequence: Synthetic oligonucleotide
cagauacuuuugcuacaua

SEQ ID NO: 1123014 - RNA, 19 nt, Artificial Sequence
  Description of Artificial Sequence: Synthetic oligonucleotide
ggacagauuuuggaguggu

SEQ ID NO: 1123015 - RNA, 19 nt, Artificial Sequence
  Description of Artificial Sequence: Synthetic oligonucleotide
gccguccacagugucuuug

SEQ ID NO: 1123016 - RNA, 19 nt, Artificial Sequence
  Description of Artificial Sequence: Synthetic oligonucleotide
cacgccguccacagugucu

SEQ ID NO: 1123017 - RNA, 19 nt, Artificial Sequence
  Description of Artificial Sequence: Synthetic oligonucleotide
gcauggcaaucaucauuga

SEQ ID NO: 1123018 - RNA, 19 nt, Artificial Sequence
  Description of Artificial Sequence: Synthetic oligonucleotide
ccacauggucuuggcauug

SEQ ID NO: 1123019 - RNA, 19 nt, Artificial Sequence
  Description of Artificial Sequence: Synthetic oligonucleotide
agggaccuaccagguccug

SEQ ID NO: 1123020 - RNA, 19 nt, Artificial Sequence
  Description of Artificial Sequence: Synthetic oligonucleotide
ccccacauggucuuggcau

SEQ ID NO: 1123021 - RNA, 19 nt, Artificial Sequence
  Description of Artificial Sequence: Synthetic oligonucleotide
cauuggcgaauggcacaca

SEQ ID NO: 1123022 - RNA, 19 nt, Artificial Sequence
  Description of Artificial Sequence: Synthetic oligonucleotide
augaaguaucagggcccuu

SEQ ID NO: 1123023 - RNA, 19 nt, Artificial Sequence
  Description of Artificial Sequence: Synthetic oligonucleotide
agagugcggcggguccgca

SEQ ID NO: 1123024 - RNA, 19 nt, Artificial Sequence
  Description of Artificial Sequence: Synthetic oligonucleotide
ccaaggcuauucaaggcuu

SEQ ID NO: 1123025 - RNA, 19 nt, Artificial Sequence
  Description of Artificial Sequence: Synthetic oligonucleotide
ggcggguccgcacgccguc

SEQ ID NO: 1123026 - RNA, 19 nt, Artificial Sequence
  Description of Artificial Sequence: Synthetic oligonucleotide
cuguuacacucaagcuaau

SEQ ID NO: 1123027 - RNA, 19 nt, Artificial Sequence
  Description of Artificial Sequence: Synthetic oligonucleotide
cgguacacacacacacaca

SEQ ID NO: 1123028 - RNA, 19 nt, Artificial Sequence
  Description of Artificial Sequence: Synthetic oligonucleotide
cacuaagagugcggcgggu

SEQ ID NO: 1123029 - RNA, 19 nt, Artificial Sequence
  Description of Artificial Sequence: Synthetic oligonucleotide
gcggguccgcacgccgucc

SEQ ID NO: 1123030 - RNA, 19 nt, Artificial Sequence
  Description of Artificial Sequence: Synthetic oligonucleotide
cgaaaucgauacucacagu

SEQ ID NO: 1123031 - RNA, 19 nt, Artificial Sequence
  Description of Artificial Sequence: Synthetic oligonucleotide
ccaccauaacuugaagauu

SEQ ID NO: 1123032 - RNA, 19 nt, Artificial Sequence
  Description of Artificial Sequence: Synthetic oligonucleotide
gcuaagcccuccaguuauu

SEQ ID NO: 1123033 - RNA, 19 nt, Artificial Sequence
  Description of Artificial Sequence: Synthetic oligonucleotide
cggguccgcacgccgucca

SEQ ID NO: 1123034 - RNA, 19 nt, Artificial Sequence
  Description of Artificial Sequence: Synthetic oligonucleotide
aacacaaucacauacauuc

SEQ ID NO: 1123035 - RNA, 19 nt, Artificial Sequence
  Description of Artificial Sequence: Synthetic oligonucleotide
uuuuauaauauucugauca

SEQ ID NO: 1123036 - RNA, 19 nt, Artificial Sequence
  Description of Artificial Sequence: Synthetic oligonucleotide
aacucuaaguaucagaauc

SEQ ID NO: 1123037 - RNA, 19 nt, Artificial Sequence
  Description of Artificial Sequence: Synthetic oligonucleotide
acacaugaaacuuacauac

SEQ ID NO: 1123038 - RNA, 19 nt, Artificial Sequence
  Description of Artificial Sequence: Synthetic oligonucleotide
gaagauaaaacauaucccc

SEQ ID NO: 1123039 - RNA, 19 nt, Artificial Sequence
  Description of Artificial Sequence: Synthetic oligonucleotide
agagcuuacacccauagcg

SEQ ID NO: 1123040 - RNA, 19 nt, Artificial Sequence
  Description of Artificial Sequence: Synthetic oligonucleotide
uuuucuuacccuaaaagag

SEQ ID NO: 1123041 - RNA, 19 nt, Artificial Sequence
  Description of Artificial Sequence: Synthetic oligonucleotide
aaugcauguacucccaucg

SEQ ID NO: 1123042 - RNA, 19 nt, Artificial Sequence
  Description of Artificial Sequence: Synthetic oligonucleotide
uaagagauuaaacucuacg

SEQ ID NO: 1123043 - RNA, 19 nt, Artificial Sequence
  Description of Artificial Sequence: Synthetic oligonucleotide
cuaaguaucagaauccagg

SEQ ID NO: 1123044 - RNA, 19 nt, Artificial Sequence
  Description of Artificial Sequence: Synthetic oligonucleotide
ugcauaaggauucuugggg

SEQ ID NO: 1123045 - RNA, 19 nt, Artificial Sequence
  Description of Artificial Sequence: Synthetic oligonucleotide
ugaagauaaaacauauccc

SEQ ID NO: 1123046 - RNA, 19 nt, Artificial Sequence
  Description of Artificial Sequence: Synthetic oligonucleotide
aagagauuaaacucuacgu

SEQ ID NO: 1123047 - RNA, 19 nt, Artificial Sequence
  Description of Artificial Sequence: Synthetic oligonucleotide
uauagaaguagucaucaca

SEQ ID NO: 1123048 - RNA, 19 nt, Artificial Sequence
  Description of Artificial Sequence: Synthetic oligonucleotide
aaaguuaccaagaaggcca

SEQ ID NO: 1123049 - RNA, 19 nt, Artificial Sequence
  Description of Artificial Sequence: Synthetic oligonucleotide
ucuguauaagacauguggc

SEQ ID NO: 1123050 - RNA, 19 nt, Artificial Sequence
  Description of Artificial Sequence: Synthetic oligonucleotide
uuauaauacuuacauuccc

SEQ ID NO: 1123051 - RNA, 19 nt, Artificial Sequence
  Description of Artificial Sequence: Synthetic oligonucleotide
uauaaaacucuaaguauca

SEQ ID NO: 1123052 - RNA, 19 nt, Artificial Sequence
  Description of Artificial Sequence: Synthetic oligonucleotide
ugaacgacagaaaugcuca

SEQ ID NO: 1123053 - RNA, 19 nt, Artificial Sequence
  Description of Artificial Sequence: Synthetic oligonucleotide
aacgaagcgaaacgcuucc

SEQ ID NO: 1123054 - RNA, 19 nt, Artificial Sequence
  Description of Artificial Sequence: Synthetic oligonucleotide
auauaaaacucuaaguauc

SEQ ID NO: 1123055 - RNA, 19 nt, Artificial Sequence
  Description of Artificial Sequence: Synthetic oligonucleotide
uauaauacuuacauucccu

SEQ ID NO: 1123056 - RNA, 19 nt, Artificial Sequence
  Description of Artificial Sequence: Synthetic oligonucleotide
aagaaggccaacaugaaug

SEQ ID NO: 1123057 - RNA, 19 nt, Artificial Sequence
  Description of Artificial Sequence: Synthetic oligonucleotide
gagauuaaacucuacguac

SEQ ID NO: 1123058 - RNA, 19 nt, Artificial Sequence
  Description of Artificial Sequence: Synthetic oligonucleotide
aacaugauucuaaaaggac

SEQ ID NO: 1123059 - RNA, 19 nt, Artificial Sequence
  Description of Artificial Sequence: Synthetic oligonucleotide
uaaugaagauaaaacauau

SEQ ID NO: 1123060 - RNA, 19 nt, Artificial Sequence
  Description of Artificial Sequence: Synthetic oligonucleotide
uucuaaaaggacaaaugcu

SEQ ID NO: 1123061 - RNA, 19 nt, Artificial Sequence
  Description of Artificial Sequence: Synthetic oligonucleotide
aauacuuacauucccuuuu

SEQ ID NO: 1123062 - RNA, 19 nt, Artificial Sequence
  Description of Artificial Sequence: Synthetic oligonucleotide
gauuaaacucuacguaccg

SEQ ID NO: 1123063 - RNA, 19 nt, Artificial Sequence
  Description of Artificial Sequence: Synthetic oligonucleotide
uccugaagcacacagguga

SEQ ID NO: 1123064 - RNA, 19 nt, Artificial Sequence
  Description of Artificial Sequence: Synthetic oligonucleotide
uauucugaucaacagagaa

SEQ ID NO: 1123065 - RNA, 19 nt, Artificial Sequence
  Description of Artificial Sequence: Synthetic oligonucleotide
agucuaaacucccauaucu

SEQ ID NO: 1123066 - RNA, 19 nt, Artificial Sequence
  Description of Artificial Sequence: Synthetic oligonucleotide
aguaucagaauccagggau

SEQ ID NO: 1123067 - RNA, 19 nt, Artificial Sequence
  Description of Artificial Sequence: Synthetic oligonucleotide
aagagccaaacacaaucac

SEQ ID NO: 1123068 - RNA, 19 nt, Artificial Sequence
  Description of Artificial Sequence: Synthetic oligonucleotide
aaugaagaguuuccugguc

SEQ ID NO: 1123069 - RNA, 19 nt, Artificial Sequence
  Description of Artificial Sequence: Synthetic oligonucleotide
cuuuacaucaccauccauc

SEQ ID NO: 1123070 - RNA, 19 nt, Artificial Sequence
  Description of Artificial Sequence: Synthetic oligonucleotide
aaaacucuaaguaucagaa

SEQ ID NO: 1123071 - RNA, 19 nt, Artificial Sequence
  Description of Artificial Sequence: Synthetic oligonucleotide
uaaaacucuaaguaucaga

SEQ ID NO: 1123072 - RNA, 19 nt, Artificial Sequence
  Description of Artificial Sequence: Synthetic oligonucleotide
uucaacauaucccaggaua

SEQ ID NO: 1123073 - RNA, 19 nt, Artificial Sequence
  Description of Artificial Sequence: Synthetic oligonucleotide
aacugcauucuaaaguuac

SEQ ID NO: 1123074 - RNA, 19 nt, Artificial Sequence
  Description of Artificial Sequence: Synthetic oligonucleotide
uucuuacccuaaaagagcc

SEQ ID NO: 1123075 - RNA, 19 nt, Artificial Sequence
  Description of Artificial Sequence: Synthetic oligonucleotide
uuagucuaaacucccauau

SEQ ID NO: 1123076 - RNA, 19 nt, Artificial Sequence
  Description of Artificial Sequence: Synthetic oligonucleotide
uuacauccaacagagcugg

SEQ ID NO: 1123077 - RNA, 19 nt, Artificial Sequence
  Description of Artificial Sequence: Synthetic oligonucleotide
caauuuaccaucuuuccuc

SEQ ID NO: 1123078 - RNA, 19 nt, Artificial Sequence
  Description of Artificial Sequence: Synthetic oligonucleotide
ucacaaugggaacauaaga

SEQ ID NO: 1123079 - RNA, 19 nt, Artificial Sequence
  Description of Artificial Sequence: Synthetic oligonucleotide
agauaaaacauauccccug

SEQ ID NO: 1123080 - RNA, 19 nt, Artificial Sequence
  Description of Artificial Sequence: Synthetic oligonucleotide
agauuaaacucuacguacc

SEQ ID NO: 1123081 - RNA, 19 nt, Artificial Sequence
  Description of Artificial Sequence: Synthetic oligonucleotide
agagaccaaacuuggugcc

SEQ ID NO: 1123082 - RNA, 19 nt, Artificial Sequence
  Description of Artificial Sequence: Synthetic oligonucleotide
agacacaugaaacuuacau

SEQ ID NO: 1123083 - RNA, 19 nt, Artificial Sequence
  Description of Artificial Sequence: Synthetic oligonucleotide
aaugaagauaaaacauauc

SEQ ID NO: 1123084 - RNA, 19 nt, Artificial Sequence
  Description of Artificial Sequence: Synthetic oligonucleotide
acgacagaaaugcucacuc

SEQ ID NO: 1123085 - RNA, 19 nt, Artificial Sequence
  Description of Artificial Sequence: Synthetic oligonucleotide
uuagagguaaggacauuag

SEQ ID NO: 1123086 - RNA, 19 nt, Artificial Sequence
  Description of Artificial Sequence: Synthetic oligonucleotide
uuaaacucuacguaccguc

SEQ ID NO: 1123087 - RNA, 19 nt, Artificial Sequence
  Description of Artificial Sequence: Synthetic oligonucleotide
acucuaaguaucagaaucc

SEQ ID NO: 1123088 - RNA, 19 nt, Artificial Sequence
  Description of Artificial Sequence: Synthetic oligonucleotide
uuagagugcgaugaaaaug

SEQ ID NO: 1123089 - RNA, 19 nt, Artificial Sequence
  Description of Artificial Sequence: Synthetic oligonucleotide
uaaaguuaccaagaaggcc

SEQ ID NO: 1123090 - RNA, 19 nt, Artificial Sequence
  Description of Artificial Sequence: Synthetic oligonucleotide
aacucccauaucuaaauau

SEQ ID NO: 1123091 - RNA, 19 nt, Artificial Sequence
  Description of Artificial Sequence: Synthetic oligonucleotide
ucuaaguaucagaauccag

SEQ ID NO: 1123092 - RNA, 19 nt, Artificial Sequence
  Description of Artificial Sequence: Synthetic oligonucleotide
auauaagagauuaaacucu

SEQ ID NO: 1123093 - RNA, 19 nt, Artificial Sequence
  Description of Artificial Sequence: Synthetic oligonucleotide
uaugucaccccacagcagu

SEQ ID NO: 1123094 - RNA, 19 nt, Artificial Sequence
  Description of Artificial Sequence: Synthetic oligonucleotide
caccuuuacaucaccaucc

SEQ ID NO: 1123095 - RNA, 19 nt, Artificial Sequence
  Description of Artificial Sequence: Synthetic oligonucleotide
ugcgcuauauagaaguagu

SEQ ID NO: 1123096 - RNA, 19 nt, Artificial Sequence
  Description of Artificial Sequence: Synthetic oligonucleotide
gucuuaacgaagcgaaacg

SEQ ID NO: 1123097 - RNA, 19 nt, Artificial Sequence
  Description of Artificial Sequence: Synthetic oligonucleotide
aacccaaagucaaauuaac

SEQ ID NO: 1123098 - RNA, 19 nt, Artificial Sequence
  Description of Artificial Sequence: Synthetic oligonucleotide
uauaagagauuaaacucua

SEQ ID NO: 1123099 - RNA, 19 nt, Artificial Sequence
  Description of Artificial Sequence: Synthetic oligonucleotide
agagauuaaacucuacgua

SEQ ID NO: 1123100 - RNA, 19 nt, Artificial Sequence
  Description of Artificial Sequence: Synthetic oligonucleotide
uuucaauccuggaucccgg

SEQ ID NO: 1123101 - RNA, 19 nt, Artificial Sequence
  Description of Artificial Sequence: Synthetic oligonucleotide
agccguuagagguaaggac

SEQ ID NO: 1123102 - RNA, 19 nt, Artificial Sequence
  Description of Artificial Sequence: Synthetic oligonucleotide
cagaguaaggcacagagga

SEQ ID NO: 1123103 - RNA, 19 nt, Artificial Sequence
  Description of Artificial Sequence: Synthetic oligonucleotide
ugcauguacucccaucgag

SEQ ID NO: 1123104 - RNA, 19 nt, Artificial Sequence
  Description of Artificial Sequence: Synthetic oligonucleotide
ucccauaucuaaauaucug

SEQ ID NO: 1123105 - RNA, 19 nt, Artificial Sequence
  Description of Artificial Sequence: Synthetic oligonucleotide
uaaacucuacguaccgucc

SEQ ID NO: 1123106 - RNA, 19 nt, Artificial Sequence
  Description of Artificial Sequence: Synthetic oligonucleotide
acaggugauaccaccaccc

SEQ ID NO: 1123107 - RNA, 19 nt, Artificial Sequence
  Description of Artificial Sequence: Synthetic oligonucleotide
ucuuaacgaagcgaaacgc

SEQ ID NO: 1123108 - RNA, 19 nt, Artificial Sequence
  Description of Artificial Sequence: Synthetic oligonucleotide
ugcuaugucaccccacagc

SEQ ID NO: 1123109 - RNA, 19 nt, Artificial Sequence
  Description of Artificial Sequence: Synthetic oligonucleotide
aaguucacgccuguguccg

SEQ ID NO: 1123110 - RNA, 19 nt, Artificial Sequence
  Description of Artificial Sequence: Synthetic oligonucleotide
auauagaaguagucaucac

SEQ ID NO: 1123111 - RNA, 19 nt, Artificial Sequence
  Description of Artificial Sequence: Synthetic oligonucleotide
cauacaguggcaacagcgc

SEQ ID NO: 1123112 - RNA, 19 nt, Artificial Sequence
  Description of Artificial Sequence: Synthetic oligonucleotide
gauugccugccauacagug

SEQ ID NO: 1123113 - RNA, 19 nt, Artificial Sequence
  Description of Artificial Sequence: Synthetic oligonucleotide
ucuacuugcgcaagcgccc

SEQ ID NO: 1123114 - RNA, 19 nt, Artificial Sequence
  Description of Artificial Sequence: Synthetic oligonucleotide
ugugggugcauaaggauuc

SEQ ID NO: 1123115 - RNA, 19 nt, Artificial Sequence
  Description of Artificial Sequence: Synthetic oligonucleotide
uaaaacauauccccugaua

SEQ ID NO: 1123116 - RNA, 19 nt, Artificial Sequence
  Description of Artificial Sequence: Synthetic oligonucleotide
auacuuacauucccuuuuc

SEQ ID NO: 1123117 - RNA, 19 nt, Artificial Sequence
  Description of Artificial Sequence: Synthetic oligonucleotide
uuuucaaacacacgcccau

SEQ ID NO: 1123118 - RNA, 19 nt, Artificial Sequence
  Description of Artificial Sequence: Synthetic oligonucleotide
cauguacucccaucgagcc

SEQ ID NO: 1123119 - RNA, 19 nt, Artificial Sequence
  Description of Artificial Sequence: Synthetic oligonucleotide
ucuuaagaccuggaaaccc

SEQ ID NO: 1123120 - RNA, 19 nt, Artificial Sequence
  Description of Artificial Sequence: Synthetic oligonucleotide
cuauauagaaguagucauc

SEQ ID NO: 1123121 - RNA, 19 nt, Artificial Sequence
  Description of Artificial Sequence: Synthetic oligonucleotide
aacucuacguaccguccuc

SEQ ID NO: 1123122 - RNA, 19 nt, Artificial Sequence
  Description of Artificial Sequence: Synthetic oligonucleotide
agucaaauuaacuggucau

SEQ ID NO: 1123123 - RNA, 19 nt, Artificial Sequence
  Description of Artificial Sequence: Synthetic oligonucleotide
augaacgacagaaaugcuc

SEQ ID NO: 1123124 - RNA, 19 nt, Artificial Sequence
  Description of Artificial Sequence: Synthetic oligonucleotide
uuuuccucugccuugcauc

SEQ ID NO: 1123125 - RNA, 19 nt, Artificial Sequence
  Description of Artificial Sequence: Synthetic oligonucleotide
cuaaaagagccaaacacaa

SEQ ID NO: 1123126 - RNA, 19 nt, Artificial Sequence
  Description of Artificial Sequence: Synthetic oligonucleotide
uuauaauauucugaucaac

SEQ ID NO: 1123127 - RNA, 19 nt, Artificial Sequence
  Description of Artificial Sequence: Synthetic oligonucleotide
agguaaggacauuaggaug

SEQ ID NO: 1123128 - RNA, 19 nt, Artificial Sequence
  Description of Artificial Sequence: Synthetic oligonucleotide
ugguccauauuauaauacu

SEQ ID NO: 1123129 - RNA, 19 nt, Artificial Sequence
  Description of Artificial Sequence: Synthetic oligonucleotide
cauaagaaggaaccacagc

SEQ ID NO: 1123130 - RNA, 19 nt, Artificial Sequence
  Description of Artificial Sequence: Synthetic oligonucleotide
uuaacgaagcgaaacgcuu

SEQ ID NO: 1123131 - RNA, 19 nt, Artificial Sequence
  Description of Artificial Sequence: Synthetic oligonucleotide
acagagcuuacacccauag

SEQ ID NO: 1123132 - RNA, 19 nt, Artificial Sequence
  Description of Artificial Sequence: Synthetic oligonucleotide
aaguaucagaauccaggga

SEQ ID NO: 1123133 - RNA, 19 nt, Artificial Sequence
  Description of Artificial Sequence: Synthetic oligonucleotide
augaaugaacuaaugaaga

SEQ ID NO: 1123134 - RNA, 19 nt, Artificial Sequence
  Description of Artificial Sequence: Synthetic oligonucleotide
ugaagcacacaggugauac

SEQ ID NO: 1123135 - RNA, 19 nt, Artificial Sequence
  Description of Artificial Sequence: Synthetic oligonucleotide
ugauucuaaaaggacaaau

SEQ ID NO: 1123136 - RNA, 19 nt, Artificial Sequence
  Description of Artificial Sequence: Synthetic oligonucleotide
ucuaaauaucugaaauaua

SEQ ID NO: 1123137 - RNA, 19 nt, Artificial Sequence
  Description of Artificial Sequence: Synthetic oligonucleotide
agaggauugccugccauac

SEQ ID NO: 1123138 - RNA, 19 nt, Artificial Sequence
  Description of Artificial Sequence: Synthetic oligonucleotide
caggauaauauuuaaauau

SEQ ID NO: 1123139 - RNA, 19 nt, Artificial Sequence
  Description of Artificial Sequence: Synthetic oligonucleotide
ugcuuucaauccuggaucc

SEQ ID NO: 1123140 - RNA, 19 nt, Artificial Sequence
  Description of Artificial Sequence: Synthetic oligonucleotide
auaaaauuuauuagcugga

SEQ ID NO: 1123141 - RNA, 19 nt, Artificial Sequence
  Description of Artificial Sequence: Synthetic oligonucleotide
aaacucuacguaccguccu

SEQ ID NO: 1123142 - RNA, 19 nt, Artificial Sequence
  Description of Artificial Sequence: Synthetic oligonucleotide
ucuuagucuaaacucccau

SEQ ID NO: 1123143 - RNA, 19 nt, Artificial Sequence
  Description of Artificial Sequence: Synthetic oligonucleotide
uuuagagugcgaugaaaau

SEQ ID NO: 1123144 - RNA, 19 nt, Artificial Sequence
  Description of Artificial Sequence: Synthetic oligonucleotide
cauauccccugauaaauuc

SEQ ID NO: 1123145 - RNA, 19 nt, Artificial Sequence
  Description of Artificial Sequence: Synthetic oligonucleotide
gcauucuaaaguuaccaag

SEQ ID NO: 1123146 - RNA, 19 nt, Artificial Sequence
  Description of Artificial Sequence: Synthetic oligonucleotide
auaauacuuacauucccuu

SEQ ID NO: 1123147 - RNA, 19 nt, Artificial Sequence
  Description of Artificial Sequence: Synthetic oligonucleotide
acaugauucuaaaaggaca

SEQ ID NO: 1123148 - RNA, 19 nt, Artificial Sequence
  Description of Artificial Sequence: Synthetic oligonucleotide
auauccccugauaaauucc

SEQ ID NO: 1123149 - RNA, 19 nt, Artificial Sequence
  Description of Artificial Sequence: Synthetic oligonucleotide
uggaucccggaguaaagag

SEQ ID NO: 1123150 - RNA, 19 nt, Artificial Sequence
  Description of Artificial Sequence: Synthetic oligonucleotide
uauuagcuggaucuguaua

SEQ ID NO: 1123151 - RNA, 19 nt, Artificial Sequence
  Description of Artificial Sequence: Synthetic oligonucleotide
ucggucauauaagagauua

SEQ ID NO: 1123152 - RNA, 19 nt, Artificial Sequence
  Description of Artificial Sequence: Synthetic oligonucleotide
uguacucccaucgagccgu

SEQ ID NO: 1123153 - RNA, 19 nt, Artificial Sequence
  Description of Artificial Sequence: Synthetic oligonucleotide
cugguccauauuauaauac

SEQ ID NO: 1123154 - RNA, 19 nt, Artificial Sequence
  Description of Artificial Sequence: Synthetic oligonucleotide
gaucccggaguaaagagac

SEQ ID NO: 1123155 - RNA, 19 nt, Artificial Sequence
  Description of Artificial Sequence: Synthetic oligonucleotide
gagcuuacacccauagcgg

SEQ ID NO: 1123156 - RNA, 19 nt, Artificial Sequence
  Description of Artificial Sequence: Synthetic oligonucleotide
acucccauaucuaaauauc

SEQ ID NO: 1123157 - RNA, 19 nt, Artificial Sequence
  Description of Artificial Sequence: Synthetic oligonucleotide
uuaccaagaaggccaacau

SEQ ID NO: 1123158 - RNA, 19 nt, Artificial Sequence
  Description of Artificial Sequence: Synthetic oligonucleotide
ccauacaguggcaacagcg

SEQ ID NO: 1123159 - RNA, 19 nt, Artificial Sequence
  Description of Artificial Sequence: Synthetic oligonucleotide
cuuuagagugcgaugaaaa

SEQ ID NO: 1123160 - RNA, 19 nt, Artificial Sequence
  Description of Artificial Sequence: Synthetic oligonucleotide
auucuaaaguuaccaagaa

SEQ ID NO: 1123161 - RNA, 19 nt, Artificial Sequence
  Description of Artificial Sequence: Synthetic oligonucleotide
aagcgaaacgcuuccuccu

SEQ ID NO: 1123162 - RNA, 19 nt, Artificial Sequence
  Description of Artificial Sequence: Synthetic oligonucleotide
gaugucuggcccgugcugg

SEQ ID NO: 1123163 - RNA, 19 nt, Artificial Sequence
  Description of Artificial Sequence: Synthetic oligonucleotide
uuagcuggaucuguauaag

SEQ ID NO: 1123164 - RNA, 19 nt, Artificial Sequence
  Description of Artificial Sequence: Synthetic oligonucleotide
uagaaguagucaucacacc

SEQ ID NO: 1123165 - RNA, 19 nt, Artificial Sequence
  Description of Artificial Sequence: Synthetic oligonucleotide
ugcauucuaaaguuaccaa

SEQ ID NO: 1123166 - RNA, 19 nt, Artificial Sequence
  Description of Artificial Sequence: Synthetic oligonucleotide
gacacaugaaacuuacaua

SEQ ID NO: 1123167 - RNA, 19 nt, Artificial Sequence
  Description of Artificial Sequence: Synthetic oligonucleotide
uuugggguagaugucuggc

SEQ ID NO: 1123168 - RNA, 19 nt, Artificial Sequence
  Description of Artificial Sequence: Synthetic oligonucleotide
uaagaaggaaccacagcuu

SEQ ID NO: 1123169 - RNA, 19 nt, Artificial Sequence
  Description of Artificial Sequence: Synthetic oligonucleotide
ggugaaugagucaucacag

SEQ ID NO: 1123170 - RNA, 19 nt, Artificial Sequence
  Description of Artificial Sequence: Synthetic oligonucleotide
uaaagagaccaaacuuggu

SEQ ID NO: 1123171 - RNA, 19 nt, Artificial Sequence
  Description of Artificial Sequence: Synthetic oligonucleotide
cauaaggauucuuggggug

SEQ ID NO: 1123172 - RNA, 19 nt, Artificial Sequence
  Description of Artificial Sequence: Synthetic oligonucleotide
aguguacccaguccuucgg

SEQ ID NO: 1123173 - RNA, 19 nt, Artificial Sequence
  Description of Artificial Sequence: Synthetic oligonucleotide
agguauguuggugugaggu

SEQ ID NO: 1123174 - RNA, 19 nt, Artificial Sequence
  Description of Artificial Sequence: Synthetic oligonucleotide
agaccuggaaacccaaagu

SEQ ID NO: 1123175 - RNA, 19 nt, Artificial Sequence
  Description of Artificial Sequence: Synthetic oligonucleotide
cccuaaaagagccaaacac

SEQ ID NO: 1123176 - RNA, 19 nt, Artificial Sequence
  Description of Artificial Sequence: Synthetic oligonucleotide
uucuuaagaccuggaaacc

SEQ ID NO: 1123177 - RNA, 19 nt, Artificial Sequence
  Description of Artificial Sequence: Synthetic oligonucleotide
caacaugaaugaacuaaug

SEQ ID NO: 1123178 - RNA, 19 nt, Artificial Sequence
  Description of Artificial Sequence: Synthetic oligonucleotide
uuggggugaaucacagagc

SEQ ID NO: 1123179 - RNA, 19 nt, Artificial Sequence
  Description of Artificial Sequence: Synthetic oligonucleotide
acugcuaugucaccccaca

SEQ ID NO: 1123180 - RNA, 19 nt, Artificial Sequence
  Description of Artificial Sequence: Synthetic oligonucleotide
uacccuaaaagagccaaac

SEQ ID NO: 1123181 - RNA, 19 nt, Artificial Sequence
  Description of Artificial Sequence: Synthetic oligonucleotide
cuuaagaccuggaaaccca

SEQ ID NO: 1123182 - RNA, 19 nt, Artificial Sequence
  Description of Artificial Sequence: Synthetic oligonucleotide
auaagagauuaaacucuac

SEQ ID NO: 1123183 - RNA, 19 nt, Artificial Sequence
  Description of Artificial Sequence: Synthetic oligonucleotide
ggcaauuuaccaucuuucc

SEQ ID NO: 1123184 - RNA, 19 nt, Artificial Sequence
  Description of Artificial Sequence: Synthetic oligonucleotide
auugugggugcauaaggau

SEQ ID NO: 1123185 - RNA, 19 nt, Artificial Sequence
  Description of Artificial Sequence: Synthetic oligonucleotide
uuauuagcuggaucuguau

SEQ ID NO: 1123186 - RNA, 19 nt, Artificial Sequence
  Description of Artificial Sequence: Synthetic oligonucleotide
uaauacuuacauucccuuu

SEQ ID NO: 1123187 - RNA, 19 nt, Artificial Sequence
  Description of Artificial Sequence: Synthetic oligonucleotide
aaacacacgcccauccuga

SEQ ID NO: 1123188 - RNA, 19 nt, Artificial Sequence
  Description of Artificial Sequence: Synthetic oligonucleotide
aacgacagaaaugcucacu

SEQ ID NO: 1123189 - RNA, 19 nt, Artificial Sequence
  Description of Artificial Sequence: Synthetic oligonucleotide
auacaguggcaacagcgca

SEQ ID NO: 1123190 - RNA, 19 nt, Artificial Sequence
  Description of Artificial Sequence: Synthetic oligonucleotide
gcauugugggugcauaagg

SEQ ID NO: 1123191 - RNA, 19 nt, Artificial Sequence
  Description of Artificial Sequence: Synthetic oligonucleotide
accaccaguguguguuacc

SEQ ID NO: 1123192 - RNA, 19 nt, Artificial Sequence
  Description of Artificial Sequence: Synthetic oligonucleotide
ucucccaucgguccacaga

SEQ ID NO: 1123193 - RNA, 19 nt, Artificial Sequence
  Description of Artificial Sequence: Synthetic oligonucleotide
uggcagaaucuguagauuu

SEQ ID NO: 1123194 - RNA, 19 nt, Artificial Sequence
  Description of Artificial Sequence: Synthetic oligonucleotide
agaguuuccugguccauau

SEQ ID NO: 1123195 - RNA, 19 nt, Artificial Sequence
  Description of Artificial Sequence: Synthetic oligonucleotide
cuuccuuuagagugcgaug

SEQ ID NO: 1123196 - RNA, 19 nt, Artificial Sequence
  Description of Artificial Sequence: Synthetic oligonucleotide
guuaccaagaaggccaaca

SEQ ID NO: 1123197 - RNA, 19 nt, Artificial Sequence
  Description of Artificial Sequence: Synthetic oligonucleotide
ugcauugugggugcauaag

SEQ ID NO: 1123198 - RNA, 19 nt, Artificial Sequence
  Description of Artificial Sequence: Synthetic oligonucleotide
gucuacuugcgcaagcgcc

SEQ ID NO: 1123199 - RNA, 19 nt, Artificial Sequence
  Description of Artificial Sequence: Synthetic oligonucleotide
ucacgcaggucugucacag

SEQ ID NO: 1123200 - RNA, 19 nt, Artificial Sequence
  Description of Artificial Sequence: Synthetic oligonucleotide
uccugguccauauuauaau

SEQ ID NO: 1123201 - RNA, 19 nt, Artificial Sequence
  Description of Artificial Sequence: Synthetic oligonucleotide
auguacucccaucgagccg

SEQ ID NO: 1123202 - RNA, 19 nt, Artificial Sequence
  Description of Artificial Sequence: Synthetic oligonucleotide
ucuuacccuaaaagagcca

SEQ ID NO: 1123203 - RNA, 19 nt, Artificial Sequence
  Description of Artificial Sequence: Synthetic oligonucleotide
ugggacagaguaaggcaca

SEQ ID NO: 1123204 - RNA, 19 nt, Artificial Sequence
  Description of Artificial Sequence: Synthetic oligonucleotide
uauguuggugugaggucac

SEQ ID NO: 1123205 - RNA, 19 nt, Artificial Sequence
  Description of Artificial Sequence: Synthetic oligonucleotide
uagucuaaacucccauauc

SEQ ID NO: 1123206 - RNA, 19 nt, Artificial Sequence
  Description of Artificial Sequence: Synthetic oligonucleotide
caucacugcuaugucaccc

SEQ ID NO: 1123207 - RNA, 19 nt, Artificial Sequence
  Description of Artificial Sequence: Synthetic oligonucleotide
cacacgucuuaacgaagcg

SEQ ID NO: 1123208 - RNA, 19 nt, Artificial Sequence
  Description of Artificial Sequence: Synthetic oligonucleotide
cauugugggugcauaagga

SEQ ID NO: 1123209 - RNA, 19 nt, Artificial Sequence
  Description of Artificial Sequence: Synthetic oligonucleotide
cacgucuuaacgaagcgaa

SEQ ID NO: 1123210 - RNA, 19 nt, Artificial Sequence
  Description of Artificial Sequence: Synthetic oligonucleotide
ucuacguaccguccucuuc

SEQ ID NO: 1123211 - RNA, 19 nt, Artificial Sequence
  Description of Artificial Sequence: Synthetic oligonucleotide
gggugaaugagucaucaca

SEQ ID NO: 1123212 - RNA, 19 nt, Artificial Sequence
  Description of Artificial Sequence: Synthetic oligonucleotide
acaguggcaacagcgcagg

SEQ ID NO: 1123213 - RNA, 19 nt, Artificial Sequence
  Description of Artificial Sequence: Synthetic oligonucleotide
caguguacccaguccuucg

SEQ ID NO: 1123214 - RNA, 19 nt, Artificial Sequence
  Description of Artificial Sequence: Synthetic oligonucleotide
auaaggauucuugggguga

SEQ ID NO: 1123215 - RNA, 19 nt, Artificial Sequence
  Description of Artificial Sequence: Synthetic oligonucleotide
cugaaauauaaaacucuaa

SEQ ID NO: 1123216 - RNA, 19 nt, Artificial Sequence
  Description of Artificial Sequence: Synthetic oligonucleotide
uuguucagguauguuggug

SEQ ID NO: 1123217 - RNA, 19 nt, Artificial Sequence
  Description of Artificial Sequence: Synthetic oligonucleotide
agaagucggccacuccguc

SEQ ID NO: 1123218 - RNA, 19 nt, Artificial Sequence
  Description of Artificial Sequence: Synthetic oligonucleotide
auuaaacucuacguaccgu

SEQ ID NO: 1123219 - RNA, 19 nt, Artificial Sequence
  Description of Artificial Sequence: Synthetic oligonucleotide
acccuaaaagagccaaaca

SEQ ID NO: 1123220 - RNA, 19 nt, Artificial Sequence
  Description of Artificial Sequence: Synthetic oligonucleotide
ccuaaaagagccaaacaca

SEQ ID NO: 1123221 - RNA, 19 nt, Artificial Sequence
  Description of Artificial Sequence: Synthetic oligonucleotide
agcuuacacccauagcggu

SEQ ID NO: 1123222 - RNA, 19 nt, Artificial Sequence
  Description of Artificial Sequence: Synthetic oligonucleotide
auguggcagaaucuguaga

SEQ ID NO: 1123223 - RNA, 19 nt, Artificial Sequence
  Description of Artificial Sequence: Synthetic oligonucleotide
acauaucccaggauaauau

SEQ ID NO: 1123224 - RNA, 19 nt, Artificial Sequence
  Description of Artificial Sequence: Synthetic oligonucleotide
cacgaugcgcuauauagaa

SEQ ID NO: 1123225 - RNA, 19 nt, Artificial Sequence
  Description of Artificial Sequence: Synthetic oligonucleotide
acgcuuccuccuuggaugg

SEQ ID NO: 1123226 - RNA, 19 nt, Artificial Sequence
  Description of Artificial Sequence: Synthetic oligonucleotide
uuuccugguccauauuaua

SEQ ID NO: 1123227 - RNA, 19 nt, Artificial Sequence
  Description of Artificial Sequence: Synthetic oligonucleotide
uaucagaauccagggauau

SEQ ID NO: 1123228 - RNA, 19 nt, Artificial Sequence
  Description of Artificial Sequence: Synthetic oligonucleotide
guuggugugaggucacauc

SEQ ID NO: 1123229 - RNA, 19 nt, Artificial Sequence
  Description of Artificial Sequence: Synthetic oligonucleotide
uuacccuaaaagagccaaa

SEQ ID NO: 1123230 - RNA, 19 nt, Artificial Sequence
  Description of Artificial Sequence: Synthetic oligonucleotide
uguacccaguccuucggau

SEQ ID NO: 1123231 - RNA, 19 nt, Artificial Sequence
  Description of Artificial Sequence: Synthetic oligonucleotide
uggcaccuuuacaucacca

SEQ ID NO: 1123232 - RNA, 19 nt, Artificial Sequence
  Description of Artificial Sequence: Synthetic oligonucleotide
uccgucuacuugcgcaagc

SEQ ID NO: 1123233 - RNA, 19 nt, Artificial Sequence
  Description of Artificial Sequence: Synthetic oligonucleotide
auaucccaggauaauauuu

SEQ ID NO: 1123234 - RNA, 19 nt, Artificial Sequence
  Description of Artificial Sequence: Synthetic oligonucleotide
ggucauauaagagauuaaa

SEQ ID NO: 1123235 - RNA, 19 nt, Artificial Sequence
  Description of Artificial Sequence: Synthetic oligonucleotide
uugcgcaagcgcccgacac

SEQ ID NO: 1123236 - RNA, 19 nt, Artificial Sequence
  Description of Artificial Sequence: Synthetic oligonucleotide
cugcauucuaaaguuacca

SEQ ID NO: 1123237 - RNA, 19 nt, Artificial Sequence
  Description of Artificial Sequence: Synthetic oligonucleotide
ucccaucgagccguuagag

SEQ ID NO: 1123238 - RNA, 19 nt, Artificial Sequence
  Description of Artificial Sequence: Synthetic oligonucleotide
cuuaacgaagcgaaacgcu

SEQ ID NO: 1123239 - RNA, 19 nt, Artificial Sequence
  Description of Artificial Sequence: Synthetic oligonucleotide
uucaauccuggaucccgga

SEQ ID NO: 1123240 - RNA, 19 nt, Artificial Sequence
  Description of Artificial Sequence: Synthetic oligonucleotide
ugcgcaagcgcccgacaca

SEQ ID NO: 1123241 - RNA, 19 nt, Artificial Sequence
  Description of Artificial Sequence: Synthetic oligonucleotide
gagugcgaugaaaauggac

SEQ ID NO: 1123242 - RNA, 19 nt, Artificial Sequence
  Description of Artificial Sequence: Synthetic oligonucleotide
gcuauauagaaguagucau

SEQ ID NO: 1123243 - RNA, 19 nt, Artificial Sequence
  Description of Artificial Sequence: Synthetic oligonucleotide
auagcgguaaauggcaauu

SEQ ID NO: 1123244 - RNA, 19 nt, Artificial Sequence
  Description of Artificial Sequence: Synthetic oligonucleotide
cuuacccuaaaagagccaa

SEQ ID NO: 1123245 - RNA, 19 nt, Artificial Sequence
  Description of Artificial Sequence: Synthetic oligonucleotide
acgccuguguccgccaggc

SEQ ID NO: 1123246 - RNA, 19 nt, Artificial Sequence
  Description of Artificial Sequence: Synthetic oligonucleotide
agcgguaaauggcaauuua

SEQ ID NO: 1123247 - RNA, 19 nt, Artificial Sequence
  Description of Artificial Sequence: Synthetic oligonucleotide
uaccguccucuucucagcu

SEQ ID NO: 1123248 - RNA, 19 nt, Artificial Sequence
  Description of Artificial Sequence: Synthetic oligonucleotide
caggugauaccaccacccc

SEQ ID NO: 1123249 - RNA, 19 nt, Artificial Sequence
  Description of Artificial Sequence: Synthetic oligonucleotide
gaacgacagaaaugcucac

SEQ ID NO: 1123250 - RNA, 19 nt, Artificial Sequence
  Description of Artificial Sequence: Synthetic oligonucleotide
cagagcuuacacccauagc

SEQ ID NO: 1123251 - RNA, 19 nt, Artificial Sequence
  Description of Artificial Sequence: Synthetic oligonucleotide
uggaauucucugguggcaa

SEQ ID NO: 1123252 - RNA, 19 nt, Artificial Sequence
  Description of Artificial Sequence: Synthetic oligonucleotide
uucagguauguugguguga

SEQ ID NO: 1123253 - RNA, 19 nt, Artificial Sequence
  Description of Artificial Sequence: Synthetic oligonucleotide
aagaguuuccugguccaua

SEQ ID NO: 1123254 - RNA, 19 nt, Artificial Sequence
  Description of Artificial Sequence: Synthetic oligonucleotide
aguucacgccuguguccgc

SEQ ID NO: 1123255 - RNA, 19 nt, Artificial Sequence
  Description of Artificial Sequence: Synthetic oligonucleotide
guaccguccucuucucagc

SEQ ID NO: 1123256 - RNA, 19 nt, Artificial Sequence
  Description of Artificial Sequence: Synthetic oligonucleotide
ggccacuccgucuacuugc

SEQ ID NO: 1123257 - RNA, 19 nt, Artificial Sequence
  Description of Artificial Sequence: Synthetic oligonucleotide
acuugcgcaagcgcccgac

SEQ ID NO: 1123258 - RNA, 19 nt, Artificial Sequence
  Description of Artificial Sequence: Synthetic oligonucleotide
ucuuggggugaaucacaga

SEQ ID NO: 1123259 - RNA, 19 nt, Artificial Sequence
  Description of Artificial Sequence: Synthetic oligonucleotide
acacgucuuaacgaagcga

SEQ ID NO: 1123260 - RNA, 19 nt, Artificial Sequence
  Description of Artificial Sequence: Synthetic oligonucleotide
gcgaugaaaauggacagca

SEQ ID NO: 1123261 - RNA, 19 nt, Artificial Sequence
  Description of Artificial Sequence: Synthetic oligonucleotide
agauucccaugaacgacag

SEQ ID NO: 1123262 - RNA, 19 nt, Artificial Sequence
  Description of Artificial Sequence: Synthetic oligonucleotide
guagucaucacaccauuuu

SEQ ID NO: 1123263 - RNA, 19 nt, Artificial Sequence
  Description of Artificial Sequence: Synthetic oligonucleotide
cucccauaucuaaauaucu

SEQ ID NO: 1123264 - RNA, 19 nt, Artificial Sequence
  Description of Artificial Sequence: Synthetic oligonucleotide
uuccgcagcucacgcaggu

SEQ ID NO: 1123265 - RNA, 19 nt, Artificial Sequence
  Description of Artificial Sequence: Synthetic oligonucleotide
acuccgucuacuugcgcaa

SEQ ID NO: 1123266 - RNA, 19 nt, Artificial Sequence
  Description of Artificial Sequence: Synthetic oligonucleotide
aagacacaugaaacuuaca

SEQ ID NO: 1123267 - RNA, 19 nt, Artificial Sequence
  Description of Artificial Sequence: Synthetic oligonucleotide
guagauuuucuuacccuaa

SEQ ID NO: 1123268 - RNA, 19 nt, Artificial Sequence
  Description of Artificial Sequence: Synthetic oligonucleotide
augcauguacucccaucga

SEQ ID NO: 1123269 - RNA, 19 nt, Artificial Sequence
  Description of Artificial Sequence: Synthetic oligonucleotide
caacagcgcaggaaguuca

SEQ ID NO: 1123270 - RNA, 19 nt, Artificial Sequence
  Description of Artificial Sequence: Synthetic oligonucleotide
aguccuucggauggcgcag

SEQ ID NO: 1123271 - RNA, 19 nt, Artificial Sequence
  Description of Artificial Sequence: Synthetic oligonucleotide
gucaaauuaacuggucaua

SEQ ID NO: 1123272 - RNA, 19 nt, Artificial Sequence
  Description of Artificial Sequence: Synthetic oligonucleotide
cccugauaaauuccuguag

SEQ ID NO: 1123273 - RNA, 19 nt, Artificial Sequence
  Description of Artificial Sequence: Synthetic oligonucleotide
gggugaaucacagagcuua

SEQ ID NO: 1123274 - RNA, 19 nt, Artificial Sequence
  Description of Artificial Sequence: Synthetic oligonucleotide
gagccguuagagguaagga

SEQ ID NO: 1123275 - RNA, 19 nt, Artificial Sequence
  Description of Artificial Sequence: Synthetic oligonucleotide
cuggcaccuuuacaucacc

SEQ ID NO: 1123276 - RNA, 19 nt, Artificial Sequence
  Description of Artificial Sequence: Synthetic oligonucleotide
cuacuugcgcaagcgcccg

SEQ ID NO: 1123277 - RNA, 19 nt, Artificial Sequence
  Description of Artificial Sequence: Synthetic oligonucleotide
aaaccaccaguguguguua

SEQ ID NO: 1123278 - RNA, 19 nt, Artificial Sequence
  Description of Artificial Sequence: Synthetic oligonucleotide
caucgguccacagagaagu

SEQ ID NO: 1123279 - RNA, 19 nt, Artificial Sequence
  Description of Artificial Sequence: Synthetic oligonucleotide
gggugcauaaggauucuug

SEQ ID NO: 1123280 - RNA, 19 nt, Artificial Sequence
  Description of Artificial Sequence: Synthetic oligonucleotide
augcauugugggugcauaa

SEQ ID NO: 1123281 - RNA, 19 nt, Artificial Sequence
  Description of Artificial Sequence: Synthetic oligonucleotide
gccguuagagguaaggaca

SEQ ID NO: 1123282 - RNA, 19 nt, Artificial Sequence
  Description of Artificial Sequence: Synthetic oligonucleotide
ucggauggcgcaguacuuc

SEQ ID NO: 1123283 - RNA, 19 nt, Artificial Sequence
  Description of Artificial Sequence: Synthetic oligonucleotide
aguggcaacagcgcaggaa

SEQ ID NO: 1123284 - RNA, 19 nt, Artificial Sequence
  Description of Artificial Sequence: Synthetic oligonucleotide
ggucauagaacaugauucu

SEQ ID NO: 1123285 - RNA, 19 nt, Artificial Sequence
  Description of Artificial Sequence: Synthetic oligonucleotide
gaaacgcuuccuccuugga

SEQ ID NO: 1123286 - RNA, 19 nt, Artificial Sequence
  Description of Artificial Sequence: Synthetic oligonucleotide
gcauguacucccaucgagc

SEQ ID NO: 1123287 - RNA, 19 nt, Artificial Sequence
  Description of Artificial Sequence: Synthetic oligonucleotide
cuacguaccguccucuucu

SEQ ID NO: 1123288 - RNA, 19 nt, Artificial Sequence
  Description of Artificial Sequence: Synthetic oligonucleotide
gugaggucacauccacccc

SEQ ID NO: 1123289 - RNA, 19 nt, Artificial Sequence
  Description of Artificial Sequence: Synthetic oligonucleotide
cagguauguuggugugagg

SEQ ID NO: 1123290 - RNA, 19 nt, Artificial Sequence
  Description of Artificial Sequence: Synthetic oligonucleotide
cugcuaugucaccccacag

SEQ ID NO: 1123291 - RNA, 19 nt, Artificial Sequence
  Description of Artificial Sequence: Synthetic oligonucleotide
cuuacacccauagcgguaa

SEQ ID NO: 1123292 - RNA, 19 nt, Artificial Sequence
  Description of Artificial Sequence: Synthetic oligonucleotide
aaguuaccaagaaggccaa

SEQ ID NO: 1123293 - RNA, 19 nt, Artificial Sequence
  Description of Artificial Sequence: Synthetic oligonucleotide
cuucggauggcgcaguacu

SEQ ID NO: 1123294 - RNA, 19 nt, Artificial Sequence
  Description of Artificial Sequence: Synthetic oligonucleotide
agcacacgucuuaacgaag

SEQ ID NO: 1123295 - RNA, 19 nt, Artificial Sequence
  Description of Artificial Sequence: Synthetic oligonucleotide
cuggaacaacacucugcug

SEQ ID NO: 1123296 - RNA, 19 nt, Artificial Sequence
  Description of Artificial Sequence: Synthetic oligonucleotide
uacauccaacagagcuggc

SEQ ID NO: 1123297 - RNA, 19 nt, Artificial Sequence
  Description of Artificial Sequence: Synthetic oligonucleotide
acauguggcagaaucugua

SEQ ID NO: 1123298 - RNA, 19 nt, Artificial Sequence
  Description of Artificial Sequence: Synthetic oligonucleotide
cagcacacgucuuaacgaa

SEQ ID NO: 1123299 - RNA, 19 nt, Artificial Sequence
  Description of Artificial Sequence: Synthetic oligonucleotide
uccuccuuggauggagagu

SEQ ID NO: 1123300 - RNA, 19 nt, Artificial Sequence
  Description of Artificial Sequence: Synthetic oligonucleotide
gcgguaaauggcaauuuac

SEQ ID NO: 1123301 - RNA, 19 nt, Artificial Sequence
  Description of Artificial Sequence: Synthetic oligonucleotide
aucccggaguaaagagacc

SEQ ID NO: 1123302 - RNA, 19 nt, Artificial Sequence
  Description of Artificial Sequence: Synthetic oligonucleotide
gcaauuuaccaucuuuccu

SEQ ID NO: 1123303 - RNA, 19 nt, Artificial Sequence
  Description of Artificial Sequence: Synthetic oligonucleotide
cacugcuaugucaccccac

SEQ ID NO: 1123304 - RNA, 19 nt, Artificial Sequence
  Description of Artificial Sequence: Synthetic oligonucleotide
uggcccgugcuggucacag

SEQ ID NO: 1123305 - RNA, 19 nt, Artificial Sequence
  Description of Artificial Sequence: Synthetic oligonucleotide
agcgaaacgcuuccuccuu

SEQ ID NO: 1123306 - RNA, 19 nt, Artificial Sequence
  Description of Artificial Sequence: Synthetic oligonucleotide
acgaugcgcuauauagaag

SEQ ID NO: 1123307 - RNA, 19 nt, Artificial Sequence
  Description of Artificial Sequence: Synthetic oligonucleotide
gucauagaacaugauucua

SEQ ID NO: 1123308 - RNA, 19 nt, Artificial Sequence
  Description of Artificial Sequence: Synthetic oligonucleotide
acauauccccugauaaauu

SEQ ID NO: 1123309 - RNA, 19 nt, Artificial Sequence
  Description of Artificial Sequence: Synthetic oligonucleotide
cccauagcgguaaauggca

SEQ ID NO: 1123310 - RNA, 19 nt, Artificial Sequence
  Description of Artificial Sequence: Synthetic oligonucleotide
acgcccauccugaagcaca

SEQ ID NO: 1123311 - RNA, 19 nt, Artificial Sequence
  Description of Artificial Sequence: Synthetic oligonucleotide
cccaucgagccguuagagg

SEQ ID NO: 1123312 - RNA, 19 nt, Artificial Sequence
  Description of Artificial Sequence: Synthetic oligonucleotide
gcucacgcaggucugucac

SEQ ID NO: 1123313 - RNA, 19 nt, Artificial Sequence
  Description of Artificial Sequence: Synthetic oligonucleotide
gucuaaacucccauaucua

SEQ ID NO: 1123314 - RNA, 19 nt, Artificial Sequence
  Description of Artificial Sequence: Synthetic oligonucleotide
agucggccacuccgucuac

SEQ ID NO: 1123315 - RNA, 19 nt, Artificial Sequence
  Description of Artificial Sequence: Synthetic oligonucleotide
uagcgguaaauggcaauuu

SEQ ID NO: 1123316 - RNA, 19 nt, Artificial Sequence
  Description of Artificial Sequence: Synthetic oligonucleotide
cgucuuaacgaagcgaaac

SEQ ID NO: 1123317 - RNA, 19 nt, Artificial Sequence
  Description of Artificial Sequence: Synthetic oligonucleotide
uacguaccguccucuucuc

SEQ ID NO: 1123318 - RNA, 19 nt, Artificial Sequence
  Description of Artificial Sequence: Synthetic oligonucleotide
cagaaucuguagauuuucu

SEQ ID NO: 1123319 - RNA, 19 nt, Artificial Sequence
  Description of Artificial Sequence: Synthetic oligonucleotide
guaucagaauccagggaua

SEQ ID NO: 1123320 - RNA, 19 nt, Artificial Sequence
  Description of Artificial Sequence: Synthetic oligonucleotide
aucgagccguuagagguaa

SEQ ID NO: 1123321 - RNA, 19 nt, Artificial Sequence
  Description of Artificial Sequence: Synthetic oligonucleotide
uuacacccauagcgguaaa

SEQ ID NO: 1123322 - RNA, 19 nt, Artificial Sequence
  Description of Artificial Sequence: Synthetic oligonucleotide
ucggccacuccgucuacuu

SEQ ID NO: 1123323 - RNA, 19 nt, Artificial Sequence
  Description of Artificial Sequence: Synthetic oligonucleotide
caagcgcccgacacaccug

SEQ ID NO: 1123324 - RNA, 19 nt, Artificial Sequence
  Description of Artificial Sequence: Synthetic oligonucleotide
auccagggauauaagcuuu

SEQ ID NO: 1123325 - RNA, 19 nt, Artificial Sequence
  Description of Artificial Sequence: Synthetic oligonucleotide
guguacccaguccuucgga

SEQ ID NO: 1123326 - RNA, 19 nt, Artificial Sequence
  Description of Artificial Sequence: Synthetic oligonucleotide
cgaaacgcuuccuccuugg

SEQ ID NO: 1123327 - RNA, 19 nt, Artificial Sequence
  Description of Artificial Sequence: Synthetic oligonucleotide
acguaccguccucuucuca

SEQ ID NO: 1123328 - RNA, 19 nt, Artificial Sequence
  Description of Artificial Sequence: Synthetic oligonucleotide
gucaccccacagcagugga

SEQ ID NO: 1123329 - RNA, 19 nt, Artificial Sequence
  Description of Artificial Sequence: Synthetic oligonucleotide
uacuugcgcaagcgcccga

SEQ ID NO: 1123330 - RNA, 19 nt, Artificial Sequence
  Description of Artificial Sequence: Synthetic oligonucleotide
ccugccauacaguggcaac

SEQ ID NO: 1123331 - RNA, 19 nt, Artificial Sequence
  Description of Artificial Sequence: Synthetic oligonucleotide
ccaucgagccguuagaggu

SEQ ID NO: 1123332 - RNA, 19 nt, Artificial Sequence
  Description of Artificial Sequence: Synthetic oligonucleotide
ucuggcccgugcuggucac

SEQ ID NO: 1123333 - RNA, 19 nt, Artificial Sequence
  Description of Artificial Sequence: Synthetic oligonucleotide
ucgagccguuagagguaag

SEQ ID NO: 1123334 - RNA, 19 nt, Artificial Sequence
  Description of Artificial Sequence: Synthetic oligonucleotide
augaacuaaugaagauaaa

SEQ ID NO: 1123335 - RNA, 19 nt, Artificial Sequence
  Description of Artificial Sequence: Synthetic oligonucleotide
gucuggcccgugcugguca

SEQ ID NO: 1123336 - RNA, 19 nt, Artificial Sequence
  Description of Artificial Sequence: Synthetic oligonucleotide
cucucccaucgguccacag

SEQ ID NO: 1123337 - RNA, 19 nt, Artificial Sequence
  Description of Artificial Sequence: Synthetic oligonucleotide
cagaggauugccugccaua

SEQ ID NO: 1123338 - RNA, 19 nt, Artificial Sequence
  Description of Artificial Sequence: Synthetic oligonucleotide
augucaccccacagcagug

SEQ ID NO: 1123339 - RNA, 19 nt, Artificial Sequence
  Description of Artificial Sequence: Synthetic oligonucleotide
ggaucccggaguaaagaga

SEQ ID NO: 1123340 - RNA, 19 nt, Artificial Sequence
  Description of Artificial Sequence: Synthetic oligonucleotide
ccaucgguccacagagaag

SEQ ID NO: 1123341 - RNA, 19 nt, Artificial Sequence
  Description of Artificial Sequence: Synthetic oligonucleotide
cauagcgguaaauggcaau

SEQ ID NO: 1123342 - RNA, 19 nt, Artificial Sequence
  Description of Artificial Sequence: Synthetic oligonucleotide
ccgucuacuugcgcaagcg

SEQ ID NO: 1123343 - RNA, 19 nt, Artificial Sequence
  Description of Artificial Sequence: Synthetic oligonucleotide
caugaacgacagaaaugcu

SEQ ID NO: 1123344 - RNA, 19 nt, Artificial Sequence
  Description of Artificial Sequence: Synthetic oligonucleotide
ccugguccauauuauaaua

SEQ ID NO: 1123345 - RNA, 19 nt, Artificial Sequence
  Description of Artificial Sequence: Synthetic oligonucleotide
gagaagucggccacuccgu

SEQ ID NO: 1123346 - RNA, 19 nt, Artificial Sequence
  Description of Artificial Sequence: Synthetic oligonucleotide
cgaugcgcuauauagaagu

SEQ ID NO: 1123347 - RNA, 19 nt, Artificial Sequence
  Description of Artificial Sequence: Synthetic oligonucleotide
aucaguguacccaguccuu

SEQ ID NO: 1123348 - RNA, 19 nt, Artificial Sequence
  Description of Artificial Sequence: Synthetic oligonucleotide
gcgaaacgcuuccuccuug

SEQ ID NO: 1123349 - RNA, 19 nt, Artificial Sequence
  Description of Artificial Sequence: Synthetic oligonucleotide
caucgagccguuagaggua

SEQ ID NO: 1123350 - RNA, 19 nt, Artificial Sequence
  Description of Artificial Sequence: Synthetic oligonucleotide
gcaacagcgcaggaaguuc

SEQ ID NO: 1123351 - RNA, 19 nt, Artificial Sequence
  Description of Artificial Sequence: Synthetic oligonucleotide
auaagacauguggcagaau

SEQ ID NO: 1123352 - RNA, 19 nt, Artificial Sequence
  Description of Artificial Sequence: Synthetic oligonucleotide
ggggugaaugagucaucac

SEQ ID NO: 1123353 - RNA, 19 nt, Artificial Sequence
  Description of Artificial Sequence: Synthetic oligonucleotide
cuccgucuacuugcgcaag

SEQ ID NO: 1123354 - RNA, 19 nt, Artificial Sequence
  Description of Artificial Sequence: Synthetic oligonucleotide
acgaagcgaaacgcuuccu

SEQ ID NO: 1123355 - RNA, 19 nt, Artificial Sequence
  Description of Artificial Sequence: Synthetic oligonucleotide
cgagccguuagagguaagg

SEQ ID NO: 1123356 - RNA, 19 nt, Artificial Sequence
  Description of Artificial Sequence: Synthetic oligonucleotide
cucacgcaggucugucaca

SEQ ID NO: 1123357 - RNA, 19 nt, Artificial Sequence
  Description of Artificial Sequence: Synthetic oligonucleotide
gguccauauuauaauacuu

SEQ ID NO: 1123358 - RNA, 19 nt, Artificial Sequence
  Description of Artificial Sequence: Synthetic oligonucleotide
ccacgaugcgcuauauaga

SEQ ID NO: 1123359 - RNA, 19 nt, Artificial Sequence
  Description of Artificial Sequence: Synthetic oligonucleotide
gcaagcgcccgacacaccu

SEQ ID NO: 1123360 - RNA, 19 nt, Artificial Sequence
  Description of Artificial Sequence: Synthetic oligonucleotide
cgaagcgaaacgcuuccuc

SEQ ID NO: 1123361 - RNA, 19 nt, Artificial Sequence
  Description of Artificial Sequence: Synthetic oligonucleotide
acgucuuaacgaagcgaaa

SEQ ID NO: 1123362 - RNA, 19 nt, Artificial Sequence
  Description of Artificial Sequence: Synthetic oligonucleotide
ugggugcauaaggauucuu

SEQ ID NO: 1123363 - RNA, 19 nt, Artificial Sequence
  Description of Artificial Sequence: Synthetic oligonucleotide
cacgcccauccugaagcac

SEQ ID NO: 1123364 - RNA, 19 nt, Artificial Sequence
  Description of Artificial Sequence: Synthetic oligonucleotide
gcgcuauauagaaguaguc

SEQ ID NO: 1123365 - RNA, 19 nt, Artificial Sequence
  Description of Artificial Sequence: Synthetic oligonucleotide
ugucuggcccgugcugguc

SEQ ID NO: 1123366 - RNA, 19 nt, Artificial Sequence
  Description of Artificial Sequence: Synthetic oligonucleotide
ggcaccuuuacaucaccau

SEQ ID NO: 1123367 - RNA, 19 nt, Artificial Sequence
  Description of Artificial Sequence: Synthetic oligonucleotide
cuugcgcaagcgcccgaca

SEQ ID NO: 1123368 - RNA, 19 nt, Artificial Sequence
  Description of Artificial Sequence: Synthetic oligonucleotide
cucgggccucuuccgcagc

SEQ ID NO: 1123369 - RNA, 19 nt, Artificial Sequence
  Description of Artificial Sequence: Synthetic oligonucleotide
cgucuacuugcgcaagcgc

SEQ ID NO: 1123370 - RNA, 19 nt, Artificial Sequence
  Description of Artificial Sequence: Synthetic oligonucleotide
gcgcccgacacaccugggc

SEQ ID NO: 1123371 - RNA, 19 nt, Artificial Sequence
  Description of Artificial Sequence: Synthetic oligonucleotide
ggcgaugcccagaguggag

SEQ ID NO: 1123372 - RNA, 19 nt, Artificial Sequence
  Description of Artificial Sequence: Synthetic oligonucleotide
ccaccaguguguguuacca

SEQ ID NO: 1123373 - RNA, 19 nt, Artificial Sequence
  Description of Artificial Sequence: Synthetic oligonucleotide
cgcccgacacaccugggcc

SEQ ID NO: 1123374 - RNA, 19 nt, Artificial Sequence
  Description of Artificial Sequence: Synthetic oligonucleotide
gcgcaguacuuccagaauu

SEQ ID NO: 1123375 - RNA, 19 nt, Artificial Sequence
  Description of Artificial Sequence: Synthetic oligonucleotide
caacauaucccaggauaau

SEQ ID NO: 1123376 - RNA, 19 nt, Artificial Sequence
  Description of Artificial Sequence: Synthetic oligonucleotide
uccccacgaugcgcuauau

SEQ ID NO: 1123377 - RNA, 19 nt, Artificial Sequence
  Description of Artificial Sequence: Synthetic oligonucleotide
ccuuuagagugcgaugaaa

SEQ ID NO: 1123378 - RNA, 19 nt, Artificial Sequence
  Description of Artificial Sequence: Synthetic oligonucleotide
agcgcccgacacaccuggg

SEQ ID NO: 1123379 - RNA, 19 nt, Artificial Sequence
  Description of Artificial Sequence: Synthetic oligonucleotide
ggcccgugcuggucacagg

SEQ ID NO: 1123380 - RNA, 19 nt, Artificial Sequence
  Description of Artificial Sequence: Synthetic oligonucleotide
guggcagaaucuguagauu

SEQ ID NO: 1123381 - RNA, 19 nt, Artificial Sequence
  Description of Artificial Sequence: Synthetic oligonucleotide
gcuuacacccauagcggua

SEQ ID NO: 1123382 - RNA, 19 nt, Artificial Sequence
  Description of Artificial Sequence: Synthetic oligonucleotide
ccauagcgguaaauggcaa

SEQ ID NO: 1123383 - RNA, 19 nt, Artificial Sequence
  Description of Artificial Sequence: Synthetic oligonucleotide
cuccccacgaugcgcuaua

SEQ ID NO: 1123384 - RNA, 19 nt, Artificial Sequence
  Description of Artificial Sequence: Synthetic oligonucleotide
ccggaguaaagagaccaaa

SEQ ID NO: 1123385 - RNA, 19 nt, Artificial Sequence
  Description of Artificial Sequence: Synthetic oligonucleotide
gugggugcauaaggauucu

SEQ ID NO: 1123386 - RNA, 19 nt, Artificial Sequence
  Description of Artificial Sequence: Synthetic oligonucleotide
ccacuccgucuacuugcgc

SEQ ID NO: 1123387 - RNA, 19 nt, Artificial Sequence
  Description of Artificial Sequence: Synthetic oligonucleotide
cucuacguaccguccucuu

SEQ ID NO: 1123388 - RNA, 19 nt, Artificial Sequence
  Description of Artificial Sequence: Synthetic oligonucleotide
cccggaguaaagagaccaa

SEQ ID NO: 1123389 - RNA, 19 nt, Artificial Sequence
  Description of Artificial Sequence: Synthetic oligonucleotide
cggucauauaagagauuaa

SEQ ID NO: 1123390 - RNA, 19 nt, Artificial Sequence
  Description of Artificial Sequence: Synthetic oligonucleotide
ggguagaugucuggcccgu

SEQ ID NO: 1123391 - RNA, 19 nt, Artificial Sequence
  Description of Artificial Sequence: Synthetic oligonucleotide
gucggccacuccgucuacu

SEQ ID NO: 1123392 - RNA, 19 nt, Artificial Sequence
  Description of Artificial Sequence: Synthetic oligonucleotide
guccuucggauggcgcagu

SEQ ID NO: 1123393 - RNA, 19 nt, Artificial Sequence
  Description of Artificial Sequence: Synthetic oligonucleotide
gccccuccgcuccccacga

SEQ ID NO: 1123394 - RNA, 19 nt, Artificial Sequence
  Description of Artificial Sequence: Synthetic oligonucleotide
cgcaagcgcccgacacacc

SEQ ID NO: 1123395 - RNA, 19 nt, Artificial Sequence
  Description of Artificial Sequence: Synthetic oligonucleotide
guguuaccaucagcuucuu

SEQ ID NO: 1123396 - RNA, 19 nt, Artificial Sequence
  Description of Artificial Sequence: Synthetic oligonucleotide
ccccacgaugcgcuauaua

SEQ ID NO: 1123397 - RNA, 19 nt, Artificial Sequence
  Description of Artificial Sequence: Synthetic oligonucleotide
gcuccccacgaugcgcuau

SEQ ID NO: 1123398 - RNA, 19 nt, Artificial Sequence
  Description of Artificial Sequence: Synthetic oligonucleotide
caccugccacagaggcgau

SEQ ID NO: 1123399 - RNA, 19 nt, Artificial Sequence
  Description of Artificial Sequence: Synthetic oligonucleotide
guacucccaucgagccguu

SEQ ID NO: 1123400 - RNA, 19 nt, Artificial Sequence
  Description of Artificial Sequence: Synthetic oligonucleotide
ccgccaggcccuggaacaa

SEQ ID NO: 1123401 - RNA, 19 nt, Artificial Sequence
  Description of Artificial Sequence: Synthetic oligonucleotide
cguuagagguaaggacauu

SEQ ID NO: 1123402 - RNA, 19 nt, Artificial Sequence
  Description of Artificial Sequence: Synthetic oligonucleotide
aaaaugaagacuuagguug

SEQ ID NO: 1123403 - RNA, 19 nt, Artificial Sequence
  Description of Artificial Sequence: Synthetic oligonucleotide
aagacugaaaccugagucc

SEQ ID NO: 1123404 - RNA, 19 nt, Artificial Sequence
  Description of Artificial Sequence: Synthetic oligonucleotide
auuugaacuacucacgccg

SEQ ID NO: 1123405 - RNA, 19 nt, Artificial Sequence
  Description of Artificial Sequence: Synthetic oligonucleotide
aaggaaccgacucaguacc

SEQ ID NO: 1123406 - RNA, 19 nt, Artificial Sequence
  Description of Artificial Sequence: Synthetic oligonucleotide
cauaaauuguucuuggagg

SEQ ID NO: 1123407 - RNA, 19 nt, Artificial Sequence
  Description of Artificial Sequence: Synthetic oligonucleotide
aaaggaaccgacucaguac

SEQ ID NO: 1123408 - RNA, 19 nt, Artificial Sequence
  Description of Artificial Sequence: Synthetic oligonucleotide
ucauaaauuguucuuggag

SEQ ID NO: 1123409 - RNA, 19 nt, Artificial Sequence
  Description of Artificial Sequence: Synthetic oligonucleotide
uuggccaucaucaagcgcc

SEQ ID NO: 1123410 - RNA, 19 nt, Artificial Sequence
  Description of Artificial Sequence: Synthetic oligonucleotide
aauuucgagggacuuuuac

SEQ ID NO: 1123411 - RNA, 19 nt, Artificial Sequence
  Description of Artificial Sequence: Synthetic oligonucleotide
uuuaaggcuguauauucgg

SEQ ID NO: 1123412 - RNA, 19 nt, Artificial Sequence
  Description of Artificial Sequence: Synthetic oligonucleotide
uuuuaaggcuguauauucg

SEQ ID NO: 1123413 - RNA, 19 nt, Artificial Sequence
  Description of Artificial Sequence: Synthetic oligonucleotide
gaagacuuagguuggauug

SEQ ID NO: 1123414 - RNA, 19 nt, Artificial Sequence
  Description of Artificial Sequence: Synthetic oligonucleotide
ucacuuaagacuuaagaaa

SEQ ID NO: 1123415 - RNA, 19 nt, Artificial Sequence
  Description of Artificial Sequence: Synthetic oligonucleotide
ugucucaggaugaaguccg

SEQ ID NO: 1123416 - RNA, 19 nt, Artificial Sequence
  Description of Artificial Sequence: Synthetic oligonucleotide
ucuagaaaauucacuacug

SEQ ID NO: 1123417 - RNA, 19 nt, Artificial Sequence
  Description of Artificial Sequence: Synthetic oligonucleotide
uauucuaagggccaccaca

SEQ ID NO: 1123418 - RNA, 19 nt, Artificial Sequence
  Description of Artificial Sequence: Synthetic oligonucleotide
uggacaagaaauuaguauc

SEQ ID NO: 1123419 - RNA, 19 nt, Artificial Sequence
  Description of Artificial Sequence: Synthetic oligonucleotide
ugaaucuagaaaauucacu

SEQ ID NO: 1123420 - RNA, 19 nt, Artificial Sequence
  Description of Artificial Sequence: Synthetic oligonucleotide
aauuagugguccugaacag

SEQ ID NO: 1123421 - RNA, 19 nt, Artificial Sequence
  Description of Artificial Sequence: Synthetic oligonucleotide
uuaguaucagaacaguguc

SEQ ID NO: 1123422 - RNA, 19 nt, Artificial Sequence
  Description of Artificial Sequence: Synthetic oligonucleotide
aauugcuguaacacugucc

SEQ ID NO: 1123423 - RNA, 19 nt, Artificial Sequence
  Description of Artificial Sequence: Synthetic oligonucleotide
ucuaagggccaccacacag

SEQ ID NO: 1123424 - RNA, 19 nt, Artificial Sequence
  Description of Artificial Sequence: Synthetic oligonucleotide
agaugaaucuagaaaauuc

SEQ ID NO: 1123425 - RNA, 19 nt, Artificial Sequence
  Description of Artificial Sequence: Synthetic oligonucleotide
gauaaagguggggagacgg

SEQ ID NO: 1123426 - RNA, 19 nt, Artificial Sequence
  Description of Artificial Sequence: Synthetic oligonucleotide
caaauggacaagaaauuag

SEQ ID NO: 1123427 - RNA, 19 nt, Artificial Sequence
  Description of Artificial Sequence: Synthetic oligonucleotide
caccccuugauaaaggugg

SEQ ID NO: 1123428 - RNA, 19 nt, Artificial Sequence
  Description of Artificial Sequence: Synthetic oligonucleotide
acaaauugccuuuauuuca

SEQ ID NO: 1123429 - RNA, 19 nt, Artificial Sequence
  Description of Artificial Sequence: Synthetic oligonucleotide
aucacuuaagacuuaagaa

SEQ ID NO: 1123430 - RNA, 19 nt, Artificial Sequence
  Description of Artificial Sequence: Synthetic oligonucleotide
acagucggaaauuucgagg

SEQ ID NO: 1123431 - RNA, 19 nt, Artificial Sequence
  Description of Artificial Sequence: Synthetic oligonucleotide
aacagucggaaauuucgag

SEQ ID NO: 1123432 - RNA, 19 nt, Artificial Sequence
  Description of Artificial Sequence: Synthetic oligonucleotide
aaagcgauuaugagaaaag

SEQ ID NO: 1123433 - RNA, 19 nt, Artificial Sequence
  Description of Artificial Sequence: Synthetic oligonucleotide
aagcgauuaugagaaaagg

SEQ ID NO: 1123434 - RNA, 19 nt, Artificial Sequence
  Description of Artificial Sequence: Synthetic oligonucleotide
aaaaggaaccgacucagua

SEQ ID NO: 1123435 - RNA, 19 nt, Artificial Sequence
  Description of Artificial Sequence: Synthetic oligonucleotide
gagggaauugagaaggagg

SEQ ID NO: 1123436 - RNA, 19 nt, Artificial Sequence
  Description of Artificial Sequence: Synthetic oligonucleotide
cagucggaaauuucgaggg

SEQ ID NO: 1123437 - RNA, 19 nt, Artificial Sequence
  Description of Artificial Sequence: Synthetic oligonucleotide
ucuacaagaugaaucuaga

SEQ ID NO: 1123438 - RNA, 19 nt, Artificial Sequence
  Description of Artificial Sequence: Synthetic oligonucleotide
gauugugugacaauguguc

SEQ ID NO: 1123439 - RNA, 19 nt, Artificial Sequence
  Description of Artificial Sequence: Synthetic oligonucleotide
aauuaguaucagaacagug

SEQ ID NO: 1123440 - RNA, 19 nt, Artificial Sequence
  Description of Artificial Sequence: Synthetic oligonucleotide
uucaguguguaaaagcaaa

SEQ ID NO: 1123441 - RNA, 19 nt, Artificial Sequence
  Description of Artificial Sequence: Synthetic oligonucleotide
uagguauuucaaauggaca

SEQ ID NO: 1123442 - RNA, 19 nt, Artificial Sequence
  Description of Artificial Sequence: Synthetic oligonucleotide
cuuagguuggauuggggag

SEQ ID NO: 1123443 - RNA, 19 nt, Artificial Sequence
  Description of Artificial Sequence: Synthetic oligonucleotide
gaugaaucuagaaaauuca

SEQ ID NO: 1123444 - RNA, 19 nt, Artificial Sequence
  Description of Artificial Sequence: Synthetic oligonucleotide
aagugauugugugacaaug

SEQ ID NO: 1123445 - RNA, 19 nt, Artificial Sequence
  Description of Artificial Sequence: Synthetic oligonucleotide
auuucaacaauuagugguc

SEQ ID NO: 1123446 - RNA, 19 nt, Artificial Sequence
  Description of Artificial Sequence: Synthetic oligonucleotide
uuagguuggauuggggagg

SEQ ID NO: 1123447 - RNA, 19 nt, Artificial Sequence
  Description of Artificial Sequence: Synthetic oligonucleotide
acucacgccgcucauauug

SEQ ID NO: 1123448 - RNA, 19 nt, Artificial Sequence
  Description of Artificial Sequence: Synthetic oligonucleotide
cuaagcuuuggccaagggc

SEQ ID NO: 1123449 - RNA, 19 nt, Artificial Sequence
  Description of Artificial Sequence: Synthetic oligonucleotide
ucgguuuucauaaauuguu

SEQ ID NO: 1123450 - RNA, 19 nt, Artificial Sequence
  Description of Artificial Sequence: Synthetic oligonucleotide
uguuccagcugucagguuc

SEQ ID NO: 1123451 - RNA, 19 nt, Artificial Sequence
  Description of Artificial Sequence: Synthetic oligonucleotide
aaauuaguaucagaacagu

SEQ ID NO: 1123452 - RNA, 19 nt, Artificial Sequence
  Description of Artificial Sequence: Synthetic oligonucleotide
ugggaauucugccacuuug

SEQ ID NO: 1123453 - RNA, 19 nt, Artificial Sequence
  Description of Artificial Sequence: Synthetic oligonucleotide
uuuacucccgagccugugg

SEQ ID NO: 1123454 - RNA, 19 nt, Artificial Sequence
  Description of Artificial Sequence: Synthetic oligonucleotide
caauuagugguccugaaca

SEQ ID NO: 1123455 - RNA, 19 nt, Artificial Sequence
  Description of Artificial Sequence: Synthetic oligonucleotide
aagacuuagguuggauugg

SEQ ID NO: 1123456 - RNA, 19 nt, Artificial Sequence
  Description of Artificial Sequence: Synthetic oligonucleotide
gacuuaagaaaucaggggu

SEQ ID NO: 1123457 - RNA, 19 nt, Artificial Sequence
  Description of Artificial Sequence: Synthetic oligonucleotide
uucaaauggacaagaaauu

SEQ ID NO: 1123458 - RNA, 19 nt, Artificial Sequence
  Description of Artificial Sequence: Synthetic oligonucleotide
ugaacagagguggggaacg

SEQ ID NO: 1123459 - RNA, 19 nt, Artificial Sequence
  Description of Artificial Sequence: Synthetic oligonucleotide
cauuucaacaauuaguggu

SEQ ID NO: 1123460 - RNA, 19 nt, Artificial Sequence
  Description of Artificial Sequence: Synthetic oligonucleotide
acuuagguuggauugggga

SEQ ID NO: 1123461 - RNA, 19 nt, Artificial Sequence
  Description of Artificial Sequence: Synthetic oligonucleotide
agcaaagcgauuaugagaa

SEQ ID NO: 1123462 - RNA, 19 nt, Artificial Sequence
  Description of Artificial Sequence: Synthetic oligonucleotide
aucagaacagugucucagg

SEQ ID NO: 1123463 - RNA, 19 nt, Artificial Sequence
  Description of Artificial Sequence: Synthetic oligonucleotide
uuugaacuacucacgccgc

SEQ ID NO: 1123464 - RNA, 19 nt, Artificial Sequence
  Description of Artificial Sequence: Synthetic oligonucleotide
ugugccgucgccuacuccu

SEQ ID NO: 1123465 - RNA, 19 nt, Artificial Sequence
  Description of Artificial Sequence: Synthetic oligonucleotide
ucaaauggacaagaaauua

SEQ ID NO: 1123466 - RNA, 19 nt, Artificial Sequence
  Description of Artificial Sequence: Synthetic oligonucleotide
gaggguuacaaucuaagcu

SEQ ID NO: 1123467 - RNA, 19 nt, Artificial Sequence
  Description of Artificial Sequence: Synthetic oligonucleotide
ccaacagucggaaauuucg

SEQ ID NO: 1123468 - RNA, 19 nt, Artificial Sequence
  Description of Artificial Sequence: Synthetic oligonucleotide
ucaacaauuagugguccug

SEQ ID NO: 1123469 - RNA, 19 nt, Artificial Sequence
  Description of Artificial Sequence: Synthetic oligonucleotide
uuucucuaggcgcagccac

SEQ ID NO: 1123470 - RNA, 19 nt, Artificial Sequence
  Description of Artificial Sequence: Synthetic oligonucleotide
gcggcaauggcuuggaugg

SEQ ID NO: 1123471 - RNA, 19 nt, Artificial Sequence
  Description of Artificial Sequence: Synthetic oligonucleotide
uucaccucgagaccugagc

SEQ ID NO: 1123472 - RNA, 19 nt, Artificial Sequence
  Description of Artificial Sequence: Synthetic oligonucleotide
acggaguccuguccaaacc

SEQ ID NO: 1123473 - RNA, 19 nt, Artificial Sequence
  Description of Artificial Sequence: Synthetic oligonucleotide
uccuguccaaaccacuuca

SEQ ID NO: 1123474 - RNA, 19 nt, Artificial Sequence
  Description of Artificial Sequence: Synthetic oligonucleotide
cuuccaaccucaucucacg

SEQ ID NO: 1123475 - RNA, 19 nt, Artificial Sequence
  Description of Artificial Sequence: Synthetic oligonucleotide
caucaagcgccgaagcucc

SEQ ID NO: 1123476 - RNA, 19 nt, Artificial Sequence
  Description of Artificial Sequence: Synthetic oligonucleotide
ugagcguguggccaagagc

SEQ ID NO: 1123477 - RNA, 19 nt, Artificial Sequence
  Description of Artificial Sequence: Synthetic oligonucleotide
gugauugugugacaaugug

SEQ ID NO: 1123478 - RNA, 19 nt, Artificial Sequence
  Description of Artificial Sequence: Synthetic oligonucleotide
aauuucagagggaggggag

SEQ ID NO: 1123479 - RNA, 19 nt, Artificial Sequence
  Description of Artificial Sequence: Synthetic oligonucleotide
ugugugacaaugugucugu

SEQ ID NO: 1123480 - RNA, 19 nt, Artificial Sequence
  Description of Artificial Sequence: Synthetic oligonucleotide
uuucagagggaggggaggg

SEQ ID NO: 1123481 - RNA, 19 nt, Artificial Sequence
  Description of Artificial Sequence: Synthetic oligonucleotide
uuucaacaauuaguggucc

SEQ ID NO: 1123482 - RNA, 19 nt, Artificial Sequence
  Description of Artificial Sequence: Synthetic oligonucleotide
uuaaggcuguauauucggu

SEQ ID NO: 1123483 - RNA, 19 nt, Artificial Sequence
  Description of Artificial Sequence: Synthetic oligonucleotide
uugauaaagguggggagac

SEQ ID NO: 1123484 - RNA, 19 nt, Artificial Sequence
  Description of Artificial Sequence: Synthetic oligonucleotide
ucuagaccccagcuaacug

SEQ ID NO: 1123485 - RNA, 19 nt, Artificial Sequence
  Description of Artificial Sequence: Synthetic oligonucleotide
uaacacuguccuucuggcg

SEQ ID NO: 1123486 - RNA, 19 nt, Artificial Sequence
  Description of Artificial Sequence: Synthetic oligonucleotide
uaaauuguucuuggaggcc

SEQ ID NO: 1123487 - RNA, 19 nt, Artificial Sequence
  Description of Artificial Sequence: Synthetic oligonucleotide
uucgagggacuuuuacucc

SEQ ID NO: 1123488 - RNA, 19 nt, Artificial Sequence
  Description of Artificial Sequence: Synthetic oligonucleotide
ucgagggacuuuuacuccc

SEQ ID NO: 1123489 - RNA, 19 nt, Artificial Sequence
  Description of Artificial Sequence: Synthetic oligonucleotide
agugcaucggcugauggug

SEQ ID NO: 1123490 - RNA, 19 nt, Artificial Sequence
  Description of Artificial Sequence: Synthetic oligonucleotide
caucucacgacucuggcca

SEQ ID NO: 1123491 - RNA, 19 nt, Artificial Sequence
  Description of Artificial Sequence: Synthetic oligonucleotide
uuacacucgacagauguua

SEQ ID NO: 1123492 - RNA, 19 nt, Artificial Sequence
  Description of Artificial Sequence: Synthetic oligonucleotide
ugaagacuuagguuggauu

SEQ ID NO: 1123493 - RNA, 19 nt, Artificial Sequence
  Description of Artificial Sequence: Synthetic oligonucleotide
gauggggcaucacuuaaga

SEQ ID NO: 1123494 - RNA, 19 nt, Artificial Sequence
  Description of Artificial Sequence: Synthetic oligonucleotide
uauuuaggcccacauucua

SEQ ID NO: 1123495 - RNA, 19 nt, Artificial Sequence
  Description of Artificial Sequence: Synthetic oligonucleotide
ucccuguccaucucguaag

SEQ ID NO: 1123496 - RNA, 19 nt, Artificial Sequence
  Description of Artificial Sequence: Synthetic oligonucleotide
uguucacaguugcauuagc

SEQ ID NO: 1123497 - RNA, 19 nt, Artificial Sequence
  Description of Artificial Sequence: Synthetic oligonucleotide
cacggccaauuucagaggg

SEQ ID NO: 1123498 - RNA, 19 nt, Artificial Sequence
  Description of Artificial Sequence: Synthetic oligonucleotide
guugcauuagcugugccca

SEQ ID NO: 1123499 - RNA, 19 nt, Artificial Sequence
  Description of Artificial Sequence: Synthetic oligonucleotide
ucaucaagcgccgaagcuc

SEQ ID NO: 1123500 - RNA, 19 nt, Artificial Sequence
  Description of Artificial Sequence: Synthetic oligonucleotide
ucggaaauuucgagggacu

SEQ ID NO: 1123501 - RNA, 19 nt, Artificial Sequence
  Description of Artificial Sequence: Synthetic oligonucleotide
ucgagaccugagcucaaag

SEQ ID NO: 1123502 - RNA, 19 nt, Artificial Sequence
  Description of Artificial Sequence: Synthetic oligonucleotide
aucuauucuaagggccacc

SEQ ID NO: 1123503 - RNA, 19 nt, Artificial Sequence
  Description of Artificial Sequence: Synthetic oligonucleotide
auggggcaucacuuaagac

SEQ ID NO: 1123504 - RNA, 19 nt, Artificial Sequence
  Description of Artificial Sequence: Synthetic oligonucleotide
uggcaagugagcguguggc

SEQ ID NO: 1123505 - RNA, 19 nt, Artificial Sequence
  Description of Artificial Sequence: Synthetic oligonucleotide
agcgauuaugagaaaagga

SEQ ID NO: 1123506 - RNA, 19 nt, Artificial Sequence
  Description of Artificial Sequence: Synthetic oligonucleotide
uaauugcuguaacacuguc

SEQ ID NO: 1123507 - RNA, 19 nt, Artificial Sequence
  Description of Artificial Sequence: Synthetic oligonucleotide
uuagcugugcccaccgcuc

SEQ ID NO: 1123508 - RNA, 19 nt, Artificial Sequence
  Description of Artificial Sequence: Synthetic oligonucleotide
aucaucaagcgccgaagcu

SEQ ID NO: 1123509 - RNA, 19 nt, Artificial Sequence
  Description of Artificial Sequence: Synthetic oligonucleotide
uuuaggcccacauucuauu

SEQ ID NO: 1123510 - RNA, 19 nt, Artificial Sequence
  Description of Artificial Sequence: Synthetic oligonucleotide
uucaacaauuagugguccu

SEQ ID NO: 1123511 - RNA, 19 nt, Artificial Sequence
  Description of Artificial Sequence: Synthetic oligonucleotide
caucaucaagcgccgaagc

SEQ ID NO: 1123512 - RNA, 19 nt, Artificial Sequence
  Description of Artificial Sequence: Synthetic oligonucleotide
cacggcugcuaccugaagc

SEQ ID NO: 1123513 - RNA, 19 nt, Artificial Sequence
  Description of Artificial Sequence: Synthetic oligonucleotide
ugggcaacgagggaauuga

SEQ ID NO: 1123514 - RNA, 19 nt, Artificial Sequence
  Description of Artificial Sequence: Synthetic oligonucleotide
gggacuuuuacucccgagc

SEQ ID NO: 1123515 - RNA, 19 nt, Artificial Sequence
  Description of Artificial Sequence: Synthetic oligonucleotide
agacuuagguuggauuggg

SEQ ID NO: 1123516 - RNA, 19 nt, Artificial Sequence
  Description of Artificial Sequence: Synthetic oligonucleotide
ucccuugacugacugcucu

SEQ ID NO: 1123517 - RNA, 19 nt, Artificial Sequence
  Description of Artificial Sequence: Synthetic oligonucleotide
aucucguaagugucauguc

SEQ ID NO: 1123518 - RNA, 19 nt, Artificial Sequence
  Description of Artificial Sequence: Synthetic oligonucleotide
gguauuucaaauggacaag

SEQ ID NO: 1123519 - RNA, 19 nt, Artificial Sequence
  Description of Artificial Sequence: Synthetic oligonucleotide
uggccuuucucuaggcgca

SEQ ID NO: 1123520 - RNA, 19 nt, Artificial Sequence
  Description of Artificial Sequence: Synthetic oligonucleotide
uccaaccucaucucacgac

SEQ ID NO: 1123521 - RNA, 19 nt, Artificial Sequence
  Description of Artificial Sequence: Synthetic oligonucleotide
uccaacagucggaaauuuc

SEQ ID NO: 1123522 - RNA, 19 nt, Artificial Sequence
  Description of Artificial Sequence: Synthetic oligonucleotide
ugauaaagguggggagacg

SEQ ID NO: 1123523 - RNA, 19 nt, Artificial Sequence
  Description of Artificial Sequence: Synthetic oligonucleotide
ggauccaccacuccauuug

SEQ ID NO: 1123524 - RNA, 19 nt, Artificial Sequence
  Description of Artificial Sequence: Synthetic oligonucleotide
gaaccgacucaguacccug

SEQ ID NO: 1123525 - RNA, 19 nt, Artificial Sequence
  Description of Artificial Sequence: Synthetic oligonucleotide
uauauucgguuuucauaaa

SEQ ID NO: 1123526 - RNA, 19 nt, Artificial Sequence
  Description of Artificial Sequence: Synthetic oligonucleotide
cccaucuauucuaagggcc

SEQ ID NO: 1123527 - RNA, 19 nt, Artificial Sequence
  Description of Artificial Sequence: Synthetic oligonucleotide
uuccaaccucaucucacga

SEQ ID NO: 1123528 - RNA, 19 nt, Artificial Sequence
  Description of Artificial Sequence: Synthetic oligonucleotide
cucaucucacgacucuggc

SEQ ID NO: 1123529 - RNA, 19 nt, Artificial Sequence
  Description of Artificial Sequence: Synthetic oligonucleotide
agcgguuacacucgacaga

SEQ ID NO: 1123530 - RNA, 19 nt, Artificial Sequence
  Description of Artificial Sequence: Synthetic oligonucleotide
cacuuaagacuuaagaaau

SEQ ID NO: 1123531 - RNA, 19 nt, Artificial Sequence
  Description of Artificial Sequence: Synthetic oligonucleotide
gaacuacucacgccgcuca

SEQ ID NO: 1123532 - RNA, 19 nt, Artificial Sequence
  Description of Artificial Sequence: Synthetic oligonucleotide
agggccgaggacccggaac

SEQ ID NO: 1123533 - RNA, 19 nt, Artificial Sequence
  Description of Artificial Sequence: Synthetic oligonucleotide
uccucgucguccucuagac

SEQ ID NO: 1123534 - RNA, 19 nt, Artificial Sequence
  Description of Artificial Sequence: Synthetic oligonucleotide
uggauggggcaucacuuaa

SEQ ID NO: 1123535 - RNA, 19 nt, Artificial Sequence
  Description of Artificial Sequence: Synthetic oligonucleotide
agugauugugugacaaugu

SEQ ID NO: 1123536 - RNA, 19 nt, Artificial Sequence
  Description of Artificial Sequence: Synthetic oligonucleotide
agcuaacugugccgucgcc

SEQ ID NO: 1123537 - RNA, 19 nt, Artificial Sequence
  Description of Artificial Sequence: Synthetic oligonucleotide
ugcgcugaggacucuccgc

SEQ ID NO: 1123538 - RNA, 19 nt, Artificial Sequence
  Description of Artificial Sequence: Synthetic oligonucleotide
cacuccauuugaacuacuc

SEQ ID NO: 1123539 - RNA, 19 nt, Artificial Sequence
  Description of Artificial Sequence: Synthetic oligonucleotide
agggacuuuuacucccgag

SEQ ID NO: 1123540 - RNA, 19 nt, Artificial Sequence
  Description of Artificial Sequence: Synthetic oligonucleotide
aaguucaacuaagcagcca

SEQ ID NO: 1123541 - RNA, 19 nt, Artificial Sequence
  Description of Artificial Sequence: Synthetic oligonucleotide
cugauggguggacacggag

SEQ ID NO: 1123542 - RNA, 19 nt, Artificial Sequence
  Description of Artificial Sequence: Synthetic oligonucleotide
gacgggaagcccugaaauc

SEQ ID NO: 1123543 - RNA, 19 nt, Artificial Sequence
  Description of Artificial Sequence: Synthetic oligonucleotide
ggaggcccaauuaucaucc

SEQ ID NO: 1123544 - RNA, 19 nt, Artificial Sequence
  Description of Artificial Sequence: Synthetic oligonucleotide
gucggaaauuucgagggac

SEQ ID NO: 1123545 - RNA, 19 nt, Artificial Sequence
  Description of Artificial Sequence: Synthetic oligonucleotide
gcgauuaugagaaaaggaa

SEQ ID NO: 1123546 - RNA, 19 nt, Artificial Sequence
  Description of Artificial Sequence: Synthetic oligonucleotide
gugucucaggaugaagucc

SEQ ID NO: 1123547 - RNA, 19 nt, Artificial Sequence
  Description of Artificial Sequence: Synthetic oligonucleotide
ugcauuagcugugcccacc

SEQ ID NO: 1123548 - RNA, 19 nt, Artificial Sequence
  Description of Artificial Sequence: Synthetic oligonucleotide
cuacaagaugaaucuagaa

SEQ ID NO: 1123549 - RNA, 19 nt, Artificial Sequence
  Description of Artificial Sequence: Synthetic oligonucleotide
augagaaaaggaaccgacu

SEQ ID NO: 1123550 - RNA, 19 nt, Artificial Sequence
  Description of Artificial Sequence: Synthetic oligonucleotide
ucguccucuagaccccagc

SEQ ID NO: 1123551 - RNA, 19 nt, Artificial Sequence
  Description of Artificial Sequence: Synthetic oligonucleotide
guuagggccucuguuccag

SEQ ID NO: 1123552 - RNA, 19 nt, Artificial Sequence
  Description of Artificial Sequence: Synthetic oligonucleotide
guggcaagugagcgugugg

SEQ ID NO: 1123553 - RNA, 19 nt, Artificial Sequence
  Description of Artificial Sequence: Synthetic oligonucleotide
caaagcgauuaugagaaaa

SEQ ID NO: 1123554 - RNA, 19 nt, Artificial Sequence
  Description of Artificial Sequence: Synthetic oligonucleotide
ggacaagaaauuaguauca

SEQ ID NO: 1123555 - RNA, 19 nt, Artificial Sequence
  Description of Artificial Sequence: Synthetic oligonucleotide
acgccgcucauauugacuu
